United States Patent Application Publication US 2014/0057251 A1 - sequence listing, part 83

SEQ ID NO: 135424 - DNA, 2039 bp, Cannabis sativa
  modified_base (1857)..(1860): a, c, t, g, unknown or other
tgataaaacttgtctcaagggctgctcggttaacacttttatggggtgtgcctggaagtacggccgtagcttgcgagacgcgtggactaggcacaaagtgagcttttctagagggtgatatctagactctgcccctagtaaccttttgcttacgtagtaaataggttgatggtgcttaccctcttctcgcactatagccgcactaatcacattttccgagatagccagataaaggagtaaggtttttctagttattggtttcgccaacagtggaggcatcgctaggtgctttttttatattctgaaaggcctctttgcactcttctgtctactcaaatttcttgttgcctcgcaatacattgaagaatggcaaacacttatcagttgactttgaaattaatctgttgagtgcagccatccttcccgtcaaggcttgtacttccttaggctttgttggtgatggcatgtctatcaatgccttgattttttggggttttctttgatacccctcgcgttgactatgaatcccaaaaattttcctgaggaaactccaaaggaacattttttttgggtttagcttcatgttatacttctttaatattttgaagcatttcgcgaggtttgtggtatgattcccactttttatcgattttactaacatattatcgacgtaaacctccatgttccgcccgatctggtttgtaaacatctcgttcactaattgctgatatgttgccccaacgttcttcagtccaaacgacattactttatagcagtagagtcccatgttggctacgaagctcatatgttcctgatctgggacatgcatttttatctggttatatccagaatatgcatccataaatgacataagctcatgcccaacagttgcatccactaactgatcgatcctgggtagtggaaaccagtcttttgggcatgccttattcagatcagaaaaatcaatacaagttctccaagtttcgtaggctttgggacgagaacagattggctatccacgagggataaaacacctcgcatataaagtcattgactaataacttgtccacttcctgttttagtgccccttgcctcttggaatccaatggtctccttttctgcctcttcgctgggtagtttggatcgatatttaaatgatgacagataatattagggtcaatccttatcatatctcgatggctccaggaaaattgatcctggttcgcccttaagaaacttattaggtgctattttagttgctcgtctaggttcttcgcaatgtagacacactttgtgagatttcctggatcgagaataacttcttctaattcttcaattggttttaataagttcctttcatcttgaacccgggggtcaagatcctcgtccttcttttcacttttttctgccaagatcgccattaactgatgaccgccattaacaaaagagatatatcaataaagtattaaaaaattttggcatgaaagatactataccagatgaaaggcttgtagctaaagaaaataagttatctaaaatttagtattcttgacagtttataacagtaattacaggaataggcaacaattttaattggaattcgtaaaatttattgggcccttataggcgacggtttaaaattgtcccctatagtataggtgacaagagcccaataaaaaatcgttacctacttctcaccacattttccacgtgcctacctacttcttttctatttcccacatgcccacccattttttctccatttcccactctctaaaacaaaaatcttaccaatacaaaaccccacccacgcatctgcactatcgccctcctctctcaccgtcttcctccctctcnnnntctccctttcttctcgtctctctcatccatcaatctccacccacccatcctccgtcggtctccatctcctctctgtcgcatacgttgaactaccaccacctcctgtcgatgtccctctcatcttcgtctcatacgtcggaccaccaccacctcccgtcagtctctctctctctctctct

SEQ ID NO: 135425 - DNA, 900 bp, Cannabis sativa
ataacacttttagaaactttgggtactttacccgctaaaaacaaacattgagtttatgccggttacaaatctaaaatattgggtacttatgccgctatttacccttaaatataacactaaattttataattgttatcccattttttgctctatgacgtggcagcatgtatgagtgacacatgtttgtcattccttgcacttggacagagagatataccgaacagacttcgagcaacatatctgcacgcacaaagtctatttgaccgagtagagtagaaggtagataatccgagcaaagagtgaagctggttctccgagccatgtgttataagacttaactacttcaaagttgatttcgtgaagcccaagcacaaagggaatccctacaatcatgggattgtataagaaggatacggcaggctgtcccaatcccccatttcatgtattctaattatgtaatgcatgatcttactaattatagatattgtaagcaaaaggaaaaccatccctcatgcatttagccctataaatagtgacctagcttcactataaaagggatcgaaagaattgcttcagagagaaatataagagaaaatactgagagatttcattgtgagatctttgagagaggaaacattgtgttctttgttctcaagttaatacaatctaagaggagtaagctattaccgaactaaaggggccgaacctctttaaaacttggtgttctttattgcttattgatttttgctctgttttattatatttctaatcgcttattaattgactcactgtcattggctaaaaacgaggctaacattttggtgcttttattgagagcaaaaatccaagtttgttctttgtcttaagtttcaacagacacacagaatggtggtgcaaact

SEQ ID NO: 135426 - DNA, 504 bp, Cannabis sativa
  modified_base (413)..(427): a, c, t, g, unknown or other
aatgtgtgtaacaaattattgtatcaaacttttaccttgatcaagttgtatgatcaagcttcttttgctgaattattgtaatttttctaagcctctctaatctctaaataatttttcagtttgatactttgtgattgtatttaattatttgtctcatcgggccttattttgggcgctgaatagtttgcaaatgaagttttatgcaatacaacagatgtgatttcattaaaaaaaatatatacatataataatctagtacaaatatataatattgtaaaagaaaaatattgatatgcgtatctttcgtcggtgtatgaaatagttgttataaattattttttatatatgtttgtgttcacaacgtggtaatcacttgttaattaaatactttagggttcgtttggaacgccgtnnnnnnnnnnnnnnnattgtattgtattgtattgaattgtattttatacaatatttttatgtaaaactatatgtggtattaacttttatgga

SEQ ID NO: 135427 - DNA, 913 bp, Cannabis sativa
tccaacaattacaccacctttacaacttgtatcactatcatcactcatctttctttaattggacttatttcttgcgaccttggtttcttctgatcctccaggcactactggtagtcaggtccggccctaaagaaaaaggggcccaagccgatataaaattttgggcccttaataaatatataaatatatttaaataaaaaaattaatctaagaaaattatacactacatatcataacataaataaaataaaataaatatagataaatctaaaataaattataaatattacaaaaattaaggaatttatattttttaattagttgtatcatttatgttaaaaaaaatttatcttgccaaaatttcaataaatcaaattcttaaaaagaaaaaacaatcaagtcaaaatttacctgtaactaataatttctaacaactatattaaattatagtccataattataataagatatataaaaaaaaataaattaaaatcaaatcaaataatattcaagaaaaaaattatttattattattattgaaattaaatattatatcttgattaataatttttttcccacaagaaagaaagaaaataataaaaaaaaaatagtcgagtcttttcttagtagccaaaaggagataaacttgatcaaatgttagacttttctttaaataatatttgtgcatttatttttctttgactttggttattaagtgtatagtgagggcttgtagttgtttcttaaacaattttattcacaaaaaaaaataatactaggaaaagaggtttaataggagtcaaaaacacgtcttcaactaataaaatcttatctttctttaggctgccactgtgctaggccaattttgggtatattaattgttaattttaattaaatataacatttaaataat

SEQ ID NO: 135428 - DNA, 714 bp, Cannabis sativa
  modified_base (332)..(340): a, c, t, g, unknown or other
tgctgacaatgttggaggtaaagctacacagtaagacacttgtccaaccttttcgagaatcttgaaaaggccctgtatatctagggcataacttgcctcttttcacaaaactgttgatccccttcattggagacacccgtagaaacacatgatcccctacttgaaactctacatatctgcgtttcgggtctgcataactcttttgcctactctgagaggcaagcattctggctttaatcttctctattgcttcattggtccgttgcactgattttggacccaaatatttcttctctcctgtttcatcccagtgaatgggagatctacacctnnnnnnnnntaataattcatagggagccatccccattatactctgataactgttattgtatgaaaactcgatcagcgatagatacttactccaggagccctcgaaatccataacacaggcacgtaacataccttctagtatctgaattatcgtttcggactatccatcagtctgaggatggaaagctgtactgaatttcaatttggtacccatagctcgctgaagactctactagaatttagaggtaaactacggatctctatctaaaattatagacttgggaacaccaagcaatctcactactgtatgaaaactactgtaaaggttgtttttactggtaaaaaatgtgcagacgtcatgaatcgatccaccacaacccaaat

SEQ ID NO: 135429 - DNA, 1340 bp, Cannabis sativa
ttccgaagaaccttatcctttctgtcaaggatcggtactggttgtttttcataagacatatctggttgcagctcaagattctcataactaagtacatgagcaaggtctgaattgtatttcctcagcataaacacatgaaatacgttgtgaactgccgcaagagctggaggcaaagctaaacgatacgccacttgcccaaccttctcaagaatctcgaaaggtcctataaatctagggcataacttgcctcttttcccaaaacgtttgatccccttcattggagatactcctaaaaacaagtgatcccctacttggaattcaacatctctgcgttttggatctgcatagctcttttgtctactctgagaggcaatcattatagctttaattttctctattgcctcattggtccgttgtactgattctggaccttggtatttcttctcccttctctcatcccagtgaatgggagatctacactttcttccatataacagttcatagggagccatccctatagtactctaataattgttgttatatgagaactctattaacggtagatacctactacaagagccttcaaaatccataacaaaggctcgtaacatctcttctaatatctgaatcgtcctttcggactgtccatctgtctgaggatggaatgttgtactaaacttcagtttcctacccatagcccgctgcaaactctgcaaaaacttggaggtaaactttggatctctatccgaaactatggactttggcacaccatgtagccttactattcctttgacatacaattctgctaattgatccactgaatatgttgtttaactggtaggaagtgagcagacttcatgaatcgatctaccacaacccaaatagaatcaaatagactcgtggttctaggtgacccaaccacaaagtccatcgatatgtcctcccacttccactcagataaggttaaaggttgtaacaaccctgccggtctctgatgttcggccttgatctgctgacaggttaagcatcttgatacgaattctaccacattctttttcattccgctccaccagaagtaagatttaagatcctgatacatcttggtagtgccgggatgtagggaatatggagtggtatgagcctcctcgagaatttcatttctaagttccacactatatggaagacaaaccctggctttaaacaacaacatccaactgcctgatactgtaaaatctctggcttgaccagctgaaacctcttctctgatctttactaactctagatcagtcatctgagcgactttaattcattctagtagatcggattgcagcgttaagttg

SEQ ID NO: 135430 - DNA, 975 bp, Cannabis sativa
  modified_base (294)..(303): a, c, t, g, unknown or other
gaacgttcatcattccgatgttgacggattcgttgttaagacccccgtttgcttggtttccagccattatgattctctctctaaattagcaagaaatcacttctcgttcccacagatggcgccaaatgttgttgaaggaatttcacagcaccaaaaataaataataacaataataatatgattaacaagtgcgagtattcgacctagaatggcgagtacccagactgggaacacaaattcttaatgaaaactagaaatacaaagaacacaagggaatatagtggttcagtcagnnnnnnnnnngcttagtccactgttgcaaagattatgtaggtgtcctatttcacggtggatcactcctttatatacaaagcaagtgtccgatcatttacacaaggattgcattcattgtcaatctatttgtacattgatttacaacaattaagctaaaaaacgtaaacattaataaatgaagaacagtttctattcactagatacagcaacgtatgcgacttctaatgtgcgagttggctgttcatattcttgtgtaagctcacggactccgagtacacctaacacttagttaagtctaagatgtctgcgttcttgtatagttgcacttacggacatcgtataacatgctgatagaacagagacatgcgagtctatattggcttatcgaggttgttggataaatcaggaccaccttgctttatagagaatcgatctctatgttttcgcaggaggatggttaggatactggcatatatcgtggtatatgcgagttgaatccgttccttggtcctacataatgcgagcctcgcaaatgcgattagacttggtcatgttcacataatctcgctgagtttagctcaggcgaggtttaaactcgaggagtctctcattgacatcttaactttccttgaggaaattgagtacatgtgtcctttaaagaggagtctggtctcgagtttc

SEQ ID NO: 135431 - DNA, 1684 bp, Cannabis sativa
  modified_base (1343)..(1348): a, c, t, g, unknown or other
ataaaagtgatggatgacaccaaagataataatccacaagaaggaatcaatcatcgtcctagaaaagaaccattgagtcctcaggatctatcgagtcatcgcatgactagaatgcaagccccaagaagacccagtatttgggcctctggtttgacagaccttggatgagtaacaatcggtcactccctaatcaggttgaagaggatggtgcttatggcccaaccagatatataccaaacgtggaattagaaaactgccatcttaggcatcgattggagggagtaaatcggcgtaatgccgagttagagcgagaaatagctgtagtaaaggcagcgcaggaagatgataccaaaaatctacctgaccttggaaaaagagattcacaaggaaaacctcacggctctcagaccaaggggcagaggataacccatagatatactcagaaccctcaggaaatgcaacttgagggaactaaggaaaacctagagatgcagcctgaaatacatggaacatcagacaaaaattgccaacccactattcaggctcatgagagtgaaacttgtgcaaacccttataggaagaaaatggtgagttaaaccttgagaggaagggcaaggtccgaccacaatcatgacaagagtgatctatgagaacatctgaacctgaagaagcgctacctccatcaacgactcggttcaaggcaaaaggattcatcccatttacgaatgagcgagttggagaataagttcagagggcattaggtcacgaaacctgggagacaaccgaggcacgatactgttggaaaacctgatttggaggtctcgtgatcaaagaaaaaagacgatcccaaaaggctgctccatgataagaagcccaacagatatattcctctttatgccgaatataccgagctcaatgaaacttgggaaaaaatctacatcgcacatatacaggaagccatttttagcgagccaagacctatgaaacatgcaaggtgcaaaaaggatccaaataagcggtgtgaatatcatggtgatattggccataccacggaagactgtcgttagttgaaagatgaaatagatagtctcaaatcacaaggacaccttcaacgatatataaaggggtaggaagatgcctatgatcagtttgatttttccaataactcgagcgactgaagattataaccctcttccgcgagaagaagggacactttggttatctcgagacggagcggttcacaagaatacaaagggcagttactccgataaagaaattgtgtacaagaattgtgacctgagtagatattggctcgctatggttgccataactggacgtcaacnnnnnncagtcgaagacagaactaaaaccaggattacttcacctggaacccaaggatatgccctggatattgaaataattggggaagtatgttagggattgaccctgaacatcaaaacccgttttatcaaaaccaggcgctcctggaggatttataaaataagtaattgaactggagaagttcttttgagattaatgattataaatcacattaatgatgaaatattttgaatttgagttgtgaataaaatatttatttctttcaaacaagtaattataaagtgtaaaccctttaaaattacttgaggggcatatatgtatgattaaccggaattgatttgga

SEQ ID NO: 135432 - DNA, 766 bp, Cannabis sativa
ggttttagttctgtcttcgactgctaatggttgacgtccagctttccacgcgacagcttgatatggcaaccatagtgagccaatatctattcaggtcgcaattattttacaaatttattttaccggagtaaccgccccttgtactcttgtgaatcgctcccttttgagataacagacgtatcctttcctcttacagataaggttataatatggatcgctagagttattaggcagatcgagcctctttatatatcattgaaagtgtccttgtgatatgaggccttctatctcatctttcagatggcgacattcttccgtggtatgaccaatatctccatgatattcacaccgtttaattggatcccttttacgcctcgcatgtttcataggttttggcttgttaaaaatgacttcctgtacgtgtgcgaggtacatatttccccgagtttcattgagctcggtatattcagcataaagggggatatactttttgggtttcttatccttgggcagccttttagaatcgtctttcctctttgatcctgaggcttccgaatcaagttctctaacggtttcatgccccagttgtcttctggttttcgtgacttgatgccttctgaatttattctccaacttgtttattcacgaatggagtgtatccttttgctttggaccgagtcgttgatgaaggtcaggcttcttcaagttcagatgctctcgtagatcactcctgttgtgactgcggtaggaccttgctcttcctctt

SEQ ID NO: 135433 - DNA, 696 bp, Cannabis sativa
  modified_base (27)..(28): a, c, t, g, unknown or other
aaaatagattacattgaaatggagttnnatttagagcataaaacccaacatggactcgacatgtggttggtgtttggatttgggactgagacacggttttgaacccaaaacacgaacctagagccagaccaggattctgacctaaacccacacctgaaccataaatcgtacccgatgaccaaaaattggagccggaactggaattggacccttaaactctaaatcctaaaccttaaaccctaaatcttaaactctttacacttaccccaaaaccctaagccctaaaccctataccataaatccctaaatactaaatccaaaaccctaacatagacacgggcctagacacatactgttatcccaattttgcactctgacgtggcatcacacgatggtgacacgtggaatatactctatatacctgctcacaagagatacaccgaatagggcacctcatatattcgctcggatgaagccctctcaacccggcagtgagcaatccacgtagcacgccaacacttaacaaattcaactttcgcatcgtgagtcatcaaagaaattcctataactttgggatcaaatcagagagatatggcaaggtatctgaatcccacgattagtgtattctgtatttactatgaaatctttccacttatatcaattgtaaccagaagggaaatacttccctcccaagct

SEQ ID NO: 135434 - DNA, 733 bp, Cannabis sativa
ttttatcaaagtttaaagaaaaaaaaaggaaatttttcaaaaaaccaccattttctctcaaactctctccctctttcggcctctctttgagcagcaaggagatggtattctccttggaattttaagctggttttaacaagatttttgtgttctcaagtgcttggtaagatccttgtagcttcattttagttttcttggtttttaagaaaagttgagtattgcatgcttgagaatttgtggctgtagttgttgctaggttttaattttattttttgtagcttaattaggtttcaatatgtggattcaagcaagtttttgttggtgtttagttgattttaaacaagtatgaagttttgagctaaatcttgattttaatggtgcattgttcaattagctgcctgtacttgtgggatttgtttagtgttgttttctgctgttattatatgcatattggagtagttttaatcatgttttaatgcatgtaggtgagctttggccaagttttagttttgaactcaaagcttggagctcacatggcatttttcatatctgtgatttctgggttgttatgatgctttggaaatgtttatgggggtatgtagagcaggtctggaagctttgaaagagtttgggtttgatttgagtgagaaacgtatttttgaagtttcctgctctgatctggaattccgtttcagcaaccggtctaccggttgggttccaggaattcccagaa

SEQ ID NO: 135435 - DNA, 972 bp, Cannabis sativa
  modified_base (754)..(755): a, c, t, g, unknown or other
  modified_base (935)..(946): a, c, t, g, unknown or other
gcagatgaattgcctggtgttctgcggtcttatcgcactactgcaaaaacctctactggtgagacccctttctcactcaccttcggaacagaagcaatcatcccagcagagacaggaattcccacttccaggtatgaacatttgaccgatgatcagaactggcaaagtatgaacctcaagctcgactcacttgatgaaaaaagagagaaagccttgatcagagccgcaacattccaacagaaggttgcttaacatttcaacaaaaacatccgagcacgaacattcaaggagggtgattgggtgctccgtcgagtgtttcaaaacaccaaagaggcaggagctggtaagttgagccccaactgggaaggcccctataagattactaaagtaataggacaaggggcatatcgactttaagcagaggatggtcgagaaataggcaacaactggaatgccactcatctaaaacaatatcatttctaactcaacctttactttttgtattatattttctaggggtgttcgcggtgcaggtggtgcaattttgactattttttcaaaccaacccgcacatgcggttttttaaatttcacaaaccgcacccgcactgcgaaactaaaaaactgcagaaaccgcaccgcaaaaaatagtgcgatgcggtgtggtttatgcagtttttgcggtttgactatcaccaaataattaaactatcaaaaatataataaaacttgagcaacacttgtcaaaaataccnnaagacttgaaaataaatataaaaaaaaagtttcaaattttaacaatacaataattagtgggcttgagttgggccttcatatattggacccaaataaatataaaaattagtatttttataatatgcggtgttgtgaggtttgaaccgcatattatcaatgctggaaattattttaccaggnnnnnnnnnnnntaccatgtatgtttcattaacatcct

SEQ ID NO: 135436 - DNA, 3475 bp, Cannabis sativa
  modified_base (32)..(34): a, c, t, g, unknown or other
  modified_base (3437)..(3449): a, c, t, g, unknown or other
ttcttcgaggctcatttgaatgctatcttctnnntcgccaggattgtaagcctcgctgacgctaacgggatgaagttatatgaagtcttccgataacgaagcggtcacctcgcttacttgttcttaagccgatctgacttttacacttagtctgttcattgtacgctaaggacttgcacgattgatacatgtcactttctttggtgcctcgctattcacatttagtgacatatggtttctcactaatatactaagtgccagttgtacattgactcctcgcctaagaccttacagtcagggggttacaaatatactttgatacttacataattaatgagttattccagaagaagcaattgcacaattcacattccctttatctcgacacgtgtcctccagccaaattttgggtacaataattaccccttaaaaagttattttttttagtaaaaagagctttttaataattacagaggtcatttttgttaatatttcttcttgaaaaaatgcatctgttgattctggcggttgtacggtttcgagggtcattatgaattgtcttcatattctgcccttctcccaaccgttggatttctcaatacttagctttcttgtcactggactttgtgtataaaagggcagctcaagcatgtcatttttcataaacctctggctctttagtgagatccattttcagaatggatcatctctttcttgctagaatgtcctctctgaattcagaagtccatcctcccaaactcaaaataccaagatgcaccaatcattatccatttgttcccaaatgcttcaagccttaattggagccagaaacgatggattccagggctgaggagcttccgaccaatccaaattaggggaaccccgaagcttgccatgggcgatcctcacttgtgatccttgagggcacagatcttgtgagcgatcttgaaggtcctcctctggctgataaagaatcccagaggaaagttgttgttgtttcaggtgaatctaggaaggaagttggcgttgtttctatcagagaatccaaccaacccaagaactaaacctgtgccagaaaacctttgcgccaacctccttctggtatcgaggaatttcctgaggttgggaaagagatctcggcttcaggaaatgggatcttctgatgatgaggagaatgaggtatgtgctgagatcaaggttctctacatgtagccagtctttcccaagctatgtgtagtcggtgtttgtccaagctacgtgtagatggtctttctcaggctatatgaagacggtctttctcgagtttatcagcttctcctctcatcctttgtttaggaagatgacttaatagtttgcccctagtggcatttttgtaaagacaagtttgtaacccgatttagggtttttcttatcttaaatgccttgtactattttcatttgaacttgatacaattgtgtttgcttacgtttttattcacaatgtaaacaactatatttttatcaaatgtacagtacttttaggtttttccattgctcatactcatcttgtttaagtagttggtgatctactaaactttttgattttcgagcagttgttaattctgcctcgctatagcagttacaatctgccttaagcaaacttaaatatactttaatagttttatcagtttgtatatttttaattttcctgtattaatagttatattatctatccattttttaggtttaagtacttttatcaaagcgtcgtgatgcctcattttatatgcgagttataactttcgattttcctttcctgtcagataggttaaaataaaaaattatagtcgtttgattccttcttcgtcaaaaaggtttgatcaaggtgttataactattcgacccctctcgtgtcaaaaaggtttggtcagggagttataacagttcaactccacttttgtcaaagaggtttagtcgagaacctttgaatttcaaaaaaataaattgaaatggcgggtttgcattacaccatgtatttccagatgaattcttgttaaccatgcataaatgccccttaagtaatttttaaggaataaactttgtaagtacttaatataatgattctctttattcataacagaagtttaaagtttacatcagtaatgcgaattacatcatttatttattggtagtagggttgcaagtgttctacgttccagtagttttttattagcgagtcgttgagtcgagccaatttatagactccaactccaaatactgattcaatgacatatggaccctcccaattcgggttgagcactcctgtagatgcatctctcgtatttgtaaagactcgtcttagcaccaagtctccaacattgaatagtcttttcttgacttttttgttgaagtatcttgtaactcggtgttagtatgctgcgttggtgatttgtgattcagttcgtttttcctcaagtagatccaaggacaattttaaaagttcttagttttctttttgattataaaaccactcttctgtgagtcgatatgttcacttcaacaagcagcattgcttctgagccaaatgctagtgagaaaggagtgtgtcccgtagctaacttctcggtaattatgtgggcccagagtacttgaggtagctcgtcaacccatcttcctttggcagcgtctagcttcttcttgatagtatcctttagggttttattaacggcttccacttgtccatttgcttgaggcctggatactgacgagaagcttttgatgattttattcctctcgcaaaattcaatgaacaaatcaccatcaaattgggttccattatcggatactatcttcacgggaattccaaacctacagataatgttcttgacgacaaagtcaaggactttcttacaggttatggaaatgaggggctcggcctccgtccatttagtgaagaagttgactgctactaccgcatacttagatcctcctcgcccagtgagtaatgccccaattaggtcgatcccccatatagcaaatgggtagggcgaggtcatcattctaagttctgttggagatacgcgaggtatatgtgaaaagctctgacacttaccacatttcttgacaaactcgtgtgtatccttattgatcgttggcaagtaatatccttgtctaatgatctctttagacagacttttccagcccgcatgatccccatagaagccttcatgaatttctctgatgatttcatttgcttttgcgggaagaacacaccaaagtaggggcattgaataccatcttctatatagttgtccttcgatcattgtgtagcaagacactgaatacaatagttttcgcccctcgtatttgtcatttggaagttgtccatcaattaaataattgataatagtcgtcatccatgttggagagctatctattgttgaaaatattttaccagnnnnnnnnnnnnntaccatgtatgtttcattaacatcct

SEQ ID NO: 135437 - DNA, 664 bp, Cannabis sativa
ataaagcagcagcttgacgagacacttaaggcatacttaagtcattttagcacggctgccgctagggttagaaatttggatgatagcacacagcttacagccatttgagctgggatctctactaatccattaagtgcagggcgcgacttgtgggatgacttacaaggacgtccggtgagaagtttcactaagttcaacgaaagggctcaggtgtttgtccggaaggaagaagctcgaaaggaaatgaacttgttgaaaacaagcttaggaagcaaacccggcaatgtttcaacaggtactgcttccacgagaatcgataactcagggccttctggtccaaacaaaaagacagaattaaggaaccgtcgaatgatagaaagaaacaatagaagcatgacaaatacctgtaagtgtatactatttataccgaacttaatgaaactcgggagaatatttacctcgcacatcagcagaaggtggccttcgataaaccctagcctatgaggaattcaaggagcaaaagagatccaaacaaatattgtaaatccataaggatattgggcatacgaacgatgaatgttgccaaagtaaagacgaaatagaaagtcacatcgctcgatgtcattttaaacagtacgtgaaaagacagggccagggatacaac

SEQ ID NO: 135438 - DNA, 1239 bp, Cannabis sativa
  modified_base (1185)..(1213): a, c, t, g, unknown or other
aatattaccatatatataataattaataattattaccatatatattataaaagaaattgaaaaaaaagtttttaattatatacaaaaatgcatgagaaaatgataataaatttttttgcacatattttataattaattaaaataatgtatacaaaattgtaaatgcccataaataaatttataaataattacatactattgatatatgtctttttatcaatgatattatacttgtgacaaatattgtatacttaaataccataatagaaaataatattttatttcttaaccaataatattacataataaaaaaaattaataaatataatgaacaaacataataatataaaaaaaaaaaaaaaatctatacacatattattcaaatagataatataactaaacttaaaaaaaaaaaaaaaaacaatattgttctaatagttaaacactaacacaaacgcataaactatataattatgcatcattttgcaacacattcataatataatacatttcatttcatctagtatggcataaaatactcgcatcaataaagattctttagctaatatgttagtggcttgaatacatgcataacagttaggccattgatcttgcttatttcattgtagaaattgtctagcatctcagttactttcttatcaaatattacatcgatcaatccttgaagtttcaggacaatttcaaataagaattctgccaatgcaccaatatttgtggaaatacatccaggaactcttttactactttgacaaaactcaggcccaaatatttcaggtctactggagtcaatcacaactgctaaaaatcctacacatccactgtacagtaaatctttagcctttaaaactaaaatgatcgaaatctgagaaccctgaacagacccgacatatacaaatggttatttgccctcttgctaaaaagttaccatcttccatttactatcaatactagccaaatattatgatagaaaatccatcccaagtataatgtcgaactcggttaattccaactccagtaggtaagcacttaaaactccctgttttcaattctaactagcatagacctaacccaccttttggggataagcaattctcctctaggtagtagggttccaacccctatttcaataaactcacaaggcctaactgttggaaattattttannnnnnnnnnnnnnnnnnnnnnnnnnnnnttgattaacaccctaaatataaactt

SEQ ID NO: 135439 - DNA, 621 bp, Cannabis sativa
ggaccccgcgaggtaccaagcgctaaaagaagaagtcgaccgcctcctagcctgcggctttatacaagagttgttctaccccaattagttagaaaatcccgtacttgtgcccaagcctaacggctcatggtgcacatgcgttgactttacagatttaaataaagcctgcccaaagacagcttcccacttccaagcattgaccaacttgtcgatgccactgcaggtcacgaacttcttagctttatggacgcattctcgggatataatcaaatcccgatgtatgaaccagaccaggagcatacctcgttcattactgatcgagtcctatattgttataaagtaatgccttttggtttgataaacgtaggtgccacatatcatggacttgtaaatatgatgttcgcagatcttattgggaacaccatggaagtatatgttgatgatatgctcgtaaaatctcagcatgcaaaagaccatgtcacccatttacaggcaatttttattatactgcgacaatacaaaatgcgactaaaccctttaaagtgcgtctttggagttggctccggaaaattcctcggatttatggttaatcaacgaggaatagaggcaaaccccgcgaag

SEQ ID NO: 135440 - DNA, 575 bp, Cannabis sativa
tcttttggcttagtcggtgatcgcatttctactaatgctttgatctttgcggggtttgcctctattcctcgctgattaaccatgaatccgaggaattttcctaaaccgactccaaagacgcactttaaaggatttagccgcatattatatcgtcgcaatatatcaaacatcgcttgtaaatggttgacatggtcttttgcatgttgagattttacgagcatatcgtcaacatacatttccatggtgtctccaagcaaatctgcgaacatcatatttaccagtctctgatatgtcgcacctgcatttatcaaacgaaaaggcattactttataataatacagacctcgatctataatgaatctggtatatgaacgaggtatgttcctgatctggttcatacatcgggatttgattgtatcctgagtatgcatccataaacttgagaagctcatgacctgcagtggcatcaacaagttggtcaattctaggaagtgagaagctgtctttgggacaagatttatttaaatcagtgaaatcaatgcatgtgcgccatgagccgttaggcttgggcacga

SEQ ID NO: 135441 - DNA, 534 bp, Cannabis sativa
aaaaagaagaaaaaatcaatggagcaaagcaaaacgtgatattcattaaaaaaaatatcattaattttaatttaaaaaagaaaaagaagaaaatatcaagggagcaaaattaaaaatttaatttaaaaaaatagaataaataagatagaaggctgatttttttttattattattatttttctgaaatatttttttattagttattgaattaattaatatttaatgtgattaaaaatgtgaaaaaaaaagagaaaattattagagtagaataaagctattttagactgtcacgtcaccgcctcatgcttctccaagaaccttcactcaatatctacttaaacttagaaacttatttattttcttattgttgcatgctttagattttcttgtatgataaatgatagatgtatttaatatttgacaaatgataaaaaaaaaatagaaagaaaatatgaataaaataataattaccttctcattaataaaaatcatatcaagacttatcaattctctatttttcttagtattaagaga

SEQ ID NO: 135442 - DNA, 1108 bp, Cannabis sativa
  modified_base (461)..(470): a, c, t, g, unknown or other
tcaatattgaaatatgaaatacattatgaacagctgataacgctagtggtaaggctagccgatacgctacctacccgaccttctaaagtatctgaaatagccaaatgaacctagggctcaacttacccttcttcgtgaagcgtctaatacctttcacaggtgaaacgtgcaaggaaatatgttcctatgcctgaaatgtgacatctctgcactttggatcaacataacttttctgcttgctttgagaagcaagcatccgagccttaatcttgtctatagcttcattggtcctctgaactaactccagacctaagtacttcctttctccaatttcggcccgatgaataggggatcgacatttcttaccatataacatctcatagggagccatccctattgtactttgatagctattgttgtaggagagttcaattagaggcaagtacttactccatgaaccnnnnnnnnnnatgacacaggctcgcagtaaatcttctagtatctgaattgttctttctgattgcccatctgtctgagggtgaaaagctgtgctaaacttcaaatttgtacccatagccttctatagactcacccaaaactttaatgtaaactttggatccctatctgaaacaatggatttaggagctccatggagacgaactatctcctttacatacaattcagcatattgatccactgcataagtaactttcattggcagaaagtgagctgattttgtgaatctttccactatgagccatactaaatcatacattcccgtggttctaggaaaaccagttacgaaatccattacaatgtcctcccacttccacttaggaagggctaatggttgtagtaaccctgcccacctttgatgtttagctttgatttgcttgcaagttaagcacttggaaacgtagtctaccacctctcttttcatgccagaccaccagaaataggattttaaatgctaatacattttggtggttcttggatgcagggaataaggtgtggtgtgagcttcatcaaggatctctttcttaagctcatcgacattaggaacacaaactcgagctttatacaataacattccattattcgagattga

SEQ ID NO: 135443 - DNA, 691 bp, Cannabis sativa
gtaatgggttttatttagggcacaaaacccaacataaccatccgcttcggcaagtcctacagaagccggaggcatccgggagactcatcaaatgggctatggaattaagccagtttcatctacactacataccgcgcacttccataaaaggacaagcactagcggacttcataacagagtgcaatgaagcagaggctagtgcaaacattccaacgccacaaaccccagcatggaaagtatttgtggatggatcctccaacgaaaacggatccggggttggggtcgcaatgatatcaccgaacaaacttcgactccaggcggtgatacgtttcgaattcacagcttccaacaatgaggctgaatatcaaaagtcctgggtgccacaagagtagaagacttcagtgattcacagttggtggtaaaccaagtgtcgggagaatatcaaacgcgtggagaaaaaattgatgcgtatgtagcagttgtctgggaactgctccacgagttcacggactacaaagtggaaagaatccccagagaaaagaattcccacgcatactgtttggctaagttagcatcaaacagcgagattgagaaactgggcgtggtacccgttgaacgcctcacgaaaccaagcattaaaaccaaaaatattgtggcagcagttgaacaagagctcaactggatgatcccc

SEQ ID NO: 135444 - DNA, 757 bp, Cannabis sativa
taatatttataacaaatatataataataataaaatattaataataatattaataaaaactttattattaatagttatctaattatttattagctactaacaaacttctacttttaaggtattaggcaaatttcaagtaccctaaaataccctggtacttttaaaatcaacttatcccaataatctcattaatatttctaactaaaactgctgtgatattttggcctccaatcgggtctccaggtcgccgaacttaaaaatatttttattttacaaataactcatattgtgttcatgtatttcaaataaatcttcgtaattaataaattacgcttatatatctacttattaagtcttcagggtcgccgaacctgaaaatatttttattctacatatagctcatattacattcacacatgatatataaatctccgtaatttatacattacgcttatttactcacttatagcaaaatttaaattttatgttgaaatagattagtaggatcacaatcccacttattatctgattaacccataatataaatataaaccctaattatttaccattagacttatcaggatattacaaatatgatttatttttccccaagtttctatgtattctattttatttgtgcttaattacttttaattggctaatcaccaattagctgtctatgattttgatgcgagatctgagaagtgagtgtcaattatgctatagtgaattagaactgaatttcaatataggacgag

SEQ ID NO: 135445 - DNA, 870 bp, Cannabis sativa
  modified_base (48)..(49): a, c, t, g, unknown or other
  modified_base (178)..(197): a, c, t, g, unknown or other
gtggaagattgtgaagaatccagaatcaagagaaggacattcggactnngatcttggtgatactctgcgacagtaaggatacaagggttagagatctaagtggaaggagacattataacccgctgtaaccactataaggtttcttatatattgtatgtgtttatttcatatcgttttnnnnnnnnnnnnnnnnnnnnttaaataacatacttgttagtaaatctaagatcctggcaaaataaattccaacagtacagtcctaaaagggtgttctagtggactctatatctgttttgacatccagaaaagaattttagttcatttttttcatgatcctatatgttatagctatataggattacttgtaaatttttttttaaaaaaaaaattgaatattttacactgcggaaaataaggttcaaaaagttatttaatatgtgtgtaagaacgaacagtcgtacgtgcaataaaatatttagatcttatttttgacattataaactacttgaaattttctaaaaatttacaagtgctcttaaaatatacaacgtacacgatcatgaaaaataaatagattgaaaaactctcttggataccaaaacagattgtgagtctaacaaaataaccatttcaaatgattatgaaatatctctaaatatttgtaagacacctcataaaaatagattttttttttatttaattatttaatttatctcttatatttgacataaaatttaatgatacttatacacttgttttgagttataaaaaactaaaaaacaaaataaaaatctgtgcatacttatgtttaattagaaaaaaattatgaatatcaccgtttttttgcttttatttttttttttttgaatt

SEQ ID NO: 135446 - DNA, 1063 bp, Cannabis sativa
taatgtacattactttattttttattttgtaaattttttgagaaattttctatattattaagattgtttattgtggttgtgcgtggtggctcgattttggtcgacattggtggtcagattgcgctaataaagtaaaaatttaaactttaatagtataaatgtatgtattgtgtgttgtattgaatatatattgtgtgtatatgtatatgtattgtgattgagaatgtgagataggaaagtattttatgcattgtatatgtatatattgaatattttaaactaataattttgttcaatattgtgaatgagaatgagataagagagtattaaataaaattttataaatttaatttcaaaaaaattagtttaaaaataaaaatttaaaaattaattctaatttttatcatttttttcttttttcaatcttattcatgtgtttttatttttttagtagctagtaaatagttagttaaaactacttaacaagttactaatttttattcatattcatgtatttttattactaagtagttactcattaataactagttagtaactagttattcataaattatataactactaagtagctaaatcaaaaaattttaattttgtagtatttttttatattgtaggttgtgaggtcaatttgcaagaatctacttatttggtgctgatcagtttctagatagctcgaggtatacatttactaacttttattattaattaaatatgaatgcttagtcgagtgaatatcttaaatattcatctgtagtgaagtaagttttgcgatatattataatgtggcctgatcgatgggttgaataatatacatgttagatgagtttgagtatcttaaatattcatccgtagtgaagtaggttctgcgaatacatgaactgcggtaggataagtggtaaatttttatattgctaaatgttattgtgattattttatattattttaaattgtgttttgttgttattaataggtttgacttttttgagaacattcaattatagctgttatactgttaaaatttcggtagaattagaataaaatt

SEQ ID NO: 135447 - DNA, 584 bp, Cannabis sativa
gcttaatgatgagatttaactttcaagatcagaaattaactcgtttaccacatgtgatgctgcggttaacttaagacaaacaaaagtagtttacagcaaatgagccaatgcaaacaaattattccatgtactgcagaattgacaaccaaatatcaaaaaacagtgcattgtaatataggtaaaaggaaactagatcatgatgttgcaaacaagggggaaaaataattcaaaacaaccagactaattcttttaattgacactgagaaatcaaaacacaattttctttttgtgagtgttatgacatagataatttttttttatataaaaaattcgattcagtcaagaacaagctctacttttcttcttcaccaacaacatttgcctaacaactttgaccagaagagagttcatacatttttctaaaaaagataaaaatatagacataagtaatccttaaaaattattcagatttaaattttaacatatctaggtttataaaggctattttcctttttatatcatacagtgataatattcaatgagccaagcacaactgtatgctagtattgacaataaaatcaggt

SEQ ID NO: 135448 - DNA, 901 bp, Cannabis sativa
  modified_base (178)..(184): a, c, t, g, unknown or other
ttctttattctatcctgattgcaccttcaatttggggtctgtcccagttgatttgttacctactttggtagctgaattcaatggttaataaaatgttgattttccattaaaaaaaaagtatttttaaaccgaaatcttttatcaacaaaattagtaggattattattattattattannnnnnntattattattattattattaaggactagcttaataaccctatgatttgagccatagaaccctaagtgatgcaaagtattatttggaaaaagatcataccaagaatctaagaaaacagcacagtcaagcctctcacttatagatttattagtctaggtaaacttattaccaacataaagcaaatgaaataactcaaatttattcaaaaaattagagaaaaaagacatattagaagaattggaaacacaaccaccacttgtatcactatttaacttgtaattattaaaatcttccataatgagccacaaaagattatgagcattataaaatatcttatgtaagagttcacaagttagatgcttaagatgatgaaagtgggacatgtgacctataaaaacaagtaatatgccatatcttattgtcattaaaatatatattatagtttatatgacaaagcacgctagaaatactcgtgttgatttgtagcgttagtcatcatttcagaaagtagccagagtgacgtactcgtgtacaagagccattattctgtaggtgtaagaacctaatggaggcttgaagcgggggatgttataaaatagtatcagagccttgatgtgacagtcaaagccccatgatccaaagggaaaagactgggagttgtgcaatcccacatcgcctggggaaggtcatgtgtgatgattttaagactgtgtaggta

SEQ ID NO: 135449 - DNA, 1910 bp, Cannabis sativa
  modified_base (1772)..(1783): a, c, t, g, unknown or other
cctttgttcccatgtcagcagggttgtcacttgtgtgcaccttttccaattccagaaccctgtcctcaatcttctctcgaatctagtatagtctaatgttaatgtgcttgctctttacataggtgaattgatgacaaactatcaaaatagactgtccctttgtctttgagtagatgcagctcttatagtattccctgtaaccaaatagcttccttgaaagcttcagtggtggccatgaattcagattctgtagttgacagtgccaccactggttattgttgtgatttccaacatatgtagcttttgttgaccatgaacacataagcaatagtagactttctgttatccttatttgatgcataatcagcatcaacatagccttctaattcacatttgatgtatctctttgataaatcagaccatatttgattgtacctttcaagtatataatcagccacttcactgtattccagtgttctaacccagggtttgccataaacctgcttaatacacttagagaatgagctatatcaggcctagtactgaccatgatatacattaggcatccaacagccatagcatagggtacacctttcatgttttctctctgcttcagttttaggacaatactcatttgacaatttgaaatgccctgcaagtggcacagcagtggcctttgatgaatccaaattgaacttcttgattactttctcaatgtagctcctctgagtcattgtcatcttcccttcttgcctacttcttatgacttcaatccccagaattttcttgacagctcccaagtccttcatttcaaattcagagttaagtttgtttttaatggcttgaatttcagtcttgtcttttctaatgatcatcatatcattaacgtatagtaatagatacacaaccttaggtgtccctattttcttgtaatagagataagagtcaaattctaatcttgaaaaaccaatactttgaacaaactaattgaacctttgattccactgtctgggtgattgtttcaacccatacagtgatcttttaagcaagcaaaccagggctattttactattttccacttgaaaactaggtggttgctccatgaaaatctcttcatccagaaatccatttaagaaagcagttttgacatctaactgctcaacctccaagtcattgtgtgcagcaatggctagcatcattcttatggttttgtacttcacaacaggtgagaagatacatgtgtagtctaccccctcaacatgtgtgaacccctcaactaccaatctagctttgtatctaggtggctcaccctctgtcattctctctttttctttaaacaaccatctgcaggagacaactttcttgtcttgtggcctaggcaccaaaatccaagtttttttcttcttcaaggactacatttcttctcccatagtagcaatccactttttttttatttgcaagcaatggcttcttcgtaggtagttggttcaggatcactctcagattgaaccacagctaagacataggctatcaaatcagcctcagcctacctgctagggggtttgatctctctctttgtcctgtctcttgccaattggtagttggtcaaatcatgttgattatcttgaccattttctagagtttccacctcagatgtgcatgcattaagttcttccacagtaccctatgtttccacttgttgtggtaatttgtacacgcaagtgcacgcatcgttaacaagtagtaaactcaccaagagtgaggtcaatccnnnnnnnnnnnnagttaagtacgttaaaattaaactattacttccatttggttgaataaaaattaagaaatgattaaaactagaaaataaaaacagtgaaagaataagcaattaaactaataaggaaattaacagttaa

SEQ ID NO: 135450 - DNA, 1408 bp, Cannabis sativa
  modified_base (45)..(50): a, c, t, g, unknown or other
  modified_base (172)..(211): a, c, t, g, unknown or other
  modified_base (483)..(488): a, c, t, g, unknown or other
ctatagattcaaaattgcacttttaattatatagaacgctctatnnnnnncacgatatagatacgctatgaatcatctattgttataatcctaataatcagtgattctctatagatgatctacctcgagtagggacaaatttaccgctacaccattcaatgtattttatccnnnnnnnnnnnnnnnnnnnnnnnnnnnnnnnnnnnnnnnntaatataattactgaaatgagcacccaaccatttatctctattaagccaagcttgaaggcaatcatcattttacttttatgtccagatagaagttataaattatgtgtctatgattagtgctcccactcaattcaactaccatatccttaatatgtatgtcatgagaagatcctttggtcaactttaacgaacaaattgaagaacataaataatacatctaaactagaacctaaccatctctggatttagatcatttgatctaagatcaacnnnnnnatattgaattagatagatattacaataagtttattatatcttatccaagtttaatattggtcccttccgatgtatactccatacatccaacccaagcttactttcaccaatggcttggaaaggacatagcacttatctaaggtacaaataaactacattatagattgtcatatcagttaaatcttgtgtactgataaatcatagaaatttatttaatcacatagtcttgattactttccactgtgttgacatcacaattatcaagaatatcaatgtgctaatgatttgaatgaatttataaatcaaacaaatgatcatgaaataaacatgtgaaccaaataatacattaaacaagtaatgaaataaatatgtttctttattgataaaggaatattcaagattacattaaaatagagttttatttatggcacaaaacccaatcaactcccccttacactaacataaaacaatcagtacatttcaattaatcctagattctctctgtgcttttcaaatgcagtgactgtgaaaatctttgtgaattgatcaacttagttgttttcaatatttttaactaaatttaattaaataacaaattaagtatcttaaatacctgaaaaaatctaatttaagttgttctaaaataactaaatttttaacttaaatatttttcaaaatttaatttgttgcccttaacttcgcccaaaatacgtggaccaatatgacaacgacacgtggacctgagaagcacgaccattagataaatcgactaagtctttttggcatcaggagtgtcaatgagaatatgccctcctggaggagaggtgaaggctccacatactcccggagaccaggggaacgctaaggtatctctgggaggaacaagacctgatttggataactgtgctaggttaattata

SEQ ID NO: 135451 - DNA, 565 bp, Cannabis sativa
  modified_base (364)..(371): a, c, t, g, unknown or other
  modified_base (523)..(523): a, c, t, g, unknown or other
tttttgtgtattaataaatctcccataattatattttaaatttatttaactcaaattatatgaaatctactacactttcaccaatgataataagtgttagacaccatagcattttataacaatgctagaagaataccacagatggagatagaaaaacggataattcaactaagatgttgtactatattaatagttgttatgattcgaacaatttttacttggcaaaaaaattcagaggacaacactatacaagggacataattcagaggaaaacctattttcctttaaaaaataaagagaattatattctgcatgccctttgaaataattaggggtgttcggtgttcgcggtgcgggtggtgcnnnnnnnnactattttttcaaaccaacccgcacatgcggtttttcaaatttctcaaaccgcacccgcaccgcgaaattaaaaatccgcaaaaaccgcaacgcaaaaacaatgcggtgcggtgcggtttatgcggtttggactatctctaaataattaaantttcacaaatacaacaaactttgagcaaaacttgtcaaaata

SEQ ID NO: 135452 - DNA, 513 bp, Cannabis sativa
attattccgcatttaattaatcatttaattaaataatcaaactgggaatattaaaatacggaatttcatatctttatcattgtttcaagatcactacgatgatataattctttaaatgagaaatctcaattgtttcattgcatcaataccatcatagctagataagaatatttatacaactacacattttttgcctaaatgattttaaatagaaaaggcaagcacatcacttttttaatccacaattcaaaagtacttacaagctaaatgcatgtattcatttaaataaagtttttaattatacaagagaaataaaacattaaagaaaatatcaagggaaaaatattgttttatatgttaccaaaatatccctttcatagggacaattgaatgatgagtccgctacgattaggagtggacaacattcaatttaattgaactgaaccgatctaatccaatctaattacaaaaaattggatatccaattataattggattgaattggatgctaaa

SEQ ID NO: 135453 - DNA, 833 bp, Cannabis sativa
ttacttataatacaatacaatttaatacattactatacagtacaataccgtaatgtacgaaatcaaccttaatagttgcttaatatatgtatagggcattatatattcagtgatatttactatctcatagataaacttaattattagtagcagatgtaatgtgacatggtctttttattcctcttcacatggcctatagctagagaagatcataattaatcatgaagattttgacataataataaaatttatattacacgtatgtttttttgagcaaagttgaaaaggaattcattaattctgtatataattattaaaaaatatatatatattattaaggttgagatgatacttgaaacttgaaaggtaataatgcaacatggaatgataaaacagtccaaacaatggtcatgattaatttcccttgactgattcatctcaagagatatatattaaatataataattatggttccatgaaagaatacacgcaaaataatggatatttgtaaacatttataattattatacatataattttgattaacaaaaaatggcagcaaaaatatgcactcatactattttttgtcattaaatattaactcaaaaatatgtggtgatttattattaaactatatattaaataaattaaagaaatatgtcgtcacgtgtatttttgagttgacacttaatgagtttaattgacatttaacaactaataaaagatacgactgcacatcacgaaagaactccaaagttaagcgtgcttgacctggggtaatttcaggatgggtgaactcctgtgaagttttcccagaaagcatgcgagtgagg

SEQ ID NO: 135454 - DNA, 591 bp, Cannabis sativa
ctttaaaaaaccatcaatctccctgatttctacactattttaccctatttttattttaaaatcttcttttttgaatacctaaaactatactgtaaaaaaatttggtttttttctcctctatcagtataatcgaacccattaaaaaaaggtagtggtataactctggccaccgattttggcagagaaaacgttgaatctcaacgtccattaaggtataaatataatttctattcattttattaatgtacattactttatttttatttttgtaaatttttttggggatttttttcatttcattaatattatgttattgtgtgtgcatggtggccaaatttttgttgcaattggtcgtcagattgtgcttataaggtaaatatttattaacttgatatataacatatgtgtatatattttgtgttttattaaatatgtgtttatatatatgtattgtgtgtatatatattatgtatatattatttctgtaaatttggtaattctattgtatacattctaagtaatatatatgtatgtatatatatttattgtgaatgagaatgagatagaagagatttaattagtttagaaata

SEQ ID NO: 135455 - DNA, 680 bp, Cannabis sativa
ttgtctttgggcttagaagatggaatgtggtggatgtgtgaagaatatttaggattcaaagttatttggaatgacagcttgggagaaagattcaagatgaattttgattcgtcaaagctccaagaagatgaacaatattttcaaggatatatgttcgcaagtggctgtgaaggagtgttctattttcaaacggatggtacacataaggggtgcaaaattctaattagccattttttccagcaggttttaattctacctcatatcctcatgcctatgccatatgaaaggagcagaacagcccttgatgttggtattagtggcaacaatataattaaagttctttgtgtcatgagtactttaatggcaactactattagtagcattgctaaagttttcacagaaggagctcaagaatggaggccagtatcctgcccaaacatgcttgtatgtacccacacaatacttgtatttgaacatggttttatatactggaatttggctaagagcacccaacttctatgctttgatgtaagcatggaaatttttacatttgtagctgtaccattaagaggtcttctaatagatttttttggaaaagttgaaatatcaaatgttgttgacgttttgggatttgtaataatagaaaatgatgtaaaaaaagatgatgatgaagaagaaaa

SEQ ID NO: 135456 - DNA, 1368 bp, Cannabis sativa
ttgtattgccaacaaccgaatccctattaccatgcatcaaaccttgacccatgatattaggaaaaacaacctgctgactgccccaaatatcagggatatcaatctccctttctcttctcggttgatcatccaccggagcaccaaaactcccagcaccaacagaagccgatcggagccacttcgagcccatagcgtactgcgttttttgagggaccgcctttcatgaatgtaccgtatggtttgataatagaagcaataggttggataaaccatctagagcaatattgcttggtatggcctataattccacaaataaagcaaaatgtaggcacaaactcataacgaaaatttatccaaaaccactcacctccggttaattgcagcttcatctgcctttttaatggcttctcaatatcaatccggacccgtacccttagatactccctccaaacaccattaaaattattctcgtcagttttaacgaagctttcgatgtagttcgcagcatccaacaccaccctttccgtcttgaatcccgcctgaatatcatgcaattgaacccagatttcaagatgatgcaatcgcaaagctcgcaaaacatctccaatttttagtctctcaaaaatcaaatgagcgtttttaaacgtccatgggctcctatcaataaacctctgaatatctatctcatgatagaattgaaaaatatatctatttcctcccaaatctttcacatacatgcccatacctggcttccaaatccaaaggactgccatcaaattttgcatagccatgaaatcgatcggattgtctgtaagaaaacgaccaactattctccaccgtgtatcaagctctgcatcatcgaccaagggtcgatcatattgaaccgctggctcctcttcctcctcgagtgggatgatcgacaacctatcctcaacgtcctcattactatacgacgtcgccatcagaaaacttcacaaaacagaccacaacaaaccaccgaaaataagaacagacctcaacaaaagaaacaaaaatcaaagaaacattctcaccatgtcaatatacaagaccttaaccttaattttaagtttaattgccttgaatgataattaccttttagtttggattcaattaacaaaaatcaaattaattaatagtttttatattctaatcagtaaataattgctagtgcgatttaatattaaaatacattaattataactatgacacattttaccgtggtaccattagcaattttttgttttctaatcttttctcattttttatcaataccatgagggcccgttcggtacacaggactggattggattagacaggctaatttgtccaatccagtgtttgtgcatg

SEQ ID NO: 135457 - DNA, 1496 bp, Cannabis sativa
ggtaaaataatttccaacagtctattggctccccagtctcgttgtatcccgcaaagtttgggggtgcagcctcctcctcttcctctacctcggaaggactaccaggacggatatcgccctgttcttctatctcctggacttcagcgtccccttcgtgatccccctcctcttggacgggcgaatcttgttcggcgctgggtagggtagcgtgctgggccacgtgagggtcagacgcgttgactttacgcattgtctgtttagttcgagccatcatcctgtggctgaacagggagattgaattgaaatgtctatcgcttgaagagggcagactagaacaaagacgagggtaatcctcgtacaggagttgaagcaaatcctggtcaatttggtgttcgcttccccaaaactcactagggttgatctacaaaagacaacacgcgagatgagtgtttggtcgggatatcgaacaataaataggcaaatatgatgaccaggagtactcaacaaattaaagaatagaaatattcgacgataagtcaaatctcagaagtttgaaattttcgagatttagggcaaaaatttcacgaagctttgaataagcaaggtgaaagacagacattgtgcaatcaaaagacaaacatcatgaatagtgaagtcacataaatcattgcaaagaaaaatcgtagagtttctgaacctagggttttttacctatcctctacatcaaggataaaatatcatccagaaattaattgtgcaaaatgaaagtaggagaaatcgagaacttactcactgattgacgtctggattcagtctgcacgaagctgagcaaatggttcttgtgaaaatttcacgacaaactcgaagtgaaaaatctctctttttgctctaaacttgcttaatggaaaagttggtgaaaatgagtttgtgaacaatgctcagtcgtatttataggcagaaaaacaaaaaggggtaatcatttcaaatacctcagatgcctcggttccccccaaaaagaaaatattggaaatcaaaagcaattaagtgtaaccgtcaaacgtggtgagagaaaattggatttcaaaacattaattgcgtcagagtatttattagccaaaaactgaagagacgcctagtcagcctcacatcgaatcgcgaacagatgcacctgactcgtgtcacccatccaaacataaagacagctcggatgaagtctacacacaactttggaagtcccgtacagacttgggggcaaatgttatcccaatttgtgcactctgacatggcatcacacgatggtgacacgtggattcaactctaggtacctgctcgcaagacacaggccgaacatgacaccacatacatttgctcggccgaagtcctcttaaccaagccgtgagcaatccgtgcaacacaccgacacttaacaaattcagctttcgcattgtgagtcatcaaagaaatccctataactttgggatcagattacagagata

SEQ ID NO: 135458 - DNA, 592 bp, Cannabis sativa
catctttatccacaatgtgccctaagaaagagacacgaggtatccagaattcacactttttgaatttagcatagagcttattatcccgcaatcgttgcaaaattgctttaagatgaaactcatgctcttcttctgattcagaatacaccaagatgtcatcaataaacacaatcacacatctatccaggtaatccttgaacacccgattcataagatcgatgaatgccgctggggcattggtgagtccaaaagacatcacaaggaattcataatgtccataccgagtacgaaatgcagtttacaggatatcttcctctcgaattctcaactgatgatagcttgagcgaagatcgatcttggagaagaccgtcttccccttcagttgatcaaacatatcctcaattcgaggtaaagaatagttgttcttgatagtaagcttgttcaactcccggtgatcaatacacatctgtagagatccgtctttcttcttcataaataatatcggagcaccccaaggtgagtagctcggtctaatgaatcccagattcagtaactcttataattgtatcttcaattccttcaattccgctgg

SEQ ID NO: 135459 - DNA, 518 bp, Cannabis sativa
tagcatatgcagttacagaaaaagagacaactagcagctggacatggttcttagagttgttgaaggatgatttgacactgactaaccctaacacattcactatgatgagtgataggtaaaatggtctccaaaatgctgtggaatctatattcaacacctcggatagtcgcttttgtgtgagacacatgtatggaaactttaaaaaggactatgcgggactcaagttgaaacagatgctttgggcagcagctagagccacaacaccaccagagtttgactccaaaatggaagagttaaagaatcaaaatgagagtgcttacaactggttggctgctaaaccaccaatagaatggacaaaagcacattttaaagagggagttcaatgtgacatgttactcaacaacatatgtgaaatttttaaccacgctataatggatgcaagggacaagccaataattactcttctagagagtataaggttctggttgatgtgtcgattttgcaagagaagagaatct

SEQ ID NO: 135460 - DNA, 558 bp, Cannabis sativa
tcttcttaactttgggcattttcttttcttttcacttgcacactaccccaacacaatgaatttcttctttgctttcttactcactgctgcccctccacacaagaataattcttacaatgcacttcactgtccctaacccaatcttgttcaaaagtcacacctctctgaccatacacatcaacttactgtcacagcaactcacttacacaaacaattcacacctcaactaaccatggtacaatccccctgtatatatgattcacacttccatataagcaagagttcaacagtccaaccaaacacacacaacaaacagccccttgttcaccaaccacactaacaatcagcagctagtaaacacggcaaacccaccaattgatcaccaatgcaaattcaaaactttaacacaacttatcaacacccataaatcacgatgtcctttaatcaaaccaaaggagcattcaaaaacttttcaaaactactccaacatttcaatgtcctcccaacaactccacaatatcaacaatactcaaatcaaagactacaactacctcttga

SEQ ID NO: 135461 - DNA, 803 bp, Cannabis sativa
ctccaattacttgaggattcaggtttcataggcagcaaacccagcaaaacacccatggatcctaagcaaaaacttaacaatgatgaaggagaaagtttgaccaatccttctcattatcgacaacttgttgggaagcttctctacctaaccttgtcaaaacctgatattacttatgttgtaaacactctcagccaattcatggcgaaccctcgcaccactcatcttcaagcagttcatcacctcctaagatacatcaaaggcaatcctggacaggggctgctctattcaagaaattcttcactacatcttcgtggcttctccgactcagattgggcatcttgccccatcacaagacgatctacaactggtttttgcatcttccttggagattgcctcgtttcttggcgcacaaagaaacaaccaactatttcaaaaagttcagctgaagctgaataccgagcgttggctgctaccactagtgaagtcacttggctgcaatacctcctagaagacttccacatccctcaacctcatcccgcattcatctattgcgacaacaattcagccattcatatcgcaaacaatcccactttccacgaaagagcgaagcacatagaactagattgccactttatccgtgacaaaatcactaatggatccatccgactcattcctatttccactactctacaacttgctgatgccttcaccaagccactctcttcaccaattctgcattcacatgtctccaagatgtcagtgtacgacatacactctctatcttgaggagggggtattaagtt

SEQ ID NO: 135462 - DNA, 1557 bp, Cannabis sativa
  modified_base (1530)..(1531): a, c, t, g, unknown or other
aactctttcttcacctcctcaagctcacccttcaaagatttaatggtttcttcaagttcacgctctttttctacatactttccattctccaattttaggatagcattatcaacagtcaattttttgttcttcttctccaacacaggatagttttcttgaatgaacaacatggcttgaagaatctacaaacattataaccaagttttaataactaaagaaaaataatcaatcacagtttatattacaattaataatgaccttaccttgtaatcatcagccactccgttgttggcaaccccagttggaccaagcttaatcaatcgtgctcgatcagcaggatggagaattccatccacatgcccttcaattcacgaagggttagagtagaccgatacagtgtgagggattcgaagaatcgtttcatcaacaacctctgggtcaagaaagtcggcattcctcttgattgtagtgcacgtaccaagggaagatggagtcattggaacatcagtgaagttactcttagaaacttgtttggacccttcaatctttgacttcttagctattgtcaatttggctctagccatggcatcactagctttgggaaatttgatcgtcctcttttgggacatcttgtctgcaaacatgcgttgctcttcggtcatgtgagtcaaaatagtaaacttaattccaaacgtctcaaattctcgagttaaaagaaggatgtgaatgtgttcaagggattgaagttcagggataccttcttctataacgtcttgtgatttttgcgggaaatttttggggagaaatttcctaaaattacggtccttttcttttatagattcaatatcctcgataattcgatcaacaaactcgttcgtattaggttgaaccccgaagtctgtttccacgccaagggccaaaaagacattaataaaacatacatagccaacacaataataaaacataattcaacactcactcaatatttgccaagagaatgtgaaactcttctcaaccctcgaatcaaataaaccatcacctctaaagaagcaatatgctttcttccaatctgaatcgccagccttggtcaaacaagttacaaatggttttttcctagtgcgacaaacaaatagcactctacccttctctttttcatgctctttagcatagtaacgtttcctaaaaattatggggtctactataataccaaacttttcagtaaaatgctcaaggctcaggagcaacctccaatcgttgggcataagttgcccaggagatattccataaagactgagtatctcagtcaccaaaggagtgaaaggaaactgaaatccataatcaaaagctgctttgtaaagacaaacccaatctctcatatctcagtcggctctctcataagacttaggcagtctcatttccacatttgaaggtatgtcataagcaactctccattttttcaaatcaacatctgtcaaaatacatccagggttcacattaaggaacccgataggtgttaggttttatgccctnnataaaactctttacaatctgattagt

SEQ ID NO: 135463 - DNA, 775 bp, Cannabis sativa
  modified_base (730)..(735): a, c, t, g, unknown or other
cgaaatggggttctacttagtggtgtccatttacactcgcacgagcgacactatcactgtagatgtttagttgtcccgtgacacatattatgtaatgaaaatacgtgtagagtatcggagtcactagtttcgtaacgaaatcactaaccgataccaaagtatggttccacttattggggccgatgtacactcgcagtagtgacagtatcactatagatgtttatgggtgtcgtggcaccaagtatgtgatcaagttatgtgtagggtatcagcatcactagtttcgtcacgaaatcactaactgatataaaaatcgggttctacttaggagtgtcgatgtacatttgcagtagtgaaactatcactgtagatgtttaggggtcccgtgacataatgtatttcatcaagttaggtgtagtgtttcaaagttaccagtttcgtaacgaaataactaaccgataccgaaataacgatctacttagctgtgtcgatgtacactcgcagtagtgacactatcactgtagatgtttaggggtcacgttacacaaagtatgtaatcaagttaggtgtagggtattggagtcaccagttttgtaacgaaatcactaaccaatatcgaaatatggttctacttagtggtgatgatgtacactcgcagtattgacactatcactaaaggtgtttaggggtctcatgaaacaaagtctgtaatcaagttaggtgtagtgtnnnnnntcacccactaaccgataccgaactagggttctactttgtg

SEQ ID NO: 135464 - DNA, 585 bp, Cannabis sativa
tacctctcttagcttctggatgcaatggcaaaggttgggtaggagcccgcatctactcaaatccgctcttggccagctcggatctgcccttcaactgttcaagcctatctgagcttcctcctcgaaagtctttggacttagcagctttcagagctgaagggtccacgacagttagctcctcaaaaagatcaataacctcctcagtcggtgccttttccttggatggggttgcctcactgcccctagatttcttggctggaggagatgagcttgagcttcctccaactctcttcttcagatcatcgagcatcttctgagacatgtctgcacgggataaaagcaatgtggttggaagaaaaaaggcatcagaaatataaaagcatgataatcaagaagtttaaaaataagatgaagtatcctgcgcttcatgagaagcgtttgtttcgggcaagactcgaaagttcataatcaccctgacaagtctcttatctccaccaggacggccttcccttttcctagtacaggagagggtgaccgagtatgtaaactgggctccctgattcgaatggcatgttcaacaggcct

SEQ ID NO: 135465 - DNA, 875 bp, Cannabis sativa
  modified_base (192)..(196): a, c, t, g, unknown or other
aaaagaaatccatcattcacgtacaagcaaaggcccacatctcacattcttctccaacaactaccaactgtacgtggaaccactcgcctgccaacaaacgtgcaccgagccacttgacaagcagaagacattattccacttcagcatttatttaggagaaatgccaatggtgcctagcaccctcctacgtgnnnnnatcgctattggtctaactaagtatcgggtcccatataatttaatataatagtttttagggcgtatcgctatcaaatcgcaacgcgacatgtcgagatggtgctaggcaccactggtgcctaatagcaatgctctttatttagccatttcaccactaagtataacacgagaatattagtttttgagtaattttggctctataaatatgacaatttagaatgcaagaacatcagattttcttagtagtgttattataccaaagttttatctttttctttctttcctctttattttactttattaattttggtgtaaagacaatgccttttttaggctaattttgttggcaagactcaagtgtaagttcatgcaatttttttttctaatatattgattttcttcgttcttcattttcacacttgttatattaaatttctctttttctaaattgcactttaaattatttagtagtaccttttatattcgttgagtcatgcttttttttttatgtaagttaggctattaattattagggtgtttattatattatatgatttttactacattctaccggtggtatttttttgatttcaattatataatatgataagatttttagaagtagtattaatttaattagagaacatatttttctagtgagcttaattatacacattttc

SEQ ID NO: 135466 - DNA, 737 bp, Cannabis sativa
tattaccagacatatgttgatccctgtagtaatgactgtcatacaaaagctcgtgaaaatattatgtctttaatatacttttcaggctttgacaatagtgaactagccagctattgacacaaacatggggtttgaaccctataaataggaggtagattatatatattaaagtcaaatgtatatgtcttgacacatcaactattacacttcttatcatatatgcatatgtctatctcttcacttgatgtccatctcctcacaacacttaatgtgtgtctgtctacctcctcccattatttacatgcatatctatctcccctaattacaaatatattatgtttgtctatctcctccccttatttacatagatgcctatctcaaacatattgtgtctgtctacctcctctcattttgatatatatgtctatctccctacaccatatatatgtctatctccttacaccatatatatatatgtgtctatctccttacatcatatatatatgtctatctccttacaccatatatatatatgtgtgtctatctccttacaccatatatatatatatctccttacgtcatatatatatgtctatctccttacaccaaatatatatgtctatctccttacatcatatatatgtctatctccttacaccatatatatgtgtctacctccttatagcacatatatatatatatctgtctccttacaacatatgtatatatatttatct

SEQ ID NO: 135467 - DNA, 598 bp, Cannabis sativa
tgttattaagtttgagcaagctttaagttttagaactcaagcttggctctttaatggtaatttttgattctgagattggttagttgttttgttgcttagaatatgtctatggggtataatatgcaggtttagaaggtttggtaagggtttgaattgatttagttaggttttggaatttttggggttttctggtgtaaaccagttaaccggtttacaggaaatgtaaaaccgattaaccgaatttgttgatgggttccccaaaaatttcatgttgtcgattcggcttagtgtaagagctttggttggttaatttcttgttagtttagggtatttccatgttaacttatagtgggtaggtttttggtttaaaacctaagttcccggtcgtgatttagcgtgtcacttatccatgttatgatccatgtgattttggggcctgtataatgttatgcatatgtaattacatgtttagcatacatgttgttattgcctattagagtacgttgatagcaataatgatatacgtagagttgtattgattattgataaatgtatgttggctgaaatactaatcgatgctgtcacatcaatatggcta

SEQ ID NO: 135468 - DNA, 762 bp, Cannabis sativa
  modified_base (415)..(421): a, c, t, g, unknown or other
  modified_base (662)..(669): a, c, t, g, unknown or other
caacgatcttttatatctattgaactctagattatattcataactccacatgatctctatagcactttggggtggataaagcgattggcatatgtagttcattttgaactctagaatatactcaatacaccataatatctctatggcacacatattttgataagacgtggatgtaatataatgaacatgattagaacttattcttgatcctataattgttccaattaatatgttagtgtagtaatagaaatcgataccaatgaagttcttggacatagtatcacagtaccttatctgagtgggagaatttttaaattccaagcccatgttaatttggatgacactagtgatagcctcctatgttatgattatgatatgaactttagaatacagctgagaaagtaaatctaaccannnnnnnggatagaaataacttatcaaaattttgaggataagataggagaattttgcaaagtctattcgaatgacttggggaaaaatacttgatcctcatgaaatgttttatggtttctcaaatgattacttaatcataagcaagtattttacattaatgttaatactagaatgctatgttgatgacctagtctagaaggaacttatagtttcagactaagacaatatgtcacaacaagatgtccctnnnnnnnnatagtaagaggctaagtgtacactagtgtaggaacttaacaagactcctactgttgagtgggagccatctaagatgtaatcaaacaaggaaca

SEQ ID NO: 135469 - DNA, 849 bp, Cannabis sativa
  modified_base (106)..(118): a, c, t, g, unknown or other
ttgtgattcaaatttaaatttactgtacatatataaaaatatttaatattgtgattcaaatttaaacgcactgcatatatctaaaaatatattattattattattnnnnnnnnnnnnnttattattattattattttttcaacttatttctattatattatatttgtcttatattaaatgtgaatatttaacgaaaattgttagtttaacgatctttttatttttcgttaatcgattaaaattaacacagttaaatgaatcaattaattatttattttttaaaaaaattaagactaaatttaatttatttattaaaatataatttagataaagtattaacaaaattagataattattttttatatatataaattttaatttaaatttaaattagacgttaattcaaataattaatcatattttatatgaaatttttttagttatttacttaatttattatttaaaaaaattaattaaatagatacaattttttataaataaatttaaaactgtattttatatatttaaaaaaaatataagaattgtattaaatttaccttttattattattattaaatacaactcaacacagtgaataattacaaagaaatagaaaatcacttctagagtgatattcctattacattcctttacgcatactcattatgatcttggactctctctctaaacttgactctgaatctcaagtatgagctttaaagattggaaatcagaacttccttttagaatagagaaacacctatttatagttgttacatttaatctcaatagattctctaagaaattaaatcatataatcgattcaatcacgaaattaaaaagttgttt

SEQ ID NO: 135470 - DNA, 854 bp, Cannabis sativa
actttatggtaacagaagggatagttttgggtcacaagatctcaaaagcaggaattgaggtggacaaagctaaggtgtcaacaatagagaatttgccgcaacaagtttctgtgaaaggagtcaggaatttcttgggtcatgctggtttctaccgaagatttattaaggacttctcaaagatctctacaccgctgtccaatttacttgttaatggggttccttttgaatttggagaagaatgtttgaaggcattccaagttcttaaggagaaattgatttcagcaccaatagtcacttcaccaaattggaagttgcccttcgagttgatgtatgatgcaagcgactatgcaattggagcggtcttaggtcaaagggttgacagggcgtttcacacaatctactatgctagtataaccctgaatgatgctcaactaaattaatgccacaatggagaaggagatgatggcaattgtgtttgcttgtgataagtttcgcccctatctaattagaaataaggtggtagtctacacggaccattcagcaattaaataccttatcaccaagaaggatgcaaagccaagactgattcggtgggtgcttctgcttcaggagttcgacatagagataaaggataagaagggaactgaaaatctggtagcagatcacttgtcaagactagaattagaagagagcaagaataccaaagaggtgcaaataaatgagaaatttcctaatgaacaactctatagtgtgaggaaaacctgatggtaccgtggtatgctgattatgtcaacttcttggctgcaaaaataactcctcctgagctttctcatcaacaattaaagaagttcttt

SEQ ID NO: 135471 - DNA, 629 bp, Cannabis sativa
tcacattgcctgaaaagtgtgggtataacaaatgacctttaagaagctacacgaccgaacgtgacatttgaaagaatcccacacggccaaatatcggaaaatttgtgggtgtacacgtcgggaaatttgtagattttgaaacaagtcaaagaccccaacactggaaattggcacacattgaccgaaaggtcccaaatggaggttaaaagggagacagcggaagtatctgtttggatcagcagcactttggttcgcaacggatcacaaacgactttttggaccggtggcaatttggactcacaacggatcacaagtggctctgatgccattttattttcataagagaaaaacagagaacaagaaaagaagaacagagaaccagaaatggagaaatgaaatcggaattcattcatcaaaggagttcagtacattacatgctttatatacacaacatatatataacgaacttaacaaactctaacagacttcctaaccaattaaccgaatgcactacatcttataacaactaacttcaacaataattttatgttacttattaaaaaaaatagggtaaataccattttggaccctgttttgcaaaaattaccaattggaccctgtgttttgtt

SEQ ID NO: 135472 - DNA, 748 bp, Cannabis sativa
  modified_base (127)..(138): a, c, t, g, unknown or other
taaacatatatacctgccataaacagtgtgtataatctgattctatcatgacacaatcgaatttaataaggaaaaaggaaatagtcaaagtttcttttaaaaatcaactttccataagagaattgcnnnnnnnnnnnnaagtttccatacaagaaaagtccagctgaaaatacaatctttcctaacattgaaaagagcaataaaaaccgaaaaatcaaggtgagaaaatcggatcagaacacaaagcaatctcaccataaataaaaaatattttggcatctaacttgccaaaaaaggactttacagtttaattagataacttgtaaattgttttttcttttatttttctatgtttagttagataataacttgtaaacacttggactagttttaaaatatttatgtaatagattatttataataatgtacatgtatatgcatatacatttcgttatatgattaatttaatttttaattatatgaaattaatatttaatataaataaattaattaataaaaataaacaaaatattttaaaaatacaataaaaatatttaatttaaataaaatgaaaatatttataaatctagaatgtcctgacaacgttagttatttgcaaataaatgacgacataaaacactaagtgtgacgttggttatttccaaataacggatgcaatagaagcatcattatgcaattctctgttggaaatattttaccaggatctagatttactaaccagtatgtt

SEQ ID NO: 135473 - DNA, 745 bp, Cannabis sativa
  modified_base (663)..(703): a, c, t, g, unknown or other
atacatattcaatacaacataatatatatttaataatatagaaaatccctaaaaaaattataaaataaaaaataaaacaatgtacattactaaaattagtagaaattacatttatacattaatatacgttgagatacaatgttttctccactaaaaatggtggccgaaggtataaccaccgcaaccactacctttacttttggtttaccgtaaaggatgaggaaaaatgtaatcttttcaggtatatggtttaggtatgaaaaatagaagatttagaaacaaaaatgagctaaaatggtgaaaaaatagtgaaatgggggtgatttttcgtggagcttggcggagagggtttggggtttctctggtttgggggtttctaggttggctggtcgagccataaggtgtggcccctatggcgtcggttatttcgaaataaccgacgccataaaaagcgtaaaatctcctcccaaaaatttcaaaccctatggcatcggttatttattattatgctgaaaaaagtgcctctaaaggcttgttttgtagtagtgccctgaccaaaaagtaggtttaactaacaaatcaaataacatgtataatactcttgagatcaaacctaagcatgtcaggattaagtgtttgatattttaccaggatctagatttnnnnnnnnnnnnnnnnnnnnnnnnnnnnnnnnnnnnnnnnnaaataatgaaataaacacataagactttaagaaaaccttaca

SEQ ID NO: 135474 - DNA, 546 bp, Cannabis sativa
  modified_base (518)..(521): a, c, t, g, unknown or other
gtcaatatgtacattgccggagaagacaatcacctcatggcagctctaacttttccttgcccttacctgcaccacatagcacctgtgagtcacaaagactcagcaagaaaatcaataataataatcatatagtttattattcgaatattatcatttatacacaatcagaatcaaaccattacacattatttataagatgaaatttaaatcactaccgacatctaccacgaataagcatcagtatacaaatatcttgtaatacaaaacctatattccaataatatgaatcatattcatttaaaaatataaattatatatacgctacttcataaagtaaccatcttcattatatcacattgcctaatcaggcaagtcgatgctttaatctaataatcatgaattgcgttgcttaattaggcaagcccgtgccatagcttgacaccatatatcgcataaatgtatcacctaatcaggtgagctggtgccaaaaactttcacccatatatcatataattgcnnnncctaatcaggtgagcccgtgccaca

SEQ ID NO: 135475 - DNA, 810 bp, Cannabis sativa
  modified_base (68)..(73): a, c, t, g, unknown or other
cgctcttccgatctttttagaaagttcatatttaggttgttaatatacatacttgtgagtagatctannnnnntggtaaaataaattccaacatgctagccatagggcaggggtcgccagccaacctccttgaggtggttggtttgtcattcatcgtctcgcttgaatgcttggactcctcatttgttcgattagcttcagggaaagacgtcattttcaaagattgacctgcgatccgactatcatcaactcagaattcgggaagaagatataccaaagattgcattccgaaccagatatgggcactacgagtttctggtaatgtcacccagattgactaatgctcctgtggcctttatgcatctcatgaatagagtattcaaggattttctcgataactgcatcgtagtatttatcgatgacatccttgtatactctcagtcagaagaggagcatgagcatcatctacgaatggtatcgcatcgacttagggatcacaagttatatgcaaagttcaaaatgtgtgaattctagttgccagaggtatttttttagggcatatcatcgggaagagtggaattatggttgatccaagtaagatcgagtcagtgaagaattggtcgagaccaaaatcagtgacagaagttcgaagtttcctcggtttagcaaggtattatcgatgttttgtcgatggattctctaagatctctatgccactgactgagttaggtaagaaaaatcagcgatttgtatggtcaaacaaatgtgaaacaagttttcaagagttgaaactgttggaattattttacc

SEQ ID NO: 135476 - DNA, 573 bp, Cannabis sativa
gaggacaggtcgactcatggtatagtaagtattttttatattatttgctattggattacctacctaggctattataaagtatgttggaaaaagtagcatagtgattattgtgatgagaatatgtgtatggtatttgcatattgatattgatatccgtctgagttctaaatggttatgcagtaagggaaatcaaatagtttgattagggagctacctgggctaagggataaacagtaaggaagagaattctttatttccataatgttagaaacatgtaaattctgctgtgcaagatatgattagacaacaagggaaaaacatatttgagatctgaaagaacaataggctcatcttgtgtctgttcttatactaccggcacttcctgttctaccactagatgtggtggaatatatgaagccaacttactagtagatcaggttgtaaaaattaaatgaaccaccaagtatgagacagaagaaaaaggttctagggtggtcaggataacggtcgaggtgagaataagaaatggtgaccttatcttgagtgttcaagatgcaaaaatgcgccatttga

SEQ ID NO: 135477 - DNA, 680 bp, Cannabis sativa
gaaagtctagttcatggaaaaccttctctttagaattccatgcacaattctcctcctcacgccaacttccattgcatctgggagacttggtcgaagttaagcaacgatcaggcaagcctctccgagcatatatcagcagattcatgacggaggcgaccaaagtttcacggataactgaagatggaaagttgtctgtgatactgggggcattgaagtccttgatgaactttggaaggatataaggaagaacgggcccgtagactcaatgagtgattttcttgactgtgccaaaggcttcatcaggctcgaagaagccattcaacgagcgaacggtgagcaaaagcctggcaagtcaaaggctccttctactggaacatcttccaaactttcccattacccgaataattcaagttcaagtggtaaacattccaacaacaaccacaagcaagggaatgggaaaaagggaaagttcgccggcaaattcgaacaagctccccgggagaatcatgccaagtacactgcattcactattctgactgaagatatagaaagtgtttacatggcaactcagtcggtgaccccatataagaagcccgggcccatgaagaaagatgccagcaagagggacatgacaaagttttgtcgattccacagagactacgaccacgacactaatgaat

SEQ ID NO: 135478 - DNA, 508 bp, Cannabis sativa
aacgacaatcctccaccaacaaaccaaagtaagaaggcatatgaactgagctagttattgcttgaacaatcattaacgaatcagtctctatgaacacatcctcccaccctttcctcttaatccagcttaaagcttccttcaagccaacaacttcagcaatttcgggcaacaccacaccaaatttcgaatccgagattgcttctaaaagttgccccgtatgatcacgcgccacacaaccaaaaccaaacattcgttgagtttcaaagatagcaccgtcaacatttaccttgatcttaccactcaaaggtctgcgccaaatgttgctgttagagagaacaccagtagcaaatgtagctgctgtgttcttagttgcaacgcgccattgatcaagagcctttcgtgccgactggactacacccaacgctgtacaatttttgttctgccagaagacttcattacgagtcttccatatgctccatgatatcatagcagcatcgactatcacctc

SEQ ID NO: 135479 - DNA, 682 bp, Cannabis sativa
accttactcaaaagagccttcctcttctaacattttctcaggattgcagccattggatcctgcatttctttccttgaaccctttttctagctttcgtgatttggagcctactacacttcctcctttgcatttttcagaagtctgcagctgtccttgttttgagcaagctgcattgggccttggaacttatgctacttctcgcgtcgttgttgcactgcctctggctatgtgtcctttcgctatttttcctcccatattcacaccggttgaggcgactaaggaggagcttgaagtatcagagggaagctcgactcagatgacggcggctcattaccccgagattgagtctactgcccaatccgagaacttcgaagaagtccctgtcccaacggatatttccccctcggctttctgtatatctgcttcttcttttcctcaagagttacctcaggtggcatccgagataatacacccctcttctttttccaatcgtcgggggtggcttgcaatgcggaggatgtttcagcaaagggagagtttctccgtgtaaaaggtctcctttcctccgcttctttttttattttccttgtaggtttatgtcgggacctttttatgttttgggattgcattatgtaaattttgtacgtttatgccgtcagtggttatgcagtaattttataag

SEQ ID NO: 135480 - DNA, 728 bp, Cannabis sativa
aagtccaagcacaaaatttcacaactccaagcttgaatcaaaccaaattttgacaaattatcaagtgaaagaaaatgaatatagtgagtgggagagggtcggttttggggctgagcaaaaaccaaaaattctactttctaatttgttaataattacattttgttacaaataacacaaatgtcaaaataacaataatgcccctacggccatataacatacatataagcagtcaagggcaataaagtcattattcacatatcacattactcaaataatctttagaatattcatgtatcaataaatgccaatataaaatcccaaaaatgtgtttcggccacgaactcagttggcctgaaattcccaattgtgactatactgcgccgacctgtcagaaaacacctaaaaaaggaaaagacaagtatactatataataatatagtccataagcacgtcacaacattaaaattacagttttaccgctcttgggtcaaaattacaaaaatgtcattggctcaccaacgggatcttagcatgtcatttatcaaattaattcacacataataaattatataataatataatttcatataaatacacatgtaactagttagggttcgctaatctgttatcttaatcttaggatattacaattatcgcctctttatagaaactttgtcctgaaatttacctaaacaactccggatatttctgctgcatatccgtctcga

SEQ ID NO: 135481 - DNA, 1038 bp, Cannabis sativa
gacccaaatactttctttctccagtttcatcccagtgaataggtgaacgacacttcctaccatacaacaatcatagggagccatccttattgtactatgatagttgttgttataagaaacttctattaatggtatgtacttgctccatgaaccttcaaaatctaacacacatgcttgtaacatgtcctccggaatttcaatcatccttttagactgaccatctgtttggggtgaaaagctgtactaaacttcagcttcgtacccatggacttcaggagacttttccaaaatttggaagtaaattttggatctctatctgaaactatggatttcggagctccatggagacgcactatctccttaacatacaacttagcatactgataaaggtggttttcactggcaaaaagtgtgctgactttgtgaaacgatccactattacccaaactgaatcatatttttcggtagttctaggtgatccaaccacaaaatccatggtgatatcttcccatttcaacttagaaagtgtcaagagttgtagtaaccctgtgggtttctgatgttcagccttgatctgttgacaagtcaaacaccttgacacataatctaccatatccctcttcataccgcaccaccaataataaggtttcaaatcttgatacatcttggtggtacctggatgtaatgaatatggagtggtgtgagcttcatctagaatctctttcttaagcccactatcatttggaacacaaactcaagccttataaagtagcataccagtatcagaaactgtgaagtccttgacatatctagctaagacttcctctcgagttttgattaactcaggatcttccagttgggcacacttgattctttttgttaggtcaaaatgaagtgtcaagttactaagtttgccaacaacaaactcaatacttgtgttgaccatgtcagtggttaactggggagaaattatctttgtactacaaactagtccagggcccttcctactcagggcatcaaccactatattggcttttc

SEQ ID NO: 135482 - DNA, 1078 bp, Cannabis sativa
  modified_base (395)..(395): a, c, t, g, unknown or other
  modified_base (1041)..(1046): a, c, t, g, unknown or other
gatgactgggttgggttgggcagcttgggctctgtcgtcggagagagagaagtcgaaattgagatttaggtttagaatttgggatttttttttagggattaaggttttttttttaatatttagaactgggctgggccgggcccgacccgaaataatatacaccgggccgggcggggctgggccagaagcccgataagagcccgaataattcaggccacagtcggcccgtcgggccgggggccagggccggcccgcgaaaaataacccagattgacattcctaattttaatccatatattgtaataatgaaaattaattaattgaaagttggtccaaaattaatttaaaattaattttcaactttaatttaattttcaatatttaattatcgaaantcgttatataataaaatatataaaatttcgaaaattataaaatataataaaataaatattttgaaaaatatctaatttgagttgttctagaataactagatttttcaacttaaattatttttcaaacaaaatttaattaaatatctaataaagttgtaaccaacttaatttgagaaatgtttcattttaagttgatccaaaatttaaaaaaaaaaatccaacttaaaaaatatcttaagaatcttcaataactaattcctagaattcttcaacttaattttgaaatttttttaaaaaaaataatatcaaattcaagttgatcccaaattagtttaaataactaatttttaacttaaattaaaattcaaaaatattcaaatttaagatgataaaaaaaaaatagttagaaataaccaacttacaacttaaataggaatatttaatgagatattaaaattaagcttcagaagaatctaattagttacaattaaatatttaattaaatacaagaaaaatacatatagtttatctataaataatctaattaaactaagtgtgtgtttcttaaattaattttaaaaaatacgaatgaaaaataaattccatttactttcaaattaatttcaaattaattatgttgctaatnnnnnntattagattaaactaatttaattaacctagca

SEQ ID NO: 135483 - DNA, 510 bp, Cannabis sativa
tacactacacctaacttgattatagactctgtgtcacgcgacccctaaacacctatagtgatattgtcaatactgcgagtgtacatcggcacaacaaagaagaaccctatgtcgatatcggttagtgatttcgttacgaaactagtgactctgatacactacacctaacttgattaaatactttgtgtcataggaaccctaaacatctacagtgatattagtgtacatcggcaccactaactagaaccctatttcagtatcggttagtgattttgttacgaaattggtgactccgatacactacaccaaactttattacagattattcacgtaacgagtgtacatcggtaccactaagtagaaccctaattcggtatgggttagtgggttactttgttacactacacctaacttgattacagactatgtgtcacgggacccctaaacacctatagtgatagtgtcactactgcgagtgtacatcgccaccactaagtagaaccctatttc

SEQ ID NO: 135484 - DNA, 829 bp, Cannabis sativa
  modified_base (504)..(506): a, c, t, g, unknown or other
  modified_base (589)..(599): a, c, t, g, unknown or other
aaaaacgtacacattagagttatcattttataatttgaattttatagagttataattatatttttttttatagaattaaaattgaaaagtgagaaaagtaaggagaaaagagaaaaatagttttagagcaattttatatgaattaaaaattaaaaaaatgagaaaattaaagagagaaacaaaaaatagctttaaaaaattttagagtatcatatcactgctttatgtctatgttttatatatatagatatagatctatatatattgattgatattgtatgtatgtatataaacgaaatttacaattaattatatttgatttaaattttactatttttttggaatataattttattttctaacattttttaaaatattttatatttttgtagaaaattaaaataatagtaaaatatcaatttgtaaatttatactttttttatagaaaaattattaaaataataataaaatatcaatttgtagatttatgctttaataaaatannnaaattgagagaattaaggagagaagagaaaaatagctttgagtgattgtagactgtcacatcactgcctcatacttctccttnnnnnnnnnnnatatatataaatatatatagatagatgtagctatctaataaaaattgttagtttaacaatttttttttcttatttttttgttaaaattaaccattaaaactaatgctcttaaatcaattaattaatttttttgtaaaaaaagttgtaaatatttaaatttattttaaaagtatcaataaaattaactaattaattttttttttttgtaaatattaatttaaatttgaatt

SEQ ID NO: 135485 - DNA, 578 bp, Cannabis sativa
ttcttcttgtcaacattatccttgtaatgttgcatattctttcctaatgtctccatcagcttacgaaaagcgcgctcgccccacggatacttgaagaataattcaagatcgttaacaaacttcaacatctcaggccaaacttggacatttccctcatttgatactaatacaccttcaatgaaagcgatcagtccaagcttgtaggcatcatctttatcttcgcacctctcgagttggagcataagagaatccaactgaacagaactcttcccttcaaaataagtccgaactagatggtcgttggacttggcgtgtatttcctcgtgtgtaggggcactacccatatgtaagccagtaatgagtccaaactctatccgtgcgaatctcatgtcatttctccctacatgaaaccaaacctcatcctccttttctgtgtccactttcatttttcgtaagaggaggctgtggaccaacccgccggagaaattcaactctccagcttcccaaaagtgtccgaaaggactagcctttactgtgtcaaccaaatccatctcagtaaacttggccttgatatatct

SEQ ID NO: 135486 - DNA, 956 bp, Cannabis sativa
aagtaccgacatgtgttttggtcaaagttttggtttaggtttgggtcatgttatagtccaaggtctgggttctcatcccagtcctggtccgattccaatttcgaaccggaacataaacttggacctagactgcgacctaggacccaaacatagatgggacctagacctaggaattggtcccccaaactgggaccaaaacttgggcctcagaacttggattgcgattcgggacccgaccctagacccaaacctggacgtaggacccacctcgggacttgggatctgggactcgatgcttggactcgacctgtacctcgtgacttgaaagtagaaccgaaacaagaagcggatcgggagccaagaatagaatgaggacctagaccaaaaattgtaatgggacaaggacccggactcgaacacagacccacactcggattctgtgtctgggttcgggtttgggtcttgatctgggtcggggtcagagtcctcgtccgagtttgggtccgggtctgggtccaggtttggatcctgttctgggtctgggttcaggtccaggtccgagttagggtccctggtctgggtccatgtttgggtctatttaggtctcgggtttcgatcccggtctgggtctatgtccgagtctaagttcgtatccagatctcaatctaggaccgagtttgtgtctaggatcgggtcccagttttaggttcgggtcaaggcccgagttctcgtctcggtttgggtcggaaacctagtctgagtcccacatccagacacctactacgggtctgttccaagccctgtttcccggatctcgtgtccaaatctagatgcctgtcacgggtcccagtctggttctggtttaagtcgtaggtctgagtttggattcgggatcgagtctggggtgcggttctaggtcctggccccagtttggtgtcccgagtctggttccatgt

SEQ ID NO: 135487 - DNA, 1575 bp, Cannabis sativa
gcgattcagattggagaaaatgagtcacaatgctgtggtaatcggcacatttacaaaactcatcaagattgatcaacgtttgttaaaatggcgaacaagaatctataggaattttcaaagaaagagaacagaaatattataagaaagagttgaaatcatattgttattggtaaaagtatgagataatgcagttaatacatatgggagtaatgcctttgctgattaaaaatcctttgctaacagcaaaaaatttcacataacatacatatctcatggtaagcctgagaatcgttgtccccaaggtcttgactcttgtcgcatagtgtaaatgagttagggttttgagagtttagttttatttatatatttttgaaagttattgggaggatcaaacctactaacatcacatcgttaaatttaacataatatttttttttatttttaaagtatattctgttaaaccaagaaatactgttagataaccacttttaatatataaagatatatatatatatattttctattattttttttctttaaaggatctatgttagtctccgagaataattgctaagaaaatgagaacattaatgtgacgccatcattctgccttgctactagtagctaaggatataagaaactctctgttagattttttttttacttatttttaaatagtttgataaaattaaggttattttatcttatttgaacataaacctcatagtgttcctcagatccggtcctaagctttggcgggctaggcccgtgcaaaatgtgggcccaaaataaaaaatgtgttctaatttgtctttaagtgaggctgtttttggctccaaccgaaattgttaactaactgtcagttatgacagtccaaagaaccaaaggctatttatagtcattccttctcatttcttgggacaagttaagagagatcctgagatgagttagtgagctagttcagagagaaaagaggagagaaaagaaagttgtaatggcctttgattcttagtgccacaagtgagatttatgtaaattgaagctaggcttcattgagtgattgtgtttgagaacacattagtgaaacaattacttgtaatcgattctttctagctcaataaagatcaaaaccactgagctattttggccgagtagacaggtgacactaaaatcacactgttcgaacctcgttacttctttgtgtttcatctggtttttaagtttcttgtctaatgttctaagttctatttttcaattctttgtgtgtgtgtcaactaattgatcttgatcacttgtcttactatttttgtttgtcttgattatgcatgagtttcatgatcgagctatctatcacaacaaaaggaaaggtcttattagacttttatttaagtacatttaagtgtattgtaatcaacaaatattcatagcttggttggttggggtgtgtgacacattacataatggtgtgggtacaagtcccatgacaatctattttcaatatttttttatatgtatttttgaaagtgagggctccgaaatttaaatggccttaggtccatatatcttagggtcgat

SEQ ID NO: 135488 - DNA, 505 bp, Cannabis sativa
attgttagatttaaggactttgtccaattttactaacatggatgaaagttcaggggtacactttgttcatgtcaaagtttaaaagacacgatttactacgtatcaaagttcaggatgtatgatttagttttgcacaatcatcacgttagtaaaattgaatgaaattagacagaaattctcaaatttaataatctcaatataatttgagaatatcttttaaataaaaatttggagacgccaatttttttttgaaatgaaatagcaactttattaaaatttagcattcagagtacaaaaggccctgtagatcaggcgaaatattctgtaaatgaatgctacaatcagataaaaattggaaatgcctagcaacatagtgggcaacttgattagatgatcgtctaattaaatgcaaagaaatatttgggagatttaaaagtaaaagtttacaatcattaacaaccaacccaaaagcagaggacatccgatgagaggcacgaatggcttg

SEQ ID NO: 135489 - DNA, 751 bp, Cannabis sativa
aggccttagtagggtttacctcgattatagttaccgagtctaatctgattatgccttgcccgcataaccctattcataaatgcataatttagacgttatgttctttcaatggtttatcctgatgatatatatcaggtctaaccaagttatgtcttatacacataactcttgacatatatgcctacattcaatatataccataatatataaaatgttagggaaataaccctaactcgcataccaaataattactcaaataagatattataacatcctcaaaataacacttatggagggtaataatcctaatccatgctttcacttgattaacaataatattttacatcattactttcttacttgcatataaattctagggtaataaccctagactgcattattatcaaactcaaggtactaatttattgagtctaacttaattatgccttgagcgtataattttttattccaacatatttagcatggcataacactcaaaatcatttaattactaaggtaataatcctagactatataaccgttcattttagtgtaataaccctaatcccagttcttatctaatcacaactataatataaaacatgggcgccaacactcttaactctacgtgcaaactcctatcttacctgatttcccacaaatgtggagattccaattccccggatgctcctgaccaagtaccggtaatcctagtcacaaattttttggattcacaaataggattaatcac

SEQ ID NO: 135490 - DNA, 886 bp, Cannabis sativa
tttatatacaaagcaagtgtccattcatttacacagagattgaattcattatcaatccgtttgtacattgaattacaaatattaaactaaaaaacgtaaacaaaataaatgaagaacagtttccattttaattcactaaatacaacagcgtatgtgacttctatagcgcgagttggctgttcatattcttacataagctcgtaggcttaaaatgcattcgggactactcgagtctaggatgtcttcgtcctcttaaagtcatttatacggacatcttgtaatgagccaataaactaagacatgcgagtctgtaccggtttatcaaggctgtcgggtcaactggactagctcgcagagtagagaattgatctctacgttttcgcaggaggatctcggggatactcgcatctaccctggtacatgcgagtttcaaactgttccttggtcctacattatgcaagccatacgaatgcgattagactcagtcatattcgcatcatctcgctgaatttagttcaggcgaggttcatattcgaggggtctctcatcgacatctcagctctcctcgaggaaagtgaatacacgtgtcttttcaataggagtccggtctcgagtttctaggtgagaaaatctcactataacgaaatgtatccaattttgtcataataactctagatcatgttattattaacttttattttgataaaaaatcaatttagggtactgctttatatcatttaagaaaatacaagattcaatttattatttaacaaaatagatagttcatttagtaatttttgtaaaacaaaaaatccaaaatgattttatcgttttaaaattaaaaaaaaaggttaattatgattttttaccctgaactttaatatgt

SEQ ID NO: 135491 - DNA, 520 bp, Cannabis sativa
aggtcccatccctcgaaaattcatgctttaatcttgtacggagattaagtgatttgttataacctctcactattgattccatgtgaatcttgcatgcaaaaatataatgttcactttgtgaccacttttctccttaagtacttaagctttgaaaattcaatcacaaatgattaattttcactcaaatcaaattctcaataattttgataccaagcatatagaaattaaacactaatttagacaccaaacatgtctaaattatacagtattttaagacatcaaacatgtcttaaacttttcacgttggagtatcacccccacacttttacttttcattatcaagaatatatcttgattttaaaatatagaagaccactttgtctctataatttttcttaaatttgatttccttcttgaaatgtactttaccaaaatttgacaccaaatatgtcaatattttcacttatgcacatagccaacttgatttagaatttgaattcaaaattaaataaattaatca

SEQ ID NO: 135492 - DNA, 538 bp, Cannabis sativa
tggtggacaagttggtggagtcaaagaagcacattgaagaccctcttaatctgactttggtacaagaggaggtggtggaacaagacggtaaagaagcgaatgagtatgctacgtggttcaactcttatggactgttgaatagaatatactatgaagagttaggagtcatcccagcaaagtcagccccatctactgaaaatcctcctcaattagagttaaaagtcctactagatcatctgaggtacgaatatttggaagagaataagacacttcctgtcattgtggcagagacaggtaagctattaagagttctaaggaagcataagaaaaccattgggtggactttggcagacattaaaagaatcagcccctcaactgtaatgcattgaatcctaatggaggaaggagtgaagcccaccatcgatgcgcaacgaagattgactccacctatgaaggaggttgttagaaaagaagtcttaaagtggttagatgctggggtagcgtatcctattttagatagtaaatgggtcagtccagt

SEQ ID NO: 135493 - DNA, 599 bp, Cannabis sativa
  modified_base (436)..(437): a, c, t, g, unknown or other
  modified_base (521)..(528): a, c, t, g, unknown or other
agatcgctaggtttcggattgaaaatcgaagaaaatgaatataggagaagaaagttttattgaatgagagagaacgagggtttcgttcgtcgttctttattattactgttatgtttttaaaacatataatatatataaaaactgataaatatatatataataatataataatgataaaatatcaataatactataataatattaataaaattttttattattattagttatcttattatttctcagctattaagaaatctacatttttaaggtatttggtcaactccgagtactttaaaatcaattaatcctaataatctcatcaatattttcaactaaaactgttgtgacatttttggctttcaatcgggtctctagggtcgacgaacctgaaaatatttttatttcacatataactcatattatatccacgtannttcaaataaatcttcgtaattaacaaattacgcttatatatccactcatcgagtcttcatggtcgccgaacttgaaaatatttnnnnnnnncatatagctcatattacattcacgcatgctatattaatctttataactaacaaattacacttatttactta

SEQ ID NO: 135494 - DNA, 520 bp, Cannabis sativa
gaaagttgcctcttcctccaggagtaggtggtcgagaggagaatccatttccaccagagtggttgttattgccaggatgatatccattgttgtttgaccttccaccggtagcataagggttccagtgatctttattttattgatttgacgaatttccttgagataaaaaattagcaagattcacagaagcagagtcaagatctttatgtttgcgttcaatttgatgttcttgagccaagagtagagcttcaagagtagtaaattatagaggttcagctcgagaatttacaaaaataacaaaagtgtcataatcaaaggatggaagtcctcaaaaaatggtagcaacatgttttttatttgaagtagtaagtccaatagaattaattttatcaataagagaacaaatcttgagtaggtactcattgagagtaagagctcatttcttgaaattctgcaacttagtggtatattgattgatcttggcttctgtatgagatgcaaagtgttgggttttatgccc

SEQ ID NO: 135495 - DNA, 530 bp, Cannabis sativa
aaatcctttagaaataggtaaaataagctattgtttacatattaaattaataaaatacaaatgactaaaatacccctcaaaaatagatatttttactctatttttaggggctattaaggcctaattcgtggtctggcttactgtccacgtatgaaagttgagcaccaaaattctattaggccaaaggttggccgaccatgcacctgcaggatgcatgctggccgaccatgggatgtctaaaagttggttggcctatgctagccataggatcggccaggggtggccgaccgacccccttgaggtggttggttcgtcacttcgtcatcacgcatgagtactcagaccctatgttggttgaagtgctaagtaaatgacttggccttcttgttagtgagctctattgtcatgtggcactgatattggcaacatagatatgccacgtcaggtgggcaaaaattaggataacatttgcccctcaagtctctatgcagacgtctgtgcggatagttggttgataactctaagattta

SEQ ID NO: 135496 - DNA, 508 bp, Cannabis sativa
attgaaattataatcaaaataaaatacctaactgaataaataaccaaaatttggtcaatacataaattttgtttaatttaaagtttagttgcttatctcttaataaaatataaaataaactaaaatgtagattttcaataacgttaatcttcctttgtgatatgatgttgcttttgattcatatatatatttttaaagtaatttgaatgttattaagacagaaaaatatgaaagtatcttaaataatttgacaacataatgttacctaaattaaaaaaaatatatatatatatataacatatagttaattttgtgatgtttaactttaagttattattatttagaaagaaaacaactctatagtaacaaataattagtagatatattgatttttatttaaatttatagtttagttacttatttattaacaaattataaaataaactaaaaggttgtttttatttttgtcatattttgtttttaataataataataatatatatatatc

SEQ ID NO: 135497 - DNA, 545 bp, Cannabis sativa
acttctaaagctcaaatttttcttaaactttgtaaattaaccaaaattaatcatttctttgagtgattaattatgatttctcctgaagtaattggtgatcctcgttacgatatatcaccctatagatatagttatactactcaacctaacacaatagaagaagagccacatgctcctttctttaccattaacttaaatgccaagttcattcttgttccacacctatctattatggaagatgaagatgaagaatctttattcgacgacgacgctggaaatccaactgcttttttagaaaatattggatggatttcgtacgagacattgatgaagagcgacgttactgaaaccatagtttacgttcaagacatgcttgctgcgatctatcttccttctctctcttatattgccgatcgcattattgattgctgtaaaaatatgataaacaacaacgattatgatcataatttgaatgaagaagtcggtgttaatatttccgttgaagttttggtttatgaactacctcaacttgatgacgacgacga

SEQ ID NO: 135498 - DNA, 767 bp, Cannabis sativa
ataaaaattctcaaatctggctcaagagacaaacccaacattagtactgcaacaacgaatgctgtaacaataaaagcaagaaattcaaaccacaatgggttgaatggaaagaggaaagacaagttaagagattcgtcaaaggacaagagaaagtagaagaaacacgagaagtatattttgatatacttagtatatatggacctaaacgaaactcgtgatatcatttatctcgatggtaattagctagttcacttggagtgttattgatctcaatgcttgaggagagttctctagagttatgttctccaagacttcaatcttcaagtgaacttttatgatgagagagtgagagttcgggagaatcaaaatcgggggctattatgggtttaaaatctcttaacccaaggtacacctcatcctaaccataatcgagttaagtttaaaatacaaaacgataataaaataacatttcaaacaaaacgataataaaataattaacatttcaaacaaaatatctaaaaaatgataattgctaaagatattcactattcacacgtgctagcttgtttcgtcataaagagcacattaatattgatgaagagcacatgccgagatcatgatgttggtgagtcgtgaggagcacgtgttaaggtgaggaatatctttgagacaaggccgagatgatgcatgtaaagactgcatatgattaataccttgaattattaaataattagggtttatgtatgagattttattattattaataa

SEQ ID NO: 135499 - DNA, 562 bp, Cannabis sativa
cctttcttctcatctttcgagcttcattccgattatcttggagttcccctgtgttgaggtaggcggctatcggtgtcatccagttcggggaaatatcaatcattttgatctcttctgtgccagtgatgctaagctcttcgaggaactggataggaaccaagttcgccttatcacttacattatttcttgccaatcaagctaacgcgtttgcagttgtgttttcttcccttggaatttgtctgagaccgtagcttttgaattctgcaagcaagtcacgtattttgctcagatatgctatcatcttttctccctgagcctcgtattctccagatacatggtttaccaccatctgtgactcactgtagatttcaatgtgttcgactttcatctcccggctagttttaggccagcgattagactttcatacttggcttgattattagatgctttaaatccaaacttgactaaagcctgcaggtgtttccccccaggcgtgacaagggtaattcctgcacctgatagttgatctgtagccgacccgtctacatgtagtttccaagtc

SEQ ID NO: 135500 - DNA, 569 bp, Cannabis sativa
cctaaacccggttatcttcttccttggcggttaaccgttaagaatggagtccaaaaatggtgaattctgtttcagaccttaaagcttcgattcttcatgttgaaactgatctttggggtcccataaacttaaacttaacctcctttgatctccgaaacaacttaaacacgttcaaattcagatttgtttcaagaatggtattttgaacgtaataatggtttttgtcgaatggtgcgattacaaaccttctaatcgcatctaaaactcctcttggatgaaataaaactcaatgaaataatctaaggcagcccaaaaactctcaaacccaaaaaacccgaaatctcactttctcaccactcggtttcgttcgacccactgccgctctctctctctctctctcaatctctgcctctcactactgtttttaaaccctaaaccatcttataaacattttatatatatagtcctaaccctaatataaccctagattatcaacttaaaaatttaaaaaacaaaaaaaaaataatatatatacatacatacgctgctgataataagaataatagtaa

SEQ ID NO: 135501 - DNA, 1395 bp, Cannabis sativa
agtctgattctttgctagcgcacttatttcttctttcatagctcgtagccacttagagttttggtatgcctcttcatatgactctggttctttaaaacttttcttcttcagctacagtagcattagcatatttttggatttggcttccgcgctcttgttgatctccgaagctctggttgactatcatcatgtacttctcttggatgcacccctgtttgccatggattctgaggtgcctcgtcctcagtgttttcttcttcaactgtatctttagttggaggtaactcaacaatttgctcccccattttcttctacaattcgtcttccatttctttagaatctggtaatgcttccttttgcgctgaccaccatgatgatgcctcatcgaagaccacattccttgatgtataacactttccagttgtagggtcgcaacatctccaccatttccgtttgcatgtcgtatcccacaaaaatatatcgtatcgccttcttgtcaaattttctacgtaagtggcttggcacgaatacgtagcacacacagccaaatactcgaaagtgacttactataggtttacaactccacagtttttcaaagggtgaaacaaaccctaacttagcttggaaaagcctattgattacatgaggggctgtcttcatatataccttcagcccaaaatcaacctggaacattcttcacatgtaccatgcttcgacatgttttgcaagatggcaatttttcctctcagctactccattctgttgtggcgtatttgcacatgtgaattgatagcgtatgcgacattcttgaagatactcagaaaatttatttgaggtatattcgccaccgttgtttgttcggaggcatcgaattttcttctcgacttcttcttacactatttctttaaactctttaaattttgaaaaaattttagatttttcttgcataaagaaaactcatacgtaccttgagaagtcgtcgatgaatgtaaccatgtaccgcataccgctgattgatggttgtttgactcgcccaaacacgtcaaaatggactagctctagtggtgctttagctttgaactttgaatcttcatacggtaattgatgcgccttaccgtattggcagccagcacatacggtctctgtcctgacctcgaattgaggaagacccttcaacatagacttcttcatcatcaccttgagtttatgatagctgacatgccctagccttgcatgccacaaatctgttgtttcattctttcgagtcttgtctacataagcagattctgcgcacattacatagacagactctaagcgtcgtcctctcatcatcggtgttccagagatttcaagatcttggtagatcttgacatcttgaggaccgaatacgacatg

SEQ ID NO: 135502 - DNA, 936 bp, Cannabis sativa
tcttaagtcaatacaaataacgaggattaggctattaccgtacagatcaggggataacctctataaaattcttgtttctttattttgctttactatatatcgattacaataaatcacttatcgcttactaaataagactcattgtcgttggctaaaagcgaggtcaacattgctttcattgagagcagaatcaagaatcgctctttattcaaaatctaaccacgagaacgatggtggtgcagacttgtaagggcttggttgatccaacaaatccacagacggtggatcctacactgtaaaacctaggaaacaccagggttctgcccgctagtaatcttgaatagccagctaatgtgggtcacggtgtaatgactcctatagatgaaatcgcgcgtggtgtgcatgagactggaaataacagttctccacccaaccagggcattcataacacagccgttccgcctggaaccaacgcccagacgaccattggagatgctactgagttacaaaatctcagtgacgctcttggactcatgcagggtcacaacaatacccaacatcatgatcaagaagaactccgcgctgtggtaaacctcgcgttcgaggaacaaaggcttatgtttgccaagtgtagagacaaagagatggaagcattaagggctcatcatgcagagattgaaaatcgtagttggcaagccaccgtgctgatatgaaaagcctaccaaactgtagatcagaaaccttcgaatgtcattcccctaggtgaaacggacaaaaatccagcgatgaatacttcccagactgcaaatggtcggccgtccaatccccggtgacaagtcccacttgtgggcctagcggtaggcgggcagaccttgtctagtaattcatcaagagaagtcatacctgatggttccaaccagatcaatggtgccattc

SEQ ID NO: 135503 - DNA, 565 bp, Cannabis sativa
tcaattcatgaacttcaggttcactataatttgtatttcaatgaattttttataaggtcatatacaattacaacaacatataagtaataattacaagttttatttttatatacacgaataaaataattatgttattttccaaaatatatatactcttcaggagttacaattatgtatatcaaactttatatttcttcaagaatcaccatcatcaatttaatgatgtgtataatttaaaaggtacatgacaacttcattatgtagctgtaatggtcgaatagatataaccataatttagcactcatattttctcatatctttctaacaagtcgtttaatttattaataaaccattcaacagtctaattatcatgacttgatatattatatatttaaatgtacaactagtacatataataagttatttattgtcactttcttcgggaaagtttttaaataatcattttgtcattctttatcactatgattttattagattatattggatcactaacaaatattagcaaattatgtattaacttctgggaatatggaaactaaattaa

SEQ ID NO: 135504 - DNA, 546 bp, Cannabis sativa
aaaaatcaaacttactggaagattcatgatgaattattgttttattactcttttgataaagtgattgaaattataaaagttaaaaaggtacatgctacggatctattcatgggatttttacacctgatgccctttttaccattttttttacatttttaatctattttcggtttctatttttttctccaaaaaaaaaaaattaaaatatatgaggtgcgaaagtaaatatttttcttttatatatacaagaaaattaagatgcccttcgcgtgatgttgtccaatatttttttttatctttttatatatatatggaacacttcttaatgggtattactcataaatggttattaaacaaatttaactataaatattaattttaaaaatatcaaaccatcgaattttgatctaataactaataataaaatcacaaatatgaatttctatgcttaatttaactacttaattataaaaaaaaaatatcaaaaaatatctctttttacactatattaaaaatatgatcatacaaaaatatttaactcaaagt

SEQ ID NO: 135505 - DNA, 810 bp, Cannabis sativa
  modified_base (39)..(42): a, c, t, g, unknown or other
tgaaaattattaatttttaatgattgttttatcaccaannnncacatgttgaagaaaatattatatcttttggttgactatatgtgtaattattcgcccaaaggtagtatttataaatattagtcattctatgaagtgagttaatattaaatgtatatatttttattatttgcccaaaatttataatttaaatatatatatatttattattattttttggcttgaattaatatatatttttttaagaaatttattttttcaaaggtaataaattctaaaatgatatgtattttttctttattgttaacttcatgaaggtagatcatgtgtatattatattctcaccccagaggagagtttatactgaccagttgactctacaatagtttctaatgcattgctcatattgcttaatcaagttttaattttttgaatttttcagtctcattttttgtgataacaataatgcttccatccatattttgaatgcgtccaactataagatatgtaaatgagatagatgtggaatttactttaggcataatagatttggacttgtgcctacgagaagaaaaatctactgatcttactgacaccagtacagttgcccagagaactcttcatgcacattaatgggaaaagtcaagtcgtcttagtcttcttattatgaaaagatcccttcctgaacatctattgagtgttttgcgagaaactacaaatgcaaaagaatttttcaacgatatagaaaaactatatgacactagtgaaaatgctaaaaggttggacatcttatggatgaaatgacaacca

SEQ ID NO: 135506 - DNA, 1151 bp, Cannabis sativa
  modified_base (980)..(987): a, c, t, g, unknown or other
cgaagaggcaaaaaaggagacccttggattctgagagacaaggggcactaaaacaggaagtggataagttgttggtcatcgactttatacgcgaggtgttttatccctcatggatagctaatcttgttcttgtcccgaagcctaacggaacttggaaaacttgtattgatttctctgatctgaataaggcgtgcccaaaagattattttccactactcaggatcgtccagttagtggatgcaactgctgggcacgagcttatgtcatttatggacgcgtattctggatataaccagataaaaatgtatgtccgagatcaagaacatacaagcttcgtaaccaacataggactctattgttataaagtcatgtcgtttagactgaagaatgctggggcaacatatcagcgattggtaaatgaaatgttcgcaaatcaaatcgggcggaacatgaaagtttatgtcgatgataggttggtaaaattaataaaaagtagggattataccatagaccttgcgaaatgcttcaagatattaaagaaatataacatgaagctaatcctaagaaaatgttcctttggagtttcatcaggaaattttttgggattcatagttaacgcgagcggtatcgaagcaaaacccgaaaaaatcaaggcattaatagacatgccatcaccgacaaagcctaaggaagtacaagccttgacaggaagaatggttgcacttaatagattcatttcgaagtcaactgataagtgtgtgccgttcttcaatatattgcgaggcaacaagaagttcgagttgacaaaagagtgtgaagaagcctttcaaaacataaaaaggcatctagcgacgcctccagttttggcgaaactaacaactgaagagatgctattcctctatttggctatctcagaggatgcaattagtgcaactatagtgtgagaagagggtaagcaccaacaacctatttactatgtnnnnnnnnggttactaggggcagaatccaaatttccccttctagggaaacttgctttgtggatagtccacgtgtctcgtaagctacgaccatacttctaggcgcaccccataaaagtgttaaccgatcagcccttgagacaagttttatcaaaaccaaatgcttcgggaaga

SEQ ID NO: 135507 - DNA, 515 bp, Cannabis sativa
ttatatattaaacatgcatttatatatatacatataaataaatgtcagtctagtgcttgggtttaaaaatgaagagaatgattggtattattttttattttttgttttcaaaatattgtttttagaaataagaacaaaaaatagcctttgaagtttttaaaacatttggttagtgttttttaaaaataatattaatcaaaagtgaattggtttttaaaacagttttcaaaattcttgtctttgtaactttgttttctgaaaactgttttaaaaaaacaagaccaaacaagttaaattgttttcaaaaaataattttttgtttttaaaaacaaataacagttttttaattatatgatgtcaaacatgcactaattcacgatacaatttttttcttcttatattggaattaagttttattttaataaaagtcgtcaaatatatatttaataattaaaattattataatatacccgaggctatctcaatattaatttatggctaattagaatttttat

SEQ ID NO: 135508 - DNA, 723 bp, Cannabis sativa
ttattactaaatcccgcaatatcaggactttattcccaagatcatgtcggagaatcatatcttccgaatatggaaataaagtaactgtgaattaaatatttatgtgtatttaaaaagtatgacacattttagatagctatcaacatggcatggtattcacgtcagtagaagatcaacgcctcatgggccgggcttcaccaaatgagctcgaagtcaatgtattatcagtatttaccctattagtaagaaaagtcgacgtatgaaaaccctagctctataaatataagaaaaacccatttgtgtatagggttagaatctgattcctcgagtgcttagacaaattctaaggttcaaacatttgacaaaatacttgtgtacacatatcaaatatattgacttgtggattagaggttattaatccttgaaccacgtaaaaactcttgtctcattctttgtttttaatctatttctttagctttaatatattttgttagtttaatagaatattttaataatataaaaatattctgttaaatttaacgttgttagtagtgtttttaaaatatatataaatattagtattatttattttagattactttaaatatttatatataaatagtaatatattatttgtaactttattattttttattattacttttaatattaggagtatgttcaattttaatatttttaaattttatatttatttttttaaaa

SEQ ID NO: 135509 - DNA, 840 bp, Cannabis sativa
tatctagcgttaaacctttcctaatcttcagtcttcttattggaaaagtgggatcaaccaccacttcttccaactcttctacaagtctaaagcttcttgcgggatccccaatgcgaggatctatgtttgtgtccttgcttcgggctggactttattgcccttttttgggcgagtcttttgggatttggcatacattttctctttcttggccttggacaggttaaatttgtaatagtgatgggcagtctattggtctcccgtcaaacatgtcacacgatggtttgaaatttgaggcataagtgttacatggatgttaccgcctttaggtcattgagggtcggtcgggctatcatgacgttgaaggagggaacgtcgatcatgatgaactgtgccatcagagttctggttgttggattttctccaactgtgaggggtagtttgatgtaccctatagctacgatgccttggccaaagaatccatacatcacttgattgcagggcaccaagtcgatgagcgggagctcaatcttttcatatgctaatttgaaaacattgttggaggaggctccgtcgtccaccatgcatcttgctacggtcatattcctaatttgcgcagttatgacataggtagatttgacatgtccctcttgctcatctccattttaataggaaagggctttcggtatgggactgttccctgagtgaccatgaagatggcctcaggtttctctgttaggagggtgaagcaagtatacttctcctccttttttaactgtggcgtgagaaaagtgttaaacttcctttttttgccgctgttcctcccagagctattggtgttgc

SEQ ID NO: 135510 - DNA, 510 bp, Cannabis sativa
atttttgggttcaactacggacacataacaagcaaatgcaatggcatttaagatttttctcctagtgaccatggttgcattaggatcaccaataacaattgtaggaggatgtgccttctgtatctaggatggtggtccttttttgtacaacttcgaatgagatgaactggtaggggtaccactattcacttccgtgtctgtagctgattttggagagattccagatgactcaaatgcatcaggtgaagcttctgatgctgtgttaattgagctctcagaaatagcaggaggaatgttgacaggaacggccatggagagagtgggatcaagaagcctcttcctcaggtagcagtttccctcagatacttctaaatcatcaaagcgaacattgatggattccataaccgtcctacttttcttgttgaatacacggtaggctctactattggtcgagtatcctaggagtattccttcatcactcctattgtcaaattttccgaggtgatctcg

SEQ ID NO: 135511 - DNA, 729 bp, Cannabis sativa
attttaaaatagatgtggttagataattattattgaaaaaataaaattaaggttagaatatctataaaaatatctaggtgaatttcaaatttattaagtatttaatttgtcatataagataatcttaatataatatttcaaataaaaaagataaagttatcctttcaatttaaaatatgtaaaatatcaaaatatctgatcttataattaaatattatataaataataaagaaattaaccaatttttaaagctgaccataatttaaataaaaaataatcaatttttaaatttaaacctcaaaatatcaaaattaataataatttattgaaaaataaatattattaatttaaaatatgatatttaagttcaaatatattaaaaataatattttattttaaatttggggtttgaaaattgaaaaaaatcagattttggggaaaaatcccataaaaatcgaattttttggggtatgctgccagtaggctgcatgttcagccttcgaaggctgcagatggggccattcactcgcggagcttgaggggaacgacgagaaacctcgacgctggcagggggaacacgggcggacaacagggtgatcgttggcgtgatgcactgcttcagacaaagaattgtccgagtgcacgtgcgcggatcccaggttgtccgagtgcctggtgcacatcgatgcacccactcgacagccgtggcacccaattttccaaaattca

SEQ ID NO: 135512 - DNA, 529 bp, Cannabis sativa
ataaaatattcatttatcagaatcaataatattattttatttccttaattagaaatattctaataggtatctgaccgtaaaatgtcaagttattattcacgtgtcattttcttattagtaaatttaaattaattttttttaaaaaaaaaataaaaattcatgacctagaccaatcaaagattgtcacgtggcaatttacttaacacttaacaaccaagtacctacagaagttctaaaattataacttaaatattattaccgccaaaaattaaactaaggtatttatttacaattgggagttaaacttaaatattcatgctacaaattactcaagataaaatttcaaaacttgcattgtgttagtatttagctatttttatttatttttgatagttaactgtgaagcatttagttgtccatgtgtacatagagtattatctacatagacgggtacactcttatttaggcctgtacaaaaaaatttataaaccgcctaaaccgaataacccgcccaaaccgaaccgaaaaa

SEQ ID NO: 135513 - DNA, 601 bp, Cannabis sativa
ttgtgtttttttttttattattttttatgaatgatctttgtactctatttttttggtaaataatttttcgtactattattgatatgtggcacattaaagtgctcaataccatatgtagtatctaataatttgttagcagttttcaaaattatttattaaatttaaatttgtgggaacttgtattgaaatgcaccaataacgatatgttaattaccttttatggtgcttgacgccttaatgtgtctcttaatataaataattttatcattaattttttaatataaataataaaaataaatagttcataattaacactaacgtatactaataaaataataaaagtggcataaaagtaaataataaagttgtgcatttatcatgatgtaaattttgtattataataaatatttgtcaaatttagcttaatatttactatgtgccaaatttgcatcaacttttggcacactattggagaataatttttcccatgtgagctgtattttaactttgcatcacttattaatttacatctccattgaaaatgctctaattttttttttaattctttttatttttgtcttattcatattgtttataatta

SEQ ID NO: 135514 - DNA, 712 bp, Cannabis sativa
  modified_base (662)..(663): a, c, t, g, unknown or other
tcataaataattattttaatattaataaataattttcataattaaaccctaataatctgcttatttctaaatttaaactaagcggtctttacaacctcagtggcgcagtggctctagctggtttttcaattaagtgtaaatactaactatgtattcttgattcataataaaaaaaaaattaattctttttttcttttaagtttcctttatagtatggtggtgtttggtttaatgtaatataatgcaatgggaatggtaattataatatgaatggtaatgtaatggaataagaattgtaataagaatggtattttgatgattggtttaactctgtaattctgtaataaacattgtaatcaaataaaataattcgtatattgacaaaaatacctttagttttattatttttaatatttaaaatttaaattaaagtaacaaaaaaagacaaaagagatactatctaacaatgtaatcatcattacattggtttcataatgtaatggggattacaatacatactgtaatgaccattacaatataaaggcattacaaagctttaaaaatgaaagcaaataatgtaatggtaataatggttccattacaatccccattacactaaattaaacatgctcgtttagaatggtagtgtgcacttttattgnntaaaaatgttggtttagaaacatgactattatgtccttggatggggata

SEQ ID NO: 135515 - DNA, 829 bp, Cannabis sativa
atttatatgaaccaataaaattgtgtcacgtgtacactgtgtacacgtagacattccaccatggcagttaacagccaaaaatgaatggaaagggcttagtgctaacaaaacttgggtttatgaggttttatcaccaaaattttagaattgggggttagttgcaagaacctgaccacttaaggaggttatgccgcaaattaccctatataataattgattggcattttttttttacattattcactaaatcaaaatttgtgagacctgatattgatatgcaccaataacaatatgttactatttgttgtgtttaatacctcctttagcatttttcttatcatctctaagatggtgtataatttgaactaaaaaaatgagtcaatattatattttgcttaaattttataatagtgcttgataggctagtttatgtacatttaatgaagtgttttagaggtatgtttcaattgattatattcatcttgtgtagaaatgaacttattttctactcgtttcaagtttaaatggtaaaattcataatatgaattgaaaataagaaggaaaatattaaattagatgaatatgatgaatttattatgaaatttgaagttctaagatataatggtgtgaaagattttaagttttggatgctcaacactctccgttttttttttatcgagaatcaatatgaaacttacaacttatttttgagtataatgtgttcactttgagggaaaatattgtaaataaaagttttagatctctctttcttcaactatttttctttttttttttttttaatttttcccgtgcaggttgtcgcctttct

SEQ ID NO: 135516 - DNA, 1127 bp, Cannabis sativa
atgtacattggcgtttacctttacgtagtgcaggacatgaaataggaggtcgaggaggggggcgcctggtgtacccccaagagtaaagaacatcccagatgtagacttcctatcatcaagacaagcctagaaaactgagtgggtatagtctactggatttaaagcaccacccttgtagactaacaaataatgccttatactctttaaatattttagaatatgcttaactgtagtctaatattcgtctcctcgattcgactgatacttgctcacaattcctactgcatcgaaaatgtctggtctagtgcataacatagcatacattagacttccaactgctgaagcataaggaacccttctcatatcttctatctcttggaaatctatgggacactgttccttagatagtcgcacaccaggtctagaggtcatagctgcccctttattgtttttcattaagaatcgctctagcaccttataaatgtaagttgcttgtgagagagcaagctatctattcttccaatttctaatgaattgaataccaagaacatagctagcttcgcccaaatcattcattttgaattgagtgtttagctattccttaatgtcaaatattttcttgatattgttacgaatgatcagagtgtcatcatcataaaggactaggaattctaccacttgattatacttgaggttttactcacatgtttgatctttattttggtgaaagccataggttttgattatttcatcaaatcttttgttccaagagcgagattcctgcttaagtccataaatagacctatttaccttgcaaaccttctcttcttgtcttggaagtttataaccttctggttgctctatatagattgtctcatcaagaattctattaaggaaaattatctggacatccattttccaaacttcataatcgaaagcggctgctatggagagaagtattctgattgatttgagcatgtcaactagactaaaaatatcgtcatcgtccacaccttttctttgagtataaccctttgcgaaaagtctagctttaaaagttttgacttctccaccaacacctcttttcttcttgtagacccatatacatacaattggatgataatcat

SEQ ID NO: 135517 - DNA, 1880 bp, Cannabis sativa
  modified_base (410)..(411): a, c, t, g, unknown or other
tgcccatctaccggtggaggtagtaactcttggttattgtcattcctctgaccctgatcggtcttgacatacttctgcaagtgtgggttgtttttcattatcattaaatcaatttcccgcttcaggttgttgcattcattagtgtcgtggccgtagtctccatggaatcgacaaaactttgtcatgtccctcttgctgacatctttcttcatgggcttggcttcttatatggggccagcgactgagttgccatgtaaatactttcttcgtcttcagtcaagatagtgaacgcagtgtactttgcttgattttctcggggagcttgttcgaattttccggcgaattttcctttcttcccattcccttgcctgtggttgttgttggaacgcttaccacttgagcttgaattnnttgggtaatggggaagttgggcggatgttccagtagaatgagcctttgacttaccaggcttttgctcaccttccgctcgttgaatggcttcttcgagcttgatgaagccttcggcacggtcaagaaaatcactcattgagtctaccggcccattcttccttatatccttccaaagttcgccaaggacttcaatgccccctagtatcgcggataactttccatctttagttacccgttaaactttggtcgcctctgtcatgaatatgctgatgtacgcgcagagaggttcgcctggtctttgcatgacttcaaccaggtctcccagatggaacagatggaacgaaagtaacgaaagttggaaagttggcggttggcgagagtggcgagaggaggagaactgtgcatggaattctgaagagaaggctttccatgaactgaactttccaggggccaacttgaaataccgttgctgggcggcctctgatagggtagcaggaaagattctgcaacacacatctcctcgtactctttgcaaatccatttgcattttgaaatacttgagatgggaaaggggatcttctctccccgtatacatcttccctgttggcattttaaacttgtgaggcaacgccagaagattgatctcaggagaaaaaggagttccgcgtgctcggtccaggtcgagatcattgtttctttgtccagccatgccttagaacatatttttcagtttttctagctgtgcctgtacagctgggctaacctcctcgacattctggtcaatttgaatcacgtcagcatctttttgagcgagaatttgagcacgggctccaggctgcacgatcttcgtgacattctgatcatctactcctctcattctattcagatcattccttaggtcatgagttgtccccaacctttcgaatacagaagcgcctggctgccttagcgattgattttcttggttgacaggtggaatgacaccgttaatctggtaggaaccatcaggtatgatctctcctgatgaattactagacagggtctgtccgcctactgcttggcccacaagtggaactcgtgaccggggattgggcggctgaccatttgcagtctgggaagtatttatcgttggatcttcgtccgtctctcccagggggatgacatttggaggttgctgacctacagtttggtaggcttttcgtatcagtagggtagcttgccgactacgattttcaatctctgtatgatgagcccttagcacttccatctctctgtccctccactcggtaaacatgcgctttgttctttgaacgcgagattttccgcagcgcggagatcttcctgatcatgatgtagggtattgttatgaccctgcatgagtctaagaacgtcacgtagattttgtaactcagtagcatctccaatggttgtttgagtgttggtaccaggcggaacgactgtgttatgaa

SEQ ID NO: 135518 - DNA, 560 bp, Cannabis sativa
cgtgtacacatatttcaccatttgcgtaaacagctctcataagttgtaatacatctataccacaatcataatctacacattgcttcttatgaaatggctttggcataatagtaaactcctcaaacatgaaactcctaccaatatgtatgcttaaagcattaggaaatgctaaaaccatgttcaccacctccgaaatcaacgaacccttgtcctaatcaatgtactaacatttagcgatagaaagtcttctctccgactcacgtttctttcactcaaatataaaacttccatacaaaaggaaaacacaaaaataattaaagtaacacaattattgttgacaattaagttacaaatataattcttaataagagataatagtaattactaccttaagacttggcttatcttctctttcatgatcgggcacttatttggcaagtttcctttttggtctactttgctgatgtaaaaacctaattctgatgctgcaaattaggatttttttaggaaagtttgtacagttgtggaatcaattttgtggttgtctctagggttgctat

SEQ ID NO: 135519 - DNA, 1186 bp, Cannabis sativa
  modified_base (785)..(787): a, c, t, g, unknown or other
  modified_base (819)..(821): a, c, t, g, unknown or other
  modified_base (852)..(854): a, c, t, g, unknown or other
  modified_base (888)..(890): a, c, t, g, unknown or other
ttaatagacaacagaagctcaataaacatcctttataaggaaacgctgaggaagatagggctcgaaaaagccaaattgaggccttgtatggtaaatatctgcggcttcactggtgacagtattgccagtctgagcataatcgagctcgcattaaccttgggcgaggcacccttatccgccatagttatgcaagactttctagttgtcgaccagccatttgcttacaacatattgttgggccgtccagcattgatcggactaggggaagttagttcgatcaagcacctatccttgaagttccaaacaccagaacgtgagggagtggtgcaaggcgaccatatgctagctcgcgattactatcgcatagagttgcagcatagaaaagctagtcatcagttaatggcgatcttggcagaagaaagtgaaaagaaggacgaggatcttgacccccaggttcaagatgaaagaaacttattaaaaccaattgaagaattggaagaagttattctcgacccaaatcccacaaaaagtgtgtttatacatttggaagaacctagacgagcagctgaaatagacgctaataagtttcttaagggcaaactaggattagttcgcctggagccatggagatatgatagggactgaccctaatattctctgccatcatttaaatgtcgatccaaactacccagcgaaaaggcaggaaaggagaccctttgattccgagaaacaaggggcgttaaaataataagtggataagttattattcaatgactttataaacnnnttattattcaatgactttataaacgaggtgtnnntcaatgactttataaacgaggtgttttatcnnnactttataaacgaggtgttttatccctcgtggannnccaatcctgttctcgtcccaaagcctaatggaacttggagaacttgtattaatttttttaatttaaataaggcgtgcccaaaagacttttttctactacccaagatcaaccagttagtggatgcaactgctgtgcacgagcttatgtcatttatggatgcatattctagatataattgataaaactgcatgtcctagattaggaacatataagcttcgtaacaaacatgggactctactagtacaaagtcatgtcgtttgggctgaagaacactggggaaacatatcagcaattgg

SEQ ID NO: 135520 - DNA, 1099 bp, Cannabis sativa
gcatatgtgtatgattaatcagaatctatctgaaaatacatgatatattacaaacccattactttagaattttttaattttttaatgttttttagtaaagaaccttttccatgagaatggaaaatcaaaagttgtaaatgagatataactcataagctacatgcgaaattgaatactaacggctcacattttgtgggaaagtattaaacgagacaccaagatgacttgaaacaatacttaaacctaatgtatgagtagaaggcctaactattcatataagcaatcaaaaaatatacaaagtgatgaatcattaaaagtatattcaagtttgcttaaagcagattataactgtttatgcaaagcataattgataatttctcgcaaatcaaaagcatagcacataataactgctcacgcccatagtagattactaactacttaaataatatcaaaggaaattacgagcaatagaaaggcttaaagtattttaaatttgatcaaaatataattgttgaagttgtgaattaaaacacaaacaaacaaatatattaagttcaaaagtacgaagcattcaataaaacataaaataaaagcaaagttggccatccaaccttgcaaatttgttttacaaaaagtgccacaaagggcaaaccattgtctcggtcttaaggccatttgcctagataaaacaaaaataaataaaaaccaagcatacatggtaggagacttggacagttcttcttcttcttctactgcctcgacttcctcgtcttccttcttggccttctcgcagtaggcaaggacttccccctcagactttcccaggaaacttgtatccatccctagatttgccatccaggcttggtagatggaacgtaatccaacagcattgcatcgctcaatggttttagcttctttcccatcgagtgttactttggctgcattaagttcctcttggagtttctagtagtcctcctggagtttttggaattcatcagccttatcttttgcctccttcttagcagcttcaagctcggccttgtgggtcttcttcacctcccagcttatttgattatcacgctggcctatcaagttttga

SEQ ID NO: 135521 - DNA, 1343 bp, Cannabis sativa
atcaagcccttctatgatcgccaacaagaaccaaggaagttcaaagtttgactggtcggatttccgcactcagaagatttgtttcaaaatcaacagacaagtgtgttccattcttcaacatcctgcaaggaaataaacaatttaagtggacggaggaatgtgaaaaagcttttaaagagctaaaaatgcaactcgcaaaacctcctgtactctcaaaacctctggacagagaagaacttgggatgtacctggctatcgaagagcatgctataagtgccgtgttgatcagagaggaaaacaacattcaacatccgatctattacatcagtaaaagactcattgaggctgaaggccgatatccattgatagagaaactcacttactgcctgattctagcaacaagaaagctaagaccctacttttaagctcaccctgttcgggtatacactgaccaaccgttacgccaaatattgaaaaaaccggatgcctctggatggtcactcaaatgggcattggagttgggccaatatgagattgtcttccaacatcgaacaacaatcaagggccaggccttagcagactttgtagtagaatgcacgggaaaggaagaaagcgtatcagaaaataaccccaagccagaacaaatacctcaaccaagtaacagtgaagacaagccgacttggaaactacatgtggacggtcgtctacaaatttactatccggtgcaggaatcgcccttgtcacacctggggggcaacacctgcacgctgtagtcaaatttggatttaaggcatccaataatgaggctgaatatgaagctttgattgccggtctaaaactagcccgggagatgaaggtcgaacatattgagatttacaaaaatcatgtatttggggaatacgatgctcggggggaaaagatgatagcatatctgagccatatacacgatctgctcgcacagttcaaaagcccctcaggtgaattctaagggaagaaaacaccactggtgacgcattggctcagcttgcgagtaataatgtaaatgatagagcaaatctgattcctattcaatttctcgaagaacctaacatcactggcacagaagagattgaaatgattgatacatccccaaattggatgatgccaataacaacctacctcaacactggggaactcccatataatcgaaataaagctcgaaagatgagaatgaaggttgcacagtacatcatagtagagggaattatgtatagacgaggatttttcatgccatcgctcaggtttgttgcccaagaagaagctgcacgacttttgtctgaagtacacgatggattttgtggaaa

SEQ ID NO: 135522 - DNA, 660 bp, Cannabis sativa
  modified_base (63)..(65): a, c, t, g, unknown or other
gagtgactgcccgcccagaaagttagaagccatcatcacctgacatcgactttatctcagccnnnacggccttcccttttccagcataaggatggaatggccgaacagaagaaatgggctcccttatgcgaatggcatgttcaacgggcctgggcatggccgagagtttcttcttcctcctcaaaggagccacctgctcagcctcagcctcaggctcagcttcatcttcaggattcataggctcctgagcatagtgctttgcccgagcacctcctttccacttagcttcacgcttcagttgaatcaactcattctccggatgagctcgttcaggccgggcagcagcaggtttccccttcttctccgccacggacttagaggaaaagtcctttggaaagctcgtactgcaccagattttgatcggaggtcaactggatgatatccctgttttccgtcggcaatcgggcaagcttttgagccctatccctaagagtaatggtgagaggaggacggtgataagtcggaatctgctgaaaccaagtccgagtgatgttcggatgcttcaccgtgaagtactcatcaacaaaacgccctattttgttgatggccttgtggtccatcccgctcaaccacttgaagcctggctgagagaagtaaaaa

SEQ ID NO: 135523 - DNA, 521 bp, Cannabis sativa
aatatagtgagaatttgaaataagtcttatctaaaaattctagaagaatttaatacatgtcttaagtgatataaatttaaagtcgcgcgcactatataaaaaaaatctttgtataaattaaagacatgtaagtaaattattatttaaaaatacgtatggttgtctatgcatgtaaattcgtaaattatacgttgtgatagactcttaaagagtttatgattatataaatgactggagaataaacttttatttctttttgtatatatagaaatattaaatgtatatagtttgttcattagtagagaagtcctgaagtactttatatgcataaaaaattatagatatatgatcatttaatatggaaattcaaattaatatggtcttggagtaccatcattgtcactaatgaaaatttatattatcattaatgtgttatgtttatatctacttaaaatttcaaagttttgtatgaacaacaatgtatatacacatgcattaatgattaaataagttagataaat

SEQ ID NO: 135524 - DNA, 704 bp, Cannabis sativa
aaattcttaacaagagtgataatatcattacctacagtgctccaacatttttgataaaatcccggggtcattccattaggtcccggagatttatccggatgaacctcatcacccgtaactggttccaacaaccggttgttgtgttcacttgtgacagccgaaggaacacattggagaacatcattatcattcacggctgtagcagttaacaatgcagaaaaataatccaccatgaccgaaggaagccttccattccaatcaacccaaatgccatctgcatctttcagctttggtatcgaatttctgcgtcttctagaggtagccgaaccatgaaaatatttagagttactatccccttcatgcaaccaaagtttcttgcttctttgcttccaaaatatctcacgctgcagtagcactttattaaagttggccgaagcatttttatagttctctatggacacatcatcacggccccgcttccatcgttgcacctccaacttataatctttaattcttttgggaaagttccctgagtaatcctttccccaacgccaaagtacctcaccgcagttcttgaccttagccataattccactcggttcgtcattcctccaacaactctttacaatctcaaaaaacaaaggttctttcaaccaagtgttttcaaagcgaaacacttgattcctagcgaccaccacttcatt

SEQ ID NO: 135525 - DNA, 603 bp, Cannabis sativa
tatcttaaatagttataacgtacatgaatatgaaaaaaaaattagactaaattttttttcttgataccaaaacaagtcaaaggtgtatcagtatattttttttaaggtggtgcattgtagaatcaccttatattatatttttttttatgtaaaataaaagttataaaagagaatatatttataaaattttgagaggtaaataaaacttcacaataaataaacagatttataaagggaaattttactatttggctttaataatacaacacatatcaaattttataccccttactaatttatacaaaacaattccactattttaaaattctacccaaaataccccttacatttaattttcccactctctctttccctctctctctctgtctttcccactctctctcctacttttcctctttgtccctgcccaaaaacaaaacaaccgaacaacgaaacccaacccaacgacgaggaccacgcatacgccgaacccaataaccctcttcttcccactcgatttttccctctctctctctctatctatctctgtttttcctctttctctctctctcggtcggtcttgaattcgacccgtgctcgtgg

SEQ ID NO: 135526 - DNA, 1002 bp, Cannabis sativa
atgacccactaccccaaaataacaagatatggctctacattagcccaaatggcgcctttttgcatcttgaacactcaggataaggtcaccattttttattttcaccttgaccgctatcctgactaccttagaacctttttgttctgtgtcataattggtggttcatttaatttttgcttcctaatctactagtaagttggcttcatatattcgaccacatctagtggtacaatagaaagtgtctttagtataagaacatacacaagatgagcctattattctttcagatctcgaatctgtttatcctttgttgtctattgatatcatgcatagcagaatttacatgttcccaacattatggcaataaagaattctcttccttactatttgcctcgagcccagttagctcgctaatcagactattcgattgcccttactgcataacttatcacacatttagctcacgtcttctaaccatttagaactcaaacagatatcaatatcagtatgcaaataccatacacatattcttatcataatcatcactatgctacttttcccaacatactttataatagcctaggtaggcaatccaataacaaattatataaatacttataataccatgagtcgacctgtcctcgcagcaaatgtacatattcgaccagtcttcaagacctttaaaaccatggctgctctgataccaagttgtaccgccctaatctatagggacgccacatgtgtgattttataaactagtttaatagtaatagaataattaatttttaaaaattgtgataatattaaaaacttgactataataaaacacaaaaaataaacattataacggtataaaaagcgtgttctagggattcctgttataaaaggttttacaaaagaactatatatacgaagatgcctcaaaaacataaaatcaaaatacacaatagatagaacccaaaaaaactcttggcaacccagcacgcaggccagtgaggtcaa

SEQ ID NO: 135527 - DNA, 1721 bp, Cannabis sativa
  modified_base (691)..(699): a, c, t, g, unknown or other
  modified_base (1200)..(1206): a, c, t, g, unknown or other
agatcaagcgtagtatatttgactaaacccaaattactggaactgtaagtcagtggtaagcaactactttctccaccattacttcctttgtgttcataaaacattatgcaacatcattctctgcatgcattactcatctagggatgttggattccttactgcttattaagtgcatctgaataaacagaagacatatctctaattctatccaaaattggaatagagataacacagtgtagaactttcttcagttgaataactttccagtgcttttcaaaacaacaaagttatttagcttcactgatggagcttaaattactatagatgggtttttatatccttctagaataattcctccactcccagagtaaccaccatctctaataggttatgagttggtgtaaatataaggattctaatatacacccctatcatctaacatatcggtcactttcaaaaaaatttcttgactatctcctaatgctcctcgtttgatgacatcttagatggctctcactcaacagtaggagtctagttaaatttgtacataatagtacatttaacctcttactattgtttctcaaggatatcttgttgtgacatattatcttagtttgaaactaaagtttcttctagactaagtcatcaacatggcaatctagtatttacattaatgtaaaatacttgcttnnnnnnnnntaatcattagagataccataaaacctttcatgatgattaggaattttgcctaagtaattcgaatagactttgcaaaatttcctatcttattctcaaaattctgataagttatttctatccatatgaatggttagatctactttctcagttgaattctaaagttcctatcacaatcataacatagtatgctatcacaagtgtcatccaaataaagatgggcttagaattttaaaattctcccactcaaataaggtactgtgttactatgtccaagaactttattggtatcaattttattacaacagtaatatattaatttgaacaaaattacaggatcaagaataagttctaataatttgctaatttgcttattatattacttccatgtttaatcaaaatacgtgtgctatagagatactgtggtgtattgagcatagtctaagagttcaaaatgaattacatatgtcaatagcttcatccacccctaagtgttatagagannnnnnngagttatgaatataatctagagttcaatagatataaacgatcgttgaactgcatatattattcttaacttcttccacccctatcagatcaaaagatctttttattaaacaaaatcttaagaattgtttaagaattaacaattattcataaatattgaaattaaattcaaagtgtttatgtggtattatctctttgcagagaaaaatataccatagattttgtatcaataataaaacacaaacacatacaaacattataaacatataaatataattagtattggcatacacaagataaagaaatatgaagttcaattcataagtgcaattcattactaaaagagaaaactttattaatattctaaaaaaaatgaattgtctgcaataatatgaaaaatagagaataaaaaccctaaactaataattaaaatcaaattgttcataaattaaaataattaattcaaaaaaattattaaaagaagatttcgagcttcatcttcaatcttggacaatctc

SEQ ID NO: 135528 - DNA, 956 bp, Cannabis sativa
  modified_base (897)..(925): a, c, t, g, unknown or other
ataactctaaaaatagatctgaaattaaaaaaaaaaaaaatatgaagaataaaatatatgtatactacacaaaaattaatttaaatatactaaaatatacacaaactaatatatgtatactcaaatgccttgttggtgtgtggtggtactcggtagtggtggtggagaactcgatagtggtagtggtggttgtgttactcggtggtggtggtagagaagggttaagagagagagatggctgaaaaagattgaaaagttgggagtaaaaatagggataatgggtcggttgggagtatttatagacttattagtggcaaggccagctgctaatgccccgctgcaaatgtaacaccctaactattttaggcatgttaaggtaatttttaacttactgtgcagctcattgctagtcaacgaggttattaaaaatcgtgattaattaaaattttgcgtaagtaattataaacataaaaataacatacatataaaattctaggatcttgtttacaaaagcattttcataagtttcactatacaaatacaaaagtctatcgcctagcgactataccaaataagccctgatgtccaaaagatcatacgctccaagcctaactactgcgacatgtacaatctccatctgctcgctatcacggcttctcagccttagccttgcccttacctacacatggaaatagcaataacctgaattatgatcagccacccatacccccaatcataaccctatccctatgtccaacacggtgctgagtttagaacgtttgtaagacagtaatattgaccataatatcagcctaacacctggtacgctagttacactctaggcgtactgatgtgatactgtcgagagtacataagcctgttggaaattattttacnnnnnnnnnnnnnnnnnnnnnnnnnnnnnttattaacatcctaaataagaactttctaaa

SEQ ID NO: 135529 - DNA, 783 bp, Cannabis sativa
gaggggtgggtggagattgatgaatgagagagacgagaagaaagggagatcgagagagggaggaagacgtcgagagaggagggccatggtgaggaggcgtgggtgggagagttaagatttttgttttagggtgtggaaaacagagaagaaataggtgggcatgtgggaaatagaaaaaaataggtgggcaccacatgggaaatgtggcaagaagtaggtgacaattttttaatggacatttatacccgacggtttaaaactgtcgggtatagtactgttgcctatactatacctaacggtttaaactgtcggatataagggctcaataaattcatgaattctaattaaaatcgtcgcctattcctgtaattactgctataaattgtcgggaatactaaacagttacttaatttatcttgacgattttaaatagttacttaatttttttagcgacggtcccctaaaaaaagcgttgttaggatcgttgcgaattcggacttttgtagtagattaaaatgtgtaacacacttgtaatatttatttgatcaataaaaatattatattaaaatataacattcccccactttgattgactaaatacacactattatagaagtcttgcttaagtgcattaggtaaaatgtctttcaacttaaattttaccttaatgtagttaccagaaagtttgatgaaaacttttattgacatagcgttgaaccactattcttttagtacaaaccggtgatagcacacacaccctcgctaatgctcacttgagaccgc

SEQ ID NO: 135530 - DNA, 898 bp, Cannabis sativa
  modified_base (352)..(354): a, c, t, g, unknown or other
agttcctggtaaaataacttccaacatagacatgttatgtcccccacatgcgcacgcgcacgtcaccttgtcggactgactggtgcgtgcgactgagccatgtgcacctggatttttcaaactttcttaactttgtcgttttttatcagaatcgagttccgtaaaaaccaaaattgcttaatttttcacaacgaatccaaataaattattgttagaataaaaataaaattgttttcatggaaaacgttcgtacttcacattcaatcatcacaaaccaacatgaacacatccaaatcaacacaattaatatattcatcattttaaatgtatatttcatgaaagtaaatcattnnnatggctctgaggccagttattgggatattctaccaggatctagatttactaataagtatgttgaattaacatcctaaatattaataacttaatacgataaaataagagtttagaaatccttacattgattgcagcataatattaagactcctcctgctaagatctctaaccattgttcctttttgtcgtagagtattatcaagatctaagcttggatctctttctctccttcgggttggttaccactgtcttccgcactatgattgagtacttgacttgctatgtgtggacatgacactctatcactataggccgaataggtgaagaataattaaggagggttcgaatcactagatttggcaggttgaaaagtgttcgatgagatgagagcatcatgttccttttattgtgtttcaactagggcttaggtttgaattatataggtcaaaaaagaataaaatattaggcaaaattacacctaatggccggccacttaagggaccactttctagttagaattttgcaactttatttcaaccactta

SEQ ID NO: 135531 - DNA, 548 bp, Cannabis sativa
atgaaattgaaatacttactcaattaatccaccacaaccaagatagtatccataccatgagaatgaggaataccttcaatgaaattcatggttaattcgtctcaaactaaagtgggtaaagcaataagccagctggagaagtagccacagacttatgtttttggcacacctcacaattacaaacccaatcagccaccgaatgttgcattcccaaccaataaaagttagatgccattcatttgaaggtcttctcctcacctaaatggccccaagaggtgagttagtatattcacgtaggatcataggtataagggagcacaccttttgtagcatcaaccaccccttgtacctcaactgtccgtgctccatggcaaacccaacatcacatgtacacccttgttgcaaatgtgaaataattctactcaagaaggcatcttgtcatatttcctgttgtagctaggggtgttcatcaaactgctcaaactgctcaaactgcccgcaccacaccgcaccgcaaaaaaaatatggtttgaaattctttgcggtgc

SEQ ID NO: 135532 - DNA, 739 bp, Cannabis sativa
taagcacaatgtagttgaactatcactctcacattattttcttcatgctttatgctaactttaagattaactcaaatatatattgaaatacataatcttatcataaattcattttctcaatatagtgtacttgatttgattcaagatttgcaccttgccagaaaagttattagttattttttaaaatactacttactgacatattctggggtaaaatttttgtgaagctgtggttgactttttccaagcaaaatatatgcgtaaaggcttcaattccaaaagaaatttgtcggacaactcaaggcccagacaagtctcaaaagatttttcccaacaacaaactattccctcaacaacactatgagaacattctaaaaagaaagtgaccactttttatagagttcaaatacttgtttgaatatttgaaaattatccaccaactccatgactatcacaaaatattttattggatgtttatgaacacaaataaaaagatcatacgactaattaaaacaagcaataagttgcaaaataactccaaaatagagttgttatgtacctaatgacgacacatcgtctgatgcacactataggcacttttgtagattctgagaaaagggaagaagtcatgagctactttgaatatttaattcttcaacgagtgtagctatttttttttttagaaaatccttcaacttatttcactttttacttatttaaatatttgaataaaaaatta

SEQ ID NO: 135533 - DNA, 1173 bp, Cannabis sativa
  modified_base (53)..(57): a, c, t, g, unknown or other
gacttgctatgactcaggactacttatctccgagatgtcatctttcttgccannnnncaaacattgatgtccatgtcatcaaggctacttttggtgtaaacacttatttttcttgtagtgtaattgagcactcaacatttgtgcatgtatgtaattgactctactaacaaccccttcagtcctaaagaacttgttattcctaaccactaacaactatttgatggtgagccatcgaagaacaaaaaagaaaccatgtcacacataaaatattcaaaaccatatcacagaaacaagacaaaaatactcaaaactatgtcacagaaacaagagtaatcgcagtagcaaccccgaccaagccgcacttatgcaatattaaaatacaataactgtcttatatcctaaccgaagggagagtagagagcccatgaagcaaagccatgaccttcgcaatgtgaggcctaaaggcacattgagttattataaagttttattttaacaaaaaattgattcagagtactatttagtactattttaaaaaaatacaagatctaatttattattaaacaaaatagagaattccatttaataatttttataaaatataaaataatatttaatcttatttatatatatatatacatcttgacagcactcaaaaaggcctgaatctccaactccactaccatttaattacagttgaaaaatctatttgctatctatactagatgtattttttgacatttggatttgtattctatttctcacatcatatttgacattactaacaattactgaagccctcataacactttgggatcaataagcttaattagtttctcactttccaaacgtggtatattgatgttgtcataacagaagcaaacatctgttttttgctcctcgaatctttctcttcctcttccttatccatttcataagccgctgaagtgtgaatactaattaaagtcttccagttcagccaagctttaagctcttctatccgaattctgctacgaagacaggtgaagaaaaggcattgaatcatctcttcttgattggaagtctgtggttaaaagttgtgactaatcataattaattatcattcttatatgttgggactaaaaagtctgtggctaaaagtattagtcacaatacttgttgtgactaaaacta

SEQ ID NO: 135534 - DNA, 544 bp, Cannabis sativa
ttttgcctttatcttttgttgatttgtgttttctaaaacgatctgcaaataagtgtttattgcttggcaagagactcttttgtttctctacaggtcatgtactgtagctgaaggactattcctctgaagtacgttccatagttttgaacgaatttattaattaataaatcttatgatttttattcaaaaaaaaatataaatataaactattttttaaaataaaataaaaaaattaaaaattttaaatgttaaatattttaaatatttatttccttcaaaaaaaatatttttattttttgtaatatataataaataattaaatatatttttagtaaaagctaatttattatagagttttttaatcacaacatttttttctaaaaattgagttgtactatatctttagtttttagctgtaattttctcataaattcctcaataagttagatcaaatgattcagagcgatatttttatgccttcacagtttggtcttattgttcaagatgttcgaaatttacttttggctttatcttttgttgattt

SEQ ID NO: 135535 - DNA, 1409 bp, Cannabis sativa
  modified_base (1039)..(1040): a, c, t, g, unknown or other
aggttttgcgagttgtatttttaggtcctgaaaagctttttcacattcctctatccagtaaaattgtttgtttccttgtaggatgttgaagaatggaacacacttgtctattgattttgaaacagatctattgagtgcggtgatctggccagtcaaggtttgtacttccttggttctcgttggcgatttcatatctaggagggcttgaatcttctttggataggcttcaattcctcaggcgttgacaataaagcctagaaacttaaccgagctgactccaaaggagcactgtaagggatttagtttcatgttgtatttcttgaggactttaaagcattcgtccatgtcatccatgtgccccccagccttcctggattcgtccatgtcatctttggtatgttgctccagcgtgtttgagaccaaatggcatgactttgtagcaatacaaaccaatatttgttcggaaacttgtatgctcttggtctggtggatgcattttgatttggttgtacctcgattaagtgtccatgcagcttaatatttcgtgcctagttgttgcgtccacaagctgatcgattattgggactgcaaaacagccttttgggcatgccttattgaggtctgtaaaatcaatacaaacttgccatttcttgttcggcttggttaccagtacgggattggcaacccaagccgggtagaaagcttcaattatgaagctgttatttggtagcttctctacctcttccttcaaggctagagctcgctctttgtccaacaaccttcgtttttgttgaactggtcggaagttgggatcaatatttagggcgtacaaaattacagaaggatcaattctgaccatatcctcatgtgaccaggcaaaaacatctagatatgctctcagaaattttatcaatgctgattttacttcgagcaacaaaccttttctaatttttagggtttagggtcgaaatatctagatcgatctcgatctcctcaagttcttccacaggtccaacattgctacttgggtccccaagtnnaggatccacatcttcatcctcgccttgtgaagttccctacttagaaatgttttttcccttgtccgagctctggctagaggatacttccttcttagccttggctatggcaaggttataacattcccgagcaatctgctgatttcctcttagacaccctaccccattctttgttggaaacttcaggcgagaatggaatatcgacgtaacaacctttaagtcatacaaagctggtcagcctaacatgacgttaaaggttgacagaacgtccaataccaaaaattgtgccattatagttatgcttgtcgaagcttgtccaacagtgaggggtaggcaaattttcactacaggtgcgactccttgactggagaa

SEQ ID NO: 135536 - DNA, 694 bp, Cannabis sativa
tttattttaattaattattaataaaaattacttgatttaaattaatctaaaactaattaataaattaattttcaactttaatctaatttttaagataaataaataaaattttgaaatatctacatttaaaattaaatatatttcgaaatatatgtaacaaaaattatcaaaataaaataaaaaatattttaaaaattattttaatttgagttgatttaaaattgaaaaaattctaacttaaatgtaattttctattttattaaatgtattaaaatagaaataaataattaaatatctttaataaaattaacttaattattaattctttaatatctaaaaaatattctaatttaatgtggtccaaaatttaaaaattaattttcaacttttcattattaaattattaaataaaatataaattaattactagaaatgtcttatctagaatttattttattaacctaagtgtattttttctaaattaattttaaaataatctaataaaaaattaatttcatttattttagaattaattatgttgctaatcaatttttaattagtttaaactaatataattagcctaaaataattatataaataagggaaatgggccttcacaattggggtagttcatgtgaggggggctgagttcagtatatcgtacccactcctatggccccctaactctcacaca

SEQ ID NO: 135537 - DNA, 939 bp, Cannabis sativa
  modified_base (248)..(250): a, c, t, g, unknown or other
aatattacattgcagtctgatttattgggaagaataaagattggccaacagaatgatcccgaattgattgaactcagaaagaaagttgagattggtgctaaaaaggatttcactgtggctccaagtggactactaagatataaggatagaattggtattccgacagatgaccagattaggaaggaaatccttgaggagttccatactactctgtattccttaaacctggggacaacaaagatgtatcnnnacaccaaggcaatatattggtggccgggaatgaagagtgatattattgaatacgtttcaaagtgtttaacttgtcagcaggtgaaggctgaacatcaaaggctggcaggtttacttcagtccttgagaatacctaaatggaaatgggaagacataactatggacttcgtagtggggttgcctaggacaactgggttgatgattccatatgggtaatagtggatagattcacgaaatcaacgcactttttacctgtgcgagtgacttacactgtggaacagtatgccaaattgtacattaaggaaatagtgagactccatggtgccccaaagtcaattgtttcagatcgtgatctcaaatttaattccaagttttaggagagtttacagaaagctatgggaaccaagttgagattcagtacaactttttaccctcagacagatggccagtctgagagagccattcagatatgggaaggcatgatgcgagcatgggtaatagatttttaaggatcttggagcaagttcctatccttgattgagttttcatataataacagttattagagtactattggtttggcaccgtacgagatgctgtatggtaggaaatgtcgatcgcctatccattgggatgaggctggagaaagacgttatcttggacctaaattggtccaaaggacaagtgaag

SEQ ID NO: 135538 - DNA, 1370 bp, Cannabis sativa
cttcgtcttcttcttcttctctgctaaaaaaatgaagaggaaataacagcaagttaaagcctggttttgctattacgataactttgcctcctcttcaatccgaagcccaaacccaattagataaaatcaaatcaactggctccaatccctctcatttcacagtataacatcattatctttactcccagatgcaagcaaagacccaagcttgttgtaccgaagaacagtgacgacccctttatgcccattcaatgtagtttcataggtttctttctcaaaatcccaaattcgaatacttccatctgcatacccaatcgctacatgcaatcaaaccctaacttcactcccgaaagcaaacagaacaaaacataacattaagaagctaaagtcaaaaggttaccagagatgaatgtgatgcatagacagcgattgcggtgacaccgatggaaggaccacgagaagacgcagatgggtttaggtttttgatgcggacgccttgttgtaaatgccaaacctcgaccttctcgagggtcggggcaaggaggtgtttcctagagctgtcataggggatgtttgattcgatggaagcgatgacgccaaaggcagaagcgggctcgtacctcaagtaggatttcaccatggctttgctgcttctgcttctctgttatgactctgagagagagagaagaacaagaagagaagaagagaaagagggaattaggttttttttttaatttttatgtttttaaaattattttttttaatttttaaagaaaaagaaaattttttatttatttattttttatttttataataatttatttttataataattaattttttaatttttttaaatatttattcacgtggaccaataaaattgtgccacgtgtacactgtgtacacgtagacattccatggcagcagttaatagaaatagatggaaagggctaagtgctaacagaacttgggtttataaggtattaccaccaaaattttagaattgggggttagttgcaaaaacttagccacttaaggaggttatgccgcaaattaccctaattataaattccacttaaattgtagtttcgaaccaaaccaaaccgttttttatggtttggtttgagaaatttattggtctgttttggtttacaataatcaaaaagctgttatactggtttggttcaaaaaatatgaaaattcggaccaaaccaatccgtgaacactcctagcaccttgtgcattagagcacaaatataaaaaagagattatttaacaaatacataaaaataataaaaaaaattataagaatacagtttcaatgaattttaaatatttttacgaattttttgatattattacagaaaata

SEQ ID NO: 135539 - DNA, 1312 bp, Cannabis sativa
  modified_base (996)..(1002): a, c, t, g, unknown or other
  modified_base (1243)..(1246): a, c, t, g, unknown or other
gatcataacatagtaagctatcactagtgtcatccaaataaatatgggctttgaattttaaaattctcccactcaaataaggtactgtgataccatgtccaagaactttattgttatcaatttctattacaacagtaatatattaattggaacaaaaatttagatcaagaatatgttctaataatttgctaatttgttcattacattacatccatgtctaatcaaaatatgtgtgccgtagagatactgtggtgtattgagtatagtatagagttcaaaatgaactacatatgtcaatatctttatccacccctaagtattatagaaatcatgtggagttatgaataaaatctagagttcaatagatataaaagattgttgaattgcatatattacttcttaacttcttccacccctatcaaatcaaaagatctttttattaaacaaaatcttaataatttcttaagaattaacaattattcataaatattgaatttaaattctaattgtttatgtggtattaactctttacagaaatgaatataccatagattttgtatcaataataaaacgcaaacacatacaaacatgataaacatataaatataaagggtattggtatacacaagataaagaaaatatgaagctcaattcataaatgcaattcataatgaaatttcttaaagagaaaactttattaataatctcaaaaatgtcataatgaattgtctgcataaatatgaaatagggaatagaatcccaaactaataactgaaactaaattattcataaactgagacaattaaatcaaaaacgagcttcatcttcacttagaaaatctctacccttttgtccaaccatccgactcaacttgctaggatatcaatccatgtttaagcagctagggctgaaataagaagaaaataatcatggttaatagatctagaattaataacccaaagggataataattctttaaaacacatgagtttatannnnnnntggaaataccttgtttctttgcagaaaacttaggacactaggatttctagtggcccttttcattgcaatagaagcactttcctttttgctttgcatttggattagcagcctttttcttattagccattttaacagctttaagaggcatttagatattcttctaattcttgttttgctgggtttcgaagtagaggcaaagtttgcctcagtcctgctgtaccattagcagtgccagaactannnnctttagttcctcctttttgtggtcctccaatcaaatttttaaatgtctgaaggttgttgattaact

SEQ ID NO: 135540 - DNA, 1176 bp, Cannabis sativa
  modified_base (945)..(947): a, c, t, g, unknown or other
gttgacaatcaacttggggcgctgctttcaattgctcaaatgccaaaactaagttgacaatgaatccagaatggtcaaaaagtaagagacctcgtcctcaagttaagaaccttggaagtatcaaaacgagatctcgggggctcgggaacgagtgcccaacacccaagttgattaatgtggtttggttttgcttatccaattttgattccgtttcgaccgtccgtctagtttttcacaataactaatatccatgaagttagagaagtcaagttcataactttgtttgcatttctcatttcgagcatgcatgggaaactcacttggaaatgaacagttttgagtctctcatttccgccgaacagcaacatctccgagagctagtgaccagctttgccaaaacacaaaaataaactaagtgatattaaaatatcacttagggatcttaaagtacatcccttgggcatttttttacttacccaatgtctaggttaacgtcatatgtcaaccttggcgctgggatgtcagcctgggcgttggatgtcaacatgggtgttgggtcatgaaccgccttcagtaaaatggccataacactcaatattgcttcgattgacacaattcaacttgcattttgaagctaattcaattctctatcaagtctgtatcacacttcaatcacaattttgaagctattgaccttaaatttcaccccaaggaaattacaaaaataagctctgagttacccgcgatgggttccaccaagcttcaaaaaatggctatcactattagaagctaatattcactgttagaccatcatctacggtcaataatatctaattttcacttttctcctatttttttgggcttctttcacctataaaaggagagctcccttagctcatttttttaatttttagaatactacccataaggtcagagcatctctcnnnagtttctctctctagaaactagagcttaaacacttagtctttttttgtaattaccatctcgttaggaataaaaaattgaagtaccgcttcattacatcgcgacatggaaagtgaactactataaattttgtgtctctctaaattatttacttacattcattattaatctcgccaatttagtgagctggtattggccactttttagcatcaatattttggtgctttcatt

SEQ ID NO: 135541 - DNA, 637 bp, Cannabis sativa
aatttaaaatgtttgagaaattttaggaatttctagcaatgttaaacacattaaggtaagtggctaaagatcttgcgaactggtagtggtggagaaatatttggttatgcagttcaaagatcatttagttgaattttgaattgtattcaaacttaccttcctagaaattcagtttgcatattgatgaaagtataagatctatgcttagttacaagcagttgcctaagtccttctacggaaataccctagtgataggaaaacttcagaatgatgaaatggttgtatacttagtgtatgtcatgatcatgaacttaagaaaagctagagctgttaactagggtttgcatgtttgatagctattttaaagtgaataggggtggactatcctatggtcattaagataagaaagtgtttgttacaacaaatactacttttctaagaatatgaataaatttgaaaacaaagtagcaaagtagaggaaatgcattccaaagtgttatatcatcttattctatataagatggttccactgcctctgttgtattgacacaaccgatgaggacaataccattagtgttcctagacaaaaaatcacagtaccttgtcaaagtgggaggatttcaaggaatccacccta

SEQ ID NO: 135542 - DNA, 1507 bp, Cannabis sativa
taacattgttaaagaaagattaaaactttggtaaagagaagtgttgttcttcaatccgtgtatgtgcatttcatatttttttttttctattccatttttggtttattgagtagttttaatcctttttacaggctttagatctgcttcgtgaacaaggtttgattcacagattggtgaaaatcgaaagtacattttatgttttccatttctacatacagagtactaggaagtagttacttataaatatccatgtcagttcctatatcttttgtgaagagcctgattcgattcatgtgtttaccctttttgtttgtttttttatcgtgaaagtgttttggaataatttaatacccttgcagtgaaacttttttaataaaagaatgtaatgaaagaaacaaaagcaatgtaaacattggtacatacagtgttgctgaaaaatacttgtttttaaaaatcaattttatttagtaatctgtgtgaaaaacatcagtcgattcaagtgtttggtccttttggtgtgttttttttacccaagtgttttggtttacaatttaatacccttagcttccctattttgacccaaaaaattaaaaagaactatggtcttaaattttttaatttgattgttactttaaatgtgatgtgttatatgtttattatctgttgggtagtaattattgtactttaattacaaattttagtttggattttcctattgttataaatttgttttgaaaaatttgatggtttagacgtaagattactgagttaatgagatacactattgataaaaactatggcagtttttattctttgtgtaaatcaattatccaagtagttagtgaaattggttatgacagttagtgaaatttgttaattctgatattaaatgttttacaacttgttttgtacaggtacaagctacccaaattggttaacctttgggggcattttgtctattcatgtatgtgctttatgttcttggttctcacggattgtaccaacttgtttgtaccaactggtttgtactagtttttggttatggcggttagtagttaagtgttgttttgttaattgttttattaaaccctttagcaacttgaagtgcattctgtgcaatttaaatgaagaggtacaaggtaactagattggtgtgttttaataagtgttgtgttattgtttattatgggagttagtagttaagtgttgttttgttcattcttttgtttgtgcaaggttttgactctttggagtagttgatcaatggcttggaagcaaatttttttgtgtgtcaaacatcatatgtttttatctgttgtgcatggtgtgtttgaagtctaaattctgggaatgttttttgtttcgtataatttttaagttttggaaatcattgaattgaaatgagtttcacatcattttaatgtacttgaatgtttaagaggcaagaaacatgaaatgtctgttaatctgtggttagggctgccttgttttaggattataatttttt

SEQ ID NO: 135543 - DNA, 891 bp, Cannabis sativa
cgtacctactcccaatacttatcatatgtcactgacgcccatatctacacgtcgcctggaagaaaccctacaacagtttcattctatgccctaacctgccagttttcatataactgacatcatatctacacgtccctagaagtatcacatcacctcatcaggtgagcctgtacctacgctcgatacttatatgtcactaacgcccatacctgcgcccggtatgtcgccaggagtattacatcacctaatcaggtgagctcgtatatttacattcatagtatcattacattatcattgcttaaccaatcaatcctttcattatataacaatattaactatatctcaatattaatcaattcataacagtactaattgtattacgtacaacgtactatgcagtacaatatatttttcttatctcaagttctaaatcaggtatgttggaaaacctacttaaagtacgatcaatgatcctaggccctatgtcataacaatgataaaccaataagtgtttatccgaaaacatagcttaacagttgcaaatgacaacctaggttttcctaccaaatctcgtagttaaaatacactaaaataaagcttatattttggttctaaaaccaacaccatacggtagagctcttttcaagctttgaaacagtataaaagaacgtccaaaacggacactcgagtgaaaagttatggcaaaaatacaatttcctagttcgcgaggttgcccgaaacggtaaaccggttggccaaaatctattgatcggttccaaaactagttgaccaattttttaagggtaacgaccaagacgacccacaactgagaagacccctgacgacttgcgacgacccacgagaagcacctaatgttgggttttatgccct

SEQ ID NO: 135544 - DNA, 610 bp, Cannabis sativa
agtctagaacgttcgtacgacggtactattgaccaaaccatcagcctggtaagctagtcatactccagtcgtaccgatgtgatactgtatcagcctatactcagtacgctagtcatactctagccgtaccgatgtcatactgtcaaatagtacggtgctatcgactataatatcagcctatactcggtacgctagtcatactctagtcgtgcagaagtgatactgtcaagtagcacgaaagccaacatacatatctaatgtaatctaacacgcttactaacatgcacgctaaacatgtaatacatatgcatactgttataccaatcttacctcgattccaaattcaggtgtgctggtcaacctcagtggaacaactgctcggcgaattacaggctcctaaattgcatcaatcacaacactcataagcgacacgctaactcacttcccggggacttaaacttgaaactaaaagttcccaatcgataaataacatggcaatactctaaataacacaaaaatggaaaaaactagggctccaaaaattgccccaaccggtagaccggttgcccaaccgaaattccggttttgggaaaaattcctagaagccaac

SEQ ID NO: 135545 - DNA, 1268 bp, Cannabis sativa
cagatactgattttgtcttatttgtagctaaaaacaacaattgcataattaagttaactctatagccatatttgcattcaattatgatgatgataataataatgatgatgaatatataccttcaaaattaccataaggactagtcttccttatcttgttgggtcgagagtctaaatcttcattagagtcatcaatatcaacattatgctcctgaaaatgattaagataattaaataccataacattgaactcagagtttacttaaagaaaaataacattaattaattgtgttgtgcaaatttattccaactctttttctattaattcatacctttccatcactacttttggtgaattctgcctcctctgttgatccacatggaagcttaggaaatacttgattcgataaggactcacaatatttcacccaaaatgctttcgaaatttgctgcacaagataaaaccataaaaataaattaattatggaacataaattaccactaaagttaagctattaccagaaaacataactacacactgcaaccgataaaaatacatgtattgtatacatatattctactcatcatgcaaatcaaagaagcaccttttttaagttggagagattacgattaggggtatatatatatatatatatatataggaatcgaaaattcaacatatcacaagagacttactttaacatgccatcctctaattttagcacataaatttccaaagtaaacaaattagacaaacttagggtaaaattacaaaatcacaaaatcagggctatatataaatatatgtatacataataaatttagacgaatctaaccacaaaaatcaaggctatgaagctgtaatatctggtgtgcatacataataaaataaattatagaaaaataatgaattgaagttgatgcagagagagagagagagtagagtagtaacaatgtatgcttaccaacttggtgttgggaggagtttgttcaataataatactgaaaatttggtgagcaggaaactgtgtctcaacctgggcaatatgactataagaatcagaagaagccattgttgaacaattttttcgtttaattttgctgtgaaacaaatgatttaaacactattaagtaaacaaaaaagagggaaatatataagggaaagtttcttgtgtatcaagtttgggaaactttcctatttattgatataaaaatcttataattccaagatttttaacgggaaactttcgtgttttttttttttttttt

SEQ ID NO: 135546 - DNA, 1053 bp, Cannabis sativa
cggtttctacaggcctccctgaaccggaataccggttcagtgcaggaatttttcaaaattacatttctcaaccaattcaaccccaaacttcatgcaaccctccagacctactgattagaccccaatgaacataatccaagtgataaaacaaagcttcatacacagaaatgcatttcaccattaaaggttcaagattgagttcaaaaactaaaaactcgactaacccctcaaacagccactaattcatgcataaatcaacttattccaacataatttaaccatagaaaacacaattaaactatagcaacaactacaacaacaaaattcatcattttacaatgaaaaccaaagttttgggttcaaaactccatacttagttaaaatcaacaaacaacaacaaaaccctgcttgaatcaacatattaaaatataattaagcttcagaaatcactaacaaacacaaacaatagccacaaccacaaattgtcaagcatgcaaaatttctcaattcttaaaatttcaagaaaacaaagaggagctggatcaaagattacctcaactagaatcacaccaaaacttgttgcaaacttgctgacttgaagaacaaaatcaaacctagcagccccctaggatttcgagagagagaaagagagagctttgagagagaaaatggaatttgtctttctttttgatttttttccaatttgtaaaatgagtgacaaaaatgattttaattacttatttacttcagccaaataaacataacctaaagcaaataatcaccaaatattaagtccactaaaggacaaaggcttgtggggcaaaatgaccattttcccctcccacactaaaagggttaaaaagcacttaagggtatttttgggaaattctaaattcccgaccaatcccaacattcccaatctctaacaatgccgccccgctaaactaaaatactaatttctgattctacttagccatacaccgcgttccatgcaaaattatgaaatttcactatatggcataaaaatgccagaattcaaataaatcaacataa

SEQ ID NO: 135547 - DNA, 523 bp, Cannabis sativa
cttccgactaattcccagcttatcaagcgcaagcttcctcttcaaccgacgtgtcaaaggtgtggtgaggaagctgagacgccagagcatgctttagtcttctgctcttccttgcgaccgttgtgggctcagatgcgggtttggaataggctcgttcggggtagtgctggatctttggcggagttgttggtgtttctttttgaggtacttgatcttaatactttttcattattggcgatggtgtggtggtggatttggtttgataggaactcggtgctgtttgggaagaagcaatctagattggatgtgattgttgatttggctcgggatgctttggcggaatttcagggggtgggtttgggggatgtgggccgggtgttgggtgcctccacgacttcaggggtaatgtgggggagtgggtgtggtgaggggaggcgaatcaattggtgtccgcccgggagaggggagtttgtgttgtcggtggatgcggcggttaccacggggaggggttttgtgggccttg

SEQ ID NO: 135548 - DNA, 2184 bp, Cannabis sativa
ttcagggtccgatacacaccttaggtacggcatgctgagtcctctttggtagagaatgttatccatcatcacataacggtgcgcttgatattatatctttctggatggtgccttttcttggggaactcgcctttggttatgtattcgatgatggggatcatccagttgagctcttgttcaactgccgccacaatacttttggctttaatgcttggtttcgagaggtgttcaatgggcaccacccacagtttctccatttcgctgtctgatgctaacttagccaaacagtctgcgtgagcattcttttctctggggattctttccactttgtagtccgtgaactcatggagcagctcccagaaaattgctacatacacggccattttttctccacgcatttgatattctcccgacacttggtttactaccagttgtgaatcactgaagacttctactcttgtggcccccacggcttttgctaacctcaccctgcaatcaaggcttcgtattcagactcattgttaaaagctgtcaattcaaaacgtagggtcgcctggagtcgaagtccatttggggatatcattgccacccccgcttcggatccattttcgttcaaggcaccgtccacaaagactttccatgttggggtttgtggtgtgggcacgcttgcgctagcttctgcctcatggcactccgttatgaagtctactagcgcttgtctttttatggaagtgcatggtatgtaatgcagatcaaactggcttaattccatggcccatttgagaagtctcccggatgcctccagcttctgtaggacttgtcggagcggatggttggttaataccttgattgggtgagcctgaaagtagggtcttaacttgtttgaggctattaggaggcaaaaaactagtttttcgatcgccagatatcgtgtctccgcccctatcatgcatttgctgacatagtacacggggtgctgagttttttcctcttcccggactaaggccgcgctaaccacattctcagagatagccaagtattgtaacaagtcttcttcgaggacaggttttgataggattggaggtttagccatgtgttcttttagttttttgaatgcctcctcgcattcgtcggtccactcgaatttttggcatttcttcaggatgttgaagaagggaatgcacttatctgtggattgggagataaaccagctcaaggcggcgacctttccagttaagctttgtacgtctttgtgcttcttgggagaaggcatattcaggagagcttggattttttctgggtttgcctctatctctcgttggctgacaataaatcccaaaaacttccatgacttgaccccaaaagtgcacttctttgggttaagtttcattccgtatctttgaaccacttcaaagcattcctcgaggtcatttgcatggcttgcacatgccttcgatttgaccaacatgtcgtccacgtacacctccatgtttcgtcccaaaaggcctttgaacatctggttaaccatccgttgatatgttgctccggcgttttttagtccgaaaggcatgaccaggtagcaatatacccccttatcgatcctgaagctagtgcattcttgatctgcaatgtgcatcttgatatggttgtacccggcataggtgtccatgaaggacaataacttgaatccagaggtggcgtccaccatttggtcgatccgtggtagggggaagcagtcttttgggcaggccttatttagttcggtaaaatctatacatacccgccgtgtcccatttggtttaggcaccagcaccggattggccaaccattctcgataatacacatcccggatcatgccactagctagtagtttgtccacctctttctccaaggcctctgcctttacagggtcgaggggacgccgcttcggctgaactggtggcatatccgggtaaacgttgaggacatgggttatgacatggggacttatgctggtcatgtctccttggcaccacgcaaaaacatccgtggttgcccttagtgctttaattatttttttctttttcctccaactctagtctttttcccagccggagaaccttggcagggtcaaggtcgcatactggcacttcctcgacatcctccatgggttctacaatatttttggatcccacacggggatcc

SEQ ID NO: 135549 - DNA, 684 bp, Cannabis sativa
  modified_base (229)..(238): a, c, t, g, unknown or other
taaattattgtttagaaaaaaaatcaaattattaaattaattttaaattttaaattaaaaataataaaattatgtctttacaaatgattaaatttatgacattgtagttttgatgtaagagaattttaccacttaaaattatattattgattgtattgattattttagggttaaataacttgaatattttgtactcttttagctataattattgttgagtagaaaatannnnnnnnnnattaattcaaaattaaaaaataattataaagtaaataagtaagaaaaattataggtttggagttagtattggaatattgttagttggatctaaattaatatttaatattaattataaataaaaaatattaattatggtgtagttttcaagagttaatttaagccatttaattaagagacgtgctaagggaactctctatcctactctcttttgcactctctctttaatgtgatgacacatgtcatatatttaccaagaattatttttacttaataattaattataatattctaatgttattacaattgttctattactacttctaatataattactctactaattttttcgtttataaaagaattaactacattaagaataaaaattaaaaaaaaaaacatatacatatattttaaaataaaaaaaaagtaacaattaatatttat

SEQ ID NO: 135550 - DNA, 1552 bp, Cannabis sativa
agacattgggaatgtcgggatttgtcgggaatttagagttttcccaaaatacccttagtacccctttatgccattttagtgtgtgagggcaaaatagtcatttttgtacatttgtaatttgtcttttatggatatttaaatatgtttgtaatccgaatttctaatttggtttggctgaaacaaataaagaaaaatcaattttataattgattttattaaaaaaattggaaaaaaggaagcaagtctcatttctctctcaagagctctctctctctctttcggttttgcttggggctgctagggctgagatttttctttgcaattctagtattttcagcaattcttagagtaattcaagtggaggtaacctttgttctagcttttctttattttcttgaagtttaagaaaaagtgatttattgcatggttgatgaaattgtggctgtggctgtggctgttgttattgtttattgttgttttcttaagtttaaacatgtttaattgagtagaatagagcaggttttgatacatgattagttgattttaagcaaatatagagttttgagctaaaacttggtttttatgggtgatttgttgttttagcttgctgtagctactgtggttattgttgttgtgttctgcaggttagatatgagtttttatgtggtttaatgcatgagttaggggttgtttgaagggttagtcgagttttgagtttttgaactcaatcttgaaccttcaatggtgaatctcgtttctgggattaaagctttgttttattgctttggaaatgttcattagggcctgattagtaggtctggaaggttgcatgaagtttggggttgaattgcttgagttatgaaaatttttaggtttcctgcactgaaccggaattccggttcagtatggcctgtaggatccgaaattctggttttggttctgggttcctcccagaaccggaattccggttgtagaaccagtctgttagttggggaaaaatagggaaccctagttcttcccatttttgtgttgtttagggtattcccatgcttttatcgatagggaaacttttagtttctagtttaagtcctcgggaagtgatttagcgtgtgacttatcaatgttgtgattattatggtttaggagcttgtaattcgccgaatagttcgttccactcaggttgaccggcacacttgaattctgaattgaggtaagattagtataacagtatgcatatgtatttacgtgtttagcgtgcatgttaggaagccttttagattacattagatatgtatgttggcttcgtaccatcggacagtatcacatcggtacagttagagtatgactagcgtaccgagtgtaagttgatattatggtcgatggtactgtactgtttgactgtatcacatcggtaaggcttgagtatgactagcagctagagtatgactataataccaagtataggctgatactgtaacacatcggtaaggctagagtatgactagcggctagagtatgactagcgtaccgagtatgactagcagctagagta

SEQ ID NO: 135551 - DNA, 616 bp, Cannabis sativa
  modified_base (50)..(51): a, c, t, g, unknown or other
atgtcccagatttctaaacaattcgaatgaaggtaatgcttttgtctttnnatcatgtgttttagagaatgaaaaatccttctggattgttgattctagatatacttacgatgttttttcttcattgcaactgcttaaaacttgggattatttgaatccagaggagttgaagctcaaagttggaaatggtgagttagtattggtccaagccaaaggaagagcctgcctcaagtttcagaagaaatttttagttttagacaatgttttgtttattcctaattttagtagaaacttcattagtgtttcatgtttacagacacaattttataaattgaatttttcgagttctgtttgcataatttctcgtaatggatttcaattatgtgttgctcacatggaataatgaactacacaattttatgttttaagaccggatatacaaatcgcacttaacaatgaacttttcaatattgctaaacctagaaaccttaaaagaaaagagattgataataatgataaacttatctataacatttatgattaggtcacataggctatgatatactccataggttaaccaaagatggtccattgaaaaatgtcatcttgggtgaat

SEQ ID NO: 135552 - DNA, 811 bp, Cannabis sativa
ctaacagaatagtagtaacgaaaatgcctaaaatacaacatttggtattaaatctgccaaaaaaaaaatatagtatttaagtgtataaaattgaaaacatatggcatttatgccgcaaatttttgtttcccttctccaaatctagcctcactcagatttgggttcaacactctcatcaagcttatcgaactttcacactcatcttcacacaatcaccatatgtagcctctcgtcatcacgcaaagcctcttctcaagcctccattatcgtttaactaggaaacaaaccgcacttcgcgtgtggtttataaatatttttagttatttatataaaattattttagtaacatttttatcataattcacaatattataataataattatttactcaattaattttataaatatgcccctgactataaaaaccttattattattaggttatttatgaaccgtgtctcttaatataagcatagactctctttttttattacaatgagcatagactcttgatgtgtaaaagtataataattataatataaataagaaaaaaatacaaatcatgtaccagttagtataataaataggatattttttttcttgatttatgcttttctaaacttttttttttaatttttttttcctaaactataactatcattacaaatgctatctttatttatttatgttcatcttcttaaatagtttgctgacatgacactaatgtatttaaaacagaaaaaaatttgatatatttattatataaaaagtaatttttaccataaaaaaactaaggcgtttggttgggag

SEQ ID NO: 135553 - DNA, 536 bp, Cannabis sativa
aagatcagatattacttattttattattaaaatttgaaataatcttattttgatattaaaatattaataaaacttagaaataatctagttaaaatcttaaatttgttaaccatatcagattttcaaaatttattatttttgaaatatatttttattaaaattaaattataatattagaaaaatgttgttttgacattttatcttattagatatttattttaattaaaattttatttttggaaaaataacatgaaattttgaaaagtttgttaattttggtttgaatagaaatttagggttaggtaaccataaaattttcaaacttaggatattttgttttatttaattattagataaaattgataatatcctaaccatctaaatatcttaattttcaaattgtttattttgttaaatttattttattaaattataagagtagatatataatatcaaaaatatcttaatttttaaattaagagattatattatcttatcttattagatatttaattaatttaaattatttagataaa

SEQ ID NO: 135554 - DNA, 1198 bp, Cannabis sativa
gcccgtccagcacgagatttccttcttttcccccggtagtcgagcaagcttttgagctctatccctgagagcaagagtgaggggagggcggtgatatgttgaaatctactagaaccgagtgcgaatgatgcccgtgccatccaccatgaagtactcatcaacaaagcgcccaatcttgctgatggccgagtcgtctgtgcccgtcaaccacttaaagcctagttgagagagttagaagtaccccgacctgccttgcttgggggtggacttcaaatcaaagaaccaggaaacttcgcgaggagaaggcataccccatttcttgaaagcgtagaggacgaagagagcagacaaatatttgatgcccttagtagtgaattgggccaggcagaggccgaagaagtctgccacattcttgaagtattgatgcaaaggcatcaatgccccttgttgaccatgggcactcgacctggtgcacatcccctttttagggtttgtggcacgattgttgtgggcgggaatgtaccaatccagtaagtatccgtcttggtcgaaagtctgaaagcgcgcctcagtaaccctggactaagggcttacccacctggcgcccaaggcaccttgccttctataaggaaccgcagcagcaagttcctcacttacatagtccatgccctcaaccaggatgtctccgtcagcatcgactgactccctagccttgttgtactccctgtagtttggggattcaacatcgtcctactcctcgatctcctggacctcagcgttcccttcatgatccccctccatctaagtggctggatcttgtttggcgctgggaaatgtggcgggctgagcaacttgagggtcagatgcgtcagccagacgcgttgttttctttgtacgagcaatcattctatggatgggtacagggtttgagaatgtccttcactagaggatggtgggctagaacgaagacgaggatgatcctcgtgcaaaagttaaagcagaacctggtcgatccgatgtccgttctcccaagactcacctaagttcatctacaaaagacaacacacacgatgagcgtttctatcgaacaataaacaagcaaatatggcgaccaggagtactcaacagattaaagaacgagaatgttcaaagaagagtcagaactcaagaagttagaaattttcttgagttagggcaa

SEQ ID NO: 135555 - DNA, 599 bp, Cannabis sativa
tataattcttagataatatatttagggtatattcttagctcaactgctttttgactgatatcttgcctagtgcatatgcatcactatttatagggctagtaagcttggggaggaagagtttcccctctcgttacaatgcgtataaacagaaagatcttgggatcaatgctgaatgcaaggatcatgggattgaggctaaatacactgatagcgggatcgtgtgtatgccatatccacgtaaattgatccctgagttatagggattatgttgatgactcacgatgcgaaagttgaattcgctaattttttggccattctgtgcggattactgaatactttgctctgggcatgccagtgaggcatcctgctcagactgtgcttcccgagcagatgttccaagtagactccacgtgtcaccattgatgtgatgccacatcagagtacaaaaattgggataacatttgccccccaagtctgtacaggacttccaaagttacgtgtagactttattcgagtcgcttctacttttggatggggacacgcgtcgagcgcgactgtccgagactccatgtgaggctgactgggcctcccttcggttt

SEQ ID NO: 135556 - DNA, 711 bp, Cannabis sativa
tctattttgaggtactatattctcagttctttccgtttataattatatagtgagttttattcaattttatcaattatatgataagtttttttataacagatttctcaaaaaaaaaaaaaattcgaaatttttattcttgatgaggatttttcaatttttaatcttttttttatctctattttggttttgatttaatcttttattaccttatattttttgataatattctttttatttcttttttaaatcacaaattatatgatgagacaagtaaagaatttataacaaaatcattcacttatgtataaaaaaaattattagttaattaactcaagcatatgatttattttatgtacagagcaaacttattttgatcaacagtgataactacaaataagatatgataatgatagcgactttgaatgtagtagcgactacaagtaagatacggtgatgccatcggctttcgatgacaacagttttaaaatcatatgatgagtttttttatagatttatcaattgatttttttagatctctattttgtgtgaggattttcaacctctattttttgttattttactataatgtttcaaaatattttttttgttgctttcttttttaaataagaaattgtatggtaattttttttgccatattaatttaattttttgtataaaaattatgaaaaatgttagtgccataattactca

SEQ ID NO: 135557 - DNA, 574 bp, Cannabis sativa
gaactaataaaagaacataaacatgccaataaaagaaactagttacattgttatcttaataaataccaattaaaaaaaacataattgttcatgctaaattctggtcaaacaaatccacacaccaccgctctctaaatttcttcatattgtcatcgttcacattattaaacgtagcctctagcatactatgctcgatgtgctctatcacatacatctcgcagtcaccgctgtatgagacaataaaaagtaaataaataaaaatatgcaaattaaattcaagttaaataatataaaattaattgtaattaagttaccttgattccgtctgtcaaacaatgctccggtcgatgacttttgaagtaaaacttctaacctgctctctgaggcggtcagttgaggcaagaggatcatgtcatgactctcgaataggctagcctgcagcatcaaagtgggtagtatcttttcccactttaccaagtgactcttcaattcattcggggaaatcgatccgaggctcgagtcaaatatgttcaacaaccaatgatccagatctacctctagtgtcacccaatgc

SEQ ID NO: 135558 - DNA, 977 bp, Cannabis sativa
aaaaaaaaaaaaaattatttcaaggtaattttttttttcatacacatttaattgcttattttgaatatttgatcagtcaactttacaattagcacatatataataatttttataatataactaattctatgtttaagatactatttggtaactttataagtttccatattaagatatcgaactttttttattaaaaaaatttgttattaatatagtatatgtaacttttaaatacaacataacaaaaaaaattatagtaatttatgatgttacttgatatgttaaaatttattaagtttataagattttattactttttgttacaaaatataaaaaagaaacaaaaatattacttttaatatttggtcgttctttgttctttttcagagacagtaaaaagttaatttttaactttaaaattataattttattttttagatttttatgttaaattatgttagataaatataataattttgttgtttaagatacattagtgttacttttaattttgggatttttttttgtggtggcgaaaaaatatacgctttccacatgttaaaacgatcaccttaaaaaaataggttacaataatgtaatttttgactttaaataataaatggtgtgactaaatttttttaaaaaacttttgaaaataaataaagaaagataaaaaatactataatacaattttaaaacttgaataattatcaaattataaagtggagagagatggataataataagcaagaataataaaataataaactaataaaaaatgttataaaaaaaataataataatgacaccaacaccaaacagacaacaaatgttaaaaaagaggagagagacaatgattaaaaagaaaatgtatgactatttgaatgtataaagtataccgagtatgaatataagatacggtgattctacaatgcacctccttaaaatggatgtattgatgcaccctttacttgtttc

SEQ ID NO: 135559 - DNA, 549 bp, Cannabis sativa
acacccaaaaatttggagttttttcaattatgtacataaaatcaattttattttctaaaagacgggtgttgtgttgccaaacaaaattcgaaataattcgtaccaaaaatagggaagtcttgtttctcgaatttttttatttataatatttagttactttgttcaaaataataaaaaaaaaaaacttatttcatacatataaaagatggaaaattatagaaaatgactccaaattataccactatataagtaaatatgctttcattttaaaacttgtatagaaataacctttttacaatatttattatttgtattgtcttttaaggatgtctctcatctcgaaaagctttaacttaagttgaggtggagttatttttacgaggaatttgttaagtttgttaagtcgtaattgacttaataacttaactattgcaaccaccgactttgggatccatatattcctttatctataaataccaccatatttatcatttgcaaaatggtgtgatttaagaagtgtttttcaagattgaagagagagagagagag

SEQ ID NO: 135560 - DNA, 1005 bp, Cannabis sativa
  modified_base (586)..(586): a, c, t, g, unknown or other
ctaagttgtcatctttagggatgagtcagctagatgtcgcatttacaaatacttatctgttaagatctaacactattatgttgtctaaccgatgacaatctttagaggatgtcccgttaaaaacaacaaaccaaattagaccaacaatgaagactcaaaattggtactacaattatttatgacagaaaatacattgaaggttcaatataaattcatacacaatttggaaattattaagaatttagcaagtaacaaagatatgtcaaaatacaaaacaaacacatcttatataatttctaagatttccaaaaaatcaatacaatatgccgttttggtgagagtcaaagatatcatttattgaatagagttgttattagctcatctaaaatggacaccatttaacaaccttttattctatcgaaataagactcttatgatgtcccgttaaggcgagagtcaaggtcattctatttcatgagcttctactattgttttatactttgtaagccctactcttagcagtcactattggggtgatcgttactaagaataaattacttataataatacttatctttcgagattntacgacgttaaattgctaatgaataaatatctattagggatgaatctcattaaaacaagaattatgtagaatcaacaatgaagatcgaatatccttataactaaatatcattatttcaaagaattgtattttcatttgatatttattttaatacaaatatatttatttaataaaattaccaatttagataactctaaatataaattttaatttaatattataaattatatacttacttggatagatctgaaaatttatttttcatccttagtattaatttttaataaatattatgaaaattaattaatttaatttggtccagaattaattaagattaattttcaacttaaatctaattttctatatatatctaattaaattcgaaatccaatgtatattgaaagtacattttcaaattc

SEQ ID NO: 135561 - DNA, 1143 bp, Cannabis sativa
gtacagggtggtgtttgggctaatgtgtgactgttttgaggtgttgtagaagctctttgggatctggtttgtggtgttctcgaacaaccctctcctttcctagttctggatgttgtttgagctctgttttggggtgatttgttgaggtctgactgccctttgtttttcctggtttggggtggtgttttggatggagtttttgacctacttttgggtgattgcaacagctcagtctggcaactttttttcttggttggaggtggtgtttgagatgttaattgggaccttgtattgggtgatgtgcagggatttaaatggccagttttgccttgtgtttgggatctggtttttggtgttcttttactggtttggatggtgtttcaaatatgttttgggcatgtgtttgggtattggggtgtaaatgggcctcctctgttgggccttcattgtcagactcaatatccaccactgtctcaataatttggacactagaatcagtgtcttcatcacttcctccaacaccatcttccatgtcaaactctggcatgtcaatatctggcatgtacacaacaaactcatcaaccccatcatcagaatcaccactggaatcctgtaaattctctgccaattcctcttcaacatccctcattgctgctttggacataacatagtcatctggtctagcacttacccgagcatcaacaatcacatttgcatcatctggtagctcctctattatgcatcttttcagcttacttccagcaggtggtgtattctcaacactcacatttgcatcaacaggcacaattgctaattcaccattgttgcctccaaaagttccagataaatcagcataaacatccaccttcctatatctctgttgtctcatgtcctcaaacatagccaacaaatccttgtcagtcttaagctcaaatccatcatgtagttctttgtctttaggcttaaaccagaaatacagaggggaaccatgacaccactgtacttgcaaaagcatcccttcaagttccatcatgttgaagaaatctgtatggcacttatcaaactcggttgtagtgccacccacatagtgtttcaacccatttctagtgcaccaagaacccccatggtgcatattcacactaa

SEQ ID NO: 135562 - DNA, 523 bp, Cannabis sativa
  modified_base (459)..(460): a, c, t, g, unknown or other
agggcaggctcttttgcaaagtctattatggtgtttggattctcagttgcggccaaagtttattttctctgattgcttgcttttggtttctaaagttaacagtgattggcatgatcgctctgctctttctggtctggtgtctcggattcggtggctcttctccaacttccctgaagcttcgttgcatttccttcctcatcaactcaacatggatgcccatggtcttgcaaaagaagctcttaggctgagagaagatgtctagtggggattgatcggtcccttctgttaggtccttttttggcaatttagttgtcaaaatataatttaattaatgtgcattttattgagcattcaatttgttcaactctggaccctttttccagggggagttgtgtttggtacttatgaacttatttagatcaaaagttagcatgttgttttgttgttttacaatttcgnntgtgttactcaaggggagttgttatttgttcttgctaactttaatttgcaggtactttgtgtt

SEQ ID NO: 135563 - DNA, 572 bp, Cannabis sativa
tggtgggattacaaagctcctttgaatgcaagttggtattggaggaaaatggtggagcttaaagacaaaatcagattttatgtgcaacagagtgatttttcagcacatgaatatcaaattgggaagggtcaaacatggtttgctcaagagttagaaaaggtatcatggtgtaatgaagtgtggtctagactaaatacaccaaagcatagctttgttctttggttagctatgatgaatagactcaagaccaaagatagattacacaaacatggagtgattgaatctgatacttgcatattatgcaattcagccacagaaacaattgaacatcttttctttggctgtttttttgctactgcttctctgtcacaggtgttgcattggctcggctggaatacaaaagaaatatccctccaaagtctcatgaagaggttgagaaaggcaaagtgtagcaggttcaagaagaaagtgaaggctgctggtttagcagccctcgtctacttaatatggcagacccgaaatgagtatcaatggggggaaaaaaaaactggtgtggaagaggttttcaagca

SEQ ID NO: 135564 - DNA, 719 bp, Cannabis sativa
catggaggaagtccttgcttactggagcaagctaaaaaaggtagaggtggaagctgagatgtcaagagaagttatcgaagaagaacaatccaagtcttctactatgtaggcttggttattaattatccactccattgctcgtattttcctttgatattgtttaagtagttagtaatctactatctgcgcgagcagttattatttgctatgctttctgtttgcgagctgttatcaattctgcttcgcataaagttataatctattttaagcaagcttgaatatacttttaatgatcatcactttgtatatttttaatttcttatatgaatagttaggccttctgttcatatattagctttaagtattttttcaaggcatcttcgtgtctcgtttaatagtttcctgcagaatgtgagccgttagtattcagttttgcatgtagcttaatgttgtttttattagttaaatctcatttacaactgctacttttcatttcctttctcgcgagaaatgttgtttaatcaattatctgaagaaactttaaaaaaataaaaaaaaattaagtggagtgggtttgcattatatcatgtatatccagatgaattctggttaattgtacacacatatatatgcccctcaagtaattttaaagaataaaactttgtaattacttgaaaaatgattcaactttattaataattgaatttcaaatattacat

SEQ ID NO: 135565 - DNA, 829 bp, Cannabis sativa
tgttttattgacaatcccttggcaagtactaccatgccaacttatagtgagtctcccgttgatgatgttaattcatcaacatctgagactctcgtgttctttttctatcattaacactaagattgcactccctagttcatatgctaccactgctttcttgcaatcattactatctgcatacttggttaaccactctaaaacttattttacacttaattatatagcttgttgtttaataaacaacttactttgtgatccaacattcaccaatcactcaaatagatatccattaaatttcatctcaattcataagtttttccccattctgggtgagtatgccttcccataattgcttaataaagtaatcctttcccagaatttcaatggtcaacttatatattatattgactatccagtcaattataaagtactctccatcaataccgtatcacattggtaatcttctttaccttagtgataccactattcatcctgacattcttttatacgttaccccggtaacatccccacttcaagcctccgttgggcccttacgcccacacaatgatggctcttatacacgagtgcatcactctagctatttcctggactgacaactggtcccacggaccaatccaagtgtttctaacgtgctttgatctgactagcacgcttcatggggaaatttcctaaataaaattacctcaagtcaaggacactagttctttcatggtgagctaccaaaacaagatgcttcttgctaacataggtagtcccacgcctacataatctcaaaattactacacaatcgtcaccttcaattcatcta

SEQ ID NO: 135566 - DNA, 725 bp, Cannabis sativa
ttgtccttctagattgacggttgtgaattaactgccaatttaatagaattacaactgtctgattttgatataatccttggaatggactttttctctaaatatggggcaacgattgactgcaagcggaagatggtggtgtttgagcctaatagtcctaacccagcagtgtttgtgggtaaagttcagggggcacggatacctagagtaacacttttgaaagctaaggacctaatgtgcagaggtggtctgggattcatagttactgcagtggataccagccgacctgtgacatctggacctgagagtaccagattggtatgcgagtttcttgacgtctttccagaagatttaccgggattgccacctacccgggagattgaatttgtaattgagttggttctaggagcagaactagtatcaaaagcaccgtatcgaatggctccagcggaattgaaagaactaaagatacaattgcaagagttattcaatctgggattcattaggccgagctactcaccttggggtgctccggtgttgtttgtaaagaaaaaagatgggtctctgtgaatgtgcattgattaccgagagttgaataagcttacaatcaagaacaaatatcctttacctcgaattgattatctttttggtcaactgaaagggaagacagtcttctccaagatcgatcttcgctcaggctatcatcagctgagaattcgagaggaaga

SEQ ID NO: 135567 - DNA, 891 bp, Cannabis sativa
  modified_base (849)..(854): a, c, t, g, unknown or other
ctggtcgagtcaatgtaaggtagattagacttcccaccagttgtcgatacattgctcaatcttacaagtcctttccagtatgagcacatagcttagcattagcttccataggtgttgagataggcttgcactcgagcattccaaatctttgcagtaaatctttagcgtacttttgctgacagagaaataaaccttccttagtttggtcaacttctaatccgaggatgtgtttcaattctccaagctccttcatttgaaagcgtactgatataagttctcctttgtttgataaatttctgcgtcatcatctctagtgataatgagatcatcgacatacaatcacaatctttgcttcccttattttaacgaataagcttgaatctgcatgtgccatggaatatccactttctactaagaactcggtaatcttttcataccatgcttgtggagcttgctttaatccatagagcgcctttttcaatttgcaaacatagtcaggatgtcctctgtcctcaaatcctcttggttgcaccatgtatatctctcgatctagttctccatgtagaaaggcattcttcacatccatctaccatagcctccagtctttactagctgcaagtgctaatagaacccgtactgttgtaatcttagcgactgggctaaatgtctcgtcataatctagcccatattgctgagtgaatcctcgagcaactaaccgagccttgtatctctcaattgaaccatcaggacgagtttttaccttgtagacccatttgcacgaaatgggtttcacttccttcggatttagcaccaactcccaagtttgattcttcgctagcgcacttattnnnnnnttcatagctcctagccacttggagttttggtatgcct

SEQ ID NO: 135568 - DNA, 900 bp, Cannabis sativa
gtggtagcaagtcttggttgttatcgcccctctaattttgatcggccttgaaatacttttgtatgtgcgggttattcattggtgtcgtggctgtagtctccatgaaatcgacaaaacttggtcatgtctctcttgctgacatcttttttcatgggtgaaggcttcttgtatggggctagtgactgagtggccatgtaaacactttctttgtcctctttcaagattgtaaatgcagtatacttagtaggattctctcggggagcttgttcggttgtgcaggtgaattttcactttttcccattgccttgcctattattgttgctggaacatttaccatttgagcttggattgcttggctaatgggggagctggacgaatgtcccaatggaaggagcttttaacttgccaggtttttgctcaccttctgttccctgaatagcctcttcaagtttgataaagcctttagtacagtcaagaaaatcactcatcgagtctaccggacctttgttccttatgtccttccaaagctcaccaaggacttcaatgccccatagtattgcagacaactttccgtcttcggttactcgtgaaaccttggtcgcctccatcatgaatctactgatgtaggctcgaagaggctcgccttgtttttgtcttacttcgaccaggtctactaggtgcaacagaagttggcgagaggaggaaaattgtgcatggaattccgaggagaaagatttccatgagttgaactttccaggtgccagcttgaaataccattgctgggcgactttcgagagggtgacaggaaaaattctgcaacatacgtctcctcctactccttgcagatccatttgcatcttgaaatacttgaggtgtgaaagaggatcttcttttccagtg

SEQ ID NO: 135569 - DNA, 661 bp, Cannabis sativa
  modified_base (526)..(527): a, c, t, g, unknown or other
ttttctcccatttcaagaactcagttgatgctagtggatgaggatggtaccattgaggaagaaattcattattagtttagtcttattctacttattaaacttccaataaaactaatttgtatttaagttttaatggatggtcttgatgacttaaattagctatgttctagttaaaaatgagaaataataaatgctagatattaattctatctattcggtgactacataattgtggagatattattgctcttttatattaatgagtggtcctcattttattactaatattttcttatcgatataggatttaatctattatttttaaataagtgttttttgatataaattaaatgattatttttaagtgttatcttcctacaagggtcaaagtgtgacctttgactacccaagttatggatattatgtatctgccacagcctaaggcccgggtcgtgacagaaaaatggtattctgcaattgtagcctcaatagattttcttataatttgggtatgttattttggggnnaatttattaggaatagggttgcatagttatggtttatttcctaatttaagaaaggacttaagaatgatgcataattattttcgtatccgaggagtagcgggtgatttacctcatggctggatagataaatgttt

SEQ ID NO: 135570 - DNA, 802 bp, Cannabis sativa
  modified_base (484)..(487): a, c, t, g, unknown or other
gtaaatttgaaaaaaaaaaaaaaggttaaaaaaaatagtatatgggataattcccctaattttaaattgttacacataattttaattaaaaaaagtatagtaagaatgacttttttggaggtaattttaaactcaagtgatgatagtaaaactataatctagtaatgacttgtaggggttatatagttatgggtgatcttcgtcccatcttcttgtgtaatgttatttataaggttgttattaatagaaaaatgtaatagaataaatgaagaataatcagaattaatatttgaaatattttgcttactaaaactatttgaaaatggaatgatagtgatttatcttgttaataaggaaatataagtaatcagaatgtttaaattgactaagttattctttgaaattaaaatatagtatatgttagttattttataagacatattttaaaggataaaaatattattataaatttaatattaaaaannnnaataaaaataaataaaagtcataactcttaatggcattctttagaaaattggtggaagaaattctccctatttttttttccttatttaatcaagttctccctttttaaaatttaataaattaaggtgctatttagtaatacttttgttttttaatttttttagtcacaaaatgaaagtaaaatttttgtttttaaaaattttatttttgaaaaacaaaaaagctttcggtaaccaattttgtttttcaattttaaaaatagaaaataaaagtttgttctgtaaagtttattttcattttttattttttgatttta

SEQ ID NO: 135571 - DNA, 522 bp, Cannabis sativa
  modified_base (47)..(54): a, c, t, g, unknown or other
  modified_base (338)..(338): a, c, t, g, unknown or other
ttagaattcatattaggatgtgaatgaaacatacttggtagtaaatnnnnnnnntggtaaaatatttccaacaaagtcatctctgcaataaagtctatggacttagagatgaagaatgacaagttggggagctctaatggtgagctgaacttgagtagaggaaggcctcatgaaaggaagccttggaacaatagaggaaggagtaacagcaaagattcttccaagggtggaagacagggaaatcggaagtctccatcaagagggcagaacgatcctaaaggctgctatcactgtggtaaaccagggcattttagaagagactgttatttttggaaganaagtaacagaggaagaacagatggtagcgatggtgactcaaatcaaggagaaaatcattaaggaaaagggaaagaagcatgaagccaatctaagtgatggctatgagagtggagaagtttacattacagcaactaaattcaaagatgaatggattttagattcaggatgcacttttcacatgac

SEQ ID NO: 135572 - DNA, 776 bp, Cannabis sativa
  modified_base (326)..(331): a, c, t, g, unknown or other
attaaaataaaaaactaaaatattaaataaaattaaaactacgtggcttgacacgtaacaatcacctactatacatatatatgtatatatttattacatttatacgtgacatatatacatatatgtatatatttattacattattggatgtagtccctttgtagtaccgatctttgcaatggcatatactagctattgggtaaatattattttgagccttgtattttacaaaaattataaattagactttctattttgttaaatgataaaatagaccctatattttctaaaattgtacaaataagaccctgaactaattttttgtnnnnnnaaaacttaataataatccgatctagaaatgttatgataaaactggttacattttttattatctgttcgtattagaaattgtcttaaagttgattatattaaaaaaaataaaattattaaaaattaaacttagggtcttatttataccattttggaaaatataaggtccattttgtcatttgacaaaacagagagtccaattggtaatttttacaaaatacatggtccaaaatagtatttacccttaattatctgtaaaattttatatatatatatatattttttttttgaaaagaagacgttgattgaaaaatatataattagacctcacggtcattgcacaagatagtgctaggtatagcagagggttctacaatacccgagatattctaagcataagcccatctagcgacattatgggtcgcaaagttacaacttctagaaat

SEQ ID NO: 135573 - DNA, 597 bp, Cannabis sativa
atagacctagatctcaaagaatacaaccaacttttagctttatccttcaaggagaaggggaaaaactttaagcgtgcagcatcattgatggttgtgtggtcatagaaagtgtgaacaacttcctcaaattctctaatatgcatatatggattttcattttccattccatgaaaagtcgacaaaagttgaataatgcagggtttgacaccaagatttggcatattaggtggaaatataaaggatgatggtatggaagtttgggtaggatgaaggtaatcattaagtgttctttgttgtgcttcattattattattcatggcgaaaggattactgattattgtgtgatcgggagaaggagtagtggatggattggaagagttttcactagaagtagtttcgttaaaagaagagttactcatccactctagtttgaaccttgttttttaattttaattaattttttttatatagtaaagagcacaaaaatacaatattacaatgactaacactaaatatattcccaggccagttggaaaggttgccaaggtaccgcttcgtcccaaccttgcctagacagaaccgaggttcccaggtaag

SEQ ID NO: 135574 - DNA, 681 bp, Cannabis sativa
ataaatagcatgccaataccctaaataacacaaaaatgggaagaactagggttcccaaattttccccaaccggaagaccggttcctcaacgggaattccggttctcgaaaaatttccttgaagccaaccggtagaccggttcgtacaggcctccctgaactggaattccggttcagtgcacgaaagggtcaaaatttcataactcatgcaattcaaccccaaaacaaaccaaactctttagacctgttctatacatcccaaagaacattttcaaggcaataaaacacaactaccagctccgaatcaaaacttgccattaaagggccaagcttgagttctaaaactcaaagcttgcccaaacccaataacagcctacaattcaagcttaaattaacttattccaacatattttaatcacagagaacacaatcaaacaatagcagcaactgcagcaacaaaactcatcatttttccatgaaaaccaaagttttgagttcaaaactccatacttacctaaatcgaactaacatgcatcaaaatatattttaacccattcaattaaatatatttaaactatagaaaacatcacataaacacagcagcaacaacatcaaatttaccaagcatgcaaactatcatatttttcttaaaactcaagaaaataaagaggaagctacaaga

SEQ ID NO: 135575 - DNA, 704 bp, Cannabis sativa
  modified_base (176)..(186): a, c, t, g, unknown or other
agactgtgaagaatccaaatcaagtgaaggagaatcgggctcagattctggtgatactctgctacagataggatacaagggttggagatttcagtgaaagaaatcaattaattctgctgcaaccaatgtaaggtttattaaactttatatatgtttaaattacattgttttagaannnnnnnnnnnggatgttaaataacatacatgatagtaaatccagatcctggtaaataatcctcaacaactagcctcagagccacagtaatgatttactttcatgaaatatagatttaaaacaatttttgtgttgatttggatggtttcatgttggtttatgtgcatgtttgatgattctatagaaatcgtagtttacatttataaacatatttttttcgctttgaaaatatttttactcgaaagtagacaaaaaattaataaatttatgcttttacagaactcaatttggattttttatgaattagttatgatttttatttcaaatttggtgaaaatatctgaaaccgagcaacaaatgtgcgcgcgcggatgggagactcactcggacaagaggccttcagacaaggctctgttcgaatttttcaccttttgagcgaggtttgccccccatacaagctgcttgcaatgtttgtttgtttatttatttatttattcaaaaaaagaaatttacaaacctattatttatt

SEQ ID NO: 135576 - DNA, 730 bp, Cannabis sativa
  modified_base (64)..(72): a, c, t, g, unknown or other
  modified_base (251)..(256): a, c, t, g, unknown or other
gcgcaaggcaaaattaataagttgagaatttacttggtgaatgaattctagatctacttattgnnnnnnnnnttatataggcccatggtccctcactaccggagataatactgcttgcagacttagttaattgattataactaatcaattataattgtaaaattagactatgtcttatttatgaattttcactaagaaaggacttaattgtgaagaaagaggttttggggtcaatttgttaattaagagannnnnnatggtctaattaataaataatatataaatgaccattttatttaataattaattataattatgaaataaatagtttttgtatctataggattgaattagaaaatatggtattattaaaagaagaataagtggttgaaaaaaataacaaaattgtaactagagaatggtcctttatatggccagccttaagtgtattttttcccaatattttattattttgtaatctatataattcagctctcagccctagttgaaacactataaaaggaacatgatgctctcacccatccacttgatgccttcaaccaaatgatcaaacctagttttctatgtcagacaactagttgatgagagagttccttccttattgattttagcctccttcattgttcttcactttcgaaaccttgagtgaaagagtgacatgcccaccatagcaaatcaagcactcaatcatagtgagtaagacggtggt

SEQ ID NO: 135577 - DNA, 661 bp, Cannabis sativa
ttttagagaatgacaaatccttctggattgttgattctagatctactaaccatgtttgttatcattgtagctgcttgaaacttggggtcatcttaacccaaaggagttgaagctcaaagttgtaaatggcgagttagtattagtccaagctaaaggaagagcccgcctcaagtttcaaaagaaatttttagttttagacaatgttttgtttattcctaacttgagtagaaacttgattagtgtttcatgtttacagacacaattttataaattgaattttttgagttatgttttttgagttatgtttgcacaattttgtttgcacaatttcttttgcacaatttctcataaatttctcataatggatttcaattatgtgttgctcacatggaaaatggctttatgttttaagaccggatatacaaatcgcacttaatagtgaactttttcaatattgctaaacctaaaaaccttaaaagaaaagatattgataatgatgatcaaacttatctatggcatttacgattaggtcacataggctatgacagattccataggttaaccaaagacggtccattgaaaaatgtcatcttgggtgaatagccagtatgtgaatcttgcctaaaaggaaagatgaccaaacattctttctctgcaaagg

SEQ ID NO: 135578 - DNA, 826 bp, Cannabis sativa
  modified_base (781)..(781): a, c, t, g, unknown or other
tatgaggtaattcttttttttttattatatttttacagtattttataaaaacataaaaaataataaataaattacatgaaagtaacaaaaaaaatattaagataatatataaataatagaaaattaataataaaataaaaaaaaatataacataaaaatatactaaaaaattgtattttatgtaaataaaatctaaaagcacaatcataaattaatttaagtggcgtttagtaacattttttaatcagtttgttgtttttaaaattggaaaagtaaaaatatttttttaaaacatgttctataaaattattttgacttttcaattttttaattgagaatcaaaattttgaaaaaaaaactactttcaatatttttttaagtagttttttttttcttaatcaatattttaaactctgactagacccgaacccaaatcccttctacggtcttggcgttgaacccggcctctgactcgaattcgaatctgatcccggacctaaacccgacttaaataaaatcaaaaaaataaaaataaaaataaactttaaagataacaatttattttttgtttttttaatgcaaattggaattttattaatttgctaaatcagccaaaagacaagactgtaattcagtaggaacatccctcccactaaaaactcgatatggaaaagaatatgacgctctagcaaagctgtgcgcagtcatattagcagatcatttaataaaaaaaataaagaaacatggtttgaaaatagatagaagctttcgacagtccatnaccactcccccaagaggcgaaaccatggtgatgttacttcgaata

SEQ ID NO: 135579 - DNA, 1009 bp, Cannabis sativa
  modified_base (958)..(959): a, c, t, g, unknown or other
gggatggggcggggatgggggtataaataggtagcggggatgggggcggggattgcattccccgtacattaaccgaccaatttccatctctattcttgattttgtaagtgttctaattaacatgttactgtagtaataaaaattgatactactaaagtccttggacatagaattacagtaccttatcttagtgggagaattttaaaattctagcccattattatttggatggcactagtgatagcctactatgttatgatcaagataggtactttagaataaaattaagaaagtaaatttaaccattcatatggatagaaatgacttatcagaattataaggataagataggaagctgtgcaatgtttattcgaatgactcaagcacaattcatagtccttatgaaatgttttatgttcttatgaaatgttttatgttataatgaaatgttttatgttatatataatgattacttaatcttaagcaagtattttacattaatgttaatactagaatgttatgttgatgacttagtctataaggaatttaatgtttcagattaagacatgatgtcacatcaagaggtccctaagcaccaatagtaagaggttaaatgcacacttgtgtatgaatttaaccagacttctactattgagtgggagccttcaaagatgtaaataaacaaggaacattgggagacaatcaagaaagaatctctgaaagagacctatatgttagatgataggagtgtaaattagaatccttatatctaaattaaataacatagtttacaacttgtcaaacaaatagagagttcttgagacttcttattcttccttctaattttgaaatctcttagtgttcttcacaaaaactttcgagccttatagtaagtgagtgcatgcccacacatagcaagtctagtactcaatcataatgtgtaagactgtgaagaatnnaacacctgaaggagaatcgggctcaagtcttgataatactctgcgataga

SEQ ID NO: 135580 - DNA, 2362 bp, Cannabis sativa
  modified_base (2297)..(2329): a, c, t, g, unknown or other
atttgtaccgaaaagtatatgcaacctctaaatttatgaataaagctgagtgccttaaaaacaatgttttcatgtcactcaggggggtagtaaggcataccacacggacaagtgcaaaacaggccaaaagtaaaagcaaaatcaagcagaatatgtatctaagcgaaatatatatttaaatgtaaatataaaagatgtcctgacctaaaagcaggtccaaaaaaaatattaagggcctggcgacaggccttaaaaattgtctccccttaaaagataataattaaattgtctggaaaaaaggaaaacaggctgttaatgtaaagatagaaagaaaaataattgtagtggtgaactggttgaactggtcggcctaatcaatgcagggtggaaaacgagggccccggcgctgctcgagcaaggcgtcaagccttttcttcttctcccggaagcgaacgaggacttcctcatgcttgggataaaagtcgagcttgatgttttggccatttgactgccaggccatgtaaatgccatcgtcaaaacgcttgacgcagtgcttgcagacgacaggagtcaggagctcatcccttttggcctttttcaaggcctggtacttaaagtccctcagctccttcacttccactgtcaggttggccgtcgacagcaagtccgcctggtgcaactcctcgaaggattttaattagcggccatctcatccatagcctccctggcttcccgcaactcgcgcttggccttggccgcaacctcgccctcagccttcagctcctcatggtgcctcacctccgcctgagcctccctctgctgggcctcctcctggaatgccctcctctcagctgacaagtcccgcaaaatcttcacggcctcgtccatgccccctaatttggacatgacaaacccgtgatcaatcagggtctttgagaggcgggcggtctctgcagtaatcagaaaaaaggaacaagaatgaaatcagatgccttgagacaagatataagcaaaaagaaaggaatgaatcgcaagaactcaccgcagccagggcagcgctgatgtcctgaacctggtaaacaaagttcactgaggcgcaagcttcgtatctcttggctgggaattgagtcagatgggagacaaactggctggtcatcttagaggcgaagggggcgagggtaggaccgacgaagcgattgaaccagtccgtcaggcgatccatgttcaggtcccagggattcctgaaggcgtcctcacgcaaggtgttctattgctccttcctcaagatcttcttcaaggcttccacctcagcatgtccccggctgaactcgtcaagggcatagttatgtttggtgattcagagcatttgcctctcttcgtctgcgtggactggggtgtgaacaatgccatgcggcacggtgtactcctccacttcggaagggatccccgagtcggtgctaacagccggagtgtccctcctcctggacctcttggaagactcagcctcaaccatcttaccctttcgcttacgatcaaggaaagccgcgatctcaccctcctcctcctcgacttccccttcctcgtctatcaagactattgtgcctaagggggcactggatgacgacctctcggggttcaccagttgggatgaagccagaggcagagaaggatccgggctgtaggcctcggcaagggtcgccaagagatcttccattggcttggctgctgcaacaaagaaagaagaaaagtgttagaataactataagaaagtatgcgcccaacaacaaagcgataaagctaatcctaccccgactctccaattcagccctagcaaagtcttgaactacattgctggcttcgtcatccccaagaaagccgtccgaggggagaaaccagctggaggacaagtgggctgaatgaactagaggaatgggtgcaggaggtccagagcccatccgggatcgacccaagaaatggcccaagtgggaaaaatagaagtctttggcatgatccccccaccgagtggaaggcatcctaagcttacaaaggcactcatcaaatcctatgggcctacattgggtatactctcgaacaaaggggacatggtgaattattaaatgagacttatcggaccctgaagtactggcatttggagcaccagtgttaggaacttggaccgaaggcttaggcctggcgggcctccgatccgtgccagcttccagacgaagggtcctcccacctgcagcctgggcctgtttaaaatattttactaggaagtatgtttcattaacatcctnnnnnnnnnnnnnnnnnnnnnnnnnnnnnnnnnataaagttcaagaaaccttacattcggtgcagc

SEQ ID NO: 135581 - DNA, 508 bp, Cannabis sativa
tgcttaattaatgttctccaccccattgggtaactttactaaagatagactcttcattgctctttaggatattcatttattcacgagcattgctattaggaaacaatggtatctaacactatctagacgtatcatcttgcgatcagctagtgatactccctaaaagttattacattaaactatatgggatccgatacttaattggaccaatagcaatattaacatggagggtgataggcaccactggtgcccttttagcattatgacatattgtaccacaatttcaattctttgcattctatagtttaatttgtatctaaaattaatattgtagttcatgaactcttattgtacataatgttatcaataaaaaaaagattttattgttctaatatgtcatcttaaggatccaccaacaaactcattaagagaaaatggttcaacatgcatgttgtttagaaattgtaagcaactactaaataacatgatttattagaattttatcaat

SEQ ID NO: 135582 - DNA, 1717 bp, Cannabis sativa
gaggtcacccatcctgaaattaccacaagtcaagcacgcttaactgtggagttctttcatgatgggctaccgagaaacaaggtgcatcttgagctaacctattttatgattattcctagtttatccatttggagccttaaatcgattgttattttttttacacattttttgagctaaaaaaattgacccatttttttttttttttatatatggtatttttatggtatttgatatgtcatatatatatgtaaattaggttttcaaagtccatatttaatatttttatttatttttaggaaattttatttgtcactgatactggaaaagtcatcggagttcgatgtcggcaccgaaaaagtcgccagagttgctgccggtgccggaaaatttgtcggaattggtactgttgccgaaaaaatcaccaagaaacaggtttctcgatgaagaaaccattttcttggtgatttttctagtgatatttccggcagcaatgccaatttcgatgacttttctggcaccaacagcaactccagcaaattttctgacaccggtaggtacttcaccgacttttctgacaccgacagcaaactcaaaaaaaatcgtcggaattgtcattgtcgctggaaaaattaccagaaaaagcaccaagaaactggtttcttcatcaaggaccagtttcttgatgaagaaaacagtttcttgatgaagaaaccagtttcttggtaatttttctggcaacaatgctaattccgatgacttttctagcgccgatagcaactctggtgacttctccgacacctacaactatttctgcgtcttttccggcaccgacaacaaactccgacgacgttccggctccagtgacaactctggcgatcaccgtagtttcatttattttgttttattttattttttaaaaaaaaatacgaagagaattttaatattttttatggtaatccaaaatggcatatcccatatatgttaagtttttattttaaatgtcatatttttttctattaagttttcttaccatatttatgtaaactagctttatttttctcatatttatgtaaataccccaattataagtatgtatgggtaaataccattttagaccccgtgttttgtaaaagttaccaattggaccatctgttttgttaaatgacaaaatggaccttgtattttctaaaatggtaaaaataggaacttgagcttaatttttgacaattttttttaatataaccaacttaaagataattcctaatatgaacaaatacagaaaatgtaaatagttttgtcatagcatttttatatcagaatataattaaattttattttgataaaaaatcaatttagggttctatttgtactattttagaaaatacagggtctattttgtcattcaaccaaacagggggtccaattgataacttttgcaaaatacaaggtccaaattagtatttaccctatatatattttaaaacttttttcatatttatgtaacttttgagcaatattttacaaaaaatcatataaaaatatattaatatttatttataaatactcaacattctataaataaattaatatataatcttaatttttcatactttaataattttaacaataaaattataatattcaaattatatttaaattattattattattttaatctatttataattgataaattcatatattattattattatta

SEQ ID NO: 135583 - DNA, 866 bp, Cannabis sativa
ccctatcgataaataacatgccaataacctaaatatcacaaaaatgggaaaaactagggttcccaaaactgccccaaccggtagaccaccaactggaattctggttctgcagggtttcctggggaccaaccgaaattccagttcctacaggtcccactgaaccggaattctagttcaatgcaggaaaacttcaaaaaattcatatctcactcaaatcaaccccaaatcaaaccaaactttccagacctgtataataaaccccaatagacatattccaagcaataaaacaactacccaagctcagaataaaaaaaataccattaaagagccaagcttgagtttcaaaacacaaagcttgctcaatcaacaaaccagccatcaaaacaagcctaaatcaacatatctaaacataatttatcctctgaaagcaataacaaacaccagcaacaactacagcaactgaaatctcaaatcatgcaaaattttactttcttacaattcaagaaactaaaaagaaagttacaagaggcttaccgtggcttggaaaacacttagagctgctggaaaacacagcaatttgatgaaaaatcaaagctggttctatagggttcgaaggagagagaggcttgagagaaaagatgagctttttatttaacttttgatttttaaactaaaatgaatcaaaagctttgttttatcaaaataaacagcttaatattattaataaaaatcaaactaaataacataattaaactcacaaaatgacaaaatacaaataggcaaaaggaccaaaatacccttgcccacacaaaacccacataaaatcacttaagggtattttcatcaactctaaacactcgactaat

SEQ ID NO: 135584 - DNA, 796 bp, Cannabis sativa
tcccacttattacctgattaatccataatgtaattataaatcctaattacttaccattagggttattgggatattacatcttgtatctgggacactctgggtaagatctaaatgtcgacccgcgaccttgatggccatctgtttccccaatactttctattacttctcggtgttctggaagtttcagtcttccgtttgtgatctgggttgccactgttagtccccttactgacactaccacccacactaggatttgatgccgtaacgacatccttagcagcttattctttaattacatgttgctctgcctcttcagcaatcaaggctaacttgaccactttcttatataatgtgtcgtaatcgatggtaatcttcaagtcccgactgattgtggcattcagtccccttatatatttttgtttttgggtgaagtccgttggtaccaggtcaccaacgaacttggatagacgatcgaattttagggtataggccactgtcttcttcccttgggtcaacttcacaaaatcttccatatgtgaagttcttatagcaatgttataaaaattttccttaaacagggtcttaaacgtttcccgagacatggtactaacgtctcgggtctaacccacaatatcccaacagacgcgagcatgatcttgtaacatgaatgcaacacaattaagtcgttctgtccccgacacctccatgttatctaggatgcgggtaatagtgctcatccactgctcatccttgataatatcagtacctcccagaaacattagaggttgtagcttaa

SEQ ID NO: 135585 - DNA, 506 bp, Cannabis sativa
ttcaccacgctgaaaagatcttctatcttttagatgagcgatctatcggatagccaagtgcttggctctcgatgcaatgcatttgatggcgacgaggaccaccaagaagacagcttcattccaacctcgatctcaaaagaggaggtcgccactggtggagacacagaattaggtctaatgtcctctacagacattgagaggatggtgcaagagctcgctgaaccaggaacaatcaaaatttgagacagtgagtctacggtgtcagtgcgtgatcacctcgttcattgcaggcacgctcctgacgtcgaggtcgaagagattgatgacgattggatgaccccagctcgagagtcaagcgacgaggaagacgcggagggaagtgggactgattcggtggacaatactcagttggatgaacctttttcatgcgaggactaggtctcgccagtcaccaaatcagatcttaccacctttacgaggttaaaccttctgtggcttgccttttt

SEQ ID NO: 135586 - DNA, 639 bp, Cannabis sativa
aaactgaaaaggttttttattttttaaataatgttttataattttaaaaatgtttttaaattttcaaataaaaaataattaaaaatattaaaagattttatttaaatttttaataagagtttttaattatttttaaatgaaattttaatttgaaccaataaaatatcaacacgtgacctttttttggaacaactaacagatcgttagaaaaagaactaacggacaaacaacaacttggagcttgaggactattgccgctatttttggagcttgagtactaatctgcatcaacgtgacttttttggggacttttgccgcaaatttcccctaaaaataaagacataaaatcgaaatacttatctgtttaaagtgaaaaggtcgttgaagtagaaattatgagtacaaaagaaatcattctcttgccaattgagcataccacaaaactaccctaaacaaatagggaaaaaccataaaaatggtacaaaagccataaaaggcacataaggaacaagtaatgtaaattcatatgaattaaagtaaaaatattaactaaaatatattaattgatttataaataaattgaaaaattaattaatataaaaatatacataaataaatcaattacaaatataattaatt

SEQ ID NO: 135587 - DNA, 555 bp, Cannabis sativa
  modified_base (247)..(251): a, c, t, g, unknown or other
  modified_base (419)..(430): a, c, t, g, unknown or other
caagtgattctgctaggagtttgtgattggtaccttgattgtacgtcaatcttctgtgggataatggctcaagtttgacgggcagcatagcttcatatccgtactccattgcgaaaggtgtctgtccggttgccgttttctcggttgtagggtatgaccatagaacttcaggaagctcttctggccagtttcctttggaatcttaaagttttttcttcagtatatccttcaaggtcttgttgactgnnnnnacttgaccatttgcttgaggatgcgccactgcggagaaacttttatatgataccatggtttgcacagaaataactaagtattggctgtcgaattgcttgccattgtctgaaactatcttgtgcggtagtccgaatatccttctggcaaattatgttcttcacaataannnnnnnnnnnntctttgatgtaatggttgcgagttgttcagcttcagtccacttagtggagtaatcagccgctaccactgcatactgcactccacctttacctttgggtaactgtccgatcaggtcaatcccccaa

SEQ ID NO: 135588 - DNA, 1239 bp, Cannabis sativa
tcgagtttgggttagggtttgagtcttggtccgagtttgggtttgggttcggatctcgatctaggtctagatcgggctcttggtgtgggttagggtcctctgtctgggtcctggtttaggttcaggtcccaggtttggatctcgaactgagttagggtttagttctgggtctaagtcttgggtttcgatcacagtttgggttcgtgtttgggtccaggtgtgcaggtctaggtttgggtttgtgatctctgggtctgggtttgagttcgggtctcgagttcaggttcaatttttaattcgagtccaagttcgggttttgcagggtatgggtttgtgtccaggttcctttcctggtttgggtccggggaaggtttcgggtctaagtctaggtccgacttcagattcccaggtctaggtcaggtcctacttcatgtttgaatctcggtttagatctgggtcccccatccaagtccagttcctagctcctggtttaggttcaggttcgagttcaggtcccgagtcttggttttagtcaggtcctagtccgggttcgggtccaggtctcggtcctagccttggtatgggtccatgtttgggtccttatcagggtctggatcctggtctaggtcgcgggtcttaggtcccggggagggtttaggacaaggtcaagtccaggtcctagtacgggtcccggtctaggttcctgtcccaggtctcaggtcccagtcctagtcaaggtctcggtccaggttttggtctaagtttgggttatgttttgggttcggttctagtctcaggttcgggtcctagtcacagttccagttttgattttagttctgggttttgtttcgggtccgggtctaggtccaagttggggtcagggtccaagtccgtgtccgggttcgagtctaggtccaggtcccggtcccgttccaagatcccagtccagttccagttcaatattttgttttggttcccgagtgtgggtctgggtcttggtatgtgtccgggtccgggtttgagttcgagtttgggttcgggttctggtctaagtcctagatctatacaccgactactggtcggatccaactatcgagttccgaatctcaggtctcgaggttggtcctaggtccaagtttcggtctagggtaaggtctcagatccctatccaagttctgaggcccaagttctggtcctagtttgggggcccaattcccgggtctgggtcccccatctatg

SEQ ID NO: 135589 - DNA, 519 bp, Cannabis sativa
tatttataggagaaccaaaataaaaaaaaaccacaaaaatagccaaagagaacgaagaagaaatgtatttatagcctccatcttcttcactcacggacagaaccaccacatcaacacgagaacacccaaaaaataaccattaattccagcgagatggagcaagaacagtaaaatcaacgtcaaataaaaaaaagatggcaaaaaatcgtaaaacaacactaaacaaataaaaaaacaacaaaagaaaaaaatgattaaaataaactaaccatcttttgtacaacctcaaacactagatgcaatagatactatatttacaagtccaatcttggaaaatctgaataaaaaaatcactcttatcttctttgtacatcatattcttcgccgaagtgggttttcaaaactttcctatcttctctgtctactggtctctctctctctctcgctctctctctcttcaagcacatcttgagggctaaagttcaagcacaattgtatggatttgtaaaaataaaaaaa

SEQ ID NO: 135590 - DNA, 648 bp, Cannabis sativa
  modified_base (126)..(143): a, c, t, g, unknown or other
  modified_base (293)..(312): a, c, t, g, unknown or other
actttgccaatgccctggaaagaatataacacttatccaaggtgtaagtataccttatcgctgatttatcatgccaatttaaatccactgaactgaaaaatcatgagaattaaacttttgaacatnnnnnnnnnnnnnnnnnncactgtgctgacaacactataatgttgaacaaatatatacatatttatatatgttctagacttaatagaatttatacattaaacataattataaaataaatcatgtgaaccatgcaacataaaagaatgatttatgatctttattaattnnnnnnnnnnnnnnnnnnnnaatgagttttatttagggcacatgtttcgaaaattatgaacaatacgcaagtgcacgtaatcaagtagtaaactcacacgagcgaggtcgaaccacaggaaattgaactgagtaccactaaattagacttatgattctatttgtagataaataattttgatagattttaaaataaagaaaaacaagaaaactaaataaagcaataaaggtgtttaatcaagaataagagattaggaaaaataatcctgttgatttaattacccagctattaatactaattactattctcttttctcaatgtgaatgacagattataaaaataaacctaactctttt

SEQ ID NO: 135591 - DNA, 512 bp, Cannabis sativa
  modified_base (38)..(38): a, c, t, g, unknown or other
ggagcttgttcggtcttgccagtgaactttcccttttncccattcccttgcctattattgttgttggaccattaccgcttgagcttgaattgcttgggcaatgggggagctggacggatgtgccagtagaaggagcttttgaccgaccaggtttttgttcaccttctgctcgctgaatggcatattcaagcttgataaaaccttctgcacggtcaagaaaatcactcatcaagactactgctgcgttttcccttatgtccttccaaagttcaccaaggacctcaatgcccccagtatcgcggacaactttccatcttcggttaccagtgcaaccgcctttatcatgaatcttttgatgtaggctcggagtggctctcctggtctttgctttacttcaaccagatctcctaggtgcaacggaaaatggcgagaggaggagaattgggcatggaactctgaggagaaagccttccatgagttgaacttttcgggcgccaacttgaaataccatt

SEQ ID NO: 135592 - DNA, 1266 bp, Cannabis sativa
ggatatagactcgaacttgggacttgaacccagatctcgacctggagagggatcaaaaaccgaaccgaaactcgaacttggacttgaaccctgaatgggccctagacacggactgagacctaggactgggtcttggatggggaacttggatccgagacctgggctttggaactggcactgagaccgaagacctgaccttggacccagaccgtgaactaggacccagaccaggaccttggatagtgtaactagactaggtttcgattttgatttagtgtctgggtttgggtttgggtccgggtcttgtttggggtctgtgtccatgtccgagtttgggttcggctctgggtccaagtctagatcatagtttgggtctaggttcaggttaggtccgagtgcaggtccaggtctcggttagggtcagggtctcagtccggatctaggtcccgagttttgatcccggtctaggtccaggggctaggtccgagttcggttctaggtctgggtctaggtccttgtcatggtcttagtctttttcgaggatcctcgtctggcggttcttgttcaggttccaattttgggtcacgggtctaggtcagggtccaggtttgggtcctggcctgggttcgagtcctgttctgagtcgcagatctagatccctgtcacgtgtcccgatcttgttcttgttcaggtcttggcacccaagtccaagtttggtttcgggaacgagattggggtgcggttctaggtcccgacccatgttttgtgtcccgagtttggttcaatgtttgggtcagagttcgggtccaggtttgggtcctgagtctaggtctgggtggggtgccggggcttgttcccagttcgagtctaggtcttggttggagtgttggtcatggtccgactacggttccgggtcatggtctaggtctggttacggttccaagtccagatccaagtcctggttctagtcccattccaaggtcctggtctacttccagtttcggttccaattttaggtcacagggtacgggtttgggtccagggtttggtatggtgctaggtttcggtccgcgtctgggtttgggtctgaggctggtcccagatctagacaccaactacgggttcggtctaagccccggttccagatccagatcttgatcccgatcttgggtcccgacctgattccattttgggtgccgggtcacgagctgggtcctaggttcaagtcaaggtctagggtcgggtattgggtcccggtcctagttt

SEQ ID NO: 135593 - DNA, 561 bp, Cannabis sativa
acctcctccagggtggccagttgaacatctcctttcttggaagatttagaaccggatgcggaagcagacatgttggttctgaaaaaatcgagaaaaccaagcagttaggccccaaacaaaccctaatgttcgaaaaagggagtgggggtcccctaaccgctggaaagaggccccctccggacacttgccaaataagaaaatcccaagaggctttccttggcaagaatcgggtgcaaaaatcccaaaggcagtgacattgcacagggaaaaggaagagaaaaggaaaaaagggcaaatccgaaaaagcaagatctactctaagccctaaagacgttattacgtaagatggggatgattcctcaacaaaaacgtaataacaaggagcaatctaaacgcaaagaagaggaatttaacgcatcatacagtaaactcaggcgaattcatttctaggagttcgacatccaacccagaaatcataaaacatgctatataaacgaacagtaagcaagtatacaatatacgaagaacttacatgaagtttgaaggctaagggttggtgtt

SEQ ID NO: 135594 - DNA, 1669 bp, Cannabis sativa
gatttggcttaaagggaggctagatgaaggattctcggaggtcacctccaagtcttgtgtttgaggctggatcgggtcgggactgtaagtctgagaaagggtagccaaaagttcgtccattggcctagctgcttcaagaaaaagaaataagtatcagcacgttaacgagaaactgcgcgcacaagaacaaagcagtaaaactaatcctacccagacaatctaattcagccctagcaaagtcctgcactgaaaggctggcgtcgtcatccccaagaaatttgtttgaggggagaaaccagctggaagacaggtaggctgaatgatccagaaggataggtgtaggaggtccagaccccatccgggaccggcctaaaaaatgacctaagttgtaaaaataaaaacctttggcatgatcgccccatcgggtaggggcattctaaatctaaggagacgttcatcaaactctacaggcctacatcgagaaaaatattgagtagaagggacatgatgaacaactaagggagacttaccggatccgaaggtgctggcgccaggagccctaatgttgggaactgggaacagcagtttaggccgggaaggcgcctgctctttcccagcttctatccggagggccctcctagtagtggcctgagccttaatataagccaactcttgctccctcctaaagaggtatttctggtaccggtcttccgctgaggcaataatgtccgcccagagtgccttttcagagtctggactgcgaatgttggaataaagaaccttggataagttgaaatcatacactgattggctctctgtgatgagcttagccctcctgcagtttgcagttgtgactaagtcccccacattcagtccgtccttgtcatatgtggagaagaccttggcgtgctggaggaagagttgggtagaggcagtgcggtgtatcgaaggaaccctaaaacactccgtgagcaattctgggcattccacggcttggaagccagaagaaaagaaaaaccggtgacgatactctttaacattcttttgaaaattaaaaggaacaggaacctcattagccagatgggcccggagtgttaaaaaaccgtctttaagcctatcccccttcttggggacagacacaagttcgtaatagtatcaaatctcggctgggctaggtgaagcccagcctttggctacataaaaaatgtacaagcctgaaagcaggcggtatgcttgggaaataagttgataaggcccaaggcaaacaaaaactagaaaatttataaaatagtgctaaagtggaagcatggctccggacataaggtgggtctggctccaagctccaaaaccaccatagttatggttgggcgtctcctcatctctgggcaagcggtggaagaccccagaggcagaaggcttaatcccggccacaatcacgatcttctccaactgatgggcacaggtcaaagttgagtgaagctcatccgcctcccaaccgttggagcgacacgtgtaattctcttggacaacaggtcccttcatcacttctttcaaggtggccagggtaaccgctccttggctggaggattcagcttcgaatgtagagacaaacatttctcaaagagtaataagattctgaaaaaaggaaaatctagcagttagcccccaa

SEQ ID NO: 135595 - DNA, 1558 bp, Cannabis sativa
tgagcctatataaagaatgatgtatagagattctttctatcttgttttcttgtgctatttgttcatgcaattttgcgttaattatcatcttgttaatgcttgatcaccattaattagtatagagattttatgttttacacttgagagaggtaatctaaaatcggacttagaattgcatgacatagcaaaagtgtgagattgagagatttcactatttgtataaggttcatataaagagattcatattactttattattgttaattgattaacattaaatagagatatcttgttagttaattaaagttaattctatcatcactcgagagagattaatagattacattaggattcttgaaactacaaattataggaaaaattgtgatagtcggtaaattgagattcatagtttgaaatgaaaaaaatcaatgctttaggtttttactttctaattaaaaattgttgtttgtctgtttattttttcatatattttattattcttaattataatttactttgtattatctaattaaagtataataattagtaaaatttataaataatcaatccctgtgggttcgacaactgttttagtattaaaatttactataacaatactatacacttgtagtaaaaattgtgtatcaagtttttaacgccgttgccaggaattaaaaattcttaaattattgctaatattattactaaaagtttttgttttaaattagatttaattttgtttctcattttatttgttgcattgcggttcaatttatgcgaagaaattgaagtgccacaccactcacaccgctgaatcctaagattgaaagaactctaaagcagttgaaaacgaagaaaaagttaaatttcaccatggaaaccattaacaataataacaacaatggccttaataacaaccaaccagctccagctgatgcacaaccacgagttgttcgtgattatttcttacctgtggtgaatgaaaatctgaatggtattactaatctagtcattgctgctaataattttgaatcgaggcatgctttaatcaatatgatgcaacacaattttttttgtgggttggctaatgaagatcccaatatccatctagctatatttatggaggtatgtgctattgtgaagatgaatggtgttactgatgatgccataagactacgactctttcatttctctttaaaggatagagcaagaagttggttgcaatctctgcaatctggttctattaccacatgagatgaaatggccagaaagttcatggtaaaattctttcttccatcaaagtctgcacagttaaggagtgagattgggcagtttagacagtttgattcagagcaactttatgaagcatgggagcaattcaaagacttattatgtcgctgcccacaacatgactatgagagttggatgcaagtatcaattttctacaatgggttgaatggtccaactaggacttctattgatgttgctgctagaggagcgttattgtctaaacctgcaactgaagccattaatttagtggaggagatctccactaatag

SEQ ID NO: 135596 - DNA, 726 bp, Cannabis sativa
aaaaaaaaaactaatttatttttttgctattttttaggaatttttttttttttgaaatagctattaactaatctatacagacgggattaatgaaaagttgtatcaagtgattcttcagacaaaatgatacgtgtcatttgctcattaaagagatagaggagagataggaaactttgagagagacgatttttattcctaaattgttggcaagttagtttccattccaatttttttttgttttgcaaaatcgtcctcaaaatatataattttttgcaaattggtctctaaattttattttttggcaaatcttttcctaaacttcacatttattaaaaggttattttattggtccacctaatattaataatttaaataattaaaaaaataatttaaaatatttaaaaataataaaaaaattaaaaaaattctctctttttttttttctttcttcttctgttgacgatgaaaagtggtcaacatcagctcgctagattagcgagattattaataaatttaagataaataatttaaagagacacacataatttatagtagttcacccctatatattgcgatagtaatagggcctacatctatttcgagtttttatttctcacgaaatggtgattgcagcaatagactaagtatcagaaactccaaactctatagagagaagctctgaccttgtgggtagttttctatatgtgaaaaatgagctaagggagt

SEQ ID NO: 135597 - DNA, 600 bp, Cannabis sativa
accatttgaaagacttaaccaatgttctcacaaccagatttacagaatacaaaatcctaaagttctaagcgacaatcagaagtaattaagtctcgcaggcatgggagtattcgaagtgttcgtccgaatacccgcgtgtattcaaaatatgaagtagcgtctgttcaaacattttttctacaaatacacggttatgccaattttaggtcattttttctgaaattacccagtttcttgcctaaaaaaatgtagcctcatatgtattccctacaaacatatattcctgaacccccttcataaattttaaaacccagaaaacattttttttttctcaaacaaaaaacaaaatgcagtgaactttgaaaactaacctttagttctggtaatctgttcccacgattgccctcgacagcactggagaattgagaaaaatcccacaaaagaagagcgaaagtctgggaaatttatggaagtctttgatggagtctctgaaagagagggaaacaaagaaattaagggagttaaggaaaatgagggaaaatggggattttgattcgaatcagagggtttaaatacccaaatccctcattaattgggatc

SEQ ID NO: 135598 - DNA, 587 bp, Cannabis sativa
ttcttgagtttgctgttagtaccagaaaagtcgtcatagtagcggctagtgtcggaaaagttgtcggagttgctaccgacgctataaaagtcctaagcattggcattgtcgtcggaaaaatcaccagaaaaattaccaagaaactcgtttcttcatcaagaaagatgaagaaaccaatttccttatgaagaaaccagtttcttggtaatttttccagtgactatgctaattccgattacttttttgaagtttgttgtcgatgccggaaaagttactggagtagctggcagtgtcagaaaattcattagaatcggcattattacctgaaaaatcactaagaaagtggtttcttcatcaagaaatttatttgctgccgacgccacgatattcgttggagttgctgtcggcgccgaaaaggttatcggaattggcattatcaccggaaaaattatcgaaaaaattaccaagaaacttgtttcttaatgaagaaatcagtttcttggtgatttttcgctaacaatgccaattgtgacgaattttcttgagtttgctgttggtaccagaaaattagtcatagtagcggctaa

SEQ ID NO: 135599 - DNA, 1023 bp, Cannabis sativa
acattgaatatttagagtctaattttgcgtgtcactaaaaatcactcctaattctttagtggcccacaccttttgtgcaggtcactaaataatgtcattaaaaggccaaattgtggtagtgataaattttctcgccccttttgttttggtattgaggaagtggataccaacataacatgtcaacatgggtgctagatgtcaacctaagcgctaggagcagaacaacctcagtaaaacgaccataacacacactcaatatattaatatgtttgacacgattgaacttgcattttgaagctatttcaatgatcaatcaagtcatgtctcacactccaatcacaattctaaagttatcaattccaacttttgtcctcaagagagttacaaacttaagctacaacttaccctaagtgagtcccacagatgcaacctctagagtcaatttcaccgttagattatcatcaacagtcaaaaatagcctaaaagtatttttcatattttttggaatattttattattattttaacaggacctcctataaaagaagctccactagctcatttttaaaattataaaaagtacacataagatcagagcattactctttaattagtttctctctagaaatcagagcatccagacttagctttttttttttttttttttgtaatccatcacgtgagaaataaaactcgaagtagacgtagctccattattgtcgcgacacaacaggaagtgaactactataaaatattgtatctctcttatttacacttaactcttaatacattctcaccggtctagcaagtgagtgtggccaaatatctgtatcctaatttttatgtccaaacactatgtgtaaatttattgggctttcctaaaatactaaataaattacttttgttttggtttgaattttgaataatgaatgaagacaacataacaaagtgataaaataaaacaacttatacagggtgctaattatatacaaacaaacaagaagaggtagatatatccaaaatg

SEQ ID NO: 135600 - DNA, 1379 bp, Cannabis sativa
agttatgtcgatttgtattttttatcggttttgtcggtttggtttgagcgggttattcgggttgggcggtttacgaaaatttttgtacacccctaattttgcccccctaaaaatcaggttttgtggttaagtattaaaaaatataaagtttgggtagttttgccacaatattcttatatataataaaataaaaactaagcatgcatgctctaagataaaatgatatactatacaatcaaatttatatatcatataacaaaaaatgtataccttacaatagaaatatatatatatataataacaacaaataaaaatatatagcatgctaataaaattatatgtcatgttaataaaagtacaataataaatagaacttaaatattatataaaaaaataatatattgtataataaaatatacatatactattcaccaaaacatatatatatatacatacaataataaaaaaatacatattattactaaatatatatatatatatatatatatactatatatactaacactaactaaattatataccacaattaaaatatacacgataacaacaaaattatataccaccattttatataatgatacttcaaaacttatatatatagataaaaagtaaatttgttcttatattcacacacaattttaaattacttgtataacaccacttagttgttaaagaaaaataataaaggagtgttttgttttttgtgctcaaaagtttattaagaaagaaagtttatatagttgttgtaattcttttttagtttttacaccaaattaaagttaccttaaagttaatagtaatacagcctatattaccacaatctgatatttgttactttagtttctacaccaagttaccaaaaatatatcttaaataatattaagatagcataatgtaactttaaaataattaattgataacttaaatgtttacaaatttagctaaaaaaattatgtgagttcttttactttattgtaacttattaatttcttaaacaattttcaaatatcataaagaaaaagtaaacacaaagcttttaaagaaacaaaaatgtatataaaataattgatatataaaaatagtagcttgttatattaaatgacaattcattagtttcaaaaataaattttacggttacttaaaatgtattttaaataataagctactatataatataatataaaaataactaattaattactaagaagtacacaaatcagttttgaaagtgactaaaatgtatctcaaatttttatataaaaatgatatttttaatgtaaaggtaagtaattaattttttattaacataataagtaaccaaaatattacttttaaaaatacagaaaaattaaaaaaaa

SEQ ID NO: 135601 - DNA, 731 bp, Cannabis sativa
  modified_base (614)..(614): a, c, t, g, unknown or other
  modified_base (687)..(692): a, c, t, g, unknown or other
atatttaatttaaaattttaattaatagctataaatatcaaccattagatttgatccaatggctaataatagaatatccattcatagataatacccattaagaacatgtccatgtttatataacctaaaatttattttcatttaacttaaaaaaatcttttttttttgaaaaaaaaaaacatttttgttaataaaattacaaaaaaaaaaaggtaataaacaaacatttcattgaaaaattaaaacatcatgaaaaaaaaaatggagaattcatccaaactaatttattatccactctaaatgcatgcattgttaattcataaatacgaacatgaattagggacgcctcaaaaaaattgacaagtaaactagtaaaaatctctaaaaaaaatcataattaattcaatagaaaaagaatctcgtagagaatacaaaattgtgttgtaattttgagacgaatttttatttttagatatcaattaattaaacatatagtatttatttagggataattacataaaatattattttttgtaaattttttacatttttacctttaaaagatttttacaattttttataaaaacaacatgaaaacaataagaaaactacanaaaagtaacatgaaaataacattcaaatagcattaaaagaagggtaaatagcggtataagtacccaaagtttnnnnnntgtaagtggcataatcccaatgtttatttttagtggcat

SEQ ID NO: 135602 - DNA, 695 bp, Cannabis sativa
  modified_base (267)..(278): a, c, t, g, unknown or other
cacaaaagttatcagaaataggttaagttgtcagtttaagaaataagagcatcttattctatttataggatagcttctaggattagatttagaaataaaatagaattataaaaaaatatatataatttggctttaattgaactttatgggcaaacctggtgtgagccctacgggattttaattttaccattttatttaaaacttatctttctcttttcacaaattctaactctataaatgtcaaatttatctatttaataattatannnnnnnnnnnnataaaattttcatttaacttatttattaattagaccttaaaagtctcttaattaataaacaaaccttaaatcgtctttttcttctcaaataagcccttgcttagcgaaaatttacaaacaagatatagttttatacagaattctaattgattaattaaaaccaattaattgagtctacaagacaatatgatctcaactagtttggggaccatgggcctatataatcaagctctcaataagtagttctagaatttaccaagtaaatttcctatcttattaattccgcctaactccactatagatttgaaattgcactcttgattacatagaacaccctattcaccaagaacagatatgctatgaattatccattatttcaatttaaatgttcaaagatcctctattattaatttacat

SEQ ID NO: 135603 - DNA, 504 bp, Cannabis sativa
  modified_base (256)..(256): a, c, t, g, unknown or other
aagtatctaagtgttttaaggataaaatacattgaatgataaaatagtaaatttgtccctactcgatgtaaaccgtctatagaggatcactgattgtttagactgaaacaatagataattcatagcatatctatatttggtgtatagagcattctatgtaatcaagaatgtaatttcgaatctatactggagtcacgaggaattaataagctagaaatttatttaattttttcggaaactacttattgggagcttngttacataggcccatggtccccgcgttatttgagataatattgctttataaattcaattaattgatttattaaatcaattgaaattctaaaaactatggtcttatttatgaattttaccaagaaaagagcttatttgaaaagaaaagagagatacgagtttatttgttaattacgacactttggagggtctaattaataaatatataaaaaaatattaattttgtttaataattatttgtaattatta

SEQ ID NO: 135604 - DNA, 740 bp, Cannabis sativa
gtctccgccggtaataattttatatgtataaaaaaattccttcaaaccgatcacttcgtcctcttcttcttctctccttcatctttcatcttctcactctatctctttctttccccatctcaactcatgtataaaaaaaattgttgctacagaatgcaattctacagacccaaaacctgaaaagttcatttcttttacattatatatttatatatatgtgtgtgtgaaacagtgaaagaagagacctttgggtggtgagcaaaagcaagttcttggagagtggatatggctggcaaagaaccactactacaaattagtagcgttgaccgacgtgaatagtatccaataattaaattcgtctatttataattgacactaataatgtataattcgcgtctatttataaatgatggtaaaaaacaaaccgacgcaataaagcaaaaagttaaaaaattgctttacaatttgcgtctgttgataatactcgcttaatataatatgcgaggtttaaaaagggacgctaaatatatacaaagagagagagagagagagagaaagaccaacgcaactaccagtaaaattcctaaatcccaaatgagatgcgtgtattgttcacatttcacctagccctcttcctcttcgaccttgctctggcgatcaacaggcggccccttcgtcttcttcaaaatcatcactaaagtaacattcatttgcaggtgcgtcaagaaatttctccagtt

SEQ ID NO: 135605 - DNA, 710 bp, Cannabis sativa
gcagccttctcctcttctgttggccccaaggagaagtccaggcatgtaatgagggcaaactctaccactccaaatttgagctccttccgaccaatgtagaaccgcattttcaactcctcctaaacatcaaccttcatcttgtgcaatataagttggtgaaataacactgaggagaatgtcaggggtacgacattccaaaagtttccgaaacgactttcctttgccgtgttattcaaattgtactcctcaaatcgagccttgatttttacaaaagttctggtgcctctatatgtcacgcgactagtaaaatgctcggatgctggaattatatgtccaggagccatttgaaaaaataaataacaaagcaatattactgtcaaaaaattaaaaaatggtcgacataacataacatcgacatgatgtcgatattctgtcgacataatcaaacagtaaacaattacataattttgtcgacatactatcgacatcctgtcgacattcagtcgatattatcaaacatgaagcaagaacataacattatcgacatactactgacatgatgtcgacaatccaagaaaaatgatcacaccaactgataaatcaaaattgttgacaaaatgtcaacatcatgtcgacaactggtcgacatgatcaaagttagctatcacattcagggactacatctcgttgtcgacaacttatcgacatac

SEQ ID NO: 135606 - DNA, 850 bp, Cannabis sativa
  modified_base (76)..(80): a, c, t, g, unknown or other
  modified_base (138)..(147): a, c, t, g, unknown or other
  modified_base (794)..(796): a, c, t, g, unknown or other
tatgtgtttattgatgattgattgatgtttgcaaaattttaacgtaaaatacattctagaattatttttattggannnnntggaaaaaattaagcaattcactattttacataacttaattttgattttatttgaatnnnnnnnnnntttttgaaaattggaaaaatcttagaggggtgacacccacgtgcgcgggcggaaccgagtgtcactcggtcagcatgtgcattcggacaagatcctgctcgaaggaacgcggtcagggccgtgtctaaagccctgcccgagcacgtaacaggctgcacgcagcctcctttcaagaggcttttcggccaatcaccttttcatgcgcgcgcggatggtatgcagtgcattccatccgcaccaaatactatttttttttgtttttttttctttattttttcatgctttttcatggaattaatttcgaattttttgtgtaattttgtattttgattttaatttttcaaattttaaatctaattatctaaataaaattaattaattttaaatattagtaaattttgaactgaaaaaggataaaatctgatattttgcttaaatggttacctttattttttaaaatttgattattttatctgatttttaaatttaattttagatattttatattttagattatttaattaactttataaaatgaccttattcaaaatttaaaataagattattttaatctagaaattttataattgtaaccagatatcttgttaaccttcaattttttattattttatttaaattaaattatnnnattagataaatgatatttatttatcattttattttatttgatatttaattttat

SEQ ID NO: 135607 - DNA, 1014 bp, Cannabis sativa
ggggtcagctgggatacgtgggaacatcggacaaaaattgccaacccactattcagtctcataagaatgaaactcttccaaacccttgtaggaagaaaaaagtgagtcaaaccttgagaggaagggcagggtccggccacaatcataaggagaggatctagagagcatacgaacctagaaaagcctgacctccgtcagcgactcgattcaagacaaaagaattcattccatttgcgaatgagcgagttggagaatgtccagagtacatcaaatcacaaaacccaggagaaaactggggcacgatgttgttggaaaacttgattcggaagcctcaggatcaatgaaaaaagatgattccaaagggctgcttaatgacaagaaatccaacatgtatatccctctttataccgaatacaccgagctcaatgaaactcaggaaaagatctacctcgcacacgtacaagaagtcatttttggtgagccaagacctatgaaacatgcgaggcgcaagagggatccaagtaagcagtgtgaataccatggtgatattggtcataccacagaagagtgtcgtcagttgaaagatgagatagaatgtctcatatcgcaaggacaccttcatcaatacataaaggggtaggaagatgcctatgatcagttcgatctgcccaataactcgagcggctgaagattataaccctcttccacgggaagaagggacactttagttatctcgagagggagagggtcgcaagagtacaaaaggcagtaactccggtaaaagcaaacttataaaagaattgtgacctgagtatatactggcccgttatgattgccataactagacgtcaaccagtggcagtcgaagacagaactaaaaccaggattactccacggtccacctggaacttcggtatatgtcagggattgaccgtggacatcaaaacccgttttatcaaaaccagatgttcctggaagattgataaaataaacaattgaactagggaagttctt

SEQ ID NO: 135608 - DNA, 523 bp, Cannabis sativa
ttttatataacatattttttatatttatatattaatttgtgattttaatgaaatagattaaaatattattattattattattattattatcttaacaatttgcaacacttaaaaatttttaatttaccaaacactgagctcagcttttttttacagttctgctacagctgcttttccctacaacacaactccagctgctttttcccacagcacaactgtgccaaactggccctaaataccaaatcaaagtaaatatactaaattatgagaatcaaatttgactttttgatcaagaaggaacaaacttcattaatcacaaataaattacaacaaaacagcccaagccaaggggaaaaaactacgttacatatacaatctctctatgtatcttttttcatagccttttaaactacctttctttgctatttgaagtctaagatatactatattttttatgtccttcgtgatctttacagctgtgtttgagaaattgttgaatatgcaattgtttctattgctccat

SEQ ID NO: 135609 - DNA, 581 bp, Cannabis sativa
tatcatagagcaagttaaataatgcaattacatacatttaagcaatgctataaaaatattataatagtttatgaaataccatataatcagttgttcgagcatatcctcttctacttaaaatgtgtagaattgctttctttcttctatcttgaaatttaggtcgtatagcctatttagaagagaataaagtaaaacaaactatatccgaaaaaaaaagttcaaaagctagttatagcagactaaaaaaatattatcccctaagagaatgttttcaatttactagcaaaaagaatagtggtgacataacttacagaacactaatagatatacaagacttgataacttagaaatgctaagtataaaatttacctgaaacttaatatgtatatacaaaatatacaatttttatgttactaaataaagagaaaaataaatatataaataaataaagagacaaatatatatatgtaccatgtgttttttactcattttctgtttaataaaagtctccactctagatcgctcttgatgcaatctggttttagtgcttgttgttcattatcagttttagcattgataat

SEQ ID NO: 135610 - DNA, 1718 bp, Cannabis sativa
aaaacaaagatttctacctccattaatccgaaaatacacaaaaacaatccaaaagcaataattcaaattatattgtgcagataatttgataacaacacaaacagagggaaattgaaacttacccagaaataacttgaaagaatcagacaaaaaaatacaaggtacaaatatttttagtatttttcttcataattaggttgttatttagtgtttgtcaatcagatcaagcataattcatagggtaaattagttgatttgaagaaatagatgcaatcaatttacatttgaacaactactgttgcatttaaggtcatttgttatttgatgtcaggaaaagttatttatacgttgtttttatggattaaaatagttgtttagaaatactaatactcataacaactataaaaatttcaagatatatatggaacctctgcaagtattagtacagagcaatggtcattgggatgacaacaaacacaatattgattatgaatcaagtggataataaatatcaagagattgcacttatgctaaattagtgtagataatgttgcaggaactagactacaaccctgaaacaactcaaatacaactgaaataccaactaaatgaggttctctaaaacaaggatgacaaaagtttgttattttatataaagttattaacaaagaaaaccgatttcaaacgatatccattgtgtgtgaacacattcaactacatagtaacaacaaaataaccatccttataatagttacccaagcaatggtgtgcaacaatatgacagtggcttgaagtgaacataactcatgacactcaactgtgtagcaacttgacaccagcaactaaacaacttttatctgctccaaggaagggatcagtttcaaaaaatgttattttggttgatactgacactttgaaaatagaatcaaccgcaaaacaataagaaaaaaactaaaagcaaacacaataagaagctgaatattaaagaatctataattatttgttcatcaattgtttttatatttttatatctttgttaaatagttgttaacaattaaaaaaacatattaacaactattgtcatttttctaaaaaaatataaatatatcaatacttgatgtagaaattaaaaatataataagagttgcttttcactgtacaagaagatataaacaaattaaaaagaaattataatgttcaatatctcatgcaagatacatgtgaaattaattagaaaaacaattacaaaaagataaaagtaacgtttcttaaaaatatgttgctcttcagcgcatacggccaaaaccaaacatatttctaaatcattaatccatgcatagtagcttcaaccttcttggaaggcttttgaatattttcttttacactttcaatgtatgcaactcacttcattctaccaaaggaatagaaatgaacaagcctattctcatcagctttgaagttcatcatcactataaatcaagtcttgcagcagttaaaacaacattaaacaaactacaaaataactttctactatgatttttttcttcaaatgaatgaactacaagcggagaacgtttcaaacaagacaaataaaaaaacaagttataaaccttggtaatatttttctttgaaaggttcaacttgtcaactattggattttatgccctaaataaaattccatttcaatgtaatctctattatttaaatatcaataaaga

SEQ ID NO: 135611 - DNA, 967 bp, Cannabis sativa
cccaagcccacggcaattccaactaatggtactcatgactcttggtgggcttggaaaccaagacccaccgtatctacgtttttttgaatttaccacttgagttgagtgatttagaattttaccatcctctgtttccattaagtcttttgtcatagaagctggcccagcatgtgtagaagtcaccaaacctttcctttttaagtcagagatttcaattatctcctcactagttaaaagatgctgagttgtcattgaccaacacaacatgctcttttaaggttgattgctgattcccataatcacgtgatacagagttaaggcgtgatcttggttgactatcatgaggatcacaattatctgaattagtgcccctaaaatccgtaggaacattaacagaaggagatgctgatgtcgactgctttgctggatcatgacctcccttgcctgaccggagccatggagaggctgtcaagaaactctgtcgtctcgtcggaggcttcatctctatactgtaaggtttctctatgttctcaatcggggtatcatatatcttctcacagaaacattcagcatgtcccataacactgcaaatgaaacaaaatgtcggaactctttcgtatttgaagtaagcataaaaggcttctccattgcggctgcgaaacttcattcgtcttttcaatggagaattaacactcactcgaactcgaacccgaaggtaatcacgccacacgccttgaaaattgttaggatcggactccacgtactgcccaatatagcgagccgcttctcttattgcccattcagttttgaatccagatcgcagatcgtggatttgaacccacatgtctaacgtatttatagcaatcgttttaggatttccacctggtttaagcctctcaataaggagttgtttgcgatcatacgtccaagggctgccatcaatcacccttttgatatctatctcatg

SEQ ID NO: 135612 - DNA, 1185 bp, Cannabis sativa
gtcactcgaccatgagagtgacaatgtcactcgaccatgagagtgacaaaagtcactcggccatgagagtgacaaaagtcactcggccacaagagtgatgaaattcagtcggccatgagagtgacaaaagtcactcagccatgagagtgacaaattcacttggctatgacagtaacaaagtcactcggccatgatagtgaaaaatttactcagccacaagaataataaaagccactcaaccatgagagtgacaatgtcgctcggccatgagagtgacaatgtcactcgcccatgagagtgacaaagtcactcggccttaagagtgaaaaaagtcacccagccgtgagagtgacaatgtcactcagccatgagaatgacaatatcacatgaaaatgagtgacttaaaggggaaccaaacctgagacctcttgaaaaggaggcatggaaatcaccactaggcgaaggaagagatggtgaagtgaagttgaatgaagaggagcctcctatgtgcagtaggtgctttcttaaagtgcgtgccaaggaagaaatccacaaggcatccaaaagacatcctaatatctaggcttccaagaacacttaaaagaactcttgaagactaggggcaagtgttaaccccagaaattggtgcttataatttctaaggttagttgaggaaggcttgagagatgacatggtagaaatcacttggcccaagaatgactcaatgtcactcacccttgagagtggtatttgtcactcggccttgagagtgacaatgtcactcggccatgagagtgacaatatcactcatccttgagagtgacaaagtcactcggtaagggtattgagaggtcacttatccaaggacatgtcacctttgtagatcttcttctcatctttttatagaaacttgaattacccaaattgggttaatattaagggagttatgatcaaaacacgaaagtggtacaaggcttcaagaaggtcactcagtcatgaccattcaagaggtcagacagcaaagacaatgaaatgtcactcggccaaagatatctcaaatttgagatctccttcttgttagaatttgttttagtatgatctagatttactaccatgtatgttatttaacatcctaaatataaatttttaaaacaatgtaatttaaacacatataaaatttgagaa

SEQ ID NO: 135613 - DNA, 755 bp, Cannabis sativa
ttgtcatttaacaaaacacagggtccaattggtaacttttgtaaaacagagattatttacccaaaaaaatatgactttaaaatatttttagaccatcacattaccgtccacatatttctcttatatatatatttgtacagaaatggttcaaaataacttgttttttcatcaaattgtaaaaaataacttgcttaagtttcaaaaatatttttatggatttttttttaatttttacacttttaagtattttttttatatatttttacgaaaatctacataaaaacctacataacaattaacagagtaacttaaattgtaactaaaattcacataacaacccatatagaaattactagagcaaccaccgaagtaaccaaaccataaatttaattattattctttgttagcttgtgtcatattttatagtgtgtactattttttttttttggctagtttgtaccattttttgggctattttgtgccatttttttttttggctattttacagtatgttgttggctcggttgatagtgaatacaacattaaagagtgctactacaaattttcacagataagagttatatcttgctttaattatatttaataattttgaggaattttttttcttttttatatcatcatttttatcttttttgattagctaattgagttcgttatcttttttgataaaatagttaattttagttgagatttgttttattaaatttgattaatctcttaaattttatagtgca

SEQ ID NO: 135614 - DNA, 2818 bp, Cannabis sativa
  modified_base (58)..(61): a, c, t, g, unknown or other
  modified_base (1536)..(1545): a, c, t, g, unknown or other
tcatcatcagaagatcccatttcctgaagccgagatctatttcccagcctcaggaaannnntcaacactggagagaggctgacgcaaagatatcctagcacaggctgggatcttgggttggctggattctatgagagaaaccacaccaacttccttcctagatccacctaaaaccatgccaatcttcctctggaattcttcttcagcctgaggaggatctttgagatcgctcagaagatccataccctccggaatcacttgtgaggatcggccatggtaggttacagggttcccctggtttggattgtttggaagctcctcagccctggaatccatcgtttccagctccggttgaggcttgaagtatgtaggaacaaatggaaaatggttggggcatctgagtattatgagtctggaaggataaacttatgaacttagaagagatattttggtaggaaggaagtaatccattctgaaaatggatttcactaaagagccagaaggattgtgaaaaatgataagcttgagccgcccatttatacacgaagttcagtgacaagaaagccaaagattgagaaatctaacgtgtgggaatcgtgcagaatatgaataggcgattcaaagtgatcttcgaaaccatacaactgccagaatcaaaggaggcatcctttccaagaaaggattttggcaaaatgccctctgtaattattaaaaagctctttttactgtaaaagaactttttaaggggcaattgttataccaaaaatttggctggaggacacgtgtcaaggaaaaggaaatgtgaatcggtgcaatatctttttatagaataactattaattgtgtaagtatcagagtatatttgtaacccgctaactgtaaggtcttaggcaaggaatcaatgtacgaactggcacttaatgtattaacaagaaaccatatgtcgctaaaggtgaatagtgaggcaccagagaagagtaacacatgcctaagcttacaataagcaaactaagtgtaaaagtcggatcgactcgaagaacaagaatgcgagatgaccatctcgctgcgaggaaacttcttatagtttcatccaactaacggaagcgagacccataaccctggcaagtcaaaagatttctgtatacccgcgatcgatgtaagacatatcttgtcgacctcagaaagaagaatggttccagctcaccattgggatcactacaatcaagtttctgtcaaaacatctccagattcaacaattaaagacgtgtttaatacacgatatttatgacccagtaaaagcaaaaaaatcacagctatatgattttcaaaatcatacaccgcatttacactttgtgatatgtaatcagatcccacaattttaaggataatttgtaatcatattttggtcagctttgtaattaactaccactatatatgtaattataaatagtggcaaacaatctcaaaaaagggacgaaaaaaatcttatgaaagaggccttgaaaaaaatactcagaaatttgaataagattgacnnnnnnnnnntgcagaattttaactgcaaaacaacgtaaaaaaaaaccttgtgttcatatattatttttctacagcttttatttttcggtgttgaattattatcttgaggctcacatttggttaaagaaaatctgtgttaacacctctctagggtttttcccgtccctttttctgtataatctgccctatttatagtaatataggttggcagttaattacattcaaatttgaatcccataacaatatttcccaaaattgtgggctttaattacgctccgcgtaaataaatacagttaatatttaaaaatcacatagttgtgacttaaaccatctttaaggaggtcaacgttgacatggattaggacatgctgccaaatgtatctcgctgaggcgtctcgcctaatacatgaacaactattcacaagtcttctagcaatggcatgagcaccagtatactgagcaaacttaagaactgcactttgaccataaggccttgcagactggacaatcatgtccttcaagttattatacttagctattatactacgctaagtgttctaatagtcaattcacctcgttaatacctctttacatacaacaaggtagatgattcactttgcattgtctatatctttcttgggattatgcctttggacgcgaaatggtttctcgtcaatacgtgaattaataatttgtacatccttgtctcgcttaagcctgtgcagtcagcgagttataaatatactctattaattccacattgactgagttatttcattttatatttattgatataattatcaatatttttgttgattcatattccctgagattgacacgtgtctctttgtgaagtacagccaaattttgggtataaatatattttaaaaataacaaatttttgaaaatctgatatggttagcaatttgaaattctaactagaatatctttaaatcaaaataagatcattttaaattgtataaataaaataagtaaatatctgatcttataattaaaattaataaaacaaacaaaacaaataatcaaatttcaaaaataaccgtaaagtcaagtttgtggaaaaatcaatttttaaattcaaaggctactaatacctaaaactaatttaaattaattaaaaattaattttattttgataattatatttttatttaaaaatttagattctacacaaaattctaccaaaatttaaattttgtttcattaaaaaaaaaaattttaaaagttgaaatatcacaaaagaaaaaaagatggcataggg

SEQ ID NO: 135615 - DNA, 533 bp, Cannabis sativa
  modified_base (273)..(294): a, c, t, g, unknown or other
ttgattatatatatgtatatgttattttttaaaaaaattaactataaaattttgtaactagtaacttgttacattttttaataattagtaagtaattaaacaattaacaatttgtatattacattatattgtaggttgtgagctaatttttgaggttcgacatatttcggtattgatcagattttaacgtgctataggtatatacattcactaactttttcatcatattataattagttaccaatgcatgcttagtggagtttgaatatcttnnnnnnnnnnnnnnnnnnnnnnaggttctgcgaatacatgtactgtggttggataggtggataaattttgtattgtttatgttattttgtttgttctttattgttatatttgttttgttttttactttaggcacttttaaaatatttggaaaaatccttatagctgttatgctaccgaaattttagtagaattagaataaattttactaaaaaaatataaatattaaaggaaaagtgcataacataaataactagttaatt

SEQ ID NO: 135616 - DNA, 998 bp, Cannabis sativa
gaagaataagtggttgaaataaagtggcaaaaatataactagagattggcttactatcatgtacggccatagttgattttttgcccaatattttattctttttcaatccatataattcaaccctaatccctagttcaaacactataaaaggaacatgatactctcactcatcagactttttcaacttgactattcaatcaaacctagatgagagagttccttctatagagatttcacctgtaacgccctgttcaacaagaacaccacgtgtgtgtgtgtgttttaataaaattcttattttatatactatataattatacaaaaagtgtgggtaattaaattttgataattaaaactcaacatacaaaactattcgacaaaagataagtgatattaactacggggtccccctgttttcaaaatatttacaagctcgtttaatagtatttttacaacgtaaactttgcattcccaaaatacattcaaaatagagcatcctgttcactggccatgccactgcagctaatatgtacattgctgccacgaccacaaactcatggttgatcaacctttgccctccctttacgtgcaccataaagcactcgtgagtcacagagactcaacaagaaaagtgaacagaacaataactgataatgatcatcaattcaaatgtcataacaacatgcttacatattacataatatcataaacaccccatcttggtactttataaagtacccctttaccactcgttaaccacgagctttatatgtcactatcgttgcccgaagaagcaaacaataagtaagaaacctaaccgcaatttcaggagtaattactcgtaacggtaataaccgtttcccactaatcaaatttttaatcaaagtcttgataataatcaagaccactaccaatcaaccattaatatttaaccacatacagtgcttaccacttttattaccttaattcagaattcaagtgtacaggccgacctgagt

SEQ ID NO: 135617 - DNA, 996 bp, Cannabis sativa
tcatggctaattactaatagatttaccctttcctgtacagtagagcacccgtgagccaagcccagaagatagtaaaatatcaatatacacaataaacaaatatctcataactaatgatgccattgcacttaatatctatttgacatagacctacgtgttacgttcacacgcctatttatgtgtatgtggcatagtcccacgtgttacgctcacatgtctatttacaacaaggccttagaatggtttatctaaattctaattaccgagtctaaccaaattatgccttgaacgcataattctttacttcaacatatatagcatggcatagtattttaaatcatttaatcacaagagtaataaccctatgccacataaccgcttattttagggtaataacattcatcccggttctcatttaataagaattataatattaaacatgagcgccaccgcacttaactctacgtgctaactactatcttacatgatatctgaagtatgtggagattccaaattcccaggtgcttttgagcaagtgccggtaatcctagtcataattttctagattcacaaatagggttaatccctaaatccagtatcacataaacatataattggaattcaatactcataaatatatagagctcagaacgagattttcaacgatatatggaacaccccaaacagagtctggatcaaaaacttatgaacaatacaagttcaacatgcaatctaccaaaataaatctaggtaggctgcaacactcaaattcatagaaaatatgttatatgagtgattatttagtatgtaagtcagggttattaccctaagattctatatgatataggataaattgtgggcatgcattaatgttaagaattacgtgtataagccatcactgggttagacctggtatatatcattaggataaaccaccgaaagaacgtaatgtatggattacgtatgtatataaataggattatgcgagcaaggcat

SEQ ID NO: 135618 - DNA, 944 bp, Cannabis sativa
aggtagcgtcccaagttgattgtcaacttgggtgctgggcccagcactatgtcaacctggggcgttgggccctgtttctagggtctcaggattgtggttttttcctcgagttaaatcttcattatttctgatgatggaaaaaatgttcgaaatactttttagtgaacttgattagaaacagcccaggttgacaatatgtcaacttgggcgctgggtccagtcccagttgtcagcctgggcgctgggtcccccttccccagaaatagttgaatcattatattttctaaaaatgaataagatgatcagaagtattcttgaaaaactccaaattaaattgcccaagttgacaaaatgtgaacttgggcgcaaggccagccccaagtgtcaacctgggcgctgggtcgtgttcttggcacccaggatgtgttgtttcttttgcaaaaggacctatttccccatttttgataaagataaagaagataaaaaatttggatcatcaatctgatacttgaaaggcgcccagattgatgaattgtcaacctgggcactgggtgctcaaggccccaggtgctcaaaaatgaacttgctccgattttgattctgatgcctcaaatatgtctgtagtatgtctagtttataacccaatgcaagtgttaacttgggcacttggtgaaacactaggtgcccaggttggtttccaggttgtaggttcgtggtgccaatactttctatatgtagcgtttcgtaattggttagtgatatttcactacaaaaaatttgatttttagtcacaaaaaaagttgcgactacttaaaaataatcattcctatgttgtgactaaatattcgtggctaaagataatagtcacaaaaaatcacaatttgttgtgactaaatgtgtttttagtcacatacttgttgtgactaaaagtaaattagtgataa

SEQ ID NO: 135619 - DNA, 543 bp, Cannabis sativa
ctactccgacaacttttttggtattgacagcaaactccaaaaaagtcatcgaaattggcattgtcgcgggaaaaaatcaccaagaaactggtttcttcaaatcagtttcttgataaagaaactagtttcttagtgacttttctggcgattttttcggcgacagtgccaatttcaatgacttttctggcactggcagtaactccggtgactttttcgacactgggagctactccggtgactttttcggcatcgacagcaaactctggaaaagtcgtcaaaatcggcattgtcgccgaaaaataccaagaaactggtttcttgataaaaaaaccagtttcttagtgatttttccaacaacaataccaatgtagatgacttttccggcaccggcagctactccaacgactttccttgcgccgacagcaaacttcgacgccttttccggcaccagtcacaaactccgacaatcactataattttatttattttatttttaaaaataaaacatgaagggaattttaatatttttttatggtaattcaa

SEQ ID NO: 135620 - DNA, 533 bp, Cannabis sativa
  modified_base (500)..(507): a, c, t, g, unknown or other
aaacgatgatttatatgtttttgtgttaatttggatggtttcatgtggtttatgtgttagttgatgaatgtatatgttgtacagtacctttttccacgcaaaatattttctctatttttataaatattttatttggattccttgtgaaaaattaagcaatttttgtttttacagaacttaattccgatgaaaaacgaaaaagttatgatttttcggaaaaatcggattttgggtgtccatggatgctcaatcgcacgcgcagacccttcggtcaaggaggatctgcgcgcgcatgggacactgcatctgcccgtgcgtctcgcccaaggaaccctgcagcccgccgaggtttctcggcagatggggttgcattccttcccgtccgcgcgcgtaaagggcattttgcagcctctggcggctgcacgtgcagcctcatgggctgccaacccaaaaaatgcaatttttgggatttttaggggtttttccccaaaaatccaatnnnnnnnngggattgtttcccaaaatttattttt

SEQ ID NO: 135621 - DNA, 764 bp, Cannabis sativa
tgctatgtgttaggtgataatccatcaattggcccttttactggttttgctagaaggttatggaaagacaaagtggataaagttggattgctaaatcatggagtctttattattagatttcatgctcttgaatacagggaccatgtgttagcaggaggctacttattttttgataagaaactgatcatcatgaagccttggaatccaacttcagacttcaaaaaagagaatgtctcttcagccccgacatggatacaactacatagccaaataggagagcccttacagattgatcagattacttaaaacaaggaaatgctctctgatgcctgagtgttaattgtaataaaaattgatcaacatttcgctgataaaatttcttttacggatgaacttgatcacagggttgagatttcgatgatgtatgaatggattccattgcaatgtcgcaattgttagggaataggccattccactttagaatgtaagaagacatggaaaaaagaacagcaagagtggaggcctaagaaagccgataaaccccctatagctccactgaaggaaatggatgaggaaggctttcagttaatgaggaatgggaggagatctgagaaggccaatgagataccaatagtaaaagtaacatccccgaatccatttcaagcactccatgaggaagagggaagtcatgaggaaatagttgaagaagttgctaaagaagagggggagggaggaccccttaacatccatggatagaatcatga

SEQ ID NO: 135622 - DNA, 547 bp, Cannabis sativa
agaaacagagaaatacacaaaacagaacgagaaagaaaataacttcggcgccaccttgaactgtcgagagagaacgggagaaatagaggagtgtcgcagggggtggagatggccaaaagtcgttgaaagtgtctccttgtggtggagtcgagaggagcgagcgagagagagataaatcaggggagagggacgagaaagagatagcaagctcgagatttttcttgggcatggacggctggagaacggctggagaaggctgccgccggtgagggaaagagagcagagagctcgtgacttagaaaatgaaaagtgatgggctttagggtttcatccttttccttttataccaaacttaaataaataaaattaaaaaataaataaattaaaaatctgctgtaataaattaaaaatttgcagtgtaataaattaaaattggtctgccttttaataaaaaaatctgatttgccttttttttaacatatagtgacacgcctagcgtgactggatacacatgtcccaacacgcctggcgcgtcactgtatcataa

SEQ ID NO: 135623 - DNA, 728 bp, Cannabis sativa
  modified_base (157)..(165): a, c, t, g, unknown or other
tcaaactttgcctcaatttcaggagagacgggatcaacaaatgaatcgttaagagcgtaaaggcccttcacataagtaaccatcttaaaatccctctttctctcctcctgattgagaacctggtgacattacctccattggagtgctcctcacatcnnnnnnnnnaaaatcaacaaaaggcgattttaatgccggtgcacgctttctcttatccataagaggagtatcagaaacagtgtcctcagctttttcatcagaaggaatgacagctgtcttttcaacaacaagacttggattttgttttcggactagaaaaaaaacaaattgaaaatcaggaaaaggaataattgcaaaacaaacataaaactgccaagcaattaacataaaatatattttacttgcaaacaaattaagctacacttacatttattttacgaacagcttctaaaccagccaacacaacttggtcatcatcaatttcaaggtgtcttaaaccatcgaaaaaatcatccccttttacactagactctttggccttaacgttgtcaacatccttagccctctcatcactaacagtctcagattgattcacatcagcagctgaaacatcactagcaaccttatcatctccagcatcatcaccaccatctttaaccaactcatcaccatcatcggagtcgaaattaatattttcaggatcaggcaattccttgtcatcatcctcagca

SEQ ID NO: 135624 - DNA, 597 bp, Cannabis sativa
cataagcatgtaaaatatatgtaaacataatcacttcaaaactcttaaattgataactatcagattgtaatgggttttatttagggcacaaaacccatcagagttactctcgccactctaccattttgactctattaacccctttgaaaaattccagaaatcatcgatttcttgctgctatcctgcgtccctgtcattccaagttcaccgtcggatgacatcaacttcttgctcatcaccattgtgtaagtttctgggtacactttacttttattattcatttgcatgttagggcaagatttagggcagtgtctttattttaatcgtatttgatttctatggtaagatggtcatgatgaagaccgtcgtgtgtcgtaattctttgtatgcttaccgtcatttcccttttggattttgcaagcaagttcttcacttagggaccgtcgagagtatgaagtgattttcatacttttgttccttttttattttctctttttttttcactgccttccggatatttgcacccgatgtttgcctaagagaatccctggatttcctatctttggcagacatctggtgttaggttttatgccctaa

SEQ ID NO: 135625 - DNA, 638 bp, Cannabis sativa
ttttttaatttccatcaatgggtattacccattaagaagtgttccatacatatatatagttttatttgttttatttttttctcattcctcatagtaatcattttctctcttcaaaattctactagcaatttccaccaagatttttgtcaattgctttatttacgataatgttcaattcaacggtattagttctatgaatattgcattagtttttacaataaacacagcggtccctacaagaaatgtcacttttaccaacacagtttgctactgcgctagtaaaagtaacgcgcatttcgcaaactgcgctggcaaaaaggtcaattaccagcgcacatttgcagtggctaaaatctaatttttaccaacgcatttacgcgctgagaaaagttatttttgccagctttttttttcattttatgctgacaaaagttctaataccaacattgccaaccccttttaccaacacatcagaagtaaattttattttagcaacgcaataccaactttttccagtacaaaaatgtgctggcgaaaggtacaaatattgcagtgtcaatttctacaataatatatatatatcaagattaaatttataatttttgaaaaatattctaatttttcttaatacaactatt

SEQ ID NO: 135626 - DNA, 1894 bp, Cannabis sativa
tctaagtttgatatttacatttatgcaactaagttgttttaaaatgagtaatttgcagcgtaaatacctaatgacatgtttcttatccagtattctgaatcagataaattaatagagaaatgtaacgaaataaatgaaaaataattagaatcaatgtttgtaatatgttgtttactaaaactgcttagaaataaaataatgatttatcttgtttactttataaagaagtaattggaatgtttaaattgattaaattacccttttgagttaaattatagtatataaaatttattttgtaagacatgttttaatttataaaattgtcattataaatttaatatcaaaaattaaaattaaaataaataaaagtcattaccctatggtatttctataagaaaattagtgggctaagttctcttttttcttttctcccttatttaatcaagctctcccttttctaaatttaataaattaaataaaccaatataataaaatgactatcttaatattaatttccattgctgaatagtaaacatgtcataagtttaatttttgacggtaataatacataataatttatatttctgaaactttcgtaggtacctaaagttaagtgtgttattatccacatgtcatattcttatcggtatattttaattaatttttaaataaaaaataaaaatttaatgacatggaccaattaaagactaccatgtgggcattcacttgatacttaatggtcaagtacctatggaagtttcaaaaatataacttatgtaatattaccatcaaaaattaaagttaagtatttatctgcaatcgagagttaaatttaaattttatgccgtaaattactcatttaaaatacaaatggcgccttcttaaaacgggccttctcgattttcagttgtaaaactattttttttttataaaagggagtcgcgaattttagaggactttcacagaaaagaaccttagaaacacaagaagaagactcttggagggagcgtgtcgatctgatcgagttcccccacttagtttctttctcttctctttaatttctttatgtttttatctatctttagtttaattatggatttgtttgttgaaattataaactaatttctcaatttagggatatgatgaatgttaactgattttattctatgagttaatgtgatttgactatttcttatttattgttcttgtggtttatttatctttgtgtttattatatgtttaagcttgatcacattatgcatgatttatcatcctaatgtgaaatttgaaaaaatgaatgttaagaatgctctaaatgaataaacatagattttgatgtgaaacgaaagtatttacatagcttgtgtgacttttagattattgcttaatgtaaattgtatgttgttctatcttagagttgacatgcaatttatgacatttatgatctaaaaaaaattaggttaatttataatttgtcatcatataggaggaaaaagcaattaaaattatatctctaattttacatctattgttaaacctctttttatatttgtttgtttaatttatttaatttttgtttagtttatttagttttaaattctatctattccattctcaaatagaaacaagaattcaattaattggtacttagttataattctcgtggaaacgatactctactttcattattattacttgtaaacgatatgtgcccttacgtagcataattttcacaacacccgacctgattattatgggccatgatttagaaatgggcaggacttttctcggcccatttggagaatttttctaaatttaacacttacctatgtaattagcaaaaacatggactctatttgtttgatacctgtaacgtccccgcttcaagcctcca

SEQ ID NO: 135627 - DNA, 938 bp, Cannabis sativa
gtccgagtctgagttcgagtccaagtttgtatctagatccatgtctaggtccgagtctgggtttgggatcgggtccctggttcaagtccgacccgataccgcacccggacctagaactggaatcggaccacgtctgggactgtaataggacccaaacctaaacccaaactcagaccaaaactcataccgggacttgaactagaccagcacttgtgacctgggacctaaaccaagaccaggacttggacccagaccgggaataggacctagacccagaccccaaaactggggtcgaacccaggacccaagaaccagactcgaacctaggacccgaaacctagagctagactggtactgggacccgaactcgtacccgaagccaaaccgagacctggactcggactggacctaaacccgaacccgaaccgaaatcagggacttgaccctaaaactaggcctaaaacttgggccttagaccttggatcggaatggaggacctgaccctagacccaaacatggacataggacccacctcgtgacatgggattcgggactcgatggttggacccaattcgtggttgatgtctggatctaggacttagaccagaacgtgaacccaaactcaaactcaaatcaggaaggacctgacctggacacataccaagacccagacccacacttgaaaacaaaaaactgaaaacttgaactggaaccagaccgagatctttgaacgggaccgaggcctagacccaggcccgaacccggaactagagccagtctcgaacaccactcgagacagaaacccggacatgaacctcgccccgaaccttatctcgtgacttgaaaccggaactgaaactagaagcggatcaggaccttggaacaggaccaggagcaggacatggacccagacccaaaactgtaaccagaccaggatc

SEQ ID NO: 135628 - DNA, 765 bp, Cannabis sativa
  modified_base (737)..(740): a, c, t, g, unknown or other
cttgttatttgtattgacttaagagcgaggagaatggttccttttcttagagctcttacaattatatctctgaatatgaattcttagataaatgtttcgatcgctttgctcagtgattatgaatcactatttatagggctataagcttgggagggaagtctttcccttctggttacaattgatataagtagaaagattgcatgttaaatacagaatacactaatcgtgggatttggacagtttgccatatctctgtaatctgatcccaaagttatagggatttctttggtgactcacgatgcgaaagctaaattagctaagtattggcgtgttgcacgaattgcttactgctcggctaagaggacttcgtccgagcagatgtatgtggtgttctatctagcatatttcttgcgagcaggtatatagagttgatcctacgtgtcaccatcgtgtgatgccacgtcagagtgcaaaaattgggataacagttactagcagttgcctaagtccttctagggaaataccctagtgataggaaaatttcagaatgatggaatgattgtgtacttagtgtaaaccattactagaatcatggatgtcctgatcgtgaccttaagaaaaggtaaaactgttaaccaaggtttgcaagtttgatagctattttaagtgattaaggatagaccatcccatgatcattagataagaaagtgtttgtttctacaaatactacttttctnnnnaaatgactaagtctaaaaacaaagt

SEQ ID NO: 135629 - DNA, 579 bp, Cannabis sativa
taattttcgacctgtaaataggctcccatacacttatttacaaggcttaacagatgagtaagaacgttctaactggttgtgctattgaccatgatatcacccattagcagtactaagatcgtactgcaggaccggcactatgttcgtgccggtatgatagcgtcaacaacatccaagagtataataggccatgatatcattcttaaccaatacgatgcctgtactgctgaaccgacacaatgtttgtgtcgctatgatagcaccaattcatactctttgaggtgattatcactcttatccagtacgatgcctgtaccgctgaaccgacacaatatttgtgtcgctatgatatcacccaaacatattcaatcatgcacacaacatatatatatcatacatatatacctttgttaaaatatcacatattatacacaattcttaccttatttccgaattcaagtgtgctagccaacctgaaaggaaagtatcgtgctagatggatgccctaatcacattttaaaaccgggtaagttacatgattaaaaccctaatcctgggaaacccaaaacctcaacccta

SEQ ID NO: 135630 - DNA, 943 bp, Cannabis sativa
  modified_base (187)..(190): a, c, t, g, unknown or other
  modified_base (362)..(363): a, c, t, g, unknown or other
ttaaagagctattatattttcatttgatactaatttaatctatttattttaatatgtatttatttaattaaaattacaaatttagatgactctaaatgtaaaatttaattaatatttataaaataataccataggaagatctaaaaaaatagtttccatcctcagtattaattttccaataaatatnnnnaaaattacttaatttaagttggtaaaaaaataattgaatgattaattttcaactcaaatttaattttctataaatatatatgacagaatctaaaatccaatgtattaaaatacattttcaaaattcattaaaattaaaataaaataaaattggaaaaattattctaatttannttggtctaaaattaattaaattaattttcaacataaatataattttcctattaattaaatctgttaagaaaaatatcaagtatttaagtatctagaacaaatcaacttaaatattaaatctctaatttaattaaatatatctagaaaaataccaaaagtctacatagaaagtatctatctagataattcataaactaattactaattttctaattaaaataatatattttcgtctatttattttaattaagtcattaatgaaaattacttaatttaatgttctaaaattatttaaaagtaattttcaacttaatctaattttcaaaatagaataatttcaaaatatctacattaaaaaaaatataattcaaaattttgtgggaaaatgattattaaaataaaatatatttggaaaattattctaatttaagttgatctgaaaatgaaaactttcgcacttaaatataattttctatctaattaaattcattaaaatataaataattaagtatctagaataaaataaacttaattattaattctaatttaatatctaaggaaaatattctaatttaagttg

SEQ ID NO: 135631 - DNA, 563 bp, Cannabis sativa
aaagagatctaaggtgctcatataaagatgagaagtttttatcaaaaaagcacattgttagaaaatcctaaggcttgataattctcaaagctattttctagagagttctcttagtgcttaaagataaggaaaataagcttttggacgaaagtgtaataccttattcaaggtatggtgatctctactaatctacactcaaagttgtgagtgagtgtatatacatatatatgtatatttttctcttgatatgtttattatatcatatgtattgtattcttcttctactacttttatttctatatacgatatatagtatgtatatgtgtattataacatatatttaatacattttaattttcttctattgtaataaaatctctaacaaaatttcattattatactttgtaaaaattcctattacaaaaaatacctcattaatttttttatactatactattttaataattcctcattttactaaataaatccttacactttttttttcaaaacttaaaaaagctttattttttaaaaaaaaaaaacaaatctctctctctctctct

SEQ ID NO: 135632 - DNA, 539 bp, Cannabis sativa
cgcccttaacaacattattcgggcggggacaaaaaaaatttgattgatccatccccgcgtccctccccgccctgttccccatttagacaaggaatccccgccccattggggccgggcccccgcggggtaccattcccatggagaaaatctgcatcccttattagcacactatcaaaacacaataactactattagtcaataaaatataaacgacatactttttttttaattattaacaaaattatttacaccacgataactcaaataccatttatgtattcatataaatatttacatatatatattaatgaagattaattgtgagctattacattctaccctccttaaagaaaattttatcctcgaaattggacttactaaaaagttcgaggtattgtgctttcatgtcttcctccatttctcacgtcgcctccctttccgaacagttgctccacagaacttttactagaggagtacttttggatcttaactccttcgttcctctctttataatgtgaactggtcgcacttcataactc

SEQ ID NO: 135633 - DNA, 1053 bp, Cannabis sativa
  modified_base (44)..(54): a, c, t, g, unknown or other
gaatacaaacaagtaacacgcaataactcaaaccgattacaatnnnnnnnnnnnagaggaaatcaattcctaaaacactgaaagattaattaaaaataaaattagttccacaacaaaatacctcataacacataatacctcaaaccgattataattcttttaaaaaaatatggggatcaattccaaaatatattgaggcataaatataaaaagaatcggtttcataacaaaataaataaatacaaagagtaatatacaatgactcaaatataatataaaaaaaatgattatattaatcaactagttaaaaatttaagacaaaaagactagttctgtaaagcaactaagacaaaaactcacacaaaaaaaaaccagttaaataaaataactcaaagaaaaatatctatttaacatgctccaacccgccaaataatattacacacataccagatttaccccaaaaatatctatttattatgttatataaccggttctattttagttataaccagttggagttatttcctgttatttatttttattcattataacactgttataaaatctgttcaattttaattataactggtttgagttattttgtgtttttatttttatttattatgttacagaaccggttacatttcaattataaccgatttgagttattttgtgttatttatttttattcattatgtaaaagaatcggttctatttttgtttatatctgagacatctacttctgataacttttacaatgacttttagtggcgacggtgatattaccggtaactttccggcaacggtgacttttctggcaatttttccggtgtcactaacttttccggtaaaatttattattattttacaaatatgggatttctatctcttttttttacaaaaatatggcataatataccccatataaatatgaaaaaaaaaattaaaaaaaatccgtaatcctatagtattatttatttatgccataaaaaagtaaactcgtataattttgggattatttcacaaaaccataaaaacaacaaaaaaattaca

SEQ ID NO: 135634 - DNA, 627 bp, Cannabis sativa
gttacaaagataatcaacccgcaccccattcaaagcctttgtaaaaatatctcctatctgttctccggtcttcacataatctgtggcgatcagaccttgttgaattttctcacgaacaaaatgataatcaatctcaatgtgcttagttcgctcgtggaacacgggatttgaggcaatatgaagtgcagcttgattatgacaccacaatttgctagaatagaagtcttaaatacgaattcagtcaaaagctgataaatccatattacctcacacacagattgtgccatagccctatattctgattcagcactggatctagacacagcactttgtttcttactcttccaagagatcagattgcccccaacaaatacacaatatcctgaagtggatcgtctgtctgccttggaggctgcccaatctgaatcagagaaacactctatccgggtatgtccatgatccttgtaaataatacctcgtcctggtgctcctttcaaataacataaaatttgctctagtgtcgcccaatggtgaattgttggagaagacataaactgactaatgacactaactgggaatgcaatatctggacaagtcacagttagataattcaactttcgaaccaat

SEQ ID NO: 135635 - DNA, 809 bp, Cannabis sativa
gtgatcaaataattatcttattcagaaaaaaaaaaaatgaagaaggagaaaaagtagtagtagaaattggataaatatttttatttttggtaccttattttattattatattagagtaattaataggggaaatttttttatgttttaatttttatacacttaatttttatttttttggcaaaatctctttaattagtagtttgctttttttttttttttgtaaatttgaaacgtcagttaaactgttaaaaactaactggatcaccattgtgtacacttatgtatacgctaaagttaaactttgaaatcaatacagtaataatttagttggtatttaatggtaatatcaaactaacacctcaaatttatatataaaaaaataaacataaaaaagttttgctaaaaaaaataaagaaattaagtataaaaaataaaaaaacataaaaaaatcttgccacaaataacctttatcattattattttgccacaaataacctttatcattattattattattattattattattattattagggttttcaacactatggtcaattaacgtgcattacaagtaactaataattttttaataatagttatcaactaatatatgagtattattattggataacactagtgcctataacatcgaaaattatattaccgcatcaggagtacttttaagcatttctcttaaaatgtgtaatacctcaatattaaaattaaggatccaattaggcgtaaactaactcacatttttaattaatttttttaatattttttctttttttgcagattcgacagag

SEQ ID NO: 135636 - DNA, 531 bp, Cannabis sativa
tttgcacaaataaagattaaaaataataaacacacagatttgttatagaggtttggcctccttatgataacgggtaatgacctactcaccttttagttttagtaatgctgagggttaatattatctagatcactatagatggaatttgctgtagcacccttaggaatacaaagtatgaatcaagaatggcaaaactcaagtgttgagatgatgcttgtatgggcgtgtgagagagaaagtgaggaagagagaagttgtcaaacttaggcttagagcttggaggcagtttgaggcttagattcaacttaggtttctaggttagagttaaggcctttatataggaggcctaaatcgtagattacaacttgaaaccctagatatttgtaggaatgccaatggggcgggtcggatctgatccgactctgaattgacctgatccagatcatgtacggatttgccccgccctgccccgctggatcagatactcggatcggatctgatctgacccgccttatacgaatcggatctgat

SEQ ID NO: 135637 - DNA, 508 bp, Cannabis sativa
ccctcattattatgtcacaataatgatgaacaaataaaaaggtggttaataatgtagctaattaattaattattattattaattataggacaacatttattcaattatggaaaacaaaatcaatggaccaatactaagctgtgccatacttggctacacttataaattgtcttgtttggacactttatgggctcccttttattcgtccagaagtattttggttgtgactataaatgggtctggtcttgtaattgagcttacatacttaatcatcttcttaatcttctgagataagaagaaaatgattaaagttgttcttgttgttcttgctgagcttgttttaatttctattctcacctttttgactttgactttgactcattctcacatgagaagatcaaccattgttggtacaatttgtatactctttaatatcatgatttatgttgctccattagctgttatggtaaattactagttactagttattaattagttactttttaat

SEQ ID NO: 135638 - DNA, 503 bp, Cannabis sativa
  modified_base (428)..(451): a, c, t, g, unknown or other
taacggttgggtaaaatatttttgggtttttggaatgtaattttagtataggcgtagtatttttggtgccaagtcatcaacaacaagggcaagacatggacaactcaagaaagttcctaccgtatggtcataccgctagaaacttgggggcaaatgttcacccaaattttaacgacggtgacatgtcaaaagtagcaacacgtggcacaaaaataccaagactaaattaatgaagaatatgtaaagtcatgatcgttaatcatgatgggtggtctgaccattaaaatgaaagtcagacagtaacccttacccctagcttgagtaaggtgggcgtctccgagaaggaaacatgatggaataagaccttcgtaagcggaaggaacaatctgttggaattattttaccaggatcttatatctactcacaannnnnnnnnnnnnnnnnnnnnnnntgaacttctaaaacgattataagtaaacaacatataaagtatgagaaacctt

SEQ ID NO: 135639 - DNA, 622 bp, Cannabis sativa
agagagagaaagagagagagaataagttttcagacttagagtaatttggaggctatgttaagtaacttaggtttctaagttagagttaatgcctttatataggaagcctaaaaccctaatttacaatgaaagccttagatatttacacattaaattgattaaatataaaagactaaattaccccttaaaagtagatattttccatcagtttgttgggctgttaaggtcccaatttgcaggtagcttgttgttaaaactttaggttgtacatagagtcctgccacgttaatcgcttggtcgcccatagacctacaggggagggctagtcggccatggtcctgccatgtcaatcttggccagccatgacctagtacgtcatgtgcgtgccaggatcctgcatgttactatgactttaccaagaggagactagtctttggatgtagaggccagccttttgcaagtggaggataactttgtacactgttctcttgtagaggccaggttcccttggtcgaataaaagttcccatggcccggaagtcacctttttggcaggccaacttgtgcccagatcttgaccggtctatatgttcaccctggccggcctataggctcctcttggc

SEQ ID NO: 135640 - DNA, 3038 bp, Cannabis sativa
cagttattttatgaatttaaaatattttttttttgttttttatattattttaaatttttttaattaaaattattatttagaccaataaaaaattgatatgtgtcatttctttgggtttaacggagcaattaaaaagagggaccaacggactcacaaaaaatgtgatttggggactattaccgccaatttttgaggttagggactaatctccatcaaccttaattttttggggacttttgccgcaattatccctttttttttttcatctccatttccagtttccacaagttttctttggttcaatcttccaaatgaaaatcatgttaacacaaatccgatacctgatttcttcttgcccattaatgttaagactaaagggacgaaaagggattcattgaaatagctaaatctgtttcctcaaagatatcaatcatgaaactgcctaatcatcttcactttcatcactatatgaaactaaagaagttctcacaacagcattagttttatcattatcacgactaggtaaatttgctggctgagatcttttttctgtatcaacatcacaaatgtttgtttcatttgagggcagctctataacatctccctgatccaacttagctttttttgcttgaggtttcacttttattatcacacctaatggacgcggatgagggtttttctttctcgctgccttctgttcctgcagaacagatgtatcttcattcaacataaaccattacagacactgtgaccaagtggaaaatagctctcttctaagtttctaacacattaaaacagacagttacttcttctctttctggcaaaatttcttaattacaaactatatacacatacaaatagctctgtaaccataaattcctaaaccaaatgctgatgctgaatcacagagataaaagaatatgtatatatgatcaagaaagtaacctggactacaggaacaggtggtgtttcctcaaaatcttggacgatcatagattgggctgccactgctgcctgtaccaaaaagcacagcactaataaagttgaagctttaatttgatttccaatcaatagtgcccatttactatgttgtttggaacaatgtactagacaacaaatagctaagaaagacaaccgccaacagactgacaaaacttcatcgcatatttctgaagcatgaataacccataaaagcatgcctacacaagagtaattatgacaaactctatgattctcaactagcatgaccaacatctctaatctgaagatactaatgccaagcttcacattcatcagcctaaataatgtatgtaagtattgcctatctaggtttcaatcaaaaccaacaaatatttagcagtaacacaattcagttcactacaaggaaattcaaaaaatacaaagttacagccttttttttcctataaaaaactttgtgatgttattattgatcactaaatttcactaaattccctggctgagatctttattcttatcaacatcactttctatatctttaaaagggatttttcttgttattattattattatgcacagggtaagagtacgccaagtgtacactacagctacaaaatttggaaataaaattctaaaaaaattaagaattactaaatgtacctggaaattccggagttgttgggcttcttcattggccacttgctgttcatattccctcttagactgaaaaagcaaaacaagatgtcatagaagtagtgtaagaagaaaatataattcaagaaacaagtattatgactttgataaagcagttgactgatcaaatgaggacatgctaaagtatgacatttgaagttatgagctatcttaactagagagcacgcactaataatcagtaaaaacacatttaaagcttttaccagctctaatttatcaaggaactcggtctcatcatcatccaaagctttaggaggtcctgcaatgcaaaaagcaaggatttgggtgacacaaaaatgcccaagtaacaatctttggtaaatcaattgtcacaaaactaaaagaaaaataaaagtactcactgtgcttaaagcgttcgttgaattcagcatcctttttgtctttattttcctttaaaatctgtagcatcacgaatgacttagatataggatatattttcattttcatatgcatacatatataattacaaacaaaagaaatgcaatagttaaaagcttacctcgtaaaggggtctatccctctgggcagtgccatcctccacgcgttcgcccctagctttcttggtttcatccaactgttgaaatcatcgtcccaatcccagaatttgatttagggtttgaaatttaagaaactatcagtagtaactgtttaaattagcaaacctggtcctccgatatgaaattcataagcctaatggggggagtagattcgtccgccattttgaactttaacactaactccttagtcctccggctgttctccttttctccaacactctgaacctgtaactaaactggggcattaaatcctgagctgacccttttacgatcttttctctttctttttcgggtcgacccgttttcaaattatatgtggagtttaaggctatttacaaaaaaaaaaaaacatgacattttcaactttcttttcgtatgtggagttttaaaatgggttttttttttatttgtatcctcttacgaagcttgtccttaacaaatccgagaatagtatacttattcttcccaactggacatagaaggcctagatagtacccattttcatcagcttcatagatttccaacgaagcacaaatagcatcatgtagagcacaatttgtattgttgctaaaaaacacaaaagacttagcaaaattaattctttgacctgtagtcgcctcataagtgtgcaacaactcctttacattgtacgcttcttcctcagtagccttataatatatataactatcatccgcaaaaagcatatgagaaatgactggcgcacctcgagcaatcttacaacccgtgagcaaaccactttgctcataa

SEQ ID NO: 135641 - DNA, 611 bp, Cannabis sativa
gtaagtgacatgctaaatcactttacggggacataaacttgaaaccaaaagtttccctatcgatgaatcacatggcaataccataaacatctgaaaaatgggaaaaactagggttcctaaaactgcaccaactggtagactagttcccaactgaaatttcggttcctataggtctctctgaaccatagttccggtttagtgcaggaatccaacaaaaattcataactcactccaaacaaccccaattcaaatcaaacttcccagacctgttttatacaacctagagagcatatttaaagcaataaaacatcacaacatgcataaaatcaaaatttgccattaaagctccaagtttgagttctgaaactcaaaacttggttaaactaatcaacaaccactaaaacatgctcaattcaccaaaaccaaacataaattaactacaaaaacacaactaaacaccagcagcaagaacaacaactagaatcccagaaacacgtataattcattttcttcaaaaaccagaaactaaagagggagctacaagaggcttgcctagagtttaagatcccttaatatctgctggaacaagcttgaaaatggagaaaaacaca

SEQ ID NO: 135642 - DNA, 994 bp, Cannabis sativa
  modified_base (414)..(415): a, c, t, g, unknown or other
  modified_base (968)..(968): a, c, t, g, unknown or other
gaaagattttccatcttgagattatccaaagttaagtatatttaactccacagtaagctcatggtgggttagcagaaagtaaatgcttctttgtccttcctatttgtatttctttcttcattctttcgttaataaaaatcaatttccatcactcccttcattaacctcttgcaatcatcagtatctgcatacttggttaactattttaaaacttattttacactcaattatattgctcattgtttactaaataatctacttagtgatccaacattcaccaatcactcaaatatatgtccattaaattgcctctcaattcataagtctttccccattctgagtaagtatgcctttccataattgcataataaagtaatcttttcctataatttcaatggtctccttatataccannttgactatccagtcaattatgaagtactctccatcattactgtatcaccttaagtaatttaggtaatcttctttaccttagtgataccactactcttcccacggaataatggcttttatacacaagtgcatcactctagctgcttcctggactaacgactggcccccacagaccaatcaaacgtgctttgctctgactcgcacgcttcatgtataaatttcctaaatgaaatcacctcaagtcaaggacactcaaccatggagttccctcatagtgagctacaaaacaagatgcttctcactaacataagtagtcccatgcctacataatctcaaaattacaacacaattgtcgccttcaatttacctagtattccagacaatactcataaattgtcccacatttcctaatgctaaatcactcctaaacaaaaaaaaaattgttatttgaatgaattagatcgaagcctccaataactactcaagtcctatattccacatgggaatatcaacaatttaactcatattgtcatctttctaatctgtctaccctnttaaatgggttaccactaaataacat

SEQ ID NO: 135643 - DNA, 617 bp, Cannabis sativa
tcatttaacaaaacagaagatccacttagtaacttttgcaaaacacaaagtgtaaaatagtatttactctaaaatttataaattatagtcatgtaaattttataatgtacattttataataaaaattatttattaatagtaagataaaaaaaataattttattagataaaaaaaattcacattatattttgaattagacagatatagtacagatatatagatgctttataataatgtttagaagggtactcatatggctttttttcattatttattttcaattcataaatcatattagtggcttgaaaaagttaagggattttttagtctgccaattaattggaaaataccacatcgcttgtgtagtggtagcaaagttctacataaaattatttaagaaaacaaaaaatgcttagtagtagtaaagttctacataaaaataaggggctttttttaataatatacttaaaattaattttatttataaaaatacctttaagaaaattatttgcgcaaatagtgccattgaaaaaatctcgtttccagtaattttcgctttttgggaatttttaaaaaagtaaccatttagttacttttaatgtgaataagatatcaat

SEQ ID NO: 135644 - DNA, 1181 bp, Cannabis sativa
tttaatgaacttgtcatcttgtatatattttcattgcttacatgagtagttaaattttctacccacgtgttgggtttaagtattttttcaagacagttggatgactcgttgaatactttcccttagcgcgagccgttagtattcagctttatgcgctagtcgtaacttttgattttcctttctcgtcagataggttataaatcaaaagttacagttgtttgatccctttctcgtcagaaaggtttgatcaaggcgttataacgattcgacccctcttccgtcgaaaaggtttagtcaagaagttataacagttcgatccctcttccgtcaaaaaggtttggtcgaggcccttttttaaaaaaaaagttttcaattttttttttttttgaaacgatgggtttgcattgttatatgtatttccagatcaattccagttaatcatacatatatgcccctcaagtaattttaaagcgtttacactttttaattacttgtttgaaagaaatgattattttattcacaactggaatttaaaatatttcattagtaatgtgatttacaatcattaatctcaaaagaactttcctagttcaattgattatcttatcaatcttctaagagaatctagttttgataaaacgggttttgatgtccagggtcaatccccaacatactcccacaattgtttcaatatccaggatcaatccctgacatatgccggggttccaggtaaagtaatcctagttttagttgtatgtctttgactgttactggttgacatccagctttccacgtggcagcttgatatggcaaccacagtgggctgatatctactcgcgtcacaattcttttacacaattactttaccagagtaaccaccccttgtattcttgtgacccgctccctctcgagataaccaaagcgtcccttcttcttacggaggagggttataatcttcagtcactcgagttattgggcagatcgaactgatcataggcatcctcctgcccctttatatatcgttgaaggtgtccttgcaatatgagaccttctatctcatctttcaatggatgacactcttccgtggtataaccaatatcatcaagatactcacaccgcttatttggatccctcttgcgcctcgcatgtttcataggtcttggcttgccaaaaacggcttc

SEQ ID NO: 135645 - DNA, 593 bp, Cannabis sativa
  modified_base (525)..(540): a, c, t, g, unknown or other
tgtcagagataatttttgaaggaaccccatatcgataaattatgtgggtccttataaaatcagcgacatcttctgcctgtacttcttttgatggtacgacttcaacccatttggagaagtaatctgtgatggccaaaatatagttatgggctttggaagaaggtagcgttaagggaccaatgacatccattcctgtgttttgaaaggtcatgacgctatagaaggatggagtggttgagggggttggtggataaaatcttcacgtaactggcacgacctacaacatttagcgaaattaatcgcatcttgaaccatagtaggacaatagtaagccaaccgctttaattgagttgacaattttgagccggcttgatgggcgccacatgtaccaacatgagtcttttaaagtgcatgtaccacttcttctatcgagagacatctcaataatatcccatcgaatgaacgcttgtacaatgtgtcacttaagagcgcaaatcgaggcactcttcttcttacatccactcnnnnnnnnnnnnnnnntggcaagactcctttttggatgtagtctttgattggctgacgccagtcatttt

SEQ ID NO: 135646 - DNA, 1804 bp, Cannabis sativa
  modified_base (399)..(399): a, c, t, g, unknown or other
  modified_base (941)..(941): a, c, t, g, unknown or other
gacacaatcgaacttaataaagaaaatgataatagtcaaagtttcctttaaaaaccaactttccataagagaattgcttctcttacaaaaaatttacgcacaagaaaagtccagctgaaaatcaactttcctaagatagaaaagagcaataaaaaccgaataataaatgtgagaaaatcagttatgaatacaaataaatctcaccataaaataaaaatattttggcatctaaattgccaaaaaatgactttacatgattaatatcatttttaataataacaataataattagtaagttcaattataaataacactttacatatgatgtataaacatctaaaatagtacacatagtgtctaaaaaaatataataaaatactactaattaatttttatatntcaagggaagcaattgacttaaccactgttgtcaaaatagttagagatgttcttcctttgaatattgggataggccgtcaaactgtcaaattaaaaaaattaaactagttaaaaagatagtacttttatatgtttgtatttatggtaaaatgaatatatacttattttttcttttatgactataatatgatttgaatgtttaagcatatcacgattgttagttagtacatagtaactacattcgtaattgtatagttattttggacaagcaaaattatctatttgcggtccctttgggccaaatacaatagtatttaagctaagatttgtgttattaaagacattaaagaaattataagttaagcattttaaatttattaattgatgattatattagaatgaatagcttaaagttctaaacttacatctctattatctcaacaatgattgacgggattttagattcaagcgagtttaagaatacaactcttcccgatgtcattgctatgatcaacagccaatgcttgctgaaaaaagtaacnatgttatattaatataaaaataaatattatagtaaaagtgaaatagatgtgtgattcttaccatgtgttccatggtataaaaaaaatattatcctatttgactcatagtgtctaactacattgataatttgattcatggctatcaccttgtcctgctcattattataactaaaaagcttgacatcataaaacttgtataactctttttgtctttgatttaaattttcccaattacatctatttagaaaagaaaaaaaatcaaatagagtcctaaaaaaaaataggcagagttttctctatttccataacattcccaaactttttttaagtgcatagcaatacatcaaatgggcaaagttcttccttatatcttcacatagtcaacaaacacagaacctacttcactacggatgaatatctaagatattcaaaatccactaacataatatatatatatatatgtatgatatattagtcaaagttaatgagatacattagtccaaataagataacttaacccgtaagttcatcttgagtggccacttgtatgacatcttcgaaatttatgtagatgtgaagtcagtagaataaggatgggttggcaagaaccttaacagactcattttgaccttttactctcataaattccaagaacatggcataaagagaaatatgagtcttgttgagtacctttgcaatgaatgactcataagattcagctgaatcaagatgttccactatcttctcttttcctttacatttctctttccccttcgagttgtttgaactatgaagcttcttaattagagaaccctacataattacaagtaaaattgtaatacaattcatatataatttaacat

SEQ ID NO: 135647 - DNA, 516 bp, Cannabis sativa
  modified_base (50)..(67): a, c, t, g, unknown or other
  modified_base (297)..(299): a, c, t, g, unknown or other
  modified_base (432)..(440): a, c, t, g, unknown or other
agaagttaattccatgaagtagcacgaaaaaacgaagaaaaacgaaaaannnnnnnnnnnnnnnnnnagtatgcattgcatactgcccgcgcgcacagggggagtggacgaccgagaaaactcggcgcagggagaaacctgcagcatgtccgcgcgtggaagaggggtttcagacacccctgggtgtgttgctcggacaaaatcttgtctgaccacgcgcctgaccgaggatcactcggttccgcgcgcgtgggtgagtgcatcatcccgatatttttttgaaacttcaaaaaatcnnnactaattcaaattaaatcgaaatggagttctgtaaaaaaattaaattgcttaattgtttccatactatccaacaaaaataattccagaaaaaaaatttcaattatttttacgaaaatttacaaacatcaatcnnnnnnnnnataacacacaacacaacatgaaactatccaaaacacaaaaaatcattttaaaaaccaaatttcttgcaagaaaatc

SEQ ID NO: 135648 - DNA, 1627 bp, Cannabis sativa
catgcaactacaagagtatataaataagaaaagattcacaaagattcaatcacaaaccaaaaatatacacatataatacctatcaaagcataaaacttaaatacataataataaatttcaccaaataaaatcatatatacatgaaaacatgacttaagtatacatcaaatcaagtttatataatgactcagtaaacaaaacctgagagtttgaagaagcaaagttccatttcttaaaacagtttatttgataagtttgatcatgttagaatagcatactgatactaacttttaaagagagaataactttcaatcatataacacgtatatataatgactgagcagtaatataccaattagctcaacacgtagcaaaatataagataaaatcaaagatttatcttaaaatattttaaaaactctactaacagatattcagaaattataaaaacttgatattatgaaaaatcaaaaatttagtattctaacaagtatttgatgagtaagctaatagttgtatatatataaatatatatatatttaaaaaaaaaaagaattaaaaaattagctatatttttttagctttttcttttaagggcaaaattatcaaacatgcatcagtccaagaaattcgaaaataaaaaacttaaattaaaatatgtgtaaaagcagataaatttcatcatatgtgacatttatatatacagatagagagaaaaagaagtaaagaaattacggatttgaaaaaaaaactgagaaatacaaataaaaaaattagggattttacatttttatgtacagatggagagaaaaaagggtgaaaaaatttgagattttgaaatcaataaacatacctagtggaggtctgcatgtcgagaatattgagcgccgttatgaactcagtggtggtggtggtggtggccgccgtcgtaagccttctcttgtcattgatctaatgggtgttcctatttgttgtgttcgtcatttcccaactgtacataatagttgcagagaaacagagagagaagaagaggaagagataaacttttcaaaggaaagttgcagaaatatcaagagagaattaaattaatgaaaaagtagaaatggaaaagttgcagagatatgaaaagagagaattaaatagaggtgttaaaggtaataaatacactttaatataatattataaaatacaaacacgtgagctgtgaattttgactattagactttttcaccttgaaatcttagtatttaatatattaaaaacatacattaacaatataagaaagagcggaaatagaaaagttgcagagatatcaagagagagaattaaatagggttgcaacctgtttgataatgatcgagttcttcggcccgaaccaaggaatcccttagatatgatgcaaaatggatcttgttctatcgttgatcagagatttttctatgaacaatataaatcggagtttgaagaaggggaaggagaaggagaaggagtcctcgacccgcaacgaatagagggggatttattcaatcacatagtttgggctcctagaatatggcgcccaccatatcgtattatcataccgttgtcgcgtttgagttctttacaagtacgtacaattacagctctg

SEQ ID NO: 135649 - DNA, 1003 bp, Cannabis sativa
atagtatttttgaaaaaatttccgcccaacaacagtgaacacttaacacaatacacagtattaaacttacacaatatttttgaaaaaaattctgcctacagtaaaaaagtgaaaaaagttagaaatgttaggatgtggtgtaaataatcctacaaaatatagtataatttttaagataattatttcatatattattattattttttttttaattttacggtttgtgttactccgatagttgcttcagtagtttttatgtgggcagctatgtagattttaattgcgatttaagttgctctgttggttgttatgtagactttcgtaaaaatacaaaaacaaataaagtgtaaaaataaaaatacccataatatttatggtctttaaggtgtttaatagggtggcatttatgactatttaatgattttttatatataccaaattaaatatgtgtgttttgtcagccgaagttagttttgaatcgaaatgtgtattttttttcaaaatccaaacgtgttcttcatgttctttatgactcaaagagttaagaatcacaacgaatgtcaaaatcgagtcttttttatcaggaaataacacattatgcagtctaaaattgtcatgcgaacctaaaagattacaatctaacgtgggaattaaaaagtttcttaaagcttgaaacttatcaatgacaggttcaaagaagagatgtcaaagaagagaggataagacatatatggagagaaaagatcaaagatctaaaagcatgtcatgctaaaagccaacacttggctagacaaggctgctcgacaaaggctactataagcaagacgagaatgaggaagttcccattcgaccaaatgttcgaatagggacttggggagcaaatgttatcctaaattttgtctacctaacgtggcatgttcacgtgaggacacgtggaatacatccttgctaatttcaaaataaagtatccttagaaggtatggcaaaactgtcaagcagcaag

SEQ ID NO: 135650 - DNA, 823 bp, Cannabis sativa
gttcaggtcacggtatgggtctgggttagggtctcagtccgaatttaggtcctgagttttgatcccggtctgggtccaggtctgggttccagtccaggttcatatcgagatccctatctaggtccgagtcttggtatgggattgggtcccaggtctaggtcctggtccaggtttgagtctgggtctcggtctgggtacacgatcgtgactaggcctgagtttcggtcttagtttgggtctggggttaggtcttagttcacttctaggtctaggtgtgagtcctggtcacgatcatagtcttgttcgatggtcctagtttggaagttgttgtacaatttccaattttgggtcccgggtctgggtttgggtcctggtctgtgttcgagtccttgcctgagtcctaaatctagatacctatcacgtgtcccgatctggttttggttctggtcctgggtcccaagtccgagtactggttcgggaccgagactggggtgcgattctaggcccgaccccagttctctttcctaagtcttgttccatatttggctctgagttcgggccttgagtctaggtctgggttaggattcgagtttgggtcccggttcgggtctaggtctgggccggagtctaggtcctagtctggttacggttccgagtctaggtccacgtccggttacggttcgaagtccaggtacaagtccttgtttcggtcccgttctcagttcccggtctacttctagttttgattccaatttcagatcacagggtacagattcgggtccaagtttggctctgggaatgggtttgggtcagggtttgggtt

SEQ ID NO: 135651 - DNA, 536 bp, Cannabis sativa
tgaaaactgttttcaaaaaacaaggccaaacaagtcaaattgttttaaaaatcaattttctgtttttaaaaacaaaaaacagttttttagttatgatgtcaaacatgcacttaattttcacaggaattattattaaaataaaattgacgctctttctctccttctccttgtgcattgaaccctagttaaacacacacaagtttgtgtcttcttcattccactcaaaatagcaaactcatatgcgttcagatacaaaaagtgtgatctaattttactattgaaaaattagagtactcatcccctttctttatgcaagacatagcttaggaaataagtggtcataggagcttttgttctaaatgcagacgacaagaatattacattagttgttattctatgaataaaataaaaaaaagtataattacataaactactattttctgtaaaaaaaaaaaattatatttttacgtttattttttatgtatatattttttacagttttttatagaaataacaagaaaactacataaggtaac

SEQ ID NO: 135652 - DNA, 1177 bp, Cannabis sativa
  modified_base (110)..(116): a, c, t, g, unknown or other
  modified_base (161)..(164): a, c, t, g, unknown or other
  modified_base (1067)..(1071): a, c, t, g, unknown or other
cattggattattttaaaattagtttagaaaaacaaatttagtttagagaaaataatctagatagtaatatctagtagctaatttgtattttctaatatttaattaagtannnnnnnatatttaagttaaaaattaattctaattaattttagatcaacttnnnntagaatatttttcttagaacttaattgaaaattaataattaagttgattttattcaagatacttaattattcatttctatttcgagaaattaaattaagtagaaaaatatatttaagttaaaaattaattttaattaacttgaattagaatattttttcttagatattaaattataattaataattaagttgattttattcaagatacttaattatttgtttctattttaatatatttaattaaataaaaaattatatttaggttggaaaatttaaattttagatcaacttaaattagaataattttcagagcatattttattttattttaataataaattttcatataaattttgaaatatatttatttcaaatttgtagatattttgaaatttttagttttgaaaattagattaagtgaaaaattaatttgttaactcattttagatcaacttaaatcaagtaattttttcattaatgatttattaaaatagatagactaaaatatgtaatttttaattttgaaatcaataattagtttaagaaatacatagatagttattttctaagcagtttttttggtaattttttagatatatttaattaaatagaaaattaatatttaagttcattttgttcaagatacttaaatattagatatttttctcaaaaaatttaattaaataggaaaataatatttgtgttgaaaatcaattaatttattaattttagattaacataaatttgagtaatttttcaagattcatttttttttattttaatgtgtaattcaaaaatatatttttaaatacattggatttcgaatttaatcaaagatatatatttatagaaaattagatttaagttgaaaattaatcctaattaattttggaccaacttaannnnngtaattttcataatatttattaaaaattaatactaaggatgaaaaataacttttttatttttagatctatccaattatgtatataattttataaatattaaattaa

SEQ ID NO: 135653 - DNA, 868 bp, Cannabis sativa
ttgttagttggaagttgtccgttgagaagatagttgattatgggtgtcctccacgtgggcgagctatctatcatcatgacatcttccttttcacatatacttgattcatttaacatctccaccgaaccaagttcaattcatccaattcattctgcgaggccaattttgctaaggcattgacattagagtttactcctggtatttgcttgatttcgaagtaatcaaacttttccaagttcttctaaactttctctcggtactttgccattcttaagcccttagcctggtattccctgataacttgatttataatcagctgtgaatcactatggcatatgagatttttcaccttcaacaattcggctatcttcaaaactgcgatcgagattcatactcaacctcgttgtttgacgtgtcgaattagaatctcaatgcatagtgaaacttacagccttctgacaaaattaatagcacccttgcacttgagccatggtcattggatgcaccatccacatataatttccaagtactcgcgtcttgctgaacaagcagattttcctctggaattattccttctatcagtgcctggaagtaaggttgtaacttgcgagatgcgtggattaggcattaggtaagtttttcaagagggggatacctcgattctgcccctactcttactaacatagtaaacaggtgactagtgctttctctcttctcacactattgcagaactaattacattttacgagacagccaagtagaggagtaatatctctctagttactggtttccccaaaattgggggtgtcaaacaatgcctttttatgctcttaaaggcctcttcgcactcttctgtccactcaaattt

SEQ ID NO: 135654 - DNA, 832 bp, Cannabis sativa
aggagagcctgaatttgtggctgaactacttttacccgatgggaactgggacaccagaaagctcaatgatctctttgacagggaaactgttggtagtatcttaaagggtggaaaaccaaattgtcagggtaaggatagatgggtttggacaagagatcctaagggagtgttttcaactaagtctgcctacctcatccaagccttggggagagctcctttagggaatgtagctccggctatgtggaacaaactgtggaactctaaaattctggaacgtcataaagtcctttggtggagcatcctttctaatgctctccccctgagggccctacttgctaagagaatgaatattgatgagacttcctgccccatttgtggggtcggggatgagactatggaacacctatttctctactgcaactttgcatcccacctatggcgggtctccccgtggggtgttatgccggttttagactctggagcccgtatgtgggattgggttagctttctctggaaccttaaaactagaggggtggacactgatgatttgtttctttatgcttccatagtggttgacacgatctggagggctcgtaatgacaaagtccataacaacactatgggaagcttgattcattatattgactctatctctggttgttacgcagactatagctcctgtttgtccatgccgcctcaggatgttgtttcttctatttggtcccccccaccagaggattggatcaaaatcaattgcgacgtccgtgtcggaggtgattctatgtgtgtggtggcaattgcgagggatcataaggagtctatcttgtgggtg

SEQ ID NO: 135655 - DNA, 538 bp, Cannabis sativa
tttttttttacaaataatagtatttcttgtaattatcctaaaaaagcatattgtaaaaattaatatttttataatatataatactatgcgtttgaacaataattattaaatttaaaactacaaattgcacctcaccacacaatttagaaaaaaatgcaagctgtaattgcaccacaaatttaaactatattttttatgaacactcttaatttttttatcactaattcaactcgtagaatttgcaagatttctgtctctaaattctaactgctgatcttattattgatggttggtgttagacccacaaatcagctaaacataaaataagaaaaggaatagtaatgatgctaaaacaaactttttttgttttgagaaatgttaaaagggtatatatggagtctaacgttcttgtgatgtgtaatattactaatagtgtaatttaatatcatgtcctgtttattttatttaagctaattaggatttttgctccctgaactttgacatgtaccaaatcatgacccatgaacttttaaggtcg

SEQ ID NO: 135656 - DNA, 1349 bp, Cannabis sativa
  modified_base (1116)..(1122): a, c, t, g, unknown or other
tggaaactacacgtagacgggtcggctacagatcaactatctggtgtaggaatttcccttggcacacctggggggcaacacttgcacgctgtagtgaagtttggattcaaagcatctaataaagaagttgagtatgaagctctaatcgctggtctaaagttagctcgagagatgagagtcgtgctcattgaaatttgcactgattcacaactggtggtaaatcacgtatctggagaatacgaagctcagggaggaaagatgatagcatatctgagcaaaatacatgaccagctcacacagttcaaaagctatggtctcaaaaaaattccaacggaagaaaacactactgcagactcgttagctcgattggcaagcaatagtgtaagtgataaggcgaacctagttcctatctagttccttgaagagcctagcatcactagcacggaagagatggaaatgattgatacttcccgaaactggatgacaccgatagccccctacctcaatactggggaactcccagataatcggaatgaagctcgaaagatgagaaggaaggctgcagcgtatatcatagtagagggaattatgtacagaggaggattctctatgccgttgctcagatgtgttagtgaagaagaagctgcacgactcatatctgaagtgcaccatgaactctgtggaaatcctgctgccgggcagagtttatccaagaaaattctaagggaaggttatttctagccaacaatgatcgaagattcaaaggcctatgttaagaaatgtgacaaatgccagagattctcaaagatacctcgagctccgtccaacgagttaactcagattcaaagtccgtggccctttgccatttggggaattaacctgatcggacaattacccaaaggcaaaggaggagtgcagtatgcagtggtaccggttgattacttcactaagtggacagaagccgaaccactcgcaactattacatcaaagaaagttcaggactttattgtgaagaacataatctgccggttcggattgccgtacaaaatagtttcggataatggcaagcagtttgatagcaaatcctttagtgatttttgtgcgaaccatggtatnnnnnnnagtttctccgcagtggcacatcctcaagcgaatggtctagttgaagcagtacaagaccttgaaagatacactaaagaaaatactcaaagatgccaaaggaaattggctggaagaacttcctgaagttttatggtgatatcgagcaactgagcaaacggcaaccggagagactccatttgccatggcatatggatatgaagctatgctgcctgtagaactcgagccac

SEQ ID NO: 135657 - DNA, 881 bp, Cannabis sativa
  modified_base (44)..(46): a, c, t, g, unknown or other
ggtagttctgagacccgatatacttacccagagtgccccagttnnnaaaggcaccatctgggggagtgtagaggacaagggtgcttccaatgtggcattccagagcataacaagagggattaccctcaactcagaaccgaagcaccaaaggctccggcgagacccactccagcaagggtgtccgccattagtcacgctgatgcagaagccagcccttcagtggtgacaggtcaactcttggttaacaactctttttactctgtattgtttgactctggggccacacattcttatgtggcacccagaatctttagtaaattggatagaccgcatgatagttacgaatcagggtttagaaccctattacctggcggagagttagttatgtccaaaaggtggattaggtctatgccgatcagaattgacgatagggagttaagtgctgacctaattgaattgagcttagcagattttgatatcatactggggataattttcctatctaaatattcagccagtattgactgtaggaggaagatggtaatcttccaaccaaaaggagaacaaccgtttgtttttgtcggttcggttcagggatctcagatcccagtgatttcggccctgtcagctagagaattattgtgtgatggatgcctagggtttcttgctgtggtgttagacaccactcgaccagactctgttcggccagaagatatcaaggtggttcaagaatttttagatgtttttcccgaagaactttcgggtttacgacctcagcgggaaattagtttttttattgatttagcacctggagtgaaactggtctccaaggctccttatggaatggctccagctgagcttaaagaattaaaaattcagct

SEQ ID NO: 135658 - DNA, 1690 bp, Cannabis sativa
  modified_base (50)..(56): a, c, t, g, unknown or other
aaaatgtttaaaattctgtgaaacagtatttttgttgtttttttgttgtnnnnnnncatttgtgaaattaacccaatttttaatcgcataagttgctaattttatttttttttgatacaattgctaaattttaatttttaatttagaggaggaattgtttataaagattttgttattgttatgtattatattttacctaaaaaaattatttcacaatgttccaacaccataaaaagtccttttctcggcagacttgaaaagtctagggaaagatataagaagaattaggacccacaaaactagagactggggagctgaaggaagtgttgcgctatcaaatgaatcaaaagtgccatctcttcctctaacaaatgagtttcactttgattccttctgagtttggaccacttttacggtttaacaatctcttcttgatcagaaagacttaactatacaaagtttactcatatatagacaaacacattgtatatatgtatgaaaatgacgaaggaggtttggaccactgtcaatgtcatacaacttatcatgaagctcccatatttgttggtatatatgttttatcgattcatgtataaccccttttctttgttttcatattcatcatattatattttcggctataagtttaactaaaattatattgtgggtttttacgaaggaaaaaaaattagtggcttcatataaataattaattagtgaaaatatttataaaattttatattaagaacttatgtggattacttcgctcatcaattaattttaattttaaaataacatttcatacatcttacaataaatctcacgcatatattaatggtattgcctatttggtatgttagacatcaacatcagcctcacaaatatattaactaaagcatatattgcctcatgatcaatcccattatttacttcatggacctatattaagtaaagcataatgtgggatatttctttttaatgattttaattatgaataaaattgattctaaaattttaatgacgtcaccaaatactcggtttttgaaagacaacctttcttccccaataggcataataagacaagattaatcaataaagccaaaggtactaataaaatgatctctgttaaaattgtaaaatgctcgagctaatcaatcaatatttatatatataaaggaaggttttaaaaagttgatgtggcatgtaccttcttacttttataatacttattttttcattttctaatttcttttaaaaaaaaattagtatgtaactaataactaatactattgttgacttcgtttttagcaaacgacaatgaatctattttatggtaaatgatatgtcgtaaggatatatataataaagcaataataagatacatgaattttatagaggttcagccccgagcagtttggtaatagtctaatcctcgttatttgtatatcatttataatacttatttttccactttctaatttcttttaaaaaaatttagtacgtaactaataactaatgctattattgacttcttttttagccaacgccaatgagtctattttataagcgataaatgatatgtcgtaaggatatatataataaagcaataatgaacacagtaattttatagaggttcagccccgagcagtccggtaatagcctaatcctcgttatttgtattgacttaaga

SEQ ID NO: 135659 - DNA, 1022 bp, Cannabis sativa
gattatgttcttcacaataaagtcatgaactttcttggatgtaattgttgcgagtggttcggccttcgtccacttagtgaagtaatcaaccactagcactgcatacagcactcctcctttgcctttgggtaattgtctgatcagatcgattccccaaatggcgaagggccatggactttgcatctgagttaactcgttgggcggagctcgaggtatcttcgaaaatctctgcatttgtcacatttcttaacataggcctttgagtcttcaatcattttcgaccagaaataaccttgccttagaattttcttagataaactctgcctggcgacatgatttccacagaatccatcgtgtaccttagataggagtcgtgcagcttcttcttgagtaacacatctgagcaacggcatggagaaccctatcctgtacataattctctctactatgatataccgtacagccttccttctcatctttcgagcttcattttgattatctgaaagttccctagtgttgaggtaggctgctatcgatgtcatccagtgtggggtatcaatcattttgatctcttccgtcctagtgagctaggctgttcgaggaactggataggaacaaagttcgccttatcacttatattattgcttgctaatcgagctaagacgtctaggaccgtagcttttgaattgtgcgagcaagtcatgtatttttctcagatacgctatcattttttgtccccgagcttcgtattctccggatacatgatttaccaccagctttgaatcgctacagatttcaatgtggtcggctctcatctcccgggctaattttaggccagcgattaaagcttcatactcggcttcgttattagatgccttgaatccaaatttgactacagcgtgcaggcattgccccccaagcttgacaagggcaattcctgcaacagatagttgatctgtggccgacccgtccatgtgtagcttccaagtcagcttgttttcactgttacttggctgaggtgt

SEQ ID NO: 135660 - DNA, 992 bp, Cannabis sativa
aacatgtccaaacactggattggacaaattagcctgtctaatccaatccagtcctgcgtaccaaacggacccttgtatcagtgtttttttttataaaagcttaagtattttaatggcagccattgagaacttgagaatcaggaagaaacgagatagaagagagagaaagaatttttattttaagtttcaaattttattaattattattttgtatttcttttaattttaaataatttttttaataaaatttttatttaaaatgttttttaaataacatgggccaattaaatattgccacatatacatctacttgacatatataataatttattgttaatgatgggaatgatgtggcatttatttttaatgacatggcatgtcatctggcacattacaagacagaaaacggagaggtacttacggaagtttcaaagtagtgacaaaaggtatttttatagccaaaaataggacgactttggtatttatctgctactgagcataaaacttaagtatttatgccgcaaattactctaaattgagtgagagtataaaaagttgtgagatgagattccccttattgaattgctctaacaaatgccaccttacatctctaaatttaaatattacatcttgcaaaaaatgcaaaatgaaattaaaatttttatttttaaaatttttgtttttgaaaaataaaaatgcattctgtaactacttttattttttaattttaaaaacaaaaaataaaagtatgttctgtaaaattcatttttacttttattttttaatttttttaagtttagtctagctccagggtcggattcgagttcgggtcagaggcggggttcagcgctagggccctgggggaatttagatccgggtctggatggaatctagaatgttgattaagaaaaaaaaattgtttaaaatatattgaaagttatttttcttttcaaaattttaattctcaattaaaaaattaaaaagtaaaaaca

SEQ ID NO: 135661 - DNA, 551 bp, Cannabis sativa
  modified_base (497)..(524): a, c, t, g, unknown or other
taaaacttaataataatctgatctaaagatgttatgaaaaaactagttacattttatttatctgttcgtgctaaaaattgtcttaaagttggtcatattaaaaaaataaaattgttaaaaattgagctcagggtcttatttttaccatttttgaaaatatagggtccattttatcatttaacaaaatagtggatccaattgataatttttacaaaaacacatgatccaaaatgatatttacctttgttattattattagaattttattagaaaaattcatggacatataattaagaaactcaacaatccaatattaaacaaaaatatatatatatattataattttaatatagatactatataaattatgtaatattatatgtataaaaaataagtctataccattttaagtttgtaatttcaaaattactaaagtctatttttaagaattattttttttttcgaaaataccctttttagggctcgtttggaacgcnnnnnnnnnnnnnnnnnnnnnnnnnnnnattatattgaattgtattttatgcaat

SEQ ID NO: 135662 - DNA, 932 bp, Cannabis sativa
aaaacaaaatttttaaaaataaaaattttactttcattttgtaattaaaaaattaaaatgttaccaaatgcaaccttagaaaatcactttcaggttatttttagggatttgtaacatgattgattatagagaagtttttcatctttatgactctcacctatttacaaaaatatgtgaattatattttttcttcaatttttatggtaaaaaaaatgaacaattataggggaaaaattataatcaaatctaaatattgatgagaaaaatatgagcaaatttaaatatttgtaaaaataattaaataaattatattaatattccaaaaattttattgaagcatcccaattttgtttttttttaacataatatgtatatatttttagtttaaaagaaaaagtatacttgctttttttattattttctaaaaaattatattcagttatacttacactgacgtgataattagcaatgtggttcacttacacttggctaagtggaatgttattttcaaggcattaacaaactaaacttggatcagatatataagatttacattggactgaaccgatattgaaagtagaaaaaatatcataaacttagcttcatatcttttccaaatcaatatttgtaacaccctactagtttaggcgtgctatcgtgattttaacataattctgcagctcgttattgctaatcaacgagtttattgaaaattgtgaatatttaaaaccttatttaaatacttataaataccaaaataaataacatatatataaccaagatcccgagtataaaatatttacaaccgtttctggtatttaatacaaaagttgccacataacgactatacaaaatatgtctagttgtcccaaagatcgtacgctccaagtctaactgcctcgacatgcacaatcttcatctgctcgctttca

SEQ ID NO: 135663 - DNA, 779 bp, Cannabis sativa
cagacaaacataccaaattgtgtaattacctccaattacacacaaatctaattacattgtggctttccaaacgcactcttaatgttatatgtgaacaaattacaatatatggagtaatatatattatttgtttttttttgttttgagaaaagaacaggaaaatataaaaaaagaaaaaaaaattacaaatatattatgagccggctagtaaacatttatctagcccacacccaaatatttacaaaaataccacatgctctaaaccttcagcctcacgaaacgaacgatgaagatgaacatacctcgatcgttcaaatctgcaacacaaccagaatgaaaccaaaacgagggaaatgcaatcagtaattccggcgaaatcaactggaaaagaacacctgcaatgatctacacagaaaattacgaaaaaaaaattagaaaaactgggaagaaacttaaattacacatttgttttcggttttactcgttcaaaacaactccccctaatattgaaatccagattcatgtaatgtagatctgtaacaaacagatctggagctcccttcgaatccaaaacaaggtatgatgtgaaaattttaaaaaaacctcttgaataatagatctacgttatatacagttgcattttggttgattactggtttccaatgtcgaattaagtttattaaaaaatacaataagaagagaaaattcaaattaaaggacaacaagctacgtataagtctgtttattttttgttttggttgccttatagttgcattatc

SEQ ID NO: 135664 - DNA, 539 bp, Cannabis sativa
agaccaaattgttgcaaataaccgtctcaaactgtttggcatttggaatatcgatgcttcttgcaaacaatcttctaaggtattatctgtttggagaagaccacgcattgttgctgcatcacgaaatgttggagctactattccatcaatatatcttagatcttcgaaggatgtaggtcctcttacatggcttagtagtaatcggagataatatctttcaccttcaaggggatttgctgtaacaattcgtcctattacttttttctttttccgtggagtccattgtttgtgttgattgtcccatacgtaatgttgtggaaattctttgtatagtagtctttttgcattttcatctactttattggtggcaaagaattctgttagcatagatttttgataacggtctgaatttaaaatattatttagatctgcatttccatggaaagtgactgattgttgatcttcaagatgtaaatgtaagctatatactgatggatacatttcattaataataaatccatatattctccacatagctt

SEQ ID NO: 135665 - DNA, 786 bp, Cannabis sativa
aatatatgatatttattagaataaaaagacaccttaaatatatatttttttatatatacttctttgatatgagactactgtggatgtgaaattttaaaggaaaacacaataagagtttatgtgtcattttataatttttttcttcctatttttcttattttctaacatatttttctattttttttttaaaacgaaaccacacaaacaaactaaaagtcccacattgtttcaaaactgtttaggttttatctatgtaagttataaataatattcttactacattactttcctttgtctaaaaaatattattttttttattgggtgattgattaatatcttatccaagtttttattttgcctaattagttttaatttttttatttttttctgaagagaatgcaaaatatatttttttgtacttttcaatatttttcaagtttaaaataattataaaaaaattccttaattattttttcatataaaaagtattgtatttattttctatgaaggtgattggtgaacttaatcttgcctattgatttttttttaaagtgaatgtaggatacatttttgtatttttcaatctttattaagtttaaaataattataaaaaaaatcatttaattgttttttcatataaaaattattttctatatttttttttaattttatttaaataatttaaactataataatttattaatatatgatatttattagaataataatacaccttaaatatatattttttgtatatatttctgtgatatgagactattgtgaata

SEQ ID NO: 135666 - DNA, 1331 bp, Cannabis sativa
catcatacacattaccaatgcactttgtaccgccaccgtacaagtgttggtagtgtatgaatcacatatatatatatatatatttcacacgtacatacattcacaaatatatcacatattatacgccgttcttacctcttttcaaaattcaagtgagttggccgacccaaacagaaagtctcgtactggacggatgccctaatcacatattaaagccaggtaaatcacacgtcaaaaccctaatccgagaaacctgaacctactacttaaggttttgccattactaataggaactacaatatcttcgaaaacatggaattgcccaaccaaggcactaaaatggacacaaattgggaaaatgaattgttcggggaatctgccaaaatcggttaaccggttttataggcaatggcaaactggttaaccgatttgcaccaggtttccccaaacaattccaaacttgctcaaaacttatccaaatgccaccaaacttttcagaacacctataatgagcttacacaacatattccaaccaacagaactcaaaaaaacataccaaacaaaaacatgccatggttgaaccaagcttaagttttcaaactcaaacttgttcaaccacaacccctcaacccaaaagcaactagatccacaataaaactcaaaataagcttagaaaataatttccaacctaatcaaaccctaacaacccctatatctcaaagttgcatactcaaaccaaaatcaaagctttataaaccaagattaaaagttctaagggttaccttagcttgaatcctacttgaatctcttgctgaattccaagaaagatgaagaattaaggtggttctcttctagttttgtggtggctgaacaaagaaagagaagaaggaaagggttttccaattttcttgatttttctttgtttttctccaaatgaaataaagattgattaattaatctttgctgaaataaaatggctaggtgttaagttcctaagcttccacctaaccccctcatcaaaaatgaccaaaatgcccttttagcttaaacttagcctaatttaagcttaggggtaaaatggtgaaaaaccataaccccgctcaaacttggtattctacttttctactttctcctatataaatatataaatcccacttcccactaagccactaagaaactaagaaataaaataagattctagacttacccatgtgattaaaatagtcatccatcgtatttttgttgacgctgagcgaaaattgtaaaaataacataatttataataatacaaataatactcctagagtttaataaaatctccgaaattgaga

SEQ ID NO: 135667 - DNA, 964 bp, Cannabis sativa
atccaagaaccggatgtaaaccgaattaccatcaatggattcttcaaattcaaagtgaggagctccattcaatccaagatttttcctgggtatctttttccacatgaaaaaagacgggtatggttgcaatttcaatatgataggctcccatacatgtgttttaactgtggattaattggtcacaaaatgaaacaatgtgctacgaatcggactaccgtgatcaaggaagatgggaaaccttctcaagcatacggttcttagctaagggtggacttaacaggaagaatggacaataaagatagggaggaggccaataaaaaaccccattcaacagatgcagaggacaacactatccaatctgcacataccttggaaataaacaccacggaacgagagacaaccattcaccaaagcagatttactacaggtactatccttgaaaatcctaacattaataattatgaacaattaaatttctgcaatacaaaacctcaactaatcacatctattatccatacatgtgctgaaacatccaagataacgatgccaagaaacattaatacagagatggaggaaattgagatgggtgctagaaagaggaatggtgaagacctacacaaagagagtctactgaactcgaatgaggaaagggcatgtagagctcgacttatggaagtggatctaattgggagggagaatacagggacactcatagatgtaccaattgtttttgaaactggctgtactaatcagaacaaaggagcccgagagaagcgaaggaagtttgtgccaaaagggagtaagactaacacaaaagggaacatgaacacaggttcaagatacgacatcctttccagggaagtttcacagcaaagtgattcacctgtggaacaaaaaactgaagcgccgaactctgcatcgcagggtcgccaagaataatgaattccctaatttggaatgtcca

SEQ ID NO: 135668 - DNA, 710 bp, Cannabis sativa
tttatttcattgttttagaaatcatattaggatgttaataaaatggtaaaatatttccaacactcatgcgatgtgaggacctccaatgattgtcaatatattgcaaggagttctcgaaccactcgcgtggggatgacctccaatgattgtaaaatattcattctcttccttatcatctgcttggggatgactctcctcatttttcttgtattttccaaatttacctcggttgatcagttcctcgatctcatcctgcaaaaaccaacattccagagtagtatggccaatatccttgtgatacttcaagaatttcttcgggtctctccaatcgcgatttcccctgattaggggaggctttctgaagactccattcttttcttcgatcgcgtagatatggtctcgtaggaccgctaattctgtatagttcacgaaacgtggtcctccctttcttttaggagacgactctttcttcggaggggatttggccaactttggacttcgatgtctttagggactgcatctcctagtgcttctccctctagaatttttccctctgggactgcaggatcgtgatcgcggtaccggcaactcacgcttatcttttcctttctctagctcggccaaagaattttcaatccttttatgtggctctgccatagcgaagaactcgaccaacgattcgagccttcgagcttgtaactctttctaga

SEQ ID NO: 135669 - DNA, 653 bp, Cannabis sativa
  modified_base (611)..(623): a, c, t, g, unknown or other
tttggaattaggctttttcgtttcttttgtggagagtgatgctgaaatcattgtcaatttagtcaattcttctttagaatgtgcttcccaatggggttgtattgttcgatctattaggtccttattatctgtcttttcgggtgcatgtcttcttcatgtgatgcgaaatggtaatactgcagcacatggattagcaagatatgcactacagatggaaaacgaggtttcttagttggaagaaattcatccttgtataatgaccaatgtattgtttaactcttagcaataaaattggttattatgataaaaaaaataaataaataataaaaaaacacaattttagttgtataagtatatatatatgtgataattactttttattattaaaataatagatttataaatttttaaaattgttgaattatatacattcacttacatttttaacattaatttgacacactgagaaacaaactcatttattgatgtgtgagggccatagcttttactaaaaaaatatcacgcttaaaaaaagctccacaaaattaatatagtataagtaattataatttttgtttaatgtgggcagtgagcacaaatatctttagagnnnnnnnnnnnnnactttaaaaaatttataaatgcaccatatt

SEQ ID NO: 135670 - DNA, 844 bp, Cannabis sativa
  modified_base (43)..(53): a, c, t, g, unknown or other
  modified_base (547)..(555): a, c, t, g, unknown or other
  modified_base (638)..(640): a, c, t, g, unknown or other
atatcaaatatttaagtgtcttgaataaaatcaacttaaatannnnnnnnnnntttaattaaatatatatagaaaaataccaaaaaacctacctagaaaatatctatcgagataattcataaactaattacttattttttaattaaagcaatatactttagtctatttatttaaataaattattaatgaaaattacttgatttaagttgatctaaaagtatttaataaattgatttttttcttcaaaaaaataataaataaaataattttcaactttgatgtaatttttcaagatagaaaaattttgaaatatctacattaaaaacaaatgtatttcgaaattagcatgtgggaaatgattcttaaaataaaacaaaatatattctgaaaattattctaaattaagttggtttgaaattaaaaaatttctagcttaaatataattttttatttaattaaattcattaaaatagaaataattaagtatcttgaatgaaatcaacttaattattagttttaatataatatctaagaaaatattctaatnnnnnnnnntctaaaattaaataaattaatttctaacttaaatatattttactatttaatttcatttcttgaaatagaaataaataattaannntcttgaataaaatcaacttacttattaattctatttatgttcaaaaaaatatattctaatttaagctggtccaaaattacttaaaaaattaactttcaactataattttctacttaattaaatattataaaatataaattagttactagaaatcactatctagaatcttttctttaaactaagtttgtttttctaaattaattt

SEQ ID NO: 135671 - DNA, 851 bp, Cannabis sativa
  modified_base (206)..(218): a, c, t, g, unknown or other
ttaaacaggccacatataaggtctagattcttgatcattgggtctagacaaaaacatgtaatattagttacttccaaatgttcctttgataaatgtaaaacggagtctttactgataaaactgaagaaaatttacagttttacaaacattgggtacttatgccactaaaaataaacattgagattatgccgcttacaaacttaaannnnnnnnnnnnnatgccgctatttaccctaaaaaatatgactagtttttctatttatagaaagtaaggtataaagggtaagtttgatgacttaactaatttctatctatatagttgtgtatatctgatcctttgtgagttttctaaaatgtttgatctaatttcttgtgaagaaaatcgaagtaaaactttccttttctataaaagaaaagtcgcacttactgctcatgattctataagtacataataagaaatttttggactgattgaagaattattttaggaaagtttctaagtgagctgtggtcttgttcagaccgtgtatgagatgtcaataaggtgtatattaattataattacaccttatagcagctaggtcatgtttttctttcatatactttaaattgtattcatatctttagaaaatagagtctttattttgtagagaagagtttgtccacctctttctctgtgtttatgtattttgtattgtctgtaatcaagtctacaaaagaggaagaacaacagtgctaccttcatgagaaggttctacaagtttttgggagtttgcttttcaagtcttgcctcgggaggaagcaagcactcttcaaggagatcgaatggagtttgagcacttgaagtttca

SEQ ID NO: 135672 - DNA, 597 bp, Cannabis sativa
atttaaaaacaataaattagaaaagtgaggatattacacaaactacctaaacaatttgactattatcacatgaaaatctaattaaatacataataataaattaattttggtattgggctaatgtttttaaacttataagaaacatgtaaaatttatatgagttttgatatttgtaaaattgaatttttattaagaaaataattttgattatacggaagaaattgttttgttaatttattgccttactaaaattatattgctattattttagcttattttttttaaataagtttttataattacaatatttgtgtaaataattagttattttatatgataaaaataaaaatcacaattttacaatttttttatggcagtcattcttatttataataattttgtccatattttaagtttttttttttaaataaatatcatatttaatataattaaatttgaatgtcaaatatatcaaaaaaatatttcgtattttcataaagagaaattactttatatactgtttttttaattttttttttaaatttacgatttgagtttctaaagtagttgcagcgttaattgcaataggggtttcta

SEQ ID NO: 135673 - DNA, 512 bp, Cannabis sativa
aaaaattataagtattggttatgcaacaaaaattttcatttatactttatgtgatggagtgcctctttgagcagtggacttatcattacattaatagtacatatgctcttaagaacacaaattgagagacaattaataataatattggctaataaatattttttgaaaatatgcaagatacagagaaacaacatatagcaatataaaactctacttacaaaatacaatacgattcataatcaaactgttactggttttgataaaaacttgtacaaaaaggtattctcatcctcaaaagttatgagttgttgccttcacaccttatttaaagtcctatataacttacgcttcctaaaaaatagaaaataattgtactaaagagaagttatgaggaactttaatgacttattccactagctttaaacttacagtagcttaattattttatttctttagagcatagagcaaagaaacagtccacccaagtcccttaagaatgttaaaaacaaatt

SEQ ID NO: 135674 - DNA, 1302 bp, Cannabis sativa
attgattttttttttaattatataaaaatgtatgagaaaatgataatatatttttttgcacatagtttgcaattaattaatataatgtatacaaaattgtaaaatgcctttatttattctaaataaatgaaacgttgcccttaaacattacacattagcatgttctacttgaaagagtgaatatgaatagacaaaaatactctcgatcaatataaaatactagcaaattagtataaacacaataaactaaattagaagtaaggaaagaagtaaaatataaaccctaaattattatactattattactaaaatcctgaattttgttatctttttcaaaaaaactaaataaaattttatttaaaatatagaattatagaaataattaatgcataaaatataaaattattcataaaataattattacacaaggttgttaaagtaaaattaaatttatatatatgcaaatattaaaactaataagttaataattaatattgtcaaagcataattttgtaaattaatatggaaagactaaaattattgacacttttattgtaattattgattaatttgttgcatgtttattaactactatataattatcaatatgaagtgattaaaaattaaaaagatcacatcatgaaaataatgtgatttatattgaactacaaaatattttaataggaaaataaaataaaggttaaataagtaatttaacatgtaaaagcctaaaaattattgacacttttatgtatagactagtgaagttttacgtgtagcacaagtaatatataaattatataattatatgtatattaaattaaagagcattgctattaggtaccagtggtgcctagcacctttgtgacatgtcgcgttgcgattggttagcgatactccctaaaagctattacattaaattatatgggacccgatacttagttggaccaatagcgatagtgacacataggaaggtgctagacaccactggtaccctttagcatttctctaaattaaatttactattaaatatattagtaattttaaaagaagatctttggacaataaacataattctcgtttaaacttagtttattacttagtcatttatttttcttgcataagttaaaaatctatattattccttaaaaaaatcatataattatatcatgctgatttttgacataatatctcatatagctccacttatattaattagtatataattttttagtaataggatttgatatgtaagattatttatttaatataatataacttgtttcaaatatttaaatatat

SEQ ID NO: 135675 - DNA, 1006 bp, Cannabis sativa
acagagatttgaaattcacatctatgttctcggaaagtcttcagagagttatgggtacaaagctaatgttcaatacaacttttcatctcctgactgatggacagtcctagaggacgaaacagatattagaagatatgttacgagcttgtgttatgcactttgagggttcatagaataaatatttgcctttgataagaattttcttacaacaacaactatcaaagtacaatagatatggctccctacaagattctgtatggtaggaaatgtcgttccctgatttattgggacaaaactggagaatggaaatatttgggtcatgaattcgtccagcgaactagcaaggcaatagaaattattaaggctcaaatgcttgcttagcaaaacagacagaaaagttatgttcatcataagcacagagacatagattttcaggtgggagaacatgttttcctacaagtctcactaattaaaggtgtaaagcactttggaaagaggggcaagttaagccctaggctcatagggtcattcgagatactcgagaaagttgagcgggtagcatatcggctagccttaccactagcattaccgaatgtgcataatgtattctatatttcaatgctgaggaaatatatgtcagactcgactcatgtcttgagttatgaagccctagaactactttcagatttttcctacgaggaacaaccagtttaaatcctcgataggaaggaaaaggttcttcggcacaaaaccatatcatttgtcaaggtactctggaggaatagcaaggtggaggaaggcagttgggaatttaagttcgtcatgaggactcaatatccaaagttattcaggttagatttcgaggacgaaattcttttatgagggggataattgtaatgactgtatacttaaaatatggattagataggcaattagcattaattatttgcattttgtgattatatatattgtgggtttcattttcaagaaataggcaatagagtta

SEQ ID NO: 135676 - DNA, 758 bp, Cannabis sativa
aatattgatgtgacagcctttaagttatacaaggccggccgacctagcattacgttaaaagctgaaggaacatctattatcaagaactgtgacatgatagtcatgctcatcggagcttgtccaacagtgaggggtagacgaatttgtcctagaggtgtgactccttaaccagagaaaccatagactggtaagagacatggggttaaattcttgagctggagtcccatcttttcataagtagttttgaacaagatattggaagatgctccattatcaatcatggttctggccaccattatattggctatcttgacttccatgaccagcgggttgttgtgcggaaatctaacttcgacagcatcttcatcgttgaaagttatggtaggccctcctactcgtggaactttgggcttcctttcttccacggccaggataacttcctcttgttcgtgctgcgctgttcgggcatacccctcctgagctttgcctgaatctccagcaatatgcgagcctccaatgatgacttgcagatgtccatctaccggtggaggtagtaattcttggttgttgtcgttcctctgaccctgatcgatcttgacatacttctgcaagtgtgggttatttctccttatcaggaattcaatttcccgcttcaggctattacattcattagtgtcatcgccatagtctccttggaattgaaaattttttgtcatgtccctcttgctgacatctttcttcatcggcccgggcttctt

SEQ ID NO: 135677 - DNA, 1059 bp, Cannabis sativa
tctctctttttttgacaggtggtgcccaaattccgtattgtagatttcaccctctacattatctaattcataaagtctgagattattatgtgtcaagtacttttatttatactatcctattaattgcttttgatacaataatgatgtttttcttataaacagtagtaaaatgccttataagaatttgatttttttaagattcaattgtcatgacttgatctgtgatactaaaattatcaaaacaacttgatttaatgtatacttgccttacaaaaataaatgtatgtaaatttgtaatcagtgttgctgagttgaagtgtagccaggagcaagattcaagacttgagactgagaaggaagatacagaatatcaacccatgttcaatattaagaaggatgacatgaaaaaattgccttttgatttaccaacaaatcttcatagataatcaatgcttcttttttgttgcatttagggtaatcattttatcatggcaccaaatgtttttgctctgcagcttgtatgtttttctactagccttatcttatacaagactcaagatatgaagtttacttgttttttgcatgttttcatattagggtaatttttttatttgatttttttttttgctaagttgtgacttgtatgcagtctttctctcccccaactcttagtacccgaggcaagtcttctctatagtcgctatttgaatctcaatgagttctttgtagaagatattctttgggtcgatgatgctgaagctctacacaatgcaacaagccacattgaaggatgtaaagttgttggtattgattatgaatggaaaccgaattatgtaaaaggcagcgaacccaacaaggtaactatgtcaattttgtgcaattcatgttgtatctcttattgccttttgatttaccaacaaatcttcatagataatcaatgcttctttttgttgcatttagggaaattattttatctttatattctaccttttgtatagccaaagtgaggaccaagtaaaactatcctattgttcctatgttttgttcatataataaact

SEQ ID NO: 135678 - DNA, 760 bp, Cannabis sativa
tcaatcgtctctctttttctctcattatccctcaaatggtcctcgttgaaggtcctctccatcgcccctttgtttttttttcttcttgtttctgtgtgtgtgcaggtggacgaaaagggttgttcgatggggctttgtatttgatcgagtgttgggtctgtggttgatctatatgttgttcttcactctgtgtgtgattttttatttactgtaaatgatttttttttcaaaaatatatgtttaaaatgagttctttgttttacagtaaatgattttctttttcaaaaatgtatgatgtatgatgtactgtggtggagttgtattaattttgaaaaattattgatataattagtattgattttgtttttgttgtgtttaaattgtatatttttattctgtatatgaaaagattattattggtaaaaaaaattattcatttgtaaacttttggttttagtatgattatttaattagtgaattaattttattaaaaaaaataattaacatattatttaatacttttaaaataaaaaaataaaaaatatatatatacattgatatagtgacgaccatcttgttttattgtacatatgaaatagaaaattaaattaaaaaataaaatataaaatgatatagtgacactcattttgaattactatatatattaaataaaaaaattaattaaaaaaaaagatatactgacacgcattttgcaactctaaagagtatatttctcgacacccacattagtgacacgcat

SEQ ID NO: 135679 - DNA, 644 bp, Cannabis sativa
tatataggttttttgtagtggaagaatacaataattttttttcaattaaagaatacaaatagttttaatatcataatagaatattaatatacacataaataataaaagtttcataagaatacaaatagactatttgtaattaaagaatacaaatagttttatcataataataggacattaatataaatataaatgataagagtcatacataaataatataaataattttttttagtttaaagaatacaaatagttttaatataataatagaaataaataaaaagttttgacaaaatagaaaaggtaaaagaaaactatgtgtgatgacacatgtccaattttttttttctttttctaattattttgtatattaatatgtatgtttgtaataataaaataggtggtaattattttagaatataagtccttagtttgatttctttaatgatttcttttaatttagtgtacatggtaattattttagaatactatatgtctttgatttgatttcttttaattagtaggtattaatttagagtaagttattaattacatactaatttttttttaaaagaaattagaaaattagaaaaataagtataagtccttagtttgatttttttaatgatttcttttaatttagt

SEQ ID NO: 135680 - DNA, 1110 bp, Cannabis sativa
tcgcgcgagctaggaaggtgctaaacgagacattaagacgtcttgataaaagtacttgagcctaaaaaatggatagataatctaactattcatatgagcaaattaaaaatgtacaaaatgataaaatcattaaaagtatattgaagtttgcttaaggtagattataactaccatagcaaggcagaattgacaactgctcgaaaatcaaaaagtttggtagataactaagtacttaaacaggaagattacgagcaatggaagaacccaaaaatactttacatttgatcaaaatatagttgtttacattgtgaataaaaattcaatcaaacacagttgtattaagttaaaatgaaaagagtacaaggcatttgagataaaaaaaataccccaagtagggtcacaaacttatctttacaaaaatgccataggggcaaaccataaaagtcatcttcctaaaacaaaagaatgagggatccgtaaactcgagatagaccgtcttcatatagctcagagaaagaccgtcttcatatagcttggagaaagaccgtcttcatatagcttggagaaagaccgtctacacatagcttggagaaagaccggctagacatagctcgagaaagaccatctacatgtagaaggtctcgacctttgcatagacctcattctccacatcagaggatcccatttcctgcaacggagacctcattcccagcctcatgaaatttctcgtaccagagagaggttggcacaaaggtcttctagtgcaagtttgggccttgggttggtgggattatttgatagaaatgacgccaactttcctcctagattcacccgaaaccacgccaactttcctctttgatgccttgtcagcctgaggaggacctctaggatcgctcgcaagatttacatcgatttttgtaaaaaaaaacaaaaataagggatcaatggagcaaaaaaaaatatccaattcagaccgccatttacatgggataatacttactctcaacaatcacttgtgaggatcgcccataacaatcaacgtggttccctcagtttggattgatcggaagctcctcaaccttggaatccttcgtttccaattcaaattga

SEQ ID NO: 135681 - DNA, 1099 bp, Cannabis sativa
aaataaattgttttggcatttatagggttgaattagaaaatatggtattattgaaaaacaaacctagcacaagtactgcaacaacaagtaccgtctcgactaaagtagataatccaagtggttcaaataccaaaagaaaagatgactcgagagaatcatctaaaaataagaagaaacagaaaaaacgtgacaaatatgttctaatttacacagtatacaccgagttgaatgaaactcgtgaaaacatctttctcgcaaatgaacacatggttgcattctgcaagcttgaaccaatgagacatgcgagacataaacgagtttcaacaaaattttgtcaatttcataaagacatagggcatactaccgaagagtttcgacaactgaaagacgagatagagagcctaatcttgcgtggatattttagatagtatgtgaagcgtcaagggaacgagccaaaccaacccaataacccaaataactagagattgcaacctccccctattgagggcaaggatttattggttatcttgggagggtcgcgtctcgctggagagtgtaataatgcccagaaaagatatgtcaatgaaataaagaatgagcaatcggtgtttgctctagaaccactaaaaaaagcaaaaacgaaggaacctccgattatattctcaaaggaagatacaaagcatgtgaggtatccacatgtcgatcctcttatcattacagtttagctcgccaaaaagagagtaaaaagagtgttggtggataatgggagcacagtaaatatcccttacacggatacattgagaaaatggggttacaagatgcaaagttaaaaccttgcgtggtgagcttatgtggattcactggtgatagtgtcgccagccaaggcatcattgaccttccattaactgtaggaaagccactgttatctacaacactaatgcatgaattcttagttgttgatcttccattagcttacaacatattgatgggtcgtcctgcattgattaggctaggggcaatcagttcaatcaaacacctacctctaaaattccaaacacaaacaggagtgggtgtggtacgaggcgaccaattgttggct

SEQ ID NO: 135682 - DNA, 757 bp, Cannabis sativa
  modified_base (638)..(640): a, c, t, g, unknown or other
tagagaaaataaaatagcggggttgcggggttatgggttatgggttatggtatttgaccattttacccctaattttgaaaaatacctatgctatgacttagtgggcattttattcatttcctttggtgaaggataggtggttgccctagcttagtgacacctagctagatcaatttcagcaagaaattaattaacctcatttatcccattttgtaagttaagagaaaatacctaaaattaagagaaactctttctctccatctctctctctcttcgaaaccagcaagaacaagggggatatctactaatttgtggagatttcaacaaggaaatctagggagaatcaagctaaggtaagccctagtggaacccttctttagtttttaagttttttcttgggttgagtttatgattttaggaattaatggctgttaggtttagtcatgcatagggttcgaattctaggtttaatttgaatttattttaagctctggatattagttttgagctatggagatggatttaagcaagcttgagctttgaaactcaagtttaggtctttaatggcataaattgttttggtatgtttttttgtgaaatactcgttggattatgttgtttataccctaattaggtannntggaaggtttggttgcatttggtggaagattgagcaagaaatgaaatttcttgggtgaactaatgcgaaaccgggtaaccggttttggcagggttccccgggcctttcattttctca

SEQ ID NO: 135683 - DNA, 1163 bp, Cannabis sativa
gagttgaaacttaaagttggtaatggcaaaatagtatcggttagagctaacggaaaagccaaactgaagtatcagaatagaattttggatttagcaatgtcttatttattccaaatttcagtagaaacttgatttctgtttcatgtttacagttgcaacaatgcaaactgaattttttgagttctagttctatcatttctcgaaatgacattcaaatttgtgttgtgtaaagactgcttagttataatttagaaattagcatataattagggtttaattatgaatttgtttattagtcttgaattatttattcacaatgatttatttgaattcagaatgcattttatatgtcatatttagaatttcataattttggatgttttgtgccccgcaacattggaacgcagtgtttggctattagaatcacatcctagtatttttagtatagcggggcactatagttagacattgggaatgtcgggagtagtcgagattatagagttgaaaaaaatacccctaagttactttttttcatttttagtgtaggaggggcaaaatggtcattttgccaatttatgttttgtctttttgtgagtttatgtaaagattttaaatctaatttttagtgattattaagcttgtattattaataaaactaaactcagtttatataactttattaaaaaaataagaaaaattggataaaggaaacattttctctctcaaactcaccctctctctttctctctttcgaaatccctagaaccagctagggttctagatttccttctctttttcaagaaatttgctgcaagtttttagtgttcttaagctctaggtaagctcttgactttatcctcttaagtttcttgaattttaagaaagtggattatgcatgtttttgtaatttttgccgttgtggttgttgttggtgtatgatttgtgtttctagattgagattatggttttatatgttgatttgagcatgtttttatggttgttattagggttaagcaagtttggagtacgttaaaaatcacgctgacatgcctaaactagttaaggtgttacaattttgtatcaaagccgtcaggttgtacaatcatcatcagtagtcagcttgtttcacggttcagtaagcttttattgctttagtagtttat

SEQ ID NO: 135684 - DNA, 732 bp, Cannabis sativa
aaaaaagataatagattaatcattaccattctcattccactttaagttatatggtttgtatttttcttattctggaacattttttgttttcactttagcaacttattgtgagttgcttcttttggttgttgaattttttttttctttttatgttaaaattgttttgaaaatgtgttcaacattatccaatcaatacaacttttttcaatgaatgagatggttctataaatattataattttaacttgcatttctatgatactatttagtgtagaactttttttttcagttaattttttaagactttagtcatctgaaagcccatccccaagtcatggtgttgtaatagaatatagataaatcttggttcgcaaaccagattttggtttttgtaattaattattttctccattacttactggtgtttcaatttttgtatgataaacaaatagatttgcttatgaagtaattttatggtaaaagttaaaagttgtaagtaaatttaaaataattcctctttctgcctgcaaaaaaaaaaaaattatatttctcttttaaatagtcattaagaagaaggtattaactttgattttattatggccaaactattttaataaatagcacattatatagtcaattaaaggcaaaaatattggaaactcatgttctctacaacatacactatcgtgttaggcatcagaaaattactcccaacaacaaaaaaaaaaaaaaa

SEQ ID NO: 135685 - DNA, 1086 bp, Cannabis sativa
ataattattttttaaaaaactgaatatatgtaaatatatttatttatgtaaatatttatgtatatatatttatttatgtataaatgtaatgtgtaataatgtggagaaaagtttggagaaaaaaatatttggagaaaagttttttgaataggaaaaattttagtttaggcaaaaagtttatttgtttaatttggtattgtaaaaaataattagtttttttaatttagtttatgtataattataaattattattaggtaaaacaaaagtttagttaaatgtttaattattttttatgcaataagtttaagtttaattagttagatttaaacctttaattaattgttaattgataattttgtgtaggtatttatttgtggtgataccgtttgaaaacttttttttattgaggtgtttaacattattaatttcaattatattaggacattggtggtgatcttgtttgactatgttgatttgtagctttattagacttggttgattattaatatactttgtgaagttaataaattatcggtaatatatatatatatatatatatatttgtgtatatttattagtttatacatatttgattactttaattatttaaatgtttcatgggttttgggttctttgtgttgaatgaagattgcgaaattgtagctatctttattggagaaaggtataatcttcaaaactttataattttttgtttagtggagtttgaatatgttagatattcatccttagtgaagtaggttctgcgattaattgtactgcagtcggatggatggaatatatatgcatggtagaagagtttgaatatcttaaatattcatctgtagtgacgtagattctgcgaatacatgtactgcgatcgaatgggtggataattttatattgttaatttaattttgttattattgtattgttttatgtgtttattagtaattttttcatgtttttaatttttgagaatgtccgatacaagagcatttatttaggaacagaatagacaagagttataaagtttgggtttaccacggggaaaagaatagagttcctggcgagggaacgtctaagtc

SEQ ID NO: 135686 - DNA, 513 bp, Cannabis sativa
  modified_base (484)..(488): a, c, t, g, unknown or other
ttcgaatagacttagcaaaatttcctatcttatcctcaaaattcggataagttatttctatccatatgaatggttaaatttactttgttaattaaattctaaagttcttatcatgatcataacatagtaatctatcactactgtcatccaaataaagatgcgcttggaattttaaaattctcccactcaaataaggtattgtgatactatgtccaagaacttcattgatatctatttctattactacagtaacatgctaattggaacaattacaggatcaagaataagttctaataattttctaatttgttcattatattatatccatgtctaatcattaatgtgtgtcatagggatactgtggtgtattgagtatagtctagagttcaaaaaaaaaaaataattgaactacatatatcaatagcttcttcaacccctaagtattatagagatcctgtggagttatgaatatagtctagagttnnnnnagatataaaagatcgttgaactgca

SEQ ID NO: 135687 - DNA, 2492 bp, Cannabis sativa
tattgacttaagaacaaagagaaaagttccttttcttatggctcttacaaccttatctttgaatatgaattcttagataatatctcctaggtaaaatcttttgacccttttcccagggagcatgcatcaatatttatagggctatgaacttggagaggaagtatttcccttctcgttacaatggatatgagcagaaagattgcatgataaatatagaatacactgatcgtgggatttggacagctttccatatctttgtaatctgatccccaagttatcgggatttctttgatgactcaagatgcgaaaactgaattcactaagtgttggtcgctctgtgcggattactgatcgctttgcttcaggcatgcctatgaggcatcctgttcggactgtactctccgagcagatgctcaaagttgactcaacatgtcaccatcatgtgatgccacgtcagagtacaaaaattgggataacacaaatcataaatcgcatttacactacgtgatctgtaatcagatcccacgattttagggatgattgcggtaaaaatatttcggtcaactttgtaattcaatgtgcactatgtaattataaatacttacaaagaagataaaaaaagggacgaaaaaacccatatgaaagaggccctgaaaaatactcagaaatctgattaagattgactcgtggactatgcacaattttaactacaaaaccatgtaaaaaatcttgtgttcttattctttattttgatagcttttattttttctgtgtgaaatcaatatcgtgatgctcaaatttggttaataaaaatctgcgtaacagtttggtgctatcattaggagcctctgtgaaaaagctcagaaaaaaccctcggttcttttgaagaaaaacaaccttctacatggctgaaaatctagaaaatgtgaacaccccacatgaggaagccaaccattattctggaaaagagcccatgggctccataagatctaccaatccgcaatccagaaggaccacccatttcaggagggctcaacctgagggtggccctagtgcgcggacgacacgttcccggagaactcaactggacgttggtcctagtacgcggacaacacactcgatgaaaactcagcgtgggaatggtgagaatcccgcgaccagggatgaagagctcaatcgtggaggtgcccaatctgtgggagaaagaacttatgagacataaatctgtcgcctgagacgccgtttggaagaggcacagtgtaggaacacttagttaaaacgtgaggcagcctaggctagggcagcactggggatgaatgctcggaatcaacctgaactttgagtgagaagacctcgaggcagaccttgtggctcacgaactaagagacaggaaaaggcccaggaagaacgacccgaggaaaatgagacaccccttgaaaatcaggatgaacaaccagatgggagacaacaggaaactaatgaacaagaaatccctcatgaaaatgaggaggatcttgggactcaactgggtgaatggagatcacctgctagaaatcaccaacgttcttcccaaacccaaagagtgaggactcgtacataccctgatgggggaaatgcgacaaaccgctctcgggaggaaagaacagagcatgaagaagaaaatgtgacttcgaggtgatccagatgccatagtcaatgaactcgaagaggataaagtactcaacaagctaatgattgagaaagattggcaactagttaatccacgagccactcaaagacaaagtcaatgagtaagacgcgatctatgagtaagacaagatctgccagcaattactcctagcccaatctgcgaggcacttgaatcggaagaaacctaaccttcggcaacagcttggtccaaagcaagggaatccattccaattgcggataaacaagatggaggacaagtttagaagatatcaagtgggggaattagggaaactatctggatacgactctgacgaggagcttgagctgtataatctagatattatgaataccccttttccttcgggattcaaaaacctgcatgtcttgtcttatgacagacccacagatctagtctcccatttgaataactttaacacaataatgcgagtgagtaatgtgacgaataatttacgttgtattttgttccccacctcgcttgatggggcagcgagtagctcgtttaacaagtttactcatcattcaataacttcctgggagcagctatccagggatttcaagaagtaatttcaggccgctagggataggggacccaaagcagcctcgctaactaatataaatcagtagcccggcgaaacacttaaggcgtagttaattcgttttagcagggctgccgctatggttagaaatttggatgacagcacgcaacttacagcccttcaggcgaggatctctactgatccattaaccgtagggggcgggttgtgggataacttacaaggacg

SEQ ID NO: 135688 - DNA, 1199 bp, Cannabis sativa
  modified_base (727)..(746): a, c, t, g, unknown or other
  modified_base (1158)..(1164): a, c, t, g, unknown or other
ttttttttttttttttgtgattgagatcactttacataaataaatatatataaattaaataataataattgaaaaatataggagaccaccgacccagaacgaagccatcattttatagaaatttaaatatcatttttagagattatttaaatatcctccataataattcaatcttgtatttttattttatatatagatgtgtatgtatttgctgataataatgtttgtcgttttgtaaaaaagatggcgtaagctgccagagaagaagggattagttaaatcatagattgttgattgtactaattaagataataagtggctggtgttaaccaaaatgaattattaattagtttgaccttgtgctcacccaattaattgcttctttaatatccatttccaactgtactataattatactatatattatataatacatccttctttttattcttattattcttggcatggcgttaactgcgtcttaataattaaatttgtgaagaatacgcgtacgggccatgatttcaattctatgtatacggaactttgtttcttttttccttttcgaaataataattagtgagcatcagttaaactagtttaaaatttaaatataaatatgtatctctcttaatatataataaactaataaacattccacgcttcgcggcgaatatataaaatattttaattatatgtagaaaaaatataaattgtgtattttaannnnnnnnnnnnnnnnnnnnaaattatattaaaattttaacttaaaattaaaaaatttgtgacataaatacttaaaatattaaatttgttactaataaatatcggaattcgaaaaatagtagcataaaatctttatttatattttaatttttattctgatgtgtgtgttaagctctgagtttgacttttattgtgtgtgcttttaatgtttgagttttagtgttttactgagtttctaatgtttgagtttgtgtttatgagatctgtttatttatttatttatttttatagattttgagaacttgaaatttgatgttgtttctattgattatatattgggattgagagtttaatttttcgtacggaattaaagtttgcatttttgttttatcgattgaaaaatattagtagaaagtttatggaatgagaatnnnnnnnatatgaaaataaaattgaaaaatagcatttgaatc

SEQ ID NO: 135689 - DNA, 569 bp, Cannabis sativa
  modified_base (519)..(528): a, c, t, g, unknown or other
gcaggttcaaaacatgcattttttggcactaaaacacgcataactctttactcgattatccattttcaaaaattccaatttcgttctcttagttaaacaaaatgtgatatagaaattcaataaaaaaaattgaatcattggatgagaaaacttgtcgcacaagttagtgagtgggccaaaatttgtgcatataagccctagtgtattatgcaaatcactttaagaagactaaagtaaatttataccatttcattttgtgtaatcttgatgtagatgagattcctagcttgatttgcatgttttgatccaaaggtagcttctctctgagagttgactataactttgagtttcgatttgacttttggctttgagctttgaagacatcttttgaatacggtcttgaattcttgatcccttgatgaatcttttgttcttatgaagtatgaagtatttgatatacttgttgaatttacctctttgattatgttttactttaccgagcaaatattgatactttgnnnnnnnnnntgcaaaatgatcaagaaaagattagtaacaaataataatca

SEQ ID NO: 135690 - DNA, 645 bp, Cannabis sativa
agacatggaatgcttcagttgctacgtgtgtgtgtcaagagggatgcacatggagactaaaagggcagaggccgcaatcgtcagaggatggttgtatttggaggtattcgcaagtgagttttatttgatccatatggaagcatcgaggcagttgagtggaatgtgttggcttgtaaaagcgccagtgggcgtaagtcacacagaggcatcgataaagatgtgaagctgtggaatgaatgcatcaaagaagccagtagggctgagaagaccgagcgcaaacgttgagatggcgctagagtttgtgtggaggccagagggccgtgctagtgaaacttagtagtcatgtgagactacgaaagtcaagaggggtgctagagttggcatgatggctagagggttgcatcattggaacttagtacttagtacagggcatgatgcaagtgtgaatcagttggatggttgagcggacattgcatccatatagaagtcgacaggggtgctatatgagatagttgacttaagagtcacatcctgcaagatgcacttttagatgcatagtgtgcatgaagagttgggcggtcaagcattcgcgtgtcggcatgttgtcgaggacgccaacagatgaagtgggggagagaccttcac

SEQ ID NO: 135691 - DNA, 729 bp, Cannabis sativa
cagccccttcacgaaaccctcgcccaactaccgcctcccatcccccatttctttatttttcatctgtttttacctattttttttttaaaaacttgcatcttttacacctaaaaacatatcccaaagtttgatcgtcttttgttttatttttcagggtaaaactgagctttgaggtggcagttgtggtggttttagctccgaccgccgcttttggtggagaaatcgttgaatctcaatattcattaaggtataaatctaatttctaataattttagtaatttatattgctttattttttattttgtaaatttttttagggttttctagatttttaagattattctattggggtggtgcatggtggccgaatttggtcggtattagtggccaaattttagtaataaggtaaaaatctaaactttaagaaacaacattcttagtcagcataaccgtttaaaggataaagagaaagagcagttggatagttattagatattatctcatgtgcatataaatgaaacgtggggaatgtccacatttcatgagcaattataaatgaatagatcccaataaaaataattgtcaacctatgcacctataaataggggcagaatctatggaaaaagggacagaaaaactagggtgtgtttggaaagccacaatgtaattagatttatgtgtaattagaggtaattacacaatttggcatgtttgtctgaccatgtaatt

SEQ ID NO: 135692 - DNA, 611 bp, Cannabis sativa
tcattgttaacaaggctaactgagcccaagtaggtacacaactacaaaaaaaattcaaaataattcttctacaaaaaaaattaactaatgaagctatcaaaaaattgcatattctgatggatgctttacttggaactcatatacttacttttgttgctcagattgttgtcgtccaattgtactcaaaacctcccaacaattgattcaatgctctcatttaaggcttctgttagagctttttccaagaaaaatgcatcaacaacacttctgcttccaatatcacctgtcaaaagaaaatgataaagagaaaaacaaatgagggtcttaacagaagaagtggacaaattactattaaaacaactgactcattctcaaaatatattgtgtaaggtaattgaattaactgacattgaattgaatataaagtatgtattttgattagacaaccaatgaatagaactgtgaccaaagagtattttgtaataataaactgtcctaaaattatggccacatcttttgagaaaaaaattcctaacaaaattgctcaagctatagtttatatgcaaaaataaaaatatggccacacaacactaataaaatgtatttacatg

SEQ ID NO: 135693 - DNA, 545 bp, Cannabis sativa
gatactataagaccatttttttttttgttttgatatcaatcacacatctgaggataattgatattggtatacataattttacaaactacctattaattccatctgtgtttgtcatgtttccttttcacatctcaattttattatatattcttatatttgtattagtgccttcatcagtgctcttacgtccactacgtacaaactctagtttactaacacaattttttatttttatttatcatcgatctgttaaaaattatatttgggttgtggaccttacagttaagtattcgctatcattaatggttaatttttttttgttttcacagaaaacacattaatggtaaattttttttttttttttttcctaaaaacgcgcgagtacatatcttgatatatatgcactaagcattttcgaataaaaattacctttaaaaaattaatatcccacaatatattaagctaattcaaatatgttaactcaactaactacttttcttaaatactattaactatgtagataatttttattttttttttaaaat

SEQ ID NO: 135694 - DNA, 621 bp, Cannabis sativa
  modified_base (573)..(595): a, c, t, g, unknown or other
gtgataacttgtatttaaatactacattttagtcataagtaacatcttgttgtgactaaaaattacatttaatcacaaaaaaattatgttgtaattgaaaaattatcacttaatataacagttttttgtagtgattttttttatttaaaaaaaatatgttatttttatgttgaagttacattatactatgtttccataatgtgaaaacaacattatttttaaaaaataaaattaagtacaaaactctaaaaaatgacgctagtaataaaataaaagaaagtgtcatttttaagtgttttgtgtaaatttttcgtaatttctaaatctgttacttaattatttttcttactataatttataattttaacttttataaaaaaaaaatagtaataaatattttattacattacaagtagtttaaagtttacaaaatttacatgtttccataagtgatttttgtccaatattttattctttttttaatccatataattcaactctaagccctagttgaaacaatataaaagctctcatctcatccttttgtcactcttgtcaacttgactattcaannnnnnnnnnnnnnnnnnnnnnntccttagtgatttcagcctccttcat

SEQ ID NO: 135695 - DNA, 1219 bp, Cannabis sativa
caagaaagaacctctaattgtattttcggaggaagacgcaaagcacatgaggtatccacacgtcgaccctctcgtcattacaattcaacttgccaaaaaaagaataaaaagggtgttggtggataatggatgctcagtgaatatcctatacaaggatacactgaagaaaatgggattgcaaaatacgaagttaaaaccttatatggtgaatttgtgcggatttaccggagatagtgtcgccagtcagggcattattcaactcccattaaccgtaggcgagccaccattatccacaacagtgatgcaagattttctagttgtcgacctaccatcggcctataacatactgttgggtcgtcctgcactaattggactagggatagttagttcgattaaacatctatctttaaaatttcaaacacaggtaggtgtagtgcgaggtgaccaactgctggctcgcgaatgctatcgtatagaattacaaaatagaaaggccagccatcagttaattgtagccataacagaggaaggcgagaaacaggatgaggatctagatccttgaattcaagatgaaaagaaccaattgaaaccaatcgagaaattggaagaagttgttttagatccagaaaatcccactaatgtgtgtttatggggaaaaatctggatgaaaaactaaaatagaagttgttataccctaaattcggctggaacacacgtgtcaaggtaaagagaatgtgaatcggtgtcatatctttttatggaataactcattaattgcgtaagtatcagagtatatttgtaacacgctgattgtaaggtcttagggggaggaatcgatgtacgaactagtacttagtgtataacaagaaaccatatgtcgctaaagaagaataacaaggcaccagagaaaagtaataaataccctagcttgcgataagcaaactaagactataagtcgaatcggctcgaagaacaagaatgcgagatgaccatctcgctacgaggaagctccctataagttccatccaactaacaggagcgaggctcatgaccctggcaagtcagaagatttccatatatccgcaatcgatgtaaaacacatcaagtcaacctcggaaagaatgatggttccagctcgccagcgggatcactacaatcaagtttttgtcgagacatctccagattcaacaattaaagacgtgtttaatacacgataatt

SEQ ID NO: 135696 - DNA, 627 bp, Cannabis sativa
  modified_base (445)..(446): a, c, t, g, unknown or other
aactgactgcccctagtccgatcattgctggacgacccaacaatatgttataagccgatggcaggtcgacaactaagaagtcttgcataacaatggcagacaagggtacctcgcctaaggttaatgtgagctcaattatgccaagactggcaatgttgtctctggtgaattcgcaaagattcaccatacaaggtcttaatttggccctttcgagtctattaacactctcttgatccttttattggcgagttgaatggtaatcaccaatagatcgacgtgaggatacctcacgtttttctcgtcttcctccgtgaatataatgggaggttcctaagttttcaccttcttggaaggttctgaggcaaatgctgactgctcgttcattatctctttcacatatcttttttgggcgttattgttttcccctgcgatatgcggccctccnnaattaaccaggatgtcctctccttcaacaggaagaggttgcaacccttggttgtttaggttattgggcagactgggctggttggatccctggctctgtcttttcacgtactgtttaaaatggtctcgagcgatgagactttctatctcatctttcaaatggtggctgtaacaccctaacta

SEQ ID NO: 135697 - DNA, 660 bp, Cannabis sativa
  modified_base (154)..(166): a, c, t, g, unknown or other
  modified_base (433)..(438): a, c, t, g, unknown or other
agttgaaaattttaatttcaaaacaacttaaattagaataattttcaaaatacattttattttattttattaatgatttttcccaccaaatttttgaaattgcatttattaaatgcagataattttgacatttatttttttttgaaaaatagannnnnnnnnnnnnttaatttttaattaattttagatcaacttgaatcaaataaatttttttattaatgattaatttaaaataaatagactaaaatatatcatgttttaattagaaaataaagtaattagttagtgaaaatcaagatagttattttctatttgcttgaattatttttctagttatatttaattgaatagaaaattaatatttaagttgattttattcatgatactttaatatttgataattttctttgaaatttaattaaataggaaaatnnnnnntgtgttgaaaattaatttattaattaattttggaccaaaataaattagaatatttttttcatgatttatttgattctattttattttaagcaattttgaaaatatttttttgttaaaatacattggatttcgaattttgctatatatatttatagaaaattaaatttgagttggaaaattaattttttaattaatttcggatcaacttaaattgaataattt

SEQ ID NO: 135698 - DNA, 615 bp, Cannabis sativa
  modified_base (69)..(97): a, c, t, g, unknown or other
  modified_base (464)..(464): a, c, t, g, unknown or other
ttgttaattaagagactttattaactctaattcataaacatatttaatgataattttatttgataattnnnnnnnnnnnnnnnnnnnnnnnnnnnnncatttaagtggttgaattggaaagtataatatttttgagaaaataaggtaaattgatgaaaaatggcaaaattacaaagtggtagggcccacatccagggctggcaacttgggtctattttaccatttattttatcaattttttaatgcaaaataattcaaatccaaacctagtttgattcctataaatagatagtgatggtctcaaaattggaagctttgtaattcacttgccttcactcaaaattttgagccttatcttctatctctatttttgaatttttcctctctctttctctcgtcaatttccgagcccttagtaatagagtacatgcccacagataacaagttggtactcaatcatagtntgtaagactgtgaagaatccaattgaagtgaaggagaatcgagcacagatccttgtgatactttgctacaaaaaggatacaagggttagagatctaagaggaaggagtcatttaattccgctacacccaatgtaaggtctcttaaacttta

SEQ ID NO: 135699 - DNA, 616 bp, Cannabis sativa
aggtatattagccgacctacttggagtacgatcgatgatctcgggccatatgtcataacaataataaactaataagtgtttatcccaaaatactgcataacagttggaaaggacaacttaggatttcctatcaaatcctgtatttgtattgtttttcttctgtttacacatatagtcatatacaatctaaaattaagtatagcttgtaaatatattaaggttaggtcatagatgctagcttattctaatattttttttcttatcattttcaaaaataaatatataataaatttataaggcattattatttactataactaatgattgaaatcaagtagagggtaaaagccaagtacactttaaataatcaagaataaatttgtaattttaatattaaaaaagtattatgataattatattagataaaaaaatgtaccacattataagtttacgaataatatttaagtatttgattaaataatatattgtacaaaataaataattttatatatcaaattttacaaaatatttccaaaaaaaatgtaataatacaaatgaagcacaagtttttttaaaaaataacaaaatcaagtatgaaatcacaaaaataattgta

SEQ ID NO: 135700 - DNA, 570 bp, Cannabis sativa
gtgaaagcatcttgtcgcaaggtaggacagtaatacccttgtcgcataatttttagggcaagggaattaccaccagtatgattcccacaaatactctcgttcacctgacggagtatgtagtcgcagctttccccgtcgatacatttgagcagcagctgactaaagcttctacgatataatcttccatcatagatggcatatcgggcagcccgctgccgcagcttccttgcttccattttgtccccaggcaagataccattctccagatatgcgattatcagagtcatccaggtgacctcttgggcggtatctatctccattatctcttctcgatttatcgttgggtgagccaatacgtcaacaggaattacatcgagtaattcaacttctctagtcgaggccaatcgggcaaatgcgtctgcgtgtgagttatgagcacgtggtactcgggacaagactactttcttgaatttctgcatcagctcgcatactaaggcgagatacttaaccaatcgcccgcctctggccagatattctccattcacctggcacacgacgatttgggaatcg

SEQ ID NO: 135701 - DNA, 742 bp, Cannabis sativa
ggaagatgatgaagaagatgtatgggaggagggtgtatgaacgggagaactaagaggaggaacatgagatgtggagggtgaagtaggaattggctgagttcaggtagatggagtagaaggggaatgatgggaaggggtgtgtgggaatgaagttggagtgacattgggaatgtttgtggtggtaggaaccgagagaggtaaggctataatgacggagtgaggagcatgagagggtggtgaagtggccgagggagtggcaaagggaaaacatgactcattaaaaatgacatgacgagtgataaaaagacgcccggaggtgggatgaaggcaaagatagcctttgtgtttgctgctatagccaagaaaagtgtaaggagaggagcgaaactcaagtttatgagtgttgtaaggcctaagaaaggggaaacattggcagccaaaaactcagagtaatgaatagttgggagctttgtgataaagtaaggagtaggggctgtcataatgaagaacacgagtaggaaggtgattgattaaataaacagcggtggagaaagcgtaaggccaaaaataaagaggaagatgggtatgagctaacaaagtgagaccggtttcgacaacatgacgatttttgcgctctacgcggccattttgttgaggtgtatgagggcatgagagatcatggtgaatgccatgttgagtgaagaaccgaaacaaagagcgatattcaccaccccaatcggtt

SEQ ID NO: 135702 - DNA, 670 bp, Cannabis sativa
tacccataactggattaccaccactttcttcattctccagaactagacttcttggtcctcttattgtgaattagcttcaaaatcacaatgcataattaaccacacaaaacacagaaataatgcaaaaatatcaataaatgacaaggaacaaaatccaattaaaataaatcaatcactatatcaaaattaaaagcaacgcaaaagcaaactgggatacatccacagcctatgctttgccagcgataaaataacgaaaccggcgcttcttacggcaagcacccgccatcttggatctggtattctccctcctggaactggtcttccccatcatggatctgttcttctccgtcctggatctggtcttcttcttcctagttgttctaagccaaagccctcttctctgtccgtctctctctttctctcctccaatggattttgaaccgagggcaagctcccatggctaaggctgctggtacgagcgcgtggaaaagagggaaagaaggttttttggggtcgattttataacttccttacagagagagagagatagagagatagagagtatgtttgtagaagacgaaggagaacagagattgaagctgtagaggaggaggattgatttcgattcggagatcggggaagtttgatctgagttcagagagatttttca

SEQ ID NO: 135703 - DNA, 525 bp, Cannabis sativa
caaagaggccatggttgttggctgtacacgcagagatagatagagggatgaggagaaggagaaatgaggaagagagagataatgtggttgctaggtttttctaaagctactaggattacaaaatagaaaaaggacttaaatattccattaaataaaggaaattaaaaactataaaaagttaaattaatatataatgttggaaatagcgccagttttttttaatatattcggccctaattattgttgggaatatatttttcccagcagtttatatactaagtatacgcaacattttataactgttgggaaaactaagtattcccaacagttataaactattggaatttattattttttttttaaaaaaaattatttcgtattgcccacggttctccaccgttgcatatgttttttccaacagttttcttgcttcagttctaaacttttgggaaaatcctccgcttactttttccaacagttttttataattgaccctcttattaaccgttgggaaaagccaatttt

SEQ ID NO: 135704 - DNA, 1636 bp, Cannabis sativa
  modified_base (48)..(49): a, c, t, g, unknown or other
aatcatgtgtaccatgcaacataaaatgcgatttctgatctttattanntagtaaatctgattatatttaattgagttttatttagggcacgatacccaacatcaacctgggcgcagggccagccccaggtgtcaacctaggcgctgacccttttttttatgcccaggaattgttatttttcctccgaaggacctatttccccatttttgatgaagacggattcaatgcaaaagtaggatcttcgatcagacacttggaagacgcccagattgatagattgtcaatctgggcgttgggtgctcaaaaattaacttgctctgaatcttattctaatggctcaaacatgtctatggtatttctagttgatgtaccaatgcaagttttggccactttacactaagacggtcacagatgccgaaaccctagttgaggatgtcaacctaggagttaggtgaaagccctagttgcccaagttggctttcaggttgcaggttcgtgtaattttagctctcgaaccttgaattaggttgctctattttgtcatagtacataatattgaaagatagtgggttggattcaaattattgaagttcgaacttccatcccagagatcccatatcaacctgggtccagggctagggttccctcccaggtcgaatgttatgacttgggtctactcaactccgtgatgccatccttcgtgccacgtgtcaaacactgatgtccatgtcaccaaggagagttttcgagctaacatttttagttttagaattaacacttaaaagggaaccaacattcgatctgttatgaaagtcaagattctataattgtagattatgttcccgaacatccatattattagattcacaaaacagaagttgtaagaatcatcttctctgagaaattttaacgagtgaattaaagatactaataacatgaacaagagttcatgattactcaggatctagaccaatatactattaattatctttatgatatgaactaggtctttatagtacacgacatgcttgataaagataaattaattacatatcggtccatgtcatatataatctttattagatgccatactacatcagcaattcgaatcgatattgcttacaccgaataacaggcatcaatgaaccgtactggcaacctgttcattaaagattctataactctaatatgttgctgactgttatattcttggctaagcaatcttaattctctatacaatacaagtcacagcctcatgtatgtataagaaatttttcgatatttatatataaattataggggtgagcaacggtcggtttggtcggtttttacacaaaaaaatccaaaatttagttttcggtttttgtggttataatccgaaaaccgaccgaccattatataaatgaaaaaaaaaactgaccgttttaatccacggtttggtcggtttaaaccaaacttattttttttaaaaaaaaataagtccttaaatttgttatatttatttaaaaactaaaaaaattagagtattgtatcaaatattatataatttaagaacaacatcttttttagttaaataaataatgtaaaataaactttttaaaatttgctcaaattatttgtgctactaatatggta

SEQ ID NO: 135705 - DNA, 923 bp, Cannabis sativa
ttttgaaaaccaagcaaaacgtgtagacattcgagcagagtgttccaatcgcggtagctctctgatttctttcaatgctgagttcacagactcggcgatgttggaggttaatgttgagtagcgtttatttgggctgtaaagccttgtccatttttctaggccaacttcatttgtcaggtaaggacgaattctactatcaatgttgtctaagtccctcatggaatcgtcgaagtcagtttgattgtatgcttttgctgcacagtagaatgcatctcttagatcatctcctccttttctgaatcttgtttttatattttggaacaaatggaagcaacataccccatgcatcaagttagggaatactgatttcattgcttttgctatactttcgtgtctgtcagaaattatgcattggtcttcacgctccccatatgattctttgagcttttccatgaagtattgccatgatgcatcattttcagaatcaactactgaaaaagctagtgggaatatgtgtctgtcagcatcttgtgcactagcaattatcaatgttcctccatatgcattcttaaggaaagttgcatcaaccacaattagaggtgtgcagtgtttccagccttctattgagactcctaatgcaaagaataggtacttaaaatgcccattgtcatgttggactaagtctgttattgttcctgcaatattatgagagagtgttgtcacattagagctactgattagttgctataagattaagtgtagtttaagaccaaagaagttatacctggattgcatttttttatcatgtgcagaatccctggaatttcattgtatgaatcatgtgggcagcctattactttttctgaagccttctcttttgctctccaagctttttggtaagaaattgagacactatagtcttc

SEQ ID NO: 135706 - DNA, 547 bp, Cannabis sativa
cgactgcgggagtcgcaactactggggcgaggttcgctgggacggtgatcccagtagtcgcaatcggtgcggtaggtgggttattgtgagcgttgacaccctgatcgtccacatggggatcacggagtgtttatgaggggcgagaacgcgctctaaaaactgcatggaggtgatcacacagatcacctcgatgtacctgatagcgtcccccctgctacatttctagagaaccggaccttgtatatctacttggtgtacgaccatgcgatgacgaagaggctgattctacgtcattgtctcttgatggtcgactgcgaggattgcatcgttcaggatcttcatcagtctgcgtcccctggttaggatacctcacggattgatctctcaatatcggatggttcaggtccaaaccttcagggttggttcttcgttccttgcgtacacggttagtacaacgtctagaatttgttacctgagggttgtctgtgcgagtagtagggactcgaggggggcgtcgggcccagttctgtccatccacttcggcctg

SEQ ID NO: 135707 - DNA, 1653 bp, Cannabis sativa
tttcccgtaagtcaggttgatcagcagttgcaggttgtgagtgtcttcctgatgattgccctttcaatttgcgacccactcctcgttgatagccatgcctctctctaagagtttgccgaagtatctcaagttcagaaacttgtgaagattcagaagcactatttcgagttgtcaccatcttcctataatataaataagttagaaatcaaacaaagttacaattatttgaatatatttaaaagttattattttataaagtcttacatatttatttttggcagcctcattgacaaaggtgttggtgtctttctttgcatgacattctttccaagtctcaatgtaaccctttccttgctgataaatataacttgttagaaaattatatttaaagtaaactttataaaatagaaattcaatatattaactcactttttgacgaagaatctcagccatagttaccgaccattgtgttgaagagaatctcatcttttgtcgattgatagagttttgattcgaccgtttaataaattcatgagttgtgaacaattgacacattagtcgccattggtcttcactaagttcattgggagggttcttcactgcattttcaaagtcttctgggtttttgtaatattctctgaaatgttgcaatctaatattctttctcgttttgtacttcttggccatctcaacaatcaaaatagctattaattttggatggctgtccaactggtaataatggtgcatatgaaattttttttttaaaataacatggtaataatcacatttattaatttagatataaattaataaattattacccgaagtttggttaagatgaggtgttcgtactgcttcgggacatttgcccaacttggataatgtccaggcacatgcagtgcaatctctcgccttatcaaccgaggaaaagttttaatctccaatcctactattttgtttgagacattgtcaatttctaatggcaacgggccagtagagttttttcttctctcttctatatttaccaaaacattcctcccacggccttttcttgagtcaccacctatgttgccatcaaaaatgtatatgtatgaatatttgaattaacaaattaaacacttagatagaaaaataacaaaaataccagaagactcccacgcagccagtaccctagtaggatctaatgggtcatccccgctgccatctccaccatgataattagcaacatctgctgacattttatgctaaaaatagaataataaaatcatgcgtccttacttaagagaatacaaacaactcattaactcttaaatttgttgttatacaataattccttgagacaaaatacaaaaaaaaaatataactagtcatcaatagaaacagtactaaatctattattcacaatcatcatcactaatgaaatgcaaatttgttgcgggcgcatcttgaatttctttttcaagatgatcaataagcaaatcatcctccaggtcttgtacaatttcttcatcttcatcatccctactatcatcaacatttgtaaccatcacagaactttgagggacatctacaattcttggtggttcattagttcgttggacattcaactcccccaaatccactgatagtgcaaaatttgatgagtttgtgtca

SEQ ID NO: 135708 - DNA, 1538 bp, Cannabis sativa
tgtgagtcgacagactcggtaacaaaaacatataacaaatcatattatatcgacttgtatgtaggtacccatacacctatttacaaggcttaacaaatgagtaagaacatcctttactagggtacagcctctgtaccacatacactacgtaccgacactgtacgagtgttggtagggtttgtttcgtaccctgagtaccactaagtgttgtaccacacacatcctatactttcccgtacttgtgttggtaacaccataacgtactctttaaacaatgtacactataccaatgcactttgtaccacttccgtacaagtgttggtagtgtactaaccagaacaagtatgcatatatatcacacatacatacattcgcatatatatatatatatctcatatgttctacgctattcttacctcgtttccgaattcaagtgagttggccgacctgaacggaaaacctcatgctggatggatgccctaatcacataacataaatgggtaaatgacgcaccaaaaccctaattcgggaaatccaaacctccaactaaaggttctgctatagaaaactgaaactacaataacctaagtaacaaggaatcacccaaccaaggctttgaaactaacacgaatcgacgaaatggattgttcgggaaacctgttccagaattggttaacaggttttacaggacctggtaaaccggttaactgatttgcaccaggtttcctcaagcaatccaaaacttgtccaaatcttgtccaaacctcaccaaaacttccagaacacctatattgacctcaaacaatataatctaaccaacagaatccaaaaaaacatacaaaatcaaaatataccatggatgaaccaagcttgatttttcaaactcaaacttgtgcatccaccacaccaaactcctaaaccagctgcaagaacccatttttaacttaatttaaacttagaaatcgaatcacaagataacttaaccctaatatccactagaacacaaaattgcatacaaaaactaggttaatgcttgaataactaaagaattgaagtgctagggcttatcgctacctgattccccttttgattccttgaagaattccagaaaaagggatgaggattgctaatttccttctagttttggtggtggtcgagcaaagagagagaaagagaaatgacttttctcttaatttttttttcttttcaatttcttattttcttctaaatgaataaatcacttactgaataagtgtctaaaaaccagctgtcaaactccagatgagaccacctaatcgcttagaaaaatgaccaaaatgcccttggtgcttaaactaaagccaacataagcctaggggtaaaatggtcaaaacaattacctcgttcaaactcagtattctacttatatatttatcccactaagaaaaaagctctagacttactcatatgatttaaagagccatttaccgtattttccatcgtcgtcgagcaaaaatcataaaaatagcataattcacaaataatacctctagagttta

SEQ ID NO: 135709 - DNA, 954 bp, Cannabis sativa
caatgactaaaaatgaagtagtagcaacttgtagtagtaagcagaaaaaaaaaaaaaaaaagaatcaaacagaagtatattgtcactttatgttgtttccctctctgtgagattcctaatatggaaagaaccaatcaatcaaaattcttactagaatgaaatctaacaatgcccaccataaaattatatcacaataggaaaaggagagcatttttgtcaatggtgggagtgaggagaggccccaatcacatcatgtgtgtctctttttctttttgttgttcatataattggagtcaggaaggcactaagtcaaaaatataaatattttatgtataaagcaagtagttattacattcatattatgctgattctaagctaaagtgacattattaaatgagtggtaacaactaagtagagcacatataaattaaggagcccaaacatttgatgacataagatgtgatatgggttttatcaaaaaaatcaaaagtggtgtatataacataatttcattgtattcattatttaaaaaaaacttgtagtttaaacaaatttgtgaaatgataaattaagccacaaaattaatcttcgaggtactagaccactaacaacaagtgtgtagatttttattggatattttaacttgaattgggtctttattttatgttgttataaattgggaaaccaaaaaaacaacaaacaaacaaataaaatttttccataaaaccccaaaataatgtatgaaattgaacataagtaatttaagatcaaagatagaagattaatatcatatgaaaaaaaaaacatgaaattgaaaataaaacaattaataattgcaaaaagaacatagacaatataagaatacacaccttattttttccgaaaacttctttccaaattgttttcaagcgtgagctacgctgcaagttggtcatcttccagtttaaaatttta

SEQ ID NO: 135710 - DNA, 661 bp, Cannabis sativa
  modified_base (367)..(377): a, c, t, g, unknown or other
ggatggtactgttgaggaaaaaaatcgttattagtttagtctgattctacttattaaacttcgaatgaaattgattttgtatttaagctggaatggatggtctgaataacttaaattagttgtgtaccagttaaaaaatggggaatgatggatgctagatattattttggtattttattaacttattaaatctatctatgcagtgactacacaactgtggggatattattgttctttcatattaatgagtggtcctaattttattactaattatttctcttcgatataggagttaatccgttatttttaaataaatattttgtgatataaattaaaggatcatttataagcattatcttcctacaannnnnnnnnnntgacctttgaccacccaagttatgtatattacatatcgccacagcttagggctcgagtcgtgacaaaataatggtatcagagcaccggatttaattacctcagaatgtatcaccaaatagtttaaatttattttaaataattatagcaataaatatttcaatctttatgtgtataagacatatttatattattagcattcaaccctcacttactaatttgattttggttcttagacctaagaaaatacctctaagaggaaggaagacaaggagaacggttggag

SEQ ID NO: 135711 - DNA, 840 bp, Cannabis sativa
atagcatccatacaaatttctagaatgatatcattttttctccaatagtatagcatctcaatattttgccacataatatgtccacttcactaagcatcatctaaagttatactattagagatgctctaagcactatacatttttccttaggactcatttagtacgccgtataagggacgtattgtattaaataataaagaacactatgtttggataaagtaatatattgtattaattattaaaatcaaaatttttaatacaatacatgttgtattatttaatacatgacaaatggttcgtattagcttgtattataatatttacaaaggattcggggtcaacaccaatctttggcccgggcccggacccggatccaaactcagacccggacccaaactcaaacccagaccaaaactcgaaccccagactggactcggacccgaacctaacctgtagttggtgttggggtcgagtgtattaaaaaaaatataataacttttcacaatctattaatacaagtcaatttcaaacatagtattgtattaaataatactaatacaatacaatacaatctaatccaacccaatataatataatatagaatacagcgaaccaaacgagccattaaaaaattatcatgattaattatagtatatgataaaattaaaactttattttcccaaagggttggtattggccgttcattatttttttggtacgataacgtaatacgtgaaaatataattattttatttatataccaaagttaattttttagtgtattgtaatgatatttacaattaattaatagctttaatagcttaaaggtcttgggttcga

SEQ ID NO: 135712 - DNA, 712 bp, Cannabis sativa
atcgtcaaggagagactgagagttgagagtagccatttttgatgtagtttggagcttggggactatcatttcaggtctgtaaaagagaaacttaaaatatgagaacccaatttttttttacacatatatggcataaaaaaagtccataatagtgtaaacaattcaaaatatccataagcccaaagagttatttaaatatgccataaaaaagtaaacacttaaaaaaatcccataattcatgtaatttctactaaattattttggtaaattggtagctttgtattctggtgagttgagtgctaatgaaaattgattgtaggcagagacggacctactcctatcaatgtgggggctatagcccccactaacaaaggtattgccttttaaaaaattaaatggaatttttttaatttaataattatagaccaaaataataaaaaagatcccacaaaattaaataaatctagtaagagtaattataatataagtgtagatattttttattgataaataagccccacaaagtaaaaattctggatccatcactgattgtaggtgatatttattgatgctatctttgtaaaattgaatgctagctatactttacttgtaaagttgactgtaagtgtattttgcttgtgagagtaagaattgatcgtagatgtttcttgcttaattgattgtaaatgttgcttatgttgggttttatgcc

SEQ ID NO: 135713 - DNA, 801 bp, Cannabis sativa
aaaatcaaacatatacaaaccagtgtctatactggtgggcagcattcaatttagagattcatatgcaataataataataataataataataaaataataaattaaagaatgaatatacaagtttataaaatgttatagggaaaacaaaatccatagaaatgattaggggtgtatataaatcatctaatttaataaaaattgatcgatttaattataatcgatcgccaaatatttaattttcaattgtgatcggattagattgaatgttattttcgaatatccaattagatctgatcggatgttggatggagtgtctaaaaattctatactaacatctaattaaactaattagtattttcatttagttttaatgagtaattaaattttatattattatacgtaaaatatatatgtatatataaaaattaatattaaaattttattctttttttattattcttttaaattgaatggatccaatctaatacatactggacttaaaatattgaatgaatctaatccgattcaaaaaatactaggtctaaaatattgaataagcctaaattaaactaataaatatatttaaaaaatatccaacgaagatgttggatcgattggatgactaaattaattgaatcgaatcgaaagataaaatctaacatctaatatataattggattgaatctgaatcacctaaaaacattagatgtgatctaagacacgacaaaacccaaataactccaacctttgatgagaaggcctaagcatgatggaaaagaaataatagaaaaaaaaaaaaaa

SEQ ID NO: 135714 - DNA, 617 bp, Cannabis sativa
aatgatcaatcaaactaattacctaattatagatagaattttgaatttgaagaaacaagcgagcatcctcacgtagccatattttcttgaatcgtctttttctttgggagaatcatcagttaaatgatcatctttgtcaatactccttaaataaagtcgaatcgtcttactccattccaaataatttgaaccaattaatttatggctcgtgattttagacatcactagaatcatatcacaaacaaccactgattttgggtctgattttgactctaccataatctcgaaagcaaagacaattgaaaaagaaaaataaaaaagcgacagcataggaagaacacccaaatacgaagaagtcaaaagtatcaaaccacaaaataagaagaaccatcgaagacaaatgcaaggaggacagagatgggccaaacaaggagcaaaagtgaatcaaagcaagattcacggtcccacgcgtgtggggaagaactttgtcggtagtggcaacatgtgagcctcacacgcggcatttctagtgtcagactttgaggttttattgaccggcaactaaacagtccttcaatgtcgccggtaagaactgaaacacactccaaatagggttt

SEQ ID NO: 135715 - DNA, 512 bp, Cannabis sativa
aagaccctacttccaggctcaaccattcaaggtactaacaaaccacccgctttggaaagtcttacagaagccggaagtgtctggaagactcctcaaatgggccatggaattaagccagtttgacatacactacgtaccgcgtatttctataaaaggacaggtcctagcagacttcataacatagtgcaatgaagcagaggctagcgcaagcgtgccagcaccgcgaacctcgacatggaaggcattcgttgacggagcatcaaacgaaaatgaatccggtgctgggatagcaatgatatcgccaagcagactctggctctaggcggccgtgcgttttgatttcccagcttctaacaacgaagtcgaatatgaagccttgattgcgggactaaacttggcgaaagtcgtgggagccgcaagagtagaagtcttcaacgattcgcaactggtggtaaaccaagtctcaagagaatatcaaacgcgtggaaagaaaatggctgcgtacgtagcta

SEQ ID NO: 135716 - DNA, 784 bp, Cannabis sativa
ttaaggtaagtggttaaacatcttatgaattgataaggtggagaaatttttggtggatatgcagttcaaagatcattgagttgaattttgaattgtatccaaacatacctccctagaaatttgaattgcatattgatgaagatgtaaggtctatgattagttactaacacctacctaagtccttctagggaataccctagtgattaaggaaaatttcagaatgatggaatggctatgtacttagtgtagaccattactagaatcatagatgtcctgatcgtgaccttaaggaaagctagaactgttaactaaggttttcatgtgtgatacctattctaagtgattaggggtggaccatcctattgtcattaagataagaaagtgtttgttttcaacaaatactacttttctaagaatatgactaaatctgaaaataaattagcaaagtagaggagctaatgtttttcctgattccaaattgttctatcatcttattcgatataagatggtcccactacctttgttgaattaacacaactgaagaggataataccatttatgttcttagatagaaattcacagtactttgtcatagtggaagggcttctaggaactcaccctgttatgacttggaagacacttgtgattgaaaatctattatttgtttaaataagtaatggattgtaaaaataaggaactaaaaagtaaaaccaagagaactatggtcaaaaccattaatatggagtagctaaaagttttgtattacaaggacaagaaaggaaat

SEQ ID NO: 135717 - DNA, 1024 bp, Cannabis sativa
  modified_base (965)..(972): a, c, t, g, unknown or other
gagttcattttagaaacataacctatgttgccttcacaacctcgtggtaagaagaccacaacaagaactaactcaactagagtccatgatcgactggaagttcaaaatacttgcatgtcactctcaccaaaagacggttggtggaagtagaagcttttaaagaagacctgatcgggtaatagaatttccaactaggacgcaaaccaccatccatggtgtcaattggacagagtttgacaacctagcaaccctagtgaatgtaatcacaaccccaaagttgtcagggtttgaacttgatagagagcgacgatcaccactctctgaccaaatcaaagctccattaatccctctaaagttcatgaaccattcctagcatcaatacactgggaaggaagatttttttatctcacatccattacttcaaagtgtagactaatctgcaaggtgtaagagatgatgtcaggtgcagaatctttgctaccactctaacgggcttagcctagtgtggtacctcaagcttcctcctagatcaatcgactcatagaaaaatctagtagatgcatttggcaaccagtttactccatcaagacaatgccaaacaaagcccaacgatttggtagatgtcaagcaacaggacgatgagcccctcaaggactatattaaagggttcttagagacagtcactaagataaaaatacttagcgaggatgcaagtgtaatggaacttcagccggactcaagaaaatgagtcctttgtggtttgaccttcgtctcaagttagtcttgtaataccctaagggcccgtttggtacgcaggattggactggactggacaagattggattatggtgaaaggaatcctatgtttggtttaagaatagactagactattttatttattttcttttaggaaaagaaaaacttaagttaaaataaaaataaataataataaattaaaattaaannnnnnnntaataaataaataaaaatgaataaatcacagcaaaaaaataaaaaaaataaa

SEQ ID NO: 135718 - DNA, 540 bp, Cannabis sativa
taagactccattgcttcggtatccgctggtaggccaaaaactgagagcaatcacacatctctattgcttccatataaatttgcattaaggatttagatctaaaataaaggagaagaagaaaaagtattcactcttcagtattgatcataagtccttttgcaaataacaggcaaatttatattttaaagagcaataaattgacagtacacgacaaaaaaaaatgagtgtacaactaatagatagtataatgatcataaactttatcgaagagaaggaagaatttgcttctgcggtatgatgtcgttttgcagaactggacatcgaccaagatggcgttctttgctacaatgaaatgctgaaagagtttcagtctcttagattggtagagaccgattttggtaatgatgtgaagacaaatccaaaagtggttgctgatatttataatgggaaatttgaaattgtatacttaataaataataaaattggatacctaatacaatagtagacataatttgtaaagtgggatacattttactaaaa

SEQ ID NO: 135719 - DNA, 739 bp, Cannabis sativa
  modified_base (194)..(202): a, c, t, g, unknown or other
gacatgagaaaggttccctatgcttcagcaataggaagtctaatgtatcaatgttatgcactagacctgacatttgctatgtaataagaattgtgagcaagaatcagacaaacccaggagaggaaaattggactgcagtttagcacattctgaagtacttgaaatatacaaggcattatgtgttagtctacaannnnnnnnntttaaatcccgtaggctataccaacttaaattttcaggcttgtcttcatgacaagaagtctacatctgagatggtatttactcttgtggtggagcagttgtttggagaagtgctaagcaaactgcaacatcagactcttccatggaggccgaatacatagctgccgctgaggctgctaaggaactagtctagcttagaaagttcttcaagacttggtgttgtttctagaatgaaaaaattactggttttactttgtgacaacactggtgctatagccaacagtaaagagcctcgaagccacaagacaaggaaacacatagaaaggaaataccacatcattagggaatatgtggcaagaggggacgtactggtggacaaagtggacactatagataatttagctgatccattcaccaaaattttgattgtaactacatttgaaaagcacaaactgaatcagggattaattgaaatgtattgattattttatgttagtgcaagtaggagtttttagggttttgtgccctaactaaaact

SEQ ID NO: 135720 - DNA, 699 bp, Cannabis sativa
aataaatataagaatagtttcattcgttcttgttttaattgcagcaacgtctgcgacttacaaaatcgcatatcatctatccatattccaaaaagcaagctcgtagactctgtggtgctttaatcgcataatgggcctttgggcgtttaaattaacgaatgtctgcgatcatacttgatgacatattcattccatttgttaacaacttaaaacttgtaagttcttaaggagtcgtcgaacactagtcattcagactaaacttatgtaaagaagcgatctttacttgtcgcaagagagacatacttgctcatcgcacataagggttatattttattttatttacattctcatactataccaaatacaataattatgattacaatgttcattttaactacaaactaaacattgtaattaattcctattactatttttattccattccattatcattactattattactctgttataccaaatcaaacaccacctaatatctttttatcatggacaaaaatgaaaaaaaaaagtctaccctaatatttaagtttattcttgacaatccttacgaaaaaaaaaaaggtatttgattattgttgttttttttttcttttttgataaacagtctatttggttattgttgaaatgattaggaaagaacctttttcttgcaaataataataataaggctaattaaga

SEQ ID NO: 135721 - DNA, 667 bp, Cannabis sativa
gggtacgagttgggagacaccccgagatagctttccaagcaaagtgaagaaccttggggggaactttaacattccagagaaccctccacagttcagactccaactgaagaccccatactcctttcaactcttggagatagcagtaggaactctctaccgagtaaaacccattcggctctttaccccaaaaccaagaatcaacagtaacactatcacttagaggaacctacattatcaaatcaatatctcttgcgtcaaacaaatcatgtaagacctcaagatcccattgcttacaatcgatgtgcatcaactgcgaaaccttgctatgagtcaacaccggatgatcataaatgacacaaggattcacatcaaaaatcagccaagggtcattaagcacaagggtagacacaccagacctgattctccttctagcaccctgacgaaccagttgttgggattcaaacacactccaccaaataaaacttgggttaggacctatctctgccgtaaggaaattaccatttggaaagtaacgggccttgtaaacgcatcccacaagagagtcttcatacaaaagaagacgccacccctgctttcctaataaggaaagattgtaatctcgcaaattacgaaagccaagcccacctgaattcttgcttctacaaag

SEQ ID NO: 135722 - DNA, 577 bp, Cannabis sativa
  modified_base (324)..(326): a, c, t, g, unknown or other
gttgggcaggtgtggttgagttttggttcgagtttggggaggaaactcaaaattgcaaccctgccagaaccagtcgaccggtgggttctggtgcaacagaaccggtcgatcggtttaggcagcagggggaaattttcagttttcttcagggccagttttattgctcggggtgatttccgtatctgggatagattgtttaaaagttgtagaacctattttggagctaatagaagatagggtttaccgattatgggaattagagttattctcggaatgattaatttaagttatttattgttgttgtcgtgacataggacccgggannntcaagctttgattccacctaggtcagcatgtacgctaaatttctggactgaggtaagaaaatattacataccgtatatgtttaacgttataactgttatagtctcaattatgatcgaaattctggtatgtgtatattatgagttaatcttaatcgaggataacgatatgcattggttgtgactcgattatgatcaagggaaatgataggaaacgattattatcgttgtgactcgattattatcgagggaaa

SEQ ID NO: 135723 - DNA, 756 bp, Cannabis sativa
tacatgttaaaataaaaatttattttatctcttacattcagacatagaaaataaataagagaacatacatcatgttgatttttaatcaagtaggggcattaatagaaagagattaatgtaaatatgaataaaaattatttatatttagtaataacattgtttgttgttttacagttgttttaaagttgtaaacacgttgtttaattttgttactttttaaacatgttgatttcacgttgtttgtacgtcaaactacagtagttaaaatttgtaggttacttaaattatatctacaattgttgtcatacttttaaatcgtagcaaaatattgttaacggttaaaaagatctactaacaattatcatatttttttctcaaaaaaaaaaagaagaaaaatataattatacaaatacttaatgtataaattaaaaatataatataataattattttttattgtactaaattatataaaaaaattaaataaaattataatgttcaataaaagatacatataaaattaattaaaaaaagttttaaaaaatatataaaaacaaagttttcttaaaaaatattgctcttcagcgcataatcaaaactaagcacacttctcaatcactaattcatacccaatagttcgaaccttcttggaagattggaatctttgcttgtacactttcaatgtatgcaactcacttcactctactaaaggaataaaaatggacgacaagcctattctgatcaacattgaagtaca

SEQ ID NO: 135724 - DNA, 1153 bp, Cannabis sativa
  modified_base (874)..(877): a, c, t, g, unknown or other
aatccagagaagactcggcgctttaactttgtttctccagatggactaaagatcttataattttgcttctaaaactttttagctttaatttttaatttttgttagcttttttttttttgtttattagccttgaggactaatagtattttgtcatttagaccttttagaattttgttaggaggaataaataatatatatatttttttttattttgtggctgcatccaatttttttcagattgcctacgtacccttttaagggttcaagtcgtttgtagttctttacaattttatttttttgagttttgaggagataaataccatgggtaaatacctttcatcctgtcttcttttttttttaagtgcgctgtctacaccatgggtaaatacctttttgtttaagtgtagaactttttgatgaacttcccattaacacacggataaatgcgtcgaccttctgaatctaaaagttcgtatgcccctcttaggaagaccttagtaacaacataaggtccttcccattttgcctcaaatttgcctttcatccttctagttatgacaattggtcttttcagagtaagcactagatctccaaccgaaaaagatcaaaatttaactttcttgttgaatgccccagctacctgggcttggtaaatttcgagcttttgttgaatagcaagtcgcttttcatctaaagcttcaatctcggctagaccgacttgcacattttcatctaggtctgttacttgagtagcaattcttaatggaggtatttgtacctccaatggtaacactgcctcagacccaaacaccaagttataaggtgtgcaaccagtcgtagtccttaccatggttctataagcccataaagcttnnnngaggcgttcatgccaatccctcttattctttatccttgtcttcttcatgatttttcataacactttgttaaatgcttctgcttgaccatttgaagacgggctgtaactagctgagaaactgtacttgaatttgtacttgttcatcaacttgaccattgcctcacatttgaaataaagcacattgtcggagataatttttgaaggaaccccgtatcgataaattacgtgggtccttataaaatcagcgacatcttctgcccgtacttcttttagtgg

SEQ ID NO: 135725 - DNA, 907 bp, Cannabis sativa
aggtcccagtcccgatcccagtctgagttctagtcctagtccaggttcaagtctcggtcctagtccgggtttgggtcccaatcctgatcttagtccgggtcccactcctgggttcgagtacgagttatagtactagtccacgtttgggtcctgatctaggtctgggtttgggtctgatctgagtccaggtttcagtctgtgtcttggtccaagtcttggtctaggtctgggtctggttctgagttcttgtacaagtctaagttctggtccaggtctcgagtcacttggcccaagtctgggtccgggttcgggcctgggtcctggtatcgatcccggtctgggtctgggtctgtgttcagttatgcgtctagatccagttttgggtccaggtccaattcctattctagggtcctgattctggttcttgttccgatttcgggtctcgagtccgagttagggtttaggtcctggtctggaaatggttccaagttcgggtcttggtatgattccaacatccaaacaccgactacgggttggttccgagccccgagtcgttggtaaagattcagatcccaatcttgggtcccagactcatttcaattcggatcttaggtcccggtctgtgtccgtgtcttggtccgggtctggtatcgagaccggggttaggtcttgggtcccagtcccagtcctgggtcctaattgttgttctaattttgagttttggtccccaatctaggtctgggtcctgggtctaggtttgagtctccaatcccggtctgggtcaaggtccaagtttgtgtctccgttcgcgtttgtgtcccgagtcccgatccgagttttgatttaagttcgcgtcccaatccgggtttgggtctgggtcgtagtcagattccagttctcgaactca

SEQ ID NO: 135726 - DNA, 555 bp, Cannabis sativa
acattaccaagaactcatagtgacaatatctcttctaaaatacattttttggaaaatcttcctcttcattttttatgaaatatggatttaaaacgatgtttgtgttgattttgtttgtttcatgatgttttatgtgtatatttgatgattgtgtggaaatcacaatgtatgttgtaaaatattttttgtttcgttctgaaatttttttactggaaagtaaatgaaaaattaatgaatttaggcttttacacaactcaatttggattttttatgaattagttatgattttttgaattcgaatgaaaatatctgaaaccaagcacacacatgcgtgcacggatggggatgctcgctcggacaagatgccttcagacaaggtgatatttgaattttcccctcctgactgaggttttcccctaatacaggctgcttgcagcctctccctcacccatttgcaacctcatgtgcgcacggggagtattcaatgcatactcccctagtgcaatcttgtttttgtgatatcttttgatccaaaaatcatttttcattgaaaca

SEQ ID NO: 135727 - DNA, 801 bp, Cannabis sativa
ttagagcaatcattttcttgatttaaaataataataaataaaaggtagtacaaatctaattaattaatacaaagctaaagaaattaaaaaaaaaattaaacaacaattccagctcaccacactcaaaagcaagaaactcattacatgataccaccgactaaatagctctaattttttttaattcttcttttatttatttataataataatattaataatttaatattttttttttcaaaacaatttattaatttaatttaaagcactgaataataaattagtgttttactttcaattggtctcactttgcagcagcaacttccatgttggttttggtgaatgtatgccgaaaatttaataaataaaaataaacaattaaattaactttactaatactaaaaaaaactctgcatttaattaattatttttgggttaatattattttggaccctgtatcttgtaaaaattactaatagtattttgtatttttataatagtacaaaatagtatcatgaattcaatttttgataatttttctttaatataactaacttaaaataatttttagtacgaacagatacaaaaaattttgtcataataactctaaatcgaattattattaacttttattttaacaaaaaaattagttcatagtactatattatatcattttgaaaaatataaaattaaatttattatttaactaaacagagaatcttatcgataatttttacaaaatacaagatccaaaataaaatttatcatagtagtatataatgaattattttaaactataagatt

SEQ ID NO: 135728 - DNA, 1676 bp, Cannabis sativa
agaatatttttgtcaattaaatatgccaaaaatggaattaacatgttatattaatttaatgtatgtgttattttattggatttttcatttttcgttttttagttctaatttctgttacattcattgttgtttttttttcctgtttttgttttccagatgtgttgttgtttttcatttcaatttctttatttgatcagttttcattttttttatagttttttcatagtttttttgtatagttttaacaccttactatgtgtgtttgtattgaaattgttgttatctagttgtttgttgtccatgtatacatcatcaatgggtaaaaattagaactatcatggatgtttatattgaaggagtttgtcctttttgttggtttgtttttagttattttgtagttttattatagttttgcaacttgcatatgcccattcattatatttactttctttgtacaatgcaggattggattaacaaattcagtcccagtgatttctttagaaccaagtgcgtatgtactagcaatttctctgttattgctaaacattaagaatactttatctgggaatttgttaaaaatattatgagacacgcagtttgggcatttcttagatatccctaattttgtttttcatcccaagtagttcacagccttcttttgagggaggtttaccagcccaatcccaaagaattttgggctaaggttgttggtcgttgtatacggtttagcgccaaagaattttacttgataactggtctggattattttggggattgcaataaactgttgttttcccaggaatcaaaccagttaattaaagtctgcttccctggcataaaatgattgatcataagtctatagaggatgctttattgtggggacaggatgaatccccaggattgaaactctctgtgttttatttcatccaatgtttccttcttagcaatactcttgataaggaagtttctaagtttgatcaaaagagttgcatccagtattccaagaattcttaattggaccaatgaggttggggccgaaaatctaacttttcgggacttgaaaggcaagatttttgatctaccgttgaagaaggcgattctcattttccttactgttttatctttgttttgtgccagttttttaatctttgttattttttttttcatgttttctatttttgtttctatttttcaattaaaggttaagaacattcgtccatctgatgaagagaggcagaagttgcaattggatggcttatttttagatgaatctatcgatgatagtggtacaactaagcaaacattcgggagtggttcatcttctagaaaatctgattcagatgacatagaaatgttaaaataagttggaattggtcatttccagtcaagaattcttgtccgaagattttatacctttgaggtgttttgttgaccttaatttcaagtctatcatgattgtaattaaggatatacaagaaaaagttaatgccatttatgatcgaccttctgttcaggtatttattttcacagtttttctttcatattttttcctattattgttggttgttttcctgttttatttcagttgcaatattgttttcatctaggttaagtcatttgatgaatttgttagccaagattgtgatgatgatgatgatgttggattttgtgcccta

SEQ ID NO: 135729 - DNA, 1145 bp, Cannabis sativa
tttttattaaaaaaatgaatagtatcaatgctataatatagaatccatgcaaatttctagaatgacatcattttttctccaatggtacaacatttttaatattttgtcgcataatatgtccatctcactaagcattctctaaagttttaccattgaaaatgctcttatgactaaaacataatatttagatagaaattatcactaatttagttttagtcacatcaaatattgtgactaaaaatacatttaatcacaacaatttataatttttgtaactaatacttttagccacaaacctttcaatcacaacacgataataataatttaaaattaaccacattttattttatttttagttataaattttattgtgactaaaactaggggtggatgtatgttaatgactatagaggccatggcccccctaagattatagtaacctacttttatatgtaatttttattttaattaatgtgtatcttaatatgtaatatatggtagcccaattaaagttaaataatttttttaaaaaaaatatagaaatagttgaatataataaataatctgtcagatacgtacctactttatttactatatatattctctaaaagaataatttgttttcatttttttctaagtcattttttttcattaatagtaacttagcaagacacacacatttttttttttattttttttaacaataaaaaaaaaagtagaaactaaaaaattttaaagaccttcaaaatagataattaagtattattattcttttcttcccctctcatagatatttaggtattacgaatctcttcttcttctctcattcatatctattacataagcgcaatgaccaactaaaagctgctcaagctacaaatattgctcatttacttgagattgataaactagatagtgggaaaggactcaattaaattggttctttacaaagagcaggtgatactcgttggagttctcatttgaaatctatttctagtttgataaagatatttagtgcaacattgaagttttattgaatattacatattgaagatggtactacttttgctcaacgaggagatgcggatgcagcttatgagtcattaacttcttttgaatttgttttcattttgcatcttatgaaa

SEQ ID NO: 135730 - DNA, 990 bp, Cannabis sativa
  modified_base (915)..(952): a, c, t, g, unknown or other
aaacaagagaggaaataccacatcatcaagaaatatgtggaaagaggagacgcgctggtagaaaaagttgatactaaagataacctagctgacccattcacaaagacattgacagagactatattggaaaagcacagagaaaatctaggtttagttgaaatgcactaattgttttatgttagtgcaagtgaaagtttgttgggtttattgccctaactaaaattctatttcaatataatctttaatttcattatcaataaaagaacgaaaaattattttattacttgtttagtgtaatgcttggttcacatgtttatttcatgattatatgtttgatatataaattctattaaatccttatcacattattattcataattattgtgttgtctacatagtagaaaaaaaattaagattatgtgattaaactaattagtcccaagatttatcaataactggatttacactggtatgataattaacaaattagtttacttacacttgtacagtagaatatcttttccaaggtattagtgaagtaagcttgcatcagatgtatgattatacatccaactagactgatattcatagtggaaaagatatcataaacctaccgtaatattttttctatttaaatatcacttagttgatcttagatcaatgatctcaatcctgagatgattaggttttgacttaaatgtactaaatgtgttctttaacttgtttgttaaagttaaccaattggattggcccaacacttacaacttgggaacacagtatgaaattgagtgggagcgctaatcgtagatataaaatctatagcttttataaacacatagaagtgaaacgatggtttctttagagcctggccaaatgagtttaattggtggagtacttatttcaataattatattnnnnnnnnnnnnnnnnnnnnnnnnnnnnnnnnnnnnnntaaggataaaatacattgaagagtaaaacggtaaattt

SEQ ID NO: 135731 - DNA, 801 bp, Cannabis sativa
tttaaaattaatttttaatttaatctaatttttaaaattaaaaaatttcaaaatatctacatttgaaataaatgtattttgaaatttacattaatataaaataaaatataatctgaaaattatactaatttaagttgatctaaaattaaaaaatttccaacttacatatatttttctatttaattaaatttattaaaatagaaacaaataatcaaatagcttgaataaaataaactttattattaattctaatttaatatctaagaaaaaaaattctaatttaagttggtctaaaattaattaataaatcaattttcaacttaaatatattttctattaatgaaatttattaaaatagaaataaataattaagtatcttgaataaatcaacctagttattaatgctaattcaatatatataaaaaatattttaatttaagttggtctaaaattaattaataaattaatttttgacttaaatatatattagaaaatataattagttactaaaaaatttctatttagaatattttctttaaaccaaatgtgttttttctaaactagtttgaaaataatccaatgaaataaattaattatattgctaatcaatttttattaggttaaactaatataattagtctaatacagttatttaaataaggcacatgggccttcacagttggggttgttcatgtgagtgatgactagctccaatatgtcgtacccactattattatccacctaactctcacacaaggcctaaaagagaggaatttaacctttaattaaataattgttatt

SEQ ID NO: 135732 - DNA, 660 bp, Cannabis sativa
  modified_base (223)..(229): a, c, t, g, unknown or other
caagtgcagccgtcaaccgtggtgagagaaaatcggattttgaaatattatatgtcagagcattaattagccgaaaaccgaagggacgcccagtcctcctcacatcgagtctcaaacagacgcacccaacacgtgtccccatccaaaggcagaagcagctcggataaagtctacacgcaacttcggaagtcccgtacagatttgggggcaaatgttatcccannnnnnncactctgacgtggcatcacaagatggtgacacgtgaaatcaaccttgagtatcagctcagagagtatatcccgagcaggatgcctcgctggcatacttgaagcaaaccgatcagcgatccgcgtagaggaatcaacacttagcgaatccagctttcgcattatgagtcatcaagaaaattccaataactcggggatcagattacagagatatggcatacacacaataccacgatcagtgtatactgcgtcaatcccacgatcttttctgtttatatccattgtaacgagaagggaaatacttcctgtccaagtttacagcccaataaatagtgatacatgttcactgggcaaagggtgggaaacagtttagtcgagaccttaccctaaatatattatctaagaattcttattcagagatactgttgtaaga

SEQ ID NO: 135733 - DNA, 647 bp, Cannabis sativa
aagttgtatgccaaattcaagaagtgtgagttttggctatcttaagtgttctttcttggacacattatcagtaaggatggaattaaagtggatccggggaaaattgaatccgtcagggattggccaagatcaaaaacagttacagaggttagaagtttcttgggtctggctggttattaccgtcggtttgtagaggggttttctaagatttcaacgcccttgaccgagcttactaaaaagaatcaacgatttgtgtggacggataagtgtgaagcaagctttcaagagctaaaatagagattatcatagccccagtgttagccctaccttctgataaagaaaagtttgtagtctattgtgatgcatctagacagggtctggggtgtgtactaatgtaggctgatcgggttatcgcctatgcctcttgtcagttgacagaatatgaacagcggtacccaactcatgatctagaacttgtcgcggtagtgtttgcattgaagatttggcagcattatctctacgaagagaaatatgaaatttttactgaccataagaacctcaaatctttctttactcataaagatttgaatatgagatagaggcgttggttagagttggttaaggattacaactgtgaaatcctttac

SEQ ID NO: 135734 - DNA, 1227 bp, Cannabis sativa
tctgggatcccatttacaaaagttgaattatacatgtacaaaagtctgtcgcctagcgactatacagcaaaagccttgacgtcgcaaagatcggcctaaccgtcccgacatgtacaacctccatctgctcgctctcacggctgctcagccttagccttgcccttacctacacatggaaatagcaagtgtgagtcaaaagactcagtaagaaaagcataatataaaacataataaaattccgggttataatcaggcacccatacacccaaccataaccctatccccgtgtcccacacggtactgagtcttgaacgttcatacgacaatactatcaaccataatgtcagcctatactcaatatgccagttatactctagctatattgatgtgacagcatcgatcaatattttagccaatatacatttatcagtgatcagtataactctatgtatactattactgctatcaatgtattctaataggcataaacaacatgtctgctaaacatgtaaatacatatgcatgacattatactaatcttaccttgttttaaaattcaagtgtgccagccaacctgagtagaataaccgctcggcatattacaggcccctaaatcacttcgatcataacatggataattgacacgctaaatcacaaccggggacttaagttttaaaccaataacctacctactgtaagttaacatggcaataccctaaactaacagagaatcaaccaacaaaagctctaaaactaacatgaattgacaccacaaaattttcggggaacccaccagaaaattcggccaactggttttacaaggcctgtaaaaccagttaaccgatttacaccaaaaaacccccaaaaattccaaaacctaaccaaatcgattccaatctttaccaaagcttccagaccttcatattataccccaataaacatattccaagcaataaaacaactacacaagctcaaaataataatcaccattaaagagccaagcttgagttataaaactcaaagcttgctcaaacaacactacagccactcaaaccagccaagaaaaacatatctaaacataattcaactttagaaaacaatatcaaactccaacagcaaccacagaactgtaaactaacaattcatgcaaaatttcttacttaaagttcaagaaaactaaagaagatgatgctaagaccttacctagagcttgagatcactaaactc

SEQ ID NO: 135735 - DNA, 507 bp, Cannabis sativa
atggtctcctcaaaacggttagcaacctcgagatccttagtcaacacggtgattttcttctcaacggaaaacaacttcttgttggcttcgcccaactctaattgaacacttcaggcttctgccgtggcttctttagcttccttcttggccaactctgcctcctccttcaagggttcggacaaagtcgcattcttagaagcagcagacttagcgtgtgagtaagtgtagcccaacttcagactggcctgacagaggaaaaactttagcatattgagctaagtgtggagaattaaagggaagtatcaaaagagactttccctggtgaactccttcaagactccgcccaccagcacatccaaagaagagtcattgtcagcaccagccagttgctcactgacctcaagaactagtcggttcaggtaatgggccagcatctccttgccctttttggccttctggaagcactggcaaaggtggagttgtgcctgcacccgttcaggatcactc

SEQ ID NO: 135736 - DNA, 1070 bp, Cannabis sativa
ggaaaaagttctttagaacaagacgattgctttggtcaaagtgctctggaagaacaacaaggtggaggaagccacctgagagttagagtctgacacgaggattcaatatccagagctattcaggttagatttcaaggacaaaatccttttaacggggagataattgtaatgatcgcattagtaatttagattagaaaaggaaattaacactaatttctgatattttttttatagttatttatgaatttaattatttgtgggctccatttgtagaaatggacattagagttataatttttcaattctggagattttattaaactctaggagtattatttgacttatatgtgaattatgcaatttttgtaatttttgatcagcaacggaaaatgcgatggatggctagtttgatcacatgggtaagcttagaaccttatttcttagtaggatatattcgtgaaaaaataaaataccgaggttgtgcggggttatggtttttgaccattttacccttaggtttgaaataggctaaaatttcacattaagagcattttatcttttgccaagggaatattttggtggctgtcctagagtgtgacacatggccttctatttttcaggaaggattagttaggaaatcctttttcattttgaggaaattaaaggaaaaatcaagaaatagaactcttttcctcttctccttctctctcttcgaaccagccacaaaaccaggggaaacccattcaaatcctcgtacattctggaatcaaactgagtatcaagtgttcttgaggttaaggtaatccttagttctttgttatatgtgtttttaagctttgaatttggtttcaagtagtgatttttagaattggtggccgttagggttagaattgcttggggttcgatttttttgttcaatttaagttgattgaaggttctggtagctggttttacttcttttatgttggattttcacaagtttatgctttgaaacctaagctttgatctttaatggcataatttgatttagtgtgtttttttttttgggaatttctggttggaatatgttg

SEQ ID NO: 135737 - DNA, 792 bp, Cannabis sativa
aatagttcagggggcattttcaatggccttaaaagttcagggggcgtgatttggtacatgtcaaagttcaggaggcaaaaatcttaattagcctaatgttattgtattgtttgagatacattgaggttaccttttttttttaatctaactcatatgatgtttcagatactattcaatttatttacaaattattttataaatctattaaaatggttttataaaaataaatctttttatttaatcttgtaatgtctaaatataccaataaaaaaaattagtaacttattaagttttttgatacattacattttatttaaagtaaatcgtttattgttatatattttatgaaactatgtggttttcttataaaatattttgaaacttattaaattattctataaaataagctaatgtttaatataatttagtaactattaaatattaagagagagagagagagctaatgtataagattattttataacgtttagaaaatatataaaaaaaaattaaaagaaaaactctctattaaaaaaatgtaataaaaaacaatacatagcaaaaaaataaaataaaataacaaaagacacaatttttcaaaaaaaaaaacaaaaggtttgacaaaaaaaaaaaaaaagaagaggaatttacgctgagtggcgtaatagtgtaaaaaataccacatttaaaactacctaattaattttagaatatatcgttgtttaattaatttcttttaggaatgtgtatacgtacttatattctctctcttcttatatgtgttatgtaaca

SEQ ID NO: 135738 - DNA, 557 bp, Cannabis sativa
ttaattaaaataatgtatacaaaattgtaaaatgcccattaagtaatgaagatctagtttgacaaagtcaaactaaaattatatatggtatgctctagatttatttttatttatttaattttataaaaatctattttattttctttttttaaagatatatatatttttttctctgataatattaatttattttgtaagatatgctattttagattttctcaattatgtacaaaatgataattttttctcttactctttcattttttatagctactacaaagtgatctttttcaactaccaaaatagtgaagattacattctccaaaaagatagaatgaatttaagtgattgtttgttaatatatattgaaagagaaatcgtcaaaaaaattagtataaattcacttatcgataacttttgtgatatacaagaaaacaattatgtattttaatttaattataaatttaataagggatatttacaatgaaactctcataatatttgcagtacacatatgatcctaataaaaaaaatagcgacaaaattatcttatctta

SEQ ID NO: 135739 - DNA, 787 bp, Cannabis sativa
  modified_base (708)..(736): a, c, t, g, unknown or other
aatgaacgcttgtacaatgtgtcattaaagatcgcaaatcgaggccctcttcttcttacatccactcttttcttcaagtcttctagcaagactcccttttggatgtaatctttgattggctgacgccagtcattttcatttgcactatccaggaaagttatcaagtagactgtatttttttcttcaactctttctgtggattgggataatacatggcgttccccaatggtaatttggatatctctttcttcctgaagtgttagtgatgccgctaaattggctaatgcatcagctttaccattttttgatctggggatgtgatttagggttatatcttggaattggtcaagcaagtatttagccttttcatgataagggactaaattctcatgcttgaccgtaaattcactgctcatttgttaaataaccagagagaatcaccaaatacctccaatgactatattttcatttcaagtacaacttctaggccaacaactaatgctttgtattctgctacattattggtgcatatagttagaatatggaaagagtaaggtatcaggcctcctgacggtgtcacaaagacaattccagcacctggcccactacttcttgctgccccatcaaaatataattgccatgatgaagtatcaactgcgaagacttcttcgtgaagaagatcttctcgcaactctatatcatctggannnnnnnnnnnnnnnnnnnnnnnnnnnnnagcttgtccttttattgctttttgcgggacaaagttgatttcaaattctga

SEQ ID NO: 135740 - DNA, 1965 bp, Cannabis sativa
  modified_base (908)..(923): a, c, t, g, unknown or other
ttaaatttgtttaataaccattcatgggtaatacccattaaaaaatgttccatatatatatatttaaattatatatatcatatatataataattgaaaatattaattattttaatttaaaattcaaaataaatatcatataactaaataacagattttgaatacatttttttattttatattatcttttaatttaaatatattatcctctaatatcctataatatatttaattaaaggtaattatcattttattttgatttatcttattaaatgaataatcaaaacaactaaatgagcttttatatgtcaccctacacgtgtgggccatattttaaagcccatttttttttttaattttaccataaataaaatttattatttattttgcaataaataataattaatcaattttcattaatctcttatttcattaggattaaaataaatattattttacactaaaataatatatttctctcttcaaatattatttaagaataataccctattatatttaagtagttaatatagttttatcaaataaaatgaaatagttgaatatcattttaattatttaattcataattaatataattatttaaaataataatttatacaaaattaatactttgcccataaaaattatttctcatagaaattaattctttctcaattcattcttcaaattaaatctcccatgtacaatattgtatagatgtgatctagggaccatagacttatattttgaagctctaataaacaattaattaattattattaaactcttcaatagaataatctgatttattaagtgttaaaaaatttaaagttcgggtagtttagctgccgatatcccaaaaagaaaatatatttaaaacttttttttttttgattttttaattttttnnnnnnnnnnnnnnnntttttaaaattaatattacgtggggcacgtgtacaagtgtgtacacgtgggcagtccactgtggcactatgatttttggacggaggggtacagagcaaaatgaaatgggagtttaggtagttttgcccctaaaaaatcgattattgtagttaagtgttaaaaaatttaaagttcagatagtttagccgccaatatcccttttaattattcaattcataattaatataattatttaaaataataatttatacaaaattactactttgcccagaaaaattatttttcataaaaatcaattctttctcaactcattttcaaattaaacctcccatatatagtgttgcattgatgtgatctagggaccatagacttatacctagaagtcccaataaacacttaattattattaaactctttaatagaataatccaatttattaattgaattattactccacaataaatctgaaattatactctctgacaatgtagaattatgtttacataattcttacttgtaatctattgatataatcaatataagtagttcgccttccaattattagttcataattagagttggtcaaaataatcattttattcttctaattatctcttgaattccttatgtaccattaattcaatgtgaattgttaatctataatccaattatagtttggattcaactattagcattcccagaattaacactataagagaattaatattcgatcctctcgaaaattttggatttcattattgtataacatgtttccacccactcatgttattaagctcccaaaacagaataagtaagaactatcttctctgagaagctttaacgagtgaatcaaataactcaatgtacacaaataggtattcatgtatacttaggattcagattgatctactaatgatcattgttgtgatatgaattttatgataaacgacattgttgcccctaattttgcctaatatacgtggaccaaccaaacaaggacacgtggatcaagcaatgtacaatccaaaatatttgctaagtc

SEQ ID NO: 135741 - DNA, 573 bp, Cannabis sativa
  modified_base (316)..(317): a, c, t, g, unknown or other
ttttcagtatgaatttactttgatctacttcaaaaacattaaataacaacctaattatgaaggaaaacatttaaaatattgatagcttgtatttttttttggatagtatagtataaacaactcataacaaactttactacaacttcaaaataacttggtttaacatagtattttctagttaaggataagatgtttcaaaacaactcaaataaaacttcataacatgaaaataactttttattccttttttatactttgaaatttattatgtttgtactttcaacttttcaattttatttttaatgttgaaaattanngaaagattaatcctactgaataaataattcaattatttttagatgggatgggtcaagatgttatgatacaatattttttttctttttctcttgtggtcaacacaattatttctttatttcattatttattattcttgaaaataaagttacatcagtttctcattatttttgtgttgttattgtattttttgtacatcttttattttacgatcatggacaaccaaaaaaaaagtaacaacaacgttaaaacaacata

SEQ ID NO: 135742 - DNA, 545 bp, Cannabis sativa
atttatgtttaatatcaatctattcttttttctcctaaaaattttgtcacaaacataacaacccatcaatttaatttttattgttaattttaataataaaaagaagataaaagtgacatcctctgtcaaattaaaattttttaaataatataaaacattaaataatattatatagatgaaaactttaaagataaaggaaatgataaaaaaaaataggagaagaatgaaatgatgggagggataaataatggtaaagtgagtgataatattgagaaaaaaattgatagaagtgacaaaagtcgatcacacaatataaaaaaaaaaaattaattatataaacacaatataaagaaatttattataccttgatacagtaaaaaaaaaaaattgaaaaatattatcatttacacgacaaatttcatatgacagtgtagaagaaaatttttaaacaagatacaatatatatgtaaaagttatacggtaattttaagtatatatgtaaattatataaaaatttataggtaaatttcctttaatttaattta

SEQ ID NO: 135743 - DNA, 510 bp, Cannabis sativa
ccacctcgacggttctccgacaacctccagccacatggatggttctccgacaacccccagccacctcgacgacgcctctctctccctcggtgctctcgtaagtcctctcctctcctcatttctttttataaaaaatattgttttatttttccagatctaggtgttttgtgatttggaaaaatacctattttggtttaagaaactatattttggtgttttgtaatttgtatttttttttcttttcaggtgagctttcattggttttatgtggtggtggttttggtgaggtgttggtggttttggttaggtgatgatggtggtttctggggagagagagagaagagagagagacagctatagtgtaaatgaaagaaactgaaaaaaaaaaaaaaaaaaaaaaaggaaaaagatacagacaaaagaaaaaggaaaagaaagacaaaaaaagaaaaaggaaaaagggaaaaaaaagaaaaaattatttttttatttataattattttttaattt

SEQ ID NO: 135744 - DNA, 1219 bp, Cannabis sativa
  modified_base (776)..(784): a, c, t, g, unknown or other
gagtttcaaagatatacgttgtaatggatatcatattgagacaatagatgaaaataattttgagtatctttgcattacatctattgtttaaaaaaaggcatattagaaaaattacctagtttgtctttaaatttgtacattacacgtataagtataatagaaactcatatcattatgaacgagaagtttataaaccagaaaaattcatttattgtttggcatgactggttaggtcatcccggttcaatgataatgcgtagaataaaagagaactcacatggtcatccattgaagaactagaagattctattatctagtgagttctcatgtgctgcttgttatcaatgaaagttaatcattaagccatcaccaataaaagttggaattgaatcccctagatttgctgaatgaattcaggcgacatatgtgggcctatttgcccacaatatagaccattcagatattttatggtattgatagatgcatcaactagatggtcacatgtttgcttatcatctactcgtaatgtagcaatttcaagattgcttgctcaaataatccaattacgagcataattccaagactatacaatcaagataactgtcttgataatgttggtgaatttacatcacaggcttaataaatattgtatgtcaatatggataaatatagaacatcttgtttctcatgtacatacacaaaatgctctagcggaatcatttattaaacgtctccagttaatcgcaagaccattacttatgagaataaaactcccnnnnnnnnnttggggacatgctattttacatgctgcggcacatgtacgcattatgccaacatcccatcacgaattctccccttacaattagcttttggtcaggaaccaaatatttcctatctaagaatccttagttgtacagtatatgttctgattgctccaccacaacgaacaaagatgggtcctcaaaggaggctgagaatatatgttgggtatgaatctccatctatcattaaatatctccaatccacaactggagatatatttatagaacgttttgctgattattattttgatgagacatttttcccaactttagggggaggggaaaagaaacagttggaaaaagaaataatatggaatggacaattattatcttaatttgatcctcgtacaaatcaatgtgaacttgaagttcaaagaataatttatttgcaaaatatt

SEQ ID NO: 135745 - DNA, 670 bp, Cannabis sativa
  modified_base (44)..(48): a, c, t, g, unknown or other
tggtagtaaatctagatcctgataaaataattccaacaactggnnnnngagccatggtaatgatttactttcgtaaaatctggtttaaaaacgatgaatattgtttgtgttttgatttggatgtgttcatgttggtttatgtgttatataatgaatgtatgtgttttacaaaatttttccatgaaaataattttattttcattctgaaaatattttatttggattctttgtgaaaacttacgcaattttggtttttacggaactcgattctcataaaaattgaaaaagttatgaatttttgaaaaacggatttcaatggtgtcgagattgggagcaccgcacgcacagaccctcggaaaagacaaggttgcgcgcgcgaatctcagacatattttgtctgaatgctgggcgtgtccctccttcagatacaagttcgcgcgcatgtcaccctgtaggtgaccgagttttctcggtcagacaccttgcatcctcctgctcctgcgcacgtatggggttgtttgcagcctctcatgggctgcacgtgcagcactcctaggcagcaacacccctaacccgatttttatgggattttttcaattttttcaaattttctcaatttgaaaatcctaaaattaaaataaaatattatttttaagatatttaaacttaa

SEQ ID NO: 135746 - DNA, 570 bp, Cannabis sativa
  modified_base (35)..(42): a, c, t, g, unknown or other
  modified_base (488)..(491): a, c, t, g, unknown or other
atcggccaatggtgctattttttcgaagtcttacnnnnnnnnatttgagattttggagaccattgccagtaacaactaccaatggtccaacacaagagctccaacaagttgaaaagtgccgggggtccttgaggtagatgcaataacggctttgacagctcaaatggcttccatgacgaatgttttgaagaatttgagcattgggaatgctaaaaatattcagccagttgctcccattcaaagtgatgatgtctcgtttgtgttttgtggagaagggcatgtgtttgagaagtgtccctctaatccagagtccgtttgttacatgggaaatcaaaaatttaatagaaacaatggggcactctcaaattcttacaatcaagcatggaagaatcatcctaacttgtcttggggggggggtcaaccagcaagctcaagcaccacaccaccctaaggaagacaagcatatccaccgggtttttcacaacaannnngacattcacaacatgctcaaaattcccaactgagttctttggagagtctaatgctggattatatggcaaaaaatgatgc

SEQ ID NO: 135747 - DNA, 664 bp, Cannabis sativa
  modified_base (193)..(193): a, c, t, g, unknown or other
atcggttcggttcaattggattggattggatgatgcccacccctaccaaatcatgccctctgaatttttctgaccgttaaacatttttcttgaacaattatgattgttatatttaaggacttttgtctaatttcattcaattttattatttcagtgattgtttatgtattaaaccatgctccccaaactttgntatctactaaatcatgcccttcgaactttgacatatactaaatcatgccccttgaattttcattcatgttagatttttttttactaaaattagacaaaagtcctttaattcaacaatctcaatagttcaggaagcatttttaacgaccttaaaaattcagaagacatgatttagtacatgtcaaagtttggaggtaaaaatcataattagccttaacttattattcctatacttgcaaatgagaaagtttgactactatttatctataactactataaaagtgacaatcttattttgggcttccacatattaaattactagaaagtcctcacttctcacccttagtttattatgttgaggttgatcatatacattacaaaagggaaatttcattaattgaccctaataaaatacctcatttcaaaatttataccctctactaatttatacaaattaattccactattactc

SEQ ID NO: 135748 - DNA, 515 bp, Cannabis sativa
tgcattcaagcttggaatttaattgaaaagatcaaagcgaaagcgtaacgagtagtaggatagacttcaagcagtccttccactccgggaaggagtgttaaagatgaatcgtacccttagtgatctttcttgcatgaaaaacaatgtgcatgcgagagtcacgtttaattttcatgaagcaagcttcagcttaagttgcataaaaattcaagcacagaattcccttcaaaagatcaaagagaaagaatcacgaggattaggatagactttaagcaatccttccattacgataagaagggttcaagacctatcgtacacccaatgatctttcttgcacaaaaaacaacatgcatgcgagagtcatgttgaatttttatgaagcaagctttggcttctgggaaggaagactgaagttgaataaaaattttagcgtagacttcacttacaaatatcaaagagaaagcatcacggggagtaggacagacttcaagcagtccttccattctaggaaggag

SEQ ID NO: 135749 - DNA, 601 bp, Cannabis sativa
acagctattcatggacgcatattctgtatataaccagattaaaatgcatgtgcccgatcaagagcatacaagttttgtaaacaacatgggactttattgttataaagtcatgccttttggtttaaagaatgatggggcaacatattagggacaggtaaatgaaatgtttgaaaagaaaataggaaggaacatggaggtctacgttgatgatatgttggtaaagtcagtaaaaggtgaagatcatacaacagacctcgcggagtgctttgagatacgaaaaaagtataatatgaaactcaactcaaagaagtgttcctttggagtctccttaggaaagtttttgggattcatagtcaacgcgaggggtattgaagcaaacccagagaaatttaaggctttaatagaaataccatcacccgccaagccaaaggaagtccaagccttaacaggaagaatgacagctctaaacaggttcatctcgaaatcaattgacaagtgcctaccattcttcaatgtgttgcaaggcaacaaaaagtttgaatggacagacgactgcaaggaagccttcaagaacataaagaaacatctattaacacctcca

SEQ ID NO: 135750 - DNA, 567 bp, Cannabis sativa
ttttaataattaaaattacttttgtttttcttacaaataataatacaatcacgtatatatataaaacattccttttattttgaatcctttttgttactatatatggtttatagagaaaattactttgagagcacgtattttttttttattttaaatagaaaaataccagtttatttaacttcaaatatattgattttagttttagatttttaggtgcacagacgcatacatataagttattctcttttcttcgccacttaaaacaattttttcggcaactttacctaccattgaaggagattatttttattagtggaaaacataactttttaagatttatttggtatgttgtactacactgaattatataatattatattaaattatattttatataatatttttatataaaattatgcaaagtttaccttttatgagcatataaatatataattttttaatataaattaaaatttatcatagtaatatatgaaaatagtagaaattacacaagatatgggaaaattataagtttatttttttatggtataaataaataatacccat

SEQ ID NO: 135751 - DNA, 796 bp, Cannabis sativa
ttaaggagtcaacctgcattcattaatcatgttgtaacaactaatctacagttgggagctcctgggtatgttgtacctccttcaggaagccttgatgaagctttgatggttagtgacaactaacaagtttttataatccatgaaattatatcttaaaggggttaaaaatttgagactagaaatcttttactaaagatgaatgtcttacttatatgtctctatatattcttaaaaatattgtctcttcttttaagtgtttgaatatgcgcaatagacacatgatgttccatctagatcttatttgaggtatgtaatatattttgacattatttttctaagaaaatttcagacttttcatattttatgtagaccttcatttgttatgttgatatagatggagatcttaattaaatcatgtgcccggtagtgaataaatgccatattattttaacatttatgctaaagaaaatctcaatttatcctattgccattattttttcttattttctcacaactatgagttattgcacaatagatgagaaattgtaagtgatgtgtagagactaatgctaagaacttgaacaataaatgtgaaagtaagtatttagtcttttagcatgtccattttgtggccctaaataaataaataataaatattattttcatatattgttatgacttatatatacataattatattttccaaaccaaatataataacacaactattactctaataaaataaatcattcacataatcattacctttagttacataaatctaaataaaaataaa

SEQ ID NO: 135752 - DNA, 1135 bp, Cannabis sativa
taatatcaactcactaacaacacaaataaatgagataattattctcgcacaattaatattccaaaaaaattaaatgctattttactctggatattacaatagtgggggatgacactgagatccaaaacctccgtgatgcccttggactcatgcaaggccataataacgccttgcatcatgatcaggaggatcttcttgctgctataaaccttgcattcgatgagcagcgacatcagttcattgagtggagggatagggagatggaagcattgaaggctcaacaagcagccattgatgaccacgcaaggtaggctaccgtactgatacggagagcctatcaagttgctaatcagccattggatttcgtggtgaaaaacataatatttcagttcggactcccgcacaaaatagtctcaaacaatggcacatagtttgacagtcaattgttcatagatttctgcacgaaccatggaatcataaaaagtttcttcgctgtggcacaccttaatcaaatggtcatgtcgaaatagtcaataaaacacttaaagaaactttgaaaaaataacttgaagaagctaaggggaactagccggaggaacttccaaaagtcttatggtcgtatcgctcaactaaaaaaacaacaattggacagactccattcgcaatggcatatggatatgaagctatgttgcccatagaactagaacctccgtctcatagaagattgacttgattgacttatgatcaagaagctaatcatgctctcctagaagaatcacttgacgaaattgaagaaaaatgagcctcaacaaacctaaatttagtacacaataattatactttttatacaattccttcactgtgattcacattattagattttagttttctttgttaccgttttattgccttttaatctcatttaatatcgatttcaccttgatgatgtagtttagggttgagcataaaatcccaccaaaccatgattcaaaacggtcggttttgagataagttttggattggtcggtcggttttcaagttgcaccaataaagactgttgaccgaggtttttggcaaccaataaaattatagaagattaaagagctgtaagaaattaagagaaggatttttacgt

SEQ ID NO: 135753 - DNA, 1240 bp, Cannabis sativa
ggtcaaagcctatgataagttgtgttggaagtttattgaccatgtgttggagtgctttggaatcccccagagattccgtatgtggatttcgcagtgtatcactaccacttcgctaaacatctgtctcaatgggggtcaggtgggaagttttaacccttcctgtgggcttcggcaaggtgaccccctctctccttatttgttcatctgggcagcagaagttttgtcaagactatttcatgtggctcttgatcagggttctattcagggtgtcaaactaagtcgaggtggtccgactctttctcacattttctttgcggatgatctaattctagtcggtcgagctaatttaacagaggtgaatagatactggagatgcttagagaatttctgctcgtggtcgggccaacaggtcaacaagctcaaaacttctattttctttagtagaaataccccagtgagcttacgtggggaaattaaggaagctttgggaatcgattctcctgaaggatgtatcaaatacttggggctgcccctttttcgatctaggcagaaagatgctgacttcaattttattctggacaatctcacgtcaaagcttcagggttggaaggctaaaactctatctaaagcagggcgtgctactctaatcaaatctgtgggcttgtctatgcctatgtatgctatgcaaacaaccaaactctcttctcgtatggttaacaagattgatggcatggtcagagatttttggtggggttttgagaaaggaaatcatggaattcatcttagagcttgggataatctgtgtcttcctaagtcgcttggtggtctaggtttccgaaaaactaaagaaatgaatcaggcctttttggccaaatgggggtggaatatcctcaccggaagccaatctctgtgctgcagagttttaagagctaaatatctaaaagggaaagacttccttaattgcagatataaagatgcagattcttggttttggaaaagcgttgttaaagcaaacgctatcttaagaaaaggtgcctgcaagttggttaccaatggtgagaacactaagatctgggaggatccctggattccgcatcgtaaaggtttccgtccgaaaccaattggggggccctcccccaatgtaaattgtgtggctgacttattgttaaataatgggcagtgggatgttccaaagctgagaggctatttcgaccaagaaacagtctctgacattcttaaa

SEQ ID NO: 135754 - DNA, 620 bp, Cannabis sativa
  modified_base (34)..(35): a, c, t, g, unknown or other
  modified_base (156)..(159): a, c, t, g, unknown or other
  modified_base (513)..(540): a, c, t, g, unknown or other
attataattgtaaaattagactatgtctagtttnngaattttcactaagcaaggtcttaactgcgaagaaaagagattctaggtcttatttattaattgaaagactctaatatgtctaattaataaatatactaaatgataattttatttgataannnnttttaattattaaataattatttttggcatttaaatggttagaattggcaaaaaggtatttttgagaaaataaggaaaatttgtcaaaagtggaaaaattcccaagtggggcccatcactatggccgaccacttaagtggtattttccacttaatttttctattatgttaatgcctaataaatcctaacctaaacctaggtggttgcctataaatagataatgatcgctcacacttaaaagatgatgaaatttcttgccttcagtaaaagaattcatgagccatcctccttctattatcgaaccagccacttttcttcgttcttcatattgttttcataccttgagtgatagannnnnnnnnnnnnnnnnnnnnnnnnnnnctcaatcatagtgtgtaaggctttgaagaataaaaaattaagagaaggacattcgagcttagatcttggtgatactctgc

SEQ ID NO: 135755 - DNA, 547 bp, Cannabis sativa
taagtttcttgaattattgttttgatttaattataaaaactattggtttgccaaatagaatcataaatttagtctagtggtattcaatccaatttcctgtggttcgacctcacttgtgtgagtttactacttgattgcgtgcacttgcgtattgttcataaatttcgtaacaagtttttgacgccgttgtcggggaattgtttaaagttttatattgcatatgattacattaaattctactttggtttatttttcttgctaactggtaacctgtttctttcaacattgtctttgtctatttcaagattgaaggtgtatgcaacgtcaaggatagggtgtcatattgccagttgatcctgaaattgagaagacttgtaggagaaacagaagaaacaagaggcaagaaagagtttcagcaactactgaaacagaagaaatcatggctgagagtactaatggtggtaacaatggaggcaacaatggtaataatggaggtgccgttgaagatcaagctaatggccgcagtctgagagactacattcttcca

SEQ ID NO: 135756 - DNA, 1250 bp, Cannabis sativa
gcataaaacccaacagttacaacgtctccgggagcataagttatatgcccagttcaagaaattcgaattctggttgcctcaggtgagtttcttgaggcatgtggtaagtaaagatggtattctagtggatctggtaaagattgaagcgatatgagactgggcttgacctaagtcagcaactgaagttagaagtttcttgggattggcagggtattatagaagatttgttgagggctttgctaagatttctacgcccttaacagaattgactcgaaagaattgcaagtttgtttggactaataagtgtgaaagcagtttcgagaaactaaagcaaagattaattactgctcatgtgttaaccctaccggtcagtgatgaaaagtttgtgatttattatgatgcatccaaataggggttggggtgtgttcttgtgcagtctggaaaagtgattgcttatgcatccaggcaactgaaaagagtatgagcagctgtatcctactcatgatattgaactagcagcagttgttttttcactgaaagtttggcatcattatctttatggcgaaaggtgcgagatctacaccgatcacaaaagcctcaaatactttttcactcagaaggacttaaatatgaggcagcagcgatggttagaactggttaaagattatgactgcgagattctctgccaccctgggacggcaaatgtgatagcagatgctctaagtcgaaaagggacagggcaggtttgggaactaaagaagatttcagcagagttggctgaatataggactagagtgggaattgaatttgtaattggaaaacttgccaatattacactgcaatctcatctgttggaaagaattagagtggctcaacaagttgatcctgagttacaggggcataaggagaggtcagaggcaggatcggcaagacttttcactttcatctgattggttattgcgatacaagaatagaatttgtgtactgactgacaaaaatatcagacaggagattcttgatgagtctcatactacaccgtactccttacacccggggacaaccaaaatctatcatgatgtgaaagatttatattggtggccgggtatgaagggtgatattgttgaatatgtgtcaagatgcttaacctgtcaacaaattaaggcagaacatcagaggccgaaaggtttgcttcagcctctaaagattcctgagtgcaaatgggaagacatcaccatggattttgtggtggg

SEQ ID NO: 135757 - DNA, 849 bp, Cannabis sativa
tatttatagaacatagaaatcctaaagacagccacaaagtcaattctacagttgtacaaactttcctaaaagaaaatcctgttatgcagcatcaaagacatgttctagtgcaacaaactagaccagaaaaggaaacttgccaaaaacgtgtctgatcatgtatttggacttaatacctaccaaaaatagtgtgtttgatcggatctaatcaagacacaatccaactcattaaggagaaataagaatagtaaaagtttccataaaaagcaaactttccataagagaatttcttctcttacaagaagtttccaaacgaagaaaggacaactgaatatagaatctttcctatgatagaaaagagcaataaaaacatttaattaaggtgataaaatcagttttataaaagctaaaaaatcgcaccataaataaaaaaatattttggcatctgaatttccaaaaaaggactttacaatctccccctttggtactttagataatcaaaatagtttttaacagaaaagtacctacaaaacaaagttagtcataccaaacaaaaatccccctgagaaacacaacataaaaccaaaatataaagctaacttttaaaccaaagttcaacacaagtaccaatctcaactccccttggaaaaaggtctagagttgagaaaaacaaagcaagaaatcaagaaattaaaaactattactccccttttttgtttatttaagggccaaagataagtagaaattaaaatatgtcccacaaaaagtcaaagataaagaaaacttataccccgtaaagctgtttggattttatgccctaaataaaacccatttcaatctaatctgatt

SEQ ID NO: 135758 - DNA, 671 bp, Cannabis sativa
ttaatttaatatatagaaaaaattatataaaatttgattttttttaaaaataaattaacgagttgatcgggtcaactcgttgacccggccaatctggtcaacccgaacctgcagactcaagagctcgaaacccgcgaacccaaaccatttcacaggtcaggtccaagtacaattttttgaacccgaaactcgcgaacccgaaacccaatcaacccacccgatgttcagccctacgttatagaacataaagaacatattttggcaggtggatatatattcttccacaaaaagcctatcattatgaaaacatgaaatgcacacgctgattttaaaaagggaaatgtctcaacaactcctacttggattcaacttcacgggttggacattaactattaggaagaaaagacattttttaagattgtgagccaactcgggaagccactacaaattgatcaaataactcaactaaaggagaggttgtcctatccttaaattctgattgaggttgaggttgatcaaagtttccatgatgtgatttcatttactaatgaagtggatatggatatggatggttatgtacactatgaaaggacccctgttcagtgtgctcattgtcatggaattggacattcgttgatggactgcgaaaagaaagggaattagaagtaaga

SEQ ID NO: 135759 - DNA, 802 bp, Cannabis sativa
  modified_base (244)..(245): a, c, t, g, unknown or other
cacttgtctatctttcaatcttagctgattggtaactttgaaatcttcaaacaacacaaccttacgagctaatgtggatgatgaagttttacaatttaattatgcatttcttgtttgacatttttttatgatcataaggtgaagttcattctctaacataagtgttttcaatgctttaacttcctctttgagataactcaaagatgccaattcatattttagatcatttatctcattctccatnngaatcctccatttattttctgtttccatctacaaaattaagataataaaaaagacaaaaaataaacattcaacaaatgtgaataataatttacatagaataattgtataatattttggttcagtcttcaaacttggatacaaattggtaagaggttttttgagaagacataaatgagtcacaaccaagtgttagaatataaaagtaagtatgatgtagtttaaaaaaaatgattttttttaactttttatttaaattatttttttaaaaaatccaattttttttaaaaaaatatagtaaaaaaaaatactagtattattttttatttttcaattcaaaaacactattattaaatagcccacaaagtattaattacattaatattttcgagatatgcatttaatgcacaaaaaaatgaatatgaaatgggaatgaatggataaaaaatggaacgagaatgaaaaagaatctaagaatgaatctttattagtttaatttttaatttattaaataaattttaaatataggtccatgtcagcaggtcaccatcaagttgcc

SEQ ID NO: 135760 - DNA, 983 bp, Cannabis sativa
gatcccaagacctccaaataatacctttgcctttactagaagatgtcttccaccaaaatcgggccataagtttttcaatttcattacatgtaccaagtggaaggagagaaacactcatagcatatgcggggagcgattacatcccaactattaattcttgcaattaccgcggtcttcaaaaatcctagtatagcatttttgtttctcccaataatgtttggaagtcccagatagaggcttccttctacgctattaattttaggtattaatggctaaaaagagtagatctaatgtaaaaaacaattcaaaaattaaagatcaaaaaaaaaaaaaacttgattacgatacaaatctcgatcaaatcacaaaataaagcgttcaagaacattgataaataattgataataatcaattttagatcaaaaataataaaatcaaaaaatacaaaaagaattttataatataattatacaaatcctaaaacttaatacttaaaattcaaataatttactcaatgatttcatacatataacatatcaacagaaagagaatttaacggggaataaaacccctaaagttttaagattcaataaggaaattttatcatatttttattacgaaattaatatgtaactattaaaatttaacgtatacatatacaaattaattatacaaattagaggtcctaaatcatatacaaaaggcaatttgatactacatgttaaaaaaattaataataaatctaagatcaatttgtatataatatagaacaaaataacaatatgtaataattaggtatatgcgtacctcattgatctgtagtaattgctgcaatttgatagtgtaatactatccactaagtcttcattcctagatctctgaagcataagcaattttatttatttgattatcaaaaagtatacaattgtgatgagataatatgtatttatggagttagggaggggacttagctacaaaaccct

SEQ ID NO: 135761 - DNA, 701 bp, Cannabis sativa
atatgataatatatatttatgatgagaatatttatgtatgtgatacatatataatatatattatgtggagatgatatatattataatgagtatatattatatcatgagatgatagtaacatacataatatattaattagcataaaatttgggagataattttatgcatgagagttatatatattatttgtatataataatatatgagtaactaatcatatttagtgtatacgataataataatagtgatgatgatggaaaagatgtgttcatcattttttgagaataaagagttttgaaattatttttctattagtggttttctctcatcttttgatacgagaaaatgaactatgagagttactctttttttgtttaatttgtatgttacagtagttttctcaattaatttgttgagaaaatgataaatccagaaagctatttctattcttttcttttccctaagtgcttgtggtagggggaaataagcttttgactgctggaaaattgttgtgctccaatagaaataccaaatcaacaagattacaactctatgacaaataatacaaaggacaaaacaggtataaataagattacaacacttaaacaaaatatacacataaaatagagaatagagatgaagagagggattacaactcaaagcaataagctacacatgaaacacaatatatatatatatat

SEQ ID NO: 135762 - DNA, 614 bp, Cannabis sativa
  modified_base (429)..(429): a, c, t, g, unknown or other
tcattgtcgttggctaaaagcgaagtcaacagtaggtgataacaatggcactatgtgtttttatttattggtaagtggcaattatttttttttagtttacttttgtcaataactggtttcttgtttttataaaatttattatttttcatgtacctttttaaaataatatatgatattaagaaaaaatctttaaaacaatgattgtgtaaacagataaaaattcaagagtgtaaaaatgttgttgtgggtatccttttgaaaaaattattttctgttcaactttattcaatgctgagaaaccagtttttataaaactgtcaataaatatctatttatcttgtagctgatcaatcattcttctttgactcgttgcttttgttattctattttggaggtttgtaaagctgtgggttattgcacgttcttcgnttgtggccaacttttccgcaccttgtgaatttcaagacaacttttggttctccttttgatcttagtcttttctttctaggtcttctagctggttttcttgattttggtggccacactattctttccatgctctcaggtatagtccattctctttcatttggtagaggatgtacagttctttcata

SEQ ID NO: 135763 - DNA, 572 bp, Cannabis sativa
  modified_base (144)..(146): a, c, t, g, unknown or other
aatgaaaatcaagcgtaaaactgctccaaaagacaccaatagacgagataatgctaactttaaagacccgagacataggctaattataacctaacagaataaaagagagcaaatatgagagatattcaccaagaacattctctnnnataaatactctcataaataacaaagactcgttgactaagactcgttaatgtcccaatcacgtaaaatcccatgcattaaactttctacaactttcttatatatatttattaattggttgccaaaaaccttggttaacactattaataataaaaaatttattaatattattatcaatatattattattataatattatttttatttatataagcttatcgttagtttattatatatatatattatataagatatcagtaaacataaacgaacagtacgaacgaaaccctcttcttcctccttcaacaaatttttttctccttcgatctattttcttcgattttcaacccgaaacctagcgatctaagttctagtagtagcaggataacaaatctttgaagagagaaaacttaagatatggtttaatt

SEQ ID NO: 135764 - DNA, 718 bp, Cannabis sativa
catattagcagatcgtcgtttaataaaaaaaacaaagaaatattgtttaaaatactttcgacaatccatcatcactccccgaagaggcgaaaccatagtgatgttacttcgaatacctttgacaattgagaaacaatcggactcgagctcaacattatcccattcatgatccttgatccaacttaacgcctttttaatggctaaagcttcagccatgtctggtgccattgtactcctgcgataaactgttttggcctccaccaaatacccgttgtgatcccttgccaccaacctgaaaccatatgatgaactgtggtcaaaagttgttgtaccaactgagattttgagtacattctcaataggcttaacccaagaaattgccccatcacctgcaatatgtgagggataatgagccatgttcgacttatcttgagcattcttccactgcacaaaatactgagaagttgcagacacaacacttgccaccgtgcgtctttgcatgtcaaaaccaaaggaccaaaagaagaaaaaaacagagcacttaaacttgaaaacaggagctagcatatcactcaaaaccaatacgaactttgcatgtcaaaagataagacaccatcacttacaatttatacataaaaataacaaaaaaattacaaaaatatagttgttcggaattttaaattttttataatttttataattttatttacagaatata

SEQ ID NO: 135765 - DNA, 934 bp, Cannabis sativa
aacaataaaaaataattaataaaaaaaaacataacttataattaataaaacaataattaataattaataattactaaaacaacataactaataattaatcaaacaataaaaattaaaacaaaacaataattaataattaatactaaaacaataattaataattaatgataaataaaaaattattacttaataaaacaataattaattataaaatacttaataagtcattacaaataaattaatacctaaaacaatcactaaataatataataataaattaatacctaaaacaatcactaaataataaaattaataaaaaaaataaaaaataaaacaacgggtccgatggctaccaatcggacccaaataaacccaacaaaaatggcaatcggacccttacaaacacccccatcggaccccaacaaaaatggcacaatgggaccatcagacctcaaccaagtctgaccatcagacgcccaaacaccccattggacccttacaaatcggaccctaatatgaccatcggacccaaaaaaattgaccatcggacccaaaaaaaattgaccatcggacccaaacacatgcatcagaccatctccttcctcatagccgaaccccaatccacattccacaatttttttttttaaatctaactaatagatctaacaaattttcacaatccaacaaagtttcacaaacaaaatcacaatctaaatcaatcctttaacacttacaaaaaaaaaaccaaacataccttggacattttcgtggggttcggggtcgccggttctggttggtcggggttgagcttcgacggcgtgggtgggtcgggattgagcgtcaacggagtacggtggggacggggttgagcttcggttgaaaaaatggtggttgtgaggagtgggtactgggttcggctggcggctgtgcgaga

SEQ ID NO: 135766 - DNA, 776 bp, Cannabis sativa
  modified_base (226)..(230): a, c, t, g, unknown or other
agtttaatacaaattcatgcacattttggtaattcgtaagcatttagcaagcaaagaaggtatgaaaaaaatacaaaaaaaaacatatctcaaatattatccaaggttttcaacattgatatacagtgtcctggtaggcgagggtcaaagatatcatcaattgaatagagtagtcaacttgtagtcaactcatctaaaatggacactattttagcaaccttttatnnnnncaaaataagaatccaacattgtcctagtaggcgagagtcaagattattcttattttatgagtttctactattgctttatatttataaattctattctaagtagtcacagcaaggatgagtctactagaaaaaaaatctacaaaatatttatctttcgagatcttacggtgttaaatgttcaatggatgaccatccattatggggttaaaatctagcacctcgaggtcccattaaaaaacaataactatgtaagatcaacaatggagatcgaatgtctaaaaataaagctcattattttaaaagatattgtattttaattttaatatctattttaatctatttatttaatattttaatatatttatttaattaaaattactaatttagataaatttaaatataaattttaatttaatatttataaaactataacttaggtagatctgaaaataaataaaatttattttccagctttagtattaatgttcaataaatattatgaaaattacttaatttcagttcatccaaaattaattaaaattaatt

SEQ ID NO: 135767 - DNA, 791 bp, Cannabis sativa
  modified_base (27)..(33): a, c, t, g, unknown or other
aaatctcaattacatgcaaattttctnnnnnnntgataaattaaacatgtaacaggcattaaacacaaaaccctataagctatctaaaccatacaggtagtttcgtcctatatcaaaactcagtcctatttcactatagcataatcgacactcacttctcagatctcgcatcgaaatcataaaacaattaattgacagcgaagcaattaaaagtaattaagtaaaaatgaaatagaatacatagaaattgggggaaaataaatcatattaaaaccataaaataatgtcaaacaacatccatctaaaccctaatcaagtgtttggctactcatgctcatggaagaaaaatcacacatattaacttaacaaaagagaagaaaataatgctaaaaactctttgacgaatgcctctagtattgactttggtctctgaaattcgtgctctatattccgttgtttatctccctctgaattgcttccccaaatcaactgatattcactccttatataggctttgagggactaaaaagatagaaaactgcacatgctgaaaatcctattcagcattgaattgggaatccacactcaagtccatgtgagtaacatgacatttttttactgcagaagggggccaggccgcgacccgtgtggatggtggtggtggtctttaagtgggcgggtcgcggcccccactttgctgggtccaaaatatctttttatgggcaggattctgatttttttccacattgatattttgatgagatattttatctttttctgttgatattttt

SEQ ID NO: 135768 - DNA, 1579 bp, Cannabis sativa
tgcatgggacctctccttttaccgtaaaagtgcgacaagttcgactccccaagggattctggttatccgaatccctaaaatacaaaggtacctctaatcccatatactatttagagaaatttaatactattatggaagtggatcaggtaactcaactcgcaaaatgctgcattcttacgacaacattggaagagaatgccgacgattggttcagccaattgcccgaggcttttatctcgacatgggagacctttgtcgacctgttcctcacacattttcaagccacgatgacctataggccgccctataccactctggctaacatcaaacaagaatctggtgagtctttacaagactattttaagcattttaatgcaaaggtaacaaaagtagagaaggctcttgagtcttcgctagtatgtatgttaataacaggtgtcctgtcaagaaccgatttctggaaggaactacaagctcgaaggcctgaaacgctggtcgagttctttgccatggcagagccacataagagaattgagaattctctagccgagttggagaagggcaaggataagcgtaagtcacctgtgccgcgatcacgctctcccagtcctagagggaagaattccagagaacgaagcccaagaagacgcagtccacagagacagcgaagtccgaaattagccaagtcccctccaaagaaggaatcctcctcaaaaaggaaaggtggcccgcgctttgtgaactataccgagttggcagtacctcgagaccatatctacgccatcgaagaaaagaatggggtctttaagaagcctcccccaatcaggggaaatcgcgacaagagagagcttaaaaaattctgtaagtaccacaaagatattggtcacactactttggagtgttggcttttgcaggacgagattgaagagctgatcaagagaggaaagttcagcaaatacaagaagaatgaggaaagtcatccccgagcggatgataaagaagaaaatcagaatgcgagtggttcgagaactcctcgcaacatcttgaccatcataggcggaccccatatcgctggtgattccaggaagtcgcaggagcgatatgcgagagaagccaaagaaaagccactcaccaatgtgaacaacctgagcgaacgattggagaagcttttcaagagggagtgcgacgacatcaccttcatggaaagtgatgcgagatgggtccaccacccatattctgacgcgttggtcatcgttgccaatattggtggagacaatgtccaccgcatactcgtggacaatggaagttctgtgaatctcttgaacttccaagccttcaaacaaatggggttgcacgagaaggatgtgtgacctgtcacatcgagtatgtacgattttgctggcgatgtcatcgtgttaaaagggatgatcaagctcccaattactttgggaactgccccagtagtagctaagtcgatggttgacttcgcagtaatcgaccaatactcggcatataatgctgtgattggtcggcctattctaaaagagatgaagatcgtgacgtccatctatcatctcac

SEQ ID NO: 135769 - DNA, 899 bp, Cannabis sativa
gaatgcttaaggtgttgaagaagccgaaaccgtattttatgtaatttagattacacttaccgtatataagttgtattttggggtgtaaccgtatttttgttaaatttttcctattttagtgaaattgtgaaaatttcccttcttttttataaaaaaaaaatatatttttacgtttaaagattttttttatatatttttacagtttttcataaaaataatacgaaaacaacaagaaaactacatgaaaataacatctaaataatatcaaaacaacaacaaaaaataacatacaaataacaaaaaagcaacaacaaattaataagagtacaacataaaagaccgtattttctgtaaataaaataaaaaaaaatcataaaaatatttaaaattacgtgaaatcttatttttataattttttgttgtttttgtgtatatgtgaaatgatcccttttggaaattacacaaatacttccacacggaaaaaaaatacagaatctaattttttttttttggatcttacaaaaatacttattattttgttatttttatattttcactgtcacatttttatttttttatttttatagtactaattttttaaaaaatatagtattaaagtttcaaaattacaaaaatatagtgcttcagtaaaataaaaaaataacttaaaaacaactctaaaataacttaacaaactgttgacgcagtttttcgtcaactgatctaagaagatcgtaaaatatatagaggactgcaatgaattaaacttgactaataaaaccgcaataaattaaattaacaccagaaatttatattagttcactccccatatcgcgatggtaatgggtaggggtgttcgcggtgcgggtggtgcggttttaaccattttttcaaaccaa

SEQ ID NO: 135770 - DNA, 908 bp, Cannabis sativa
  modified_base (838)..(839): a, c, t, g, unknown or other
  modified_base (866)..(866): a, c, t, g, unknown or other
tagggcataaaacctaacagggacttgaataaccttcagtaaaacagacataactcaatttttatccgattgatgcaattaaacttgtgttttgaagctattcaaactctctatcaagtcttgtctcacaatccagtcgtaattctgaagctattatcatcaaaattcaccccaagagagttacaaaataagttccaggttactcacatcgggacccaccgagcaccaaaaattggcgatcaccaccagaagttaattttcatcgttagatcatcaacagtggaaaaaaacttatatgtatttttctcctatttttgtgagcctccttcacctataaaaggagagatcctttagctcatttttcacatttaaaaaactacccacaaagttagagttgctctctctagagtttggagtttctaatacttagtccatgtaatcatcaactcgtgagaaataaaaactcaaaataggcgtagccccattactatcacgatatgggggtaaactactataaattttgtgtgtctctctaaattatttacttaaacacattaatcatatggccaatctatcgagctgatattggccacttttcagcgtcactattttgtgctttcattgggagtcacaattcaagttccccatctatagtttgactttctctaccagaaactttgtttcaaagggaattcataagttcaagcaagcaatcaaccatgaacatgaaaagtatcactaccaccctagtagccatgccactactcagcaagcagcaggaactgagattcccattaaggaagcgaactatgagtgagctgttgggttttatgccctnnataaaactctttacaatctgattagtnatcaatataagaaatttgaagcgatttatgtttgcatgaatt

SEQ ID NO: 135771 - DNA, 606 bp, Cannabis sativa
gcacttagtgcggattggatgttgtttgaccaaaaaagtgcggattggatcggatgaacacccctaattcttaatattctaatttagcacacgcttccaaaaaaaaatcaaatttattttctgcactagaaactattcaaaaaaattcaaaagttaaaaaaaaaaaaattaagtgacatttggtaacactttttaaacagtttgtacttttaaaattgaaagtaaaaatatttttcaaaaacatattctataaaattattttcacttaataattttttaattgagaaacaaaattttaaaaacagaaaaaaatcacttttaatatattttttttttttaaatagtaatagtttttttttaattaatattttaaactccgaccagacccagacataaatctcccacggccctggcactgaacccaacatctgacccgaacccgaatttaatcccgaacctagactcgacttaaataaaatcaaaaaatgaaaataaatgttgaactgtttttttattattaattattataataaaaaataataatgataataaagagaatgacttgttcaacaacataaaaaaaaaaaaggaaaaaaaatattatta

SEQ ID NO: 135772 - DNA, 798 bp, Cannabis sativa
ttatggtctagaaagtaagactttatttttggtggtttaaaggcacattccctatttactattccctaactgttttatgacgttgcttgttttactttgtcgcatatggtgacacctctattggataccgagagtgctccgcactggtatgcagcgaatctgaccatggataatacaacagtgtaaatcagagattcattgtctactgcaatgcataagaggtcacgtcgaaacgtttgcctagagatggtatacaagtgtgtatagtttgtcgttctgttagtctaattgcaaccatctcagctgtaattgtttttttttttttttttgcagctgaatattttggacctattgttcgcctctgtgaagccaacaaacctcaaattaggccaattcctaattatttcttctggcagtgactacccacaacaacaaaatggggacgattgtgggctttttgtaatgaaatatatggaatcaatggttgagggaaatgaaacaatggaagaggtaatttaatgttgttttcattagttttcatctatttaactatgtgtttataactaaattgaggtcttaatctatgttgtgttgatttgtttttctgaatttcattgtcatgtgtatttactgaattggatcccaaatgtattgtcagttgatcctattgaagctagactgaagttccctcatgttatacaacttgattgaacatctgttgagtttcatttagtggtattttatacatatattgtacttattttaaaactcatctcatatggctgttggacaactttt

SEQ ID NO: 135773 - DNA, 868 bp, Cannabis sativa
  modified_base (369)..(373): a, c, t, g, unknown or other
taggaaaggacaataagcctgctaattaatgagttcgttcttcaccttgtcggaatttcttttttgtaataataatattatattatatgattaattaaggaaagccatgtgcttagcagcctggatcttaattaattctattaatcccaatccaacgccacggcttacggcacaattaatataattgttaaaattataattacaactccaatcatcctgttggatctgcctcctcttattattgctcatgcctttccacatctccataaatattccataatcattttcatatatatacatatataataatttatggtataaatactttagtttaaaataaatagttaagtttaatttttgacagtaatnnnnnttaagttatatttttaaaacttctgtaaatatttagttgttaggtgttaagtaaattgcaacgtgacaaaccatgattggtccatatcattattttttttttttgaaaaaaaattatttaaaatatatcaataataaaaaaataataagtggataataatttaacatttaactttcaggtacctatagagttttagaaatataacttaagtattattaccgacaaaaattaaatctaaatatttattaaaagtgatcagagttaaacttaagtatttatatataaattactcatatatatatatatatatatccaattagctttttatttattaaatactgatcaccagtataatcgtctatatatttatataaagataaattttacagattttgtttttcatatcttgaaaaatagttcatgataacaatttttgtgcaagtaattcgataatctcacactacaaaaaactgttatttttagtgacaacttttt

SEQ ID NO: 135774 - DNA, 599 bp, Cannabis sativa
  modified_base (195)..(195): a, c, t, g, unknown or other
catcaatataaagaactagggataccactatattacctttagtgaatttgaaattataaaagattaaaaatcattttatgttgcatgattcacataattacttttatgattatatgtttaatatatcaataatttattttgtttcgttcttagttatgtgaaaaaaaataatttttaataaatattaaataattnaatattaaaaagtaatcaatctaaaataatcgatttgcaaattggattggatctgatttgagttattttgcgggttggaatagatccgaaatttataatctgcacttagtatgcaaatcggatgcactatgaacaaaataaataatgtggattgaattgaattaatgaaatctgtaatttgtgtaaaagctcctatgggtgagatttattttgggaggagacttttccatatctacatagaattatgatgaaaccttgttgtcactaaaagtgcatttggtcatgttagaattttgaggaataagatgaatgaggttccatcccaaaatcaattggcgatgggaggagtagcctttttatcttatatatcacaatttattttcacacattagcaatgtgggact

SEQ ID NO: 135775 - DNA, 786 bp, Cannabis sativa
  modified_base (493)..(503): a, c, t, g, unknown or other
caataacctcgttgattatcaacgagctgcacagtacgttaaaaattacgctaacacacctatgctagttagggtgctgcaatcaaattataagattagaaaatgatattgaaaatatctatttgtgtatttttaaatcatttatcttattagatatttaatttaatctgacaagataattcaaataaatctagatattttaaaattagtttaattcatttttaattttttttgaagagttagtttaggttgtttttaacaatcctaaattttaaaaatagttggttagttaaataataatttaattatatgagtaataaatatcttatttcacaatttgttacatggacattgtttgttttatttaattgtttattaaaaactttttttttaacaaacctgttatttatttgatctaaaatgctatgattaacttgttgacagacccaataatctgattttaatcatagtccaattgtcaatagatcttatnnnnnnnnnnnaacaggtaaattttgtatttctttcatctatgtaaacctagaaacataatagggcccatccaaatcaatttggcctgtgtgagcctatatatttacttttgggcttagatgcatataggaagcctatttatttctagatagataaatggactaggttggtaagataaaataatacttttgatagttttatttaggcccaattagtattggacttacttaatgaataacaattatttaaataatggttaatcatctcctttgtgccttgtgtgagagttagggg

SEQ ID NO: 135776 - DNA, 504 bp, Cannabis sativa
atgaaataaatcatctgaaccatgtaacataaaatacagtttttgatctttattaattagtaagtttgattatattgaaatgattttatttagggcacaaaatccaacaatgtaaatatcaactttaatcatcattgaaaaaaagaaattgccacagacgtgacataacccatcacctcaattatttttatactttttcatacaacaaaaatatattaagagacctgtaaaaacaaaaatgcaaataaaaagtttttttggaaaaagtgagtatatagtagttaaataagacattaaaattgtaataattcacgtcctacagtaaaaaaaaatagtatatagtgtaaaaacccctactttggagtttttttataaatatggaaaaatgtaatatagtttatttttttgtggtataaataaataatgcaaaaaatatagaattaagagtttaaaatatgggagaaaacaataaataaatttgataaaacttgtaataataagttt

SEQ ID NO: 135777 - DNA, 714 bp, Cannabis sativa
ttcccacacaagaggcatatggaattgtgtccatttgagccttgtcttcttctgtcttggggtctgggattgagaaagtttgaagtgaggtgctagaggtgtagtgactggtttagattcactcataaaaaacttgtctaatatcttttggacataatttctttgtgacatagatatactgctagatgcactgagctgctgttttagtttgtcaatctctagtctttccttgccaatgatgagaatgtcatcaacatatagcagtagcccacaaggatcataacttctccttgtgtaacctgtttttgtcatgaattcaaggaatcttaaattccattgtctaggagcttgcttaagcccatatagagacttattaaggaggcaagcttgatttggtttgctactcttgtagccatctggttagccatgtagatttattcttcaagctttccatgcaagaaggttgtcttaacatccatctggtccatttctaagtcaaattttgctacttttgccatcatgattcttattgaagtatgttttaccactggagaaaatatgtcattgaaatctataccttacctttggctaaaatcctttgctactaatcttgccttgtacctgatctcttcacctgacaatccttccttttccttgaaaatccatttgcaaccaattagcttctgtccagttggcctagtaacagtcttccat

SEQ ID NO: 135778 - DNA, 677 bp, Cannabis sativa
  modified_base (26)..(32): a, c, t, g, unknown or other
  modified_base (218)..(222): a, c, t, g, unknown or other
aataataaaataactattaataatannnnnnntattaatattatattattatattatattatattatattattattaatattaaaactttcaagttcatatatataagttatatattatatcttatatactatgaatctcttaatcacgtcctgcttgattctcttatataccctcaagtttttaatttttcattacccttaattgtctttttaagtnnnnntttcaaacatcaaacctcctgtgtcatttagtcttcaccttcttaattaccgcgttcttcatcttcacttgcttcaccgactttcagtatcaccactctccaaaaatcgacacgtattatactcaagcctcctacttcaccttctgtattgtcaattccactcccacccctagccctttccaatctctcaatattataaaggggagttatatttacactacagataattataagtacaccctaacaaattaagaaaagttctatttgcacctcataaaataataaacacagtctattattttaaaaaatataaacttgaataattttttaacaaattaaaagaatttctatgagcaccttataaaataataaatacagtttattattaaaaaaaaactatataaacttaccgctagccctttccaatgactctggctatcaaatgattgaacaac

SEQ ID NO: 135779 - DNA, 680 bp, Cannabis sativa
  modified_base (40)..(54): a, c, t, g, unknown or other
tttatttacattgttttagatattcatatttaggatgttnnnnnnnnnnnnnnntagtaaatctagattctggtaaaacatattgcaacacaagcttaccattaataacaatttacctcgaatggatgatctttttgatcaactgaaagggaagatggtcttttccaagatcgatcttcgctccagctatcattagttgagaattcgagaggaagatatcccgaaaactgcgttccgtacttggtatggacattatgaattccttgtgatgtcttttggactcaccaatgccccggcgacattcatggatcttatgaatcaggtatttaaggattaccttgatagatgtgtgatcgtgtttatcgatgacatcttggtgtattcggaatcagaagaggaacatgagttgcatctcaaatcgattttgcaacggttacgagacctcaagctgtatgccaaattcaaaaagtgtgaattttggttatctcgtgtctctttcttgaggcacatagtagataaggatggaatcatggtggatccggccaagattgaagcagttcgggatcggccaacaccaaaatcaaccactgaagttagaagctttttaggcttagctgggtttattgtcgatttgttgagggtttctcaaagattgttgtacccttaacagagctaacccg

SEQ ID NO: 135780 - DNA, 1766 bp, Cannabis sativa
cccaaacccgaaccgagacactaaatcaaaatcaaaactgggactaagacccaaacccaaacatggacccagaccgggacctaggacccgaacttggatgggggacttagaccgaggccttggaaccgagacctacatcggaattcaggactcgtacccaaactaaaccattaccaagccccaaaactcgagcttagacccaatcccggacctggtaccgaaccttgactaggactgagactcgaacccgaacccaaacttgaactcgggacttgatctcggacctagaccaagcccttgatcgagactggaattttgacctagacatagacacaaacttagacctagaatagaataccgacccagacccagactgggatcgaaacacaggacctggactagaacccaaatgtagacccaaacccaaaccaggacctgacctggacccaggtaatccgaagtcggacccagacccagacccagaacctgccccgaacaaaaacaaggacaggaacctagacacagaccaggacaaaacctgaacccatacttgaacccaaaatcggacctgaactcgggacccgaactcagacccagacctagaataacacccaaacatagacctggacctaaacctgaactcgaacacagaccgagattggaaccaggacttacacctagaattgaacctaaacatagaacgagttcaaaacttgggacttgaacctggacctggacccacaccaaggacccgaacccacacccggagcctgatccagacctagaaaatcccgacccgaacccaaactcagaccagggattgaagcccgacttgaactcgaatcctaactcaaactccaaatcacaactagaactagaatcggactaggattcggaccaagaccaggacctaaacccgaacccgaacctagataaaaacccagaccgagacccaaacctgaacaaagactaggactcaaatccgaacctagactaggacaaaaacccaaaccagaactgggactgtgacatagaattgggatagagacctaggaaccggaacaaggacagggacctagtacccgaccccgacatggacttgaacctaggacccagcttgtgactcggcatccgaaatggaaccaaactaggacccaagatcgtgattcggatatggacccagcgcttggaccaaacccatagccgttgtctgcatttgctgaccaactccagacctgaaccaagaccaagacacgaaccaagacctggacctgaacccagtcccagacccaaacctagacccgaactcgtaccctgtgacccaaaattagaaccgaaacttgaagtataccgggacccgagaatgggactgaaactaggacatggacctggaaccgtaaccggacctagacctagactcgaaaccgtaaccagactaagaacaagactccaactcaaacctaaacacgaacttggacccagagctggatcccaatccagacctaaattagagccagaatcgggaccaaggactaggactgggacccaagacctgaccctgatctcgatcccagacccgaacccagacacggacacggatgtaggattcgaatcgaaacgagattgggacgaaagattgggatcaggatctttacccacgactggggcttggacccaacccgtagtcggtgtgtagatcttggaatcgtaccaagacccgaacctggaaccatttccagaccaggacccaaacaaaaactcggacc

SEQ ID NO: 135781 - DNA, 786 bp, Cannabis sativa
gattattctttttttattctgttacatttctccattactttattctgattcttaatactgtatagcaaattcattcaatcaaatctgcaccattttgctcatagagcattcgatctgcagtaagtactgattttatattttaaaatatggattggttagtttttttcaatcggttactttttaatattgaataatttaatattatcaaaaaaatttattttcttacacaattaacaacaaaataaaataaattaatgttattttatgctcctaataataaattaaaataaataaaataaaaaatgacaaatttgaaggaagaagaaaataaattgtatgtacaaaaaaaatatttaattttgttttagattatattttcataaaaatagaatataccatatgtattagatttttaaattattattttgtacattaaaatattaattgtatatataatttttttttttggaatattatataaatatgtgtgaattagatttgatcggttagtacatatcaatcaacatctaattttccagtctaattaaatctataaagtgtagatttctgcactttacaaattagatattttatgaacacccttaaatatattcaagaatttcacatttcatttccttttttatagtatctaaaaaatctaattaaaagctaataataaaaagataaggggaattttaaaaaatatccttcttttatgttttatttacaattttaccacctaaaatttttaattacaaaattctcttataaagttttaaaattata

SEQ ID NO: 135782 - DNA, 1278 bp, Cannabis sativa
taaaattctgcatagtcaacgagttaatctcattcagatttttgagtattttttcagggcctcttgcgtaagagttttttcgtccctttttttagattgttttccactatttacaattgcatagtagtagttaattacaagtcaggccaaaatgtaattacagtcattatcccttaaatcgcgggatctgattacatattataaaatgtaaatgcggtgtaggattttgaaaatcatttagctgtgattttcccgcttttactaggtcagaaatatcgtgtattaaacacgtcttcaattgtttaatctggagatctcttgacaaaaacttgatagcattgatcccaatggcgagctggaatcatatttctttccgaggtcgacttgacatgttttatgtcgattgcgggtatatggaaatcttctgagttgctagggttatgagcctcactcctgttagttggatggaactatagggagcttcctcgtagcgagatggtcatctcgcattcttgttcttcgagctgatttgaattttacacttagtttgcttattgcaagctagggtatgtgtaacttttctctggtgccttgctatttacctttagcgatatatggtttcttgttatacattaagtaccagttcgtacattgatttcttgcctaagaccttacagtcagcgggttacaaatatactctgatacgtatgcaattaatgagttattccataaaaagatatggctacgattcacattccctgtaccttgacacgtgtcctccagccgaattttgagtataacaattgccccttaaaaagttcttttttagtaaaaagagctttttaataattacggggggcatttttgccaaaatcttttcttggaaaggacgcctcctttgattctggcagttgtatggtttcgaaaatcattataattagcctatttacattctacacgattcccagctgttagatttctcaatctttagctttcttgtcactgtacttcgtgtataaaagggcgactaatgcttgtcatttttcacaaaacttttggctctttagtgaaatccattttcataatggatcacttccttactgccaaaatgtctctcctgagtttagaagtttatactcacagacttataatatcaaatgcaccaaccaatttccattcgttcctaaagacttcaagcctcaactagagctagaaatgattgattccagggctgaggagcttccgaccaatctcaaccaggggaaccccgtcttagaa

SEQ ID NO: 135783 - DNA, 1009 bp, Cannabis sativa
gaccttccccaggcgatgtgggattgcacaacttacccggtgtttcctcttatggatcacgggactactgactgtcacaacagtgtctcatgagtactgcaatgcataaatttgttcatcctgtagaatctaatagcctactctattcttgagtgttgagattggcttgaaagattacaatgtgaatttttttaacgaaattcttagattggatgatcgttattaacttaaaagatagcgaggatcccctgatagggtacaagaggtattgtctctctattcattagtctaaatttaatttatatatattatgttgagatccttggacttatgattcatattgaataaaattgtttttatcaaatccgcttttacttttctaactctgatatggaccataaaaactatcaaccttggctttaaaaatatggagcattggaatattatagcggtagggaacatgtttgggctctttctcaaaagaagaataatttgtgagttaaatgggttcatgctgtgtatttaaaagagagtgattggtgggcttatataaagccctgtaagattgtagttggtacgggcttaaagtgttaggatttatcaaaatacttaagaaatacaaataattacagatctaatcatatttcaaaagtgctttaatatagaaaaccctataagttatatttttatagaacctttgttaaattaaaaaggaaaaatatgaatacatatgagtagaaacactaatctgaagccattgttggagattgttcagaaagttattatgatcttctaagaatacactatttctttaggggccgtttggtacgcatgattggattggattagataaactaatttgtccaatccagtgtttgggcatggcagaagtttgggtaactaatccagctaatctcatctgtctaggattatttatcccatccagcaggatgggataaataatcccatgcaggtgagattttttttttaatgttgattttattaatat

SEQ ID NO: 135784 - DNA, 534 bp, Cannabis sativa
gaagtcttggtgcttccttttatatgcattggttttacaagtcattatatttgcttaggtgtcaagttagataactaacttaactagccaatgccaagagtaggttggaatgatgaagtcgcattagctcattgggacaaatcatacaacaaatccacctagtttgctccaaagagctaatgacagagatgaagcttatgagcttctgatgttgagtaggttcaagcaatgtaggaacttgtctcttgtaacactcttagtgaagatatcagctgggttgtcatgagttcttatcttcttaacttgaacctgtttagatgacacaatgtctctaataaagtaaagtttgatatcaatgtgctttgacctctcatgaaacattggatttttcatgaggtgcaaagcactttgattgtcacaatagactgtaatgtcctcagatttgaaccatagttcttctgttaaatctcttaaacatatagcttctttaatggcctcagttggaaccatatattcagcttctgttgaagataa

SEQ ID NO: 135785 - DNA, 768 bp, Cannabis sativa
ctacaccaccgaagctgaaaaccacctaagatgaaagagattaagcgtttgagattgaaaaagagaaagagatgcgagaacgtacctaggcactgtcgatcagggtgtggctgctactagcactactacaaaaactattatttctgatgatcctaaaaacatattttttgggggactgtcgctaaaaaattaagtgagtgtttaaaactgttagaaaaaattgggtactcctgacggttttaaacactcgtgatgtcccaacagtttttaagcgtgccttaaaaattgcaatttttttaaagcagaattgccgacgattaaaaattgtcgcctatagtgtaatatctcaaaaatataattatgaataattaagatttattatatattatgtgttaagtaggtagtaatgagtaggattatgatcctgctaacctaatttagcataaattataaattttgctataagtagataaacaagcgcaatttattaattacagagatttatttagaatatgtggatatagtgtaagttatttgtgaaataaaaatattttcaagttcgacgaccctggagacacgattggaggtcaaaaataccacaatgattttcgttagcactattgatgggattattgagataagttgattttaaaattactaaagtattttggggtactcaaagttgaccaaataccttaaaattaaaattttttagtggttaagaaatggtaaaataattattattaatgtatatattattattattat

SEQ ID NO: 135786 - DNA, 715 bp, Cannabis sativa
aaacgtctaggtttgctctcagaaattttatcaattctcattttaattcgagcaacaaatcctttccgatctttatttttctggccgggatatttggatcgatcttgatctcttctaactcttccacaggtccaacattgctgcttgggtccccaagtcgaggatccacatcttcatcccccgccttgggaagttccctacttggaaatgtttttttcccttgtctgtgctctggctggagaatacttccttcttatccttggccactgcaaggttataacattctcgagcagtctaaaggtttcctcttagatatcctaccccattctttgttggaaacttcaggcacaaatgccatatcgatgtgacagcctttgagtcatacaaggcttgtcggcctagcattacgttaaaagctaaaggaacatctaataccagaaattgtgccatgatagttatgctcatcggagcttgtccaacagtgaggggtacatgaatttgtcctataggtgctactctttggccggagaaaccatagataggcaagagacatggggctagatccttgagctggagtcccatcttttcataagtagttttgaacaagttattagaagaggctccgttatcaatcatggttctagccaccatcttattagcaatttggacctctacaaccaacgggtcgttttgtggaaacctgattttgacagca

SEQ ID NO: 135787 - DNA, 1193 bp, Cannabis sativa
ttttttttttcatttttcatttttgaatttagcattcaatttctttttacttttatttctcagttttttatttcaaaaccaccttccaaccattcaaatcttcaaaacccacgttcaaaacccacaaaaccacctcccacccataactttcgccatcttcttcttccaactgtcttctttatcatctttttatatcttttatttcgtatatataatggctattacccgtggctctgtttctccatctcaattgccaaaaaaagcttcaaaaatatgtcataaatcagttgctaacaaggctaaagaaaaacgtccagtcatcgacggttgatgactccgatgtcgctccccccgtggctaaaggtgttcgtcctccagtaaaaaaattccaactctgacagccagaagagaaaaaaaagtcaacttcaagacagttgtgatggaactgtaatgcaaccgttatatctgttgcgagtcaactaacataaaactacaaaataattaataattctacatatttaatacaatcgaatattacatcgtgtttatctgttcaggtcgcgtattttgacaattctgagccctatttttataatactatgatattatagtagcaaaactattattcaactaatgtccaacttaattgcagctagaaatgttaaatgtgaatgtgtctctataagaaactatttgtcaatatttttttgtcactgatcgataattaattataccttaatcgtaatacgtggagaaataactgttagacatctataaactaactttatatcaactaatttagtatattaataaaactaatatgttataaaagtttctttaaagagctttaatgtattgtattgaagatatgaaataattgtaaatatgataaaatttaatgtatcgttatcaatttgtaataatttatatattaagtttcagagagttagcaaaatatttatgcaacactaatacaactgttatgaaatattaaaaaatagaacagtgtttccatgtacgtaactctatctacatgtctattcgcgatttaatatgaacaaattaaccattgaaagtttgaaaaataacgaaaatacatcgggataaacatttaactatagtattgatgtatttttttttttttggattatacatgagttggattttttgggaactccagttcaactttttga

SEQ ID NO: 135788 - DNA, 1235 bp, Cannabis sativa
ggcatctcaacagtcatgactttacaccttcttcattaatttgtcccggtgtttttgtgccatgcggtgctattcttgacatgtcattgtcattaaaaattgggtaaacatttgccccccaagtttctagcggtatggctatacggtagaaactttctggtgttgttcgggtctatcttctgttgttgacgacttgacatagcagcaccaaaaatactatgcctatactaaaattacgttttttttaataaaaaaaattaaacaaatatttcccactcactacttttcacattttacaatatagcccaataataatttcccaagaaaaataaattacaagaaaataataaatttcaaagaaataaaactatttacaaagaatgaccaacaaaaatataaaaatttctctttagccctcaatggtagtggagggttataatagcaattttggattaaaatgccctcttttgcaaaaataaatttccatatgtaagaaaggaaagaagacaaaccctcacatttcaaaaagttaatcttctccattttgctcttttcatttttggggttggacacatcttatcaccattggaggagattttgaagctttgaagtgattcttggacacttggtagaacatttattcactatgggtaaatatctgactcctccatagtcattttttacattaaaatcatgtttttggtggtatttttgaaactttttcttggttttcttgctatggccgaatttgacatgtttgattgggattcttgaatttcttgatataatgtgattgtttgatgcttgagttttgtagtataggtgatggacaatgtgtctttggctttgatttggttcaatttgatgaaagaaataaggaaatttgaaatttttaggttggtggtgttcttgaatattgaagaacactatgaacataaaaagtttcaatttccctccatttttccaactttcattttcatcaaattgataaaaatgtgtttgtggtggtgaaacattgatcttggattttgttttcttagccgcaccccgagatacccctttggggggtcgggttggtaccccaagccaaccttcttggaggtaggggcggcatcttgatttggcttccttggaagtcggggtggtaccccgagactaggtgccattgccgatcatacttgcttgatttaaaagtcaagcgttatttttagataaaattatccatagctaattat

SEQ ID NO: 135789 - DNA, 923 bp, Cannabis sativa
ttaaaaataaatccaatagagtgattatatatttattcaaacaaccttaaaatttatatcattctattcattccaccaaattaagcaatcctaatcctaaaagcttttgagcaatctttcttaccattacatccttagcaaaaatctatagcactcatcactttcatattttgtcaccattggtcttaatctaagcaacttaaaatatttaaggtaaggaactctacatttactcatttattgatcacaataaaaaaaatattcatagattttttttcttatggaaagagatatgtcttagtaaaattatcttatttctctgaatattgatgatctgtttccagcaatcttggtaccgttggaaatattattacatgccccataaatttctatgaaaaaaccttttgtaattcgggttgtgttgaaaattcatttttcttctgtattatgcaattcgttttttaatattgttcttgaaaaattgttttgactaacttgtaatatctctttgaatataagtttgatttcaaagattttgatgtcaatggaactgaaactttcatgaagaaagtattccctgggtcggaatatttatgtgtcaaaattttgtatttttttttattattatatcttataattcgttacaccatatttcttctcaaaattatgataactctcttagttttaatctattttcaatgatgtgcatatcgttggaaagctaactgaattttttataattttgatgaagacaactttactaaattcatgtagtttttagttaaatataatattattttgtaaaaataacaaggaatatggaattttatagccactcttctatggtattttttcatatttaaaattttttatggtatttgatatgccatatttttgtaaacctattatccaaactcatattt

SEQ ID NO: 135790 - DNA, 868 bp, Cannabis sativa
ccggcttaagctacattccacttatatttgtcttctaatgcagtcccataaattaataatagttttcttttttttttttaaaaaaaaaaaagaaattaattatagtttaaaacgtttgattaactattcaattaattttaataaattaagagttattaacttttgcttaaaacaaacttagttgcttctctctcttcatgtaatatatatatacacactacgttttttagatcaacgtgaatggtatgggatggccgaaagcctataataaagaatataaatcaaaaaatatatatttaaaataaaattgcttttgatccgaataatgtccacagtcgcatatagtggcatgaatcactattaaagagaggagacgtctatttttttaggggttggtatagcttgacttgatatatatatatattatatatatatacactgataaatatataattaatcatacatatatagtacatagcttttctatttttatatattattcatattttttgaaagacaaattgatatatattatacttattattaattttagaagaataatatatatgagttaagatggaattgcgccttcattcatttttcgtcggttttaacaattccgaatggcactagtactacgtacccaaagcaaattctctcaattaattatttccatcttatcataatttttctaaagaaacatatgagaataagttttaaaatttaaaatctaattctcaatctgtagatattgatcaagtgtgcctaatgataaaataataagaataattttgcaattatttatttttatttttaaaaattaattaaagttattactttatatattgtttttttttttttatttttt

SEQ ID NO: 135791 - DNA, 1168 bp, Cannabis sativa
  modified_base (1121)..(1125): a, c, t, g, unknown or other
tacaaaattctgaactgggggtgtcccacaccagtagagattgagtatctttactcagttaaggccgttccgtcaaggaagaatgctacagtgagcttctactacctcggtactcattctagcgagcctaaaatcattattgaatttccaaatgaagtatccttcaaggacaacttcttttggacatctggtctttcccccatcggcacaaccacttttcgcaaactttttgagtgattgttttcttcttgctcatttatctcaatctttgtttttcaagtttctgaccaatgttttatttgtttttatagctctcttgacgaggcctgctcctacccccgagatggtcagtcggcacaggcgcttgataactcttccctacagtctttggtcatgcaagttccttttgaatgaggccaacttgcgattggtgggccttctcgctcacaaagaatatacttgtgattacaagattcccaagtattcttcttagcagcaaattacagttcaaaacaaggataagtcctgagatcgcttggctaaagcacaatatcttcaaaacacttcccccccgggaagctggtgaggcagcgtcttgaggtaatcaatgtggttggtctcccacagtacttagggctgaacgttgtatattagttactttccaagactcccgtcttaatttttatatttgggattcccttcccgtagattgaatttctcataagtttgacagctggtatcctagattccatgtccagattaactgtcacgagtcatattattgtataacagagcaatacgacactatggaagatagggcaggtcatatagatgcgagctgggatatagaaccaatcgagccttttgatatattcaagattataggctgtaggaactttagtggatattatggtccttcaaccccttcgtctagtgatagcttgccttctagtgactttggtaaatccattaggtggaaaattgtattcctccctttttcatcgggctttttaataattgtaacgctttttcttgttttgcagacatgggttatcaagatatcatagatcgaaaagggaagaagagggtaaccatgtagggttttatgccctaaataaaannnnnttcaatataatcagatttagttatcaatatagatcagaaataa

SEQ ID NO: 135792 - DNA, 656 bp, Cannabis sativa
  modified_base (229)..(234): a, c, t, g, unknown or other
  modified_base (470)..(471): a, c, t, g, unknown or other
tgtgcgagcagatcatgtattttgctcagatatgctatcactttttctccccgagcctcgtattcgccagatacacaatttaccattagctgtgaatcactgcatatctcaatgcgctcggccttcatctccttcgctagttttggtcaagcgattagggcttcgtattcgaccttgttgttagaggctttgaatccgaatttgactgctgcatgcaggtgttgccccnnnnnntgacaagggcaattcctgcaccggataattgatttgttgccgacccatccacatgtagcttccaggtcggtttgttttcagtattactcagttgtggtattgcctcaagatcgctttctggtatgctgtcaattttgcctatgcattccaccacaaagtcggccaaggcttggcctttgatagctgttcggggtttgaagttgatttcgtactgccccaattctaccgcccacttnngtaaccgtccagaggcatctggcttttgtagtatttgtcgtagtgggttgtcagtgtacacccgaacaggatgaacctgaaagtaaggtatcaactttcttgttgctagaatgaggcagtaggggagcttttctatcaacagatatcggccttcggcctcgatgagtcttttaccgatgtaatag

SEQ ID NO: 135793 - DNA, 638 bp, Cannabis sativa
gggctacaagggtagaagtcttcagtgattcacagttaatggtcaatcatgtattaggagaataccaaacccgtggagaaaaaatggccgcttacgtagcgattgtcaaagaactgctccatgacttcacataatacaaagtggaaagaatcccatgagaaaagaacgctcacgcagactgtctggccaagctagcctcggacagtgaaatagaaaaactgagggtggtacccgtcgaacacctcacggtgccaagcatcaaagccaaagaaacggtagctactaacgagcaaggaccgagttggatggactccatcatcaaatacgtaacgaaaggagaattggctcaagaaagggctgtatccaagaggttatagtatcaggcacatcgatacgtaatgatggataatatcctttacctgagaggcctcagcatgccgtacttaaggtgtgtgtcggactctgaagctagacggatcatgcaggaggtccatgaagggttttgtagagatcacaccagaggtccgagtgtctcaaagaaattattgagacaaggatacttttggccaacaatgaagaaagattgtgtagactatgtcctaaaatgtgattcatgccaaaaatttgcgaacataccg

SEQ ID NO: 135794 - DNA, 664 bp, Cannabis sativa
agagccttttcaaccatctctacatatgatgttgcctcattggtagtaatcactaggtcgtgcctaatttttaaatcagacctgtgggcacaatacccgaaaccagcttggccagacagtcaaattttgttgtgtactcagttactgacataccctcaatttgcacaaaatcaataaattcttttcgcttagcactgcgggctgcctcattacagtacttggcattgaataaaaatctcaaaactcctcctaggtcagaacagtgacggctcaggtgagggacaccaattcccaccacacgagggcgtcttcctggaactgaaaagtagctcaagtcacctgatcatttccaacaacccccatgaaattcaaaattctttctatcactgtgagctactgcctagctttcatcacatccggacctcccaaaaacactataggtgcttgcttcggaacctctctcgtaaagcgcggctctccatacggtttccagcaacaggttgttctgctggcactgcaggaactacgacagcctgagcttgcagtggatgcactgcaggaggaccctgctaccttagtctcaaaattttttcatcttgctggcggatacgatcttgcatttctgcaaatctctactcccaatccggaggagcttgaggtggat

SEQ ID NO: 135795 - DNA, 961 bp, Cannabis sativa
cctggtcaatgcatttcaaaacatccagattagagttgttatgtattaaatcatttcgcactttccagatagtttcgacaataattgaagcatacaggaaaacttcttccccccggatccccctagagtttagattccagataaatttgacccaatcccacattcgaatcccagtattgcaaataggatagatgccccaaggtgaagtgcgccataagcgcatcgccacttcgcaggacaagaaaaggtgttccatggattcttcccccaagccgcaaaaggggcaacatgtgtcctcaatgtggaaccgcttactaatcacagatctaattgggagcgcattggaaaggatgcaccaccaaaggatcttatgcctttccaatattatactgttccacaacttgttccaaagagccggggctacctcacaacgatgagctctatccagagcttgagacaaataagcagatttacttgtaaattggccacttttatccaatgtccaaacccatctatcatcccctcgtccggagggttttccccctttagcaattgcagacactatttctttatcaaataagccatttagctttgggaagttccaatctccattctcaagtaataggtcatcaacacataggtcattggttaagacccattccttaggtttcggaataaaacctagcaaatgaggaatccaggggtccctccaaatgctagtcgtccttccatttgttacaactttacaagcccccttccttaaaatggctttggctttgacgatatttttccagaaccaggaatcagaatccctgtagctacaattgaggaacttcttcccttttagatacttggtttttttagctacaatcctatttagtttaagtttagactcgaggtattatgctaatagtggtttttttttttatatatatatatatatatatatattgggggagga

SEQ ID NO: 135796 - DNA, 1443 bp, Cannabis sativa
  modified_base (981)..(985): a, c, t, g, unknown or other
cttgccatatctctgcaatctgattcccaagttatagggatttctttgatgactcacgatgaaaaagctaaatttgctaagagttgatcgctctgcgcggattgctgatcgctttgcttcagacgacatggatattatgatgaggcatcctgttaggactatattctccgagcagatactcaaaatcggttccacgcgtcaccatcatgtgatgccacgtcagagtgcgaaaattgggataacatttgccccccaagtctgtatgggactttcgaagttgcgtgtagacttcatccgagttgcttctccatttgcttctccatttgaatgggatttgaatgggtgacacatgttaagcgcgcctgttcgcgactcgatgtgaggctgactgggggtccctttagttttctgctaataaatgctctaacaattgatattttgaaatatgattttctctcaccacggttgacagtggcactagattatttttgatttcccatattcgcttttaagggggaaccgaggcatctgaggttttttttttaaatgattacaaaaactcattttcaccatccttctttgctaagtatgttcagagcaaaaagagaggttttcggcttcaagcttgctgaagtgccttcatcgacactgctcgtgtggtatgacattacctgaatccggacatcttattcttgagtaagttcttgatttcctttatgtttactttttgaatgcacctccgactttgctgtagaagatatgtaggaaaccctaagtttacaaaccatgcaatttttctttgtcatggattcatgcattttcacagtccataatgtttgctttctgaattgcataatgcctatctttcatcttgcttattctaagcttcatgaaatttttttgccgaactcgaggaaaatttcaaacttcctgagttttgacttttcgctgaacattcttattctttaatctgttgagtannnnnggtcggcatatttgcttattttaaagtttgatattccgaccgaacactcatcttgtctgttgtcttttgtagatgaacccaggtgagttttaggatagcgaacatcgaatcgaccaggacttgcttcaactcttgcacgaggaccatcctcatctctgttctagcctaccttcttccagtgaaagacattcacccttaaatctttcgcccaaccatagaatgatggctcgaaccaaaaagagaacgcgcatggctgatgcatctgaccctaaattggctcggcacgccactttgctcagcgccgaacaagatccaaccgtccaggagggggatcgtgaaggggaggctgaggtccaagaagttgaagagcaggacgatgtccgtcctagcagtccctctgaggcagaggaagagattgcacccccaaactatgggggatacaatgaggctagggagcc

SEQ ID NO: 135797 - DNA, 544 bp, Cannabis sativa
ggtgttcgccattactcaggctgaggcagaagccagtccttctgtggtaacaggttggctcttggtcaacaactctttttactctatactgttttatggccactcattcttatgtggcagccagaatctttagtaaattggatagaccacatgatagttacgaatcagggtttggaacccttttacctgcacggagagttagttaactccaaaaggtggattaggtctatgccgatcaggattgacgatagagagttgactgctgacctaatagcaatgagcctagcagatttcgatatcatacaggaaatggatttcttatccaaatactcagccagtattgactgtaagaggaagatggtaatctttcaaccagaaggtgaagaaccgtttattttcgtcggttcggtttagggatctcggatcccggtgatttcgaccttaatagttaaggaatttttgtgtgatggatgtctagggtttctggccgtggtagtagacaccactcggcctaaccctattcggccagaagacattcaggtgg

SEQ ID NO: 135798 - DNA, 1757 bp, Cannabis sativa
  modified_base (37)..(63): a, c, t, g, unknown or other
tatctatttaagatatcctacaaaattttgagaaatnnnnnnnnnnnnnnnnnnnnnnnnnnnatgttcaaacagtctattttacacacatgtaaaacaaaatagtcacacgtgcaacacactgtttgaacgtagttttcgccatgttaaactttttcgaattttttaaaattttgtaggatgtctaaaataactataacgtatatgatcatgagataaaatttgactaaaaaattatttcggatgctaaaacagataggggtgcatcaatatatccattttaagagggtgcattatagaattttccaaacttaattactctaaatatgacattttttaaaacaaaacttacaaatatgggaaaaagctataaagaatatcataaaaaactttaaatttgtgtttttttttaaaaaaaaaataaaacgctaaaataaataaaaaatgatctcaactgtagatgttgttttttttttttacagaaattaaacttatttttttatttaaattattgtttgtttgttttttctttgtttttttttttttgttaaactaggaaacaaatcacgcttcgcgtgcagttattttttgtttagtgataattaagttatataacgttcttagaatatttttagagtgccacatcaccgcctcatacttcattttaagtaaatattaatactattttgaaccctaatttttagcccttattcttttagagtctttttatatataaaattaaatgttggacatcatgttttgtgaaactaaaactttaactatatatatttgctaaaaacaacaaaatatcaaaattctattcagaccctttatattttaaaactcttaactgtaatatttgtttggaccctttactattaaaaattaagatttttaaaaagttaaaaaataagaatatatatcagcaatgaatcttagcctacccaactcaactatttttaactataaatttattcgaactatctttaatgaagtcagttataaaccaatatctaattcctttttttctagtagtgggaaaaaaaataaaatagataaaaataataattttttgtttaataatattcatctatacaatcatgacagataaaaacgataaatgagagtgaaaaaaatagtgtaaaagtattaattgatggattttttttgcttaatatattcacaattagtaacttaatatttataaataaattatacatttttattcattttaaaaaaattaaatgaaacttaaattcaaaatatccaaaacctaataaaaaaattaataatttcaaatgattcttttaaaaacaattttaaaaaaagggaccaaaacgtaagtttagaaagctaataaataaagtattattatttaaaaaataaaataaaaaaataaaaaatgagtgaattaaagagtgaataaatatattttacatattaattgataggcgaacgattttgtgcctagaagtgtgaatcacggattggaatccgttgtacggcaggtaggtcccacgttacaatagttctttttttacttatttaatttagttgggaaccagttattctaggtttgtttaccggttgtacagttgtttttttaattaaaaagtaaaaaggtacaattaatttactgtttatgttagttaatgtagaaaaaagtacaacagctttactgttcgtggcagttaattgtacaaatatactgtaggcagtgggtccatgttgtgggagtggggttattttggtatttt

SEQ ID NO: 135799 - DNA, 563 bp, Cannabis sativa
  modified_base (328)..(328): a, c, t, g, unknown or other
agcactggaaagttatttaaactgaagaaatttctaaactatttctttctctatttcattttggatagaattagagatatgtcttctatttattcagatgcacttaacaagcaataaagaattcagtatccctagaggagtaatacatatagaaatatgatgttgcataatgttttatgaacacaaaggaagtaatggtggataaatcagttgcttaccatagccttacagttcctgttatttgggtttagtcaaacacactacacttgatctagatatcaagacaatggattgattgaaatacacttcttgttttatgttagtgcangtgggagtttgttgggattttatggcctaaataaaatacatttcaatataatcttatttgttatcaataaaagatttgaagtcatttaaatttatatgtagttttcatgtttaggatttagtatacaatttctaataaatctacaacatatatgtattcacaattacagtgatgtcaacacaatggaaggtaattgtgattatatgcttcaaaagttaatgtcccatgattcatc

SEQ ID NO: 135800 - DNA, 636 bp, Cannabis sativa
catgataatgatttactttcatgtaatatgaattaaaacgatgatttatgttgatttggatggcttcatgtggtttatctattacttaatgaatgtatgtgattttcagaattttcccataaaaaaagttttatttttctttctgaaaatattttatttagattccttgtgaaaaattaagcaatttttgtttttacagaactcaattccgataaaaattaaaaaagttatgaattttggaaaaatcgggttgaagaggtgtcgagtgggtgcatcgaatgcaccaggcactcggagaacaccccatccgcgcgcgtcctttagacaatttttgtctaaagcctcggacacgcacgctgcacacgcccatgtgaccctgatgtctgcccacgaagaccctacaagcgccgaggattctcgcccatgtccctccttccgcgcgcgtgtctctgggatttgcagcttcctagggctgcacgtgcagcctactgggctgcctacacccaaaaaacccgacttttgagggatttttccctaaaattcgatttttccaatattcaaaccccaaaattaaaataaaatattattttttaatatatttgaacttaaatatcatttttaaattaataatattta

SEQ ID NO: 135801 - DNA, 1300 bp, Cannabis sativa
cgtcagttcgggaagcagctagagtgatgcactcatgtataagagccatcattctatgaaaataagggcccaatagaggcttgaaccgaacacattaccgaggtaacgtataaaagaatgtcaggaagagtagtagtattactaaggtaaaaaagattacttgaattacttaaggtgatacggtaatgatggagagtactttataattgactggatagtcaatctggtatatatataaggataccattgaaattctaagaaagtattactttaataagcaattttggaaagacattctcacccagaatgggtaaaagcttatgaattgagatgcaatttattgaacatgtaattgagtgattggtgaatgttggatcacaaagtaggttgtttattaaacaacgagctatataattgagtgtaaaataagttttaaagtggttaaccaagtctggagatagtgatgattgcaaggaagcaatggtagcatatgtacagggagtgaaaccttagtggtaatgatggaaaaaaagaacacgagagtcttagatgttgatgaatcatcatcatcaatgggagactcactataagttggtatggtcatttgtaccaaggggttatcaataaaataaagaatatactggagatatgtatatttctggatgtgtttgaaaagattatcaagatttctaccaaacacaaaaaagaaacttcacgatcaaggaatgatctttgattaattgttatcatttgagaattcgggaaaggggtatttccaatttagttatggatacttggtatgagcaatgttgcctttatcgtgtaggttacatcaattcactttataatggtagttaaccataagtgattgagaaattataaagttgtgtcagtttaagagaaattgatacaagttaaaataagtagaaatgaacaagatttaagttgacgatgagatgggaattcctcaagttaagtgaacaaaaaccaatgaggaattgcaagaggttaatgaagggagtgaagggaactgattttttttctttcttacgaaagaatgaaagaaagaaatacaattaagaacgacaaaaaaaagcatctattttctgataacccaccatgagcttaccttagagttaagcatacttaacttgggtaatctcaagatgggaatcttttggggagtcatcccaaatagcgtatgagtgaggacaaagtatgctagaaagattcatattaggatacataatcggtagtcgttccagagattatcaagaggaagtgatgtgttaataagcag

SEQ ID NO: 135802 - DNA, 1167 bp, Cannabis sativa
aaagtcatagaagagctcaagaccggctgtctccaaggcatgaactttctctcccagcctcgtcaactcagccataagctcctcctccttagacttcttttcctcttctagtcgacgaaggaccgctcgaagggatgtcttttcatcttgaaggttgttcacttcagcagataaggtctcgatggtcttttcaagtcagtcagaagcctcgagatccttagtcaactcagttattttcttctgggcggtaaaaagcttcttgatgacttcacccagctccaagttccaccctggtgtcatcagcgtccttcctggccaagtccacctccgccctcataatgttggacggagccgcgttcttggaagcaacagatttagcccgggagtatgtgtaagccaacttcagactggcctgcacagagaaaaaaagaactttagaatttgagccaagtacagaggattaaaggatattgtcaagaaagacttacccttgtgaattccttcaagactccaaccatatgcagctcagacccacctttggttgttcaggcctgtccgaacttcctcctggagactccttagacttagcaacttttggagtagagggttttgcaacaattggctcctcggaaagatcaatgacctccctaggaagtgtcttttccaaagaagaggttccctcaccgcctctagacttcttggccagaggagatgcgctggagcatcaagcatcttttgagacatgtctgcacggaacaaaaacaacatgattagagaaaacagacaccagaaacataaagcataatagtcaagaagcttaaaaacaagacggagtaatatgcatgatgattgctcgggcaagactcgaaagtccatcatcacctgacatgcctcttatttcggaattaatgtgtaacaccctaactagcataggcgtgttaacatgattttagacgtactgtgcagctcgttgctaatcaacgaggtttatgaaatcgtgattaattaaaattttgtttatttaattaaatacttataatataacatacaaaagacttcaggatcccgtttacaaaatactttacagaaaagtttgctattcaatacaaaatatttgtcgcccagcaactaactacaaaagcgttgatgtcccgaggatcgtacgct

SEQ ID NO: 135803 - DNA, 661 bp, Cannabis sativa
tccttgcaatcatatcactatctccatacttggtttaaaaccttattttacacttaattatatagcttgttgtttaaacaacctactttgtgatccaacgtttccaaatcactcaattacatgttcaataaattgcatctcaattcataagcttttccccattctgtgtgagaatgtctttccataattgcttaataaagtaatactttcttagaatttcaatggtcttctcatatatataccacattgactatccagtcaattataaagtactctccatcattgccgtatcaccttaagtaatccaagtaatcttctttaccttagtaataccactactcttcctgacattcttttatacgttacctcagtaatgtccccacttcaagcctctattgggacctaatttccacaaaatgatggctcttatacatgagtgcatcactttagctacttctcgaactgatgattggccccccacaaaccaatccaagtgtttccaacgtgctttgctccgactcgcacgcttcatgcgaaactttcctaaatgaaatcaccccaagtcaaggacactcaaccatggagttccttcatggtgagctacacaaacaagatgctttttgctaacgtaggtagtcccacgcctacataatctcaaaat

SEQ ID NO: 135804 - DNA, 819 bp, Cannabis sativa
  modified_base (61)..(74): a, c, t, g, unknown or other
tatgtgtttatttcattgttttggaattcatattaggatgttaatgaaacatacatggtannnnnnnnnnnnnntggtaaaatatttccaacacatgtcaataaaattttacacatatattaaaatatttgtattatgctaatcaaattatatatcactattatacatagcaaaataaaaaataaatatcatttaagaaaataatatatcatacaacaaaataaaaatatattatataacaaaatctatataccaacaacccataaaaaattaaaaaaatcgacataactttaaaataaaaaaaaatttaataaaattaatatagatatactataatctttaagtaatttacttctaattctaaaaataaattttaaaaaacaatatattaatttttttttatgtggcaaaagataattataaaaaggtcatttctcaacaagttttaaaataaggacatttacttatataatgctatgatttggggttatttgctataatttttattttcacttctcatagtagtatgtggactttatatttgtattatggacttgtgaattatggatatggggaattttctaagtttcattgtatgaattaaaatttaagttttaataagttttgatttataattcataagatattgaaatgtaaatggaaaaagatacttgtcaagttctttataggaatgcacatttttcccatccgtctaaatggggaacgggacgaagacaaagattactttttgtctctaaatgttaaacgggacggggacaagaatcacaccacactccgacggggatccatttagtattt

SEQ ID NO: 135805 - DNA, 826 bp, Cannabis sativa
acttctgagaaaccaaatttctgcagcacccttgaaatgtaatccttctgagatagcatcagcctttttccttgtctatctctaagtatctcaatgcctagaatcttcttggcatgcccgagatccttcatttcaaattcagagcttaacatgtcttttactttccttatctcactcatgtgtttgcttgctattagcatatcatccacatataagagtaagaaaacagtactcttagtattggatgatttgacatacacacaacagtcataggcactcttcttgaaccctgatttggtgatgaaatcatcaaatcttttgtaccactgcctaggagattgttttaggccatataatgacctttttagcaagcaaacatgatcttcttttcccttttccacatagccttctggttgttgcattagaatttcttcttctaattcaccatgcaaaaaggctgtttttacatccatttgctccaattcaaggtcattcattgttgttaaagccaagattagccttatggaagtgtgcttcaccactggagagaagatctctgtataatccactccttctctttgtgagaacccttttgccaccaatcttgctttgtaccttacttcttcagtgccatcaattccatccttaactcttagaacccatttgcaaccaactacccttctccctgcaggttttaagatcagaacccaggtcttatttttctttagagattcaatctcttcatccattgcccttccccattttttcttgtcaactgacttcatagcctcagcaaagcttctaggttcatgttcaaattgctcta

SEQ ID NO: 135806 - DNA, 1304 bp, Cannabis sativa
gttaacttaggtagtaacggacaaacaaaaatggtgaccttatggactattaccgtcaatttttgaggttgaggacttatctgcatcaaactggactttttggagacttatgccgcaattatcccataataatataaacatagtatttatacataaggtcacattaaattataatttcgtttattttcttaaacatattttttaataactaataagtataaatgttacattttaaattatttatgactttttaataaacaaaagaaaaagtatttattcaaataaataaataaacttaagtgtttcatttttaaaattgttacgactttttaataaacaaattatatttattatcataataaacatactagattaataataactttataaacattaatgatactaatcaaatatataataaacatatatattgtttataaaaatataaataaaatattctttttttaatttcgttttaaattttagtaaatatattattttagtaatatataaaaatataaatattaacttttacatttacatatttagctttatgcatttatttattttttaaaaaaattaattgaaagtaatcaacaagttaaaatcgtaaacatatatgtttatttgtaaatattttttattattatattaaattatgtaattatattttttgcacattttttgtaatattgtacatttacttgtatattatctttaatgtattttcttttatatttctaaaaataaatctcatcaaatccttggaattaggttagaattttattactttggtttattaaatgagtttcctttttatgttagtaacctctcttttgagtttgacttcatacttagatgaacattgtattttcaaaagtatcattcgtgcacttgaaagtataattaatacttaaaaactttcaatccaacattatatttatatgtaataaagtctatcaaaaacacaaataataatacatttatttatttttttcatgaaaaatttattttactagtattacaatgtaaataaatcatctaggaccagggcccccatatgtcatgagatgtccaaagtcacttttaaatccccaatctttaactaaataaaagtcaatatcgatggatgaaatatgtgtgtgtttagcatcttcttgtatgtgtgcctcatttatagttgttaatgctctgcaatatgcatcataacgagtatcttgttttagaagtaaaccagaacccattggaggaccgatttgaccaagtggactgtaagtttctcctccccaatcaatatatgtagc

SEQ ID NO: 135807 - DNA, 625 bp, Cannabis sativa
atattaggatgttaaaaacatacttgttagtaaatctagatcttgataaaatatattccaacacataccgagtacggaacgcaattttcgagatatcttcctcttgaattctgagttaatggcaacctgagcaaagatcgatcttggaaaagaccgtcttacccttcaattgatcaaataggtcgtcaattcgaggttagggatacttgttcttgatggtaagcttgttcaattcttgataatcaatacatatatccgcagtgacctgtcattcttctttacaaacaataccggagcacgccaaggagaggaactcggtctaataaaccccaagttcagtaactcctgaagttggatctttaattcttttagttctactagagccattcgatacagtacttttgatattgattccgctcccagaattaactcaatcacaaattcaatttctcaggaaggtggtaatctcagtagatcttctggaaagacatcaaggaactcgcacaccaattttttattcttaggtctagatgacacaggttggctggtatccactgcagtgactaggattcccagacaacctctgcacatcagatcttttgcttttaaaagtgttattctaggt

SEQ ID NO: 135808 - DNA, 759 bp, Cannabis sativa
gctgaaattggggcagattactgctgcaatgctcaagcgaatttagcattctggcagtgacgtggaaacacgagtttcacttatccacatcagcaaatttgtctcagtcactcacaatacaccagctggctgctgtggaaggaaagagactaaacctagtgggccaaagtggaaaaagattgggcttctattttggggtgtgaattttgtaccctaaaaacccaacatctaaaagaaaagaaggaggaaatacacctccatcatcctcaaggacgtgagcagctactgcaattattttttgaggagtaactatagcagaaagtacatcagagaagaaagaagaggggaccaagccttagtgtttgacttttcttttactctttcttaatagttttctttcttttccgcttctattgttgtttgtacttagtatcaaaaactttatgagattgtaaacttgggcagcaaccatggatgaatattttttagcttggattttattttcatacttgaatatgagctagacttttaaagcttgaatggctatgaacttctaagttgggtatgattaatttttaagcttacttcagcattttttagccgtgttcattcaagtgagtttcattttatttgattgttgtttcttggcgaagaataacaatttgctaagctagatcctataccggaagggctagatctagtagttcaacttgaatggagcaagtgaaaacctaaatttaggtttttctttgtaagtgg

SEQ ID NO: 135809 - DNA, 1142 bp, Cannabis sativa
aaaaaaaaaaaaaaacccaaaaaacaatcttagaacaacttaacaaacaactataaaacaacaaaaatataactgcaaagcaatagaaaaataaaaaaatattaacataattgcaataagcaaaattatataaactcgtcgatatgtttttatattacgattttttttacttagttttgacagcttaatttatctttttatgctattacattagccttttcatggaaattattgtgtggcaactttattctttcaccttatttttttttttctttccttttatgagttattaatagttaaaaaataactataaacaccgataaacaacataaaaataaccaaacaaatgtatatatacaataaaagattgtcttggataaactgaaaatatacataatcttagaaataattgcatgaggatacgcacttttcattttattttcataaatgttcttatttatattaatataaataataccgtcagttttttaattattttgtacgcacgcataccgaaacaaacaactttacttttaaagaagttaaaaattatttttacaacaaacacaaaacatttttttttggtcagactttttgtattttttccttacttctattttttttgtcagattttgtcaaatcatttatttttgttttgtttacttttttttttttgaaaaattttatcttttgttacgtttttttttttattaagtgttgttttttactacatttgtttaataaagagctttccctttattttttttcttttttatattttttaaaagttataaaataatcttataaagtaactctctctctctcttaatatttaatagttactagattgtacattagcttaatttgtaaaataatttgataagtttcaaaatattataaggaaaccacatcatttcttaaaatatataacaataaacgctttactttaaataaaatttaatgtatcaaacaacttaataagttactaatttttttttattatttttatacttagacattacaaaattaaataaaaatagatttgtttgtataaaactattttaataaatttataaaataatttttaaataaattgaatagtatctgaaacatcatatgagttacattaaaaaaaaggtaac

SEQ ID NO: 135810 - DNA, 641 bp, Cannabis sativa
  modified_base (327)..(332): a, c, t, g, unknown or other
aaccagtttttttgtctcaaatttttaactagttgataaatataaccagtttctttgtattatatttgagttattgtgtgttattctttgtgtttatatattttgttatagaaccgaaaataaatcaccaaaatctcactttctttattttagttcaaacttttacatcacaccatacatcaaaacttgtgactaaaaataaaaaagttgtggctaattataaattattatttttgtgttgtgactaaaaggttcgtggttaaaagtattagtcacaaaaataacaatttgttgtgactaaatgtgtttttagtcacaatacttgtnnnnnntaaaactaaattagtgatatcttgtatctagatactatgttttagttacaagtaactttttgttgtgattaaaagtcacatttagtcacaaaaaattaatgtgttgtaactaaaaaattattactaaaagtacgtagcaatttttttatagtgttggcataccaaaataattataaatccgatatttgtaataaatgtttacaagttaattattaggctaattagtaattttctcccccgaactttgacatataccaaatcatatcccctgaacttttttggccgttaaaaatttccccttaactattg

SEQ ID NO: 135811 - DNA, 544 bp, Cannabis sativa
taggggaactaatacaatgcctattgtaaagattgttagtagtgggaagggagtgttgagccagtctgtaaacgaaatgtctaattttaggaggtattgggagacgccagagggatttccaccaacgggtgagggtttccgtgtttgaggaagaaggttgaacccggttaatggcttgtttagcaacatggtaccctgtcctaaccgagtaatgaccagaagtggagtgctgccagaagtaggtgtcaggtttggagggatcagggggagggagggacagaatgtcattaacggtgtcctgctggaagtaggctcgaagaaggggaatattccaatccccgttggggagaaggagggtggatacatgggtcagggaaggtgggacttgagagggaaaaattcgatggttgggaatccacggatcaaagatgctggtgttagccccatttccaattcttttgcaaaggcccgatttgagaagggatttgccccaatgaatactacgccaaacatacgagggataatggcccagagaggagtctaa

SEQ ID NO: 135812 - DNA, 788 bp, Cannabis sativa
tatttattggtctttctcaggtttctgtggaggaagcaaaagaaacagttgctctatggtacagagatagacaagaagtactaagatggcaagaaaaacgtaaaagagaagctcatgaaaaagggtgtgttcgaaccttattaggacgagcgcgctggtttaatttccttcagtggttggtgcttcttattctcaaagaggtcatattgaaagggcaaccattaatactccgctgttgatgcccttttacggcagaaatatactgagtgttgatcttgttgttgatgctaagtgtgcacaaaactggtacactgccaagtaaaacatggtgtggtctcttctctgctatggatgaaaattatcaatcaatcaatcaaggtatctatctgtttttagtctctgcatttagaatggaataggttgttaatgtgaaagtttttgttgaagtaaaccccatattatctatacactgtcaaaccagattttttacacagagattacaaaggcagtaaaaatcttatgtggcctcaggcctctatttacctagacaggtttataagttaattaataaagtttgttaaaactttattattaactcttctcctgtattccactactatatataaagccaaagattacaacatcagaaggtgaagaaaaaatccagatcagtgacaacacaacaaaagactgaacattacaaaaccagatcagagacaaatattcagattcttctagagatcaatacagagcaacaaaatagagggagttcgtggttgaggcttaca

SEQ ID NO: 135813 - DNA, 648 bp, Cannabis sativa
ttcattttgggctgtacaaatgttgattgggccggcccacagtattgttgtaatattttaccatttttagaatattcctgtttttttccctttatttaattgtgcaaggtttatcatttaattattaaaaacaagactttctttaaatataactgcctcctttcaaaataaataaatatatagctgtctaaaagaaatacttcaatatgtaaatattaaatttttaatttagcaattataaagttaacatataatttatagggacactattttgtctcgtgattgtactttcacggtgatgtacgatacccgttagatgggggagttatttgatctgagtgctggggttgatttagaggtaattagggttaaaaaattataacgtaccctgagacccatctaatgtattccatatatcacggaatacattccgtgaaagtacaataacgagacaaaatattgtcccataatatataatatatattttaattttctcgtataaataatttaggtgacgtttgtcaatattttgttaattagttttctatttttaaaattaaaaaaagtaaaaatattttttaaaattattttctataaaattcttttcattttttaatttttaattaagaatcaaaattaaaaaaaaaa

SEQ ID NO: 135814 - DNA, 597 bp, Cannabis sativa
tcaattttggccggatccaccatgatcccatctttatctactatgtgcctcaagaaagagacacgagataaccaaaattcacactttttgaatatagcatatagcttatgatcttgtaatcgtcgcaaaaccgctttaagatgcaactcgtgctcttcttctgattccgaataaaccaagatgtcatcgataaacacaatcacacatctatcatggtaatccttgaacacccaattcatgagatccatgtatgtcgcccgggcattggtgagttcaaaagatatcacaaggaattcataatgtgcataccgagtacggaacacagtccttctctcgaattctcagctgatgatagcctgagcgaagatcaatcttggaaaagaccgtcttccccttcagttgagcaaacagatcatcaattcaaggtaaatgatatttgttcttgatggtaagttgttcaactcccgataatcaatacacattagcaaggatccatctttctgttgggttttgtgccctaaataaaacccgtttccatataatcagatttactagttaataaagatcagaaagaacattttatattgcatggttcac

SEQ ID NO: 135815 - DNA, 502 bp, Cannabis sativa
tcaatccttgtggcttcggcgtcccaaggtgaaatcgcaacaattgaggctgctaaaatcccaattcccacatcgaaaacccatttcttcgtcccaattgcgaaactagaaacccaagagagcttcgtagaggcatttatgttaggtttcgatgaacaaaataaattggcatatggcatttatgagaatattgaagcaacgaagagggttcggcccattcatagaactttgctcgtttagttgcacccattgtcgtagctggagtcgatcgcacctttgggtttatgttttcatagacctccgctcgttcagtcgcacatattattgcagcagctggaatcgcaccttttgatagggcttttgggattggaatcgataaaaaatttagaaaaaagcttgctttaccttaagcaaagtctcactgcaatcatcgaaaaggtaattcacctttaaaatagggtaatatatattctttcatatgtatattgatattatatatata

SEQ ID NO: 135816 - DNA, 539 bp, Cannabis sativa
agatagctccgcgttggtcgcgtctcctgaagcgagaagcaccgacccctcccctatataaggggtcacccatgacctgggagggggatccacaattgaaaatacttagaaaaataagctctttaaattacggtgtgttttatttacatttattgtgaattctggtgttattaactgcatttgttattgtgattttggtttaaatctcatttattacgactccgcgtctgttggctaaaaattcagtcaacatatataataacattataaaattaataaagaatattctattaagtaatatgatattctgttaaagttaacgtacaaatccgaaaatattattaaaccaacaattccgtgctatattttatatagaatatatatatatactaggttgatgttaagtacaatggaagtataattgattttctttttaattagatttaattaaatgatgttaagtgcaatacatatatatttaatatttttaattaggtaatgtatttttaaaaaaattttgaaatagggtttgagatttt

SEQ ID NO: 135817 - DNA, 529 bp, Cannabis sativa
ttaatgcctaattaatttacatcttaatattaagttgttatctatttatattaaagtgggattgttatcaaattatttattactacatattttttttttgtaatataatcattgttttagtttttatggtacatattttttgagtttacgtatattttgtagttacttttatttttcaagttaattttgggtttatgtgtctttatttgtatgtataattatttttaagttgattttaagtttatgtgccattttttttatatataattatttttagattagtttgaatttaagtacatttatttttatatataattttttttaagttagttttggttgttttcaagttgttattttgttgctaattagttgttattgcattgagaaaagaagtccaatacactaaagtgcactttgtccaaagttaacacgtggcagccactggcacgttctgacgcgtgtgagcctcatgttaggttatttttattattaattttagattaagtttagtatatttttaattgagttt

SEQ ID NO: 135818 - DNA, 626 bp, Cannabis sativa
  modified_base (584)..(590): a, c, t, g, unknown or other
atcttcataatctgaacagatttagtaattttattattttttttttactttgtttagcctttacactttataattgttgggatttatgaatgatttagtttgtatgaatgactttgtttgtaagcatgactttgtttgtatgacattgtttgtatgaatgacttgttggttatttactttagctatctccttttatttacaatcttattattcttttttatgatatattttgtctccaaatgtctccaggataatgtctacaaatggtgcaccattcaaccaaaataatctacttcttgacgtttcagacgatgagtttgtagagttattagttttatttgcttgcgtggattacaatcaattaataattttaaaattacaaatgcagaaaaagacgtatattttgatggagatgaagacgtatatttgaatgatagtgttgagtttagcatttcaagagatcaacttcgtgaaatggctaatgtccgtgatgaaattgttgatcatatatggagagcaactcgacgatgaaaataatgagtaaagattattaacaattagaacttttttaatagttttcttcnnnnnnngacaattattagtttatattttattatgactttgtc

SEQ ID NO: 135819 - DNA, 684 bp, Cannabis sativa
tgcctttcttcatggtgatctccatgaagatgtttacatgaaattaccacagggttactcacccaaaagccctgtcctaaaaaatgcagtttgtaaattaaagaaaagcctctatggccttaaagaggcctcaaggtaatggtacgccaaactaagtaccacattactacaacgaaaattcgtccaatctaagaatgatcattccctgttcatcagatacaaaacatgcatattccttgcctttttaatctatgtcgatgacatcattgttgcaatgaatagcctagaagaattgcaacatttcacttccacacttgattctcattttaaacttaaagacctaagcagcctacatttcttccttggcctagaaatggcccgatgcaacaaaggcatctctgtcacacaaaggccatttactctacaactcttacaagaaactggctaccttggcactaaaccagtatcaactcctatggaacctaataacaaactcaacaatgagtttggaaaactccttgctaaccccacacaatatagaagtttaattggcaaactcatacatctaactataacaagaccaaatatttcttttttcgtcaataaactaagttaatatcttcaagcaccaagagaaccccatctccaagcagcccatcgcatactacaatacttgaaaggaac

SEQ ID NO: 135820 - DNA, 760 bp, Cannabis sativa
aaaaatggtgtatttatatatataattatgtcttagtataaatttttaaaaatttctgggggggccacagctcctgttggggtgcatgtggctccgcctcatagcttgagtccactgctcagtttaggaagcttctttctattggtgagaaattatttctgtcgcgcaatgatttaattatgttatgtatgttatgccaacaatattttcacaactgaattctccttaaataataatatatagtcaataataagtatattacaggtatatatagtggtagtggtagagccagtcacatattttagtgggggcaaaaaaaaattagaatactaataatgaaaattgtaattttaattgagaaaagtataaattttagtgggataaaataaaaataatgtgagaattataaattttataaggataaaaatgaaaaatataaatttaatggtgacaaaaataaaaatatataaagatataaataaaaaatattatttttttgggctcaaaatgtgaaatattaaaaattatgtatataaaaatgtaaataatcaaaatatgatttagtcggttatgaaaaatttatttataatgttattttgttattaataacatttaaaatgtactttaaaatatttcaaaaaaaatgtacttttaaaaaacatttaaaatgccataaaaaatattttaaaatttaaaacaaaatttaaaaatatactaattacaaatatcttaattaaaaaaatattgatatatcatgatt

SEQ ID NO: 135821 - DNA, 562 bp, Cannabis sativa
  modified_base (518)..(525): a, c, t, g, unknown or other
atattttataaaataaaaattatgtcaaaattaaatgattgacatgacactttgtccatacaatattatattgttttgttatttttttttttataaatttaatctttattatgtgtctaaagataatttttttttttatccaaaggtaatttttaaaatagttgtcaactttattttgataataataagatatgttttccacgtggcagtctttgtaatattgtagctacagactcacatgcataaataagtttgaatgttgttcccaagttgagtgtgcctttcacacgctctctttgttcattttttgtataatcttatttctttacagtatttttgtaaataccaaactttaaaaataatatttttgtaaatattagatagtataaatgtttattttttctaggagtagtataaatatttattttgggtaattttagtttaaaatagaaaaaacctcttaggaatagggaaaaaaacaaaaaaatacaaaaaaagaaaaaaaattacaaaaatannnnnnnnccgcccattaaacatttatacagtccacatacaaata

SEQ ID NO: 135822 - DNA, 1140 bp, Cannabis sativa
  modified_base (212)..(217): a, c, t, g, unknown or other
gagtaggaagagtgggggtcccacaacactcggagtcactcagggctcctgaagaaactataccgcaccctcggctcgtagagcctttttcgaccatctccgcataagatgtcgcctcatttgtagtaatcaccaggtcatgtttaattttcaaattcagaactgccagctatttctctttcttgctaaggtctataggcacaatactcgannnnnncttggccagacggtcaaactttgttgtgtactcggtaactgacataccctcgatctgcaccaactcagtgcattctttctgcttggcactacggactatcgcattctaatacttggcattgaataaatctcgaaactcttcctaggtcataacagtgacgtctcgggtgagggacaccaattcccaccacacaagagtgtcttcctggaattgaaaagtggcacaggtcactcgatcatttccaatgacccccatgaaatttagaattatttctatcactgtgagccactgctcagccttcatcacatctggacctcccaagaacactggaggtgcttgcttatggaatctttcgtataacaactccatacgattaccagcaacaggttgttttggtggaactgcaagaactacaacagcatgagcttgtggtggaggcactgtaggaagaccctgctgcctgagtctcagaatttcttcatcttgctggcggatacgatcttgcatttccacgaatctctgctcctcatccagaggagcttgtggggggttcacatgatgaccaccgtgaactctgccacggcctctaccgcgactatgggaattctaaggaatttgatttccctgaccgcctccgatctcgaccctattaccctgacttcttgtatttcgttgggcgtccatgacttagcctgcaaacccataagccaggtaggttaaacaacgattataaaaacttaacacagctcttatggattttaaggcaacacttttaaaatagataaccacagtataatatgcatcctaacatgctttaataatcacatataatactaaacaagtacgggtttactaaaccatgagccgagctttctctgatgaagatcgtacatgccttggcaagctttggtagacaaacgtag

SEQ ID NO: 135823 - DNA, 532 bp, Cannabis sativa
tgtttggcaagaaattcttgaaactgagtgttatcatcttctaccatctcaacttctggacttggcacttcaactcgcttttcaattggtacatttagatcatgttcgtcttctattttcatattatgcataataatacatgaagtcattatatcatgtaaaatcattttattctaaaaacgtgttggtccagcaataattacaaatctagactgcaatactccaaatggacgttcaatattttttctacatgcttcttgtttcattacaaataattttttttggaccacatggatcatggatagtttgaacaagagtagactattttagatatataccatcagctaaataatagcctatattgaactcttttcctttaataacataattagcgggtagagcaacaccttgagcaagattagcgaaaatatgacatgcctctaatacattaatgccattattagatcctagtaagccaaaatatgcatgccatatccagagatcatagtcaactactgcttcaagaataata

SEQ ID NO: 135824 - DNA, 711 bp, Cannabis sativa
  modified_base (628)..(638): a, c, t, g, unknown or other
tttaagtggttaaaattagaaaaatggaatttttgagaaactaaagaaaaattgttgaaaaatggcaaaattctaaagtgggccccacatcctatggccagccacttatcagggaatttccatttaattttttcaatattttaatgccttataaattctaacctcaacctaggtggttgcctataaatagatagtgatggctcacactaaatgatgatgaaattcaagccttcagtcaaaatttcctgagtcttcactcttgctattttcgaaccacagtcctctcttcctctcttcatatttccataccctttagtgatagagtaagtgctcacacacatcaaatggtactcaatcatagtgtgtaaggctatgaagaatccagtttcaagagaaggagattccgactcaaatcttggtgataccctactacagacaggatataagggttagagatcctgagtggaaggagccattaatattctgctgcaaccactgcaaggtttctgaaactttatatgtgtttatttacattgttctattaattcatatttaggattttaaataacatatatggtagtagggtatctccaagatccaacaattgagatctcatttcacttcgctnnnnnnnnnnntatatggagctaagtgttttaaggataagatacattgaaggtgtaacggtatttcctattcaatgtagatcat

SEQ ID NO: 135825 - DNA, 816 bp, Cannabis sativa
gtcatttttctcctatagttagagaaattttttgaaattgtttttattatattttgaaataatatattgtagttatagtagacacctatcagtttttaaaaaatcagaataattaacagtgtcaaaatacggggttcaaatagtcagttgtacgtattgtttcttagagcttatgataaaataaaacatacacgagcacaactctttgattaaaccttaattttaatactataaattttcaaaatttatatatatatatacgtctataattattatgtatcattttatataaaaaaattatacataatcttttttacgtgctaataaaataaaaaacacttttaattggtagagtaaaagtgatacctccactaatttttttccatagtactttattatttttctcatagtatttcattatattttttctttgtacacatttttatatgtaatattatttatcatatttatattaacattatggttaaatgaaaaacagagcctggaagtgcaataaatctaccgtcgaattgcttaggtgaatgcggtattgatgaaaagacatgcaataagttatgtcttggcaaatcctttaaaaatggaggaaaatgtgtatacaaccttggtggggggtcgttcgggctatgttgttgttataataattaaaatttgaaatgtatacttcatcatcaaataaataaagagtattattatattaattttatcattagttttactattagtatattttgtccaatattttattttttttacatgaaaagtgtaaaatgtaatttattaaaggactttgcacaa

SEQ ID NO: 135826 - DNA, 956 bp, Cannabis sativa
agaatttcataaagaggttcaaggaagaagcctaaaaaatcaagaaagttgatgacggacaacaactcgctcttcttcaagcgggcattcgtacagggactccgttctggaacgagttgcagcaagaaggggtttccaaccttcaagatttccagaagagagtccagaaatatatcaacctggaagaggcctaaatagtggcctacgggggatactattccaccgggatctcaggatatgtgtcaggagcccaattctcaggtactgtgccagcagcagctccaccgatgagcggcatacaattttccgctactcccgggtatagtcaaggccaggccttagcccctgcatcttcccattttggaaatccctcgggagtaaatggacaagccccctcgcactctactccgaccgcaagtttagccggtccttctcagggctctcggagcaaaaggtcctccaaaggcagcaagcggacggaggataaacgacagaaaagggggtatactccctaatatacccaacacacggagttaacgaactcccaagaacgtgtatattttgctactaggcaaaatacgcactaccggagaccgcctcctctgtacaaagacagctcccggagggaccccaataagagatgcgaataccacaatgacattgggcacaacaccaatgaatgcaaaaatctcaaggacaagatcgaaaacttgatccgattggggcatctctacgaatggatcaagaaccggttgccccatcttaacccgggtcaagcggctggagctttgcctcaaggagcgccagggggtgtagcaggagcattggctctagttgctccccccagaaatgcccagtatattcccggcctactaccaagacccaacgggagagtggctacaatctcgggaggaccccacatcggaggaactacccgcaaggagctcaaacggtac

SEQ ID NO: 135827 - DNA, 2418 bp, Cannabis sativa
  modified_base (1727)..(1737): a, c, t, g, unknown or other
  modified_base (1884)..(1887): a, c, t, g, unknown or other
aaaaaaaaacagtttcatcaacaagatgacgaaaaaaaaatataatctaaaaacgatactaactttaaaaattaatttcatcaacatcaattgatagctaattatttcattaaaaatacacaatgcctaataaaaaatacacaatgcctaataaccaaactttaaaaataatactaacttttaatccatttttgaacatataaattttatatcaatacttaataatcaaacttctaacttcattctctattttggttaattttttttattttggtcaatttcattctccaacatacaatatggagcaaaaataacaaagagaaccagaaactaaaactagagagaaaacaacacaaagaaaattaaagagataaaaatgcaataacaaaccataaaagaataacaaaaaataaataaataaaaacataggagggagagaaattgtatataaaaaaacaacaaaaatagaggtaggttaatattatatactctactaatcaaataataccccaatcaaatacaaaacccactaaaaatattagagttgaagaaaaaaatagagaaataaaaatcttaaaatgcaaatgcaaaataaactaaagaaaaaggtaaaatcaattgggttagaaacaagaacatgaaatatgagtttggatattagatttataaatagtagaaattacacttaatatatggaaaaattataagagtttatatttctatggcataaataaataatgctaaaggattacgggtttttttttttatttttttttttacatttatatgagcttttttgatgctatatttttgtaaaaaaaagatggatttctcatatttgtaaacaataataagtttatcgaaaaagttgtcagcgcaggaaaaggcaccgaaaaagtcactggtaccggagaagtcgccggaaacatcaccgtaaaaatcatcgtcgccggaaaaagtcactaaaaaagtcacaagaagtagatgtctcaaatataaacaaaaatagaaccaggtctataatataatgaataaaaataaataacacaaaataacacaaaccggttataattgaaatataattggttttgtaacataatgaataaaaataaataaaataaagtaactcaaataattacaattaaattagaaccagttctataacaatgttataataaataaaaataaataacatgaaataactcaaaccggttataactaaaatagaatcgattatataacaaaatgaatgagtagttttcacgcagataatgagtgtaattatttggtgggttggagcatgttgaatgaatatttttgtttgagctattttatttaattgatttttgtgtgtgaatgtttattttagttgctttacggaaccagtttttttgtcttaaatttttaactagttgataaatataacagatttctttatattatatctgagttattgtgtgttattatttgtatttatttattttgttatggaactggttcttttcatatttatgcttcaatattattttttgaaattgatctctattttttttttaaaaaaaattataatcggttttatgaggtattatgtgttatgaggtttttttattgtagaactagttttgtttttagtttatgttttagtgttttaggaactgatttaccgtttattttttaatcgtaatcggtttaaattattgtgtgttacttgtttgtattcattatgnnnnnnnnnnngatctattttagttataaccggttttgagttatttcgtgttattagtttttattcattataacactgttatagaaccggttttattttaattataactgatttgagttatttatcatgttacagaaccagttatatttcaattatannnngtttgagttattagtttttattcatagaaccggttatatttttagttatatgtgagacatttacttttggtgacttttctggcgacggtgactttttcggcgacgatgacatttccagtgacttttttggcgactttttcggtgtcggtgactttttctgcaaaacttattgttgttttacaaatatgggatttccactttttttttttacaaaaatatggcatacaaaaacccatataaatgtaattaaaaaaaaaaaacctataaacctatagtgttatttattgccataaaaaaataaattataccctcaattcccatatttatgaaaattccccataaatatatggtatatcaaataccataaaaaatcttataaatagggctatttaaaagtatggaaaaatgaagatatgttttgatatatatgacataaaaacttaatttccctaaatatggcattttttaaagaaaaacttacaaatatgggaaaaagtcatgaggaatgccataaaaaactttaaatttgtg

SEQ ID NO: 135828 - DNA, 685 bp, Cannabis sativa
aattacatgatttggaacacaaataaaatatccttcttgacaaggaagagaagttctggaaacaaagaagtagagctctttggctgaaagagggggataaaaacacaaaatttttccatcggaaagcgagcaatagaaaggctaaaaataccatcaaagggctgattgataacaagctgaattgggtgacagggaataaacaaatggggcaggtggcttgtgactacttcataaacttgttcacttcgaattcgactaccccggaagagctacaagagtttcagcggcttgtcccaaactgtatctctaaagccacaaataaatatctattagagcccttcacagtggaggaaatctataatgcaatgcgtgccatacatccccaaaaagctcttgaaagtgacggactgcctaggttattttatagaaaatactggccgactattggtcatgaggtatcaaaagtttgcttgggaattctcaatgatgatatgaaggtggaggaaattaatgatacccttatttgcttaatccttaaggtccctaaaccgaagtatatggcagaatttaaacccataagtctatgcaatgttgtttataaaatagtggcaaaatgcctagcgggaaggatgaagaatagcctacatcaagccatctcggaggaacaaagtgcttttgtgggggg

SEQ ID NO: 135829 - DNA, 618 bp, Cannabis sativa
cgtcgcggcgagagcccgtacaagcagcggtaatttcgtctgttgaaccctgaaaaacgagaaataagaagaaaactgcgattgcaaattaggggaagcaattttgagacctaaaacacagtggagagcgcctagaggagcaaagtgaagatccaaagtcattccaccaacagtttatttctttcttcctttttaatttctttattttgaattttgttttaggaatggttatggatttgaacatgagctaatcttccattcagggaagatgatgaatgttagttaaagtttgcttagttaatgttaattgccattcctgttcattttgattgtgtattatccttatttgtgttatttctatgttaaagcttgatcaccttttgcatgtctatgatctcaattcgaaatctgaaaaaatgagaattgagaatgctaaaatttggataacctaattttttgtagaacaacgatatttacatgacttttgtgacttcttacattatggcttaatgcagatcttgtgaaattctaattgagagattcattagagagcatgagatttagaacctagaagatctgaaaagggataggttaattagaataatctgtcattcacaa

SEQ ID NO: 135830 - DNA, 562 bp, Cannabis sativa
caaaagattctgtttaagctgctgcaagaggacatcccgagctactaaatcctcatcaaccgcctgaatagtagtgttgccacgagtgtatgctggaatagtaggtggaggccgaccataaactgcctgaaatggtgtcatgccgattgccgaatgatggctggtattatagtgatattctgcccaccccagaaatttgctctatttatgaggattatcagcggagaaagccctaaaatactgctctaaataccgataggtaatttcggtttggccatccgtttgagggttgtaagaagaactcatccgcaatgtggtgcccatgaactcaaacaacttgcgccaaaaagcactagtgaatatggggtccctgtcagacacaatcgaacgtggtaacccatgtaaacgaataaccatatttgagaataactccgcaactttagtgggagaatagtgtgatggaagcgctccaaagtgagcatacttcgtaagacgatcgactaccaccaaaatattagtgactccacccgaattgggcaatccaactatgaaatccatggct

SEQ ID NO: 135831 - DNA, 1259 bp, Cannabis sativa
tcaatatcaaattgattctcaatgtcattcacgacaaaattgtctacattatttgtattaaaatacttattaagagaaccaacctgacttttttgcaagactttttttcttaatttctcttttcttttttgagctcctgatttatatttgtaatttctaataggaccctataaaaattgcaaacaaaattaatgatatgagtacaataatatgatatatacaatacaatgtttatcttattattacaaaatatatgatatagcaaaatatatggtatatcaaaatcattaaagaaaaaatataagacataagtcacataactttagaaataaaagggaaccactaaaaatgagttttttttttcttttgcagataaaataaaatatgtaaatcaatatatgagcaatgcaataaaaatccaatggtgattatttttttatgtaaattgatttgtgactatgagtgaatcagtagtgaaaaaaaatatattatattatgtaatatgaatgaatatgaacatacaacaaacaaataatatattattatatatgattaattgaacaatctaactatttttttttcttttccagtggtctatttcgagcacttgatcaactctcaacataaagggcaattcaacatttaatacaataatctaggaaaataaaattcaatattcattttagtttatctctaatatttatacaacatcaacaataacaataacaatatataaatactaaaatagtaaaatacacaaaaggctatactattacaaaaatttcaaagcaaacaaaaataattaaaaaaagaaaggaattaattaagaagcccactcactaacactttcctactaatatatagaaatatatgatgataatgtacaagataataagtaaataacaacaagtaaataatttttaatttaaataatacgtcaataatttttaatttaaaaaaaatatagcaattgatcataaaaattaataaaatattaattttaaaaaattaaaaccttaccattacaatacaaggagatataaattgaaaagattgcttttttcttataataggagatagttgatgagtgatgaacattgacgatgaggaggatagttggtaaattgtaaattgtaaaggtaattttttttagagattagaaatttagagtcttgagaagagaaagaattttagagaaagagggaagggttggtggagcttggtaggaaagaatggaatattgagagagagagagagag

SEQ ID NO: 135832 - DNA, 625 bp, Cannabis sativa
agaaataaatagtacataatttaaaaacttgacacaagaaagttataagtggtattcgtattctttcaaacacttttaagtctacggagtcacatttagagaatgaaatcaattagtgaagtctcaaataattacaaatacaatggatttaaataagtttagactccctctaaaattttgccacaattttttgtaatttgctttgccaatctaatttctgaacaccacaccaaataacgaaattccttcgtttttttttttttttttgtgttgagtgcttattacttcctcccgaagtaaggctttgacaagttttctctcgaaaagccttcttttgttcaatggattcttcaacctattctaagaacattatgagagcaaaaaacaaagactaaaacctagtagagcattctaggttttcacaaaagaaactctctcctcacaaagataaaaatatgaaaaataaaattggaagaggtgagaaacgtttgactgctttctaggtcttatttaagaatactagtttttgaacgtacattgcacgtgtaatatgtagaggaagattgtatgtaaaaaaaaaaaaaaaaatcatatgttattattataaagataaattatttaaaaa

SEQ ID NO: 135833 - DNA, 898 bp, Cannabis sativa
ttgaatcaatgaatgaagcaaataataaaagattgtcataaagatcaaaggaagtcttttctcggaggggaagtcatctccaagaattctgaagctattatcacactgtgtggtgcgtggggaaattcataaaaaaatgcttttatggttaaaacaataaatatctaataaattggggattaacctcagctaaaaaaaattgttatttttgaataaatttttttttttttaaaaaaagtcacctattaatttcttaaaaaccaagaattctgttatataggtacactttatatagaatagatatattatgtgtatataatatatatcatgcatgtatattaaagtatataatatatgtgtgaggtatgcaacatatataattgtgtaattaatatatattatgtgtatatgatatatattcaaatatgttatatgtatataagatatataacatatatatttatataattaatattatgtatgttacatacataatatattagttggcataaaattattatttgagagttataattcatgcatgggagttatgcattaattttgtacattaatatacaaattatataatgtatatgataataatattgatagtgtttattactattgatgtggaggttattatcatatatgtattgtgaataaagagaatttaaaattctttttcaatagtgattttgagaaaaaaaaattgtaacttgtgagaagttacattctttgagaataaaaagtaataattatctcattttataagataagaaaaagtagactataaaagttacacttttattggacttgcattgtcataagcaagaacaattaagatcatagtggatccaaacttgtgaaattcgagtaataaattggaagagcaatttta

SEQ ID NO: 135834 - DNA, 1404 bp, Cannabis sativa
agattcttctttgttaagtcctctcatcacaaaagtgttttaactctcacactttacatccaagaatcatcttcatttacagaagattcttcttacaaaattcaaacccaatctctctcttttctttgcacctctctacctctcaatctttctctctcttaaactctcaatctcatctgatcataatactaaatctcatcctgttaaaatgacaaagtcagggtggtatttataggcttagaatcaagatcctaaagtcgatggttggaagaaatgaggttgttaagttagttataaataactaacttaactaactcttcttagagtgaactctccatgtcaacttaagtaccatggcctccgggaacatgtatgagcttctagactcacggaccaagggaacttgttgaagacgcttccggataggataaaacctgatgtagtcgactatttggatctaccattctaggattgacagccagttgtaactccttttcaaggaagagctaactatcctgaagactgaacctaaagtacgcatgatagtcatccaggaactccctttcggactcgactatcattcctcacaacccctttcgggatttataacaacgattgaacaacttcctagaaatgacgtttgtggagacctttttatttggaggaactataacacattctactttttttattcattttttagtagttaaaaccctcccaactgttattttgattgcatttaaccatccaagcacaaattttaacagtaaaacccttcaaattagtgaactggtaacaaatttaaggtgtcatacagttaactatcactacaggctgcttatgtgcacactcttatacacatgactatattattatttaaaaattactttcaagatttattttaaaattaaataaaattataaaaataaaataaaacattttaaaaaataaataatattacaaattttgaaatcatttttatattttttaaataataatattatgcgtaccaatataaatttgacacatgtacaaaaatgtacacataagcagtctaatattggcaattacttgtaaaaaaatagatgacactttaaatttactagcaattcaataatttagagggttttaccgtcaaaatttgagcttagagattaagtgcaagtggagtgatagttgagaagatttagccgcaaaaagctcttctttattttatctcaaatttttacattatatcacatatcactttttttttaaagaaaaataataaatcattaaaactctaatttttttaaatttaaatatattttatttatttgaaattaataatattaatgtttacatttatccacatataaaaaaaaaaaaaaaaaccctaacaaattaataataaaatatgtttag

SEQ ID NO: 135835 - DNA, 619 bp, Cannabis sativa
  modified_base (31)..(33): a, c, t, g, unknown or other
agattagatattctgattgtatcaagatacnnncgaaatcaataaggaaaaggcaattagcaaagtttccttaaagaagacaattttccataagagaattgcttctcttacaagaagtttgcaaacaaaggaaagaccagctgaaaaatgcaactttcctaagaaagaaaagagcaactaaaaaccgaaaacacacggtaagaattcgggtatgtatgtaaaagaatcttataaaagaaaaatattttgtcaactaacttgccaaaaaaatactttacaaacacacacaataaaattcaaactcaaaacttaacacacacatcagaataaaaattaaaccataaatgaagatttatgctactatttttcaaatttcggtatttattagtaacaaacttaatattttaaatatttatgtaacaaattttttaatagtaaaataaaaattttaatataattttacttagtaattattattaatttaaatacacgatttattttttatatataatttaaaatattttatatatccgccgcaaagcacgtgatgtttactagttttaaataaagatatttatttatactaggtgattgttacgtgccaagccacgtagtgtta

SEQ ID NO: 135836 - DNA, 642 bp, Cannabis sativa
ttaataaatgaaaattcttttcaaataagcaaagtgaacaaaatcatgttcatcccaatgtactactttttaatcccaccaagatcatgttcctcaagagcatgagaatttattgtgactctgattctctaatcctttgaaacattagtaaactgtaaccagaattccttattttatttcatattgactgggaaggaggcatgagtctagcaaaaacctattttctcattcctgcatgagctaataaattttatacaaactgggggtcaacaagtttctcaccaacaggtagatttactttgttggtatccttagtgagaactcaattgcatctggtatgcttcacctgtatatacatctatcgtcttatgctcttcttttgtagttgttgaattttcgatgtttactaatcatacttgtttgtatttgaattgttcttttgttaaattctccattgcgcatatgataaggggctgagtggtttggccattaacactttatgctgatcagttgtcttttactgcatcgattctggataatatcgattctttttaaaaaaaaaaaacgcagttcctgatctttcaatttcaggggttgcatattcaaggcacattattcaattttattcttatcaaggaggtg

SEQ ID NO: 135837 - DNA, 1193 bp, Cannabis sativa
  modified_base (146)..(149): a, c, t, g, unknown or other
  modified_base (389)..(389): a, c, t, g, unknown or other
gcatcaatgcatatgctgaggaggtaacacaccgactatccactgatatttcctcagaggggtatcattctctcaacattcgtcaccaccatgatcaacagtgcatggacgaatcacaggggtccgaggagaaactttgtgtgggnnnnttatatcctggagtactgtagaggggttcataaggtattgttttagtaagattttaattgttgaactatgattataagtttattatggtttgttaattgtttagtttttctccataattacagaaccatttctttccgagatggatgggtaatgagttcatttacttcattttgcatcttcccgaccaaaggcactgggtcaaagttgaagttgacatagagctgtggaaaattaatatntacgactgtgattccagcgtttgtcattggtccaccatggcacccatcttgaagacttgggaagaactgttgccctcgctaatccatgcaactggggattttccacttaataaccagatcatggcgttaactaataaggagatcaccgtgcttccaaaatgcatgcgagtcgagcaactcccgacttagttccgaaggcaacaatcaggtacatagcgataaaaaagtactatagtattaaaatatgctttacattgtactacctttattttttatggtgcatttagtggtgattgtggcatttattgcattgagtatgtggagcatctcatgatgcgacgtggattaaccgatgtcacggaaggccggatcaagttgtttcgtgaacggtggtgtgttgatttgttttactaaaatgtcagctgattatatgtataattatggtgacattgtatattttgtgtaattaaaattacagttatgtataaatagactttctcttcttttggatgaaccatattccactacctacaaattattataaattaattttggcattaaagcaattccaatagtttttttattgtattttttaaaacatatcactaaaattttacttttttttaatttacaacacatttttacatacatcatacatcatatatttagagcaataaataatattctataaatatggagcataaataatgtattttaaagaaacttaacattagtctaacggtgtctcatacttattcttagtcttgtaaaaatatttaacattgtctttgattcacaacaaaa

SEQ ID NO: 135838 - DNA, 522 bp, Cannabis sativa
cttatagatttttttcttgtatatatataaaaatcaaaattaataatttagaatatatatatatattgaaatgaataatttaatctagacaagttacaatataacagatcataagatagatttgtaggacaacttggagttggatcaatatcaaccagctaaaaaaacactattattctttatagtttctcgtcacttgtccatatgtcactcgtgtgcttattggataacaatttttagttttgagagactttgatattctttgattaaaataggttaaataaatattttggtttagtgtaattattctgttttaatcacaagtagtatgaagagccaaattgttcgtaatgaaattgtttcaaagattcaatataaataccaaaaattggactcgtccatgatcttgtgttgatcaattttaggattcttacaaaatgaggttcttctttgttgttgggagaacttgttagttttttgtactagtgtttaattaatttagttttcatttttcaatatgtt

SEQ ID NO: 135839 - DNA, 632 bp, Cannabis sativa
aagaattttttacatggtcatcttaatgaaaccgtttatatgcatcagcccatgggtttttgagactaaaatcatccaaatcatgtttgcctcttaaagaaatctttatatggtttgaagcaggctcctcgcgcttggtattaaaggtttattgattttgttgctaccattgggttctctcatagtaagtccgatcattctttatttatttacaagaatggttctgacactgcttatattttgttatatgtggatgacattatacttacggcttcaactgatcgtcttcgtaagcattttatgactctattgggttctgagtttgctatgaaggacttaggtcctctgagtttctttttgggtattgttgttaccgacatgcccatggtttatttttatctcaaaaacaatatgctgcaaaaattattgatcgtgtcggcatgtctaactgcagttcatgttctactcctgttgacattaagtccaaacttagtgccaccagtgatactccttttgatgatccaactaaatatcggagtcttgtaggggctcttcagtatcttactttcactcgacctgatatatcgtatgtcgtgcaacagatttgtcttcatatgcatgctccgacaaat

SEQ ID NO: 135840 - DNA, 1198 bp, Cannabis sativa
ttgatgacatgctcattataggaagcaatgataagatgatcaaatctgttaaaaatttgctgaaatccaaatttgacatgaaagatatgggcctagcagatgttattttgggaattcaaatctctagaacatctgatggactcattctaagtcagtcacattatgtggacaaaattcttgagaaattcaacaaggaagatactggtgtttccagaactcctattgatttaactctacatttgtttaaaaacaaaggtgagagtgtctctcaggtagattactcaagaattattggaagtctaatgtacttaatgagttgtacaagacctgacatagcctacacagttagtaaactgagtagatacacgagtaatccaggtcctgaccattggaaaggaataacaagagtattgaggtacttacgttttactcgaagctatgggctgcattatacaaaatatccagcagtacttgaaggatattgtgatgctaactggatatctgatataaaagactctaagtctacgagtggatatgtgttcacactcggtggtgcagcggtgtcatggaaatcttctaaacaaacggtcatagctagatccacgatggaatctgagtttatagcgttagataaatgtggcgaagaagcagaatggcttcgtcaatttttagaagatattccaaaatggccaaaacctgtgcctccaattagtatacattgtgatagtcaatctgcaattggtagagcacagagtaatttatataatggcaagtctagacatattcgtcgtagacataaccattagacaactactctcaactggaattatctctgttttgactatgtatgtaaagtcaaaagataatattgcgggcggatccacctaaccaaagggttaaatagagagttagttgaaaaatcatcaaggggaatggggctaaagcctatgaatgaataagtcaatacagttgatacccaacctagttgactggagatcccaagatctaggttcaaagggacaactaaaactgtaaagactatgatggatcactgtgggggttatcctcaagtccattcctatgatgcaacagtgatactcgtaaggaaaggttaagctatgcttttaatgattcttatgcgtcgaaacgtcgagcagagtaatacgagttactcttaaataagtaattacctatgtga

SEQ ID NO: 135841 - DNA, 636 bp, Cannabis sativa
gtaggcatgaaatatggcatttctaaaagcaacacttaacctgtcatagttaaggtattttaccaagggatgattagttaaagactgacaaatgtagtcttttagatgagtaggtggaagagttttgtcgagctgctatggtgattgaggaatgttgtatgaccttaggaggagcatcaaggacttgcgttgatggaattgcagcaggtgcttctgctggtataaaatcaacaaatgtagttgctggtgtgagatcagcagaggcattggctggtgtagtttcatcagggggtattgatggttaatggataaggtcaacagtgtttggtattgttttaggagtggtgacagggtgtgttggggtattagaagagactcaagatttggtgctttgagtaggaagtaagatgtccagttgttgggtgtttcgggacccctttagtggaaaaatctgctcataaaatacaacatcttgagagtgaaaatttttgttagtggctaggttgagaagtctgtaaactttcatgccattgggataaccaatgaatatgcatgcatgtgcccgaggagagaatttgtgtctaatactaattgttgggattttatgccctaaataaaacccatttcaatctaatc

SEQ ID NO: 135842 - DNA, 710 bp, Cannabis sativa
  modified_base (559)..(566): a, c, t, g, unknown or other
tgtcaacttgagcgttgggtgcccggacaccgagtgctcaaaaatgaactttctctaaatctaattctgatgcctcaaacatttctgtggtatgtctagttcaagtcccaattaaaagtttgacccatttgcattaagaaggtccagaaaattaaaatcctagttaaggatgtcaacttaggcactcggtgaaaccctaagtgcccagattgacttctagggtacatgttcatgtaatttcaactcacgaggcctagatttgattgctccatgtcttcatggtatagaatacagaaagataacgagttggaaacaagttattgaagtctaaacttctaggattcccaaagtcaacctgggggcaaggggcctctcctttgttgactgctatgactcaggtctactaaactctgtgacatcatctttcttgccacgagtaaatattgatgtccacatcatgagggaaaaattttgaattaacaaattgtacgtataaagaaatgttgaattttatttaagattatgttttccttacatataagaatagaatatacatttnnnnnnnnaagttttgaaatatatttgtatcatgtatatatattagatttttaaatcactatttcttacattaaaatattaattgtaaatataaattttttagaatatatataaatatgtgtgaattgaattatatcggttacttttacatg

SEQ ID NO: 135843 - DNA, 1209 bp, Cannabis sativa
acaaagttcaagatgcaagattctaagagtacttcagtacctcttggagtaaagtttgtattaaccaaggaagaaagccctatgagcacagaagagaaagaagaaatggaagaaatttcatatgcaatggctttggagtgtctcatgtatgtcatggttagcacaatacctgacattgctcatgctgtaagcatattgagtaagttcatgtcaaatcctaggataaaccattggagggcactcaaatggttgttaagatatttaagagggacattggatattggatcgacttacaaaagagtttcagagaaagtaactttgaaaggatatgttgatgctgattatgcatcatgcaaggatactagaagatctactacctcttatgtgtttcaaactaatggagattgtattagatggaaatcacagctccagttcgtaatagcattttcaacaacagaggcaaaattcatggtgaccacagaggcattcaaagaagcaatatggctacaaggaattataaaggagttgaagcttctagttggaaaggcaagggtatattctaacaaccaatcctcaattcatttgtgcaagaatccaatgtaccacgagaagacaaaacacattgatattcgtttgttttggataagggagaagatagaagaagaaataatcaagttggagaaagtgaagtcagaagagaaccctgctgatattagcactaaggtgttacctattagtaagttcaagcattgcttggacttactcaatgcttggacttactcaaccttagttgctaagtagctacacatgaaagcattaccacctccattggacaaatatgctttgcttgttggtgcttgaagaaataaggtagaatttgtggtattattccttaaactcccaactttagttagtctttaactaacttaactataaaaaaggacaacttgcatattgggtccctaggcctatatataaagtgaactactcctctcatttcataagtgaagaaaaacaaggaagaacaagtcaaacacaagatagagacacaacacagccgagagagaagttagagtgagaaatggagagagatatgtgagagaaagagagaggctgggattgggaaattgtattgagcaacattgttgattatcttggctcgggattagtgagttaatgagtgttgaggaattacaccatggatgactt

SEQ ID NO: 135844 - DNA, 564 bp, Cannabis sativa
tagatatgcggcggaaaatttttgcaaagaaggaaaaagaagcgaaagagcttgaaacagctaatcaagaccttcaaaatccttcatcttcgtccaaccaagaattcactaatgacaatcgaagaggcaaaagcactggtgaagttgaaatgacgcgagcaaaatatgatatattggctcatctaaagcgcatctctactcttttaagcatttatgatgcactggaaatgtctcctgagcatagaattgcacttgttctcgcattgacaagtcctgaattttatacggagaaaatagaaccagtgaaacttgcatcagttgaaacacatacaacttgtatggcatgcataacttttgatgataaggatcgtcagttgggagctgccttacatgattgacctctctatgtgacgggtatggttgttgatattcgcgtaagtcgcatcatcttggattgtggatcgactgtgaatgtactccccttaaaaaccttgagagatgttggtttacacccacgtcaattgtctccatcatcattgacaattcaaggttttaaccaagctg

SEQ ID NO: 135845 - DNA, 1097 bp, Cannabis sativa
ttcttactaaatacaagaaggaaatcatcatggctggaaaccaagcaaacggaggtgttaacaacgaatccctcaacatcggaatgatgaacgttccactgtctgtggttagaacaccacttgtagatgtcatcaatggaagagtaggtcgagataatgtcagaccccttaatctattccctgaaactgctggcccacaagtcggagagacatccacgccagcagcaacaatggggcactttccacccatcactccagcggcagtgtccgagggtatcgtccagctgaccactgaccagtataccgcaatccaggaccagctgcgtgccctgcaggccgaggtggatggatagaacagggcccgacaccctcctcgagcccccactactcgcacagaaaaccctcaggtaacacactctagatgtcgtaataaccgtgttcccagggaacaaaggaccaaccccggtatcccaaccaggagacacagatcgacgaagaccccgaacaacataaccctcacagcagaccttcgcgagataatgacgtagaatctgcctcctcgtccacgcatggtcacacacctagcaagtacacgaggtccggttttgtggagatgcagcagggaggacgatatcaggttcacaggggtgatctgcgtgatcaccttaacgttgttttcagagcattctcccacgcccctcgtgacgagaaagggccccgtgatcctcaaatgggcgatcaaggtgtaaacactcgcacaaatccgcctaacgcacaagaagcgactaccggggttaatttcccagcaaacctcgccgcagtagccacagctcctgcagccgcagcaatcccggctcccttagccagaggtattgatcaaagcatgctcttgtaggctttgaaaatgctcgagcagcagagaaagcccatatacaagctacatgggacctctcctttcacttcggaagtgcgacaagctcagctccccaagggattccggttatccgaatccttaaggtacaaaggtacctctaatcccattgattatttagaaaaattcaatactattatgaaagtggatcaggtacctcagctcg

SEQ ID NO: 135846 - DNA, 700 bp, Cannabis sativa
ggtaaatattttcctgagtttcattaagctcggtataaatagtatacactggcacatatttttcatgcttcttttgtttctttctatcgttcgacgattccctgattccatcatttcttttcagaccagaagcccccgagttatcaatactcgtggaagcggtccctgttgagacattgctgggtttacatctcgagcctgttttcaacaagttcatttcctttcaggcttattccttccgaacgaatacttgaacactctcatttaagtcagtaatgtttcttaccggacgtccttgcagatcatctaacaacttgcgtccggcggttaatggattagtggagatccctgcttgaagagctgtaagttgcgtgctgtcatctaagtttctaaccctagcggcagccgtgctaaaacgacttaagtacaccttaagtgtttcataagacgagacatgcgagtttttgaatcccgaaggaaaaggggtattcataatgtctgggtgatacggctcaagctcctcgtcagagtcgtatctagatagttttcctaatttccccacttgatatcttctgaacttgtcctccagctcgtttatatgcaattgcatcggatcctcttgctttggaccaagctattggcgaaggtcaggtttcttccaattcaagtgctctcaaagatctggttgggagtaattgct

SEQ ID NO: 135847 - DNA, 639 bp, Cannabis sativa
agtgtcaaaatgaacaacccacaccccaatcctcatttattatatgcctttgcaaatgaactctcaagtgtgaagatgtctcctggttaaagcatcacttcacactttcttttgatgaacttaaagtttcagaaagaaaacttgctgggaattgttctatcaaaagagcaatgggttcagttcattctcaacagcctttcacctgagtataacaaaattattgtatcttacaagataaacaactttcactcgttcgacatggataagctagaagctaaaatgcgtgcttatgaacggacattgtcacttgcaaggaggggtcgctctagagttgcagaaaagggcaagagaaaagttgaagatattgagaatgattcctccaacaatcctattacttcaggcttagttgagaagaatagagaaagttattccacttccttagattatctttcacaacagattgaaccaacaataagaacaatccaagaactgttaagcagacatattattcaatgttatcattgagaacagaagggtcattttaaatcaaaatgtcccagacttctcaacactaagaacaatggtaatgcttcagtttttgaatcatgtgttttagagaatgaaaaatccatttggatt

SEQ ID NO: 135848 - DNA, 870 bp, Cannabis sativa
ttaaaggatactatcaagaataaggtagatgctgccaaaggcaagtgggtcgatgagttacctcaagtactctgggctcacagaactactaagaaaatgataacgagacacactcctttctcgctagtattttgttcggaagcaatgctacctgatgaagtgaacatatcgactcacagacaagagttttataatcaagaagaaaaccaagaacttcaaaaattttctttggatctgcttgatgaaaaacaaactaagtcgcaaattatcaatgcagcgtattaacaccgagttacaagatacttcaacaaaagagtcaagaaaagactattcaatgttggagacttggtgctaaggcgagtatttgaaaacacaagggatgcatccgcaggagtgttcaacccgaattgggagggtccatatgtagtcaaagcagtagttagagttggagtttacaaattagctcgactcaatgactcgctattaaagaactactggaacgtggaacatttgctaccctactaccaataaataaatgatataactcacattgctgatgtaatattttaacttcagtcatgaataaagagaatcatttctattatttaagtaattacaaagttttactctttaaaattacttaagggcatttgtgtgtgattaatcagaatttatctggaaatacatgatataatgcaaagccaccacttcaaaaaaaaattaaaaatttgaattaaggttctcgactaaacctttttgatgaaagaggggtcgaaccgtcataacttcctgaccaaacctttttgacgagagaggggtcgaattgttataacatcctgatcaaatctttttgacgaagaagggatcaaa

SEQ ID NO: 135849 - DNA, 1213 bp, Cannabis sativa
ttatatggtagttatggtgttttctgatctagtgtggtggtggtggttatgtatgttctcgattatttatcgacagactctcaataggttctcgatggtattaattagtcttttagttgtcatgtttggtgagtgtactgattatcgatgggttctcagtaggttctctataaatattgattgcagttgttcaaaggttatgaaaattaatgataatttctttcaatttatgtatgcttgattatcgacgtattataagaaacccaattaaaaccctcaacacaccaaacatcattgtacggtattacaagaaacacaatcgatcctgcaatttgaaataacaaaaggtttgttagggaacactaccaaaaaaatataaaaaccaaaaatgaagaaatttaatataatcgacaacctatcgacatctcatcgatattccatcgataagaagtgtcatgatttcgagcagtgaaaaaaatcgacaaagtgtcgataatctatcggtataatgtcatgacattgaggcatttgagaaactcaacaaaactgtcgacatatcgttgatatcatatcgataaagattggcttcaagaacctattgaaaatctatcgaataacattcgagaaaggtcatccctaacgttggaaaatctgcttctagaatctttcgagaacttatcgataaccattcgagaaaaataatgtcatgacatgacattgaggtagttgagacactatatagaactgtcgacatatcatcgatatcatatcgataaatattggtttcgagaacctatcgaaaacttatcaaatagcattcgagaaaggtcatccctgaccttggaacatctgcttcgagaactaatcgataaccagtcgagaaaaatataaaacccagaatactcatattgataaatattggcttcgagaacctatcaaaaacctatcgaaaagcattcgagaaaggtcatccctgaccttggaacatctgcttcgagaagctttcgagaactaatcgatacccagtcgagaaaaatacaaaacccagaatactctaaaaaaatagatctcacgattttgacgaaaattctacaaacaacaccatagatctaccaaatatgctatactcttacaattatttaacaaatatttttaaaaaaaaaatacttacccattaatttacaatgaaagagaggtcgaggaagggcggcgc

SEQ ID NO: 135850 - DNA, 1835 bp, Cannabis sativa
tgtaagagttttattcttagtaacgaccattcgaatagtggctgttaagaataggacttacaaggtatgaaacaacggtagaagctcataaaataagaatgaacttccattttagatgagttgacaactctattcaatggatgatattttttactatcgactaaaacaaagcattgtatcagtttgttgaaaaccttagaaaataattgaatatattttattttagtatttttacaaacatgtttactaacttgttattttcttaacttatgtatgaatttaagtgaaccaaatgatttatttctatttatttatatttgtagtgtcaaaatggataacccacaccccgaacctcaccttctacatgcctttgcaaatgaaatatatcatgtgaaaatgtctcctagtaagagcattaagtcacatatgattgtgatgagtctgaagttccagaaagcgaaattgtttggaattgctttatcaagacagcaatgggttcaattcattctcaatagtcttccacctaagtataatcgatttgttgtatcttacatgatctacaattttatctcatccaacgtagacaagctaaatgcagaattgcatgcttacgagcggactttgcctgcaaggaggcctccctccaattttgtagacatgcaaaaaaggaagcaggtaattgagtatgatgcttctaacaatgctgcttcttcaagttcaaatattgaaacaatggatagtcatactcttctatgttcgtattgtgatgagaagggacatcaagaagtattgtgaaatttaatacacaagtgcacatatcgttgttcaagtaataaactcacacgagtgaggtcgaaccataggaaattgagcagaagaccactaaataagactttgtcgccaaatcagtccatgtagcaatggagctgggtggcaaagacaccaatgaactcttggctctctccctcagcgagaatgggaataatctcaaatgaatggcatcatcgttgactcaatttactttgaaggtctggcataactccataaagttagacaggtggagatttgggtcttcagagggcagtccaccgagctgaactgaggattgcaccattaggagtatggcaggctttatctcaaagttgttggcatctgaggcaggtgatcttatacaagattgaacccccgtcaaagttggaagaacaaagtacctcaagctacggttaggtggattacgaccgttttcctggtcttctattgctcccccattattttcattgtttccgtcattggcgttgtcagccatgactatttctggttcagccctcaatgtagctctttctaacctcttgttccttctattctgtctataggttttctcaatcttaggatcaacaggcactcttgaactagctccttgacgtcgcatatacaaaaagcacctgaggtaggatagaaaaaaaaaataagacaaaatagttagcaagaagtaagaagaaaaactaaagcagaatttagtctaatttttgaaatatcaatttttaaaaaaatccccggcaacggcgccaaaaacttattgtgaaatttaatacgcaagtgcacgtatcgttgttcaagtaataaattcacacgagtgaggtcgaaccacattgaattaaactggataccactaaattagacttatgattctatttggtagataaataattttgatagagagtttagtaaaaaaaaaaaaattaaagaaagcaattaaggtgtttaatcaaggatgagaaattagggaaacgaatcctgctttatcaattacccaattgttaatgctaattattatt

SEQ ID NO: 135851 - DNA, 688 bp, Cannabis sativa
  modified_base (111)..(112): a, c, t, g, unknown or other
ccatcactttgcgaaggctgctatattattccctgatcgtcgattcagtttggaggatgttccaactgatttgctaccttgtttggtagcggaagttattggttaataaannatttgatcattcaaaaaaaaaaaacatgtttgtctatcttaatgttttattttttatttaattctctcattaaagtttcctcaaatctcatatcattcatttcaaatccacaacttaaaatgctgtcatttataatgccatttttagtttattttgatatttcagcaacttatctcaagatcaatcatataagcacgtatgtatgtatatatatatatatatagtgactacttagatgaaattaataatgactaattattcatattttgtgcagtgatttcaactaaatagcaggactctaagattgttccaagaagtgtgttgagagcttgggtctcctaaagatagactgtttagttagttttgtgagatactgagataaatacacaatttctacactggctcattactttcattcacatattttccttttttccatataacatattgttgtaaatttgtaacactacctttactttctttgaataaaaaaatatatagttttttgtgtaaggaaaaactaaaaactgctttttgaaaaaactgtgataaaaatgtgtttggtaaacagttaaa

SEQ ID NO: 135852 - DNA, 1552 bp, Cannabis sativa
  modified_base (878)..(890): a, c, t, g, unknown or other
  modified_base (1052)..(1056): a, c, t, g, unknown or other
taaattatataaaattatatatattaagtggatcaagatcacataatgaacatgaattataattaattatgtggatataataatcttactccacatagattttattatgtgttatactcgaaattcggctggaggatacgtgtcatggtatagggaatgtgaatcggtgcaatatctttttatggaataactcattaattgtgtaagtatcagagtatatttataatacgctgactgtgaggtcttaggcgaggaatcaatgtacgaactgacacttagtgtattaacgagaaaccatatatcgctgaaggtgaataacgaggtaccagagaaaagtaacacatactttagcttgcaataagcaaactaagtgtaaaagtcagattgactcgaggaacaagaatgcgagatgaccatctcgctacgagaaaacttcctatagtttcatccaactaacaggagtgaggctcataaccctggcaagtcagaacatttctgtatagccgcgatcgacgtaagacatattttgtcgacctcggaaagaaaaatggttccagctcgccattgggatcactacaattaagtttatgtcgagatatctccagattcaacaattaaagacgtgtttaatacacaatatttttgacccagtaaaagtgggaaaatcacagctatatgtttttcaaaatcatacaccgcatttacattttgtgatatgtaatcagatcccacgattttaggaataatgactgtaatcatattttggtcaactttgtaattaactgtcactatgcaattaaatagtggcaaacaattccaaaaaggagacgaaaaaactcttatgaaagaggctttaaaaaaatactcagaaatctgannnnnnnnnnnnngtggactatgcagaattttaattgcaaaaccacataaaaaacccggtgttcatattttatttttctatagcttttattttttctatgttaaattatcatattgaggctcaaatttggttaacgaaaatctgcgttaaccgtttggtgctttcattgagagcnnnnntgaaaaagctcagaaaaagccttcccttcttttaaagaaaaaccttcttctttatggctgaaaatccagagaatattaacaccctgcatgaggaaactaaccatcgttctggaaaagagcccatgggctcaggaagatctaccaatccacagtccagaaggaccacccgttccaggagggctcaacctgaggatggccctagtgcttggaccacacgttctcgaagaactcaacccaacgtattctcagaaactactggacatgctggaaagacatccacaccggtagctatagtgggccacttcccgccgaccacaccagtagtagtctccaaaggcataatccagcttactatagcacagtacataaccatgcaggaacagatgtaggctctgcaggccgaagtcgatggaaaagaataagttagggctcgacgtccaccccgggtcccaaaacgaggaattcctagtaagcgcgagtcatcagctcgcgttga

SEQ ID NO: 135853 - DNA, 1726 bp, Cannabis sativa
gttgaagtgttgtgttatttagaacaattttttcctccatccttttttgacataatgatccacttaactgttcatctggtgagagaggtaaaaatgtgtgggccagtgtatttgagatggatgtacccaatggaacggtacatgaaaatcctaaagggttatgtaagaaacagaagcaggccagagggttcaattgttgaatcctacatcgttgaagaggctgtagaattttgttcagacttcttgtcaaatgtagcaactgttgggtcatgtcttcctcgaattgataatgaaattagtaaagggggtcagggtgtttccgtttgcgacgtaagtcgagctgatcgagatgaagcacaccgactcgttttgcaaaatgttgatgaggttcaaccgtacattgagtaagtttaatttaatttttaatattcaattcaaatcaaaagtgtactaataagaataatgtttaactacatcttgaaggaaacattttgattggatcaagactacttatcctagtaagtcgaggaaccacaaatgggtgcaagatgaacattatcgaaattttagtacatggttgaaagaaaaggtattatgcaataccgagtgatttgaaattggtatgtttttcataatcatttcatgtaactactaattaatttgatttatgctaggtgattgtggaaatgagtgactccccgaacaatgtatctcagttgctactttcgatatcgcattttccttcatttactgtactaaagtatcaatcatactacataaatagtactcaatttaacacgaaagatcgtgattgcttcagaaaaacacaaaaatagtggtgtcatgattgttgctagtgctatccaagtagctagttcaaaagacaaaaaccctattgaatgtgatatgaccttttatggtgtaatcaaagaaatttgggaattagattacattagctttcgaatccctgtttttctttgtgattgggtgaggagtgataatggagttaaagaagatgagtttggattcaagctagtggacttgaatcgagtaggacacaagtctgatcgatttataatggcatcccaggcaaaacaagtattttatatgagtgacccaatagatggtcgctggtcagttgttctaacaacacaaccaaaagattatgattaccaagagtctggtggagatttatatctcaatgataaaacttttgaaatcaatccaccaccaattgatgtcgccgttcgggacgaaatcatttcttctcgggaagacggtgaaggattatggattgagtaaactatcaatctataaatattggtgtgttttgttttatattattttatatttttttgcgcctaatctaaatttctgtgttaattttatgtattattattttgctttaatgtgtaggtacattgactatggatgaccccggtgactatgatgatgattttgccctttggggacaatccattggtggtgaatctgaatctgatccagctgcaccagaactggaacctgaccctgattcacaaccaaagaagaaaaatggtaggggggcatataagggtctgaagcatataaagaataggagtgaaggaatacttctcgaagtcgagtacaaccaatggggccagtgcattggggacactgcaaatgaactggttagccagattggcttgtatgcaagacgaaatcttccactggcatacaatgattg

SEQ ID NO: 135854 - DNA, 663 bp, Cannabis sativa
ggttaattgtttaaaaaatttatatttttataattatatattgttgaaatgtaactaatgagtatataattgatatagtaaacaactaaatagttactttgagtttgaaaagatgaaaaaatatatgcttcccatattttgaaatgatcacattgaaaagtacgtcacaataatattatttttgaggccaaacaactagcaatgtggttgaaattttattttaatgttggaaataagagaaaaaatatatattttttttattttaactttctctatataattgtaaaaccaacgttcaaataaaaaaaaaaagaagagatatttacatatagacacgctttttgtcttttattattaactataacttaatctatctcaataacaaatttaacgttcttttatactgttttaaaactattggtactgtttacattttatagctaagctcacaactttttttttttttttctttttaaggaagacttgtaaaattaaaaattaggtaattatacatagaaacaataaaataagtatttttttctgcaacttaaaaaaaaattataatcacaccactatttgtttagcttcaaaaattatacaattacgatttaatgttcaatatgatcattttgagatgtggaaccatatattttttgtcttctt

SEQ ID NO: 135855 - DNA, 828 bp, Cannabis sativa
  modified_base (598)..(599): a, c, t, g, unknown or other
ctaaatgtcttcatacttcgtcctccaccacaacttggcgtccccagacaaatacatggtagctgttgctacatttgcttcttcagagtcggtctgcatgaccctaaagtgttgctccatgtcaaacagaaatttttggagctcctttgcatcccttgcccctccatagcatttgggctcgaatgctctcggtcggccatactccatacctccgtggccccccggtatttgcacgctctaccgctatcatggtaagatttaccttggttgacattcctgctaactcttcctgaatggttgtgacagacacattacaatcctctatcgtatcattgagggagtcttgtaatgcagccttccccttttgtagcacagtgatagccgcctgcatgtctgctgttgcttgttctaataccctgatgcgatcctccatctgaggcgcatctgatgtttcagtagcagcatctctcctctcgatcgcagctaccctagccaataagttagcatggtcttgagccaacgaggcaacttgttgttgtgtcactgttggccctgagttctgattcttggaggctagatccctgaccctctcgtccannccatctaattcccctatgcgcctctcaagctcttgaatcctttgggtgtttctcaccattatgtcgtgttaccaagcttctctttctcttggctctgatacgaactgtcacgggctgcctattttgacaccctcaaataggtgggacgtgcggcacttgctggcacaccgagctagcaaggtagcctaaacgcgcccgcaggcaaacaagttcaaaggttaggcacgat

SEQ ID NO: 135856 - DNA, 898 bp, Cannabis sativa
aattttataaaagcacacacacgtggcgtccctgttggacagggcgttacaactgcacttaacagattcatttcgaagtcgactgataaaagtttgccattcttcaatgtattgcgaggcaacaagaaatttgagtggccagaagaatgcgaggaggcctttcagaacattaaaaggcatttggcaacacctccagttttggcaaaactaataactggagaaatgttactcctctatctggctatctcggaagacgcgattagtgcggttatagtacgagaagagggaaagcaccagcaacctgtttactatgtcaataaaaggttactgggggcagagtcgaggtattccctcttgaaaaacttgctttatgccttatccacgtgtcttgcaaattacggccttacttccaggcacacccaataaaagtgataacagatcaactcttgagacaagttttatcaaaaccagacgcttctacaagattgataaaatggtcaattgaactggggcagtttgacataacatatcaccctcgaacatccatcaagggccaagctttgacagaattcttaatagaaggaataactccaaaggaaaatctgcctgttcaccgagatgcagacacttggaagttatacagatgcggacacttggaagttatacgtggatggtgcatccaatgagcagggctcgggtgcaggggtaatattaatttcaccaaaaggctttaagtttcattatgctttgagatttcaattcgatgcgccaaacaacaaggctgagtatgaagccttgatcgcttgcttaaggatagtcgaggcgctgaaggtcaagaatctcatgtgtcatagtgactcaccactgattgtaaattaggttctcggggaataccagg

SEQ ID NO: 135857 - DNA, 711 bp, Cannabis sativa
  modified_base (30)..(31): a, c, t, g, unknown or other
actgaaatagtaaattgaatgaaattagannaaagtccttaaatttaacaatctccatagttcgggaggaatttttaacggccaaaaaatttcagggagcacgacttactacatgtcaaaattcagggaaaaaaattactaattagcctaaaaaaatttatagcaatttatgatgttacttaatatgttaaattttattaagtctaagattttattactttttgttacaaaatataataaagaaacaaaaaaattaattttaatattagtcgtcctttttcgaagacagtaagaagttaattttaaactttaaaattataattttatttttggatttttaagttaaattatattagctaactataatgattttgttgtttaagatactttagtgttacttttaatttcagtaatttttttttttgtggcggcaaaaaaatatatgcttcccacatgttaaaatgattatcttgaaaaataaattgcaatagtataatttttgagtctaaataataaatggtgtgactaaaaaactttttaaacttttttttaaaaaaataaagaaagactataatacaattttaaaagtgattattttacaaatacggcaaaaaaacacaaaaattacaaaaatatggttgtacgaaattttaaatatttttacaatttttataattttatttacaaaaaataaggtctttttatgttgta

SEQ ID NO: 135858 - DNA, 673 bp, Cannabis sativa
  modified_base (631)..(633): a, c, t, g, unknown or other
gtgttctatgttatatacaaatagatcttgagtttattattaatttttctaacagttagtaattttttaataaatttaaaactttaatacgatacaacctaaacataacacgtcaacacgaattactactctaacgattaggcaaagagctacactaacacaaggctaattgacttagcaataattttgcgaaccaaattttgcttggctaacatatgagtgaaaaaaaatatgtttcccaaatagtgtgtcaccatccataataatttgacatgtgacaaaattaaattaattataaattctttctctttcttccttaattatcgataccaataaaaataaaagaatgtaagggtattcataatttggtttagttcagatttttatttttttaaaaccaaacgttacttcgtttggttttttaaaattaaaaactgaatcaaatcaattttaatgcaccaaactaaatcaacccacttaagaacaattgatttagtttgaaaccgttatttgtaattcgtaattgttttaatattttttattaaattattttttactttaaagttcataatacgtaaataacaatgaatatacaaaaaaaaaaaaaaatattggcggctaaaccacctgnnntttacggtttgtaaaacttaaacacaaaaaatgaattttt

SEQ ID NO: 135859 - DNA, 549 bp, Cannabis sativa
tacatatgtgatgagaaaaatgcgcaaaacactcattctggtaccaaggtattggaacggggaacatttaaacaaatattaccaatagaagtaccaggtcagatgaccatatcaagtacgaaataaaagaacatttgctcttcagtgaatggccttctaggcggaccacgacctaaggttcgaataaaattttcaagtactcaggtcggatgaccacctttgaaagtacgatttttatttcctacaattttttttgttcatgttaagctaaagattagattatatcaacataatagccttgatgtaagttacaacggtaacagacacatttccgaccaataaatgaataaatatgtttatttaaattccaattgagtcgagttcattagcatgttattaatttatcatccaatgcgtacaaaaggtttggtcgaacctaaaaccctgaacatacaaaaaagcatacttgaaaaatataaataaaaagtgaccaagagtcatgagtctgcttagtcacttgggggcacctatacctgtacaaagcatttg

SEQ ID NO: 135860 - DNA, 3910 bp, Cannabis sativa
  modified_base (346)..(348): a, c, t, g, unknown or other
ttttgagttagaaatggagtttggaactttttaaagcttactccgaacgttaatggaatttttcatttaaaggcttgatttttatttctgttacataaagatggtaatgtttatggtatatatgcgccctgtgaagtttggagtgatttggagaagtttggtagtgtttcagtgagtgtgaaaattgagatttttgagtatcatagtttttaaaaattcctaagagatcaaaaatcctatttttgtcatagcttttgactcgggtctccatgttggacaatctatatactgtttcgaagcttgcgatgagctctaaaatatggtgtatattttagagccaaaatannngttttattttagtgtatttataccatgaggtttggaagaaaatcctagattgtcttatgtgaatattaagaagtgttttgggataaacacttattggtttaccgttgttatgacatagggccgagatcatcgggaatagttctccacttgggttggccgatatgtatgaatctggattaaaggtaaaaagaagtatattgtactgcatagtacgttatattgtaatataattaataatgttatgaattgattaatattgagattgagatatagttaatattataatatattgaaaagattgattggttaagcaatggtaatgtattatactatgaatgtgatatacaaactcacctgattaggtggtgcgatactcctggcgacttaccgggcataggttcgaccgtcagtgacatatgactaccgagcgtaggtacagactcacctgattaggtgatgtgatactcctggcgacgtgtagatacgacattagtgatatgaaaattgtcaggttatggcatacaatgaaaccgctgtagggtttccttctggcaacgtgtagatacgggagtcagtgacatatgataagcactgggcataggtacgggctcgtctgattaggcgattactcctggcgacgtgtagatactgcgtcaatgatatgaaaatttccaagttatggtatagaatgaaactgttttagggtttcctcctagccacgtgtagatacaagcatcagtgacatatgataagtatctggcgtaggtatgagcttgtgttattaggcgattactcctggcaacgtgtagatacgacgtcagtgatatgaaaattgccaggttgttgcatataatgaaaccattgtagggtttcctcctggctacgtgtagatacaggcatcagtgacatatgataagtttcttgcgtaggtatgggttcgtctgagtaggcgatgcgatatattggtgccaagttgtggtacgggctcacctgattaggtgatgtaattatatgatatatgggtgcaagtttttggcacgggctcacctgattaggtgatgcagttatgcgatatacggtgccaagctatggcacgggcttgcctgattgggcaatgtgatgtaataaagatggttactttatgaagtaacatatatatgatttatattttttaatgaatacgattcctttgtataataattttgtattatcagatatctgtatactaatgcttattcatggcagatgccaatagttatctggatttcattttatgaactattcgtaatagtttgattctgattgtgtataaatgacactattagaataatcaactatatgattgttattattattattacttttcttactgagtcattgtgactcacggtgctatgtggtgcaggtaataaaggcaaagaaaagctagatcaaccatgggtgatagtcttctccagtaatgtacatattgacctcactagcctgcgtgtcgagttgccaggagttttgttgggctggttgtatctgttgtgtgttttgattttgtgtttaaatggttgtcgtataattcctttagtaaaattttttataataggggatccccggaacacacttattatgtcgttataatgtgtgtttttggtattttattttagtcaagttttcaatattatcacgttttttaatgattaattattctattagtattaaactagtttgtaaaatcacacacgtggcatccctatagattagggcgttacaacttggtatcagtgcaacgatggttttaaaggtcctaaagactggtcgaatatgtacatttgctacgaggactggtcgactcacggtatagtaagtatttatattatttgttattggattacctgcctaggctattataaagtatgttgggaaacgtagcacagtgataattttgataagaatatatgtatggtatatgcataatgatattgatattcgtctgagttttaaatggttagaagaagtagactaaatattgatattcgtctaattagcgagttatctgagctcgaggcaaatagtatggaagagaattctttattgccataatgctcggaacatgtaaaaattctactatgcaagatatgattatacaataagggaaaacagatctgagatctgaaagaacaatatgctcatcttgtgtctgttcttgtattaccgacacttcatgttgtacaactagatgtggtggaatatatgaagccaacttaccagaagatcaggaagcaaaaactaaatgaaccatatttatgggataggagaaaaaggttccaggatggtcaggatagcggttaaggtgagaataaaaaattgtgacttatcctaattgttcaagatgcaaaaaaaaaaaatgccatttgaaccaatgtagagccagatcttattttattgtggggtagtgggtcatctaaaaagaacctacccgtagttaagaaagactgatgttaaaggagaaaagtatacgtgtccagcccaagtgctggttatgacttaaggggactcgggtatcagacctttggccgactcaaattagaattttatgggaaatattacaactgttatttcaattgatatcaatataaaacattgtacattaagttagagacatcaagaaatctgaatggactgtgcatgtatgttatttagtggcaacctatttgagggggtagacaaattagagaaatgacaatatgagttaaatttgcaagtattcccaagtggaatataggacatgagtagttaatggaggcatcgatctaattgattcaaataacaaaatcttttatctaggagtgatctagcattatcaaaggtgagacaatttacgagtattgtctagaatcctaggtgaattgaaggcagcgattgtgtagtaattttgagattatgtaggcgtgggactacctatgttagcaagaagtatcttgttttagtagctcaccatgagagaactccatggttgagtgtccttaacttggggtgatttcatttaggaaatttttccatgaagtgtgcgagtcgaagcaaagcacgttggaaacacttggattggtccgtgggggcccgtcgtcagtctgggaagtagctagagtgatgcactcatgtataagagccatcattctgtgagaataagggcccaatggaggcttgaagcgagaacgttaccagggtaacgtataaaagaatgttaggaagagtagtggtattactaaggtaaagaagattacctgaattacttaaggtgatacggtaatgatggaaagtactttataattgactggatagtcaatgtggtatataaggagaccattgaaattctaagaaaggattactttattaagcaattatggaaaggcatactcacccagaatggggaaaagcttatgaattgagatgtaaattaatggacatctaattgagtgattagtgaatgttggatcacaaagtagattgtttattaaacaatgagctatataattgagtgtaaaataaattttaaagtggttaaccaagtatg

SEQ ID NO: 135861 - DNA, 737 bp, Cannabis sativa
agcacactagagaagataagaacaggtttggctcaagtgtgtgtggttggtgtgcttatgagaagatgataattctttagcttagaacacttagaatgatgttatatgatgaatagaagttaaaccaaccattacttttgagtgaaaaacgagtttatatagtgtaggaatgaaagctattcgtttatagccgttagcacatttttcgaggccaattcagccgtgatccaggattccagattggttaccggaattctagatgggaaccgaaattctggatggctaacaggggcaaaaggttcttttttttttttctaactaaaacgtgcataactttttactcgtttatctgatttaaaaaattccagttgcgttctcttagttaaatcattttttgtgaaataacttgtcgcacaagttagtgtactatgcagatcactttaacaagactaaaataaacttatatcacttgattgtgtgcagtcttttcatgttttgatccaaagttgacttttctctgagagttgactttgactttaacttagactttcaggttgacttttgaatttaaacttttgaagtcctcttttggattgggtcttgaattcttgatctcttgatgaaagtttttctattatgaagtatgaagtagttgatatacttgttgaatctacttctttgattatgtttgactttaccgagcaaatattgatactttgtgaacttgcttgcaaaat

SEQ ID NO: 135862 - DNA, 848 bp, Cannabis sativa
aagtctgtgacggcgtaacccctcttgtacacagattatgcgctatgattaataaggctagtgatgactactttatgagagatcacttcaatcaagaatggataaaagactttatccacctaacccctaagagacctaaggtataggtcatgtatttcctattttgtatctactgggattatgtgcccctactgaaactacacagaaagacaagtgcttcagttctagggatcaccccaaaaaaacattataaataccccccaaatacactagataggggtccagaattctgggctcataagaattaaagagagcaattaggagagaaaactaccaagaacatactctgtaataaatactctcataaataagaaagactcgtgggctaaggctcattaatgccgcaaccacgtaaaaatctcatgattaaacttcctacagctttctcatacatattattaaattggctgccgaaaaccccagtcaatagattccatgtgaaaaattaaccaattttgatttttacgaaactcgattctgataaaaagtgagaatattataaaggtttgaaaatcggatgcatatgggtgtcgagatgggtgctcaatcgcaccagcatctcgaacaaggaggcatgatgcgcgcgcgcgacccaaacattttttgtctaaagtcgtgtctcgcccagccttcaaacacgcatcaccctgcaagcgcccgtgtttgccgcacatgacacccagcgatagcccatctcctcacgcgtagctccctgcttgcagcctcctgtgggcagcatgggggatttcacccaaaaatctaaatttcatggtattttttcccaattt

SEQ ID NO: 135863 - DNA, 536 bp, Cannabis sativa
attccgataaaaattgaaaaagctatggtgttttgaaattttggatccctgggtgtcgagatggtgcacacgcgcaccaagaactcggacaagaagctccttgtgcgcgcggattcaaacaaaattttgtctgaagcgcacgctgatgcccgtgtcctcaccctgcatgtcccctatcctgaggctacaatggccaaagtttaccgcacattcgaggctgcagtgcgatttttgtgattttttccaccaattttgaattttttccattttcaaaacccaatttaaaaataaaatattatttttaacatatttaaacttaaatatcatttttaaattaataatatttaatttttaatagattattattaattttaggatattttgaggtttaaatttaaaaattgattattttatttttaaattatggccagatttcaaaaattcgttaatttcattaatatttatatattatttaattataaggttagatattttaatattgggtatattttaaattaaagatagcattatctttt

SEQ ID NO: 135864 - DNA, 897 bp, Cannabis sativa
caataggggtttccatgtagaattccgtaaaaattcaaaaaaaaaaaaactgttttgaagtgtaaaaataataaaaaaaaaaacccatacaaatatgtatacacgtgtagatataaataactaaaaaattaaattacataagtatcattaactttactattatatacacgtataatttaataaaatctatatatctatatatatagatgagaagtatgaggcggtgatagtttgaaatctcttcaaagctattttctatttttttccttaattctttcaattttttaatattttaaaaaaacataaatttacaaattaatattttactatttttcaaaaaaaaaaattctataaaaatatctatcttaaattaattatttaaaaaaaaaacacataataataaatgactacacgtaaacataaatgacttctaatcgaaattgataacaaataagcttatattgacatggattttatttaagacatcaaatcccaacagttctatagttgtttttatgtgtttttttttttgtacagttgttgttttgtttatgtgtattttttatcgtgtatattatttgcatttattttgttattttttagttatttttcagttcatagttgtttttttaccattactaactcaaaaagaaaaaaaattggaagaataaagttgtaatgacaatttcatgaaaaataataatgtaatagtacaaaaagataaattaagttgtcaaaactaagtaaaaaaatagtaatgtaaaaacatattaaagagttgatcttattttgaatattgcaagcaagtcaatgttttgttattttctgttatatttttcttgtcttatagtagttttcatgttgtttgttaagttttaatttatttatttattttat

SEQ ID NO: 135865 - DNA, 679 bp, Cannabis sativa
  modified_base (114)..(116): a, c, t, g, unknown or other
aaaaccaagaaagtcgatgacggacaacagctcgctcttctccaaacaggcatccgtacagggactccattctggaatgagttataggaagaaggagcttccaaccttcaagannnctcgaagagagtccaaaaatatatcaacctggaagaggcccaaacagtggcctatgggggatactatcccaccgggatagcaggatatgtgcccaaagctcagctcccaggcactttgccagtagccgctccaccgatgagcggcatacaattttctgttactcccggatatagtcaaggtcaggccttggcccctgcatcttcccactttggaaatccctcggggatgaatggacaagccccgtcgcactccgccccggccacaagtttagccggtccttctcaaggctcaaggagcaagagatcctctaaaggtagcaactggacggaggataagcgacaaaaaagggggtacactccccaatatacccagtacacggagctaacggactcccaagagcgggtgtattttgctaccaggaaaaatacacactaccggagaccgcctcctctatacaaggatagctggaccccagtaaaagatgcgagtaccacaacgacattgggcacaacaccaatgaatgcaagaatctcaaggatgagatcgaaaacttgatccgatt

SEQ ID NO: 135866 - DNA, 611 bp, Cannabis sativa
ttggtttggtggtgatggtttgattcgtacgagagagaagttttgagggtttgtttatttcataacttaagtttatctatatattaataataataataaaagattatttatcatttcttagccattaaaatttttttaatcttagggtatttgatcaaccccgagtattttaaaatatcccagtaattttgtaataaacttatctcaataatttcatcaaagttactaacaaaaaccgttgtgatattttttgcatccgatcgggtctctatggtcgccgaacctgaaaatatttttatttcaccaataactcacattatatctagatattttatataaatctctgttattaataaattacgtttatttatttacttatgaaaaaatttataattcactacaaaaaaagactacctttagtgacaacataatttttgtgactaaaattacttgtaactaaaacatagtatttataaacaagatgtcattaattcagttttagtcacaacaagtattgtgactaaattaaaatacatttattagtcacaataaattgtaatttttgtgactaatacttttagtcacgggccttttagtcacaacgtaaaaat

SEQ ID NO: 135867 - DNA, 525 bp, Cannabis sativa
taaagattctcattactttaatacactactgacttgtttcattcatatcgtataatcttaattctcttgtacatccttacaagattataccttctacatatgaataagaaatttttacatatttaataattatactcttatagtaatacatcatttatcttatatatgtattttatatattctctaatgtattatccattaattacttgattttagggcataaatcccaacataatggtcattcctgatcttttctttcatattatcaacattgtatcgatattatatcgataaactataaaaaaaatctagatttcgagcaaaaatcagatctagcatttcagaccaaaaaatagcaaaataacaccagttcaaagaaacaccacacacatatataacgaaaaataaactacatactattcctaatatctacaaaaatagttaaaacacaacttatgttgggttttatggcctaaataaaactccatttcaacgtaatccattttattcaatatcaataaagaa

SEQ ID NO: 135868 - DNA, 1214 bp, Cannabis sativa
gtcaagtcagtaaatttatagtgtgaagtagaaaagaaaataagaaatgtaaatagatacttcctgtgtctatggttatgcgatgatcgacgatcaaattctactcaccggaatgagagagtacgtcagatcgtagagaaatgataagtttagtcataaaactatagaaagagaatgaatattcgtatatcctctttttccccttctttagtcctagtgtgggcctatttattatcttaggaaaacggctacctcttgaaacgtggtccatcttagagaaacgctcttcctccacttctctagggatgaatgtcatcttttcggttcgttcctggatgagcgtcctcacatcagcatatcacttagagggttgatattcttgctccgctatgctagggaagatcgctatttttgtgggttagttgggaaacttaacattcttcctcctccacgtgtcaaccttaacattacactttaagatcaagctttattgtgggttggacattcaaatataggtatgacccaaacgacatggattgggcgtggcccatgtgagccattgggcttacgggttcctcgtttcttacttataagtgggctttgtaagtacttcgatcgttgggtttagagcaatttttggccactacactaaatatatgtggtaatattttttatataataaatcataattaatgctatttaaatttatttattaattaaaaaatattattcaaattaatataatggaagggaataattcaagtctgtctttttttaaggtgtcaatgttactctcttcaagggtagttgtattactaagagaataatattccaagattaaaccctcaaaacaaacagagtaacatttcacattgtcattctcttgctagcattgacccataatttttaagtgttaaaaatagtattactgtgtttagttgtgtacaaaaattatctcttcttgagaaaataaggtttttgtgcacatgaatcttattagaaatattatcctaattcatcactatataaaatattatatatatttatgtaatattaatttttctatttttattgtaatgaccgcttagttttattttgagaattaaggccagtttggcatagttgtgttgtggaaaaaaatagttgtagttgtactgtgagaaaaagcagctgcagcagaactgtagaaaaaagttgagctgagtgtttggtaa

SEQ ID NO: 135869 - DNA, 1329 bp, Cannabis sativa
gcatggttgggcatttcaagaaggatttccctcaggcaaagaaagaagagctcaagaaggatttccctcaggcaaagaaagaagagcagaagccaagggcaaatcccgtacctgctcgggtttttgctatcactcaagctgatgctgcagccagtcattctgtggtgacaggtcagcttcttgtcaacaactcttattttacagtgttatttgactctggggctacacattcttatgcggcaacacagataattaatcaattgggtaggccttgtgattttattgaaagagggtttggaacccttctgtttagcggggagttggttatctccaataggcaaattaggtctatgccagttagggtcgaagataaagagttgagtgctgacctagtaaagttggaattagccgaatttaatatcatattttggatggatttcttgtccaagtattcggccagcattcattgtaagcggaaaatggtaactttttagtcggagggcgaagatccatttgtcatatataacacctttaaatcagattgttattaaattttatttagacaaaaaatcagttcagggtcttatttgtactattttagaaaatataaggtccattttattatttaacaaaacagaaagtctaattagtaacttttgcaaaatatagggtccaaaatagtatttacccatatttatactacaaatattcccatatatattctttttctttctaaaatacgctttattaacattgaattgaaatccagaagaaaatccttttccaaaatactatgcatggaggaaaaagactagccacatatatcaaaattagaatacacatttcagtaaatgtgttcaagtataaatgtttctattttgaagcactccatgagttccttttcaccagcaataatttatcactatacttataatttttttttttaaataaatatgaaataacactctaatatgtacagacataaagataggatactttatttttttttttaatttttttaatgtttctcatattattattattattatgtaaaaaaatggagtttttagaaaattagtagattttactaaaaataacaatggaacagctaaaagataatcgtggaataatagtaaaaacttaacaaatcacatagtataaaaaatacacagcatttttttaaaaaaatagggtaaatactattttgaaccatatgttttgcaaaagctatcaattggaccatctgttttcttaaatgatcacaaaatggaccaaatgtatttttcaaaatagtacaaataagaccctaaactaattttttgttaaaat

SEQ ID NO: 135870 - DNA, 1585 bp, Cannabis sativa
gagagagagagagagagtcaaaaaaattaatataaaaggccaaatttaaaatgactaaccacaaagagacaaatgagggagacgattaagctctctgtggcctgtatgggcggcggagtaacctgaaggtgacttgcaaagttccatcatccggtgagggagaagcttggctcaaggttaagaagggtgcacccttgttgagatttatgccctaaaatcaagtaattaatggataatatattagagaatatgtgaaatattattataagataaatgatacattaattataaaagtataattaataattataaaagtataatcttgtaaggacgtacaagagaattaagattatatgatatgaatagaacaagtcggcagtgaattaaaatattgagaatctttaatatggaactactaagtacagtttactatacactatacttatactgtgtgtgcttttgattcaaatcacatatgtagatagacatgtagtaaatgtgatgtgtataatttgattatgcatggctggatgatatgtaataaacatctttcattaacctgtcatttaccatgaaatagttattcatatcacaacgatgattattagtagatcatcctgaattctgagtatacgtgaactcatgtttgtgttcattgagttttttgattcatttgtttaagtttctcagagaagataattcttacaacatctgttttgggagctcaataacataagtggttgggaacatgtcatacaaattcaagcttttttaacagatcaaatattagttctcatatagtgttaattctgggagtactaacagttggatctaaatctataataagttaaagattaactattcacattgaattaatgaccagtggtggacccagaatttaattggagggtgggcataaatttttttcatatataaaaatattccaaaaataaaacaagtaaatataaaaaaaaacacaattcattatttcaattcccaactaaaaatatattaaatatcaaacagtaaaaatcctccaatagaaaaaaaaaagcaatctaaaacgatgttcaaaatatataatatactcaatatcctaaaattttagcaaaatatatcaatttttgagctcatatctttagagttgtcctcgacgagttttcatgttttgaaaacgatcaattataagctcgttgttaatagcattgaatacatccttttcgagatatactgtcaaactgtcattcaaccattgatctcccattttgttgcgcatttgatttttcacaatgttcatagctgagaatgctctttctactgaagctgttgcaactggaagtgttagtgccaatttaataagcaaatataccaatgagtatacctcatgttttcttgtctctactagtctcttagaaagatcagcaattcctttcaattctgaaaatacaatatgagaacgcataccttcaacataagtttgaagttgacactctaacatctttaaatctgttgtagaaaaatcatgcggataaagttgagcaagacgaatttattagaatattttatatatggaagttattttcta

SEQ ID NO: 135871 - DNA, 1454 bp, Cannabis sativa
gaccaactaataatattatttttagattaaaattttattatttaatttttaaaaatagtattttcttctttcctattttttttataatgtgtcgcaaaattatttttcccacaaagttatttcaaataaaaatatatcacatttattttattaaaattttagataaagttaatttattttttagaaattaatgtatttttagatatgtatttttgagcatttaacacaactttaactagcttattactaattttagcaattcaagtgaataaaaaatattctaattcaaaattttaaaacaaattatactaaatgagtatatgtttagtttttattttttctatttattttttttttttttttgagaaaaatatgtttattttgtgttgggtacatatattttgaataattaatgtacaattcttttgtagttgtgttttatttttaagattatttgtatattgtttttatttaatttttaattagttgacgcaatgtgttcatgcttaattaattttcatattaaaataaaattgttatcgtgttgtttattcgttgttattaagttgtttgaccaagagaaaaataagtatatgtttagctttttatgggtacatatattattgagttggtagaaatgtattttgtagttgcttttaaatgcattttatacattagtggaattttttattttcttaaaattattgtcatgcctatgtaatttgcatattgaaatgaagttgttatgcatatattttcatattaaaatagaattataactgtgttgtttattcgtggctattaggttgttcaacaaagagaaaaatgagtatatatttatttttttaatgtgtagatatattttggagttcgtgtacaagtattacgtagttgtttttaaatttattttatagattatttatgtgtttttttcttggatctgatgcaattcatggagttgttttcatgcctatttaacttgcatattatagtatacaattgtttatttgttgtaatttagatattcaatcaaataaaaatgtatacatatatacatgtttattttattttatacattagtggtattttttacttttttagagttgtttttatacctatataatttgtatattgtagtgaagtttatgcagttattttttgttgttatatttagttgtttaactaagagaaataaatgtatatatatgtttttttttatttatgtgttgtttttatttattttttaagttgatgtaagtgttgatgctcaattaatttttatattaaaatagaattgttatcatgttgtttattcgttgctattaacttatttcagtattgtatttcttgagggtttatcttataaatttatttttatttgcataatatgataaactttaattgatttatatgttatggttaagttgttttctagttgtttttgtgttgttgtt

SEQ ID NO: 135872 - DNA, 752 bp, Cannabis sativa
  modified_base (635)..(637): a, c, t, g, unknown or other
caaattccttctagatttggtatccgtctatctaaggaacactgtcccactgatcctcaagaggtagaggacatgagaagggttccttatgcttttggaattggaagcttaacgtatgtaatgttatgcactagacctgacatttgttatgcagtaggaatcgtgagcaggtatcagacaaatccaagaaaggaacattgaaatgatgttaagcatatcttgaagtacttgaagagtacaaggcaactcgtgttagtctacaagagtggttctttgaatcccgtaggctataccgattcagatttccaggcatgtcttgatgacaggaaatctacatctgggatggtgtttactctttggggtggagctatggtttggagaagtgctaaacaaaccgcaatttcaaactctacaatggaggcagaatacatagctgctacagaggcggcaaaagaacttttctggctaagaaagttcttcacaggattcggtgtcatccctggaattgaaaaaccactggttttgctttgtgataacactggagccatagccaatggtaaagaacctcaaagccacaagagaagcgagcatatagaaaggaaatatcacctcatcagagagtatgtggcaagagnnnatgtactggtggaaaaagtggacatagaagacaacctagctgatccactcaccaaagtcttggcaggaactgcatttgaaaagcaccgtcagaatttaggataaattgaaatgta

SEQ ID NO: 135873 - DNA, 1256 bp, Cannabis sativa
  modified_base (1180)..(1208): a, c, t, g, unknown or other
gtaaataaaagtgacaaatgcattaattataaatatgaaaataatgtttgcattatcatatgtttatatgtggatgacttgttgatttttagattgaatattcatgtcgtgaacaatgtgaaatttgtgttgtgtgaaaattttgacatgaaagatctagatacagggaatgttatccttggtatatagatcgctaggtctgaaaagaaaatttctttagatctcagtgtaaatcttaaaaaaatatataattactttaactgtaaatcttcgtgtacaccttatgatctcagtgtaaaattatttaagaactggatggtataagacaaatataagtatgcgagcatcattggcagccttcggtatgctactaattgtactagacctgacattgcctatgtcgtgggagtattatccaagtttactagtagacctagtgtagagcattgtcatactattgagaagggatcatgaagtacctcaaaagaaccctgaaccttggattacattatcagaagttttcagttgtctttgaaaggtacaatcatgttgattggaacacttatcagataactccaaggcaacttgtggctatatttttagcatatatagctggtggaactgtttcatgaaagtctaagaaatagactattttggctcaatcaacaatggagtatgaaatgattgcactggctactactagtgaagtagtaggttggctgagaagcctgctagctgagattcttttatgggaagacctatttcagctgtgttgatcaattacgaagtaccacaactattgcaaaagttcagaaccgttattacaacggtaagaggtgacaaataggtcgtaagtacaacattgttagaaagtttctctcaacatgagctattagagtggatcatgtatgcactgatgataacttgactaatcctttgagaaatgtttagctagagagaaagtccttaaaacatcaaaaggaatgggactatttccctttgattgatgaatcactcataatgaccaacagacctatagactggagatcctaagaaatagatttaatgggtaataacaagttatgatgtgataagaatgagatcatactattgtcataaaaaatgtgaagcatgaattcctgaagcggagataatatatgttggattttgtgccctaaannnnnnnnnnnnnnnnnnnnnnnnnnnnnctaattaataaaagatcataaatcgttttatgttacatggttcacatg

SEQ ID NO: 135874 - DNA, 1043 bp, Cannabis sativa
ttttcccttctctttgaaggataatgctaaaagctggttatactctcttagaccaaggtctattggaacatgggaagaaatgacatcatcattctttcacaaatacttccctaaccacaagaccaatggtttaaaaaggcagatttctaccttttcccaaaaagacaatgaaactctttatcaagtctgggaaaggtttaaagaactgttaactctttgtccccaccatggttatgaaaaatggcgcctagttagttatttctatgaaggcctcactagtcgtgaacgccagtttatagaaatgatgtgcaatggtgaattcctccaaaaagatcctgaagaagcctttgaatatctcaatgagcttgcagaaaaatctcatacttggactggtccaagtgctactgaaagcactaacagaaatcgaccagcaggaatttaccaactaagggaggaggacagtctcaaagcccaagttgagtccttaacaaagcaacttgaggcctttaaaaaaaaaagtgggcaaggactgaatatggttgccaaagcagaaatacatgagccatgttttgtgtgtggagaatcggatcatttagctaaggattgtttagcctttagagaaatgaagggggtttatgaagagcaatgcaatgccttagggacctacaataagccattctctaatacgtacaaccctggttggagaaaccacccaaatttcagttggaaagatcccaaccaagcacaatcttccggagggcaatggagaaatgagcaccaaaatcaaccatcaaaagctcagcctgctcctcaatacaattctccacctcaaaggagttctcttgagaacaccgttcaatcattcatggaggagcaaactaaaataaatcgccaaatgatggaagaaatcaaagaaatgaagagtcaattttcaaaattgactgggtccttggctatttctgaaagaggcaaacttccttctcagcctcaattcaatgcacaagggcaacatatggctcaaacctccagctctaacgatcaaa

SEQ ID NO: 135875 - DNA, 786 bp, Cannabis sativa
attatattgaaatgagttttattcagggcataaaacccaacatttattccatcgagtatgtggaacatctaatgataaaacattcactaaatgatgtcacatattagggcatacaattgttttgagatcggtagtgtgtggacctattctatcagaacctcagttgagagaacattgggtgtatatttttttggtgattgtttacacatagttattgtcgaaaacattatcaattgtttatcaatagctttgcgatagggtgatgcctttatcttttgtgataggtcattatcgactgatgcctttatcttttgtgataggttattatcgacagattatcaactgattgttgacttattgctgactaattatagattgattattgactaattattaacaaattgcccactgattttagaatggaataattatgtgttctttgttgtgatggttcattattatcgatcgattattgtattaagtatgtgtgatgtaatcgacaggtgtctataaaatatcgacaatatattgataatattatgttgacaaaatctcaagatgcatgaatcttaaataccttaaaaccgacatcataccgacagatctcagcatgcaagaatcacaaaatactggccattacatcaataaaatatcgacaatatttcgataatatgttgaaaaaatctcaagatgcatgaatcttaaataccttaaaatcgacatcatatcgacagatctcaacatgcaagaatcacaaaatactggccattacatcaataaaatatc

SEQ ID NO: 135876 - DNA, 679 bp, Cannabis sativa
acccaactttgatacaactaatcatttttatttaaactgaatctcacttatcaaaaataacttgccataaatttgtatgtgatttatatatacaccttaaagaaaaatatatattagattaaaataaatgaaagtaaccaaggaatactcaatttataactgtaaatacgtgcgtgttgtgttagtctaacttatattttttgagctttttaatttttaaaatacgagtcgtgtcgtgtcgggccataaaaaatatgggtcgtatcgtgtctaagcacatattttttcttgtcgggtcatgctcgtgccaagaggctcatgctgtgtcaaaaagtcaagtctatatttacaacactaactcaatctagcaaaaaactaatatacaattttttttgaataaaatgaccaaaaagtttattgatgagaagtcaaaagtacattaggaagaaaattcttcctaacatcgttttctatctgtactgtacatatagtgaaacaaaatacaacaaaacatatacccagaaagactggtaacaaagatctaaaattcttaaaagaagaagatgagaatagagtttgacatatgcacaagaaatgtcaaactctatgaatcgaaagaagaaatgtttttttttttttttaaaaaaaaaaaaagcatttcctatatttagaactttag

SEQ ID NO: 135877 - DNA, 1859 bp, Cannabis sativa
agcggtttgatgtacacccctagcctatggaaagttctatacatattttagtgttgtaccaatgatgaattaactactattgttacttcttgactaactcaaaagtaggttacaaaaagtaaagaatccagtatctttagaggagtagacatatagagaggaacttcacaatatcaaggattttgtgattcaggatatgtaatggtggagaaagtttgtattgaatgaagcatatcagatcctgttacagagagaatactacatactacacttgatctggatattaagatattgagattaattgaaatacacttttagttttatatttgtaacgccctaatgctaaggcacgttacagtaatttttcaattgaagtgccatctttgctaatcaaagaattttcttgaaaatcgtgtaaaatttaaacttttaagattaactatgaaactttataaaatttataaaaataataacaagtgccgggatcccgttgataaactttttacaaaataaaaatattcataatacaaatacaaaagtcaggtcgcacaacaactacaaaataatatccccagatgtcctgagacttgaacactctaggtcgcaccgccatgacatgtacaacctcatcctagctcaagcttactcctgttcagcctttgcctttgatttacctacacataaaagtagaactgtgagtcgacaaactcaataagaaagcatataacatatcacataataccgacttgtatctaggcacctatacacctatttacaaggcttaacaaataagtaagaacgttcaatactagggtacagccaatgtaccacatacacttcgtaccaacagtgtacgagtgttggtagggtttgtttcgtaccctaagtaccactaagtattatagcacacttaccctatacttcccatacttgagctggtaacaccgtaatgtactcttaaaatgatatacactataccaatgcactttgtaccatttctgcacaagtgttggtaatgtagataccataacaagtatgcatatacatttcacacatacatacattcgtatatatatcacatattatacactattcttacctctttcccgaattcacgtgagttggctgacctgaacggaaattctcgtgctggatggatgccttaatcacatattgaaaacgagtaaatcacacttaaaaaccctaattcgggaaacctgaacctacaagttaaggttctgctattactaaatggaaccacatgaccctaggcaaaaggaaatcaaccaaccaaggcactgaaatggacacgagtccaggagttgttcgaggaatctgccaaaatcgattaactggttaaccggtttgctccaggtttctccgaacatttcataacctgctcaaaacatatccaattgccaccaaactttcccgaacacgtataatgagcttacacaatcatttccaatacaaagaacccagaaaaacacagaaactcaaaatataccatggatgaaccaagcttgagttttcaaactcaaaattgagcatccatgctaccaaacctgtagccctaatttaaaaggacaccacgtgtatgattttataaactaatttaatactaatagattaattatttattaaaaaccgtgataatatgaaaaacttgactaaaatataacactataagcggacattataatggcataaaaagcgtgtttcgggagtccctgttataaaaacttttgctaaaaaaatatatatgataactctttaaacaaaaaattaaaatacacagcagatacaaccagcctaaaaaaactcctgtcaactcagcacgcaggctggtgtggtcaata

SEQ ID NO: 135878 - DNA, 879 bp, Cannabis sativa
gtaccttcgggaagcaatgcttttgtgcgaagagaaaagggcatgcctcttggcagccaagcatcttcattaattcgaatagtactaccattcccaacgcaccaccgagagcctttaagtaagatttcccttccccaaagtatacttcgccaaactgttgacccataatggcctatagtagcttccataaaattaccttgaggaaagtagagagctttaagtacccttgtcattaaactagctggttcggttatgagtttccatccttgcttggccaacatcgctttgttaaaatcttccaaatcccgaaagcccatgccaccttgctccttgagtctacacaatttcttccaattaccccaatgtaacttgtgtttattagatgtagatccccaccaaaatctagcaatcatactctccatctccttaagaatgccttttgaaattctaaaacaactcatgatataacaagtgatagcttggatcaccgctttaatcaaaatttcctttcccgcttgggagaagagccccatcttccaaccttgaagtttagcttccaccttatctctaattatgccaaaaacttgttttttattccttcccacaaaagaaggcatacccaggtatttagtatggcttttcaccaaagaaacgcccaagtaattagctagagtttccgccacggatgtgttgatcttgctgcccacacacatttcagatttctcaaagtttatacattggccagataaagtttcataccttcccagaacctcttttatcgccttgcactcctccatagtagcatctagaaagataagactatcatctgcaaaaaaataagtgggagagccttagatccaagcttccaaaccgtaaccc

SEQ ID NO: 135879 - DNA, 1593 bp, Cannabis sativa
  modified_base (1180)..(1182): a, c, t, g, unknown or other
ttctagcttttctttgcaattcttgtcaatttccagcaacataaagtgaaatccaagctaaggtaagtctctaagcaactccctccttagttttcttgagtttcaagttatggattttgcatgttttgtggttttttctactgtttttgttgttctgggtgtttgatttgtgtttctgaagttaaaatatgtttagatatgttcaattaagcttgttttgtgggctgttattagatttgagcaagctttgagttttagaacttaagcttgactctttaatggtgaaaattgattttgagtttctgtagttgatttattgcttggaatatgtctattgtggtataatatgcaggtgtggaaggtttggtaaggattggaatcgatttggttagtttttagaatttcttgggttttctggtgtaaactggctaaccgattttacaagacctgtaaaactagttacccgtatttgttgttgggttccccgaaaaattcgtggtttcaatttgtgttagtattagagatttggttggtcaattccctactagtttagggtatttccatgttaggttacaatagataggtttttttggtttaaaacctaagttccctgttgtattttagtttgtcacttatccatgttgtgatcgatgtgattaaagggcctataattcgtcaaccagttgttccactcaggttggtcgacacacctgaattcagaattaaggaaagattagtataatatcatgcttatgttattacatgtttatcatacatgctatctatgcttgttagaatacattgatagcagtaagtgtatacttagaattgtactgattattggtaaatgtatgttggctgaaatattgatcgatgttgtcacatcaatatggctagagtatgctgcatattgagtataggctgacattatggtcgatagtattatcgtatgaacgttctagactcaatactgcgtgggacatggggataaggttatggttgggtttatgggcgcctgattttaacccaagattttattatgttttatgttatgctttttatattgagtctgtcgactcacagtgctatttccatgtgtaggtaagggcaaggctaaggctgagcagccgtgaaagcgagtagatgaagattgtacaagtcggggcggttaggcctggannntacgatctttgggacatcagggcttttgctatgtagtcgctaggcgacaaacttttgtatatgaatagctaaacttttgtaaatatttttgtaaacgggatctcggatttttatatgtatgatattttacgttttaaataattaagtaaaattttaattaatcacgtttttcattaatctcgttgattagcaacgagctgcatagtatgttaaaatatacgttaacatgcctaaattaattagggtgttacaatttggtatcagagccgttaggttgtctttcgaagatcgtcacgacatgtacaatcatcatcattgatcagctcgttttacggttcagtaagcttttattgctttactagtttattttaatagtataatttaagaaaagcctgttaggaagcatgttag

SEQ ID NO: 135880 - DNA, 650 bp, Cannabis sativa
  modified_base (188)..(191): a, c, t, g, unknown or other
aaattattcaatttaagttgatcaaaaaattaattaaaagtaattttcaactcaaatttattttttaataaatataggtagaaaaattcaaaaatccaatgtatttaaaattaaatacatctttcgaaatttcttaaaataaaataaaataaatcctaaaaaaatattctaatttatgttggtccaannnnaattaataaattaattttcaacacaaatatcattttcctatttaattaaatttctaagaaaattatcaaatatttaagtatcttgaataaaataaccttaaatattaattttctatttaagaaaaatacttcaagcaaacagaaaataactatctagattttcacaaactaatttctttattttttaatataaattataatatattttagtctatttattttaattaatcattaatgaaaaatttatttaatttaagttgatctaaaaattaattttcaactttaatctatttttcaaaaaaaaaattcaaaaattgtctacattaaataaatgcaattttgaaatttggtgggataaatgatgaataacataaaataaaatatattttgaaaattattctaatttaagttgacctgaaattaaaattttcaacttaaaaataattttctagttaatta

SEQ ID NO: 135881 - DNA, 702 bp, Cannabis sativa
gaacatagtgagattattaatacatatatattgttattttgcttcactgcaatgtcaaatctctatttcaatttgctctacttcaagagatgttgtacttctctcttctaatcttaaagttttagaagatattttttttctaaaagctttctcttttttaattcataaatttgacacttgaaataattttattctcctcttcctttatgagattgtttttaagaatttgaaatccttcttatccatcttttcgagtgtatatttagttttgttgtattttacttcactaaatatacaatacacatagaaaataaaattactttgttgcaattatttccttccttgtattaagatgaccaacatatttttgtgatttctcataaataaaatttttagtcatcttattcaaaaaagaaaaaaaaatgtagctataataaatacattataataccaataaaaaggttttaaaaataaatattagaagtaattcaattaagttgtatttttacatagccaccctaattgagggtgcaaataagatggcaattagagtttatcttttaagcattttggtaagttttcgttgggccccgttcttctacttgatcgggttgctatctcacattgactcttacattagtatgatatgtccgttttgggcctaagccctcacggttttatttttgggtaccttcccaaaag

SEQ ID NO: 135882 - DNA, 557 bp, Cannabis sativa
aatatgcatcactactaatagggctatgagcttggagaggaagtatttcccttctcgttacaatggatacaagcagaaagattgcatagtaaatacagaacacaccaattttgggatttggatagcttgccatatctctacaatctgatccccatgtaatagggatttccttgattactcacgatgtgaaagttgaattcgacaagtgttggtcgttctgcgtggattgttgattgctttgcctcgagcatgtatatgaggtatcctgttcggattatatcttgcaaaaagatactcaaagtcgattccatgtgtaaccatcatgtgatggcatgtcagactgcaaaaattggaataacattttccccccatgcctggacaagacttttgaagttgcgtgtagacttcatcccagttgtctttgcatttgaataggtgacacgtgtcaagtgcacctgttcgccacttgacgtgaggctgactgggcgtcctttcagttttcggctaataaatgctctaacaattaatatttcgaaattcaattttctctcaccacg

SEQ ID NO: 135883 - DNA, 784 bp, Cannabis sativa
aaggtgggtagccgtgtatcttgtagcatttttcaattgtgtgcccgaggatattgaagtgagtgcaaaatggcctattccttttctgttgattggatcttggtgcttgattgtcacttttttgatttcctttcttgtctccttggaaggcaaaagccatggcttgatttgagttattcgaattgggtatagcattagtacctctttgatgttcttcttgagtcacaagatggaacaccctattaacttcgggtaacagatccataagcaagatacttcctcaaacttgagaatatgaatctgagagcccatcaagaaggacataatgtactccatatggtagtgatcttaaagcttcttgactccaccgcaagtacaacccttgcaggtgcacgggggtctgtaattggtgagctcttcccatattgtcttgagtttagtgaagtacatactaatggtttgattttcttgcctaagattcataagattcttccttaaattgtatataagtggaccatttttctggtgaaatctaaccttcaagtcattccaaattttagaagcacattcatcatacagtatacttaaggaaatatccttagacacagagttcaaaatccaggaaataacaatgttattatttctataccaagcattgtaaagatttttatcagaaatagggggtttagagatagaactgtcgagaaaaccaatcttgtgttgggttttaggccctaaataaaactccatttcaatgtaatcgagattattcaatatcaataaa

SEQ ID NO: 135884 - DNA, 857 bp, Cannabis sativa
tcgagccttgtagtacaaaaaaaaatgaaacagtcttggtcgtggaggagagaaatccaaaaataccacaggtagggaaccaacaataactttcactgaagcagataccagtcacgtccactcctgtacaacgatcccctagttgtggaagtgaaaattaaaaataagacagtggcacggactatgatagacaatggagcctcctcaaacatcctttttaaaacaacctatgagcatatgggattccaatgtaaagatctgatgccctgctcccagctcgtatatggtttcttcggccagagcgttcacctttgggacaaatctgcctacccctcactgttggacaagctccgaggagcataattgtgatggcacaattcttaataattaatgttcgctttcaatgtcatgttaggccgatcgaccctatatgatctaaaagttattatgtttgttttccacctgtgcgttaagttcccaacaaagaatggggtggggtgtctcaaaggaaaccaaagaatttatcattaacttacttgaggacgagcaagagtcaagtgtggggaaagttgatgagtccctatttgtcttataaatatgatcaatttatgtatgagtattcttaaataaattatttaaattattgattagtgtgtttttaattacttttagtattttaaagactaatcatgcatttggagtcttttggacgaatattagcatattttggtggaaaataggggaagacggcgagctcggttttataaggcaaaacttaattgcaagttttgatgatcttagaagcaaaattggacttggagctcaacatgaaagttttaggtctcatttttagcttt

SEQ ID NO: 135885 - DNA, 1063 bp, Cannabis sativa
ttacaattcatggtaataaataaaagatttggacatccacataattattaatatttataacatatattatttttttcataacatatatagcagatattaatttttttaataatataacgtatattactaacaattaatctatatatacacacacaatattcatctctttcacatatcaattaaggttaaataatggcataagtatctaaagttttaagtttataagtggcataatccaaatatttatttttagcggcataagtactcaatatttgtaaaactgtaattttttttattttcgtcagtacaagctctattattttcttaaacatgccacatataaggttcaaattattgatcattgggtctagataaaaacatgtagtatcagttacttcttaatgttcttttaataaattcaaaacgaagtttgtactgaaaaaattggaggaagattacaattttacaaacattgggtacttatgccgctaaaaataaacattagatttatgccgcttacgaacttaaaactttgggtatttatgccgctatttacccatcaattaatcataaatcatcaatatatatataaaggagaaagtatgatatatatatatatgcgatatgatattctaaaatcaccccaaaactatttttctcttctctcctttattctctcaattttaatattttattaaaatataaatctacaaactaatgaattctctccaatctcttaaaactgtttaaaatatatttaaaattcaagatgaaatttaagattaagatatagatttaaaagatacaatagtgacgactacaagtgaactacggtaatgacaagggatgagatacagtgatgacaactggtgagatacggtgataaaaataagtgagatacaatgagactacaactgaaatacgataataacaatagttttgaatgataaagatataaaaataatacattgtggagaacaccgtaatttttttctacaccaccctatttatttatttttataaaaataatttcttttaacaaagcaatttaaaatactacata

SEQ ID NO: 135886 - DNA, 1309 bp, Cannabis sativa
  modified_base (720)..(720): a, c, t, g, unknown or other
cataaaagattgtcccttcagcgtttttttcaccagtgtcgtataatttttctacagcattgaaaaactctttggcatttgtagtgtctcataagccagtgaataaatatttaggaattgaacttttcatagtgttgagattaagatgatttgatttttcccattgtgcatgaagatttttttgggcaaccatactggtatcagtacgatcaacatgtttttcttctcgcaagcataagtctaaattcattgtgcctaaagtaaattctacatctcgtttccatgccttaaatttggacgtattcagaatttgaatggaaacgttattgttgttcacagaaaggagaccgaaaaatttaaaaaattaaaacttgatcaagctatatgagtaatgcaattagaaaatattgtaaagtcaattagtaattataaacactcatttaaaatgagaatataacacacatgatctatcttcataaagttatcaatagatagttaatcattgtattataatctctctccatatgatgatcattattcaaaagaagcatcatcatcattaaagaaatcatctaattctaattagtaattaactaagtttttttggtttgatcttgagtttgcggaatgagaatatttggtagtccaaagaaatattaattaaaagtacatgaatcaagacactaaggctagcatagtggtgagggagggatgggaaanagggagaggtcatgggttcgaacttaggacctttaagctattaagctaatatatgatgtatatgaattgtaattttatcagtaggggtatttattggatcacatttaatgtttttagacttatttaaattcgatccaattatatattggatgttagagttattatccgatctaattaatttcagtcatctaatcgattcaacatctatcagatttatgttagattgaatcatttttattgagtgtatttcatatatatttattgatttaatttaagtttattcaataatttaaacctaatattttttagatccaatccattcaatatattttaagttcaatatatattagatttattttaatattaattttaatatatatatacatattaaatttacacacaaaagcatatcatttctatgagattaaatcttgagttatttcgaattgaaagaaaataatctatatatttataaattatttgatgtattaatttattattaatctaattaattgtcaatcaccttttattaatttttacctgctggtccctattggttgaaaaaaaaattatggttggattagttctt

SEQ ID NO: 135887 - DNA, 561 bp, Cannabis sativa
taattatcaaatattatattaaagataatctgttttaagattgttgcacaatttaccgggactaatataatattttgatataaacttgatgataaaatacaaataatatatttctattcatatgcttaaataaatactatataatttataaagataaagaaaataaaccgtgaacgcaattcttattggagaatatccgaggcctgtgtagcacacagtttccttaaaacagattttccttctcccgttggtgctagagaattccaacaacgtctgtctcccaagatacaacgaataaattatttatgttataaacttatttattaaacaagatttttggtgtaattcaaatcaaagcaaaaggctcatatatatagcctaagatttttccaacaattacttcaaaacaaatgtgggataaaacctactaatttttcattcacaaaacaaaatagttgactaagtgaacttttccaacaactatttctcttctggccactagtgctagacgagctcttctgctagcataatcatacgccattctctttataataaattaaa

SEQ ID NO: 135888 - DNA, 800 bp, Cannabis sativa
atctctctcttctctttcatgataaacaagcgagttgcaaataaatacaagctgctccctttctcaatttcaggcaaagaatttaatattttcatgacgtcagcaatactattctcctttctagctatttcaatatttctacttcttgtctccgcgtcatcagcaaggcgaccaatttgttcaaatatcattacaggccctgtcttcttcatttcccttttccatttttgcctttttattttgtttctcaagcggctcaattgatctcttgctaattttctctttagaaaatctatcaatactaggagtctctagatcatcatcgctactctcagttgttcatgtaaggtttcagtatcattaaaaggcttttcagactcagatggaattattccaaatgaaggtgtccaagcatactctcctgcatcaacagtattcataaaaatcttatataatttttcttctacttctggttcaattccccgaatgcgaaactttgcagcatcgggatgagtctacaaaagcaattttgttgattaaatgtaccattcataaaaaagtcttttagtttcatataaatatttaacaagattataatatacctgtaatttactatttcaccaattttcagttgcatcaattgtattcttttgcatactccatcctaaaccagtttcttttcccttgagatgcttctaaagcttccattcatttttcaatccatcccacttatttttcagctgggctctagtgtaatctctttcagttgcttttttcatatttgtaatcaagttttgata

SEQ ID NO: 135889 - DNA, 757 bp, Cannabis sativa
ttgaagacaattcctaacactaacgaaaaatgtaaacagttttgtcacaaacacatttagatcagattatattattaaaatattttattttgattccctaaaaaatatatattttattttgataaaaaatcagttcagggtcctatttgtactattttagaaaatatagggttcattttgtcatttaacaaaacggaaggttcaattggtaacttttgcaaaaacacagggtccaaaatggtatttaccctatattttatgaggatttatatgcatcgcataaatgttgcaagaaaaaattatttatttggagctcttaacatattgaaagtttgaaatatgcattatttaaaaattctagaataatttaatacatgtcttaagtgatataaatttaaagtcgcgtgctctatatgataaaattttttatagacatgtaagtaaaatattatttgaaaaacgcatatgcttgcctatgcaatataaatttgtaaattatacgttgtgaattgtgatagacttttgaagaattttttgattgtatataaataattgaagaacaattttttttttttttgtatattaggaaatattaaatgtatatagtttgttcattagagaagtcttgaaatacttcatatgtattagttattatagatatatgatcatttgatatgaaaattaagatcatacaacaagaatataaaatatatatggccttggagtaccatcaatgtcgcaaataaaaatttatatt

SEQ ID NO: 135890 - DNA, 638 bp, Cannabis sativa
  modified_base (32)..(45): a, c, t, g, unknown or other
taattttggatcatgttcactccatatttctnnnnnnnnnnnnnncaacacttgagaaaagaaaatccactgaacaaaaacataatcagagctatcaccattattactgtcttggcccaaatattgatcaatacaattattcccatgctcatttatcttattatggattcttttcaatttttctttggaaaccttactttcaagatcctctacctttgaatgagagactttaataaagtttttcatctctatagggatgaattcaggactaaaaaagcttacctcgaaacgatgaacttcattgactatatgatgaactaattcgtcttcgatttaatcattcaaataaaatattgtcttcttcctttccttcttattcgtctcgttataccaaaatggtccaaccaactccattacttttttaaaaaatcgcaataaagtatcagaaccatcatttacaaagacttgttacgattctcttccacatttaagcattggattaaagttataacctcgtcaagaaacaacaacaatgtagaaaatatcaaacattttgaacactttgaaaagtagacgttatgttgaaaatatttaaagaaatgaatcttattagaattgagaaagataggttgaaaaag

SEQ ID NO: 135891 - DNA, 910 bp, Cannabis sativa
agggttattttcaactaaggagaatgatgaaagtcgaggatgtgattacttttgttggatcgataaatcacatgttaaaaaaagtacagatgctacacctggattgggaaaccaaatcaagattttagactaagataagaaacgtaatgagaatgttattagaaaattaatttttatcatttttatttgccttttcatcattgtccaacttttattgcattaaagatatgtgttgtggcaaaatgagtatgttttgtatatcttatgttctcaaaactaatgtttaacttaattgtgtagaacataatagagaagtatggataatggtaaaaattacatttggttaaaagatcccactatgtagtcaaaattatatgttttctacatttctacattatgtagaaatatttctacatgggttcaatgtgtagttacaaaatgatatgttattcacattttggtatttgttatgtgaagtagcaaaaagagtatgttatgtatttaatatgttttgtctttaatatgttatgaaaacgcaaatttactaagtttgctaaggagggctattgtttatttccatttggttaaagaaatgggagttgatatgttttcaacattgtgtacaaataattgtgaagtatgggttcaatctgaaatttaatatgttgtcaaaactaagtttaaacttcaatgagtacaaagatttagtaagtatagttcaaagtcaaatttaacatgttagagatatgtgaagttgtaaaatgatttattctcaatttttattttttttcgaaatatgagaactaacatgatctttttcaaatcattatgaaatcacctttgttgtgaattataatggtatagtacaaatcataaagttttggtgttaaataatttcaatgaagtacaa

SEQ ID NO: 135892 - DNA, 799 bp, Cannabis sativa
  modified_base (741)..(750): a, c, t, g, unknown or other
tctgacttgctagaaagaatcagaaaggcacaattcgaggattctgagctagtcaagattcgagatgaggtgatggctggtcggcctaaagactttttgatctcgaatagtggaatgttactgcataaagctcgagtttgtgttcctagtatcgatgagcttaagaaagaaatccttgatgaagctcacaccacaccttattcactgcatctaggaaccaccaaaatgtatcaggatttaaaactctacttttggttgtgtgggatgaaaagagatgtgatagactatgtgtcgaagtgcttagcctgccagcaaatcaaagctgagcatcaaaggccggtagggttactgcaacctttagccattcctgagtggaagtgggaggacattgcaatggattttgtaactgggttgcctagaactataggaatgtatgattcggtatggatcatagtggacagatttacaaaatcaactccctttctacaagtgaaagttacatattcagtggatcagtatcctgaactgtacgtagaggagatagttggtctccatggaactcctaaaactattatttcagacagagatccaaggattacgtcaaagttttggatgagtcttcaaaaggctatgggtacaaagctgaagtttagcacaactttccaccctcagacagatggcgaatcaaaagaacaattcagatactagaagatttgttgcgagcctgtgtcatggactttnnnnnnnnnnggagtaagtacttgcctttaattatattctcctgcaacaatagctacca

SEQ ID NO: 135893 - DNA, 1051 bp, Cannabis sativa
  modified_base (44)..(50): a, c, t, g, unknown or other
  modified_base (375)..(379): a, c, t, g, unknown or other
  modified_base (1020)..(1020): a, c, t, g, unknown or other
ctacttgtatatgcttacttaaggcaacttaaacttagagttannnnnnnagtggtggtccaagatagaataatcactcattgtatatttggtataaatttcagttttagactttaatattagattccaaatagaaattttatatttctatttcctagaacacattacacattacagtatgactttcacaagtttttaatatccattttctgtcaatggattcaaactgtataattatgtattgaatttgagttttgtattctgtgaccaagatccacttggactattctaagaactctttcttgtaactagacctaagttatcaaaagattacaatcacattttagtatctatggcatttatatcttgttcatnnnnnttttgacaagatcattctttgcaaaaagaaaatatgactatatccactgaaagtaggatcatctatatttatatatggatgtacattcaggggtggatatgagctatcgttaaattcttaatacgatcactctagattttaccttatgcaaaaagatttgaaatgtttgagaaattttataattttctagcaatgttgaaaaacattaaggtaagtgattaaagatcttgcgaactgatagaggtaaagaaatattttgtagacatgtagttcaaagatcattaagttaaacttcaataccaaacttacctccctataaattcaaattgcatactgatgatagtgtaaggtttatgattagttactagcatttgcctaagtccttctagggatataccttagtgataggaaaatttcataataatggaatggttgtatacttagtgtaaactattactagattcatggatgtcatgatcgtgatcttcagaaaacctaaaactgttaacttaggtttgcatgcttgatagctattctaagtcatttggggtggaccatcttatggtcattaagataagaaagtgttttgtttcaaaaaataatatttctctaagaatatgactaaatctgaaaacaaagtngcaaagtagatgagatattttttcttgattc

SEQ ID NO: 135894 - DNA, 1513 bp, Cannabis sativa
  modified_base (1036)..(1050): a, c, t, g, unknown or other
  modified_base (1450)..(1476): a, c, t, g, unknown or other
aaatcacgtaatatgcctatgttagttagggtgttacagtctaacaactaattcgcctcgtcaatattttttatgtatagcgagatggatgccttgctatatattgtctgtggttgatttgagtaacctcacttattctttttaagtaaacgagtcttgtccttggatctatgtattccgaaataggttgatgtctcgtcaatataggcattaatagtttagtatcattgtctcgcctaacactatacagtcagcgagttatgaatgtactctattaattatatatttaatgagttattcctttttgcattaaatcatataaggttattataccaagtggttcatattccactaattgacacgtgtcaccttctaaagtgtagccgaattttgggtataacagccaaaatacgttgatatgcttgcattagtcaccagatgaacattaaactcacaagccaatgaagaggaagaagaggtacaatgtgagaacacgtttcatactcgttgtcatgtgaaagacaaggtatgtagtgtgatcattgatgggggtagctgtactaacgttgcaagttcatccatggttgagaagttgtgacttccaacgcttaaacatccacgtccttacaagttgcaatggttgaatgatagtggtgaagtgagagttaccaaacaggtttttgtatctttctgaattggcaaatatgaggataaggtattgtgcgatgtggttctaatgcaagttgcacacctccttctaggaagaccttggcaatttgataggccagtccagcatgacgacttcaccaacaagtattcattcatgtttcgtcagtgaacagtcactctagctcctttgacaccaaaacaagtctatgaagaccaagtgagattgaaaaatttgagtgatcaaaagaatttaagtgataaaaagaaattgagtgataaaaagaacttgagtgaccaaaagaaagagactacaaagatgaatgagaaaaaagagagataaagagagaaaacaattgaagcaagtgannnnnnnnnnnnnnngaagagttctatcaatgagaaaaaaaaatagagagaaaacaaaataatttatatgcaagaaaaagtgaaattacgcgagcttggcgtacaaaacaaccaatgattttgttcatttacaaggaggctcttttaaacactaaccaacttgattcttcgctgcctagtgttgttgtttctattttgcaagaattcaaggatgtgtttcttgaggaggtaccacatggtgtgcgacctattcgaggaatagagcatcaaattaattttattccaagtgcttcaatcccaaaccacccaacatatagaactaatcctgatgaaattaaagaaatacaaaggcaacttgaatgattgatgaccatgttggaatttattttcctaggatcttagatctactcacaannnnnnnnnnnnnnnnnnnnnnnnnnnaacttctaaaacgataaataaaacacataaaaagtta

SEQ ID NO: 135895 - DNA, 840 bp, Cannabis sativa
  modified_base (32)..(36): a, c, t, g, unknown or other
  modified_base (441)..(441): a, c, t, g, unknown or other
tttaaagaataaagattacattgaaatggagnnnnntttagggcataaaacccaaccctcacaccttcaacccatgatccatgcttcctggacaactatcgtccaaccacgcagcaatccaacacaaccgaaacaaaattcaaccagaaagagaaccaccatgggctgtttcgaattcataaaaaaaagtgtagaaaaactactacgaaactaaaattcaacgggaaatccagtttaatttgcataaaactaatgacttcaattttcagatccatgaaaggctaatctcaaaaaattaaactggagttcctaaacaatccaactaaagtataatccaaaaaaaattacatcaatactattgtaaaatatttatcctagtgtacttttgttattttccaaatttttaatggtgaatttgttcatattaaatcataaagaganatgtagatagagttacgtacgtggaaacactattctaatttttaatgtgttacaacagttgcattacaattgtataaatattttactaccagttattttgtctgattgaaaccttcgtctaatgcaacctttggccaaccacccagtaaccacccacaaacttttgtctgatagaaacttttgtctaatgcaacctttggccagccactcagcaaccaccctgcaaccatcgtcggattgaaaccttcgtctgatgcaactaccgcgcaaccatgcaacaaccaccttgcaactatggtctgattgtgtaagtgatagtgtaagtggtattttttgtaattaaagtcagataaaaagtataaatattgtccacaccttacgaatgtatatttttgtaaa

SEQ ID NO: 135896 - DNA, 583 bp, Cannabis sativa
  modified_base (122)..(122): a, c, t, g, unknown or other
  modified_base (544)..(557): a, c, t, g, unknown or other
tatatatatatatattataagggtaacctaatagagggtttttttttactaacattacacaaggggtacaaaaaatcttatgttttgcaaaagttatcgattggaccctctattttgttaantgacaaaatggaccctgtattttgtaaaatggtaaaaataggaccctgaattgattttttgttaaaataaaatttaataataatctgatctaaaagtgttatgacaagactgtttacatattttatatatgttcgtatttttaagttggttatatttaaaaaaaaaaagttgtcaaatattaagttaagggtcctatttgtaccattttagaaaatatagggtccattttgtcatttcacaaaatagagggtccaattggtaactttcgtaaaacagagggtccaaaatagtatttaccctcctttatataagccttttttcttaatttcattctttttaaaaataatttgcaatcaattcaaaaaataaaacagtttatattttttttggctaattagtaatttttctcctgaactttgannnnnnnnnnnnnntgccccctgaacttttttggctgtta

SEQ ID NO: 135897 - DNA, 1325 bp, Cannabis sativa
cagagaatattaacaccccgcatgaggaaactaaccatcgttctggaaaagagcccatgggctccagaagatctaccaatccgcagtccaaaaggacgacccattctaggagggctcaacatgagggtggccccagtgctcggaccacacgtccctagagaactcaacccaacgttggtcctagtacgcggacaacacgatcgaggagaactcagcgtgggaatggatagaaccctggggcgagggataaagagctcaatcatggaggtgcccaatctgtgggagaaagaacttatgaaacagaaagtcgccgcctgagacgccatctggaagaagcacagcgtcaaaacgctgagttagaatgtggggcagctttggccagggcggcgcagggaacgaatgctcaaaatcaacctgaaccttgagtgagaagaccacgagacagacctcgtggatcacgaaccagaacataggaaaaggcccgggaataacaacccagggaaaatgagacaccccttgagaatcaggatgaacagccagaaaggaggcaatccggaacggatgaacgagaaatccctcatgaaaatgaggaggatcttaggactcaatcaggagaacggagatcacctgctagaaatcaccaacgttcttcccaaacccatagagcgaggattcgtacataccctgatgggggaaatacgacaaaccgctcttaggaagaaagaacagagcgtgaagaagcaagtgtgacttcgaggcgatccataacccatagtcgatcaactcaaagaggaaaaagtactcaacgagctaatgatcgagaaagtatgggaaccagtaaatccgcgagccactcaaagacaaagtctatgagtaggacgcggtctatgagtaagatgagatctgtcggcaattactcccaaccagatctgtgatagcaattgaatcgaaagaaacctgaccttcaccaacagcttggtccaaagcaagaggatccaatccaattgcggataaatgagctagaggacaagttcaggagatatcaagtggggaaattaggaaaattatctagatacgactctaacgaggagcttgagccgtatcacctagatatcatgaataccccttttccttcaggattcaaaaacctgcatgtctcttcctacgacggaaccacagatctggtctcgcatttgaataactttaacatgataatgcgagtgagtaacgtgaccaacaatttacgatgtatttttccccacctcgcttgttggagcagcgagtagctggtttaacaagtttactctgttggaaatattttacca

SEQ ID NO: 135898 - DNA, 1016 bp, Cannabis sativa
  modified_base (33)..(49): a, c, t, g, unknown or other
tgcaacataaaatgatttctaatctttattaannnnnnnnnnnnnnnnnattgaaatggattttatttaaggcacaaaacccaacagtgcatgccctattttgtaccttctgaaaacttgtgtgtgcccatagttggcacttaaagacaagttactccttttcttcttcccaccaatctctataaatacccccacaaaaattacgaacgagaggggaataagaacacagaaactttttctgtaagaaatactctcattaataatagagactcatggactacgactcattaatgcccgaaccacgtaaaaattacctgcattaattatccctaagctctcattactacattatttatttagttgtcaaaaatctcgatcaacatatctaaactcccatttcatctgtatatcttcaagttacatgttttagacagaacttgaaaacaaactaacaacttcatatatgtatattttaatcaataacacatatttgagatcaataaccagtaaatgatgtactaattttattgacgatacattgtcaaaatcaataattaataataatcaataacatcagttgctaagtttatcaagaacacatgttcaagatccataactgtaatatctcgataagcctaatggtaaataattagggtttataattatattatgggctaattagataataagtgggattatgatcctactaatctatttcaacataaattttgaattttctacaagtgaataaataagtataatttataaattacggagatttatatggtatatgtgaatgtaatatgaattaccggtgtaataaaaatattttcaggtttggtgaccttggacactcgatcgggggccagaaatgtcataacggtttaattaatagaatttatgggaatattatgataatttgataatatcagtattgggataattaggagtatgtgggatttgacttagcgccctagaagtataaatttctgagtggctaagaaatgataagataa

SEQ ID NO: 135899 - DNA, 1226 bp, Cannabis sativa
  modified_base (249)..(250): a, c, t, g, unknown or other
taaattagtccatagagtcctataaatagaaatctaatcccattatttttgtaatgccctaatattaaggcacgctacagtaatttttcaattgcagtgctatttttgctaataaaaaatttttcttaaaaatcgtgtcaaaataaaactttagaattaattatgaaactttataaactttatataaagatttacaaagccagggattccattgtcaaactttttacaaaatattccaaaatacaatannctggttgcacaacgactataaaatgtaaaccccagatatcccgagattgaacactccaggtcgccccgccatgacatgtacgacatcaccctagctcgaagctcactcctgttgagccttcgccatttctttacctactcatgaaagtagagttgtgagtcgacagacttagtaagaaaaacatataacaaatcatataatattgacttctatctaggcgctcatacacctatttacaagacttaacaaatgagtaagaaccttctatactatgatacgaccatgtacaactgtaccacatgcacttagtaccaccatcgtactagtgtaggtagggtatgaaccgtaccttgagtattgttaagtgttgtactacatacaccatgtacctactcatactagtgttggtaacaccgtaatgtactcttcagacatcgtaccctttaccaatgcactctgtactgctattgtacaagtgttggtatgaatcacaacaagcatgcatatatatatttcacacatacatacattcgcatatatatcaatatgttgtatgctattcttaccccgtttttaaattcaagtgagttggcagacctgaacggaaagtctcgtgctggatggatgccctaatcacccaacatagcccggcaaataactcgccaaaaccctaatctgggaaacccgaacctccaacttaaggttctgttattactaactgaaactataataccctaagaaatagggaatcacccaacaaggcattgaaatggacacaaatcgaggaaatgaattgttcagggaatctgccaaaatcggttaactgattttagaggtccttgcaaaccgattaatcggtttgcaccgggtttccccaaacaattctaaacctgctcaaaacatgtccaaatcccaaaaaactctccagaacacctataatgctcttccacaatatattgcagtcaacagaatccag

SEQ ID NO: 135900 - DNA, 899 bp, Cannabis sativa
attgaaatgaggtttatttagggcacaaaactcaacaaactgccacttgcactaatataaaactaaaagtgcatttcaattaatctcaacaccttgatgtcgagatcaagtgcagtaagtagtattatctttataataggatttgacaggttgtattcaatacaaactttccccaccattacattttcttagtcacaaaatccttaatattaaataattcctttcgatatgtctaactctcttaggatactggattctttactatttggcaactttatctgtgttagttaggaagtaacactagtagttaatccatcactggcataatgccaaaaactacatagaactttccataagttgaataattatctagtagccttcctgaccgctttaacattcagtctcactggtagagttagagacttcagataggttcttacacttctctaaaaattactgctccaccccaagagtaatcaccatatcataagtagactttgtagcattaacagaagtctagaaacctaatttggtgtagtcttagagtattaaaatactatccttatcgactaacatatagttcctcttttgatctttaaatttacttgattatttttcaatattcctttcctcgattaaatattgatacctactcaatactcccactgaacaacaagtgtctggtctaatacatgagacctctcactattaattcataaggaattcctttcatgacttttatcttttttggaatagttgaaactgttcctagataaataaaatctataatctaggagccaaaaagcttcctttagaattagccattagaaaaatactctagcatcttactaaagtaagttgctgtaacaccctaactattataagcgtgttagcgtgat

SEQ ID NO: 135901 - DNA, 686 bp, Cannabis sativa
gagagagagagagagggagaaacggatgcgagattgagaaagtggatgagactttaggcctttgggtgggtttgtagccgtttggggggatcgtggtctctcagtggttctatcacactggttgggttcttggtctggtggagagagagagagagagagagaacgaggaagagtgagaagaggaagagagagacaataggggagggaaaattaaataaaagggtattttggatagtttaagaaaataatgatattattttgtacaaattagtggaagatataaattttgatattgagagttttattatgtattattaataaaatttctctaaataaaaatgacatgtatttaatggaactgaagtgtaacttttgacaactaattggtatcgtgggcatgcattatacaatttgaaagaatatataatacaggaaaaatttaaaatgcaccttctttaaaaaggtatatcgatacacttattttgacatcttgaagaattttttagttcaattctttcataatcgtgtatgttgtagttattaaaatattttgtaaaattttgagacctttagagaaataaaacacgccgaaaatagggtttaaatagtctattgtacgtgtgactcttttcttttatactcgtgaaagtagactatttaaacactgctttctatattgtaaatta

SEQ ID NO: 135902 - DNA, 745 bp, Cannabis sativa
  modified_base (27)..(45): a, c, t, g, unknown or other
  modified_base (117)..(125): a, c, t, g, unknown or other
  modified_base (210)..(210): a, c, t, g, unknown or other
attagcaatttaacgccgtagaatctnnnnnnnnnnnnnnnnnnngtaagtgttttattcttagtaacaatcaacctaatcgtggctgctaggagtaagacttacaaaagtatgaannnnnnnnngaagctcataagatagaatggcctggagtctcgcctaaacaggacaacgctggattctcatgttgatcgaataaaaggttgctanaatgtttgtcattttagatgagctaattactgtattaaatggatgatatcttttattctcgcctgaacgggacactggtatcagtttgttggaaaccttgcaaattatttaggattatatgttttagtattttcacttgccattcctacttgctaagtgctaataatttctgaatgtgtatgattttgtattaaaccttacttgatttctatttattgatgcttgtagtacccaatatgactatgaacaaccccataatgtcactattgactgataacaagctctctggagctaactttgtcaaatggagagagaacattaatatttctctcattgatgaaaacgccctgtttgggttgacttaagaggctcctaagcagccaggtgagaatgcgaccaaggcagtcaagttgaagttcgagcgttgggaaaatgctaacaacaaagctcgatactttatgctgtctagcatggtcgacaccttgaaaacaaggttttccaatactctcacagttgcagatattatgaaccagtt

SEQ ID NO: 135903 - DNA, 640 bp, Cannabis sativa
gtacataaatatgaaaaaaaaaattaaactaattttttttttatgccgaaacaagtagagggtgtatcagtacatcccttttaagggggtgcattgaagaatcacccaataattaatatttttgcaagtatcaagttgtgcacgacttattaataatagaataatttgcattataaatatttaaatttaactttcagttacaaataaatacttaattttaatttttgacagtaataatatataaattattgctgttatatttcgctttaaaattataatttttaagtattcaatgtaaatacagataatcaaagagtattactttttattaaattaaaaaccaaactttaataatttctaactatcaaaatcacgtaatattaaagatgaaagaaattagttaaagaaacgaaaaattatttctagagaattaatagagaaataaatacttaaaataaatataccgttttcatcatctaatctatatataatataaaggaaagcacaaaataagtttatgtggcatcttagatttttggaactaaatacccacattgtttataaatgatgtaggcatcatccatgtaggttataaatattattctttttatgtcatattaattcatccaaaagtattttt

SEQ ID NO: 135904 - DNA, 509 bp, Cannabis sativa
tcttcagggacagactccctagccataaaagccatcactgacttatcctccttggattcatcactagtctcttcttcttcactgtcactccaggtaacagccaaggccttctttttcttgagagtattagcacattctgcctgaatgtggccaaagcccgaacattcgtgacattgtattcccttccctttcttttcattttgttgagactgtctgttagggccagtggaattcctccccgaaaagttctctttattgcctggattagatctcttgaagttcttttttaggaaacgagcataattctttgcaagaagggccagattagagtctgtaaaggactcggacaaatcaatatctttagagatctcttccttatgaatgaacgcaacacccatctcggttttttctttctcagagctcttgagtttcttccctttttcccatctttcaagagttaactcataattttggagagacccaatcaattcatctagatcaagagcttc

SEQ ID NO: 135905 - DNA, 781 bp, Cannabis sativa
ctcgtgtgtgaaatgtatgtcttgctggcccatgttgaaaagtccctgctccgaactctgattcaggaaaaaacctaccattggagtgattcatgtggttgttggtccctgttccaacattgtcccgctgtgttgtggtgccatgggggtcactaaacccttactttcctctttttccttactgtcagcaactccaataacgtcctcattggattcttggacaattcttgacttgaacctccaattgagttctttatttttcttgaagttctaagaagtaaaggtgttcacccaatctaatccgcactattgctcatagtgtatcagattcgcgctaagtgcagatttcattttttggatccaatccaattcgcacaatagctcaaatctaatccaatccgtaaaagtacaaattggatcagttattttagattggttactttttcatattaaattatttaatatttatgaaaaaatattttttttttcagataacgaacaataaaataaaataaattatagttattttatgtctctaacagcaaattaaaataaataaaataacaaataataaattcaaagaaagaaaaaatattgtatgtataaagaaatgtttaattttgttttaaattgtatatgaaaaaaaaaatataagaataaaatacaattgatctgttaagttttgaaatataattgtattatatgtattagacttttaaattactatttttttacattaaaatattatttgtaaatacaggtttttttttatatatatata

SEQ ID NO: 135906 - DNA, 981 bp, Cannabis sativa
atgccttgagcgcataatccataatttcattacatttaacatggcatggcctttacacacatttatcactagggtaatcagcttaggctattaaaccgcttgtgttagggtaataaccttaatctcgattactataaactcacatataacatttccaatataagtgccactgcatatactctacgtgctaactactgtcttacctgttgtcccgcattggcagatatttcgaatctctgggtgctcctgaccaggtgccggtaagcctagtctcacaatccgggatttcacaactagggttaacccctgatttcaaactcataaaatatattcatggcatttaaaattcagataatcacatagagctctagtcgagctttccaacgatataacgaactcccaaatcagagttcggaatcaaaagttatgaaatttcaaagtttgcactcaaactgcctagaaaatcgagggcgggccgcggcatgcccaagccatgccgcggcacctgggacaaatcccaggttccaccaacaggggcggcccgtggcatgctcagaccatgccgcggcacctgggttgaaaacccagaaaaaccagcaagctttcacgaattttagctcccaaaacccaaccaaagcaaaccaaatctcattcaaactctcaaatcaataaatcaaggtgcaaccaataattaaaggggttaaaaacacataatccatgcaacaatttccagcaataaacccccaatttcaggttgcccaaaacaacccaaatcttgcttcaaatcaacaaaattccaagttcaagaacatgagttcaaatccaacacatccctattaaattccaacagcaaaacactagtaaaatttaaaattccaacctagaaaacgtcataaaatctctgcccaaactcaacaatggaacatacaacaacaacaagctcaatttcaacaagattaacaccaattcacttaacatgca

SEQ ID NO: 135907 - DNA, 862 bp, Cannabis sativa
ttgttgatgagtacttcatggtgaaggatccgaacataaccggactcggtttcagcagatcccgacatatcaccgtcctcccttcacccttactcttagggatagggttcaaaaagtttcccggttgttggcagaagactgggatatcatccagttgaccttcaatgaaaatctggtgcagtacgggctttacctagaggacttttcttctaagtccgtgacggggaagaagggaaaatattctgctgctcggcccgaacgagctaataaggaggatgagctcattcaacttaagtgtgaagctaacttgaagggaggtggccgggcaaagtagtatgctcaggactccatgaatcctgaagatgaagctgaggctgaggctgaggctgagcaggtgactcctttgaggaggaagaagagactctcgaccacacccaggcgtgttgaacatgcacttggcataagggagcccatttcatccgttcgtccatctcatccctatgctggaaaagggaaggccgttatggttgagatatcaggtgatgatggacttctgactttctaggcgggcaatcactctgcgctttacttcttttttcagcttcttaattttcatgctttgtattttctgctggtttgtgctaaccacgctgtttttgttctgtgcagacatgtctcggcagatgatcgacgctttaaggaagaggatgagcagaagttctagcgcctcccctccggcaaggaagtctaagggcggagaggggtcttcagagaagaggccttctggagaggtgattgacctttccgatgagctgactactgcgaatcattccactcccaaatctgccaagtctaaggagtc

SEQ ID NO: 135908 - DNA, 1071 bp, Cannabis sativa
aatatacattatactaactaagtataacaactagaagaatctgagtgacggatagtgaggcatccatctcgctataggaaggcatactcctgctaccttcactaatcagatcgaaacatctttcaatgagatccactgctccgtcgagtcagctttctcagaaagaagttgacattcaaatgatgttggctactaaagttcaccttgtcaccaaaaactttgattgtcagatggagtattatgtcttcaatcgcagaaacggtgggatttacattatcaacattggaaagacatgggaaaaacttcaactggttgctagggttattgttgctattcaagttcccagcgagatgccctagcaagatacactttgcaaggtatctaaatccacgtcagcattgacccatcaaaaacggtttaatcacaaccttattatgttcaaataatagctgcatttatttagctgagacgtaattaatgcccataatttttggaaaaatattattgtgggattcgtatctgattgtaattaactgccacactatgtcactataaatagggggagaatgtgctgaaaaatggacgaaaaatccttgagaaaaagtcccctagttggtatcagaataatctgaataagattgacttgtggactatgcagagttaactgcaaaccacgtaaaaacttgatgttgttcttactttattattttttctttgttttcaactaatttctatgttgatcctatcacgaaataggcttattattgttaacaaaaatctacgttaacacaagtaaattctttaacttattaattcctccctctactacaaaaacaccctttagaggcactttttaagtactttcaacaacgattttggtgaaatttactactgacggtgattaaggtaatgctgtagggtctaaaataagtgacgccatagcgttacatattgcgtcagttatttgctaggaaccgacgccatagtggtacatatgacgtcagttcctagaaaacaactgatgccatatacacccataacaaccgacggcaaatatctaatgattttttt

SEQ ID NO: 135909 - DNA, 1112 bp, Cannabis sativa
  modified_base (60)..(66): a, c, t, g, unknown or other
actttatatgtgtttaattttattattttagaaattcatgttaggatgttaatgaaacannnnnnntagtaaatctagatcctcgtaaaagacattccaacagataaatggagttgggttgatcaatattgggttgagtttaggagaaacaaaagtttggattttcaattagtttattaaaaacttgattttcatctatatgtgttcctgtatttgtggaaaggaatgattatgagtttttattttaggtttaaatgtggttgatttatctctgattttggcgtggaatcatatagtattactgatacaagtacaaaaattggaacttgctcttctttttcactatatatatgtaattaagcatagggatatactaaaattttagactactgtaaatagtgattccattaaagaattaacataggggaagctattttattttgttatgaaatagaaaatgttaagcacttttaaaatatttttttaaaaaattcatacacagcagctattaaactttattttaacttcactgttagtgttagaaaaagaaaaaagttcgcttatttaagtatatattcgtcctaaggagtttagtgttagtgttagtgttagtcactcataaccaaaattatgtaagaaattgttatgaaataaaaaatggtaattacttatataaaatagttttttaaaaaagtcacacacaacatccattgaagcttattttatcttcactgttagtggtagaaaaaaaaaagtttgcttctgtaagtgtagattcgggctgcggagtttcctagttccttatcactaaaaattaggtacattagtcactcataaccaaaattatgtaagaaattgttaatatttagtgataatagatttgcactctcttgttagatgtggagctttttcttcatttaatttggttgaaatatatgttttttcaaatcttatagattagctgccatggtagatttgactaatattgcttaatatcaaagcattggattggcattctctttagggaaatttttatagctctgtaaaaagacttaataaagttacttattattagaaatattttaccaggatatagatttactaccatgtat

SEQ ID NO: 135910 - DNA, 664 bp, Cannabis sativa
  modified_base (158)..(158): a, c, t, g, unknown or other
ttttgtacgatgaatcgtatttgtctccggagattcaaaagaggcagcccaaactaagctctattgttctgtcgccatatgttgtggactttggttcttcttcatcttcaaaggaagtcttaatgaggattgtgcaagatgataaatttattgtgcanggaatcaatccttttaaagatgaaatttgttttaatactgctgttgagcagtgcattaagttttccaagtttattgatgagaacatagtcatgaatagggggttagtatttttttatttatatttatattatttacatttgtttttatgtctttttttatgtgattgactttttttgtgtttgttgttttctgtgttgtcagtgtgaagaagtactccgatgcggacaacatcttatctccaccgatggatttttctttcattgaaatttcagagaagatgtggttctacaagcttcatgcttgtggtgaatttctgcgtgacagtgtaagaaactagtttctttttattattttctatgtctttgctgttagagtcaatgttctggtattggttcttccaaaaaccggtttctgatacatgtgtttattgcttttctgtagcatttagatgtggtattctattaccttaggaagaagattaagcaagacgatactttgaaccaga

SEQ ID NO: 135911 - DNA, 783 bp, Cannabis sativa
aaatagaatacatagaaactgaagaaaaataaatcatattaaaaccataaaataatgtcaacaatctccatctagaccctaattaagtgtttagctaaacatgttcattgtagcaaaatcacacacattgacttaagaaaagagaagaatataaagaagaaaagaatgatgaaaaccctctgaagaatacctccagtattgaagtcggtctctgaaattcgtactcctttttctgcctttgatttccttctgaattccccctgaaatcaattgaagttcactccttatatagccattgagggactaaaaagatagaaaaaaatgcacatgctagaatcctattcagctttgaattaggccttcacaataagcccgcgttgagaaaaataatattttttctgcttcagataggggcaggccgcaacatgcctttcctgggccgcggccagtgtgcattgatcacatgaggatgctactttttcacaatactggccgtcacatgcccattcctgagccgcggcccgtgtgtaattttcacacaaatttctaacacgtgccacttcatattatccttttcctaggcatgaccagcttcaacttctgttctcctgctaggactagttcctacctatcatattgattcagtctctattccctaggggtgttcatccaattcaatctacactatttcgctcatagagcatcccatccgcattaagtgcggattttattttttggatccaatctaatccgcacaatagctcaaatccaatccaatccgca

SEQ ID NO: 135912 - DNA, 546 bp, Cannabis sativa
tagctatattttcttcaaaaatgtcttccattcgcggttcttcttactcagtagaggaagatgtgcacttgtgtcatgtctatgttgacatttctcaagatccaatcgtaggaagaaaccaatcaggtaataatttttgggcaagagttcaatcagagtaccacaaagatggaaaatttagtaataaacctcgcccagtaagatctttgcaaactcgaatgtctactattaatagtgcagttgcaaaattaaggggatgtatcaaccaaattgaaaataaaaatccaagtggtgcttcagcagaagacattgtaagtgtttgttattataatttatttattattactatcttatttttcaattttcattaacgttattacttaatttatattgcaacagttaattcaagcgaagatgttattagcccaagataaaaagtacgataaaggctttaaatttgatcatgtgtggcacatcctcaaaggtattcaaaagttttcaaatgatgaaaacatcaatgcaccacgtagattccaacacgaaggt

SEQ ID NO: 135913 - DNA, 1092 bp, Cannabis sativa
gtaaaataatttccaacatttggcacctggagcagaaccagtttctaaggcaccatacagaatggctccggtagaactttaaaaattgaaaattcagcttcagtggttgcttgacctagggttttcacgacttagtgtgtcccttggggagctcccgtattatttgtcaagaagaaagatggatctttgcgtatgtgcattgactactgaaaattgaataaactgactgtcaagaacaaatatcctttacctaggatcgatgatcttttcgatcagcttcaggggaagaccgtcttctcaaagattgatctccaatcgagctaccatcagttgagaatcctataggacgacattccaaaaattgctttctgcactaggtatgggcattatgaatttatagttatgtcttttggactaaccaatgctaccgcaacgtttatggatatgatgaatagggtattcaaggatttccttgatatttgtgttattgtatttattgacgacatcctcgtgtactcccagtcagaagaggagcatgagtaatatcgtcagattgttttacagcgactacgagaacataaattgtatgccaaattcaagaagtgcgagttttggctatctcaggtgtcttttctaggaaacattgtcagtaaagagggaatcaaggttgatccgggaaagattgaattcgtcagggattagccaagacctaagagagttacagaagttagaagtttcttgtgtctggatggctattaccgtcggtttgtagaggggttctctaagatttctacgcccttaagtgaactcactaaaacaaatcagcaattggtgtggatagacaagtgtgaagcaagcattcaggagctaaaacaaagaatgattactgctccggtattagccttaccgttagagaaagaaaaaattgtagtttattgtgatgcatccatacagggtgtggggtgtgtattgatgcaggccgattgggttatcgccaacgcctcttctgacagtcagtagtcccgtgatccgtaaggggaaataccgggtacgctgtgcaatcccacatcgcctagggaaggtcaagtggga

SEQ ID NO: 135914 - DNA, 753 bp, Cannabis sativa
aaatatactattgtgttataaaaattatgaatattttaaaagaaatttataatagtaagtatcagaattaactaaactacatgacacgtgatgttaattttataacttattaatatatttattaatattagttctattacatataggttattaaaatctatttattattgattatataaaaaaatgtgtgttaattattaaattattagagtgtttatcttaatattaatagactgcaatattttatattaaacttttaagattttatagtagatcatactaaattgagagattttttttatatatttcaacagcgttatagctgctaccattaactatcattttatggctattgtcgctgtcaatccccatatatctaagttgccattgtcacgatattttgtatcatctaccatatactatttggagtggccactactactaaatagtcatattagaaattttatgagaaaaaatttctactaatactaataccaactttaagtatttttttttccaaatattactatacataaagtatgataaaatttatacacaatacaaacaattaatttgtttataaaagactaaataatgaagaactaatcaatattgatcacaaaattttgagattatttattgttattttagaatggaatttttttcgtgataaaactatatatatagatatgagattaagtatttattaaaatggtaaaatatttagagaatgttaataataataataataat

SEQ ID NO: 135915 - DNA, 1192 bp, Cannabis sativa
tgcaacttctaatgttcgagttggctgttcatattccggtgtacgctcgctggcttaggatatacctaacatttagttaagtctaagatgtttgtgttcttagatagtcgcatttatggacatcgtataacgagccgatagaacctagacgcacgagtctatattggtttatcaaggctgttgggtcatcgggaccagctcgcattatagagattcgatctctatgttcttgcaggaggatggaaaagatactcgcacatatcctggtacatgcaagttaaattcgttctttggtcccacataatgtgagtcacgcgaatgcgattagactttggtcatattcgcatcatctcgctaattctagctcaagcgaggtttaaactcgaggagtctctcatggacatcacagcttttcttggaaaactgaatacaggtgtcctctaaacaagagtctggtctcgagtttctaggtgagataaatctcactataacacgtgcccctagtttcgcgatgtgacagatgcggtcatgagggaaactatatgcgagagacaggtgaaaggttatcacgaggagttgacctttggttgtcccatcgagggtttcaaaaaatgatagctgtaattattttgttttatcctatttatggtgccacgtcatgaaactcttcggttttcgtgtaggcatgaccatggctggccattggataggacgaccgtaggcattctggctgccatgtgtcataatcccaatttatgagggatacgagtatttaaacttattgatacgaaataacttcctcattttctctctcattcttaacttccttttctcccttttactgagattcgaagaaattcctatactctgtccaaatttctacttctccctcttgaatctcttcagtttcagaggtgatcgaaaccagccccagggagaatcatcaaaactaaaggttagtttcgaatctacttgcgtttttggtttctaattgaaaaggaaagctgcatttttcgggtttttatacttttagaggtttgaaaatacatggtcgtatacatagggctatatttttctgtgtagaactggccaatcccagcagaaaacagacctgaaatttgcatagtcgtgaactttaggaagaatgtgtgaataatcgcacctttcttgcttgtttatttcttgaatacac

SEQ ID NO: 135916 - DNA, 1378 bp, Cannabis sativa
atgaaaaaatagcaaaccctagctacttcaaggtggattcgaaagagagagagagagttgagagagaaatgctttctttttcaaatttttttattttttgtaaataattgaataaaaggttttgttttattatgttactacagccaaacattaacataaaaattcagattaaaaatttgtattcaactcacataaatacaagacacgtaaaagcaaaatgaccattttgcccattccacactaaaaatcataaaaggtcacctgggactatttttgtcaactctaaaatctcaactattcctgacatttccaatgtctaactatactgccccgctatactaaaaaattctaggatgtgattctaatagccaaacaccgcgttctaatgttgttgggcacaaaacatgtaaaattatgaaatgctatatatgacatataaattgcattctgaattcaaataaattatcataaattaataattcaaagttaataaataatttccataattaaatcctaattatttgctaatttccaaattaaggctaagcggtctttacacttatagtctattgatataatcaatataagtagtttgccctccaattattagttcgtaattagatttggtctaaatgaatattttacccttctaattatttcttgattctttatgtaccattaattaaatttgaatagttaatttgttatcttattatagatttggatccaattgttagcactctcagaattaacaatataagagaactaatattctgttagttttatggtactaaatcatgtacccagtaaaagagtttcgtattatctgattatcattgtagtatagtccctaagatctctatatgtgtgtacattaaatcaaaataataaaaacaataagtttagagtatatatcttaaagcctatcagggtatcctccaaacttctcgtatgttgcatcccttaatccagttgatgaggaattagcaattcggactcacactagtgtcttctaaattgatccaccacacacaaggaatagtgtgagctattaggatagagtgtataaccttgttgttgttgagttctcaacacatgagaaggaacaatagagagaaaaaatagtttgcttttctctctatagattttgaaatatgtagtgtaaagaatgaattaaattctcaaatcaggctcctatttatagtagttaaatccatttaattaaattagtatttaattgtttaaataaataaatacctataattaaatttggttactgatatttatgagcgaatctctcaactacttgagagaatatctcaacaaccttaaatatctataaccacttttcaaattagatatttacctaattgaatta

SEQ ID NO: 135917 - DNA, 585 bp, Cannabis sativa
tttctcaaaatcatcaatttttttcagtgctaatactcatgaaattttgagaaaccgcctttgtacagtgttgggaatggcacctgctttggagggtagtctttatctgggtttaccaagctccatgagccgcaataaagtttcagctttgggttatttgaaagaaaaaatgaggaaaaggttggaagggtggggttcaaagttcatttctagagcgggaaaggagattcttatcaagtctgttgcccaatcacttcccagttacgctatcaatgtcttcttattacctatggaggttgttagagatatggagagtctcatgtcaaaatactggtggaggaactcggctaatagtaactccggtattcattggatgtcctgggagagactttgtcatcacaaaaccgaaggaggtatggggttcagaaatctaagagactttaatctggcaatgttagggaaacaaggttggcgcttactaaccaaacccaattctttggtagctcgaatcttcaaagctcgatacttttcgaatggtacgtttcttacggctgaaattggttctaatcctagttttgtgtggag

SEQ ID NO: 135918 - DNA, 842 bp, Cannabis sativa
tttttgtaatatattcaatgtgggctgtacaaatgttgattgggccggcccacagtatttttgtaatattttaccctttttggaattttcctgtttctttccctattttttttctctctttaaatattatttaagaataatattatatttaactagttaatataattttatcaaataaaactaaataattaaatatcattttagttattcaattcataaatgatataattatttaaaataataacttatacaaaattactattttgcttataaaaattatttcttatagaaattaattctttctcatctcattcgtcaaatcaaactctccccctatatagacgaactaatgacagagaaaatttcatccctactttttatctgttaattataaattaaccgaaaaaactacaatttcaaaaagaaaaatccaatgcaactacaaatatttatattaaattaataaaataattaaattaaaatattacttaacatacatatttttttattattaaaatatatatatttttttatatttaggaagaaagaatcgaacttggaactcctcttgcctttgtgaggagaagtatggaacatgtttatgtccataataatttatattttttttatcatgttaaagttatttatcatatattatatataccatactaactagtttaatataataaagatatatatagggtaatattatagtaggaccgagcaaaagtttactacctgtaggttttttaccgttgattttagatcttgtggttattataacgtaaggtatatacttttactataagactacttgtatacaattaaaactttatacatat

SEQ ID NO: 135919 - DNA, 612 bp, Cannabis sativa
ttaaaactaagcggtctttacacgcactatggaagttgcatacgttgttgtatttagtgaaatagatttaaactgttcttcatttattcctttaggtttattttaatttaatgttaatatataatgtaaaatggttctataaccgattaagttttgtgtaactaaaaggacacttgctttgtatataaaggggtgatccgacatgaataagacaagacagagatcccttgcaatagtggactaagcagaccttgatttgactgaaccactatacttcctggtgttcattatttttcttgcttttaaattgtctaggcagtcttgttcgaatactcgttgttttaagttgagtacttgctgcttttttgttaagtgtcaattatttattttctatgttgtctaaattcctcccacaacatttggcgtcgtctgtgggaacttctttgattttggaggaaaatcaacatggctacaaaccagacaaacaaaaacactggatctttcaactttggaacaatgaatgtcccactcctaggtgatggaactaatctgactaacacaatcaatggaggtgtgggacgaaccaacgtcactcctctcaatttgttccca

SEQ ID NO: 135920 - DNA, 576 bp, Cannabis sativa
tctttatcctttagtaccgttactttactagtaaaagtataatttagatccaatctaaatttgttcacaacttttcagttctagaattaacacttaaagagaaccaacattcaacttgttaggaaagtcgggattctataattatagatcatgtttccagccatccatattattagattcctaaaatagaagttataagacttacagtatcttttttgagaaactttaacgagtgaaccaaaaaaactaataatataaacacgagttcatgattactcaggattcaggccgatctaaccatctttatgatatgaattaggtctttatagtagacgacattcttgataaagatataatccttattatatacaacaccttcacttagatgtcatactacatccataatccaaattgagactacttgtatcaaataacaggcatcggtgaaccgcactagcaaccgttgattatagattcctaaactttaatatgttgtttactattttattaaaggctaagtgatcgtaattttccatacaatacaagccacatcctcatgtatgaataaggaatttt

SEQ ID NO: 135921 - DNA, 1110 bp, Cannabis sativa
  modified_base (176)..(176): a, c, t, g, unknown or other
  modified_base (265)..(275): a, c, t, g, unknown or other
  modified_base (659)..(671): a, c, t, g, unknown or other
tgattatcacataagtgtaaatccagggcactaatgaatcagtgacattatcttttgaagcatataatcataattacattccactgttttgacattactgtaattgtgaataattatatgttctggacttaacagattttgtagacattaaacaataaacatgaaaactacatgtnaacataaatgacttctaatcttttattgataacaaatcagattagattgaaatgggttttatttacggcataaaatcccaacaaactcnnnnnnnnnnnaacataaaacaagttgtgcatttcaatcaatcaattgtcttgatatccagatcaagtgtagtatatttgactaaacccaaattacaggaattgtaagtctgtggtaagcaactgctttctccaccattacttcctttgtgctcataaaacattatgcaacatcattttctatatgcattgctcatctagggatagagataacatagtgtagaactttcttcagttgaataactttccagtgttttcaaaacaacgaatttatttatcttcactgattgagcttaaattattatagatggggttttacatccttctagaataatttctccacccccagagtaaccaccatctcgaatgagttggtgtagatataaggactctaannnnnnnnnnnnncatctaacatataggtcactttcggagatttttcttgactttctcctaatgttccttgtttgattacatcttagattgctctcactcaacagtaggagtctggttaaattcgtacatagaagtacatttaacctcttactattgtttctcagggatatgttgttgtgacatattatcttagtcttaaactgtaagttccttctagactaagtcatcaacatagcaatctagtattaacattaatgtaaaatacttacttaagattaagtaatcattagagataccataaaacatttcatgaagactagagattttgcctaagtcatttgaatagactttgcaaaatactcatatcttatcctcaaaattctgataaattatttccatccatatgaattgttagatttactttctcagttgtattctaaagttcctatca

SEQ ID NO: 135922 - DNA, 849 bp, Cannabis sativa
aataaattattatgtgcacatatattgtaataaaattatataatgtatacattagtgtaaattacccttttttaaatctatatgcaccataacaaattagttatggcctttcatatctatacaacatttacaatgtattgaaccgtttttcatctttttgacttacttttctaggccatactagtacaatcctttgcttcacactctctttaattcttttcaccacctgagtcatattaggatcctttccttgccatattacttcattcctggtcttcaagaggttatagacaagactagcaagactagctgccatcactttcctcttgaatttgcttactttgatcctttgtatccacttggttagcctaggcagtgttatatctgagtgtcttcattgcatccatgatgttatttcattaaaacattgcatagtcctgctgcatccaaaaaatagacggtcttttgtttcctcttgattgttacacagcacacaataagaatctccaacaatgccaaatctgcaaagtctatccttggttctcaacctcccatgcatagcaatccatagagtaaagctatgcttaggagtgttgaatcttccccaaacttgctcactccacccctgtttatcttggacagagcatagtagattatagccagcagaaatttggtatctctctgtgaagaattggtgagtaatcaataagagagctaaacttgattttccaggctactaattttctccaataccagctcccatggcttggaatagggtagctctaccaattttccagtagacagtgtgaacccatttaacccatcagttttcttctttttttttttttt

SEQ ID NO: 135923 - DNA, 807 bp, Cannabis sativa
tctcaaaaaggtggattaggtctatgccgatcagaattgaggatagggagttaagtgctgacttaattgaaatcggtttagcagattttgatattatacttggaatgaatttcttatccaagtactcagtcaatattgaccgtaaacagaaaatggtgatcttccaacccgagggcgaggaaaaaaaaatcaatctctataaaatccaccacaaaacccttaaacccatacgcattaaaaaatccaaacatttttttatacatgaaaataaacctagttagaaaccaaaataagatctcattcaaagaaaaattaaaaaaataagacaccctaatcctcattagcaacctaaaatccatagctgtgagtgaagcaattatttatccggacagtgagtgaagcgcatgtagtaactggagttctacaattaaaaggcctatactcaacaaaaataattcctcctcttgaattagttagtgaaggaagttgataatctatgcagaatagttatagatgataaattagtgagagaagaaaccaaaaacaaaaaagtcgagggagagaggatgggtgatggagagagaacttgtagtatgagatagaaaactacataaaacacaatttcaaaccaaattttttggaatacaaaagaaatatacatgttaaaaccaattggagaagaacacacttcccgattaagcagaaggcgaagaagagttgaggaggccgttggggttgggtcaccgcctgattaagaagaggagaaagagaatgggttgaagggtttttgaagtggatgagatgggg

SEQ ID NO: 135924 - DNA, 628 bp, Cannabis sativa
ctataaaagggaagagaggcagcataatggaaaaagatttttatttgattttttttgggcagttttagaagtaaacgtaagagtgaaacatgagagaaaataagaaagagagaaggcattttgcataaaattttcatcttcaagagtttctacatagtaagtgataggtaaaattctttgctcttcattctaaatctttctttgctctaatgaatttttctcttttatctttggtccactttgatctaggctttttgagccacaaaaaacttcaaaagtgagatataaccaagagatagggaaattctcatttttttacacatcgttatactgctaagatcgaaccaatatttttcttatatttttcatggtccattttgatctaagctttgttttagccacaaaagatcttcaaaaagtgagatatagccatggaaagtacatgaaatcttagaaaaattaatactcttatgctgtttaaattaattcaagatttatatattttttatggtccactttgatctagattttttttaagccataaaagatcttcaagagtgagatataaccatagagaatatattaaatcttaatataaattaaaagaaaatgtcatgctgccaaaatt

SEQ ID NO: 135925 - DNA, 708 bp, Cannabis sativa
  modified_base (397)..(397): a, c, t, g, unknown or other
  modified_base (506)..(513): a, c, t, g, unknown or other
tgtaaacataaatcacttcaaaattctatattgataactaatcagaatgtaatgggttttatttagggcacaaaacccaacaccttccggatgcctctggcttctgtagaacttgttgaagtgggtggttggtcaacaccttgattgggtaagcctggaagtagggtctcaactttctcggggccatcaagaggcaaaaaactagtttttcaatgactgggtaccgcgtctccgctcctatcatgcgcttgctgacataatacacgggatgctgagttttctcctcttcccagactaaggtgcactgaccgcatgctcggagacggccaagtacaggaacaagtcttctccgagaacgggctttgataggattggaagcttggccatgtgctctttnagttttttgaatgcctccttgcactcgtcagaccattcaaatttctgacacttcttcaagatgttgaagaagggaatgcacttgtctgtggaccaggagataaaacggnnnnnnnnagcaacctttccggttaggctctacacatctttatgtttctttggggatggcatgctcaggagagctctaattttttcttgatttgcctcaatccccttctcattgacaatgaagcccagaaacttccctgacttaaccccgaaagtgcacttcttcgggttgagtttcattccgtatctccggaccacttcaaa

SEQ ID NO: 135926 - DNA, 894 bp, Cannabis sativa
aaaggtaaatcccccttcgatttctttgagttctgaagaagaagaacccatggaggatccctctgttgattcctcagaaaaattcgtgtctctttattctgagaaggagattccataagacattggagtttcctcagacagtgaggaaactgaacttgaaccagagccacctctgaccaaatttgctccaacttctgctcgatcatcttcagcacccaaggcttctactgctaccaaaggcaagcagccaatgaaggaatcatctcctggtaaaattcctacatctctctcctattgtcctcgtttctactatcgtgataatgagcgtgattggaatttgtatgctacccgaaagtttaagagtgaaagaaattacgatttgcatgctcatagggtgtatggaattgtaaagttcattcaatacaatcaatgggagattactctctttggtttaaaagggtacattgctaacatagtcaaagatttctatgctaacttatctgatgattttcttgataaaaattctagaacttttcgaaaagtgtatgttagaggacattggttttcattctctgaaaaagacatttctcaagtcttgcaacttccagagaatgtcccaaatgccataatgtctatggatcgccatttgatgctcactgaactcactggtgcacgggctgaactgaaatcgggggagtcttcgcattacacatcttacatttgctcaagcatctctcatgcgttttgctcttagaaattgggttccaaactcaaacaagactaaggtgtctcaagatatggcctcattcctctatcgtatcacctcaggagcatccattgacttggcctcccacattttgaaccaaattatctcatttcgaagaggtaaaaagc

SEQ ID NO: 135927 - DNA, 737 bp, Cannabis sativa
  modified_base (202)..(224): a, c, t, g, unknown or other
  modified_base (597)..(597): a, c, t, g, unknown or other
taattaattttagttttagattaagtttagggaaattacctcatatactattttttaactttttttttcttcaaatttacggtttgggtttctaaggtggttttttcggtgatttctatgtaagttgctatatgaattttggttgtgatttaggttgctccgctagttgcaataggggtttctacatagaattccgtaaaannnnnnnnnnnnnnnnnnnnnnnaaaactgttttaaaatgtaaaaatgaaaaaaccctttaattttatttatctcatataaattttagttacatttcaattagtagttatatttattcttattgtttattatactttatgttacattttttagtaacatttatgctatttttaaacatatttaataaatcaaaataaactaataagttacaataaataagtgcttgctagttaaatatatattatattatagtatttgttttagtaattagttattttaaaattattattttgctcttcaaattatattatagtatcttaatattattaagatacatttttagtaacctttagtgttatcccaatttttgcactctgacgtggcatcacatgaatngtgacacgtggaatccacttggatctctactcgggaagcatagtccgaacaagatatctcgctggcatgcccagagcaaagtatttagcaatccacacagagcgaccaacacttaccgaattcagctttcgcatcgtgag

SEQ ID NO: 135928 - DNA, 645 bp, Cannabis sativa
gaataatatgactccttccactcatatctctaacccttgtttcctttctgtcgcagagtaataacaagatctaagcctgaatctccttctcctttatttttggttaaccaccgtcttccgcactatgattgagtacttgacttggtatgtgtgagcatggtacactatcactatggctcgaattggtgaagaaaagcaagaggtgaaatcactatagaaaggagtctctcatctactagttagaaaactacgtttaggttgaagtaggttggatgagaatgagagcatcatgttccttttatagtttttcaactagggtttaggatttaattatatggattaaaaaagaataaaataatgggtaaattcatcactagtggcaggccacttaataggcttcactagttacaattttgcaactttttcaaccatttatccttttctcaataatgccatatttttcaatttcaatcttataaatatcaaaactatttatttaatgattatatttaattatcaaataaaattccatttatcttattaattatgttatcccaaatttggcactctgacgtggcatcacgagaatggtgacacgtgaactctacttagagcatctgttcggatcaacatgccgagcaggat

SEQ ID NO: 135929 - DNA, 936 bp, Cannabis sativa
aaagtacatcacgggacaaaatcatatccttatatatttatatatatttatattattagatggatttatgaaattaacaatttaattttagaaatatttataatgcacttttctaaaagtgatgtattgatatatttctatctatttcggtacccaatagacttttttagtctaattttttatatagtcgtcttatttaagatattctataaaactataataaattcagaaaaatttaacacgctgaaaatattgtacctctttaaaagtagtgcactgatgtactcctacatgtttttggtattcgagagatattttagtctatttttttatggtcgtgtacattatagttgtttaagacatcttgtaaaattttgaaaaattcagaaaaaattaacacacaaaaaataaaatttaaagtgtctattgcacgcgtgacttttatttggaagggtacattgtaaaatcatcttttaatttattgtgtgtaaatttaaatgtgaatactataaattattattatttttaattataatttaagttaaaaattattatatgtttttgtatttttatcgagttttactgattttacaatattattacttttttttaagctaattagtaaatttatttaaattattatttaaatataataattttggtgattttagttaattaatataatattaatttttattttattaaaaaaataatataataagaaggaatattttttgaaataattacataaagtgttctttttgtaaaaaaaaaatatatatttttctgtttaaagatttttttttttacattttttctattttttatagaatcaacacgaaaacaataagaaaactacataaaagtaacaagaaaataacattcaaataacatcaaaataacaacaaaaaatggcacatgaataacaaaaaaaaa

SEQ ID NO: 135930 - DNA, 819 bp, Cannabis sativa
tcgaggtttgaggttacttcgttttcttagaggagcttgactttattttttgactctggtttgattttttgagtaaatgactcattatcaaaaataaaatatggaggagtttagccttttttttttgtaaaatacattcaacctatttcactttttactttttaaatatttaaataaaaaaatgtaatgtaatcaaaatggttactttatgaagtaacatgtatataaattatatttttaaatgaatatgattcctattgttatacccgaaattcggctggacgacacgtgtcaaggtaaagggaatgtgaatcggtgccatatctttttatggaataactaattaattgcgtaagtatcagactatatttgcaacccgctgactgtaaggtcttaggtgaggaatcaatgtacgaactggtacttagtgtattaacgagaaacgatatatcgctaaaggagaatagcgaggcaccggagaagagtaacacataccttagcttacaataagaaaattaagtgtcaaagtcggaccggctcggagtacaagaatgcgagatgaccatctcgctacaaagaaacttcctatagtttcatccaactaatggaagcgagactcataaccctggcaagtcagaagatttctatattcccgcagtcaacgtaaagcatatcttgtcaacctcggaaagaagaatggttcctgctcgccattgggatcactacaatcaagttatcgtcgagacatctccagattcaacaattaaagacgtgtttagtacacgatatttctgacccaataaaagcgggaaaatcaca

SEQ ID NO: 135931 - DNA, 585 bp, Cannabis sativa
ggcataaatctcaataaaatatgcttagtatgcaactgagttttagtagctaaaaaccctataaagctttccaatcaaaataaagcactttaggggaactttgagcttccacaacttcatctacatatcagattctatttgcagttttctttcgagacttgaaggtgatggtgcgagcttttaattgaattgaaaccataaggttttttaaatacacgagctcactgacaaaagagtgttgaggtgtctggttcttttatatttttctaagtgattatatttgcttcattgttttatatttatttttgtgttgttttagttttgtttttgtaaattttttattctgatttttcaagattgggcttgcaaatatagtcgctattgcatctggtgttgaggttgtgaagaagattgttagtttttttaatccttttttccttttattttttctgatttgttttattgttgttttacaattgttttgccatgattatttatttgacttttccggctatcctagtgttgctgtagtggttttgtccatgagcgtggaaaatggaggtctcgtttttttttttttttttt

SEQ ID NO: 135932 - DNA, 614 bp, Cannabis sativa
tcttcacatcctgctcttcaaagtgccaaagtttgtaatttaatggcaatggatggctcgggttgggacgaagatttaatagcagatttgttccttgagcgagaccaaaacctgatattgtccattcctcttcagtttagtcatgaccgagatcatctcacatggaaaggtgagatctctgggtggttttctgttaaaagtgcatatagattggcccaagagattaatggggaagatggacaagatggtgatgttgctgcaattttttggaaaaaattctgggaagttaaatcacctccgaagatgaaaaatatggtgtggagggcctgccaaggttgtcttccaaccatgactcagttgcgaacaagacatgtggctgtgtctctcgtctgcccagtttgtaacaaccacgaggagacaacttttcatgcccttgtttcttgtccagcagctgctctttgctggaacagagtcgacattggtacggtggtgcaccagcagcatgaatttttttttgactggtgctcctcgacttttctggtgttagatgcagatcagaggagacttttgattgctctttgttggtctctgtggaatgcaaggaatgacagagt

SEQ ID NO: 135933 - DNA, 802 bp, Cannabis sativa
tgtaatcataattacattaaacaatagaattcctattacattaaaaaagctatgtaatgaggattacattacatacaggggcggagccacatacaccccaacaggggtcgtggccccctgaatctttaaaaactatgtacttggcattgatatatataagagtttatgaaaagatattaatacatgcctgaattttgatggatgaaaaattttaaaaattagtattatttatttaaatatagttttattatatatatatatatgcatgtagggctcacaattataataaagtaatagttgtattatccttttattacactaaatttgatttgttttaatttaaaaatatatttaataattatttgattaatagtagtataattaaccaattatgctatatattctttaaagtcaatataagtttttttccttaattaagaaactacatattaatattaatttggtaatattaaattgaatcttgtcaaattttaaagtatcactcgcattttatttctaattcaattacttaatttattattttttaatatattgtataaaatatttataaaatttaaaaaataataaaattgtccacacatacccttaaaaggcattttagttactaaaatttaaatttgttgtatattgcgttgtttgatatttgccccccaactatttagttctaactccgcccctgattacatatgacttaataaagtaaagctaaaatgactctatactatttttttatataaatataaaaattaaagtaggcgataattttgtcaatttatcattt

SEQ ID NO: 135934 - DNA, 997 bp, Cannabis sativa
  modified_base (778)..(800): a, c, t, g, unknown or other
cttacctccccaaaaattcgattttcatattgttgataatataaggtctatgattagttagtagcagttgcctaagtccttctagggaaataccttagtgatggaaaaaatttagaatgatagaatggttgtgtacttagtgtaaactattactaaattcagggatgtcctgatcgtcaacttaagacaagctagaactgttaactaaggtttacatgtttgataactattctaaagtgattaggggtggaccatcctatgttcattaagataagaaagtgtttctttcaactatggttaaaactattcatatggagtaagtaaaagttttctattacaaggacgagaaaggaaattttgaaaataagtatattcaatggacttaacaaaacttcttgatcctagtgcaagcaacttactttagtaagatgctaaagcattttttttatggctaaacctataggaagctttttgacttctagacttagattttatttatctaatgaaaagtttttaactattccagaaaagataaaggccaaggaaagaattccttaggatcaatagtgagaagtctcaaatatgctttgttatgcattagaccagacacctactgttgagtgggagaaataagttggtatcaaattaatccaggaagggaacattgaaagacaatcaaatgaatctgaaaatctgaaagaggaactatatgttagttgataagggtggtattttagtactcttagactacaccaaatcaggtttctagacttgcttnnnnnnnnnnnnnnnnnnnnnnnagttggtgattactctgggggtggagcaatcattttggagaagcatctggaaagttctatacaatttttggcattgtaccaacaatgaattagctactagtgttaattccctaataacacagaaatagttgccaaaaagtaaagaatctagtatccctatagcagtagacatatagagaggaatttcacaatatcaa

SEQ ID NO: 135935 - DNA, 1018 bp, Cannabis sativa
attagaagcaaattatttaaagattatggtatatctatattagttttgttaaaatcttttttatttaaaagttatatcgatttttttaattttcttataagttgttgtgtgttggtaaataaattttgttgtatagtatattattattcttagatgatatttaatttttattatgatatgtataatagtggtacataattttattaacataaaaaaaaatattttaatatatgtatataattttattagcatgctacatctatttaattattatttttatatattttaattgtatgattatttatgttaaataatatttaattagtttttattttattatatacaatggtagtatataattttgttatcatgatatatatattttaattgtggtatataatttggttagtcaagtatacatatatatattagatatacacatttttattattattattttttgtatatatgttttggtgaatggtatatgtattttttattatacagtatataattttttttaaataatttttaagttttattttctattgtacttttgctgacatgatatataattttattagcatcctatatttttatttttttatgtttataattatatatatatttctattgtaaggtatatattttctgttatatggtatataaattttattgtatagtatatcattttattttagataatacatgtttagtttttattttattatacataaagtgatatataattttgttaatatgatatatacaattttttttaataatattatattatttattttattttttattgtaggtatatacgttttctttgtatggtatatggtttttattgtctatattatatcatttatttaagatgatatttaatttctattttattatatataaattttttggtacgtgatcatattttaatggtggtatatataattttgttagcatgatatatatattttttgagtattaatttagtattgttataatttctttgtgg

SEQ ID NO: 135936 - DNA, 649 bp, Cannabis sativa
  modified_base (274)..(280): a, c, t, g, unknown or other
gtttgtctctcactctaaatggattgattcaaacatgatgttgatcgttaaagtaatctctcttgtgtagattgttaatgaggagaggaagtaatctctcttgtgtagattgttaatgaggaatgttagatgattgtgtgtgtttttcatgtaagtattgatcgacccaaataaagatcatacttattttgagtgtagacatacctatggtgataaatgtgtgacaattataaggttttgatgtgaacaatatgtacagtccaaagattgacannnnnnntgacaggatttattatcaatatttgattgctacgagtaccacttacagtaaatatctatctaaagacttgatattaatagtgtgtttatcttgagatgagatttgccattatttgaacttattgtgttttatgaatctttgtttattttggtctctttttagctcatgtttcagttatatctaccaacataaagttaattctcatgctaaatgagataaatttttaagtaaaaaaagagacaattatgctttcttagctatcctgtttcaataaaagataaagataaagataaaaataaaaatcaagatgttgcatatagaacactgttaaaaaaatacaaaatatattagatatgaaattatctataa

SEQ ID NO: 135937 - DNA, 503 bp, Cannabis sativa
tcttcttcttcttcttcttaattatttaattatgaacatgattattgtagttattatgtttgtgattatgaactaaatattcattttagagtgttgatggaactattttagattacgaattcaagtttttagattattctcatatttgtttatgcaattttgtgcttattatcatcttcttaatgcttgatcaccattaattagtatagaaattttaagttttacacttgagagaggtaatataaaatcggacttagaatcgcataacataagaaaagtgtgagattgagagattccactaattatatgagtttcacttaaagagaattatattgctttatgagtgcttaattgattaacattgaatagatatatcttgttaattaatttaagctaaatctatcatcactcgagagagattaatagattacatcagaattcttgaaactacaaattataggataaattgggataatcagtaatttgagattcatagtttgaaa

SEQ ID NO: 135938 - DNA, 540 bp, Cannabis sativa
catcataaaatcaaactctgttccggtgtcattattcttggctaaagaagccaaaatgaaagccctcaaaacccagtatgaatctctataaaagcaactttttcaacgagaatcatattctacagggtctcaatcaacgctctttggaggaaatacaaccctctttggagcaaatacaccatcagtaccatgacagttctcaaccatgccaaagacttctccgacatcacctttcttagtctcttcaaaagaagactcacttctccgacttagacggatgcttgacaaaaatcaacaacaacaaaaaaaaaaaaaccaaaatggggaagaaaaaggaaagcctagatgattctcctccaagagcatcctccctatcggaaaaagagccaaaccaattcatggcccaatgaactgtgcataatcctatttctgccctgatgcaccaaccagatgaagaattttataatcagtcttcttcctctgaccaagaagagaattttgaagagaattctgaaacttggtcccaagattcagatacta

SEQ ID NO: 135939 - DNA, 1693 bp, Cannabis sativa
  modified_base (1472)..(1480): a, c, t, g, unknown or other
  modified_base (1627)..(1641): a, c, t, g, unknown or other
aggtttgagattatctaaacatgtggcttgtggtatacctggtaatttacttaccctattgcgagcaacttactttagtaaaatgctgaagcatttttttaatggctaactctaaaggaagtcttttggctcctagacatagattttatttatttatggaacaattttaacttttccagaaaaagataaaagtcattaaaggaattccttaagaattaacagtgaaaggtctcatgtatgttttgtaatgcattagactaaacacctcctgttgagtggatgttatgagtaagtatcagtttaatccaggaaatgaatattggaagacaataaaagaaatcctaagatcgaggaacactatatgttagttaatataatggtattttttaattacccttagactacaccaaataaggtttctagacttgcgtcaatgctagattgtctacttatgagatggtgattactttgggggtggagcagtgatttttggagaagtgtaaaaaccaatccggagtctctaactctaccagttagactgaatgttaaagtggccagaaaggctgctacataattattcagtctatgaaaagttctataccatttttggtgttattctaataagagtaactactagtgttactttctgactaacacagatttagttgtcaaacagtaaagaatccagcacattaagaggagtaaacatatagaaagaaatttcacaatataaaagattttatgattaaggagatgcaatggtataagaaggacggtaattgaatacaacttgtcagaccctattacaaagataatactacatattacgcttgatctgcacatcaaggtgttcagattaattgagatgtacttttagtttaatattagtgcaagagggagtttattgggattttatgccttaaataaaactcatttttatataatcgaatatactaattaataaaagatcagaaattattttatgtcgcattgttcacatgtttgctttcacgattatatatttaatatattatttctattaactctaaaacatattgttattcacaattacagtaatgacataacagtggaaggtaattctaattatatgtttcaaagcttatgtcccatgattcaatgcactgaatttacactgatgtaataatcaacaataaagtttacttacaccttggataagtgtaatgccattttcagggtattggtaaagtatgctagtatcagatgtatggattatacattggattggaccgatattgaacttggtaaagatatatcataaacttacagttgtatctttctaagtcaaatcacttagttgatcttagatcaatagatcttaatcctaatgtggttaggttcgatctcaactatgttatttatgttcttagagttgttcgttaaagttgacaaattggactggtccaataattacatcttgggaacatggtagnnnnnnnnngtggaagcgctaatcatagatacaaaatctatagcttctatctagaaataaaagtgaaatgttaattttcttcgagcttggcttaatagatataaatgaaagatctaattatattagtttactgaaatatcatttattggaagctannnnnnnnnnnnnnnaaatacattgaggggtagaacggtaaattttttcctactcgatgtaaatcat

SEQ ID NO: 135940 - DNA, 1021 bp, Cannabis sativa
actacaaaatcatgtaaaatatctggtgtcatttattttcatttatttctgtagaatatttattacaaaaaaggctatttatttagttaacgaaaatctgcgttcgcaaggctaatttcaaccactcttatcctccattctcattaattgattgagaacccatagagagaagattagtttgtggaagaccatatacccatcatctcatatccaatggaattaggtatgtcttccatcttatcgaatcataaagtaatcttgataatctaacatgagtataagatccatgtgtatttctagatttaatttctaattatatattgtctcatcacaattgtatatcttttgataattagataaataaatctgcttctgacttagagatctagggaggaagacttagttgatagtattgcactatcaaattgcgctaattgtgttggatcattcaagtatgtatacataattattttcttttattattgtgttctagattatatacaaattagtttacatttttaaaaaaatactataaatgtattttaattaattggtttatattttattttaatttgtaaaaattttaaattaaatttaggagtataacattagattatcaatgaatatagtcaacactaagtagaaataaaaacacccgttgtaaaagttaataagcatgaaacctgttaggatcgtcgaagactggcctaagcccttacaaatttttttttgggcacttttctaaaaagtcacattccaatggagataatgtccattcttatatattgaagatctttcccatttctaatcaacgtggtattttaattgtagacccaataaaacttatattggcaagtattgtttattattagtcccttattaaataaggaaaatttacatgatatactaacttttgtcatttatttactaaaatactatcagtcggtattttttactttttttactgtatttttttataagtttcatattgcagtatattgtgttaagttttcactggtgt

SEQ ID NO: 135941 - DNA, 1194 bp, Cannabis sativa
tatatatattattgatatgtttatcgtttttccgcattacatatcgtttatatatatgctatatttcatatactatattatagtctaacagttggtatcagagcggtttaatctctactttgattatatttgattttcatatatatatatatatatacatatatacacggtgttcatatatatatatttatttttcgtatatacattcatattatatatattcatattatatatatacattttcatacgtatatacctatatacattcagttcatatatatattatataatttatacgtacggtatatatatatatttttcattttttggtatatttacatatatgtatatatgtttatatatattgtacattatatatatgttttatcgcataataatattcataatacttattttcatttatgtgatatatacatacatatatatatatataacataaagtttatcggtgtaaagtttgatttttttccgttttttattttttcggtatttatttcgaattctatatatattactatattcgtataatattatagatcgatctaagcattgaaaatcctttgaaaaacttaaagatggaaaaaaattttagttaaaacttttccggacctgattaattttgtgatattaaagttcatattttttccatgttttcgtgcataaaatctatgttaatctctttattattcgatttagaacattttagatttgaaaacacgtaattttatcgtcggaattctcttttccaatcgggtttgggtcgtgtccgtcgaacccacgtgcagaaaaacgggtcaaaatgacccggttggctgaagaagtcaaccccaaacaacgtgtcgttttccacagtgtggcacaacgacatgtcgtttttcatatgtggctactgtcgttttcccaaacgacgtgtcgttttccaagttatatttggctgctgtcgtttgcccaaacgacgtgtcgtttttcccctgtggaaaactacacgtcgtttttcgtagttttggcagcccttcagggtgaaaaaatgacgtgtcgttttatacatgcattttcaaccacctccagaatggaaaacgacatgtcgttttgctttttgcaaaaacgacatgtcgtttaggcagtgccattttcaaaaaaaaaaagaggaaaattccgaatttatttataaat

SEQ ID NO: 135942 - DNA, 531 bp, Cannabis sativa
aagaccttcgcaacttatgataggcaggatctcgacgtcgggggttcggtcacgacagagaatttccggaaggctaaactgatcctggggcaccagtcggtggaggactccaacctttccaggtcatctgcccgaacgtaagggttccggccgcggagaagaccttccgggatgagattattgccaccacggaagagaagtaccgagagtacctctaccagaaggcccaggagagggcttacactaaggcccaggcggctgctgggaggccccttcgcgttgggagcctggttgagagaaggggccagatggctgccaggagaccccttcgcattgggagcccggtcgagaagagggctcccaagccaaggcctaccgtccaggtgccgaatacaggggctcctgatgccaggacgtccggctatggtaagtcccctttaacaatacattacgtctcttctgttcgtgaatatgctagccttaggcctttagggttcgatgaacgtctccttaggtttaggatgccctcga

SEQ ID NO: 135943 - DNA, 984 bp, Cannabis sativa
  modified_base (946)..(959): a, c, t, g, unknown or other
ttgagttgtgattgattgttggttatgattattgagtatgtttttaggtcaaatctttgtgaaatggattgattttgctgctggaattatgaacttgtttaggttgagcttgaactttataagttaaagcatgaattttatgtgtgatgtaatctgtttttggggtttatagctgggaaactgatgcatggattaagggtttttgacccttcattaattgtttgtaacttgatgttatgatttatgagtttgggtgttatttgaggtgatgtgggtgaagtttggttgctgaaatcgtgtttgaagcttgttggtttccgggtttggaacccagatgccacggcatgctctgagcatgccgcggcccgcctctgctgatggaacctgggggttcgtcctaggtgtcgcggcatgacttgggtatgccgcggcccacctgtgagtttttggacagttttgagtttgaactttgaaaattcataacttttgtttccgaactccgatttgggagttctttatatcgttggaaagcttgtttcgagctttatataattatataaattttaaatgtcatgagattattttataagtttgaaatcaggggttaaccctatgtgtgaaaatcccgaatttgtgtgactaggattaccggcacctgatcaggaacactcggggatttagaatctctgatattgtaggacaacaagtaagaaagtgattagcacgtagagtatgcgcagtggcgcttatattgaaaatgatatgtatgattgtttagtaaccgagattagggttattaccctaatacgagcgattgatagtctagggtgattaccctagtgatatatgtgtgtaaatgccatgccatgttaaatgtaatgagatttaggaattatgcgcttaacgcataatcaggttggactcagtaaccataaccgagatgaannnnnnnnnnnnnntattgtatttagacgtgtgagagca

SEQ ID NO: 135944 - DNA, 1170 bp, Cannabis sativa
actttatatagaatagatatagcatgcgattgaagttttttaattttatataaaatatttatgtgctgtaattgaaacttatggcattgattaaaggaaaatttgaatttttttttttatatatatatatactagtgaaggatgctgccgatggcacctatcacccgtttttctctattatttttatcaataatatgttttaattggaatgttttaactcattaaaaataaagaaaaaaataataataaagcttaaagaaatatgtaagaaaaagataaaaaaaaaggaaaaagacaacaaaaatatataattaatttaacatgtaattataattggtacaaataaaataaagtacatatctcaagacatactaattactaatatataatcttatttatattgagaaaaatataaaaaagagcatggactataggaaatagaagagcaagaagtttgacacatgcaagtttttaaatcctataatctcaatagtttgtaaggaatttttaacgacctaaaaagtttaggaacataatttggcacatgttaaagtttaggagactaaaattctaattagtctttattttaaagataaaattatattttttcttaagttctcgaaacaattacaaataataaataaataagcaaaaaaaaagtatataaaaaaaataattttatgcaaaaattaattttttttcattaaaaatcgaaaaaaagttattaaaagtaaacatacaatatttacaaaaatatattattatattcaagtattatcatacaagaccccacataaattttacaataaaagttacttatgattttgaaaattttttaatatataattgtctaactaactaaattacttaatccatttcaacaaaaggaatatatttatttcaagtttatagagaataattaaattatgaaaggcacatatctcaaatttttttatgtatatccaattactacatgtgtattttttaaaataaactaaataaattgataaaaaaataaaacactaataaaataattaattatatattattaataagacacaaataaaaaaaaaaaaacttagagcttctatagattggaatagttgagacttttccttagataaataaaatctgtgtcaagaagtcgagaagcttctatagattgccatt

SEQ ID NO: 135945 - DNA, 994 bp, Cannabis sativa
gaaggcaaacgcaagaaggaagcaaacctcggtgttatgctgatcaagaaagcatgagtaatacgagaagttatcaacctcggaaacgacatgggaaaggctccagctcggtgtcagagttattgttgctatcccagcgagatgcaccttgtagcgtatctgaatccatgtcaccattgatccagtaaaagcggataaatcacatctgcatgattttcaaataataataactgtatttatttacatggtgcgtaattaaagtccacaattttgaggaaatattatggtgggattcgtatctgattgtaattaactgcttccctatattactataaataggggcagaatgtactgaaaaaaggaaaaaaaaatccttgagagaaaagaacctgagtttgtattcgaataatctaaataagattgactcatggactatgtagaattttaaccgtaaaatcatgtaaaaagcttcgtgttttgttttcttctttatcttctataatttctttacaaaataatcatgaaataggctttattatcggaacaaaaatctgcgttaacaattagggtatttatcaaaattatttttttaatattatttcaaattatttattataaaataataagatatcttgtcatacatacttcttgagttctagatattttgttgaaaaaattactttaaagagaataatttgacaagagaatattaaaaaatatttatttttactaataatttttataactaataacttactaccatattagtttggatttaatggtaatgagcaagaaaataaggtcatttttgtaatttaagaagcccaaaacaacattccctcttttatatagttatacattacaaataattcattttttttactaataactcactacaatattagtttggatttaatggtaattaacaaagaaaaataaagataattttgtaatttagtgtagcaagcccaaaataacattccctcttttatat

SEQ ID NO: 135946 - DNA, 806 bp, Cannabis sativa
aaatatgtgtgttagctctctgttatgttgataattattgtgggattaattctggtagttgtgtttgagcataattttcgaagctaaaaagtgggttttctgggtttttaaacccagaggttgcaactatcataggtttggtagcgaccatgacaatggcagtttattgattgttttgggtttttgtttttgcaataacttttaactcgggactccgtttgggacgttctttatatcgttagaaagctcgttccgagctctatatgaatatatgtaatttaaaggccaattttatatattttgtggaaatggatttagggattaaccctatacttgtgtatcccgggattctgactaggattaccgacacttggttaggagcactcaggaatttgaaatctccatatttgctggacatcaagtcagatagtagctatcacgtagagttatgcgcggtggcgcttatatggaataagatatatatgagtaactagaaaccgagattagagttattactctaaagtgagcggtttattggcctaggattattaccctagtgaattgttaataagtattgatatgctatgatatatgtatgtatattgagattatgaattgtgcgtttaaggtataaataagctagacttggtaaactagtaccttgagcttaatcaaatgtggtctagggttattaccctagattattataaaggtaaaaaagctatgatgtatgataatattattgatccagtgaagacatgagttagggttattaccctcagtagatgttattttgagcatactgt

SEQ ID NO: 135947 - DNA, 745 bp, Cannabis sativa
ttttttctcatgatcatgtaaattataattatttaagacatcttgcaaaattttaaaaaatttgaaaaagttttagacgccgaaaactgtgtttaaacagtgtgttgcacgagtgactattttattttatacgcttgtaaaatagacagtttgaacattgttttctatattgtaaattattctgaatttctaagaattttgtaaaatatcttaaatacctataatgtacatgaatatgaaaaataattagactaaaaaattcttctgaatgcagaaataagtagaggaggcatcagtatatcccctttaagggggtacattgtagaatcaccctatttatttatttatttattttttaattattatgacacattttttaaaaatataatgataagttttttcattttttattgacataatgtgcactagtagacattgacatattaaaattatattgttatctattttatttttttgttgttttaattatatattacttattatatcatatagcctattttaaaattatgtcttattatttctattattaatgtaactatttatttaacatctaaaaaataaattgtcatgttaactgctaccaactcaaaaaggaagagaaaaaaaagttataagtatgaagttgttgttagaatactgtaaactcagaatatagccctaattaattcatgagaattaaacaataagattaaagaatagcggaagcgtaccggagtccatagaa

SEQ ID NO: 135948 - DNA, 692 bp, Cannabis sativa
ggggacgggccttaaattgtctcctcttaagaaaaaatataaattctcttagggaggggtaaaaggactgtaaatgtaaataaaataaagaagaaaaaaaagatagtgataataacagtagtggttaacggttgacttaatcaatgcggggtggaagacgaggccctctgcgctcctccagcaggacatcaagtctcttcttcttctcccagaagtggacgagaacctcctcaggctttggatagaagtcgagcttgaggttttggccatttatctaccaggccacaaagacgccatcatcaaagcgcttggtgcaatgcttgcagacaatgggggccaggagctcatccctttttgccttcttcagggcctgatctttgaaatccctgagctccttcaccttaacggtcaagttggccgttgattgcaagtcagcctgatgcagctcctccatagacttcagcttggcagtcagatcttcaactgcctccttggcctccctcagctcacgcctcaccttagccacgacctcatcccgggtcttcagctcctctgccttggcctgtaacgcctcctgatgcctcctctccgcctgagcctcctgctgctaggcttcctcccggaatgccttcctctcagccgccagatctctcagactcttcatggcctcgtccatgcccccaaactcggac

SEQ ID NO: 135949 - DNA, 557 bp, Cannabis sativa
caagggtatattgtctcatttgacagtgatcattgttatgtacttaatgatgataatcaatgtatcttacaagtatttcgatctaatgataattattataccctaacccctgtgttcacttgtcattcagctatcaacaacaccattgatttgtggcatgaaaaacttgaacatattaattacaaaaatctaaaaaaattgtcaaatccagatgttgttcgtggtctacccaaactgggtaaagaaagtgttggtaagtgtgaaccttgtcaacttggtaagcaattaaaaatcactcacaaaagtgtatcagttatcaataccatgaaagtattggaatcacttcacatggatcttatgggtctaattcaagttgaaagtctgattggtaagcgatatatttttgtgtgtgttgatgatttctctcgttttacatgggtagatttttcaagagaaaaatctaacacatttgatacttttaaaacacaatatttgagattaagagttgaaaaatgatgtaacattagtaaaattgttcgaattcagagtgatcatgg

SEQ ID NO: 135950 - DNA, 832 bp, Cannabis sativa
ctctctctctctctctcatctgaacagagttctctagctcctaatttctggtcatgtttctaaaggttgagtcaaggtggtatttaagggtgttcgttggatcacatctaatggatttggacccaaccgatccaatcaaattatttattggatattaaattttatcatctgatccgatccaatcaaattgtgtcatccgatccgatccgatccaatagatttattggattggattggttccaaccatttgaggcattgactggttttctattagattgaattggatctatcgaatctattttagttactatttaagttgatttaagaaaaaaatatataaaaaaaagtaaaaaacatatcttaaaagttaattctcatgatctcataataattagtttagttcaacctaattctcatgatctcataataaaaccactaaaaaaataaaatttattcaatatgcattaacacttttataagcgtttaggaagatgataattaatattttagatctaaggttttttatttttaatctcatgtgttaaatgtatattaaatcaattaatatatatttttaaataaaatatattaaatatataaatttataaatgtattttaaaaaatatataaatataactggatgagcattagatgataattggatcggtttggttggttatccattgaattggatgtcccatcgaacaaccgatccgatccgattagatttttaaaatttacatccaatctgatccaactgtgattggatacccgatctattgaatcggttgggattgaatcggtcggatgtaattagattggatgactttct

SEQ ID NO: 135951 - DNA, 948 bp, Cannabis sativa
  modified_base (57)..(64): a, c, t, g, unknown or other
gaataataatttataattagtcaccacttttttaattttagtcacaagttttgttgnnnnnnnnagtaagattttttgtagtggtagttaactatttaaactttatttttggcactataaagtaaactattcgcaattttctaaaaatttataaataattttaaatagctataacgtacacgatcataaaaaaaataaaactaaaaaactatcataaaaatcgaaataaataaaaatttactagaacaaccttttaagaggaatctactacaaaaattttctataatttatatataaagatataatgagtttcttcttttagatttattattattattttttaccaatttattaaactaattgcaaaaagattcaattattaatgtaatcttaatcctactttaagttaggaagtactatctctttctttattgaattaacgaaatgagtaaaaaacaccaaatgtacatcttgaaataatctcggaacaaacaatcaatttcaaaatgttcttttttttcttgattcataggcaaatatttttaacacaattgtacttctcaatacatgacaagagcaagtttcatctcaaataaacaagaatttttcgctaaatccaactctcactcgctaaattgagctatatctctctttcttttaatacttgaatattgattattacaaccaaatttactttagctctttccaaccttatcacactacaacaaaaagtgttattagaggcgagaaaaatcctaatacaccttgtattagcagtagagtaggagcctcgctattattaatagtttaaaataataaaaaaaaaggctattataactagggtacattattcaatccaatctaattgaaccgaatcgatccaatttaatctaattacaaaaaattggatatccaattacaatgagatgttaaaagttggattctaat

SEQ ID NO: 135952 - DNA, 2206 bp, Cannabis sativa
  modified_base (133)..(139): a, c, t, g, unknown or other
  modified_base (1660)..(1664): a, c, t, g, unknown or other
gttatgatggactctcgagtcttgctcggccaatcgttttgcaggatattatgtattgtttttaaactttttgactatcatgctctatgcttctgatgtctttttcctctaaccatgttgtttttgttccgtnnnnnnntgtctcagaagatgctcgatgctctaaagaagagagttggaggaagctcaagctcatctcccctggccaagaaatctaggggcggtgaggcgaccccttcgaaggaaaaggcaccggccggggaggttatcgacctttccgaggagctaactgttgcagatccgtctactccaaaagttgctaagtccaaatattctcgaggaggaagctcggataggcctgagcaatcaaacggtggatctaagctggccaagagcgtagttgagcagatgcgggctcctactccacctttgctagtgcatcccgaggccaagaaagaaaaagagatgctcgcctattacatgaaccggttggttcctgaggtaagttagcagctggtcggggctaacaatgaatcttctctagagctgctgatgggaggagtcttgagggaattaacaagggtaagtctttgttgacagtttcctttaatcctttttacttagctaagattctaaagttttttctctatgtaggctagtctgaagttggcttacacttaatcccgagctaaatctgttgcctccaagaacgctgctatgtccaacacaatgaggctggagatggacttggccaagaaggacgctgatgatgccaaggttgaacacggagatgttcagatggagcggagtttactaaggacctcgaggcttccgaccagcatgaggctaccattggcactctgtcggcagacgtgaatagccttcaaaaggaaaggggagttcttcgaattgtcttctatcggctggaagaggagaagaacaccaaggaggagaagcctacaaatgagattgagaagtataagtcggaggtggcgaggaaggaagaaaaagtacatgccttagagacaattggtctcgagattttttatgacttttggaaggctaacccgcaggtaaatttcaattacctgggcgaggccaaagacatgtatctcgagtactgtgttcttaagtggcttatggtgaacctgatgcgactgcttcttcttctggccagaatgttgatgtaccttccgaccaacccagaagatccgaactgagagcctgggaccctagttgtttaattacatctctttttatacttctcttttatatatcttattcggccataaggctttttttaagacaccatgaccagcaaagcggtcattaaacttggaattatttttcattttacagagaacaggctgaccggggagcttttaatcctggtattacgtgcttttgtgaactttagtgaattgcattctctatttataatcatcgtgcaattgtgtttgttttgtctttaccaaatgctttgtacaggtataagtgccccccaagtgaccgagcagacttatgactcttagtcacttgtttttttacaagtgtacttttttattttttccaagttttgggttggaacaaaccttttgtacgcatcggatagtaaattagcaacatgttatgaattttgactcaatttgaattttgaaannnnnatctttattcatttattgatcgaaggtgtttttgttactgtagtatcttacatcaaatctatttgatctgatttgatcttttagcttaacatgaaataaaacaaattgaagaaatgagaaattgtactttaaatggtggtcatctaacctgagtactttttcatttttgtcaaaacctttgagcgtcgtccgcctagcaggccattcacttacaagtaaattttctttcagtatataatatgatcatccgacctggtactttattggtagtattttcttaaatcttctccattccaataccgtggtactagaacaagttgcattatttcatcatacatacctaatttgtatgctccagattcgaggaattccacaacctgatatggtccttcccatttaggtccgagtacacctgtcgtactatcttttgtgtttagaaatacccttcttaggaccatatcttccacaaataatttccaagccttaacttgtttattgaaataccgagctactttttgttgatgggctatcaactttaagtt

SEQ ID NO: 135953 - DNA, 862 bp, Cannabis sativa
tacgagagcacttgaatcggaagaaacttgaccttcgctaacagcttggtccaaagcaagaggatccaatccaattgcggataaatgagctggaggaaaagttctagagatatcaagtgggggaattaggaaaatcatctggatacgactctaacaaggagcttgagctgtatcacccagatattatgaatacctctttaccttcaggattcaaaaacccgcatgtcttgtcctatgacaaaaccacagatccggtctcgcatttgaataactttaacacgataatgcgaacaagtaacgtgacaaacaatttacgctgtattttgttccccacctctcttgttggagcagcgagtagctggtttaacaagttcactcatcatatattttcctgggagcagctatccagggatttcaagaagcaatttcaagccgctagggataggcgacccgaagcgacctcactcaccaatataaagtagcagcctaatgaaacattaagtcattttagcacggctacctctagggttaaaaacttggattacagcacataacttagagctttacaggcggggatctccactgatccactaaccgtcgggggcgatttgtgggatgatttacaaggacgtccgataagaaacatcaccgagttcaacgaaagagctcaggtgtttgtccagaaggaagaagcctgaaaggaaatgaacttgttgaaaataggctcgggaagtaaacacagaaatgtctcaagagggaccacttccacgagaattgataacttgggggcttctggtctaaaaagaaaggacaaaattagggaaccgtcgaaagatagaagaaaacaaaataagcatgacaa

SEQ ID NO: 135954 - DNA, 695 bp, Cannabis sativa
aagttagtagtggaattaaagagcccaccagaaattgaagtagaagagatagtagaaacgatggaactccttttgcactcaaaatctgaacatgaagagaaggtagaaaacttagaagaatcagagtattccccatcgttggataatgaggaactagaaaatacagaactgtctccaacaacaaatgataacaagtcagatggagatatatataccaaattatcatttcgaggtagagatcgaggaatcagagtcagaaaataaaaatttatcggcataccacccatcgccaggactagaagtctcagtcgaaccagcaccaatttaagaggatgtgggattggtaacatattcagaagaggacttggagagtcagtagttgagtcatgcatggaggacaattagctattgaaattttttttagttgtttagctatttagtttgtttctttacttttcacatttcaattttcttagtaagaaggaaaggaatttaacccttttctcaaaaatttagaatttatgttattaagaattcataagactttttttttgaaaaaaaaatgtattatttttgtttgggaacattaagtttagatatgtgcatagaatttctcttcctagaattaaactcttttgtctttattaaatcaatcttttcaatgtttaggcttagattgtgagagatcacaattg

SEQ ID NO: 135955 - DNA, 1038 bp, Cannabis sativa
aacagtgagatggagctcgacagtgattgtacatatcgcggcagtgcaacctgaagggtctcggtctttcaacattttgagataaaatttagttgcttgttgtttgtaaaaaaaaagtatagtaataatatactagtaaactttgtattagtaaaaatactttaaagtgtattttgaaattcgggatcccgacccatatggttataaagttataatactataaaattaatctttatgtttagtaaattttgaatatgggcgttacataagaataaataaagcgtaatttattaattacggagattatattggaatatgtgggtatcagagataccataacttgattaaaatatttttggggctggcaattttggaacttgacggggagatcagaaatgtcactacaataaaagatgaattgaattgaatttcataccggtctagtttagaattttgtttaagttatcgatttagtggattaattagggaatgactaaaatacccctagaattctctaaagtttaagtgtgaagggaaggggtagaatagtctttttgtaaagtaaatcttttgtcttttagtgcctttttctaggctgagatattactaataataagtttatattttatttaagtcttatgtgttgataaatgatgatacaacttagaaaatttatgaaaaagtcaacgcaagttccttgtcttctactctcttgcacgagccttggacactagctgcactcaatttcttcaaattattggcagaattaataagttctagggttggtacaagcttgaaggaaagtttttcacccttttctcctagtttattcaagtttcaagttagatataagttagggttttggtgatttcggggttggggtgctaaactgaagttagaataagtttctaggcttaaattagagtttgtttaagatcacttggttagaatcagctcagttagggttgagttagaggaatttaggatttctaaccttaaattgtacttgactatgctatattgattaaattgatgaat

SEQ ID NO: 135956 - DNA, 952 bp, Cannabis sativa
gaagccatacgacaggcctaggcagggtatatcaatagcaggcagtcacaaggcacctaacagcctcatgacccactatacaacaggcccaggcgaggcatgtcaatagcaggtaggcacgaggcacccaaaaacctcatgacccactaggcgcacaagcaagcaacaacattgctgcctagacctctagtggtcaaaacactagaaacaagcacaacaccaacatctctgggaggaacaatggtaaaaagggaaagtttgacacttctcccatgccacagaagaacaaggcagagaagtacacttgcttcaccttcctaatagagaagcctgagaccatctccatggccaataaaagaacagtctcataccgaaagccctttccaataagaagggagatgggcaagagggacatgttgatgttctatagatatcacaacgacttcggccataacactaatgagtgtcagaatttgaagagagagattgagtacctaataaggctaaacaatccccactcgcatcgttatgtgcaagacgaccagacctaggtgcaaggaggtcaaaatggagatccaatgccaccacctatggcaggacacctaggggtcataataggcggagcccacatttctggtgaaaccagcaaagctagggagcactatactcagacactccgtcatgagcccaaaggcaaagtcctagatgtcgaagactggagctctaagaaatagaagcccattgagcccacaatctcctttggcaaagaagatgcaacatcggtcagcttcccgcataatgatcccctggtcattactatgtaaatcgggaatatgaccgtggttagatgtatggtggatgacacagcttcctccaacattcttttcaaatcaacatatgaaaagattgtgtaaagtctttttttttggcaagttagttgacaaaatatttt

SEQ ID NO: 135957 - DNA, 556 bp, Cannabis sativa
tatcactaaattatgacatgtattaataaaaatattagtattattattagatattatatattgttctatttgaggtgatgtttgttgtccccctctatgttggtgtatttggtctatctttggaagtgtttttaaaggtttttttatatatataattattatttaagtaaaataaataaaatcaatatttaattacattaatagtgataatgactcaatcttaagatatgttaactaagtaattaaatataagttctacataatttaatataatatcgcctttataaaatattactaactattcataagatactaccttataatgatgctaaactctattaatgcctgaagtctctctaataataaataatgtaattggttttagaattaatgttgtgaaactaatatccatctatatatatataaatcttatattaaatgtaattatttaacgaaaattattggtttaaccgtttttttttttttgttaaaattaacgattaaaactaacaccgttagatgtgacagtcagtagtcctgtgatccgtaaagagaa

SEQ ID NO: 135958 - DNA, 543 bp, Cannabis sativa
cattaccattactattacattctaccaaaccaaacatcaccttagggtttctaattagggattcatttatttgttgggctgatctaatctctttgggcctaatggttggttcattatttgagtaaccattgtcagtgaagagtgaagagttttgtaactcttgttggacttggctcttggggtattagattattgggcctaaaatagagatttgaagttttaagtttttaataatacaatttttgttgtggacgcatatacacaacaaataataataaatactaatagcaatagtaattaatttgttaataataataataataatattgtacctgctaattaatgatattctttatataagagtaaagagttttgtgtaactcttgtttaacttggttattgggctattgctcttgggttctaataaatgagcttctgtcattgattggcctattggtaacatatcccaaatacacttaagttaactctttctcttttggagacaaaattcaaagatatgaaaaaaaaaaaaaaagatcataa

SEQ ID NO: 135959 - DNA, 626 bp, Cannabis sativa
  modified_base (151)..(153): a, c, t, g, unknown or other
acaacaagtattgtgactaaaaatatatttaatcacaacaaattgtaatttttgtgactaatacatttaatcacggaacttttagtcataacatgagaataataatttataattaaccacaattttttatttttttatttttagtcacaannnttattgtgactaaaaataaaaatatttatagtatattttgactaacaaaattaggtatatgttgactaacaaaattaggtatttatgtagtagtgaattcttcaacaatttccaagagttttagaacgtttataggaaataattttagcaatgcttcctatagtataatgagattaaagagttgaaaggagcaagatactctttaaaggtatgtaatctaaggaaaaatactaaaaagtactattagtatatctaatacttttttcagtgtaatattactattagtgtaattaagtatcaagttctattattttatatagcttaagaaaatagtttttaaagaatatcgcaaatcaattgtaaggtgtcacttatagaaggtattcactacaaaaaattgctacttttagtgacaattttttagtcacaatataatttttttatgactatatgtgacttttagtcacaacaaa

SEQ ID NO: 135960 - DNA, 913 bp, Cannabis sativa
ttcttatattgataactaatatttagggcataaaacacaacaagtggagtgtgagactagagagagggagaaagatggcgtgaagagagagagatgagtgagaaaatatcaatcctattttctctcttttcagtttgttatttgtctctattttgtagcttgtaggaaagtctatttatttatgataccatgtatcctatatatagtgttataaataaagtcttcaatattttattttaaataaaagataaatacttaatttaatttgaattcaaaattcaaattcaaacataaatatctaataatcaaatattaaaatatcagtagatcttttatttaaataattattcatttaattaaataattatttcataatatatttaattaataaataaaagataattaacttaatttaatttaaattattttatccaataacacagttaaactaaattaatcatgcgtctttacatgtcaccctacacgtgtgggtcatattttgagatccaaaattgatttcttaattttgccataaataagatttattatttattctgccaataaataatagttgattaattatcactaatatcttatttcacaaggattaaaataaatatttttctcaaaaataatatatttctctttaatttcgttctttaatattatttaataatattattatatttaactaattaatatagttttattcaataaaactaaataattaaatactattattatataattcataattgtcataattaatcaaaataataattttataagttactattttacctttaagactttaattcgcactcaaaatccattcatcaaataaaatattcccatgtacagtgttgtatagaggtgacttggggatcatggacctatatttcaaagctccaat

SEQ ID NO: 135961 - DNA, 956 bp, Cannabis sativa
taaaataaattccaacagtattattatgtattgttattgaatttatgttggacttttttaaacattagaattcgtggtattttatttttttgataattattataatttgtggcatagctggaaggcctaaaattgttatgaactaataaaaaaacataatcataccaataaaagaaactagttacattgttatcttaataaatacatctatgtagatagataaatatatataagaaaaagacataattgttcatgctaaattttggtaaaacaaatctacacaccaatgctctcttaatttcttcatattgttaacgttcacattatcaaatggaagatttagcattttatgctcgatgtgctctattacatacatcccgttgtatgagacaataaaaagtaaataaataaaagtatgtaaattaaattcaagttaaataataaaaaatcaactgtaattaagttaccttgattccgtctgtcgtacaatgctccagtcgatgacttttgaactaaaatttttaacccggctctctaagacggtcaattgagacatgatgatcatttcatgattctcgaataggccagactgcagcatcaaggttgggaataactcttcccataatatcaagtgactcttcaatttatctggggaaatcaatccaaggctcgagtcaaatatgctcagcatccaacgatcaaggtctgcctctaaagtcacccaatgctttgcactatcgaagaagagggtcatatatattctctccttattcttccaaatgtccaaggattgggcatcatcccctcgaatcatatccaatatgtcgtcatcccactaaaagttagaatggtcatccccgcagcttgccaccgaccaataactcctgatgggaaaatgtgaggcatgatgacactgttggaaatattttactaagatctagatttactaccaagta

SEQ ID NO: 135962 - DNA, 775 bp, Cannabis sativa
gctactaaaaaaatattattttcccatgtaattacttactattttgccaaacaagatattaggaattcatatgtaattaccatctcatatccaaacaaaccctgtattttaaaatatagtgtaattaccacactgtgtaattaccaccctagtaattaccatacttagtaattacacagttactttcaaacacaccctttataatataaaatatagtcttgcattttttgaattaatgccaatctttcaatagaattatttttaattataatttattttcattgattgattctatttataaaataactttatatatttatattagtggaatatactaacaatttaccaactagttagggcctatattatttcatgtaatactttctaataattaattttttctcagcagagatgcactttaataccaataaatgagacattgtctgtcccaataatcaaaaattcacacatgtcttcctaattaattctctattaagatttatttggatagaaaaaaccttcattttttttttcaaaaaaaaatattcatctttttgtttgagaatttcatgcgtgccttttattttcttagggaagttggaaaacataacttaataccaataaataaatcaaataataagatctcaatgcaatacatatacttaatatcatttccacatctcatatatacatatatatatatatataaatacatataattttgtaaattttcatatctaggtttggattctgtaatgttgtgaatgatgttcaa

SEQ ID NO: 135963 - DNA, 594 bp, Cannabis sativa
ttagcaacgagctgtacagtacatataaaaatcatgtaatacgcctatgctagttagggtgttacacttaacctctacctcaagttcttcctccctagtcttcttgtccttaacctcatcctccaacctgtgaagaagagtccggagactctctctcgtcttggagactggtaatttcctgagacaaagaagcattatctacttcaagctacacggtcgatggcattacctgcagctccttggtcagttcggcaaccctggtctcaatagcaaggagtttcttattcgcctctccaagttccgtcctcacaacctcgagctgggtccgtgcatctttagcgtccttcttggctaagtccgattcccttcgcattgtgttagaagtggcaaggttcttgacagcgaccgacttggcgcgagagtatgcgtaagccatcttcacactagtttgtacggagaatgcattaaaatctgaactatccaaagaagaatgaaataagagtgatagagggaacttactcgagaaatttccttcaaaactcctcccaagaccagctccaaggataactcactatctgccccggtcagttgctc

SEQ ID NO: 135964 - DNA, 693 bp, Cannabis sativa
agatgagtgagtatgaaaatgattttcaaataagatgtgtaaaataagattattaagatattagaatccacaaaatgcaagttcaataatatttataagtacattgattcacaaattttatatataattgaaataaatcacactatattttctaaaatatatttctatttaagcacaagtaatttttaaaaatataagattttatttcacttatacaatgtataattctaagcattaaatgtgttataatttactgaaactacacaaaatcaaagaaattatgtttaggcaaaatataatacttatgttctaagaattagatgtaaataatttaatgaaagacatttaatcaaagagtattatatttttgcataatgaagaactaagtggaaacacgctttaacaataaaaaatacatgatattgaagataaaaatgcacatttttaataagaaaaattcataaactttgtagcataaatgggaaatcaacatacaaaaataaacactatctagttacattttgcttcatcatcttaataatcttgaaaaaaagactagaaactcataattagattgaaaaaaaaaattacaaaatggaaacatacttgacatgctcttcaaaatataaaaatgatagaaaaaaatagtaagaaggaaatggtagaaatatgaagagtgtggaatggaaaagt

SEQ ID NO: 135965 - DNA, 528 bp, Cannabis sativa
ggccaacaaggaacccataatatcgaaacttggacaatcattaccaacttgaaaatcagtacatgaaaaagcaacatattagttactaaatcaacaaaacaaactacaaaagcaaaataattgcaaaaaacaaaataaataaaaaacaagaccttatccatgcaatcctcagcacctcaatcaccagcctgatcagcaacttcattaacaatagcatctgatatttgtcttatttcctgaaaaaaacaacaaaaagatacaaatatataataaaacctaaaaacacaagtaataatacatttcaaaacaaaaaaaatatataaaaacaccttataaacttcagcaccatcatctttaacaccaacaaaaacatcaacatctgcaccattaccctcaccaccatcctacaatgacaaacacatacgaaaaaaagaatacaaattactaacaaaataaaaattgaaaaattattagaatggaaactaaacattatattatatactaaaataaaataaaaaaccaacataa

SEQ ID NO: 135966 - DNA, 738 bp, Cannabis sativa
  modified_base (567)..(571): a, c, t, g, unknown or other
taccagatgagtctggtgttgacccatctgcagcatcacaggatcctcctcttcgcccgtcagcttctattcccagcacctcagaggctcgcaaactagtataccctgccattttggcaaggttggagagtgtggagagggagcagattgctttgagggaagggcagaccgctctgctaagaggacagacggctattatggatcagttgaagaccataatgagactcctgcaagatcctggaaggccgacaccagatacacagtcacagccacagccacagccatagccataaccagaagaagaggctcagtcaccagaaaatgaaatcattctcccaaatgaatatagactggatgatgatgatatgttctgtaaactagagaacacaaatatcacaagcatcggggatactaaggattctgaggtacaggtgttagagaaagctccagaactagtggagaaccggaggaagaggaagcgacctatgtggttccatgagtacactgaaattaaaaagaagtccagggcatcaaagacacttgtgaattcggacccacttagagtgnnnnntcggaagctgctcaggacttttcacagttgggttctcggccagattgggaataagtacccgagagagtgctttttcggtagacacgatttggcttggttcctcgaactacatacaccgaagacatggcttggggatgatgtaagtttttaagacttttttacttctt

SEQ ID NO: 135967 - DNA, 565 bp, Cannabis sativa
tggaaaatatggtattattgaaagaagaataactggttgaaataaagtgacaaaattgtaactagagaatggaccaatatgtggctggccttagtgtgaatttttgcccaatattttattcttttttaatccaaataattcaaccctaagccctagttaaaacactagaaaaggaacatgatgctctcatcccagctaacacttttcaacctcccaaaatctagtttctaactctgttcgacaactagtagatgagagacaccttctatacagttttcaagcctccttcattgttcttcatactcgagtctatagtgatagagtgccatgccaacacatagcaagtcaagtactcaatcatagtgagtaagacgatagtgactgaacccgaaggagagaaagagatccaggctcagatcttaataatactctgcgacagaaaggaacaaggattagagatcagagaaaaaagagtcaaattattccgctgcagccaatgtaagattttctaaactcttatgtatttaatttcattgttttggagatattcatatttaggatgtta

SEQ ID NO: 135968 - DNA, 1002 bp, Cannabis sativa
ataaaaacttaatttttcctaataattgggcacagagcacatcaaagatggcagtaaagcaaagaaaattattagaaaaaataattgaaagcatattgtgttaaatataattgaaagaaacaataatacatatgatatttgtaaatctagagactacatatatgagatatatggaaagaaagattatatatatatattcatatggcatacatgaacagccccaaaatcattatttataaaccaagagtattaattaccaatttttttcagcaaagaatcaaaaaataaaaaaggaaagttatgagtaaatcaaagaaaaagaaataaagaaatagtgtcaagtaataggaatgaagactgaagttagtgaagctcacctcaaatatggggctgccactggaaatggtggagaatggagattgtgttgaatgtttgtgatagggtttgggttagggttagggttaggagaagggaaagtaggtaggtaggtgggccgggttgggttgattgggccattgtgggcagcccgtgtacaacgtggaaattgcatcttatacccattttttgttaacccattttatttttacttttttttttatatatatatttaatttataccttcttctatttgttatatctcgattataattttatgtaataaaaaaaaccttcctcacctacatgaacagtacccttatgtgaggatataattggtaatggggtacatttaaattgaattaaattactaattttctatatagttaattaatacatgtaagttgtaagttttaaggtacaaacaagaaatgaaatcatatcataaattaaagatttctcagtcacaacaacaacaatactagtaccccatttactaataagatactttgtttgtgaacatgattatacaaacaaaacacaaggaatccaattcaggatgaattgcaatttgcatcaacatcagactctagtttgtctctagtttcatcaaaccctgcatagaaa

SEQ ID NO: 135969 - DNA, 1265 bp, Cannabis sativa
  modified_base (145)..(148): a, c, t, g, unknown or other
  modified_base (1212)..(1214): a, c, t, g, unknown or other
agaattattatccccttgggttataaattctggatctactaaccatgtttgttttcttcttatttcagatccagctgcttaaacttggattgctatcctaacgagttaagtcggatggctggacagaagggtggagattgtccannnntgaagatgaagctcggaatcttcttttaataatttttgaattaatttttttttaatttatgaacaatttgatttcaattattggtttgggatttttattccttatttttcatattattgcagacaattcattatttttttgagaatattataataaacttttttcttttagtaaggaattgaattcatgaattgagcttcatatttctttatcttgtgtatgccaataccaattatatttaaatgtttatgtgtgtttgtattttattacttatacaaaatctatggtatattcttctctgcaaagagataataccatataaacacttagaatttaaattcaatgtttatgaataattgttaattcttaaacaattattaagattttgtttaataaaaagatcttttgatctcataggggtggaagaagttaagaataatatatgtaactcaacgattttttatatcaattgaactctgggttatattcataactccacatgatctctataacacttaggggtggataaagctatttacgtgtgtagttcattttgaactctagactatactcaatacaccaaatatctctatggcacacatattttgattaaacataaatgtaatataatgaacaaattagcaaattattagaatttattcttgatcctgtattttgttccaattaatatgttactgctgtaatagtaattgataccaataaagttcttggacatagtatcacagtaccttatttaagtgggggaattttaaaattctaagcccatctttatttggatgacacttgtgataggaactttagaattcaactgagaaagtaaatctaaccattcatatgcataaaaatgacttatcaaaattttgagaataagatagtagaattttgcatagtctattcgaatgacttaggtaattaaccctcatgaaatgattttatggtatctgtaatgattacttaatcttaatcaagtattttacattaatgtgaatactagattgctatattgataacttagtctagaaggaacttacagtttcagactnnnataatatgtcacaacaagatatccatagaatcaatagtaagaggttaaatg

SEQ ID NO: 135970 - DNA, 1729 bp, Cannabis sativa
atcctagtatcataggtttgagatcatctaaacctatggcttgtggtatgcctggtaatttatttactcaagtgcaagcaacttactttagtaaaatgttggaacatttttctaatggctaattgtaaaggaattctcttggctcctagacatagattttatttatctaaggaacagtttcaaatattccaaaaaagataaaagtcatgcaaagaattccttaagcttcaatagtgagaggtctcatgtatgctctggtttgcattagaccagacacatgttgttgagtgggagttgtgagtaagtattagtttaatctacaatgaggcagtctgtagtgctaagcggaaagaatttatcgagttggtgcagagtgagggtatatcagtaacagaatacacgacaaaatttgattgtctgaccaagttggcttcgggtattgtgcctacagacttcagcaagaaggagaaatatctagtaggtctaaatgtgaaaattatacacaacctgctgattactacaaatgaagcgatgtcatatgcagatatggttgaaaaggctctgcgagccgaaggtgcgataaaatttcttcaggagccccgagtgactccgagtgttggtgggacccccactcttcctactcttgtttatggtagggtggtgattccactaactgatcagaaaagaaaggctaacccgaaatctggtggttcgggacagagcaagcggttaagtgggaacaaaggcagaggtggacgccagggttattcttaccttgagtgcccatgttgtaagaaacatcatccaggagagtgcaaccggaagacatgcttttagtacgacatggtagggcattttaagaaagattgccctcagacaaagaaagaagagcagaagctagaggcaaaacccgtacctactcgagtgtttgctatcactcaagttgatgctgcagccagtccttttgtggtgacatttcagcttcttgtcaacaactcctattttactgtgttatttgactcgagagctacacactcatgtgtgggaacacgggtaattaatatattaggtaggccttgtgattttatcgaaagaaggtttggaaccctattgcctagcagagagttagttatctccaataggcgaattaggtctgtgccagttaggattgaagatagggagttgagtgttgacctagtagaactagaattagcagaatttgatattatactcggaatggattttctatccaagtattcggccagcattgattgtaagcgaaaaatgataacttttcagccggagggtgaagatccatttgtctatgttggatctgttcaggggtctcggatcccgattatttcagtcttaagggctagagatttactacacagtggatgtgtagtttttttagcggttgtgattgactccagcagaccttaaacatttgggcctgaagtagtcagggttgttaaagaatttctcgacatatttcctgaggagttgtcaggattaccgccacaacgagaaatagattttgtgattgacttggcacctggagttgaacttgtttcgaaagcattatatagaatggctccagtggaactcaaggagttaaaaatacaacttcaggggatgctggattcagggtttatctgacctagtgtatcgccctagggagctccagttctgtttgtgaaaaagaaagatggttccctcagaatgtgta

SEQ ID NO: 135971 - DNA, 598 bp, Cannabis sativa
accaaaatttcaaaaattaaaaaacatttaaaagtacggtgggacccccctgccgtacaacggattccaatccgtgttttgcacatatgggcacaaaatcggctgccaacatttataagggaaatttacatcaggtgcatttcccaatttttattacaattttactgttatatgcataaaattacgtttttattgtcttattattatactatatattgtattttttattaaaaaaaaaattcttcaattttgttaaaacctggcagttcaacatttattctaaccaactttattatattttaagtttgtaaaaagtgtgtatttgattgggcatatatcacttttgtgatagtttttcttttttttttttttttactttaaattgataatgaaaaattaaaataccttctaatacatgttctgatttgtgttttttatctatttaaaaaaaaaaatagacaagagccaacatgactcctcctttctaagaaaaaatatgtatttatacatatatatatatatatatatatatttctcttgaattaatgagtaaacacagacactttatttgttgatttgattgggcatgtcatttttg

SEQ ID NO: 135972 - DNA, 507 bp, Cannabis sativa
gttcaggtcccaagtcccatttcggattttttgttcgggattgagactagggtgcggttcttggtcctgaccttggttctttgtccctagtctagttcgatgttcgggcctgagttcatgatcgggttcgggtcccgagtccaggttttgggttggatccttgtctggcgcccaatttgggtcatagtctgatttagagtcctagtcttggtccggttacggttctggatctaagtggaatttcagttatgattctaagtccaagtcctaaatccagtccttgtcaacttccagttttggttccaattttgggtcacacggtacgggttcgagtccacttttgggtttgggactggggtttaggtccgggtgtgggttcaggtccttgttagggttcgggtccagggctgggtcccaaatccaaacattgattacgagttttgcccaagcccttggtccagatctggatcccaatctcgggtgccaatctggttccatttctgctgt

SEQ ID NO: 135973 - DNA, 701 bp, Cannabis sativa
tatgagagttacacttttattggatttgcattgtcataagcaagaacaattaagatcatagtggatcttaacttgtgaaatgagtcataaattggaagaacaattttatactcaaaataaagtgaatcaatgtggattcaaaaattatgaagtaattttgaatcttaaataatcaaagtggtgaacaaaattgatgagaattttgttaactttagtgtaatatttgggttaatctcattgagaagataacttcaaaataatgggtaaaaataatcacattattttgtgagtagtaatgtgagtttggtattttagttttgctgtgaaaactaaaaataacaaatagtattttctaagtgaccttaaaaagtcatttcaagaggaaaatacaaaaaggtgatatttaatatacattttatggtagaaatgtgggggtgaactacaaatttaatcaaaatgtgatgagacattgttgatatttttgattttgaattcaaattctaaatcaaatttggctatgtgcatatgtaaaattttgacatattttgatgtcaaattttggtgaaaataatttcaagaaagaaatcaaatttaagagaaattagagagacaaagtggtcttctatattttaaaatcaagatattatcttgataagtcaaatgtgaaagtgtgggggtgcatactccaatatgagaatttg

SEQ ID NO: 135974 - DNA, 555 bp, Cannabis sativa
gtgaatttttaaattaaggataaactgcaattattattataacaagaaaaaacttatctttgaagcttttttccttagtatgttactattgtatcgaaactaaattattatttctaattattatagctaaaataaaaatatactattcaattaaacgtgcactatacataatatttgagatattaatcaaagttaataaatgatcaaatgccaacctgaaccatttcttttatagtttacattaatcgaatcttatctcattaaacttttcgaagtcaataaatgttaatgggtgctgcaatgcaccccttgaaataaacatgcatcttttttgttggcattaaaattaaaattaatctaatttttttagtagtagtgttacgttattgttagagattttattataattaaagaaaattaagatacattataactttataaactaacaaaatttttatgttaagtattagaattaatgtttataatgtatttgttaattctactacaatgaaatgtgcaatactaatttccttatatatttcttctaatatttaa

SEQ ID NO: 135975 - DNA, 529 bp, Cannabis sativa
taaaagtgcaatttttaaaagaaatctcatcagcccttcgcaaggcccactctcggtcagagatttgacccaatcggagccatctaaaagcatatctgagggcttccatccgcgcgtgctcctcaatctcgaccagaagaaagtggcgctgccacacttgcttgatccaacatttcacgcgggtcccccagtcagcttcagctccaaccagcgcacaccacgtcccagcagcgtcagttctcctccaacccgcgtgcgccaagtgtcctgctgaccaagaagaaaaaaaatacagaaaaagtcaatgttaaacccatttttcttagccaaaaccacaattaaaaatccaaatatttcacatttttctcccacaacttatacctaaatatcaattttatcttcccaatttattacacctaaataaacataccgaatttatttttaccctattttttcactatttttccattcaaacaaatatttattttttccaacactcttacacatactctatttatcccttctcttc

SEQ ID NO: 135976 - DNA, 1652 bp, Cannabis sativa
aaattatagaaggatcaattctgaccatatcctcatgttcccaagcaaaaatgtccaggtttgctctcagaaattttattaaggcaattttacttcgagcaacaaaccttttccaattttaagctttctgggcagaatatctcggtcgatgtcaatctcttctagttcttccataggttcaacattgctgcttgggtccataagtcgagaatccacatcttcatcctcgccttgtgaagttccctacttagaaatgttttttccgttattcgagctctagctagaggatacttccttcttagccttggctatggcaaggttataacattcccgggcaacttactggtttcctcttagacaccatatcccattatttgttggaaacttcaggcatgaatgaaatatcgacgtaacgacctttaaatcatacaaagttggtcggcctagcatgaaattaaaggttgatggaacgtctaataccaaaaattgtgcccttatagttatgcttgtcggagcttgcccaactctgagggctaggcgaatttgtcccagaggtgcgactccttgaccggagaaactatacacgagttgaagatagggggttaagtctttgagttggagccctatcttttcatatgtgttcttgaataaaatgttggaagaggctccattatctatcatggttctagccaccatcttgttggctatcttgacaacgtcttcatcattaaatgtgatggtgggttcccctgctcgtgggatctttgacttcctttcttctagggccaggactacttcttcttactcatgttgtactgttcgggcatacctctcccgggcttttcctgaatctctagctatgtgtggaaccccaataatgacttgccgatgttcgtctactggtggtggtagcaagtcttggttgttatcgcccctctggttctgatcggccttgacatacttctgcacgtgcggattatttttccttattaggaatttgatttcctgcttcagattgttgcattcattggtatcatgactgtaatctccatgaaaatgaaaaaactttgtcatatctctctttctgacatctttcttcatgggcgcgggcttcttgtacggggctaatgaatgagtagcaatataaacactttctttgtcatccgtcaggacggtaaatgcagtatacttagtaggattctcccggggagcttgtccagtcttgccagtgagctttccctttttccattcccttgcctattattgttgtcggaccgtttaccacttgagcttgaattgctcatgtaatgggggagttggatggatgtcccagtagaaggagcttttgactggctaggttattgttccccttctgctcgctgaatggcctcttcaagtttgataaaaccttttacacggtcaagaaaatcactcatcgggtctactagtctattctttcttatgtccttccaaagttcgccaagaacttcaatgccccctgtatcgcggacaactttcgatcttcggttactcgtgcaaccgtagtcgcctctgtcatgaagccgctgatgtaggctcggagaggcttcctcggtctttgctttacttcgaccagatctcctaggtgtaatggaagttggcgagaggaggag

SEQ ID NO: 135977 - DNA, 565 bp, Cannabis sativa
actttccttcatcctccacaacttctctggcacgatactctcctcctctcccttctcttcacacacacagcagcaacaccaaggctctcctctctcccttctcttcacgcatacagcaacaacaccagcacgagctctcctctctctcttggaacatggaatatatcttttaatctttatgtttgaaactttagacttcaatttatcatttgtctattaattaggattttaattttgaactttttatgcctttagttatattttaaaacttataactagtaattttatgaatttcatgactttattatgaaattatgtattttttgttatgaattttatgatatatatcatgtgtatgaattttttattcttatagttgaggcttacgcctcggagcgcctcgaggcttacgcctcccggtactacggtaaaacgcctcagaacccgattctgccttttaaaacattgtctttattgtaaagactgcttaactttaatttgaaaattagcaaataaatagggttataaaatgaaatttgcatattagttatgaattatcagttta

SEQ ID NO: 135978 - DNA, 714 bp, Cannabis sativa
ctcaaattttatttgttatgtactagcactgcataaatgtgatattttgtaaatggttagtaataataattaatactaaatactactatcttttaacttttagaaaaaatctgcatatgtggtggggcttatttgctttatttttagggattttttcaataatatacttaaaatacaaactaattaaaaaaatctcttaataaatctcaattacaataataccttgacacatcatcaaaaaagaaacaaaaataattccaaattctgtttttttttttttattaaaatttcctgtgttttcaaaagtaactttttggttacttataatgttgataagaaactaattagttccttttacatttttttaaaaaaactttatttttatatcatatagtttgagatacaatttaattacctctaaaacttatttgtaaacatcttggtatcttaatatgtaaaatatatttgggtaaccttaaagtttatttttgaaactaatgagttatcatgtaatataataagctactatttttatataccatttactttatatacatttttgttactttgaaatctgtgttaatttttaaattatattacattgttttattattttaatacttttatattactttttttatttttcttttataacaatatttatgttaccttcaagtctatttaataaactaataagttacaataaagtaaaaa

SEQ ID NO: 135979 - DNA, 704 bp, Cannabis sativa
ttagtgcattgcttaaggttaagcttgtgttgtgcacctaatattttacaagtttgagcatctctaatggagacattatttaagaatcttacaaatttgcacataatttaaaattataatattttattttatttttctttcacattattagtattggtactttttactttaaaatatttaaacacctataaaatttattaaaataatattatattgttatttaatatatattaaataatcaaaatttcttattatcacaaaataataataaaataataagaaggaaaatatgtaaagaatgctattgtacatcactttttcataccattctttttgagaaattttaaaaaaatactgacttttggctcaatctttacaaaaatactgccacatgttacttttatactgtcttagccaatttttttttcttttagatggtaaacacaaaaaaaaaaatgagacctacatcttctacacacacagacagaaccaccacaggaacaccagaacaatcggaaaacaaccattaattccggtgagattgagaaaaaaaaaagtaacatcgacgtcaaataaataatcatggcaatacaactgtaaaataacactaaaacaaatcaaacaaaaaaaaggaaaacatgattacaaaaaactaaaaaatatcatgcacaacctcaatacccaatacaatggtagttatattt

SEQ ID NO: 135980 - DNA, 523 bp, Cannabis sativa
aaattaaaaatacgcaaagaaaaaaaaaagaaaaaaaatcaaaaactggttacccaccacaaagataaaaactaaaaactaaaaataaaaacatatatgtattataaaaaaaacagattcaaaataaaactgtaaatagaaaacctgaaacatgcaaaataacaaattgaaaaaccgatttcttaaaaaaataaaaattaccaaaggactgtcaacagaaggagcctcgctctatttcttgccaagcgatttggaaaccggtttcttcttgactttcttagcaacattcacaagcttcggatcatcagcaacactaagttcacaaactttatcctaaaaaaacataaaacacaatacagttaaatgaaaatgaaaaaaaacaaaactattaaattaaacaaaacaaccaaaaaaagataagaaaaaaagaagacatacaaaattagaatggtcccccacatccttagattttcttttatttgacgcactagcgtcatcactaacaacttttcttttttttttt

SEQ ID NO: 135981 - DNA, 1022 bp, Cannabis sativa
atttaaacaattcgggatattacccctatatttatgattctaactctcaaattgttgtttctatcttgctatttttttacagcactttttaactagtggaattgtctcatttcatagtatttcctttcgagtccaagaacccggactagatgtttttttttatgtaataaatttgtctgaagtttaacatcgtcacaactcaaaatatggatcgagtctaatacatattttctcagcatggagacatcaaacacattatatactccagacaacgcaagagttaaggctagctgataggctacctagcctatttatctcagtaaacaggtatctaatattactcttgtaccacacttattgaagtacctaactaatggcacatttaattatcacctttagacaaacattttgtgaaaggaagagattattctaaaatcatctaacctttatcaaatatacccataacatgtttctaatattccattcaccttctaatgttacccatctttcaagaataaaacgtcatactatttttgctttaatctccatggttcttgataaccttctttaattcttaacatcatagccaaagatatcaatcttagaatctcacaagattagattattccttcgtataaattccatatccttatttactgtataaattatctatactgatagacaatatattaattaactcggtatctccagccgttactattcagtcgaaatcataagattccacaatacctaattcataattatgtatttctataccttctatgggatatcttaagttgatctactaacttaacttattaataagtaagtattcgtttatgatagatattcaattagagcattccttatttccacccactaatatgtacttatctcaataccttgaaaatttctgtttattaacacattccttcttcttgataatctctggaacgactactgattctgcatcctaatatgaatctttctagcgtactttttcctcactcatacgctttccg

SEQ ID NO: 135982 - DNA, 1230 bp, Cannabis sativa
  modified_base (1202)..(1204): a, c, t, g, unknown or other
ttttttttttttatcttttatgttttttaatatatatttttatatattatttagtttattaaatgattttttatccataccaataaggtaccaaacattggttaacattttttttttgggtcttttgtgtttttaatttatttttgatgaatgatcttttattatttttttattattattgctatgtgacaccttaagaggctcgatgtaatacaccaattaagcagttttctatatcatttattatattaaaatttttgggaactgatactgaaatacactaataagtaataacgtggtatgctaccttttgtggtgcttgacaccttaatgtgcctcttaacattttctgctgttaatatgtacatatctttattagtcttgattatgtttttcttattgttttttgtttttgattttttatgaatgatatttatattgatgtgctacccaataattacttagcaattttctaaatttttattaaattaaaatttgtgggagttgatattgaaatgcaccaataaaagtgtgctactttttgtggtgtttggaaccttaatgtgtctttaaacatttcattattaatatatatgtacatatttttattaacttttaataattgttttttttattatctataagtttgcaagaacatctttaatgagatatataaaaattgtactatattttttaaaaaaagactttgtgatgtatgtgcatcaatttttagaattatgttctgatgcacaactgcaaaacttggtgcaaatttatttatttatttattattattttttttgttatgaatgatctttgtactattttttattgtaaatgattattcgtactattattgctatgtgataccttaagatgttcaataccgatgtgtacccaataattagttagcattttttcaaatcatttattaaattaaaatttttgtgagatctattaaaaaaaaaattgtgagatgatattaaatgcagcaatagcggtatgatattttttgtagtgtttggcacattaatgtgtgttttaacatttttgttattaatttgtacatatctatattagttttagttagattttattatttttttaattatacatcgagagatataaaaaattatactatatttggcaaatttctcttttttttcagaaaaaaaatctcaattatatctttatatattaannntgcctatctaacggcaattcttggtt

SEQ ID NO: 135983 - DNA, 564 bp, Cannabis sativa
tttacagaacacacttttgtttttgttttttattttttttaaattgaaaaacaaaagtagttataaagcacatttttatttttcaataataaattttaaaataaaaaaatttacttaaatttttatgattaaatatatttaaaaataaaagttataccaagagccacctaaaattattattattgtatatatcttttttttttaagggaattattgtatatctccttaaactatgaaaaatacgtcgaataccatcaagaacatgtgaaactttttcaaaagtaacaaatctaacatgtatgtattgataacctatcgaattcctatcaaaagtcatcgagattaaggccaaaaacaatacacatttcaagaccattgaattctcatcaaataaaatcgaaaacctatcaaatttttatccacatatgctttgaattcatattatgggaaaaaaaaaataaaaaataaatgtagaattacagtctcacccaaactcaaaatcaatcctaaaaactaaacaactctgaaattccgtattttaatattcccagtttgattatttaa

SEQ ID NO: 135984 - DNA, 665 bp, Cannabis sativa
atccgtgatgtacaacagccgtcagatgagggagttatttgatctgacggctgatattgatctaggagtaaatagggttaaaaagtaaaaacgtaccttgacactcatttaatgtaccctttgacccatctaatggaccacggaatacattccgtgaaagtacatcacgggataaaatcatatccctataaatatatatatacataaatataaatgaaaagaaaatatatatatataaaatatatatataaacaaaaatcgatactgtatacgtatatatatatatacttgtatatacacattaaaccatataaaatatcataaaaatatataatagaatatgataattaattatatggaaagaaatcaaatgaatataatatgaaagtgtatatctaaaaatatatatattatacggtataaatgaatatatataatatatatatgaacatgaatatgaagatgaatatatatatatatataaaataaattgagtatgaatatatataatcaggattatataatatgaaggtatatatataatttatactataaatgaaaaaccccgtatgtatatatatatattaaactcaaaaaaatcaagacagagatatataatccgctctgatacaaactgttagatatttagatgtataaactgaaat

SEQ ID NO: 135985 - DNA, 883 bp, Cannabis sativa
aacacttatcgggaatttaaaatcgaaactaagattaaccctatcgataaataggatgccaataccctaaattacgtaaaaaggcaaaaactagggctcgggaaaaagccccaaccggcagatcggttcccaaccggaaccccagttcctaggtaccgaccggtcgaccggttgctagaggcttcccagacccggtcgaccggttctgagctgggaacaaaaattcgatccccttaaatcaattcaagcccaaactttccaaaactttccagaatacctgaatgcactataataaaccagttccaagcaatagaactcaacaattcacaccaattttcaattcaccattaaagagctacgtttgagttcataaactcaaacttttgcccaaacctcaattccacccataattctagtttaaattacctcacacaacatcaaataaactccagaatacccaatcaaacactcataattcatacagcaacaaaaaccctaaattcatctataaaacctaacttagactaaagaaaacttaaggaagaagagcaagaagaaataccttgaattggaacttcaatactcaactagaattcagagatttcagcaagaaatcaccaccttccttgctgagttgaaagagagggaaagagagagatggaaattgagacttctatgctaagcttcctctaatcctttttttctccaaatatcaatattacaataataaaaggcagccatttatttcactagaagcaaaaacaagggtcttaaagggaaaagacctaattacccctctaactaataaaactagctaccaactctcaagggcaaattggtcattactaaacccgaaaattcaacacttaacaaaataccccga

SEQ ID NO: 135986 - DNA, 799 bp, Cannabis sativa
tagagatgtcacgtagcaaagagtgccactctaggactctccatctgtaatggaattcaagcatccttgatatgacttaagtattgtcacgtagtaaagagtgccactctacggcattccatccgtaaaataattcaagcatccttcataggatttaagtattcgtcctagagatgtcacatagcaaagagtgccactctaggaatctccatctgtaatggaatttaatcatccttcatagtatttaaagatccgtcctagagatgtcacgtagcagagagtgccactctaggacttcttatctgtcttagacttgaaagggttgaactttggaaaaaatgaggattcttgatggtgtaatagatattgattacacacctaaagttattttagaatgtaccatttgactatatatgaagaacttacaaaataacgcatttgaaaaataaagattatattgtactaaataagtgctaaatgttaatattataaaagttgtctaacctcagattgttgtgcgattactccttcgtattgttcaaatgctcatatcttattccccaatacaagtctaagcttttcaacaaacaagacagtggtggcatgtgtgatacttgagcgaacctctggcatttgtcgcatcttttgacaaaattatacgaatctatccgcattgtcggccagtagtatctgattgtaaaagccttgttgcataggcttcttggtccagagtggtttccacattcaccttcgtgtagttctgtcagtatgtacttcacttcggatggacttagacatc

SEQ ID NO: 135987 - DNA, 1203 bp, Cannabis sativa
  modified_base (27)..(42): a, c, t, g, unknown or other
aggatgttaatgaaacatacatggtannnnnnnnnnnnnnnngtaaaatatatccaacacttttttgtatgttttttgtccccctttttttttatcttaattaccactatttataattacataggaggcagttaatcacaaagttgactgtaatctttttacaacaattatcccctaaaattatggggtttgattacatatcacatagtgtaaatgcggttattatttgaaaatcgtacagttgtgattttctcacttttactgggtcaaaatgatcgtgtgttttaacacattaattgttacgtccgaaaatgtctcgacaggggcttggttcctgtgaccgtaatagtgagctagagcctttttctttatccttctaaggtcaacgaagtatgccttctcgcttctttgtgacgatcgcggttcttattaacaaagagttgttcgaggctcatttgaatgttagcgtctgactcgtcaggtttgtaagcctcaccgagaagacgtctgaagttaactgggggaagttacattaatgaaccttcccatagcgagatagacacctcgcttattgggtctcgtgccagcctgactgttatactttgtttgtacgttatacacgaagtgtttccgcagtcgatatgcaccgctttcgtctacccaggtgtaacgtacttgatgcctcgctaacgacatatggtttctcgttattatactaagcaatagtctgtatatcttttcctcgcataaactttacagtcagcgggttgtgaatgtactcttctacttacgcaattaatgagttattccataaaaattgacatcatcgatccgtattccacacgtcttccactgagatggtagccgaattttgagtataacaattgccccttaaaaaattcttttttagtaataagtgctttttaataattatagagggcatttttgtcataatccctttttggaaaaatgcctcctttgattttggcagatgtaaggtttcaagggtcattatgagccgtcttctcatcttctgtcccactaccaaccgttaaatttcccaacatttagccttcttattactggacttcgtgtataaaatggtggcttaagcctgccatatttcacgcacttctggttttttggtgagatccattttgagattggatcattattctctcgtcaagatgtctcatctgagtt

SEQ ID NO: 135988 - DNA, 798 bp, Cannabis sativa
atttacggtatgggtttctaaagtggtttctccagtggtttctgtgtgggttgctatacgatttttagttgcgatttaggttgctccgctagttacaatagggatatctatgtagaatttcataaaaaatgcaaaaaaaaaactgttttaaagtgtaaaattaaaaattcctattttttgtgactaaaatgtgaattttagtcacaacaaaaaattattaatttgtgatcaaaatataatacttaaatataaattactactaatttagttttagtcacaataaataatgactaaaaatacatttagtgtaatttttatgactaatacttttaattacacatttttttagtcataattttttaattttaatcacaaattttattatgactaaaattaaaaaaatttgtaatgaaaaatattaaaattggatgcaaatgtctctcttaccaaaaacaaaagaataatatgaattctataaaagaccacccttattttatcaagcaattgggcccaacgtagcaacttagcccattgacttctctttagctacaacttttgaggtgggccgaattattacattatgtaatactaattttataaaaaaaaaattagaaataattatataaggtactattttttataaaatatttacatttttacgttcaaagagtgtcttttactttttacggttttctataaaataacacgaaaccaacataaaattaacaagaaaactacataaaaataacgtgaaaataacaacaaaaaataacgtatagataacgaaaaatcaacaac

SEQ ID NO: 135989 - DNA, 694 bp, Cannabis sativa
  modified_base (325)..(330): a, c, t, g, unknown or other
  modified_base (618)..(623): a, c, t, g, unknown or other
atgccaacgtggaagatgtacaccgggagagaagatcccctttcccatctcaagtacttcgaaatgcaaatggatttgcaaggggtacgagaagatgtatgttgcagaatcttccatgtcactctgtcggaagccgctcagcaattgtatttcaagttcgctcctggaaagtttagttcatggaaaaccttctcttcggaatttcatgtacaattctcctcctcacgccaacttcctttacatttgggagacttggtcgaagttaagcaacgaccaggcgagcctctccgggcatacattagtagattcatgacggaggcgaccnnnnnntcacgggtaactgaagatggaaagttatttgcgatactggggggcatcgaagtcctcggtgagctctggaaggttataagcaagaacgggccggtagactcaatgagtgattttcgtgaccgtctcgaaggcttcatcaagctcaaagaagccattcattgagcgaaaggtgagaaaaagcctggcaagtcaaaggctcctcctactggaacatccgcccaacttccccactacccaagtaattccagctcaagtggttagttccaacaactgttgggttttatgccnnnnnnaaaactcattacaatctgattagtaatcaatataagaaatttgaagggatttatgtttgcatgaattttac

SEQ ID NO: 135990 - DNA, 744 bp, Cannabis sativa
atcaaagagcacacaagctttatgacagactaaagcctatactgctacaaaaccatgccctccaggctaaaaaatgcagggaccacttactagaggcttgtgaacaaaatgatcaagaatttcattggccgcaatatggaggtgtatgtggacgacatgctagtcaagtccaaaaaggctaggggcatgtagaagatttagatgaatgcttcaagatcctctataagtacaacatgaagctcagcccccttaagtgttctttcggagtaggctcaagctaattccttggcttttagtcaacactaggggaatagaagcaaacccagacaaagaccaagcccttttagacatgaagtcacccacaacaatcaaggaagtacaaagcttgacgggatgaattgctgcactaagtagatttttgtccaaatctacggataaatgcatacccttcttcaacattctcatagggaacaaaaatttcgagtggaaaggagtgtgaaaaagcactccaagagcttaaaaaataattggctcaacctcctgtcctatcaaaaccgctagacaatgaagagcgaggcatgtacctagctatcatagaacattttgtgagtgcaatcttaacaagagaagaagatagtatacaacacctagtacaagacttatgggaaggcttgcaacaacggtattaatatagcaaacgacacttcaccaaatttatggcacaaatgacttggccatatgagt

SEQ ID NO: 135991 - DNA, 2525 bp, Cannabis sativa
  modified_base (475)..(487): a, c, t, g, unknown or other
gaaaaacccgtacccaaactcggaggaagactcattacccgaccccaacctagacccatgcccagacccggaaccaaaccaagtcccaaaatcataattggaactatgactaggacccaaacttgagaccaaaatcaaacccaaaccataacccaaactcagaccagaacctggcccgagaccttgactaggactgggacctgagacttgggacctgaacctcgaccgagacccagaccgggacctagacctgagcaggtctgaaaccctcgccgggacctgagacctgtgacccagaccaggatcaagaccgcaacaatgacccaaacctaaacccggaccaagactgggatcgagacctggacccgaactcagatcgagacctagaataaaaccaagactcaggacacgaacctgaacctggacctagaccaggacctaggaaccggacttggatgggggacctagactaggnnnnnnnnnnnnngaacccagacccagatctaaatctgggaatcaaaccttaaccaggacctgaccaggacccacgaatgtgaagttggacccagacccagacccgaaacctgcccccgacccaaactaggacatgaacctggacacgaacccatatcaagataaaacccgaaccaggaaccgaacccaaaatcgatcccaaacttgggacccatacccaaacctagacctgcacccggacccgaactcgaacccagactgggatcggatcccaggatatagacccagaactaaacccagactaagatcgacatcgaaacttgggactcagactcgaacctagaactagacccagggccctaaccactcagagcccgattccgacttagaccaagatatagacccaaacccaaactcagaccaggactcgaacccgaacccgaactcaaaccccgacccaaactcgaacccaaactcgaactcggaatcgcaactagaactaaaccgaactaggactaggactaggaccaggaccagaaccaagactcgaacccaaacccaaataaaaaaccagaccgagatccaaactcgaaccgcgactaggacccgaacctgaacttacaccaggacacaaacttagacaagaatcgggacctggaaccagaattgggattgggaccttggcaacggaactaggactgggacccaagacttgaccccagactcagacttgaacctaggacccagctcgtgacccggcaccaaaaatggaaccaaaccagcacgcgagatcagggtccggatcaggacccggggcttggaccgaacccgtagttagtgtcaagatctgggacccagccccaaacccaaaccaagaccaagatgcaaacccggacgcagacctaaactcattcccaaacctaaaccttgatccaaagccattccctgtgacctaaaattggaacaaaaatcagaagtagaccgagtttcccacccagacctagatctgaattgggacccggacctgaatcgtaatcaggacccagcctcctaccaagacctagatccgaactgggacccagacctgaatcctaatcaagaactagactcggtgccgaaccttgacccaaaaatggaactagactcgggacacagaattggggtcgagacctagaggtgcaccatagtcacggtcccgaacccaaacttagacatgggacccaagacctgaactagaaccaaaatcggaccgagacacgtgatagggatttagatctaggactcaaacaaggacccgaacccagactaggagcaaacctcaaaccctaatccagacccgagacttgaaacttgaacctaaacaagaaattctagacgaggatactcaaacaagactaggaccgtgatcaagacccaaacctagaccttgaacaaaactcgaacctagccccaaacccaaatcgagacaggaactctggcctatgcacggtcatatacatagactgggaccaagacccagacccaaacctggacccagacctagacctaggacctgatccaagacccagacgcggacctagatagggacccagatacgaacctggactcgaacccagactcggacccacatggtgatgaaaactcgggacctagatctagaccgagaccctgacccaaacccagacttggacccacacccgggatctgaactcaaacctggatcgaattgatgagaacactaaggctaaataaacaagtaaagttccagttggcccggtgacaagggcgcaagccaagagattcaaagaagaactcaacaacttagtcaatagaattttaaaacaagaggagaccgcagtcaacactgaaggagagcaaaaatttgtgcttctcatcaaagtggactcaatttagacccaagttgagcttatcacgttttccaaggcaatatgcaactttccttttttaattttgtttcctttattttgtctttgttttatttggaaagttgtctttcttttagtttcctttttttcttggttgtaagttgg

SEQ ID NO: 135992 - DNA, 1324 bp, Cannabis sativa
  modified_base (65)..(69): a, c, t, g, unknown or other
attgcatcgattcacattctctttatcttgacacttgtcctccagccgaattttgggtataacannnnncccttaaaaagttcttttttagtaaaaagggctttataataattacaaagggtatttttgtcaagatcttttcttagaaaaaatgcatcctttgattcttggcagttgtacggtttcgagggtcattatgaatcgtctcttcatattctgcacttctcccaatcgttgaatttttcaatacttagttttcttgtcactggactttgtgtataaaagggcggctcaagcttgtcatttttcataaacctctggctctttagtgagattcattttcagaatggatcatccctttcctgccaaaatgtcccttctgagtttagaagttcatcctcccaaactcataatacccagacacaccaacccatttccatttgtttccaaggatttcaaatctctatcggtgtcgaaaataatagattccaaggttgtggagcttccgaccaatccaaaccaaaggaaccccgtggcccaccaggggaaccccatggcccgccatgggcggttttcacaagtgatcatagatcttgtgggcgatttaaaaggtcctcttcaggctgataaagaattctagaggaagttggcatggttgcagatgaatttaggaaggaagttgaagtggtttctatcatagaatccagccaacccaagacccaaacctgtgctagaagatcttggtgccatcgaggaatttcctgaggctaggaaaaaagatcttggcttcagaaaatgggatctgatgatgaggagaatgaggtctgtgcagagatcaaggctctctacatgtagccggtctttctcaagctatgtgctgtcggtctttctccgaactatgtgtagacggtctttctcaggctatgtgtagacggtctttctcgagttcatcggcttcccctctcatcctttgtttaggaagatgacttaatggtttgcccctagtgacatttttgtgaaagacaagtttgtaacccaacttggattttttcttatcttaaaagccttgtactattttcatttgaacttaatacaatcgtgtttacttgcgtttttattcacaatgtaaacaactatattttgaccaaatgtacagtacttttaggtttttctattgctcgtaatcttcctgtttaagtagttagtgatctaccaaactttctaattttcgatcaattgtcatttctacctcgctatagcagttataatctgccttaagcaaacttaaaaataatttaaggattttatcactttgtatattctt

SEQ ID NO: 135993 - DNA, 524 bp, Cannabis sativa
aattaattattctaatttttttcatttaaaaaaagttacatatcacttttaaaatttaataagtactattttttttcaaaaaaaaaaaaatgttggacgtatttatatatattatataaagtaattttatacaatataaaattatagtttgttacataatcaattttagagcattgttattggtcactagtagtgtcccacctttcattagtgacaccctacaattggttagcgatattccataaatcttattttttttaagttatatgggacattctacttaattagaccaataatgatatgataccaacgagggttgccgtttagcatttctcataaggtaagcatcatatttttttttatatatatatattttctaatttaatatacgatcagaaaacatattaattaataataacagaacaaactaataaattttttataatgtctaaaaaatattaaaaaatatttaaaattcgagatttgggaaatacaatagcgacgactacaagtgaactacgata

SEQ ID NO: 135994 - DNA, 926 bp, Cannabis sativa
atgttttaaaaaagtaaatacagcataataaataaataaattccttaattttttttagtatttattaattattatgcttcttttgataccctctagtgatatattattaactaatacgtccctcacatggaaaatccccattttggagaaactcatgcatcttttctattttttttattttattttattttttttgttgagagaatgcatcttttcaattttcgtgtaaaaaatagttgctttttttaggtgattttttatattattattaatttaactaggggatttgttttgcattggttaatgggcaccagcaccaagctggtaacatttgctctattaaaaaaatgtgtttagtattataaaatagtgtcctataattaagtaatggttacttataagttttattaaaataaattatgcaggattcaatatcaaattatattaataataatattatacattacaatagtggtagacactataggtgcgtttggtaaatcttttttaattagttttttatttttaaattaaaaaagtaaaaatattttctaaaatcctgttctataaaactatttttacttttgaatgttttaattaataattaaaattttaaaaaacaaaaaaaaattactttcaaaatttttttaaacagtcttttaattaatattttgaactctgaccccaacttagtccttggaagccgaacccagccccaaacttggacccgcccccgattccgaccttcttggactcgacttaataaaatcaataaatgaaaatgatatttatagaacacacttttattttttgtttggctaattagcaatttttcccccgaactttgacatatcataccccatgaacttttttgaccgttaaaaattccccctgaacgattcagattgttaaatttaaagactttt

SEQ ID NO: 135995 - DNA, 733 bp, Cannabis sativa
acgtgtcgctctctcgaatccatcatggccaatttttggtggggttctaatgacagtaatcgtcccaaaacccactggcaaagctggaaaaaactttgcaattccaaaaagaatggtgggctgggtttccgttctctggtccattttaatcaggctatgctggccaagcaagcctggcgcattctcaaacagccaaactcaacggtgtccaaaatcttatctgctcgatatttctctcagacctccttccttagcagttcaacggggcattctccttcttttgtttggcgtagcatttgctggggaaaagagttgcttcgcaagggtcttatctcaaaaataggaaatggacagaacacatgcactatttcggatcattggattcctggtttccgtcaggtttctcccttaacccctgtcccggagaaggtcgcatctttcatcaccccttctatgtcttgggatacctctcagcttcaaagttgtttccctccccacataacccaggctatcctctccattccccttcccctcaccccctcccaggacgatttgatttgggaaccctcaaattctggggtttacactgttcgatcaggctattatcttagtttctcttcaacctcccctccggacatcccttcttcctccaccccttcgccttggtggaaatccctttggcacctttccatccccgccaaggtgaaacattttgccttccgagccacaaact

SEQ ID NO: 135996 - DNA, 1305 bp, Cannabis sativa
gattatttacaccacatgctgaaatttttaacttttttttacttttttactgtggggcaaaaattttttcaaaaaaaaatgtgtaagttttatactgtgtattgtgttcagttttcattgtttttctatggttttttaattgttccactgttgtttttagttgttatgttttgtgttctactgttgttttataaaaacacagtacttttgaaaaaaattctgtgtgacagtatttttataaaagttaacccaaattttagtattttcataagtttctcattttttgatgaaaagttaaacttgtgtacttatgttgcaaattactctaatttttatctctgtctttgtgtcactctccacgactccctctctcttctctcccttcctcttctcaacttctatatgttattttttcaaatttttatacactaagtgacatttttatataattttggaggatttttggagtaattaccagacaagataagagcagtcacaataacttctctgaaatagaaaattttaaaatatttaaagaaccatacttaaaacacgttacatcatatgctttaaattcgttcttcattttaaaggttttttaaaattcactatttatgttctacatttataaaatactatttattgctttaaatatattttattaactattttgagttttaataattatttttgtatagaaatatatacgtgtattagctaggttgatgttacgtgcaatgcacgtataattaattttctttttaattagttttaatttagtgatgttaagtgcaatacatgtatgtttaattttttttaattcggtagtgtattattattttttaacttttaaaatagaatttgagattttaatctgagattttttttagctattgcggttatattggtgtgctctttagatgtgattgtatgtacgtattttatatgtacaataaaaaaattaattttattgttatacttattttatattgatctcactatatattagaaaatattttgacaaaatttaagtttgattagagaattagttatttttaaaatacattttttatattatgtctaaacatatatttttttttaaaaaataatagtagatacattcttaatttgtagttagaacagtgtagttataataaagtttacaaattattagaagcatatatatcattaacattattttttaacaatatcattaatcatttttaaaacaaaaggtttatcgtgaaattaaagtttaaatatatattctatatatagatgtaattatactaggtgaatgtacgt

SEQ ID NO: 135997 - DNA, 701 bp, Cannabis sativa
  modified_base (27)..(36): a, c, t, g, unknown or other
aggatgttaatgaaacatacatggtannnnnnnnnnatccttgtaaaatatttccaatagctttctctaccttgctatttctcctgagtactttgaccaaagctacggtcttgtttcgcaggatcttatcctttctgtctaggatttgaaatggctgttcttcgtatgatatgtttggttgcagctcaagatttttataacttagtacatgagcagggtctgaaacgtattttggtagcatagaaacatggaatacgttgtgaactgctgaaagagttggaggcaaagctaaacgatatgccacttgtctaaccttttcgagaatcttaaaaggtctgtaaacctagggcataattttcctcttttcccaaaatatttgatccccttcattggagacacccgtaggaacacaagatctcctacttgaaactctacattcctgcatttcagatctgtataactcttttgcctgctctgagaggtaagcattctggctttaatcttctcgattgcttcattagtccgttgtactgattctggacctaagtatttcttctcccctgtctcatctaagtgaatgagagatttacacattcttccatataacaattcatagggagccattcctattgtactttgataactgttattgtacaagaactccatcactggtaagtgctttgtaacgccctgtccaacag

SEQ ID NO: 135998 - DNA, 1079 bp, Cannabis sativa
aacacatgcccctagtttcgggacttgacagatgcggtcatgagggaaactatatgcgagagacaggtgaaaggttgtcacgaggagtagacctttggttgtcccatcgaggattttaaaaaatgacggctgtaattatttcattttgtcctatttatggtgccacgtcacgaaactctttggttttcgtgtaggcgtgcccatggctggccgttggataggacgaccttaggcattctggctgccacgtgtcataatcccaatttatgagggatgtgggtatttaaactctttgatacgaaataatctcctcattttccctctcgttctaacttcctcttctctttttctctaagatttgaagaaatccccatccaacatttacccagattcacttttcttcccatctttctaaaacttcagaagaggacgaaaccatttgcagggagcaatcagaaaaggtcagtttctaatccactcgtgtacttgatttttttttttgagaagatgagaattgtttttctgggttttttgacattttgaggggtttgaatatgcatgttcgtagggaatacacatagggctatatttttctgtgtacaactgggtaatcttagaaaaataggcctgaaatttgtataaccctgggctttaggaaggtaagtttgaatattcacacctttcttacttgtttatttcttgaatacacacaggtattcggatgaacacttcgaatactcgcatacctgcttactttaggttttacagagactttatcattcctagtcgttgtttagaacatagggttttatattctctgcatattttgttgtgggaacattggttaagtctttcaaatggtgggcgtgtcacaatattccaatgcttatacgtgcgatcgtatgttccttgaggtactgcgatacgcctagccatttgcgacatacgccggtgtttcctgttccaatataagcgtattcttcgactagtagatttcctctaaatggtgggtgtttcccagtaactttagggtcatactcgaaaatgtatccccttgggtcactgggatacacccagcc

SEQ ID NO: 135999 - DNA, 715 bp, Cannabis sativa
attgtaaataaataaatatcaatcacattattaataaataatactaattttggaacaaacaatagtgaaatatatataacctataagtttagcattcacaatagtgtcatgtcacgaaaagtatatacataaaaagatatatttaaggagtcttattattctaaaataaaatatcatatattaataaatgaatataatttaaattattttatggatataatcattttaaatataaaatgacaataattttttttttataattagaaaaattgaaaaataatttactttatatgaaaaataaagattgaaaaatatgatatatgaaaaataattaaagatgtttttataattattttaaaatttgataaagattgaaaaatataaaattttactttacattcacttaaaaaaaatcaagtaattgggcaagattaacattattaattacctacatagaaaataaataatactaactttgtcacaggcaaaataaaaaaaaaaatattaatgtatataatctagaagtatatcactcacaatagtttctaaactatgtgagactttttcaaaataactctcatgttactaaaagtataaaagttaaaaaataagaaaaaagatatactacaataaaaaatacatagcaagtcaccacttttgtttggactttcctttatatatattgatattaattattttattttattaattaaaa

SEQ ID NO: 136000 - DNA, 808 bp, Cannabis sativa
catatattttttagtttgaaatgtattggtttaagaataaaatattaaggtttttaaagtatagtttttcaaatttccctttgtcaattcccttttttaaagctcagcatcttttatctctttttttttcttctctcttttgatttaaacaaataaagcccattagatatgagcccaatctaattagaaatgtgtctaatttaaataaggataagttgaggaatacctcttttatatatctgttaatcaaaaatactctcatattatatttcattaatatatacccacttttcctagtgggttgcccaatataccctcaccctccactgaagtctaatacataatttacattagcctaaggagtataatgggagtatcatctataaaagtagatatattttaaataatataaaaattaaaataaataaaataaaataggtatacaatataattttctcattaaaataactactaatcaatttggactttgggtgaataggcataaattgttctttgatctcttttaatgttaatatttatacttatgctcctaaaagtacaaaaaaattaagattaataattatagataagaaactaaataatgtcaagattaatatttattaaaaactaaaaaaaaataataaaagtcactaaatttactaaaagtttgagaacaaaattatttaaatgcattcttcaaaaaaaaacaaaaaattatttaaatacaaaaaagctaaataattttattttcatagagttatccataatttccaatgagaaatttgattttctatacttaaaaaatctt

SEQ ID NO: 136001 - DNA, 796 bp, Cannabis sativa
ttaacaaacaaaatcttgtagtttcttttcttcattcatggtttttgattaattaatcaaaaaattgattttttaatggttcccgaacaactcctaaataaataattgccaaaaattatgaaaaaataaacatcatctaaacttccaaaaaaaaaaaccaaaaatcaaccacaaaataatattttaaaaacacctagaacaaaaacagcctaaaagatgaacaacaggaaaaaatatattaacaacaatctgcaaaacatgaaattactagaaaaagtgtaaactgtaaaataaaattaaacaacacaaactactgaaaaataacattaaaacagctatttaaaaaagccaatagaacactaaaagaataataaaaaacgattaaaaaacaaggaaaaatgttatgaaacacaaaaccttttgtacaaaaaatgagaaaaaaaacaaaaaaaaaccctaaaaaaacaactataaaacttaagaacaactaataagaaaacccaaactgagaaacattaacatagtgtagtttggttcaataaggcaaaaaactagttaatagcagtaacagaacaaaaaaaaactaaaaaataacatcaagagaaatacacacaaaaatgtgaaaaaacataaacacagtgaatacaaactgataaaacataaacaaaatgaataacagcgattgataaaaaatttcaacttaaaaaaaatgaaaaaatgcgaaagctaaacaaaccttggatttaactttaggcttaaattccaaatcaggaacttcatccttgaagtcagaatc

SEQ ID NO: 136002 - DNA, 1236 bp, Cannabis sativa
  modified_base (43)..(44): a, c, t, g, unknown or other
  modified_base (229)..(238): a, c, t, g, unknown or other
acgggccaatgcgtctgcgtgtgagttatgagcacgcggtacnngggacacgactactttcttgaatttctgcatcagctcgcatactatggcgtgatacttaaccaatcgcccacctctggccagatattcttcattcacctgacacacgacgatttgggaatcgctgaaagcctacaagtactcgattctcatctcgagagtgagcttcaatcctgcgattaaagcnnnnnnnnnngcttcattgttagatgcagaaaactcaaaacataaatcagcgtgtaccttaaaattgttgggactgattagtatgattccagcgccggaaccttcgctattagaagccccatcgacgtacaacgtccatccttctcctttcggtatagcagtgttgatttcttcgtttatgagtgccacttcagtacttgggaactcgagaatcaaatctgccaaggcttgccgcttgatcgcagttctcggtttgtacttgatgtcgaactggcttaactctaccgaccatttcaacaatcttcccaatgtctctggtttcgccaagacttacctcaaagggtagttcgttaaaacttcgatgctgtgggcctggaaataagttcgcaactttctcgatgacattaccagggctaacgctaatttttccatttgagggtagcgggtctcatcatctaataggtgcttactgacatagtacaccaggtattgtcatccttgatcttcgcggattagtacagaactaatcgcatattttgacaccgctagataaattgataagacttcgttggttatgggttttgatagaattgggggctgccccaaatgcgttttcaatgcttgaaaagcatcttcgaatttctcggtccgctggaacttcttattgccctttaaaagttgaaaaaactccttgcattcgtcagaggatcgcgatataaaacggttcagggcggcgactttaccagtgagactttggacttcttttggcttagtcggtgactgtatttctactaatgctttgatcttcgcaggatttgcccctattcctcgctgatgaaccataaactcaagaaactttcctgaaccgactccaaagacgcactttaagggatttatccgcattttatatcgcctaagtatctcaaacattgcttgtaaatggttggcatggtcttttgcctgttgagatttcacgagcatatcgtcaacatacacttccatagtatc

SEQ ID NO: 136003 - DNA, 514 bp, Cannabis sativa
  modified_base (114)..(116): a, c, t, g, unknown or other
ggtagttagggtgttacactttatttctttatttggctatctcggaagatgcaattagtgcagctatagtacgagaagagggcaagcaccaacaacctatttactacgtaagtnnnaggttactaggggcagaatccagatatccccctctacaaaaactcgcgttatgcctagttcatgcatctcgcaaactacggccatacttccaggctcaccccataaaagtgttaaccgatcagcccttgagacatgttttatcaaaaccaaatgcttctggaagattgataaaatgatcgattgaactggggcagatcgacataacatacaatccttgaacatccatcaagggccaagctttagctgaattcttaatagaaggtataactctagaagaaatcccaccagattagcgagacgcagacacctagaagttatatgtcgatggcgcatccaacgaacagggttcgggtgcagggataatattaatattaccggaaggctttaagtttcacta

SEQ ID NO: 136004 - DNA, 735 bp, Cannabis sativa
agaagctaaagttcaatcaaaaggttattattgttcattgtgataatcagagtgcaatccaattaactaagaattgtgtgcaccatgagcgtaataaacacattgacatcaagcttcatttcacgagaggttgtggagaaagaagttatgaagattgctaaagttccataaccaagggagtgccaagtagtaagcttgagcattgcctaaagcttattagagtcagttgagctcggacgggctaaggggacagtagcatttaaacaatgatttatccagcaacttcaacttgaaaccaaggtggagatttgttggctatggttacaagttttttcatctgggattggaagctgtgaatccagagagcagataccagaaggttagtgtggattcgaaagccttgtgtaaaaggtcttgtagaatttgaaaggatctttcaggatagcttgtaccgtgtatggaatgtctctcccggatagtttatctctaatctggaggtgcactcccgaacaacttttgtcagtcttgaaggttcattcaggaatgaagtcatgtacgtatctagaaagcttgtgtgttacaatgcttctggattgtccgtactgaaagcgtgtatttcaagatgatgtagattattgttgctggtgatgagatggatcatttatggcggtataaatgtgccacgatgatttaagagacatatttgacaacaatgcaaatctatatatagttgta

SEQ ID NO: 136005 - DNA, 1100 bp, Cannabis sativa
aaaattaataaattgttaaaaaaactctataaaaatattaagtttacttaaaaaaaacctaaattattcctaaaatagtatttttaaacttttatattatttataaacaagtattttaaaaaatcaaaccaaaattattaaaaattcaataaataatttaatcaaactaaaaaaaatgttatgttaacttaaacaaatctagatttttagagaaaaaaaattatactcaaacttgttcccataaaatttaatttttacaaaaaattgaatttttaatatatttttttatatctaaatgacttttttaataaaaaaaacaaataatttttttaaatcgtttaattagtttaaaatttttaatttcttttttaattttcttattgattcaaaataaattttcttaagatctaaattaatttttttttttaagatttactaaagaaaaattaaactttcttatttttattttgacggggtacgatttaatagttgtcgaaatttaaggggtaacattgttaatttacaaagacacgtcagcatttaaataatgggacataacttaatagaatgacactactacaaaatctacttttggtgttggttttaaactgactcatatatacttttagtgtcagttcataaaaccgacacttatttcacagtcacaaaaagtcaatttttggtgtctgttttaaaccgacgccattgagttttggtgttgttttataaccgacacttaaaatgtacaaatttattttttttcctttagtgtcggttctaaacagacacttaaaagaattaaaaaaaaactaaaatcaataagaaaaaaaaataattttaaaacataatgattctacataaaattataaacttatttattcactactacaaacataaataacaaacttatagaatcaaattaaatcaacgagtaacttcaaaaatactgccaacatccaatacaagaagttagttgacatttgactagaaatagtgaaaactccttgcttgatcatctttaatacaagatagaaaactacttcaagagccaacatacaataagcttagcttataattagtgagtgtatataatccttacc

SEQ ID NO: 136006 - DNA, 1092 bp, Cannabis sativa
gttttcatgaagattatggccatgccaccaactaatgcaacaatctaaagcgcgaaattgaatttttgataagaaagaataacccgtacgtgcaaatatatgttaagaccgatcaaaataaaatggccacccagacagataataatcaagatttactcccacgaccagtagatggacatttgcaagtcattattagaggagcacacataacatgagatttagggaaagctcgggagaggtatgcccgaacattacagcacgagcaagaagaggtggttctggccgtcgaagaaaggaagccaaaaatatcacgggcaggggaacccaccataacattcaatgatgaggatgttgtcaagattaatttcccacacattaaccaattagtcatggaagtcaagatagccaacaaaatggtggcccgaactatgatagataatggagcttctgtaaatatcttgttcaaaacaccatatgaaaagatggggctccaactcaaagacttaacgccctgtcttcagcctgtatatggtttctccggccagagtgttgcacctctagggcgaattcacctacacctcactgttgggcaagctctgaagagcataactgtaatggcacaattttttatattggacgttgcattagccttcaatgtcatgttgggccgaccagccttatatgatctaaaggctgtcacgtcgatatttcattcatgccttaagtttcaaacaaagaatggggttgggtgcctgagaggaaatcaacaggttgcccgagaaggttacaaccttgccctaaccaagcctaaaaaggaagtatcctctagtcagagtgtggacaagggaaaaagcattgccaaatagggaaccgcccaaggcggggatgaagatgtggatcccgacttggggaaccgaataccaatgttggtcgagttgaagaactagaagaaattgaaattaacccaaatgttccagccagaaggctcaaaattgaaaaaggtttgctgctcgaagtaaaatcagcattgataaaatttctgagagcaaacctggacatttttgcatggtcacatgaggatatggtcgaaat

SEQ ID NO: 136007 - DNA, 1578 bp, Cannabis sativa
aatttctttgattagcaaagattgcataattattgaaaaagcactgtagcgtgccttagcaatagggcgttacaactggtctaccagttggggcagttttgggaaccctagttcttcccgtttttacgacatttagggtatttccatgttatttatcaacagggaaacttttaatttcaagtttaagtccagaaagtgatttagcgtgtcactcaccaattttacaattaatgtgatttaggggcctataattcatcgagtagtccacacaggttggccgacacacctaaactcggttgcaaggtaaaattagtgtaatgaaatgcatttgtatatacatgtttagcgtgcatgttagttaagcctattagattacattatactagcgatatcattatgttctgtattatattggatatcaataaatgtatgttggcgtaagtcgtgtttgacaatatcacatcggtacgactagagtacgactagcgtatcgagtatagggtgatatcatggtcgatagtactgtactacttgatagtatcacattagtatgactagagtacgactagcgtatcgagtataggctcatattatggtcagtagtactatcgtacaaatgttctagactcagcaccatgttagacacaaggatagggttatggttaggtgtatgagagcctaattacaatccgagttattgctatgttattgtttatgtttttcttattaagtctgtcgactcacagttattgtttgcatgtgtaggtaagggcaatgcttaggttgagcaaccgtgatagcgagcagatggagattgtacatgtcggggtggttaggcctagagcgtacgatcattgggacatcagggcttattttgtatagtcgctaggcgacaaacttttgtatatgcacagggaaacttttgtaaatacttttgtaaacgggatcctggttttatataagtatgttattttagtgtttataattaattaaataaaattttaattaattacgattttcaataaactcgttgattagcaacgagttgcatagttagttaaaaatcacgttaaccatcatccttcatcccttagaggcatgcctaatgtcgaacaagattttgtaagtagtttgtatcactacttttataatgttaagttttaaaaacaccaacaaaatttaatctagttcttatatacaggaaaaagaactcggtgttgacaatgttgagagatatcaactctagatgagaggaaggacaaagaacaatactttgatcgcagaatatgacaaggtaagtgagcagaaaatagtaagtgtcaattatggtaagaatgaattaaaagagaaagttagtactagtgaaatcgaagttaagggtcaaaatgatatcttaacggaatctttaggcacaccttagcacctaggtcgtgttaaagcttttgggtatgatgtttctttaattgagacatattacttttttttctatatttagagtctaactacgttggtacattatgttgcaggtcatttgccaagatttctactgtaacgccctgtccaacagggacgccacgt

SEQ ID NO: 136008 - DNA, 679 bp, Cannabis sativa
tcgagatccttagtcagcacagtgattttcttttgagcggcgaacaacttcttgtgggcttcaccgaattcaaaccgaacagctccgacttccgccctggcttcttcagcatccttcctggccaactccgcctccgccttcaaggtgtcggacagagccgtgttcttggaagcagcagacttagcctaggcgtaagtgtaagccaacttcagaccgaccttcacaaggaaaaaactttagcatctgagctaagtatggaagattaaagggaagtatcaagaaagacttaccctggtgaactccttaaagactccgcccaccagcaattccaaagaagagtcattgtcagcaccagccagttgctcgctgacctcaggaaccagccggttcatataatgggccagcatctccttggccttcttggcctctagaagcaccgacaaaggtggagtaggtgcacgcacccattcaggatcactcctgaccagttcagacccaacctttggtggtccagactccttggacttagcagctttggggtagaggggttcgcagcagtcaactcgtcaaaaagatcaatgacctccccaacaagcctcttttccttagtagaggacccctcaccgcccttagacttcttggccggaggagaggcgttagagcttccgcccattctctt

SEQ ID NO: 136009 - DNA, 2319 bp, Cannabis sativa
cctcaagtggcttggcacgccaccttacccagcgccgaacaagatccaaccgtctaggaggaggaggatcatgaaggggatgctgaggtccagtagatcgaggagcaggacgatgtccgtcctagcagtccctccgaggtggaggaagaggaggaggttgcacccccaaactatgggggatacaatgaggtcggggagccatttgatgttgatggcgatgtcctggttgagggcgttgactacgccagtgaggaacttactgctgcggttcctcatagaaggcaaggtactttgggtgccaggtgggtgagccctccgtcaaatgttactgaggcgtgccttcgggatctcgaccaggattgctacctgggcgacttggactgttacattcccgcccacaataatcgggccacaaaccctgaaaggagaatgtgcgcctggtcgggtgctcatgcccagcaaggggcattgttgcctttgcacccgtactttagaaatgtggcagacttcttccacctctgtctgacctaatttactcccaagggcattaagtatttatctgccctcttcgttctctatgcctcccaaatatgggatatgccctctccccatgaagtaagctggttttttaatttgaagtccacccctaagcaaggtagatcggggtacttctatttctctcaaccagacttcaagtggttgacgggcaccggggataaggcccttagcaagattgggtgttttgttgacgagtacttcatggtggaaggcatgggaaccacccatactcggttccagtagatccccacctatcaccgccctccctttactctagctcttagagatagagcgcaaaggcttgctcaactgccgggggatgaccgtaatatcattcagttgacctctgaggaaaactttgtgaagtagaggctctatccgaaggatttcattcctaagccaatgaaggagaggaagaggaaatctggtgctggacgggatgagagagctcatcaggaggatgaactcattcaacttaagcgtgaagctaagtttaagggaggtgcaagggccaaacagtatgctcatgagcccttgaatcctaaagatgatgctgaggaagagtaggtgactccgctcaaaaggaggaagaaacttccagcctagcccaagcccgttgaacatgccattcgaattagggagcccagttcacctgcttagccatcttctcccgtactaggaaaatggaaagctgccatggcagagataagagacttgtcaggtgatgatggactctcgagtcttgctcagacaatcgtttcgcaggatattccgtcctgtttttaaactttttgactatcatgctttatgcttctgatgccctttttcctctaaccatgttgtttttgtttctcgcagacatgtctcagaagatgctcgatgctctgaagaagagagttagaggaaactcaagctcatctcctccggccaagaaatctaagggcagtgaggcgaacccttccaaggaaaaggcaccggccggagaggttattgacctttcgaggatctaactggtgcgtatccttctactccaaaagttgctaagtccaaagattctcgaggaggaagcttagacagggctgagcaatcaaagggtggatccgagctggccaagagcagatctgagcagatgcgggctcctactcaacctttgcaagtgcttctagaggccaaaaaagtcaaagagatgctcgcccgttacatgaaccggttggttcctgaggtaagtgagctactggccggtgctgacaaggagtcttccctggagcttttgatgggaggactcttgagggaattcaccagggtaagtctttatggacagtttcctttaatccttctttacttggttcagactttaaagttttttctctgtgtaggctggtttgaagttggcttacacctaatcctgagctaaatctgctgcctccaactaaggtttgcatgtttgatagctattctaagtgattagggctggaccatcccatagacattagataagaaagtgtttgttttaacaaatactacaattctaagaaaatgattaagtttgaaaacaaagcagcaaaatagaggagatattttttttcttcttgattccaaaagtgttctatcatcttattgttgggattttatgccctaaataaaacccatttcaatctcatatgagttgttatcaatgaaagattagaagtcatttatgtttacatgtagttttcatgtttgtggtttaatatgtacaaatctattaagtccagaacatat

SEQ ID NO: 136010 - DNA, 566 bp, Cannabis sativa
tttgatttctgttggcatcgcacaaaaatcgcacaatggtgtacaaaatcgcaaaaaatttgaaaaatctagaaaaaaaccagcgttcgggtacgaactctactttcatttcaaatcacaaaaacgacataatacaatgaataatgtgtggatccatgcaatacaataaaaactaacaatattttgtataaaaaacacttacccattgcttttggggtgaggaaaatgaaggttcttttgatgaaaataaagtttttggaggtctgaccgagtgtggtagtggtccggcgtggttgaggcgcggttgaggtcgtggtgggtggtggcccggctggttttggtgggtggtggtggctgagggaaaacgagagaaagaaagagagagtgagaaatgaaagtgaaattttttggttttgatagaaggtattttgggattaaaaaggaattaaaagtatgattaaaaaatgtgtagtggtaaggaatattttagggaaaaaacagaaaaatacaaaaaaggaaaaaaaattacaaaaatactttgggccggcccattaaacatttataca

SEQ ID NO: 136011 - DNA, 576 bp, Cannabis sativa
tatgtcgacaacatgcatatttaatgaaaccgcatactatgttgtcgatactatgtcgatgttatgtcgatagtttatcgatgatacacctgtcggacatgcaacgtggcagttgggaagggttattgggaacgtaggtaaaatttattaacattaaatgtgtaaccgtaaaaaatgaaacgcatgcaatgtgtttttttcgagtgaatatcgataaaatgtcaatagcttgtcaatagttgaatggattaattaccattgtacacgtgtctgacatgcaaattgcattggggagtctatgtcgatattatgtcgatggtgtgtcgattatatatcgatgaggattgccaacctcttttttagtaattttgtcgacataatgtcaacagtatgtcgatgatttgtcgatgaaacatgtcatactttctgctattgtttttatcgacataatgtcgatggatattgatgggatatcgatatttattattttttggtattttttcctatactcaccttgtttggtttgaaattgtaggagacaaagtgtttcttgttgtatcgtacgatggtgtttgg

SEQ ID NO: 136012 - DNA, 597 bp, Cannabis sativa
  modified_base (50)..(50): a, c, t, g, unknown or other
  modified_base (487)..(488): a, c, t, g, unknown or other
aaaatgcaatataaataataaatagtttaaaagggtcatttctctacaanttttgaaatgaggacatttactaacatagtactataatttaaggccatttgctataattttttgaaatgagaacataaactaacataatcctatgatttggggctatttgctatataacttctcgtggaaaaaatagaactgtagaaaaaaactgagctgagtgtttggtaaattataaattgttaagattcttttataataataataaaattttaatctatttcattaaaatcacaaatatatatatatataaaaaaatatgttatataaaatttttgattttttttatatttttaattatttttttctattgtataaatttatatgtatttgataaaaataatctttaatattattaaattatatttttatcaattgtaaaaaaaaaattattttataaaaaacttaggtagatattgtttgttaataataaaannataaatataaaatattttttaaagcaaaataaaaaattagaaatttaaatattttgtctttcaaaaaaaatatttttattttttgtaatatataataagtaattaaata

SEQ ID NO: 136013 - DNA, 986 bp, Cannabis sativa
atttagaaattcaatcaaaaaaaattttgaactatcgtgtgagaaaacttgttgcacaagttagtgaatgggccacaatttaaatttataaaacttagggtgcatttgatttttttaagatttagaggtctgaatctaaatacatatctgaataataagatatcaactctaaatctgaatattaaaatatttagattgtttgttttttaacatatctgattgtattttttttttattttttaggtgtttttaattatataacattaactaatttattaaataaactttctatttgtaaaaatatttttatataaatcaaatattaatttttttaaattatcactatcatatttattttataaataaataattttttaattcaccaaacacaccataatataaatttaatattattatataaatttatatgataagaaagataaagtattaggagaaactaatttatgtttgagatttttcttttaaaaaaaaaaactaatattatatacctattattaatcattatttttatgaatataatatgtatatatgattatatattattagaaatacactattaaaaaaattataaggtgattgacgtgttgttacactatttataatattatatatgttagaagaaatgtgaggtgattgaggttatgttgcaaaaaaaaaaaataaaggaaaatggaaagagaagaaacaaaatagaatagatatatgattcaaaaaaaatatagaatagatatatgtgtctgaaaattttttagtgcctattatacatctgattcggtcagatgttttaagacccaaaaagtggtttagaaaaatataaaacaaatgctcttgatgagtctaaatctgaccaaatcagattaagactattattaagtgtaaacaaatgaagccttagtgtgctatgcaaatcactttaacaagagtaaagtaaatttataccatttgattttgagtagtcttgatgt

SEQ ID NO: 136014 - DNA, 692 bp, Cannabis sativa
  modified_base (253)..(267): a, c, t, g, unknown or other
cggttctgcaaccggaattccggttctgggaattcctgaaccccatccggaattccggttgctgaaccagaattccgattttgagctggaaacttcaaaaattcgtttctcactcaaaacactcccaattcacaccaaaacttccagacctgttctaaatacccccataaacatttccaaagcatcataacaacccagaaactacagatatgaaaaatgccatgtgaactccaagctttgagttcaaaactcnnnnnnnnnnnnnnntcacctacaagcatcaaaacttgatttaaactacataatcatgcataataatactgcagaaatcaaacccactcacaaccaaactctacagcaaacaactcctcaattttccataaaaacataattttgagctaaaatccaaaactttgaataaacaccacaagcatgcatcacaaccaacttcattctactcaaataaacaagtttaaactactgaaaacaacaacaacaattaacagcagcaagtttaaacaacaaacatgcaaaactccacttttcaaaattcaagcaacaaaagattaaaaataagaacttaccttggcttggctacactagaattgagctaagatcacttagaattgaagaagaaaaccctaaaccctagcagcccaaggaattcgaaagagagaaagggagagctttga

SEQ ID NO: 136015 - DNA, 817 bp, Cannabis sativa
tctttttatttttctctaagctatgttcattaatcaatctttaagggaaatttggagatcaccaactttagtgtaatattgcttattgtttcactttgattatgatttcttttcttattgcttgaggacaagcaaagttttcagtttggggtgtgataactccatgaaaatagagttatttgatctttctaggcattaaattagctttgttctcaagtatttttagtttattttagtaacttttatttggttttatttagttttgcaataaatattaattttagtattttagattaatttataattaattttgtaatattttatcaattttatttagtttctcattttataagtatatgtttgtggtatttttgtaaaaaaagatcaagtgtaaaatttggacttattaagtgtcaaaatggtcaaaatagataacaatttgaattatgtggttgatgtagttgattaatttaccaaagtccaattaagacccaaatatcttttttccaaaagttcactgtatttattaataggctgatatatttttagtgtgataaaggtttaaaaaaatatacaaagaaaagaaaaaacaaatcaaaaaaaagaaaatgggcttgatattttttctttttgtaattgggcctaggtgagagaggggttaggcatctatcatatatgcatataattgaatagaaaaaaagaagcagagggggcgtgaattacaaagaaggagaggcgtgactggaggaaaaaaagagggcggctgggtctttttggagcctgacgcctacagcaaccacacagtgaagaaatgaag

SEQ ID NO: 136016 - DNA, 510 bp, Cannabis sativa
ctacttattatctatttaattatttatttctttaatttcaagaaaagtgaggtgtatttgttattcaaatttgtatttttcagcactattaattctatttcttttgatttcaaaaaaaaaaaaatcgttttctataatttaatttttacactacaaaaactaatttgcatttgcaatctcttgtattttttagtatagaattgcaaacttaaatactttaaccttcccgaaaaaaaatccatatattaaaaaaaattctatatatatttggcataattaaacttaattagtctaaatttaaaattagacttaattaggtctaatatcttatttattatataaatgtctatataatatttacattatatttaacaatttttgttacatcttcataaatattttttaataattttaacataaataacatttctatcctctcacaaaagaaataatcattcacaaaatcacaattgagaataaaatgcatccaaacacatatataaaaagtaa

SEQ ID NO: 136017 - DNA, 957 bp, Cannabis sativa
ataattcgacccctctctcgtcaaaaaggtttggttaggaagttataacggtttgacccctctttcatcaaaaaggtttagtcgagaaactttaaaaaattcaaattttttttatttttgaagtggtgggtttgcattatatcatgtattttcagatgaattctggttaatcatacacaaatgccccttaagtaattttaaagagtaaaactttataattacttaaataatagaaatgattctctttattcataactgaagtttaaatattacatcagtaatgtgagttacatcatttatttattgctagtacggtcataaatattccacgttctagtagttctttattagcgagccattgaaacgagccaatttgtaaactccaattccaactactgcttcgattacatatggaccctcccagttcgggttgaacactcctgtggatgcatccctcttgtttgcaaatacccgccttagcaccaagtctccaacattgaatagtcttttcttaactttcttgttgaaatatcttgtaactcggtattggtacgctgcattagtgacttgcgactcagtttgtttttcatcaagtagatacaaggataattttagaagttcttggttttctttttgaatataaaactctcgtctgtgagtcgatatgttcacttccacaggcagcattgctttcaagccaaatgctagcgagaagggagtgtgtcccattgccatcttctcggtaattctgtgagcccagagtacttgaggtagctcgtcgacccacctgcctttggcagcgtctaacttcttcttgatagtatcatttaaggtattattaatagctaccacttgtccatttgcctgaggcctggatactgacaagaagctcttaattattttgtttctctcgcagaactcagtgaataagtcaccatcaaactgggttccattatc

SEQ ID NO: 136018 - DNA, 614 bp, Cannabis sativa
aaaattcaatttataaattgtgtctgtatgtaaataaacatgaaactctctaatcaagtttctactaaaattaggattaaacaaaacattgtctaaaactaaaaatttctctgtaacttgaagcaggctcttccattagcttggaccgatactaactcgccatttccaactttgagcttaaactcctcttgatttagataatcccaagtttcaagcatctgcaataaagaacaaacatggttagtagatccagaataaactatccagaaggatttttcattctctaaaacacatgattcaaaaacaaaagcattaccttcattcgaattgtttagaagtctaggacatcgttcttcttgatgtcccttctccttacaatttgaacattgaagagtactaccatcaattgtactggaagaagcagcattgttagaagcttcatccttaattcttttcctcttacacaagtttgcaaatctggggggcagcattggaatcaagttccgttcataagttcgcaattctgcttctagcttatccatgtcggaagagttaaaattgttgatcacataagatacaacaaatccattatacttaggaggaagactattaag

SEQ ID NO: 136019 - DNA, 1242 bp, Cannabis sativa
aaatattataaatatttttaaccatatttttaattttattattatgtattttatattttaaattgaaatagttgtaataaggaattgattgttttccattattttagtaatggtaaatcgattcacacactatatttttcgtaaagtttggaaataaaaaacctttatatcaaatttacaaatccagtctatatatagacacactcaaatttgattgtgagttttggttaaaaatatagtaaattataatatatacataatgagatacgctacctaattaaaaaaatttaaaaaatttaaaaaatacgtatatatataatcatattcaaatgatacaccaatgtagcaataaccaaaaaaaaatcttaaagatcaaaatctcaaactccatttaaaaattaaaaaaaaatacattacttaattaaaaaaaaattaaacttacatgtattacatttaacattacctataacctgattaatctatcaaaagaaaaattaggtggcatttaattggagataatgaaatagaaaggaaatgatttttatttcattcctttagttgcattttaaagtattggaaggaatatcattccaatagaatattattttccctattttaatggaatgactattccatttcaaaataaaaggaaagatcattccaatgtaacatgaggaagaatttaatgatttttttatatacattttaaattttattctattcctattcttatttctatatttttatttctcccaaccaaacgctaccttaaatttattctgccgctatttattcttaattttttttttcagacgattgaataatctgcccatataatataaaaatgaaattttttttaattaaataaaaaaattaagaataaaaacttaaatttttctaatactacccattcatgggtaatacccattaagagtgcacccttatatatttatagagaaacatgagtcagttatgtaatgtttagggatgcagagcgggaaatttacaaggagtgctctccatgtccctattcctgttaaggattttaattctcatccctttattcccattgagaacggggtggagacgggactagaaatcccctattgtaaaaaataaaatttattttaaaaatttaaatatataaaattattaaattacctaaaaattattatataatatactaattattataaaaaatacaacttaaaaaattacaaaaatgacactaatatacaaaaa

SEQ ID NO: 136020 - DNA, 786 bp, Cannabis sativa
tatcaaacataataaataaatgatgttataattgaatggaaaactatatatattggtagtctaatctcaaacactgataagttttttataattaactttaccattagggactctcaaaccatttctcctagctaaagcatctcttaatacacgcccatcgtgtgctgaaccttcccagcctggtagaacatatataaattgcatgtcttgtgaacaaactcctaaaacgttagttgcaatctctccttttcttgttctataccttggtttgtcagcttcaggtacacgcactcttatatatgttccatctaatgctcccagacaattctacaccaaattaattatacttattaaaaattatttaaagttaacaattactaactataattttaaatcctcaattcataccttaaaccacttccaccttggatcaattgaggtcgctaatattggctcaggtgttctccaaaattctttttggcagcgaatcattgcttttaaacactcatgaaagtatttgcttatggtttttcctgatcttttgaaactaaaaccaacaactcggttcttatggtggtgtgctaaaatatataggaacattgctaccatctcttcgatagagacatttcgtgtctttcttaaatttcccctagtactgagtatgtgacataacctttgaaatgtttgtctatccattcttaattgtgaaacacaattgacatcacttgcatacactaaatcatgtaagttttctaactgtttgtagactctcattatagataatgg

SEQ ID NO: 136021 - DNA, 535 bp, Cannabis sativa
  modified_base (40)..(44): a, c, t, g, unknown or other
aagcataaaatatttataatcatatcttaaatttaaattnnnnnttaaccaatttttttataaatatttattttaaactcatatttaaataaatatatttagctaaatgtgaaaatatttcaaccatttagtgaaaatatctcaactacttaaagaaaatatcttaacacttaggcgaaatatcttaaccactttgagaaaatatctcaaccattaaaagagggaatatctcaattactttgagaaaatattctaaccactttgagagaatatctcaatgaaatatcttaattacttttaaaaatatctcaaccactaagagtgaatatcttaaccactttgggagaatatctgttaggatatttttagactattatttaggttatttttagagttaattttcttatttataatcatttttaatagaattatacttgttttgtatgatttcagatttcaacacttgaatgtataaattggtcaaattttagaaaaatttaatctataaaagagagaaaattgtacaaaaaattaa

SEQ ID NO: 136022 - DNA, 648 bp, Cannabis sativa
accttggatgcaagcctatgaacaaacctatggaagccaatctcaagcatggacaaaatgacaaagagaagttggcagacccgactctatacagaaggatagttggaaaactacaatatttgactattacaaggccagatatctcatactcagtaaataaactgagtcaatttcttgatgtgccaagacttagtcacatgaatgttccttttagggtcctacattttgtgaaagccacaccaggtcagggaatttattttcctgctgaatctgaagttcagttgaaagcttacacggattcggactgggctgcttgccctgacacgaggagattaacaactagtttctgcattttcttaggggactctatcatttcatggagaagcaaaaagcagcatacggtttcgagatcctcagcagaagctgagtacagagcaatggccaatacgacatgtgaggtggtttggttgctatcgatcttaaaggagctcaatgttgatcatgaaggaccaacattgttgttttgtgataataaatcagctaaacacattgcagcaaaccatgttttccatgagagaacaaagcatatagagatagattgtcacttgataagagagaaggtccaagctggagttatcaagacagttc

SEQ ID NO: 136023 - DNA, 669 bp, Cannabis sativa
ataatttagttgttcatcaataattattttaagatttgttcaagatgagataaataccttaaacacctcaagcataacatgaaataaataaaactaggctttttgaagcaatggttagtctcataaaagttaaaatattaatggaaaaaatagttagtaatatgattcactgtagtataactcttgtgttgaggcaggcgggtcctggaaatacgcattggtgtggtcattaaattagtcagctcttgcttgattgttggtaaattgtggcctttgagatccattattctgttgatggtttgggcaccgatgataaataggtggatgagcgacaaatgcgacaatgtcttgagtttcttgggattttctctcggtttggtccttctcttgtatttcccgtacccatggttctcataacttcaggatcttgaataatttcaggttgttacaatatcttctaggttgtggcgtctcttctttcgaattggagctcaactcaaattcttccttgaacattagtgttagttgttcaatctcttcctttgcatgattgtatgaagtctctaatattgatgcattgaaagtcttgttataagttactgaagagagaaatccaaaatccatgtcatacatgtgttgttgttgtggtgctggctggttaaaatgtag

SEQ ID NO: 136024 - DNA, 905 bp, Cannabis sativa
  modified_base (30)..(43): a, c, t, g, unknown or other
tagggtgttaatcaacatatttgtgagtannnnnnnnnnnnnngtaaaataatttccaacaaatgccatagcccatttcaaagtttttttggacaacaaatttaaacttaaagacataggctcccttcgatttttccttggactcgaattcgctcggacaaaacaaggcatatcagtttctcaacgtcctttcacccttcagcttttgaaggatacagggtacttaggagctaaaccagcttcctctccaatggagtataatctcaaactcaacaaagataaatgggccctcttacctgaccccactacataccgcaaccttattggtaaattaatttaccttacaatcactaggccggatattacatatgcactaaaccaccttagccaatttcttcaacaaccacgagttccccaccttcatgccactaacaggattttacaatacctcaagagcactcctggacaaggacttttctttccttcaaacacttccccaaccatctcagcatacgctgagacaagtttatgagcgtccaacgttcaaatttcattctttgctgatgctgattggggcagctgccaagacaccaggcgctccattttcagggtattgtgtattccttggccaatctcttatctcgtgagaataaaaaaaacagcaagttgtctctcggtcatctgctgaagccgagtaccgtgcaatggcaaatgccacttccgaagtaacatggatccttgcccttctcaaagacattggcatctctccgaaaattccagcaacattatactgtgacaacattgctgcaatgcacatcagtgagaatcccgtctaccatgaacgcacaaaacatgtggagatcgactgccacttcattcgcgaaaaagttcagcaaggatccctc

SEQ ID NO: 136025 - DNA, 897 bp, Cannabis sativa
aagtcattgtacattttggttgaccctggatgcattgagtagggtgtagtgtgtgcttccatcatgatctttcttttaagctctatgtcgttggctacacatattcttcccttataccttagcatgtcgtctgtagcttcggagaaatcctctgactccttctctggcaagcctgctcttaaaaactcatcaacaatctgtgcatctttaagttcttgtagcagcgttgagacaatggttaggttagctagttttcgactaatgatctctataccacttctgtagagttcttattgtagtggcctttccatttgtgccagtattgccaagctggcataactgcgtttgcttagcgcgtctgccactacgttggccttccccgggtggtagtgtatttcacaatcatagcccttaacaagctctagccattgtttctgcctcatgttgagttcctttttcgtaaagaagtacttcaggctcttgtggtcagtttaaatttcacttttctcaccgtagagatagtacctccatatttttagcataaaaactactactgccaactccagatcgtgtgttgggtacctttgttcagactccttaagttgtcttgagacatacgctactactttgtcattttgcatcagcacgcatcccagcccttgttttgatgcatagcagtacaccacaaacttatccttgtaaatgggaacacataatacaagggatgttattagtttgtccttaattgtttggaaagtaccctcacactttcctgaccagacaaacttctgggtctttcgagtcaagttggatagaggagttatgatctaggaaaatccgtcgacgaagcgtctatagtaacctgctagaccgaagaagcttcttacttcacttata

SEQ ID NO: 136026 - DNA, 705 bp, Cannabis sativa
agtcccatcttttcataagcagttttgaacaagatattggaagaggctccattatcgatcatggttttggccaccattttattttccatttgggacttccacgactagcgggttgttgtgcggaaatttaattttgacagcgtcttcatcattgaaggttatggtcagctctcctgttcgtggaacttttggcttcctttcttccacggccaggataacttcttctttctcgttttgtgctgtttgggcatacctctcccgagctttgcccaaatctccagcaatgtgcgggcctccaacaataacttgcaaattctcatctaccggtggaggtagtaaatcctggttattgtcgttcctctgaccctgatcggtcttcacatacttctgcaggtgtgcattgtttttccttatcaggaattcaatttcccatttcaagttattgcattcattagtgtcgtggccgtagtctccatggaaccgaaaactttgtcatgtgcctcttgttgacatctttcttcatgggtccgtgcttcctatatggggccagtgactaagttgccctgtacacactttctataacttcagtcaaaatagtgaatgcagtgtactttgcttgattttcccagggagcttgttcaaatttgccagtgaattttcctttcttcccattcccttccatgtggttgttgttggaacgtttac

SEQ ID NO: 136027 - DNA, 775 bp, Cannabis sativa
  modified_base (387)..(388): a, c, t, g, unknown or other
gtcgtatgcccaatatctttatgaaatttacaatatttgttaggatctcttttgctcctcgaatttctcataggcttgagtttaccaaaggctaccttctgctcatgtgcgaggtaaatattctcccaagtttcattaagcttggtataaatagtatacactggcacatatttgttatgctttttttgtttctttctatccttcgacggttccctaattccttcctttcttttcggaccagaaactcccgagttatctattctcgtggaagcagtccctgttgatacattgctgggtttacctcccgagcttgttttcaacaagttcatttaagttcatttcctttcgggtttcttccttctggacgaacacctgagctctctcatnnaactcagtgatgtttcttaccggacgtccttgtagatcatcccacaactcgcccccagcggttaatggattagtagagattcttgcctgaagggctgcaagttgcctgctgtcatccaagtttctaaccctagcggcagccatgctaaaatgacttaagtacgccttaagtgtttcgtcaggctactactttatattggttagcgagaccgcttcaggtcgcctatccctagcggcctgaaattgcttcttgaaatccctggatagctgcacgtaggaaattatttaatgatgagtgaacttgttaaaccagctactcgctgctccaacaagcgaggtggggaaagaaatacaacgtaaattttttatcacgttactcgctcgcatt

SEQ ID NO: 136028 - DNA, 1113 bp, Cannabis sativa
  modified_base (1025)..(1027): a, c, t, g, unknown or other
cactgtgagtcgacagactcagaaagaaaagcataacataaaacataataatatcctgggttataatcaggcgcccatgcacccaaccataaccctatccccatgtgccccacagtactaagtctagaacgttcatacgacaatactatcgaccataatgttagcctatactcaatatgccagtcatactctagccatattgatgtgacaacatcaatcaatatttcagccagcatacatttatgagtaatcaatacaactctacgtatattattactgctatcattgtactctaacaggcataaacaacatgtatggtaaacatgtaataacatatgcataacattaaactattcttaccttgattccgaatttaggtgtgctggccaacctgagtggaacaactgctcggcaaattacaggctccgaaatcacatcgatcacaacatggataagtgacacactaaatcacaaccggggacttaggttttaaaaaccaaaaatctatctactgcaacttaacatggaaataccctaaactagcagggaattaaccaagcaaagctctgaaactaacacgaattttttggggaacccagtagcaaatctgggtaaccggttttacaggtcctgtaaaactgactaaccgttttacaccagaaaacccaaaaaattccaaaacctaaccaaatcgattccaatccttaccaaaccttccagacctgcatattataccccaatagacatattccaagcaacaaaacaacaaatcaagctcagactcaaaaattaccattaaagagccaagcttgagttctaatactcaaagcttgctcaaacctaataacaacccataaaaccatcatgaatcaacatatttaaccataattaaactttagaaacacagagcaaacatctacaacaactacaaaacttaaactcacaaaaatatgcaaaatccaacttgaaacttaagaaaactagagagcgagttgcttagagtctttgttggaaattattttacnnngatctatttactatcatgtatgttggattaacaacctaatatgaattctaaaaacaatgaaaataaacacatataaagttagaaaa

SEQ ID NO: 136029 - DNA, 720 bp, Cannabis sativa
aaagtagagtcatagattacatcaatctatcagacttgaactagtatatatcttggtgttaattttatcattttactactttaattactcctgatttttaatactctgtccatccctattttctcctattactattttgtgtttgttattcttgtcattgctaacagtttggttagtaaattttagttgatttgattctccactttagtcctaattttcccacaaagagcttatgtatattgttacatgggaatacccttattgatgcctagccattaaattgatgcttctgcattgcttcagtgtatggtgtttccaaccttgagagcaaggttattttataagagatggtgtataagggatgctcaaggtatctatattgttacatgggaataccctcattgatgcctagcaattaaattgatgcttctgcattgcttcaatggtatgatgtttccaaccttgagagaaaatatatttttgaagacggggttgtgatggccaagcccaagtcacattggacctctctttaatggaaaaccaaatgaaagtatgggctaggcataaagtcgatgggaatatatagtaagctttattaatagtttggatgttggttgtttggtgttggttacaatttgaaacccttcaaggggtagttatagttgctcaccccttacactttattgttagaattatttcttctagatccttcttttacta

SEQ ID NO: 136030 - DNA, 1027 bp, Cannabis sativa
  modified_base (718)..(732): a, c, t, g, unknown or other
cctaccaggacattgtatcagtttgttggaaaccttaaaaattatttcagatgtgcctgttttgtatttttgcatgtctttcttacttgctaaaagatatgataatttctgaatgtgtatgaatttatattgaatcatgttgttttttgttattaattgtagttataaattttgagtcttcattgttggtctaacttaatttgttgttttaatgggacaaattccaaaggattgtcatccattagacaaatataatagtgttagatctcaacagataagtatttataaatgcaacatctagtcgtacatctaaagatgacaacttagactagtgtttactatatgaaacaatgaagagatttataaaataagaataactttgaatctcgcctaaacgggacatcgttagattcttattttattcgaaattatcctttttttagtttcttcttagcttttttatttagaatttgcttagatagtatatcattggatgaatagtttataaatcatctacttatgatgtcactctaatttctcctatgcaattgaatggcgcatataactatattccagacattttatcccgacatgatataaatccttgatcttggaaatcttctacttgtatatgcttacttaaggaaaactaaacttagagttagattagtagtggtggtccaagatagaattattactcattgtatatttggtatannnnnnnnnnnnnnnctttaaattttagattccaaatcaaaattttaaatttcagttccaagaattcattacacattacagtataactttcacaagttttaatatccattttctatcaatggatccaaactatatgtttatgtatgggatatgagttttgtattctgtgactaggatccacttggactattctaagaactctttattgtaactagccctagatcataaaaagaccacaaccacattctatatatctatggcatttacatctggttcatagtggttttgacaagatcattctttgcaaaga

SEQ ID NO: 136031 - DNA, 692 bp, Cannabis sativa
ggaagccattgaagcgttatttacgcgagccaaccacgaagtatatatgcaaaatttaaggttcaccgaaagtttatagctttagcaaaatctcgttcatctgaaataaaaataaattggggatttaacccgcaaaaaattactcatgaatttttcataaaccaagaattcagttatataggcacactttaaatagaatagatagatttgttttattatttaattaaataaaaataaaaaattacccataaatttctcataaacaagggcacactttatattgaataaatattttcatttctcccaaccaaacgccacctaattcctattgtaccatgtaattagtggaatcaaactaatagaaggtctcaattaaagaagcagatactcatattttcaaccctatgtggatgcatcgattttaacttaaaatatagttgaatttggagttgttattttctacaaactgtaatttttacgtttatggataaaaataataacaatatttttttcaataaaaattaagtcggtcagaaaaaaacactttatgaaaaaaaaaaactctaagtagtaattaaattatataattaataaaaataatttaagaataagtaaataatattatttgtttatctaaaaaataattttagaaaacgtgatagtgtgaccttttttcggttaggtatttgttt

SEQ ID NO: 136032 - DNA, 1102 bp, Cannabis sativa
gcataaaacccaacagaggcaaccgtcatggtggttctgaaacttgatacacttacccgtagtgtcccagttgtaaaaagtatcatctgggtgagtgtagagggcaaggatgtttccagtgtgggttgctaggacacattgtcagtaaagatggaatcaaagtggatcttgggaatattgaatttgttagggattggctgagaccgaagacagttatagaagttagaagtttcttgggtttgcctggttattaccgtcaatttgtagagggattttctaagatctcaatgcccttaatcgaactcaccaaaaagaatcaactatttttgtggacatataagtgtgaagcaagctttcaggagctgaaagagagattaattacaactctggtattagccctaccatctaataaagagaaatttgtagtttactctaatgcatctaggaagggtctggggtgtgtaccgatgcaggacgatcgggtcattgcctgcgcctcttgtcagttaaaggaatatgaacaacaatacccaactcataatttagaacttgccgcggtagtgtttgctttgaagattttggggcattgtctctacggagagaaatgtgagatttataccgaccataagagcctcaaatgcttctttacccagaaagatttgaatatgaggcagagacatcggttggagtaggttaaggattatgactgtgaaattctttatcttcctgggaaggccaatgtagtggctgatgccctgagcaggaacggtcccaggcatgtaactagtatgactaagatttcaccatagttagtagatgacatcgtcagatcaggcattgagtttgttgtaggaaaacttcataatttaatgttgtaatctgatctgttagaatgaatgaaagctgcttagttaactgatccaaaattagtgaagatccgagaagaggttttagctggtcaagctaaaggttttttggtgttagataaccaaatcctgttgtataagactaggatttgtgttccaagtagtgcggaacttaggagtgagattctcgaggaagctcataccactccatattcactgcatcctggcactaccaa

SEQ ID NO: 136033 - DNA, 914 bp, Cannabis sativa
  modified_base (51)..(61): a, c, t, g, unknown or other
tttaagtatttatgtcacaaattttgtaatagtaaagttaaaattttaatnnnnnnnnnnnaagtaattattattaattaaaatagatactttattttttatatataatttaaaatattttatatatccgccgcaaagcgcgaaatatttactagttatgttatataataataagatatataaaatagatatatagatagatatataaatttttataaaatagtagaacattttaaaaaaactataaaataattaaaaaaaaaagccaaaacgtaatgtgaataaaaagctagctaaaaaaaatgtaagtgattgaaaattaaaaaaattaataaataaaatattatttttgtagagttatcattttttttaaaaaaataaataaaataaaataaatgaataaattaaaaagtaaataaatatattttaaattaattaatatttatcaaactaataaaaaattaaagaaaagagagaattaaggagaaaataaaaaacactaattagagaaattttagagtgccacatcactccttcgtacttatatatatactaggaaacaggccgcgctttgcgtgcggcggttaaataattatataaatattaattgaacaataaaattagtatcaaataattttaaatttctttttatgtatatttttttcaaaaatatatatacatattaaaaaaaaataataaatctatatagaaaaccttaaagaattaagaaaaattatcatacaacttcttacataaataaaaaaatcagataatttttttaaaaaaatatacattatagtgaaaacaattagaaactaaatattttttgggtaaataccattttggactctctgttttacaaaagttaccaattagaccttgtgttttgttaaatgacaaaatagatcctgtat

SEQ ID NO: 136034 - DNA, 555 bp, Cannabis sativa
caatccaattcaagtataatccaaaaaaaattacatcaatactataataaaatatttatcctagtgtattttcgttgtttttcaaatttctaatagtaaatttcttgatattaaatcgtgaagagacttgtaaatagggttacgtacatggaaataatattctgacttttgatgttttataatagttgcattacaattattttatataatatgacgtggattgagagcccatcaaaaatgtatatacatatgaatgctttatataataggtccatcgtcagctatgaaacgcccaagcatgcaatacataagtgttatctcattaaagaatatggattatgaaaagcctaacatgcaacacaacttatcacacatgtcattagatagttgacaggtgttatttcagttataggtgttattttttttttttataaaggtttatagatatagaaggagaaatgctaaagggtatcagtggtgcctagtacattcttacgtgttaatatcgctattggtcaaactaagtatcgggtcccatataatttaatatagtag

SEQ ID NO: 136035 - DNA, 729 bp, Cannabis sativa
acaaaatctaattaaacttagtaatgaagtgataccgagaagcaattttagtaaagcacactacaatgccatgcagtaattaaattccatttagtattcattcattatctgtaacaaaccgaattccatatagatataaaatcccaattaaatcaactatcaatacaaatccccaaaaaactcaatcgccaaactattaaacaaaatttggatttctttgcacttcatatacaaaccaacagcaaattacaatattcatactaaaacaacaaacatagaaacaagcagcaacacaacataatgaataaacaaaaatcaaaaggccattacataaaatgaacaattggaaatatagggtaatttttctttttctttttttgaaaaaaagcaattatggaagacttatttatagggcacaaaaaaagaagaacagcaatatcaattaataatagtccactaaaaaaaattcagagaatagagtaaaacccatatcaaaattatccatttcacaaaataagcccctttaaataattggtaatttcttcttttaatcaaaaattttctatgctaattagatatgttatacacgactctaattagaaaatatgtacatatataaatttttcaaaagtcatctaacatatcatttatgggggcttaccttccatgcgagtgagaaaccgaggtgttgagcaagaagactggctccgacccaacaaagaaaacaga

SEQ ID NO: 136036 - DNA, 841 bp, Cannabis sativa
  modified_base (723)..(732): a, c, t, g, unknown or other
aagatctcgaaagcgaggatctatatctgcttccccgcgttgggccggacttcattaccttttgtcggcgggcatcttctattttttggctttagataaagccaggttctaaaagtgtcgggcagactattggtctccccttagacatcatacccgatgcattgttgggaactttaggcataggtggtagatgaatgttactgccttcaggtcatatagggtaggtcgacctatcatcgcattgaaggctaatgggactattgtaccatcaacgttcttgtagtgggattttctctaactaccaagggcagtcggatgtatcccaagggtgcaatgccttggatgaagaaaccataattaattggatgtgcaaagtgctaggtctattagttggagccccatttttttgtaagttgatttgaaaaggaagctagaggaggctccattatccaccatgcaccagatcataaaaaatttatatgtcttttttatatatctttttgcttatgttctttttctaagttaattttttacatgctaatatgattttcaggactaagaataatcaaatggatgattctagttctagttcatcttctacagatagcgattttgatgacttttcaaattttttgatgctataccttctaagtgattacaatgggaagtttattgagaaaatccctcaatgaacatatgtggagagaattttgtgaaacaatnnnnnnnnnntcatgagagaacatgttacgaattgttgcgaatggataagaatgtatttgttgagctttgtacttgtttaaaacaaaaagaatacattaaggacacccgagaggttaaa

SEQ ID NO: 136037 - DNA, 572 bp, Cannabis sativa
tatacttctaataaaattttaatgttattgttgacttcttttttacacatttttattaaaataaaatttattttattaatgcattggagcataattgtacaatttaaaccaaatataacattgatttattttttaagctaaatttagcacaaaatttacactatcaaattgaaaataatcttaattagggtcatattatattatattgaattatatgctatattttttttttatataatactatgttaaaattttaatttataatagtcaatatcatatatagatttacataaaaatatgataaaatataatttaatataataatatacaatacggtataatattacataccaaataaatccttaaagtgtctaataattattggtttctcaccaaccattgatatcagcttgctcttgcacacataaagaatccaatgcaaaagccacaagaggaagtaacaaataaacttaaaacataaatataaacaagacacaagttttatagtggtttaattatccatggtggggaatctaagaggttgtttggctttacagtttaaaaactgtttt

SEQ ID NO: 136038 - DNA, 1106 bp, Cannabis sativa
  modified_base (416)..(427): a, c, t, g, unknown or other
tgttatttctgatctttattagtaagtaaatctgattatattgaaatgtgttttatttacggcacaaaatccaacagataattttttttttatagggtcaagattcgtttcataaattttatatggttttcttatagggtcgaaactggattcacagattttgaaagttttttaatgggactgcttcattttatgatttttttttttttaattttaagtttctttatattattattttttttctaatttgaaattggttttcgcatatatgttatgtttttaaattattgttatgtgttgttttctattattattgttagtattttttttctaaattattgttcgaaactggtttacatattttgagagttctgtaatggggttgctctattttataatgttattacaaatttttnnnnnnnnnnnncttttttattattttatttctaggagaaacttatacttatattttattttcaaattattggtatgcattgtgtgttgttttgattatatttgtgattaatattttttttgtatttttgtatgtgtttttttttttttatttgattgtccgatgaaattggtttcagtgactttattatttaacatttattattttttatgatttttatagcgtcaaaagaggtttcattgggtcggaactggtttcacaggttttaactgttctgtaatggggttgctccatttttatgatgttattgtatattttttattttgtataaaatcagttttattattgtatgatatttgaacaataatttttattttattttaaataatatgtttctcacacacatattattttattatttttataatttatttttttaagtaagtagttttcataactggttttttttattgttgttcataattgagttttaagtttcaatttttttatttgattattttacgaaactggtttttatttgtttatttttattttgatagttttactatctggtttctcacattcttccactgtattttttgttattcttttatagtttttattgtatttttgtctctttaattttctttgtttctttttttctctttgattttaatttctgattctcttt

SEQ ID NO: 136039 - DNA, 1759 bp, Cannabis sativa
ttcaacttcaattatttgcctatttaggaataattaataattattttcttatatatttaatatgtaacaaatgggtgattaacctactttgaactagatctgttgtaaaccctgtaccatataaagggcattagatctcactcaaaacttaagctaggctaagtcattccatatgctacaaaggctttcttaagcctcatacacgtgctcctctctcgccctcttctcttctttagtccttcacaagaactcatcagttcttggtctgcctagcattgttctcactattgtactattcaaagagagccatggctagaatcataaggttctcatttatgatctgcatggtatgatctctagaattaatacaactaaaaatagagtaggtcattacccactaaacaaggggtttgaacctctataaatctttgtgtctcttttattatttattgttcttatttacacgtgatgattgttctatcataaatacgactccacctgctggttgaccaaattttgagtcaacactatcaatacttggtgtatagagtattctatgtaatcaagatttcagttctgggtctatagtggaatcaggaagaattaataagataaaaaaattactcgataaattctagagctacttattgggagcttgattacataagccaacggtgcccacaatatatgagataatattgttttgtagtatcaattaattaatttatattattaattaggatactaaataagactatgtcttatttataaatttattaagcaaggacatatttgggaagaaaagagaatttagggtttgtttaataattaagagagcttggagggtctaattaataaatatatttaaatgataatttcgtccaataattaattataaatattaaatacaaaaagttagtaaataattagaatagaaaaatgacaattttgatgaaagattagatgttctactttaggaaacaaaagtggtaaaaatcaaactcttgggcctccattaaaggtttggccaaaggggtttactttgcattttgaatcattttctttagctcagtttagttctaaacttaactctaatgtctctctatcaatatagaatataatattattgattcaatacacaatatactagtcatatatagacatatgggactctctcttgtcacgaaagaattaaacactatactattctatatacagaaatagaaattctcttattattttaaaaatcttctcgtggcctccactgagtccacaggtagcgaaaaattggggcttgcatgacaacacaagatttttttggatgtaaacaaaaagttaaacttaagaaaataagaaaacaaaacaaaacaaagccaaacttggtcaaaaaagatcttttgcatggacctctggcgcccatgtgtgcataaggtcgtggtatccatcgagtccacaagcaacggaaaatcgttgcttgcatggccacataggatttgtttggataaaaaccaaaagttaaatacaagaaaacaaaacaaagtcaaacttagtcgaaaaaatcttctccatggtctgtaggtgttcatgtgtgcatagggtcgtggcatccaccgagtccaaagaaacaaaaaattgggaattgcatggcaacacatgacttttttgatgtaaaaaaaatttaaactcaagaaaataagaaaacaaaacaaaacaaagcaaaatttggtcaaaaaagatcttttgcatggactgttggcgc

SEQ ID NO: 136040 - DNA, 536 bp, Cannabis sativa
gatgacacgtggagctgagaggaccaactcttaaagaaattaagtaagtgttagacaacagaggggtgtctctgggaaggtgtctcgtggaggggacatgagaaggatcttcatgctcccggaggccaaggacatactaaggcagttccgggaggtacaggactattgaacaatcacctcgcatttaatgctgcacgggggaagacgtattgaaactaccataaacgagatgacagttggtgtaaccccctttttcatctattacgctatgattaataaggctagtgacgactattttatgaggaatcacatcagtcaagaggggataaaagattatatccacctaacccctaagataactatggtataggccatgtatttcctattttgtatgtgcttcgaatatgtgcccctattaagcctgaacagaaagacaagtgattcaatcctagggatctcccgagaaaaacactataaataccccacaaacatactaagaaaggggtcgaggaattctgggtgaaaaaggaatcaaa

SEQ ID NO: 136041 - DNA, 628 bp, Cannabis sativa
  modified_base (155)..(162): a, c, t, g, unknown or other
catacaagctaagcttcgtaaccaacatagacataggaataggactttattgttataaagtcatactgtttagattgaaaaatgctacggcaacatatcagcgacttgtgaatgaaatgtttgcgagacaaataggaagaaacatggaagtctannnnnnnnatatgttggtgaaatcgataaagagtggagatcatacaacagacctagtggagtgctttgaaatattgaaaaagtgaaacttaaccgaaaaagtgttcctttggagtttcctaaggaaagtttctgggattcatagtcaacgcaaggggcattgaagcaaatcctaagaaaatcaaggctttgatagatatgccatcaccaactaaacccaaggaagttcaagcattaacaggaagaatggcagcacttaacaaattcatttcaaagtcaactgataagtgtctaccattttttaaatgttattgtgaggcaacaaaaaatttgagtggaaaaaagagtgcgtggagggctttaagagcataaagaggcatttgtcgacacctctagttctagcaaaacccataactggagagacattactcctccacttggtggtctcgaaaaatgcaattagtgctgcaatagt

SEQ ID NO: 136042 - DNA, 1283 bp, Cannabis sativa
  modified_base (446)..(447): a, c, t, g, unknown or other
aaaattgtaacatgtagcaagacatgtcatcataaaattatacatcgtcgatacattaagattgtatagagaagtatttcccttaagggcaagttgtcgtctggtcggtaagaagaccaatacttgatagagaagcttgttgtgtctatatgaagaatcaatatatgcttgatcagtatatatatattgacaaagtaaactattttaaatttttatgatagtatattaattaaacttattattatgggaaactcttatacatttttctttttaaattttataatttttgtatacaataaaatataacaattgcataatataattgttatcccaaattttggccttgatgacgtgcgaaccaaattgtaactattattcgtgtttttggtattggacacgtggactctaggtcagcaccgcagacctatcagtgggaccctcagcannggagaagtgggccaatcccacctgaatatgtccttccattaacatatattggttccacactcgtaaagcctttcgccttcagtaatttgtacccggaagacatgtccggtactacgagactggagagataaaaccgtgcgttcccagtccttccgatttctctttatattccaacacacaaataaggaaactatagttgttaaatcacaacagagtatcatatcaagattaaagggaaaatatattgttctcaatacgttgtattgcttcattaagatcaaatgttttatttggtgtagccatctaatcttcatcagaagacatctaaatcaaaagaaaagtaaattgtacacaaaataaaaaatatatatataataatgatacaataatattatatacatatatgaataaaaaaacacatatcttgctaatgttgttgatggtgtgatccaaaaatatattttttttttggttattgaggagagaatataattatgttaaaaatgtgtactactaactagttcatgcatgcttcatatagatagtgtaattaaaataaataattagttcaatatctagaaaatttaaatacattgaatatttaccttgaactaagttgaagaataagcatactatgaatgtatattatttactagttaatgcatgattttataaataatgtaattgatgtatatgattaattttatatctaaaaattgtaaatacattgaacattataaccttgaaaaataaaattaattaatataatatgatagaattttaaaactattaaattaattgaaatcttaaattaaatataagtaaagaaaagaaaa

SEQ ID NO: 136043 - DNA, 790 bp, Cannabis sativa
gtaaaataatttccaacaccctctgacttacatgccccaatcggaggtgtcatagccttgcttgactgtgtttagttgagtccataacaggtgctgcactacttgtcattgtctttccatccacgaaatacattccattactcaaccttcctctcaacacaatttctatgccttgtgcaattttcattgaaccttcctcaactttgacaacataccccagtttatcaaacatatcaatagagagaagatttcttgtgagatctggaacatacttgacctgctacaaggtcaacatgacttcatcatgattctttaacaagattgttccataacctttgatctcttatgctttgttgtcctaagaagaattgtgcccccatgactctctgaaagaatcttaaacagtactttatttggtgtcatatgaaatgaacaccttgaatctagaatctaatctccacctaaatctgatctagacatcacaagtacaccagatgacactacaagtgaatcagatgacccatagccatcaacaactccatgcttcctagacttgtgatgattttccctcttcagtttagccttcaaagccaaacaatcatctctaaagtggccctccttcttacaatattaacattgctttcctgcaactccattagtgcttggccctcctatgaagtttctagaattgaatctttaatggttacctttgtagccatttgagttctgatttcccttgtattccgtcttggggaattttcccttaacaatgagtaatccttccccattg

SEQ ID NO: 136044 - DNA, 568 bp, Cannabis sativa
agaagaagcacgataagcacgtgctagtatatactatttataccgagcttaatcaaactcgggagaatatttacctcgcgcatgagcaaaaggttgccttcgataagtcccagcccatgaagcatgcgaggaataaacaagagcctaacaggtattgtaaattccataaggatattgggcacacgaccaacaaatgttgccagttgaaggatgagatagaaagtctcatcgctcgaggccactttaaacagtacgtgaagagacaggcccatggacacaaccaacccaatctacccaataacctaaacaaccaggggttacaacatcttcttgttgaaggagaggacatcttggttatttcaggagggccacatatcacaggggagagcaataatgcccaaaagagatatgtgaaagagataaagaatgagcagttggccttcaccccgaaaccttcaaagaaggtgaaaactgaagaacctccaatcatattcacggaggaagacaagaaaaatgtgagatatcctaacgtcgatccattggtgattaccattcaactcgccaataa

SEQ ID NO: 136045 - DNA, 806 bp, Cannabis sativa
aattaaataaaaatatataataataattaaataaataaaaataaataatctgcaataaaaaaataaataataaataataaaaataattaaattataaaataaaataaaataatatatcatatataatcaaatatatatcataaatatataataaaataatttattatattttattaaataaataattaaaataataaaataaaaatacttgaataatataaaattatttatgctaaatattattttattgcaactattaattttctaaaatattgatacaattttctaataatttaaaaaagaatatataattttataattatattattaatcaatttaagtaattattatttaattaatattattttaaaatttaaaagcttatgtatgataattcaaaattatacatttttaataattctaatgaataagtttttaataaaaaaaattataaataaatttgtaataattctttcatttaaactcttattaaatttaaaatatattaacaaaatcaaaattaaaaaaaaaaacaataaaaataatctcactcacctgcatgggattattaatctcaccctgctggatgggataaataatcttagacatatgagattagttatattagttatccagacttccaacatgcccaaatatggactggacaaattagcctgtctaatctagtccagtcctgcgtactaaacggaccctaagggaactaatattgtataacatgttcccagtcattcatgttattaagctctcaaaacagaagttttaagaatcatcttctctaagaaact

SEQ ID NO: 136046 - DNA, 1006 bp, Cannabis sativa
ttacattgaaacagagttttatttagggcataaaacccaacataaaggccatcccgattgatgcctaatagctgatgctttaagagaactcaatcaggggaaggtacttacccatgatccttcaaagtcaatcacacatgcccgtagcatgtcttctaagatctaaatagtcctctcggattgtccatccgtctgaggatgagatgctgtgctaaattttaatttagtacccatagcttgatgtagactctcccagagtgttgatgtaaatttcagatctctatccgaaaaatggactttgggacttcatgaagacgaagaatttctctaacataaaactcagcatactggtcaatggagaagttcgtctgaacaggtaataagtgcgctgcctttgaaaacctatccactatgaccctcacagagtcactctgtcctgtggttctgggcaaacctaccacgaagtccatagcaatatcttcccatttccactctggaatgtacaatggctgcagcaaccctgctggcctctgatgttcagttttgacttgctgacaagttaagcacttagcaacatactcagcaatatcattcttcatgcttggccacaacaacatggccttgaggtcttgatacaactttgttgactctggatgaactgggtacggagtcgtatgagactcattcatgatctctcttttaatatcatcattcataggtacacaaacacgattcataaatagtagcattcctgtatcatccactgaaaagccaccaaccttccaagccgaaatcctatctcgagatttcactaactctggatctatcatctgtgcttctctgattcgctctaaaagagtagattgcagggtgatattagcaaatttccctacaaccaactcaattgtagctcaggtcatatcatttgcaaactgctaggagatttgatttacagtatttatctgactctgctctttttactcaaggcatcgacaaccacgttggc

SEQ ID NO: 136047 - DNA, 848 bp, Cannabis sativa
taagtggtatttgtgtaataaaagcaactttgtaagtaaaaatgtagtcataggcgtgtgtgagtaattttgtaataaattgtataaaatggatttttcatgtaaaaatttcattttattaagtaattttttacataaaaataataatatttaaattatatttttaaaattctgtaagtacatgtataggtacatggtcattaaatattaagttattattcatgtctcaattttttattagtataattaaattaattttttaaaaataaaaataaaaatttaatgacctaaactgattagaaattgtctcttgacaattcccttaacacttaacaatttaagggtgggcaacatccaatccaattacaaaaaattggatatccaattacaattggattggattggatgctaaaagtttgattctaattggattggatcagttattggatgtcaatctcaaaatctaattaaaaaccgatccaatccaattacattcatatttgttaaaaattatttatatgtatttatataataaaaaatataatatgtattaattatatttttattagatttaatttttgtgttaaatttataacagttagtttttttatgtatttattttcatgatgtttgttttattttattacttagaaatattattgttttaattatttgaaacttttagttgtattacattgtaataatagtatgcttatggagtattaaacttctttttttgaatgaattaaacttaaataaaaggtactatttaatttttacgtagtttttcttcatatttttatgttaatattaaaatttgggcgcgtaattggatatccaattaaaaa

SEQ ID NO: 136048 - DNA, 742 bp, Cannabis sativa
cctttctctttaagggataaagcaagaagttggttacaatctctgaaactaggttctataactacatgggatgaaatggctagaaagttcatggtgaaattctttcctccatcaaagtctgcacagttaaggagtgagattgggcaattcagacagtttgatccaaagcaactttatgaagcatgggagcgattcaaagatttattacgtccttgtccacaacatggctatgagagctggattcaagtttcaattttctacaatgggtccaatggtcaacctaggtctattattgatgctgctgctggaggagcattattgtctaaacctgcaactgaagccattaatttactggaggagatggccactaatagctataatcggcccaatgaaagaaatactccaagaaaggtagctgggttacatgaagtagatcctatgacaaatataggatctcaaatttttactttatctaatcaagtggctgccttagttgcttagaagaatacattaactgtagaaaatgttgctgctacatccacatcacaagtgcctgatatgagtatcgaacaagcacagtgtatggccaatagactttacaataacaactaccgaggaaatccaatgactaactactacaattcggggttgagaaaccatgagaatcttcttatggtaacactaaaaatgtcttgcaaccaccttctgggtttaatgaacaacaacaagaagagaagaagtc

SEQ ID NO: 136049 - DNA, 502 bp, Cannabis sativa
  modified_base (63)..(67): a, c, t, g, unknown or other
tataattaagtgcagattggattggatcagttactttttgaagtcaaacaacatccaatccgnnnnngtgcggattttagatttttcaatctagtctaattcgtgcaagtgtggatattcgcattttgcggattggatcgtacggattggattggatcggatacttagtgaacacccctaattaaatattattttttttatagttacataccatcttatttactaaaagggtattattttaatacactaagggttcgtttggtatgttgtattaggttgtattgtattgtattgtattatatggaattggattatatatcatatttttatataatgctatattaaacctttttttttgaacaaaaggaaattttattcaagacccagcaaaaaacaatacacaagaggcattatacctcaaaaaacacactgctgcaccaaaacaccaacagtaacaaccgcccctactaccaactatttattgttggattttgtgccctaa

SEQ ID NO: 136050 - DNA, 646 bp, Cannabis sativa
atatatataaaaaaaaattaaacgtaaaaatgtactttttttacaaaaaaaaaaatattaccttatgtaattatctctaaaaaaaagttaaagcccataaaaatgggcaaactaaattgtaccatatttttcaaacaaaattttaaacgataaatttaaaaatacctcttttttatatccattaattaaaaatagctttatattctattttattaaaatatacccatttttatagaggaattttcataaatatgggaattgagggtatggtttacttttttatggcataaataaataacattataggattatgggttttttaattttttgacatttatatgggttttttttatgccgtatttttgtaaaaaaaaagtagaaatctcatatttgtaaaacaacaataagttttgccggaaaaatcacggtcaccgaaaaagtcattgaaaagtcaacggaaaaatcacggtcaccggaaaagtcgccggaaaaatcacggtcaccgaaaaagtcgtcggaaagtcaacagaaaagtcaatgtcgccagaaaagtcaacagaaaagtcaacgtcgctggaaaagtcaccaaagtaaatgtctcagatataactaaaaatataatcggttatatgaataaaaattaata

SEQ ID NO: 136051 - DNA, 2423 bp, Cannabis sativa
  modified_base (284)..(295): a, c, t, g, unknown or other
  modified_base (490)..(497): a, c, t, g, unknown or other
agtgggtacgatatactagacccaaccctccctcacatgaacaaccccaattgttaaggcccatttgccttattttaataatgtattaggctaattatactagtttaagttttttaaaattgaattagcaacataattaattttgtaataaatagaattaattttttattagattattttaaaattaatttagaataacacacttagtttaaagaaaagattctagatagtgatttctagtaactaatttatatttttcaatatttaattaagtagaaaaatannnnnnnnnnnnaaattaatttaattaattttagactaacttaaattagaatatttttcttagatattaaattagaattgatagttgagttgattttattcaaggtacttaattatttgtttctattttaataaatttaattaaatagaaaattatatttaactcgaaaatttgttaatttcatatcaacttaaattagaataattnnnnnnnnatattttattttattttaagaattgttaacacagattttcgttaaccaaatttgagcctcacaatattgatttcacacagaaaaaaataaaagctatcaaaataaaggatatgaacacaagatttttttacgtggttttgcattcaaaattttgcatagtccacgagtcaatctttttttagatttctgagtatttttcaaggcctctttcatgtgattttttcgtctcttttttgctcttgtttgtcgctatttataattgcatagtggacaattgattacaaagttgaccgaaatatgtttacagcaattatccctaaatttttggtatttgattacatatcatgtaatgtaaatgcggtttatgatttgaaaatcgtatagctgtgattttctcgcttttactgggtcaaaaatatcgtgtattaaacacgtctttaattgttgtatctggagatgtctcgacagaaacttgattatagtgatcccaatagcgagatagggccattcttccttccgaggtcgacaatgtatgtcttgtgtcaatcgtgattacttacaaggaattcttctgacttgccagggttgtaaacctcgcccccttcagctggatgaagctataggaagtcttcccattgggagatggtcacctcgcttatttattctttgagccgatcagtcttttacacttagtttgttcattgcacgctaaggactttcacggttgatacgtgtcgctttcttcggtgcctcacttttcacatttagcgatatgtggtttctcgctaatatactaagtgccagcctgtacattgattcctcgcctaggaccttacagtcagcgagttacaaatatactctgactcttatgtaattaatgagttattccatatgaacaattgcattgattcatattcccttcatcctgacacgtgtccttcattgaggtggtacccaaatttcgggtatgacaattgccccttaaaaagtttttttttagtaaaaagagctttttaataattacaaagggcatttttgcaaaaatcctttcttagaaaaaatgcatcctttaattctggcgattgtatggtttcgaggatcattatgaatcgtctcttcatactctacccatcttccaaccgttagatttcacaatctttagctttcttgtcattgaactttgtgtataaaagggcggttcaagcttgtcatttttcataaacctctggttttttggtgagatccatttttagaatggaaaatctctttcctgctagaatgtccctcctaagatcagaagttcattctcccaaactcatcttaccaagacgcaccaaccaattttcatttgttcccaaagacttcaagcctcaactagagccgaaaacgatggattccaaggttgaggagcttccgaccaatccaaactaggggaaccccgtatcctgccatggtcgatcctcacaagtgatccttgagggtatagatcttgtgagcaaccttaaaggtcctcctcaggctgataaagaattctagacgaaggttggcatggttttagatgaatctgggaaggaagttcgcgtggtttctattagagaatctagccaacctaaggcccaaacctacgttagaagacctttatgctaaccactttctagtatcgagggatttcctgaggttgggaaaaagatcttggcttcaggaaatgggatcttctgatgatgaggggaatgaggtctgtgtagagatcaaggctctctacatgtagccgatctttctcaagctatgtgtagttggtctttccctaagctacgtgtagacagtctttttcgagtttatcggcttcccctctcatcctttgcttagaaatatgacttaatggtttgcccctagtggcatttttgtaaagaaaagtttgtaaccagt

SEQ ID NO: 136052 - DNA, 516 bp, Cannabis sativa
atattggaacaataatttattttttattttaaacacaatttgtactataaaataacaaattaattagtttattcttttttagtctagacatcaaatctggatgtatataaagtacatgaccgtaacatatcttacatagtaaatctggataataatatatgcacttgttgaatatgatgaaatgccttgctcagataaaatttcttggtcataagtttatttgacatatatagctatactatgtctatactcatacatgcaaaataaaccaattactaaaggaaaccctaaatatttataaactctctcaaacataaatatcagatcccaagtaaaaaaaatgattaataagaaaaagaaatttttacactaaaaatacaaaatacatattttattactaaaatactaccacagtgaagcctacatttttactcttcaactttattttattacaattttaccacttacacacacatttcatgcatgcatcactacatgtcaatagactatgacctc

SEQ ID NO: 136053 - DNA, 1443 bp, Cannabis sativa
gtgcacttgcgtagttattaataattttcgtaacacctcttcctcttcctttctcatctttcctaaatcttaaaccaattttgaaaattaagcttaaattagagtgtatttggtgtgatttagtacttgaagcttgtgtatttgtggtaagcatctaatctctctttatttatgtttaatttttggtaatttaagctctttaaatgttattcttgatgatcttatgtaaatgatgcatgttgttgataattggttggtttgtgaggtgtttggtgtgtttgtgttgcttagattcatgtgtgatgtatttttgattggtttaggatgagaatttgatgcttgaatttttgaatttggcttgaattaatgggtatattttaaaggtttaaatgctatgattttaaacatgagatattggtggaatgatgttggtgttgtagcatgcttttgttagtatgtgtttgaattggtaaatttgagctttggtttgcttaaaaattcatgataatattggatataggttgttctagctttgaatttgaaattttgcatgattggagttggttggtatgagttttaggtatgaaattcgaagtttgtaaaattgcaatttttgggggtttccagggccctcaccacgacgtgggcaacctggttgttgccgccgcggccacatctttgctcgccgcggcgaggccctattttcccgagaatttttgagtttttatttttgccataatttttgattcgagaatctgtttgggacgttcttgatattgttggaaagctcatttcgagctctatatgcttatctataattgaaatgcaaattatgtgattatgtgaaagtgaattttaggatttaccctatttgtgaaattccgggaacgtgtgactaagattaccggtgcttgctcaatacctagggatttggaatctccatatacttggaatatcaggtaagacagtagttagcacacagagataagcgttgtggcgctcgtgtttgatattatgcttgtgattaagtgaaaaaccaggattagggttattaccctaaagtgagcggttatacgatctagggttattactctagtgtttaaatgattttgaatccaatattatgatgtatatgttaagatagagaattatgcaagtaaagcataattaagttagactcgataatcagaaccgataaacaaatctaaggccttattgtaaatacacatgtgtacgcaacacgtaggtctatgttaaatagacaatagatgtggtgacatcaatatttatttgaattgagaatatatattgcatagtattatttatactgtcttgctgggcttggctaacgggtgctctactgtgtaggaaacggtaaatcagtttgtgatcagccatgagttcgagggcttggcagtttattgtacatgttcgggccacact

SEQ ID NO: 136054 - DNA, 852 bp, Cannabis sativa
cattttcggtgcccggtaacatggaacacggtgtatggctcagtagaatcacaatctaatattttagtatagtgggacggttttgttaaacattgtgaatgtcgggattagctgggaatttagagttttctaaaatacccttaagtgctttataacccttttaatgtgggaggggcaaaatggtctttttgcccatttatgttttgtcctttagtggactttattttaagttaatagtcagatttcttatgtaaataataggctgaatatagtatgtaatgaagtcattttatcattttatcaaaaatcaaaagaaaggaaaaaccaattcattttcaaagctctttctctatctctttctttcggcccctttgagcactaagggtttgaggttttctttgtgaattcaagctgattttgagggaaatccaagttctaggtatagttcttgtagcctctctttagtttcttgtaatttacgaaagttattgttttgcatgcttggagtttatgcttgctgtgatttctatggttgattgttgttgtgttcagaggttaaagcatgtttgattgagtggattcaagctggttttgttgctattagttggatttaaccttgtgtaaagctttgaactccgaactttggtttttaatggtgaaatggtgatttagctgctgtagttgctatttgagtttgggtttgttttctaatgttatattatgtttatttaaggtgatttaagcaggttttagtggtttgtttgtgggatgagcaagctttgagttttgaactcaagcttgactcatcaatggtggtttttgtaattgtgcatgaagctttgttttattcct

SEQ ID NO: 136055 - DNA, 1071 bp, Cannabis sativa
  modified_base (829)..(829): a, c, t, g, unknown or other
  modified_base (1043)..(1046): a, c, t, g, unknown or other
gatttcccaaattaccccttagtgatctttagtggctattagtatggaagggcaaaattgtcattttgccaatctttagtctatctttttgtgagaatggggtttagtattaaatctgattttaaagttgattaagtggatttatttgaataaaacaaaaggtattatctcatttttaaagaaaaatcaattgaaggaaggaaactcattttctctctcaaactctctctctcattttcgaaacccatagaaccagctagggttgggttttcttcagcaattctaggtgattttcagctagtttcaagtgaatccaagccaaggtatagttcttacaaccttctctttgttttcttgaagtgtaagaaaaggaatttatgcatgtttttgggatttagttgttgttcttgctgctggagtatagttgtgttctctatagttaaattatgtttggttatgttgaagtgagcttgttttagtgcttgttgattagtgtaaccatgttttgagttttagaactcaaacttggagctttaatggcatttcttgtttctgagtttgggtacttgttttgttgcttggaaaaacatctttaggatgcttagaacgggtctggaaggtttcatgtagtttggggttgtttttgttgagagttggaatttttggtaattcctactctaaattggaattctggttctgggggacttgtaggaaccagaattccggtcgggaaccggtctacaagttggggcagttttgggaacactagtttttcccatttctgtgttgtttagggtatttccatgttatccatcgatagggaaacttntagtttcaagtttaagtccccagaaagttatttagcgtgtcacatacctatgttatgactgatgtgatttaggagcctgtaattcgccgagtagttgttccactcaggttggccgacacacctgaattcataatcaaggtaagattagtataatgttatgcatatgttattacatgtttagcgcacatgtttttatgcctgttagattacattnnnngcagtaatagtatacatagagttgt

SEQ ID NO: 136056 - DNA, 676 bp, Cannabis sativa
ggcgtatcctcagcatccaatgaaactcattcccattaagcgtattgataacaattttaaaattgctctccacaataataaacttacaatcgttgcccttaactacatccaaagcccttaactacatccaaagtcaagcagcagacaaatatttctccacacaaagtatcataaaactctaactgtgccatttgaatccaaaccactattctaagatgggtcttcgctatcattgtattacaacgagatgacgttttataattgttgaccgaagtttttggcaactaatataataataatatgtaagaaagctgtaagaagttaatccacgagatttttacgtggttggggcattaatgagccttaatccacaaatctgtgtatttatgaaagtatttattacagagaatgttctcggtggtttttctctctagtttttatggaacccagaattctcgacccctgccttaatgagtttgggggtatttatagtgtttttgtgaaatgatccccagaactgaggtacatgtctttctgtaatattcaataatgacacacattcccaacgaatatatcataggaaacgcacggtgtaatccctaggctttttagggttttaatggatgtaattcattatcctttcttgactgatgtgatttctcataaagtagccgtc

SEQ ID NO: 136057 - DNA, 609 bp, Cannabis sativa
acatgcctttgattccgtgacttagacgattatattgtagtgcaaaatacatgccatccctattgcattaagtccctataaatagtgacttagcctcactatgaaaggggaagagaaaattgctacagaaatatactttacagagaaaataatgatctatgagagttactcagagatcaattgtaagagctttcaagaaaaagaacactttgctcattctcttaagtcaatacaatacaagggaagtaggctattaccagacttacggggtcaaatctctttaaaatctggtgttcactttaccttactgtttttattcttttttaatatgttgaaacgctttattatttgactcattatcgttggctagaagcggtcaatattttggtgctttcattgagagttgaactcaagttctttgtcttaagttttgacaggataaacatgatggttgtataaacccgtagaggccttcctaatcaaggtgacccgatggtgataaatcctaacgtgcaaactcttgaaaatacgagagaaccactagggacaaaccccaagcaggtcaatacgtaacctcctactgtaggccatggagtgactttccctctg

SEQ ID NO: 136058 - DNA, 509 bp, Cannabis sativa
aaaatcatgtctttacaagggtagcaattcgatcgtttatagtacgtttgaagtgccttataattaaagttgtcataaactataaaatttggattggatcgacaataaatcgaaatcgtttagatatttttttagtacaaaatttttcatctatttataatgtattttttttttatttgacaaaatttattattcaatttttatttgacaaagtttttatttgattattattattattgctgcatgtgttattttattgttcactattatactttatgtaatacaaccatcaatatatattaacaaataaaagtttaaaagttttcatcacaataattataaactttaaaatttttatagtataagaattgttccatattagtaaatattaaaaaaaaatgaaatattgtttagaaaaataaaataaaaaaattcaaattattaaattaatttaaaatcttaaattaaaaaaaaaaatcatatctttttgaaagaattaaactcatgtc

SEQ ID NO: 136059 - DNA, 843 bp, Cannabis sativa
ccttaggtgtcctgccataggcggtggcatctaatctccgttctagcctccttacacatgggtctgcttgtcttgcacataacgacacaggtggggattgttatgccttattagatattcaatctccctcttcagattttgacactcattagtgtcatggccgaagtcattgtgatactgacagaactttgatatgttcgtcttgcccatctatatcttcgtaggaaaaggctatcggtattggactattccctgattggccttgaagatggcctcaggcttctttgttagcagggtgaagtaggtgtacttctcctccttattcttctgtggcgtgggataagcgtttaacttccctttttttccattgttccttccgaagctgttggtaccgcacttgtttctagtgttcttgcaactagaagtttaggcagaaatactggtgtctgcctgtgtgcttggtgggtcatgaggctgctggatgcctcgtggctgtctgttgttgacatgccccgtctgggcgtgtcgtatgactttttcaagtttgataaagttgtcagctttatcaaagaactccttcatgttgttggtagagattctctggatatctttccagaagtcactcagtgggagtgccccccagtatggtcgtatatcggccttcttctataaggcctttgactttagtagccttggccataaacctctaggtgtaatcctttagagattccccttgtctttgtttgacttcgacaaggtcttctagctgttatggtacaagtcttgaggacaagaattgtgtgtagaattctcgtgagaactcagcccaagagttgaatcttc

SEQ ID NO: 136060 - DNA, 1104 bp, Cannabis sativa
  modified_base (143)..(148): a, c, t, g, unknown or other
aactaagcggtctttacaaaagaactcccaaatcggagtttggaatcaaaagttatggctatttgaagtttgcataaggatctgtccagaaagaaaagggcacgcagcgacatgctacataccatgccgcggcacctgggttnnnnnnccagaaaaccagcagcaaaacacgaaaaatcagcctcgaaaactcaactaaaccatcccaaatcacaaccaaacttccaaaccatcaaatagggttgttaacaattattaaagagtcaagaatacatacttgatgcatcaattctaacaataactcccataatttcagattgtaacaatatacaaaatcaagcaccaaactcactaagttcaagctcaaaacatgaacctcaacccattgaatcatttaatttccaggtgcaaattctacgaagcgtagctaggtttcaagcacaagaagcatctaacaattaattccttaactcaataaagaagccaccacaaaattataaaattaaacacaagttaggaagatcaacactaaatccataagcttgcattcaagagaacatacaacaattttatgctttagaatctccaatttatttcaatttcagcaagaacttaacaacataaaacaataggcgcactacctcaagtattgcaagaacctccttgaattttccaaactccaaagatggcaaaagatcaaactttcaaccaagattaaaactagaaaacttatagtttaagagagtgagagagagggttcgggtaggaggccaaaagaatcaaaaaaatctttcctattttattaaaatttccatttaggtaaaatccaattaaaaggccaaaagaccaaattacccccaagggcattaattcacactcacacacctacaagggtaaaaataacatttcatgcacaattaatacccaattaatttcagattatcaccgttaaataaaaatgccaaatatttcaatccaaattgcatttcgggcccgaacccaggtcggcccgaaacacccgggtgtgactataacgcatcaacatgtcagaacacacctgaaaagacaacacatgcatactatataataatatagttccattaa

SEQ ID NO: 136061 - DNA, 901 bp, Cannabis sativa
  modified_base (425)..(433): a, c, t, g, unknown or other
  modified_base (498)..(500): a, c, t, g, unknown or other
ttaacttcttttgcttattgcttgatagtttttcttgattgcttcaaaacccttgatagttgacatgccatgtaaggtgacttatcatcatcttgttaaggagctgtattccgcgcgtgtcttcagtcttaaccatgttttacatgccaagacaggtggataaaatttgggataagatatacatagttagatttttatatcagtttcctccctctaagctttagcctcatactttgacggcacaaagtttgatccaaagtcatcactgacacttcaagaaaaagctctcctctatgttgggttttgtgccctaaataaaacccatttaaatatagtcagatttactaattaataaagatcagaaatcacattttatgttgcatggttcatatgatttgtttcatgattatgtttaatgtataaannnnnnnnngtccagaacatatgtatttgttcacgattatagtgtcgtcaacacagtggaatataatcatgatnnnatgttcaaaagtttaattctcatgatttgtcagttcattagatttagactaggactgaacatttcgagcgggttcgacccggtacccttcgggcgggttcgcgggttcacaggttaagtttttaggaccaccgggttttgggttgaacccaaacccgctcgccaacccgcatatttcatatattatatatattttttattttttcattacatattatatattaattataaaataaaaagaattaaaaataaaaactaaaaattaaaaaaccctaaacttccttttatcttttactatggatatggacgtattttgaagataaaatttgatttgatgaacaatttatttgttggttggattgattaatgcttcttttcttcaatagttgatttgatgaataa

SEQ ID NO: 136062 - DNA, 636 bp, Cannabis sativa
gttagtgctaatgtaaaatgatcttgttttgattgcttacatttttaagttgtgaaatgtttttttttccatagataattaccatatttcacattacatataatttaaagcacaaataataatgattttactaactagtctcaagaaccattgtaatttgaaagacaccatctttaatggttacaccattttgttgcacaatcaattctgtgaaaaatttactttttttaaatcaacttcaataattcacattaaattttagatacaatttcacactatattaaattattttacttgaaaataacacattttgtaccgtttccattaataatcaataataactaatttataatataattatgtatattatcacaaataacttttgattttttttttttttgttaattagtaatttttctccctgaactttgatatgtactaaatcgtgtcttctgaacttttttggccgttaaaaattctctttgaactattgagattgataaatttaaggatttttgtctaattgtgattgatgtaaagtcttcaataccattcatgctctatgatctctgtttagctctcttctctttctttctcaacttcttttttctacagcttgggctatatatatatata

SEQ ID NO: 136063 - DNA, 1201 bp, Cannabis sativa
gtgttggtctgtagggccagtcgtcagtccatgaagcagccatggtgacgtacttgtggttaagagtcattattccgtgggtgtatgggcccaatggaggcttgaagcgggggcgttacagctttctccactattacttccttttgtgttcataaaaattacggaacatcatttttctatatgtattactcctctaggaatactaaattctaaactgtttgatgagtgcatctgaatgtacagaagacacatttcttattctatcccaaatgaaataaagataaaatagtgaagagctttctttagtttgaataactttctagtaccttttaaaaataaatcagttatttagctttcctggtggaactaaattattatagatatgttcgtacacccttcctaaattattcctataccccagagtaatcaccatctcaaatataaagttctgagttgatgtagatataaagattctaaatacacccctatcatccaacatataggtcactcttagagattctttcttgattgtctccctatgttttctgtttgattatatctttgatggcttccactcaacaataggagtctagtttaatgcatacacaagtgtgcatttaacctcttactattggtacttagggatatcttgttttgacattttatctttatctagaataaattccttctagactaagtcatcaacatatcattctagtattaacattaatgtaaaatacttgcttgagattaagtaatcactagagataccataaaatatttcataaggaccaggaattgtgtttaagtcttttgaatagacattgcaagatttcctatcttatcctcataattttaataatttaccactattcacgtgaatggttagattaacttttcttagttttatttcaaaaaagtttctttcttgaacatattattgtaattcattagtgtcatccaaataataacggacttgaaaaatcctcccactaagataaggtactatgattctatgcccagggacttttagtggtatctattactattagaccagatacaagatcaagaataagttctactagttttctagtttgcttagcatattatatccatgtctaatcaaaatatgtgtgttatagagattctgtggtgttttgaatataatctagagttcaatataaaagatctttgaactgca

SEQ ID NO: 136064 - DNA, 951 bp, Cannabis sativa
tcggccttcaatggcatgataggttgacaatcccttaatgacctgatggcagtaacttccatctaccacctatgccttaaatttccaacatggcgtggagtagaatatgtgagaggagacaaatagtctgcgggtcactgttacaacttggccttgtccaaggccaagtaggagaatatgcccgccaagagctctgaagaggagcccaacaaagggcgatgaagtccagcctaaaaaggggacacactcatagatcctcgctttggggatcctgccggaagctttggagctttagaacaattggaagaagtggaggttaatcccattctcccaaccagaagacttaagcttgggaaaggtttagcactagaaataaaattattattgataaaattcttaagggcaaatctagacctatttgcaaggtcatgtggaggcatggtcgaaaatgacccctccatgatgacccatgcactcaacatcgatctaaacatccgacctattcaacaaaagaggaggttgctggatgaggagtgcacctaagcactcaaagatgaggtcgagtggctacaagcccatgacttcatagcggaggaattctatccactatgggtatcaaccaagtactagtgcccaaacccaacaaaaagttgagagtatgcatcaacttcaccaacctgaacaaagaatgtctaaaggactgcttttcgcttcttagaaccgaccagcttgtagatgccatagctgaccatgacatgctgagtttcatggacgcatattcaagtaacaattagataaagatgcatccaccagatcaggagcacagtagcttcatcacaaatttggcctgaactgctaaaaaatcatgccctacaagttaaaaaaggtaggggctgttggaaatattttaccaggatctagatttaccaccatgtatgtttcattaacatc

SEQ ID NO: 136065 - DNA, 577 bp, Cannabis sativa
gtttcgaagtttgggattttttggcagggaaaacacgtttatcggttctgcagaaccgggtaaccgattttctgagcaggccaggaaaccgatttactggttttgggatttcggtctgtcggtttttgcagggttccccgagaaaccagttttctcaattctcgtccattttagtgccatagttgtgtgttttcctatttcctaggttaatgtaatccctagtgagtatagcatagccttaagttgtggactcgggtttcccagtttagggttctgaacatgtgatttactcggtttcaatatgtgattacggcatccattcagcacgggactttccgttcaggtcgaccaattcatttgaatctggaaaggaggtgagagctgtatataatgtgtgacatgaataactgaatgtatgtatatgtttattgtatatgaattcttatatgttgtgattcatacactaccaacacttgtacgcttgcggtatagagtacattggtaaggtgtatgatggctgaaagtacatcgtggtgttaccagcacttgtacagaaaggtacaaggtgtctgtggta

SEQ ID NO: 136066 - DNA, 644 bp, Cannabis sativa
tttttttttttttttctttatgttgcatttttgaaagtgttttttatgttgtgttgttgttttcgtttttgttgttgttttttttttttttttaatgtgagacattttaatatgttttcgttaggtcttagtctatcaagttttatattctttagcattgatcaatttctaacaaattgatacatattcatcctggtttgttactggtttgttgtgtttgatgatacatatgaaaatgtcttgagttttaacaatttatttactcgtttttatcttattgtgactaaatatatcccttttgttacttatttaaagtggttgtgttaaccaactttataattgttttaagctaagaagatttcattaatagagctcgtcgacaatggaggtttctgcatttttagtgatggggatttgcgactgtcggatatttttctaggtatttttttggtttcgaatgagctttaaaatgaagattgaggaatatatatgtttcgtttgtaggttaggaatcacgcgcttgattcctgttttttaggattagccgttgtttttttggttgaagattaacgtggggaagacgatgacgtgtcacgtcattatgttctcatttcaaaaataacgttatttttgtaaaaagttac

SEQ ID NO: 136067 - DNA, 909 bp, Cannabis sativa
  modified_base (214)..(217): a, c, t, g, unknown or other
caacgggagttctgtgaatctattatccaaaaaggccttcactgcaataggcctaacagaccgagatctttcaccaagtggttcccaactgacagggtttaatggagcagcacttatcccgatgggaaaggtgaggctcccagtcaccttgtgcccggagacaccccaaagtaccttcaaatactacacgtttgtggtggtggactgcccaacnnnntataatgcaatcctcgaccgaccggccctggtagattttggggcagtcacgtcaatacggcacttgtgcctaaaattccccactcaagaggcgggaatagggactgtgagaggaaaccaaggggaggctaggcagtgttataacgtcgctgcccacctacccgtcttaatggtccgagaagttattgagccagaaatggcagaagaagatgagttgaatccccgcgtgggatctgaaaaaattgtagaaccaagggaggacgtcgaggaagtgttggtgtgcgaccttgattccaccaaagtcctccgactaggaaagagcctagagccggaggaaaaagaaaaaataataaagaaactgaggggcgccacggacatttttgcgtggtgccaagaagacatgaccggcataagtcccacgtcatcacccatgtccttaatgtcaacccggacatgccaccggtccagcagaagcgacgtcccctcgactcaataaaggctgaggccttaggaaaagaggtggacaagctactaacgaatggcatgattcgagatgtctactacccggagtggttagccaacccagtactggtgccgaagcccaacggaacatggcgggtttgtatagactttaccgatctaaacaaagccttcccaaaggattgtttccctttgccaaggatcgaccagatg

SEQ ID NO: 136068 - DNA, 780 bp, Cannabis sativa
  modified_base (372)..(382): a, c, t, g, unknown or other
tttgctcaccaagtctgcaaagtaaaaaaataaaattgtcatcttctcaataaataattatggtaagtggcaaaaatattaatctaactaataaaagaaatatagaaaaaaaaaaaaaactcaactaatagaaaacaaggacaagcaagagaaattaaaacctgcaaaatatcattgaaacatagaaaaaccaaatttgaccaacactaacactaaacagtaaaagctattttagttttttgttgttaacttactgcaatagtaccacattgtgaaaagttaaaccttataaaaacatgtacaatagaaaagtaatgtctttgcattttgattaaaaatattaaacttgtcattgccacgtgggcaaaattnnnnnnnnnnnaggcttgacagacgacaccttaaaaatgtaaacggaacaatactttggagggttttcctacaaaaatatgaggttggatggttttttgcaagtaaattgatagttaggggggttttgtcgcaaattactcattaatgtaatagaaacaaccacctttgtgatcccacacctacaaatgggttggggaatacgaagacccgatggggtccgatgcttgtgttggattttctcattgggtctgatggcacccgatgctgggtccaatggagcttgatggtgttaagtaatttttcaaaaaaaaaaatttgtattgggttcgatgattctgatggtgggtccgatggggtccgatgcctatgttttgttctctttttttttttttttggtgtattgggtct

SEQ ID NO: 136069 - DNA, 578 bp, Cannabis sativa
atgataatgtatattattaaaaaattaatgaataaaacacctaataaatgtataagtcaataaataataataaaggtcaatcactaaatttgtgcgtttaaaacattaatgaaaattttaaaattaaaaggaaagtcaaaagtatctaattgataaaaagctacaaaagaggaaagaataaatgagaaaaataaaatatctgtaataaataaaaatttaaagtaaaaataaaataaaaaaatttaattataattagagttaaaatgaaaacgttttaaaataaatagtagcaaaactaaaaatagtatacaataatatagaaaaagaatactgtgaaaatatattttttaaagatatctgaacattacttttaaatatttaataaaatttcataacatattccaccattaaagcctatcttcacgcgtaaatcaataccataatttcggacaggtcgggatatatctgaaacttcattgtggtttgatagacatcgacgccgtggataaggggtggtggttagaacagaggcaccatcctcagccgtaatctatttctaaaagttcctcaatagaaaa

SEQ ID NO: 136070 - DNA, 765 bp, Cannabis sativa
aattataatatttgcattaaaacttttttttttttacaaaaattaaacttctaccccttctaaaataattttattgaataattaattatttttaacgaagatatttatgtaattagttcatatcattaatcttagttttagaaaaattttcatttaaatttatttattttttaaatattatatataaaaaaataaagatcatttattaaaatcacatagttgtgaaaacaatttatttttttttcaaaaaaaaggttaacaaaatattgtagtaaaatgcatgtttttctctacacctaatctttttcttttgaaatcttgtctcgcagtcacgcagagttaagtcgttgactttttggtcgtgtttatatacttgaagtccaatgccaacttggaaagcaggttgtgttatctaagtcgaaaattcgtcagctatgtgcaatttctaaggaaatcttcttaaatcaacctaatttgttggaccttaaagcactcatcaaaattcgttgtatatacaaaacccatcttttttaatttttattttactttctactaaattttgtaattagtttgattttgtttcaacttttttttttgaagtattgtgtagtttaattatatacccatgtcattcaccaattgaacttcttttcagaagtatgatttttttttttcctattttctatttgtttcaatttaatagaatttggataggatttgttattggtttgtattgaattgatttatttatctaacaaaaactaa

SEQ ID NO: 136071 - DNA, 1003 bp, Cannabis sativa
attattggtacaacaccaaaaactttatagaactttccaaaggctgaataagtatccttcttgcaactttaacattcagtctcactggtagagttagatatttcagatagatttttaaacttctctaaaatcactgctccacccctagagtaagtaccatctcatcagtagactttctagcaatgatgcaagtctagaaacctaatttggtgtagtaagagtattaaaatactacccttatcgactaacatatagttcctctttcgatcttaagatttatttaattacgttccaatgttcctttcctggattgaactcatacctactcacaacccccactcaacaacatgtgtctggtctaatgcattttaaaacatacatgagacatctcactattgatcctaagaaattcttatcatgacttttattcttttttggaatagttgaaactgttccttagataaataaaatctatgtctagaagccaaaagacttcctatagagttagccattagaaaaaatgctccacaatcttactaaagtaagttgcttgcaatagagtaagtaatttaccaggtataccataagctatatgtttagataactcaaacccactatactaggatcaggaatttttgttaagtccattgaataaactcattatcaaaatttcctttcttgtcattgtaatagaaaacttttggttactccatatgaatggttttaatcatagttctcttgactttgcttcttagttccttattctgactatccattacttgttaaaactaaaaatgcatgtcataacaggttgagttccttgaaaaactttttgtctaggaacattagtggtattgtcctaatcggttgtgtcaatacaacagaggtagtgggtccatcttatatagaataagatgatagaacactttcgaataaaaaaaatatcttctctactttacttctttatttttagatttagtcatattcttagaaagtagtattt

SEQ ID NO: 136072 - DNA, 591 bp, Cannabis sativa
gatttctgtgcgaaccatgggatcataaaaattttctcaatagtggcacatccccaagaaaatggtcaagttgaagcagtcaacaagacactcaaggatccacctttcatctgctcaggtccgtccaaactccgtcctcaggaacctttggacttagtaactttcgaggcaggagggtccacggtaggttgttcctcagagagatcaatacctctttcaaccggtgttctctttgggacggagtctcaccgcccttagacttcttggctggaggagataagcccgagcttcccccaactctctgttttagagcctcgatcattttatgagacatttctgcacgaaaacaacaatacagtcagaagaaggcataaaatatatgaaggcatgaaaataaagaaaaataaatgcaagatgaagtactctgcaggatggcaggagcatctgcccgaacaagcacagatggggtgtcatcattcgaagagtcttcctactcttcaaggacggctttcccctttccctctacaggggttgatgggcgagcaggtacaccatgctccctgatccagatagtatgttctatgggcctct

SEQ ID NO: 136073 - DNA, 646 bp, Cannabis sativa
atattatccttaaaatacttagctacctataaatatatttcagtaaactaatataattactgaagtgtgatctcaattatttatctctattaacccatgctcgaaggaaatcaatgtttcacttctaaatacttataaaatccataaattccatatctatgattagcgctcccactcaattatatatcatattcccaagatgcaagtattcggctgaccgagttttaacgaacaactctaagacaataaataataaaattaaccagaacctaaccatgtcaagattaagatctattgacctaagatcaactaattgatattgacttagatagatataacgctaagtttatgatatcttatccaagtttaatatttgtccaattcgatgcattatctatacatttgatactagcatactttgccaatatcctagaaaggacatgaaccttatttaaggtgtaagtatactttatcgctgattatcatgtcaatctaaatctagtgtattgaaaaatcatgagacataaaactttgaaatatataatcatgattatattccactctgttgataacattataatcacgaataactatatgttttagatttaatagaatttatacattaaacatataatcatgaaataaa

SEQ ID NO: 136074 - DNA, 501 bp, Cannabis sativa
gaacttgggactcggacccaacctagacaaagacccaagacgcgaacccacccccggtgcctgatctggacctagactgaaattcgggtccgaacccaaactcacaccaggactcgaactctgactcaaactcaaaccaaagctcaaactcagaatcgcaaatggaactagaaccgaactaagactaggaccaggttcatgacctaaacctaaacccaaacccagatcaaaacccaaacagagacctaaagccgaactgcgactaggactcaaacccgaacctagaccgggggccaaacccacgcaataaccgggatctggacctagaatcaggatagggacctgggaaatagaactaggaccgagacctagtacccgacccagatccgaacttgaatctaggaccgagctcgtgatctagcacaaaaaaggaaccagattgggacctgagattgttatccgaatctagacccagggcttggacaaaacccgtagtcggtg

SEQ ID NO: 136075 - DNA, 518 bp, Cannabis sativa
ttttttaagtttttgaattgattttttaaatttttgcccaaaaagtggtttgtaaacctccaaataaaattcctacatcataatattttttattgacatcgtaaacaattgaaaatatttttttttatcaataaaaaaatacatattaatagaagaatgagtcatttttatgttgtgtgaaaaattaacttcatagttacttctaggtttcactttcggtatcataagcaactaaatagttacttttaattatggcgacgatgagaaaatacatatttttcttacatgtcaaaacgaccacattgaaaagtactttttttttcatttagttaaccaaaaagtaaccagatttttaaaactattcttctgaccatattgttgctcacttaagttaaaaaaaataacatcgtcatctactctttaatgtgattattttaagatgcaggaacatatatttttttattatttccaaaataaaagaaactattgaggtacccatgaattgataccaatcatat

SEQ ID NO: 136076 - DNA, 510 bp, Cannabis sativa
tttttattgacatcgtaaacaactcaaaatacttttttttatcaataaaaaaatacatattaataaaagaatgaatcatttttatgttgtgtgaaaaattaacttcatagttacttctagatttcactttcggtatcataaacaactaaatagttactcttaattatggcgacgatgagaaaatacatatttttcttatatgtcaaaatgaccacattgaaaagtacttttttttttcatttagttaaccaaaaagtaaccagatttttaaaactattcttctcaccatattgttgctcacttaagttaaaaaaataacatcgtgatctactttttaatgtgattattttaagatgtgggaacatatgtttttttattatttctaaaataaaagaaattattgaagtacccatgcattgataccaatcatatactgattggttactattcaattatattatatattaaagaaaacttaatttgtaattagtttctactctttctacaata

SEQ ID NO: 136077 - DNA, 596 bp, Cannabis sativa
ttgcacttttaacataatctgtcacccgttttgcttgggcctggcatgcggtcgaatcttgcgccccgacttgtgtttcttcgacctcatccaagcccatttccaccgtggggacgtcaccctcacaattggtcttccaatagtcaacctcctaattctgaggatacaaaatttgaagaacaaccatctgaaaaaaaaaaaaagaaaagaaaatcgcataaagatcgcattaatatcgcataacatcgcataaactaacaagttggcaaataataaaagtaaagtcgcacaaaaatcgcatgaaaattgcataaaatagcatgaaaataacaatttaaaatcgcacaaaaatcacatgaaaattgcataacatcgcaaaaaaaaaaaacagattagcaaaaaaacaagtcatgtcgcacaaaaatcgcatgaacatcgcataaaataacagtttagcaaacaaaaacatgtaaaaatcgcacaaacatcgatcgcattaaaatcgcataaaatcgtagaaattaataggttagcaaaataaataccaaaaaaacaaagaaagtaagattgacatacccttttctcaaatagtgcag

SEQ ID NO: 136078 - DNA, 1214 bp, Cannabis sativa
attaaatgttatttctgatctattttaataagtaaatctgattatattgaaatgatttttatttagggcataaaacctaacaaaaagtattaaaggacttaaaaaatctaaaacttcataacaaacagggtaattattaagattagctttcccctcctaacattaatgtattccaaatagcccctaagtgaaatttcattttacattcataaaaatacacctttgttataaatttagacagatataaataataaactttgtattcactttactttatattctttatcaaagttacacatatataggtgaatacatgcatgtataatgtacataattattatacttgctattgctacaagttgactattattgctattattgtagtattatcatttagagtatactacctattttatactatatagtcattcataacactcccccttaatatactctttaatttgtttataattaatattgtctcactaaaaaaaccttactaggtaaaatctaatgggaaaaagaccatagtaagggaaaaagagtacagttgaataacttccccttcacaataacattaccagttacttctcacagattttgtagatgacgcattccaataccatgtctcaatttttttaagattgtagtaagtgatgactttgtgaaaagatctgatagattctcactggatctgatgtattgtatatttagatcatttcttttctcaagtgtaaatgagaaaaatttaggaggaatgtgttcagttctattgcttttgatgtaaccttcttttatttgagcaatacatgcagcattatcttcatacagtatggtcggatctttatgggtcaaaagaccacaactttcttaaatatgctgtgttactaatctcaaccatacacattctcgagtggcttcatgtagtgtgataacctcagcatgatttgaagatgtagcaacaagagtttgcttttgagaatgccgtgatattgcagtgtctctatatgtgaacacgtatccagtttgagatctagctttatgtgaatctgataaataacatgtatccgcaaacccaactaattcttggtttgagtttttggggaaaaattgacctaaatcaatagttcctcgtaaataacaaaatatatgtttcattccattccaatgcctcttagtaggtgatgaactaaaccttgataacaaattcactg

SEQ ID NO: 136079 - DNA, 882 bp, Cannabis sativa
catatgtcatcgaagtagtagttggagtcggagtctataaattggctcgacttgatggctcgctaataaagaactacttgaacgtagaatatttgcgatcctactaccaataaataaatgatgtaagttgcattactaatgtaaactttagacttcagttacgaataaagagaatcatttatattaagcattactaatggcatttatgtatgattaactggaattcatttcaatttttttttaaattcaaaggttctcgactaaacctctttgacgaaagtggattcaaaccgttataactccctgactaaacctttttgacgaaagagggttcgaatcgtcataacaccttcatcaaacctttttgacgaagaggggatcaaacaactataattttttatttaaaacctatccgacgggaaaggaaaatcaaaagttataactcgcgtaaaaaactgaatactaacggttctcgtgagctaggaaagtacaaaacgaggcgtcacgatgccttgataaaagtacttaaacctagaaagaggatagataatataacttttcatacgagaaaattaaaaatatacaaagtgataaaatccttaaagtatatttaagtttgcttaaggaagattataactgctatagcgaggtagaattcacaactgctcgaaaatcgaaaagtctagtagattaccaactacttaaacaggaagattacgagcaatggaaaaacccaaaagtactgaacatttgatcaaaatatagttgtttacattgtgaataaaaatgtaagcaaacacaaatttattaagttcgaatgaaaacagtacaaggcatttaagataagaaaaaacctaaaactggttacaaacttgtctttac

SEQ ID NO: 136080 - DNA, 987 bp, Cannabis sativa
taagtaaatctgattatattaaagtgggttttatttagggcacaaaacccaacagaagtaccccgacctgctttatttgggggtagacttcaggttaaaaaaccaactgacctcgtgtggagaaggcacaccctacttctggatggcatagaggatgaacagggccgacagatacttaatgccttaggagtgaactggatcggacaaaggcaaaagtatctgctgccaccttcctgaagtatggggggtgtaaaggcagcattgccccttgtattgtgtgggcaccaggcacacatccccttctgcgggtttgtatctcagtgatttgaagcagggacgtaacattcaagtccacccagatagccagactggtccaagtcctacatgcgtgccttagtgatcttggacgaaggactcacccatctggcacctaaggcactttgcctcctgtgaggaactgcttcagtaagctcctcggtgacgtagtctactccctcgactaagacttcaccctctgcagacactggctccccaacctcattatatcctccaaagtttggaggttcagcctcctcttcctccttggcctcggaagggctgccaggacggacgtcatcctgttcctcaatctcttggacctcgatgtccccgttgttatctccctcctcctggacgagaagatcctattcggtgctcgaaagtgtggcgagtttggccatgtgaggatcagatgcgttgaccttccgcatcgtttgttttgttcgagccatcattctactattagatggatactggtgtgaatgcccggcaaccgagacagcaagaaaagtaattggaatgccaaagttccccgaactaggatggccaataggtagagtgtcagcaacacctggccggacaatgtatgtccatttggatggcagataacgcttccaacctttcttcaattcccaaatgaagcagtcgttgttggatattattttacca

SEQ ID NO: 136081 - DNA, 691 bp, Cannabis sativa
tctagggatttaccctagtgataagaaaattttagaatgatggaatggttgtgtacttagtgtaaacaattactagaatcatggatgacctgatcacgatatttcgaaaagctaaaactgttaactaaggtttgcatgtttgatagctattctatgtgattatgtgtggaccatcacatagtcattagataagaaattgtttgtttcaacaaatactacttttctaaaaaaatgactaagtctgaaaacaaagtagcaaaatagaggagataatttttttttcttgatgccaaaagtgttctatcatcttattcgaaataagatggccccattgcctcttttgtcttgacacaatcgaataggtcaataccatttagattcttagacagatagtcacggtacctcgtcgtagtgtgaggttttcaaggaactccacttgttataactttagagacatttgtgattaaaatccattgtttgtttaaacaagaaatggattgtcagaataatgaattaacaagtaaaaccaatagaactatggttaaaactattcataaggagttactaaaggttttctattacaaggacaagaaaggaaatttttgaaaataagtcttttcaacggtcttaacaaaacatcttgttccttgtattaaaggtttgagtttatctaaacctatggcttgtggta

SEQ ID NO: 136082 - DNA, 951 bp, Cannabis sativa
  modified_base (909)..(925): a, c, t, g, unknown or other
tgctactgttttactcttgcttttgctagtgttttattgaattcttgagttggagttctcgggtcttatcaggccagaggcagggttcctgaaagttgtgctccaagtgcatatcctgatactccggtcgggtagtatcctctgtaagccactatttgggcttcttccaagttgatgtacttttggaccctattttggaaatcttggaaattagctgctccttcttgttgtagttcattccagaaaggagtccccgtgcggatcccagcctggaggagggccagttgtcgtttgtcatctaccttcttggtctttaagcctcttatttgaatctttttataaagttctttagagtgtatgaaggcaattgttttatattagtcagggcgcagacttcaaggttaatgtttctcgccgcgacaaactgtctcctgaagctgacttgtagcttgctctagcagtccactgatcctggttccaacttcttaaacattcttcagcagaaccgctcagcgttagtggaaagcataaacacttcgcggcattgttgatactcatgaaagtcatcacacaattaaactgagacaaatggtcaataaggtctggatctccagtgtaagttgtcattttgagcatctaaagttcttgggaagctctgcatccagtataggtcgagcgcatggctcccggtcctcacaatcaaagttcgagtcatcccctttttatttccgggagaccctggcaatgtctttgcgtagtattgccaactcggccaggattccctcattcaaagtgtctctagaaattggcagcgcgtgtttcttcttatcaagatggtcttttaagtcaccatgcttttcattgatttttttccttaggtcagctggagtgtaaagaccgcttagtttnnnnnnnnnnnnnnnnnttaattatgtttaattatggaaaatt

SEQ ID NO: 136083 - DNA, 2117 bp, Cannabis sativa
  modified_base (67)..(71): a, c, t, g, unknown or other
ttaaatacattgaatttcaaatttagttacatatatttattagaaattaattttggaccaacttaannnnngtaattttcataatatttattaaaaattaatactataatggaaaataattttaattgtttttagatctatctaagtataattttataaatgttagttaaaatttatatttaaaattatctaaattagtaattttaattaaataaatatatattaaaataaatattagatgaaaatacagtacttttaaaacaatgaactttagtataataatattcgatctctattgttggttctcatagttcttgttttaataagattcatccctaatagatgttcattcattattgtaagtcttttattcttagtaatgatcactccaatagtggttgctaagagtagggcttacaaagtataaaacaatagtgaaagctcataagatagaatggccttgaatctcgcctaaacgggacaacgccaaaattctcatcttgatcaaataaaaggttgctaaaatggtatccattttagatgagcaaacaactctattaatagtgatatatttgactctcgtctaaaagggacacttatgtcattaagttgcaaaccttaaaaattatttaggatatatttgtttttatagtttcacatgtcattcctacttgctaaatgtttaataatttctgaatgtgtatgattttgtattgaaccttatttgatttctatttattgatatttgtagtttctaatatgactataaacaacccaattgtgccactattgatcgataacaagctcactggtgctaactttgtcaaatagaaagagaacaataatattgctctcataggtgaaaactccctgtttgtgttaactgaagaagctcctgagcaactaggtgagaatgcaaccaaggcaatcaaggaaaagtttgagcattgacagaatgctaacaataaagctcgatactttatgttgtctagcatgattgataccttgaagataaggtttacaaacactctcacgactacaaagatcatgaatcagttaactgaactgtttgggatggcgtcagatcaagcttattttatggtgaccaagaactttacaaatgcacgaatgaaacctcatcagaacatgcgtgatcaccttatccaaatggctagttatttccaggaagctgagaatcatggagctattatagattaagaaactaaagtgagtttgatcttaaatagtttaactccagcttttctaccatttactacaaattatatcatgaacaagttgacttttgactttcatgagttgatcaataaccttcagacatttgaaaatctgattggaggaccgcaaaaaggagaaaacaaagatccaagttctagtaatgctatggttggtatggcaaagcctgagacaaacattgcctttactttgaaacccgcaaagaaaaagaagaagaatagtcagaagcttcttaaagctattaacacagctaataagggtaagaaggctgctaatcaaaaagaaaagaataaaggaaagtgcttctattgcaggaaaaagggtcactggaaaccccagtggcctaaggttttggcaaagaaacaaggtatttctgactttcttatgaactcatgtgttttagagaattattaaccccttatgttattaattctagttatgctaaccatgtttatgttcttcttatttcagctctagctgcttaaacttggattgttatcctagagagttgagtcgaaagttggacagaagggtggagattgtccaagttgaagataaagctcatttttcttctttaatttttgaattaattgttttagttatcaaacaatttagtttcaattattagttttggaattttattccctatttcatattattgcagacaattcattgtgacatttttgagagtattaataaatttttctctttaaaaggttttcattctgaattgctattatgaaattcagcttcatattttgtaacttgtatgccaataccaaattatatttgtatgtttatcatgttttatgtgttttgtattttattattgatacaaaatcttgttgggctttgtgccctaa

SEQ ID NO: 136084 - DNA, 705 bp, Cannabis sativa
ttcaacaatccaagctgtgcttttggatgctgagaagaaacagtctcacaacaaccaagtcaagaactggctccaaaggctgagcattgtggttcttaaaacagatgacttgatggacgagttcaacactcaagctttgatcatgtctcaaaatccaatggccaaccaggtacgtatttctcatagctacaatacacaacaccaaaatattatttgtagtttaaaatatactcgaaccctgactcggggctaggtccgaagtcctgggctgggttcgtggtttggcggtctggattcggatccagatctgtgtctgggatctggtctggggtagaatggatttatgtgatggtaggaaaataagtcattaaactaacataaaaagaattcgatgtaaattatttctaagaaaatgaaataaatttatacaactccacaggtgtgcaccttcttttccagctccaaccagcttgctttccgtttcaagatgagtcgtagaatacaaggcatcaagaaaaaactggcttccatttccaatgataaaagcttcattttggagcaaggacgtcaagaaactaccctaactactagaagagtgagagatgctgacttctacgtacgtaaagaagatgttattgggagggacaaggatagattagttatcatcgataatcttttatcggagagttctgatcaagagagtgt

SEQ ID NO: 136085 - DNA, 577 bp, Cannabis sativa
agtattaatttaccccccaatggctaacccgaaaagtctgcatatactatgtagacaaaacttaaaaataatattattctctcaaaaaataatatacagaaaaatctaaatgtgaatatacatattaaagtatctttcaaaaaaaaaaaaatatacatattaaagtaagagtataatacaaagcttaaataaaaatcctttttttttttttaagaaaatacaaaatcaatatggggtacgttgtccctacttaattatcaacatctaataagttccagtgttccactgcaccctcacagcgagaaaagtatcttatggtttcaaataccacaagaggtgatatatttttatatgtgaaaataaatattagattccacataatttaatttaataaataatataaaaaattattaatttattataatatgctacattgatatagtattaggcatcatatggtacccaacaatagcgaaatatacaaagggacatcttatggtgccaaacaccactcccctcaagtcaactcgaataggttgttcatatagtaagaaaatgtggatcatattgtattaag

SEQ ID NO: 136086 - DNA, 661 bp, Cannabis sativa
ttgaaagagagagtaaaagagctctatgatttagaggagaggaagaatatgtgcaacaagtatgtgataactcaaggctatctcaaactcattgctgcagaaaacaaagagcattggccaagcattgtttggagtgggctaaacttcccgaagcatagttttgttatgtggatggccatgcttaaccgactcaagacaaaggacaagatagctaaatatcatcctgaaattgataaaacttgtctcttttgcagcagtgaagatgagacaatggaaaacttgttttttcaatgtcatgttgggcaggtatgcattaatcaagtgaaaagctggctgaactggactatgagcaaaagaacattgccaggtgtgatcaaatggcttggaaaggccaaattgagcaggtttcagcgaagagtgttggctgctgcactagcaggcttggtatacatattgtggtgctcccgaaactccatattttgggagggaaaagttgtaagaagtgatacaatcatagcacaagtcaagaatattacaaagagtagaatttcttgtatttggccgaaaaaagtgtctaatatagatagaatttggtttgaagcaaagtaaatattagagatatttagattctctagttggagaatgctatagagttgtacaa

SEQ ID NO: 136087 - DNA, 713 bp, Cannabis sativa
tgcctctagggcctctgcctcgaccacgtacattcaaggaaatttgaactccctgactgccactgaatctaaccattcccttttagcttctcatgttttgactgtcattcattctaatagaacagcctgcgaaaccacgaactagcctggtcagatttcaagaataatttactaaatattgcttattttggaaattaaaacatacgtctattcaactatcaggctactaacatgcttcctattacgcttttcttatagcatactaatcaaataaactactaaaacagtagaaacttactaaaccgtgagtcgagctgatagctgatgatgattgtacacgtcctaacgatcttcagaagacaacctggcggttctgatacaaaattgtaacaccctactagtttaggtgtgttaacgtaattttaacctaattgtgcagttcgttgctaatcaatgagtttattaaaaaacgtgattaattaaaactttatttaactgcttataaataccaaaataaaatacatatataaaactgagatccgtttacaaaatacttacaaaaatttcatagtgcataatacaaaaaattgtcgcctagcgactatacaaaatacgcccagctgtcccaaagaccgtatgctccagacctaactgttctgacatgtacaatcttcatctgctcgctctcacagctgctcaaccttagccttgcc

SEQ ID NO: 136088 - DNA, 697 bp, Cannabis sativa
gactcgaataaaaactcagatcgggactcgggacacaaacccaaaccctgacgcggacttggacccagacccagacccaggttccggaccaagattggagactcagacctggacccagtacagagacctagattaggggcccaaactctaaattagaacaaaaattaggacccaggactgggactgggatctaagattaaaccccggtcttggtctcggacccagacccagacacagatatgggtagggagccaggattcagatcttgaccacgacccaacactacaaactaactcgtagtcggtgtctagatcttggaatcgtaccaagacccgaacctggaacaatttccaagaccaagacctaaacttgaacgtagacttgggccaggacctgcgacctaggacccgtgacttaggaccttgacaagacccaaactagcaccgagacctgaacctaaacttggacaagtactcgattgggacccgggaccaggacttgagaaccgaaccgtgaccgataccccgacaacgtcaagacccaagataaggactagtacggaacatggatcgggacatgcactcagactaggaatgtaacccagaccgggacctaggaccctgaccttaatcgtggacatggaccaatgactgaggacccaagacccaaacctagacccaaaccaagacacaagaca

SEQ ID NO: 136089 - DNA, 563 bp, Cannabis sativa
ccgcaccctgcgccgccttgttgcgctacacggtcatccgcttcgtcttaactaataatatatattttcagagaaggattataattatatgctgcatcaataatgtataacttaattttacttagttaattagtatattttgtatgtactttgtgttttcttgtatattgtgctgtgtttgaaggctgaatactgaattaaataattgtttttggaattaaattcattagtactaaactatttacaaactataacatgtcttttatttataaagcctataatctgtcaaaccattaatacaatttggtctaacaaataaaactctatttttgacactttcaattattctcttgtaaatcaattcgggtaactttcaaagatgaataggctttattcctttttaattagacaatattgtttcacatggatcaaatgtaaaaatattgagtcatatataagaacatgagctattctattcatcaccaattggttttgagatgaaatctcatgattctcaacatgatatcaaagttatattcctagcgggttttcgatccacacct

SEQ ID NO: 136090 - DNA, 921 bp, Cannabis sativa
cctctcattggttgcatgtggacacgtggcgagatgagagaacgccacgtggaaagtggctgaagccatttttggctgatggagtgcggggagagagaagccctactctcggggctgggcggtggacgaaacacacggaccaggaggatccgtgcgcttcacgcgtgcatggggcttcgaaggagacaaggcgctgacgcgccttctgcagacgaacaggatgatgccacgtgtcgtggctgtcggctggtagagaagaagagggcctttctttgggctttttggctcaaatgttgggtttccaaaaatgccattttttccttctttaggccatatttttaccatttttatttttttattttcctttccataaatgttattttcttcttcaaacacaaacaaaattaaatccaaacaaaatatttccaacataaaatatatcactttaaatcattgaaaatatttattaaaaaatctaattaatttgtataaaaataatacattttcttaactttttacttctttttctctatttgtgtcataaaatattattttttcttgcaaaattaactcaacactataatatattcaaataaaaatatattacattaatttcatgaaaatattatctaaaattaattttattttatatttttgcactagtaaatatgcatttttgactatttaacaacggttatctcaaaatgaaactagagtcagccctaagcagtgtgagtgactaacccacatattaattacctcgggatgctccttcatcagcttcccaaggggcagtattctagagatattgtgccagagccacgcgatcttgagcgttctcctcgtctggaacgggaacttgctgccaagaagagtacttgggatatttataatcacaagtaaactccttgtcagtcagga

SEQ ID NO: 136091 - DNA, 2106 bp, Cannabis sativa
  modified_base (1718)..(1719): a, c, t, g, unknown or other
atcttttctactgtgaatatcagtccaatccaatgtataaccatacatccaatacaagcttactttactaatgccttggaaaagatataccactacataagtgtaagtaaaccaaattattgattatcatatcagtgtaaatcatgtgtactgataaatcatgggactaatagtttaatcacataatcttaattattttccagtgtgtatacaacacaataatcatgaataacaatgtgataaggacttaatagaatttatatatcaaacaaatgatcatgaaataaactctcacttgcactaacataaaacaatcagtacattttaactaatcatggatgctctctgtgcttttcaaatacaatctctgtcaatgtcttggtgaatgggacgactaggttatcttcagtatcaacattttctaccagtacgtctccttttgctaaatattctctgatgatgtgatatttcctctcaatgtgtttactcttgttatggcttctaggctctttactgttggcaatagcaccagtgttgtcacaaagtaacaccgatagtttttccatagatagaataacaccaagctttgtgaagaactttcttagtcagactagtttcttagcaacctcagcatcagctatgtattcaacctccatggtagagtcagatactacggattccttgacacttctctgaacaattgctccacccccaagagtgaataccatcctagatgtagacttcctgtcatcaagacaagcatagaaatctgagttggtatagcctaagggattcaaagcaccacccttgtagactaacacataattccttgtcctctttaagtattttagaatatgcttaactgccatccaatgttcctttcctgagttggactgatacctactcacaattcccactgcatagcaaatgtatggtctagtgcatagcatagaatacacatacttccaactgctgaagtataaggaatttttctcatgtcttctatctcttggggatcagtaggggattgttccttagatagctgcaaaccatgtctagaaggcataattgtccctttggtgttggtcattgagaaacactctagcaccttatcaatgtaagctccttgcgagagagcaagtgtctattcttccggtctctaataatttggattccgagaatgtaattagcttcacccaagtctttcattttaaactgggtgttaagccattcctttacgtcagtcatcttcttgacattgttaccaatgactaagatgccatcaacataaaagaccaggaatactaccacttgcttatccttgagttggtaaacacaaggttcatctttattttggtgaaagtcgtaggttttgataatttcatcaaacattttattctaagggcgagaagcctgcttaagtccataaatggacctattcagcttgcaaactttctcttcttgtcctggaagtttataaccttctggttgctccatatagattttctcgtcaagtatcttaatggatttgagcatggaaactagactaaaaatatcctcgtagtccacaccttctctttgggtataaccctttgctataagtctagctttaaaagtttcgacttgtctatcagtacctcttttcttcttgtacacccattaacatcgattggatgataatcatcaggtgtatctactgttgggattttatgccctanntaaaactcattttaatataatcttattttctatcaatagaagattagaagtcatttaaatttacatgtagtttttatgattagggttttaatatacaatttttgttaatccagaacatatagttattcacaattacagtgatgacattacagtagaaagtaattgtgattatatacttcaaattatttggtcacatgatttattagtgtgttgaatttacactgacgtgataatcaacgataaagtttacttacacttgtatatgtggtatgttctttctagggcattagcaaagtatgctagtaccgaatgtatggaatatacattggactggactgatattgacagtggaaaaggtatcataaacttactgttatatctttctaa

SEQ ID NO: 136092 - DNA, 551 bp, Cannabis sativa
gcgccaaggtttttaaacttcctacaatcatcgtaagagttaagctcgactcatggtgtagtaagtgttgagagtaaatactttactgcttatgtgatcaactatttaccgctttccatattaggcaatatgtaagcatctagagtaattatgtgatatatgatgccatgcttaaaatgctatatgttaagtgtttaattatatgaagtaaatagttgagttagggtttaaggaaataagtgcataaatgtggtattggtggttaacttgctggggttgttgattacaggggtacttgtaaaaatggaccctccgtaatcatctagaccacagggcgagcaagtagagcatggtgtagaccaaacaaatccaccggcaccgcctgcacctccgtagaatctgggggataatgcgggggttggcaatgctaaacctcctgctgactacatcagatgttccatgaaatgcgaggtatcataattcgtcaagtggaagagttgggtcgattaaggcaactggcatcggctgcccatgttgagcaagtgttacca

SEQ ID NO: 136093 - DNA, 527 bp, Cannabis sativa
tggtatgcggtcaatgtcgccaaaaaggacacaacaaaagatcatgtaaaaatgacccagtactaaaaccaccaagaaaaagaaaaagatcataagatcttgcttacagcataaagatttgcctttaaactttgaagtaaaataaaatgttgatgtaaacatcaaacatggttactatatagacagtatacaaaaacagtttacaatgataattgttagtcgataaagcttttcaatgtattaataccaacttttaataaaatgattaccattcgcttaaattcaagtaagtttttttttttttgcctactccatatgaaataatatgttaaaaataacaagttaccaaatatatgtacggttattaactgtaattaatttacaaccattttaatagtttataaaccatcagattggtttataccacttataatggtatacataaatgtcattggtttataaactcaaacaaaattaaacaaatatcacataaaaaaagccagaacactaaaactaatttccaattc

SEQ ID NO: 136094 - DNA, 572 bp, Cannabis sativa
ggaatgaagaccttggaacaggaattagaggttgacccaaaaacagatctagacgcagaatcgaacacagacccgaaccccaactgggatcgatagttggacccatacttgcgttagaacttgcgaccaagaacccagaatccaggaccaatgaccttagaccttgaccagaacccagacccatacaagaacccagacccagacccagatccagaccaagacccagaccctaaaacgaactgaaaccgggacccagacccagacccagacccaaacccggactcgtacacgaactcggactggaacgcgagacttggaccagtactgagttcaggactgggatccagaccaggacaacgaccgagacctgaacattgactgggctaggacccagactaagactaggactgggactgggaccgaggaccgagactgggatacgagacccaatactcggacctgagacctgagaatagaattgtgacccagacctagacaacgccaagacccgagacaaggacaagtaccgaacaaggactgggacctgcactcggactaggatgataaccaag

SEQ ID NO: 136095 - DNA, 848 bp, Cannabis sativa
gttatatacaaatagttcttgggttaattgttaatttatttaacaactctcatttattttctagttgtattttctcttatattagcagggattgtaattataccgctcataatgtagctaagtgggcatttacccacaagaggtttggagttatcccattaacttccatttcgataaacattttatgtaatgaccgtgaagtctaatcagtttatttatcagagtacgcttttcttcaaaaaaaaaaaaggtaacatatatggtaatttaccatatatggtagtttattttgtgtatatcctaagaatgacttgaggtcacgacacacgatccgttccacgaataataaaaataagtttttcttcataaaataatatttaggaatatttttctacatttaaataaagattatcattttaatttaatattactattaagtagtgtgttaattaatgttacatttggtaacactttttttaataagttttctattttttttattagaaaagtgaaaatatttcaaaaaaacatgctttataaaactgttttcatttttcaattttttaattgagaatcaaaattctaaaaattttaaaaacaaaaaaattcactttcaaatttttttacatagtttttatttcttaatcaatattttagattctgactctaacttggacctatggacctgaactccggacccaaacccagtctcggactcggaccataaccccagtcccagacccaaacgtggatccgacttaaataaaatcaaaaaataaaaataaaagttatagaacacacttttgttttctgtttttaaaattcaaaaacaaaagtagttatagaac

SEQ ID NO: 136096 - DNA, 870 bp, Cannabis sativa
ttcaatgggtggggatcatttggtggcctgggaggaggtgtgtagacctaaacatgagggaggtctcgctattgggaggttagacatgagaaataaagggttacttatgaaatggctttggtgattcccattagaatcaaactcactatggcataaagtgatcaaaagccgttatgggagagcagaaaattgttgggatactaaatcatgtcatagactatctccaagaggtccttggaaggatatttcagatctctatggtgaatttttggagttggtaaaatttaaagtgggcaatggtacaactattcggttttgggaagatatatggattggagatacaacattaaagagtcgttttccggacctggcagtggtatcaaaggtgaaaaattcgagtataaaagatcttgttgccattgaaggagaggtaggaaattgtgttgcaagctggaattttaagtttagaaggaacttgatggagagggaaatgcctaatcttattgttttattgcaactactggaacatattaggctactcaacatctcagaggatatcagattatggaaaccagatcctagtgggattttctcttgtaagtcagcattcaattggtttacttcagaccagaattttggtgatttgttttaaacgaagacttaatggaaaagcaggtgtcctattaaagttaaagtctttggatggttggtggcattaggaaaaattaatgtgcatcctatgatgcaaaaaaggcgaccgtttatttgcttgtccccagggtggtgtgtttgttgtaagaaaagtagtgaagaagtggcacatttgttcttggggtgttgtcttgctcaaagactttggataaagctgct

SEQ ID NO: 136097 - DNA, 509 bp, Cannabis sativa
ttcttactccggcaaaaatattattattatggaagaaaatcatcttaccctaaatacgattctcaagtttattaaaatatttcttccactcctgtaaaaacataacaaataacacaataatataaaatattataaactatcttgtatacatattcaacaaatacattattatacctcaatctaagtatacatcgtaaattgaattatacaatatacattatctaataagatttacacaaaaaattaaatcggtataaataatataccttactatatactatacatatataaattcgagtcaacctcataatgcaaacaaacactcaaaaaactaacctaataaataacaaaccaaataacactaatatacatatattctaaactattacctatacaatttacaaacatacactcatacacctaatctaagtatacatcccaaatcagagaacataatatacattaatttatacaatatacacacatttagtatacaaaaatatgcacaa

SEQ ID NO: 136098 - DNA, 1049 bp, Cannabis sativa
ccattatatatgtcaataaacttagtagattctatttgttggaacaacattttatttttttcaatacatagtaaactataatcaaacatatggcaataaacttattagtcaatttttcatatattgtaacaacaatttattttttatttcaaacacaatgtgtgcctataaaataacaaactaattagtctattcttttttaggtcgagacatcaaatcaaatttaattgtatacaaaatatatgactgtaacatgttttacatagtaaatttggataacaatctatatatttgtcaaagatttgaatatgattaaatgtcttggtcacatgaaatgcattactcataagtttatttgacatatatcccaaataaacttattagtttattttagcatattgaaacaaatttttattctttgtttacataacagcctttttgtacagcctacaatcgtatatactaataaatctattagtttattttggcatattgaaataaatttttatttttatttttgtatattgaaacattaattcatttcatttcatatagcctacaattatatacatcaatgaacctattagtttctgtttattggaacaacattttacttttttcaatacagagtaaactataatcaaacataatgatatacgccaataaacctattaatttatttttcgtatattagaacaacaatatatgtttttgtttcaaacacaatctatcatcatgcatgcctatgaaacaacaaactactaattagtctattttttttaggtcaagacatcaaatctatttgtatacaaattacatgactataacatgtcttacataataaacttagataacaatatatacactaaccctgctattgacagccaaaactacaaaattcctattatggtttttttgagtcattgaattactattagttgtgattaatttgaaaattaatagaaaataaataataaataactataacctaataatttatttccttataaaagtttaattaagattaattatattttaaaattaaatta

SEQ ID NO: 136099 - DNA, 1067 bp, Cannabis sativa
aaattctaaagagactcggggtggactattttatagtcataaggatgataaagtatttgtttctacaaacgccactttccttgaagatgactatattaaaatcttcaagctgaaaagcaaagtagtattggagaaaatactttcagaaataactccaactaatgttccatcatcttctactcaaaaagaggatgattccactcccttggttgaaccaatacaagttgatacaaccgagaaaactaccactaatgttcctgtttagaaaatcacggctccttgtcgtagtgggaggatttctgcaaaaccatcttgttatggtttggatggtgaaatcactatggttggttgtgacggtattgatgacggtccatgaacctataaacagtagcttaagtttatttgtcaaagtcagagtcgggcgtaatcattattatgtgatttagcttataacctagttgtcagttactagtaataaaattaagtttatgtattgctacttgtctaaatatgtgcttttagttttatttatttttatgtgactacgtgaaaagcatttctttactaagttaactagctcacccttattaaacttaccatgtgcagattacggttgtaaaacgtagaaagtcggtggcaagtgagaccttggagacttgtgtgtgtacttgctgaggaccatataatgagggtggtctagggcacgctccatttattttattaagtgttattaaattaatgtcacagttttttttatttattaattattatgtcttttaagtccaaactgagctcaaatatgaaatattttatgtttataaataaaagagacattatagtttttctgcattttaaggcttgtaaataaattagtaatttatgaaaaagtacgggcgttacagttggtatcaaagcaacagttatataggtcccgaacgttctcacgagttacacatatcggttaaaaaggctccactcgctaccaagtaagtattatttttgcatgattgtattttatgtgcattttagtaatttcaaaatttctttttattttcagaaccctagaa

SEQ ID NO: 136100 - DNA, 514 bp, Cannabis sativa
  modified_base (106)..(106): a, c, t, g, unknown or other
ttattagaagagtgtgattataaatctcttattacaatctaatttaagaaaattactcatatattatttttttaattttttttaaaaaatttacagtttgagtttntaaagtggttgcagcgctagttgtattaaggattttcatatgattttttgttacaatttaagttgcagcgctagttacaataggagtttccatgtagaatttcttaaaaatgctaaaaaaaaaaaaactattttaaagtgtaaaaataaaaaagacctttaatttatgtgtttgaaaatatatatcaaaatattttttttacttttttttatatcggtattaattatacttataaattagttttataatttttttttaaaaattaaataattaataataccaaaaataagttttaagttttttaaatgcgcgtggtaaattaaaatattgagaattttattttttagtaccgtaaattattcgaaattttttaaaaatttataaaactaatattataactattataaa

SEQ ID NO: 136101 - DNA, 1036 bp, Cannabis sativa
  modified_base (280)..(280): a, c, t, g, unknown or other
tgaagcggggatgttacatatgaggtatatttttgtggaactagtttgatttttaatttatgtttcattgttttaggaattgatttattctttattttttagttgtaatcgatttgagttattgagtgttacttgtttgtattcattatcctatataattagttttatttagttataaccgtttggagttatttcgtgttattttgtttttattcattataatactgttatagaaccgattctattttaattataactgatttgagttattttgtgttanttatttttattcattatattatagaaccggttatatttcaattataactggcttgatttatttatttttattcattatgttatagcaccggttctatttttagttatatctgagatatatacttctggtgacttttccagtgacttttctggtgacggtgacttttccagggacgatgaatttttcggtgactattttgacaccgacgacttttcggcgacttgtacgatgttagtcatgacttttccggcaaaaattattattacatgttttattaaatttatttttttcgatattttaaaatttaattattttttaatcccatattttttacattactaatttatgccatatatattagagttagtcccacattgctaatttgtgaaaataaattgtcatatataagatgaatgagttactcctcccagtgccaattggttttgagatgtaaccccattcaccttattcccaaattaaaacatggtatcagagccacttgtgatccattgtgagcccaaagtgccaccggtccaaaaagttatttgtgatccgttgttagcgaaagtgccaccggtccaaaaagatactttcgttgtctcacctttaacctccattgggacctttcagccaatgtgtgccagtttcttgacttgtgggattctttcaaatgtcacgttcggccctgtggtctcttaaaggtcgttcgttacacccacactttccaggccgaaacgtgaggagggtgtattagag

SEQ ID NO: 136102 - DNA, 501 bp, Cannabis sativa
ccgataaagcaaacgataagtaagaaacctatccgtggtttcaagagtaattactcataatggtaatgaccgtatcttaattcattcacatcaacggtgataaccgtcttcttccctcattcataaacaattcacaaacaacaataatcgtttctcaccattacctcgattactatcgagttttaacatatacatattattaatctcgatcaaggtcgagtcacaacaaatacatatcgggatctcgatcataatcgagaccgtaataattatatcattaatcataaacagtgcttaatacttttcttacctcaagtccaaaatcaaggatgtgggccgacctgagtggaacgatgttcgacaatttcgagtcctatgtcacgacaaaggtaactcaataggggtttattctaaaacactgtctaaaacccgcttaaaataacctagagtttttaaccgaaatttatggtgaaaatgttgaaaattattttaccaggatct

SEQ ID NO: 136103 - DNA, 904 bp, Cannabis sativa
tgatctgggttgccactgtcggtctccttactgacactaccacccacattagggttcgatgttgtgacgacatccttagcagctttctctttaatcacatgttgttctgcctcttcagcaattaaggctaactcaaccactttcttgtacaaggtgtcgtgatcggtggtaatcttcaagtcccgactgataggggcattcactccccttacatatttttgtttctgggtgaagtccgttggtactaggtcacctacgaacttggataagcgatcgaattccagggtatactcgaccactgtcttcttaccctgggtcaacttcacaaaatcttccatatgcaaagttcttatagcaatgttataaaaaatttctccaaacagggtcttgaactcttcccaagacataatactgacatctctacccaccaccagacgcgggcatgatcttctaacatgaatgtagcataattaacttgttccattcatgtcacccctatgttatctaggatgcaggtaatgatgctcatccactactcaaccttcatgatattagtatctctcaaaaacatcagaggttgcaacttaacaaaatgttcgaacactgaatctcaatgtggtagaataaatctcgggttacccactactggcacaggagctggtggtaacacttgttctgctagagttgcccgtgccagttgcctaaaccgaagtaattcatcttcttgacgaagtataatgcttcgcatttcaaggaacatttgctgtcagttgggaggtggattaacattattaaccccacattatcccttgaattttgtgagggcgcaggcagtgccgatggattggcttggttattaccagactctacgtgcttaccatgtggtctagatgattgtggaggg

SEQ ID NO: 136104 - DNA, 676 bp, Cannabis sativa
  modified_base (631)..(632): a, c, t, g, unknown or other
tcagatggacatccccaaatgtgtacatgatttaaacttggtttccaacctttccttaattaaaaggagtttttaagactacctttattggatctcggtttaatatgtacacggatgtctttaaagcttcagcccacaaggatttaggaagattagagttgctactaagcatactccgcaccatgtccattaatgttcggtttctcctttctacaacaccattttgctttggtgtaccgggcaaggtgtaatgggaaacaaccctatttttttcaagaaacttcgcaaatggactaagtgattgtccatcttctgtgtatctaccataatactcacctcctctatctgatctcactatcttaatttgcttgttgcattgtttctctacttcttctttaaatatcttaaaaacatctaatgcttcacttttattatgaagtaagtagatatacatgtagtttgagtaatcatctatgaatgagaagaagtatctctgaccatgtgagtccatgtctagactacatatattagtatgtatgatttctaatatttcaaaactcctatagacaccaatttcaacagacttggaggtttgctttccattaatgcaatccacacaagtatcaaagtnngtaaaatctaaggtattgagtaccccatcttttacaaacctttt

SEQ ID NO: 136105 - DNA, 678 bp, Cannabis sativa
ttactaattcttaaatgaaaaataatttttggtgtgctacaaataatattatgcctctatttatatatacatatttatcttaaactattataatagaagatcaatcttcctaaatttctaatggccaaactatgaatacgaatagtcattcttaggatatatttatctatatatatataatcatgcatatatatatatgatatgaggatgttgtgaaatggaaaatcaagaaaagaagattatgtcaatgctttagattactattttcaggttttatactctctttcaaataaaatactaatagttgatagccttgattttgattcattttcaatatatcaatgaaattttaatataatcatgtgaaaaggtatggagcggatatgaggtattttttttcattttcttctcaagatataatttaaatctccatttttatgcttatatatattttaattatgaaaatgtatttttattgattgagttctataaacaaacatgtttttcataaacaaacatggattgattttctatgttgagttttatgttttttttcttcttaattttttaattattttattatatctattataaataagtaatctatctaaatactaattcactaaacaattttatttatatatttacacatattatttattgattagaaacctttag

SEQ ID NO: 136106 - DNA, 1275 bp, Cannabis sativa
ataatgagatggttaataattaattaatgtataagaggcacatgagagcaccctaaaactataattgacccattaaattatagtccaccactaattgtacatattagcctaataaacccaataaaaccccttagggttaggtgttggatataaaatgggctaatatgtgttagtataaggtgagtgtgtgtgtgtggtgataaggaatagggttttctatcataagttcatcttctaccatcttggggatacattgaaggattttggtgtcatagcaataatggaaaatgcaaatatgggaggtatgtgtatttcatatttgatgctctaaataaagtattaatcttggatttaatgattatgagtaataatgtttaaagtttgtttggatagctcataatctatgtgaatgtttaacaattggtattaagagctagtatatttgatttgagagctccataatattttttttgaactaacccattttatttttcaaatctgaaaaattattatattattttatttttcgaattaatgtgtttaaaattgtgcaaatatgagatttactattttaaatgggtttatatatgctttggatggatattttgtctattttccattgttgtggaggtgaaacctatttttggatatatgttatatgggtaatgtttattttgtaaaaatgtatgaaatggatggttgaaattgatagagtattgaaaatggaacaaaatccctcaagcggcgtcggttttggtggccagagatggtctatatgaccgggtcacgaaccgggtcgcgccaatccgggttgcagacccgcggacccatgtgtgggtttttcgggtgacaagaacgacagaaaacgacatgtcgtacgccctttggttcagccctcaccgagaaaaaatgacgggtcatttttcctgaccctttggatgtcattcggggcaaacgacatgtcgtttcccaaaaacaacatgtcgtttccaaaaaacgacatgtcatttcccaaaaacgacatgtcgtacgataatagatgcaaccccctttagcagcacaaaacgacgagtcatttcatgacccctgctgcatgtcgttttcaccaaacgacatgttgtttttccaaaacgacatgtcgtatgacagttaaaaaaaaggagggaaagaaaatgagcgcgtgggggcccgtgcaaggtcaaattttgggccatttttcaccaatttaatctatttttagcattctatcatttccacatcttaattttatgcata

SEQ ID NO: 136107 - DNA, 726 bp, Cannabis sativa
taagattttttgtagtaaattttaaagaaactttaaaatgaagaaattcagagtatctgttattacgtgtttttagtacagttctttaatttctaaaaggttctttattttaaagaagttctgagtgctctataactgcagtattaaacactatcatatgaggaaaaaataaattataatttttgcacatgctaaataccattaaatagggaacaatttgactttagtatgagtgttactattgccgacctaatttattttatacaacaatttgcattgtacttgttaatattttggcatccactagtctttttaaaattataaataattaatttatgatcctaaaagctgaatctaaataataaaagaaatactatttgtacaattaaatatttgattctagtttcaaaacttttaaattatttaaaaaaatttaaaatttgttgaatacattcaataactacacaatgtacacattacaatataaaaaaaattaagttgcaatttcgccaaatcttaaaaataaaaaaaaacacttaataaccatttaaaaataaataaccaatacattttactatatattattagggtaatattattttagatcatgtgtttcgtaaaagttataaattttgagagaatatatcactacaaaaattcttacttttagtcacaataaaatttgtaactaaaaattaaaaaattgtggctaattataaattatca

SEQ ID NO: 136108 - DNA, 514 bp, Cannabis sativa
gattgtggaatgttggcttgacatagaatagaatttgtttgacatactctcttgaagcgaaattcttgttgattttcgtttggaaaatgatttaggcaaatttttctttttatcgattgagcctttcgagcctacctaaaaagttttatcattagtatacccaaagttgagccttaacctgtttgaaattctcgccacgtaactaagcttaattcgttatctttaattttttcgttctcaacatgacttattatgccataagtttttaatcaatttgggggggaataatgtgttgtaagtggggaataattttgaaagtaagagattgaaaaaatagttgttatgtgatgtgcctctattgtaagaaaaaaaaagaaagaagaaaggaagagaaaaaaacataaataaatgcgataagttcttcttgagaatcaattgtgaacaattgggtaggcacatagaaaaaaattgcaatctcttactatcatctttgggatatatgaaaaagaaaaaa

SEQ ID NO: 136109 - DNA, 784 bp, Cannabis sativa
gttgcctctgcttcgaagcccaaatcgaagaagaagtggaagaacaccaagaagtgaacaaaagccatgaagaataaaaaggctactccttaaaaatgaaaagataattgaattgtctataatttttatgaaggcaactttcattgaatttatttattttttggtcaaaaacaatgttctctgtattgaaagagttagaattttaatgttagggccttgacctatgtgttattatttggagtactgacgggataacaatgtcttaaataacgagatttgaggtaagaaaattaggtagttttgaatgtatttatttgtataaatttgaattctttgtgtattagaatataatttatgatttattattatgaatgtgtatatgatactgagagtgtatgattttggagacaatatgaattatgtgaattgagatatattatggttgttatgacttgtatatgttgtatgatgtatatttatgctgcatattgcatgttgcatgttgtatgctaacgtctcaggtaaagtgagggactatgatggggtatgatacggggtgaggtcgttaaatgtagagataccctaccttgcatttttctgagtcgtgtatgagattattatggtggggtatgatacgtgataaggccgttgaatgtagagataccttaccctgcattttactttgtcttgtatgagattgttatggtggggtatgatacagtgatgttactgttaaatatagagataccctatcctataacaatggtaaggctgcataggccca

SEQ ID NO: 136110 - DNA, 749 bp, Cannabis sativa
attgtagtataatcataaaaaataattatttatcaatgtaataaataataacttaaaaaattgatctactatataataatattaaaattaataatttatttattaaaaataaatatcttttaataggaagattgaaaagttatatcatttatttattaagatacttaatatttatacgattaataaatgatatctagaattttaaattattaatataaaactaaataagtagggtaatatagaaaaaaatagattattattattattatttgttaagaattatttaagtgaactatattctttctcataattaatattatttttatgtctcgatcatttaaaattattctcatcattttatctcacagttattatcgtattcttacttatagtgccaaaaattattgtctccaataagtttattcaatacattaaataatgagttataattacttaatttacatataattatttgaaatattcagttataaaaaatagatctaaaaatattgaaaaatttataaaaaaaaaactcactatctaatgttgaatgatctataaattgattgagaacttattataaaatatttgtaattatattctgtactcaattatataaatttgaaattatttttttaattattaattattataaattatggtatagtatacatattttaatagtggtatatataattttattagcatgatatatatatattttcaatattaatatattagttttagta

SEQ ID NO: 136111 - DNA, 1023 bp, Cannabis sativa
  modified_base (93)..(117): a, c, t, g, unknown or other
  modified_base (225)..(227): a, c, t, g, unknown or other
  modified_base (327)..(348): a, c, t, g, unknown or other
tagccgccccatctcttcttcctctaaaagaaacaatacacaacaatacaagagagatacaattttgcatcctagtgagagagtagtgcccannnnnnnnnnnnnnnnnnnnnnnnntagattggaagactgtgaaggattgaatctaagagaaggacatttgggcttagatcttgattatactctgcaacagaaatgattcaagggtaagagatctgagtggannnagacatattattccgctgcaaccagtgtaaggttttcttaactttatatgtgttttccttttatcgttttagaacttcatatttaggttgttaatcaacnnnnnnnnnnnnnnnnnnnnnntcctagtaaaataattccaacagcaacttccatcaacatggagtttccatgttagatcttcaggattttgttattgaacttgctctcacttcttctctggctcttgctattctcgtgagtcttgagagacctcaagagttgagttgttgcacttagccacgaagtctgtaagggcttgcccctttatggctgttcttggctggtatgtgatctcaaactggccaagctctatagcccatttgagtagtcggcctaatgcttcatgtttgtacaaaacctgttgcagttgttgatcagtgcacaccttaatgaggtgtgcctggaagtagggcctcaactttctagaggccaagagaaagctgtaggttagcttctccatgagtgggtattgactctctacgtcacctagccttttgctgatgtagttcataggttgctatacacctgccttcttctcttgtgaggatagcactcacagcgtgctctgtgactgctaggtacacacctagctcttcattgtctaggggcttagacaacaccgatggttgtgctaattgcttcttcagctcctggaaagtgttttcacattcctctgtccactcaaactttttgttacctctgagaatattgaagaagggtacacatttgttcgtagatttagacacaaatcttctt

SEQ ID NO: 136112 - DNA, 1132 bp, Cannabis sativa
aatttcttaattaattgaatcatacttaattatttaaatgaatatttataactgaattcggttactagtatttttgatgaggaaatctctcaactacttgagagaacatctcacctaactttgagaaaatatctcaaccaacttgaaatatttttaaccactttttaatttaaatatttatccaattgatttaattaattaattaattaactcaaagagacaaaactaatagggacaccttactataggataggcgccaaccttctcttaattaagacaaggacggtgtcttttatatatcttgataacttgtgtcttgacaaattttgtcttttttcctatttaattaattttaaaaaatatttatttattgcaaaaataaataattactattttattagttcaaaatagatttttctgaacaacatttcaactcttttttcctacccttgacaatattttaaggtggtgattaagggactatagacgtatataattctaagctcgaataaattagatttatttattgagtctcttcaatcaaataatattttttattaattccatgattactccactataaatatagagttgaactcttattaattataaaattatatttactgagttttactatagtgtccattgatataatcaattccagtaattagccctccttgtgtcggttcataattaattttggttaattttggttaaattacgttaaattactttaaattactttttattacttttttacccttctaattacttctttatcatttagtactattaattcactagtgaaagtataatttagatctcatctaaatttacgcattactttccagctctagaattaacacataaagggaaccaatatttgttctgttaggaaagtcaaaattccataattgtaggtcacgttcccagttatccacattattagatttcgaaaacagaagttgtaagaaacatcatctctaagaaactttgacgagtgaatcaaagaaactaacaatatgtacagttcatgattacttaggatttatgtcgatctattattaattattgttatgatatgaattaggactttatagtaaacgacaagtttgataaagataactttatt

SEQ ID NO: 136113 - DNA, 998 bp, Cannabis sativa
  modified_base (170)..(180): a, c, t, g, unknown or other
atatatatgtttatatatatatgatagtaatattcatgttattagctaatactgcatcttaatttttcagtttagtgtagatatttagctaacgtttcgttgcttccacgttaaagattcagttatatgttttgcaccacacaattgtacattattattattattattannnnnnnnnnnattattattattattattatcggtgaaggctgataaaggcgtcgtattttgggagctgtaagtgttgtgcactagaccgtgttaaaagagcattgatatgtaagagtggttgagaaaggaaccaagatcttctcttaataggaaatcttgattggaatcaagatttcttattaaaaagttgtgtgttgttaaaccaatttaaatttgacacgtcaactaattttttatttattacaaaattaaccatctatatatacaatttttttctttaaaatactcaaattaattgatgtgttacaatgagactagtttaatacactatgaaacacaatcttttaacacaagatcttggttcaggaagatagatagtacggtaaaatttataaagttttatcttaaaattaattgagaataagtagagtagcacattttttttattgtggtagtttatttatttggatctattttcaaatttcaatgggtgtatttgagaaagtaagagggtatgataacatgtagaaattctatcttaaaattatagttgataataaaaagagtaccatatatatcttatatagggataattatataaaataaattttttataccaaaaaaattatatttttatgttttaagatttgtttttttttttatatatatatttttacattttttttttttataaaaacaacacacgaaaacaacaagaaaactacataaaaataacatgattataatatccaaacaacatcaaaacaacaacaaaaaataatatacagataataacaaattaacaagagtacaatataaaaagacca

SEQ ID NO: 136114 - DNA, 1137 bp, Cannabis sativa
  modified_base (490)..(493): a, c, t, g, unknown or other
gtaaaataatttccaacaagtaggacctgtaggaaccggaattccggttggtgcctaggaaaccccacagaatcggtcttttggttggggaaccgatctgccggttggggcagttttgggaaccctagtttttccccttttgtgatatttagggtattgccatgttatccatcgatagggaaacttttagtttcaattttaagtccccaaaaagtgatttagcgtatcactcaccagttttacgagtaatgtgatttatgggcatgtaaatcatcaagcagcagttccactcatgttggccgggacacctgaattcgaaagtgaggtaagactagtataatgatatgcatacgtgtttacatgtttagcgtacatgtttgttaagcctgttagattacattagaataacggtatcaatatatttagtattatattggatatcgataaatgtatgctagcttaagtactatttgacagtatcacatcggtnnnnctagagtatgactagcataccgagtataggctaatattatggtcaatagtactgtaatacttgacagtatcacatcagtacgactagagtatgactagtgtaccgagtatagattgatattatggtcaatagtactgtcatttgaacattttggactcagtacttatgtgggccacaaggacagggttatgattgggtatatgggcacatattataatctgggttataattatgatattgattatgcttttcttattgagtctgtcgattcacaaatattgtttgcatgtgtagtaagggcaaggctaaggttgagcagccgtgagatcgaacaaatgaagattatacatgttagggcggttaggcttggagcgtacgctctttgggatagctggttgtattttgtcaagtttctaggcgacaacctttgtattatgcatctgaaacatttgtaattattttctaacaagatttcgattatatataaagatttattttggtatttataagtaattaaataaagttttaattaatcacatttttttaataaactcgttaattagcgacgggctgcacaactaagttaaaatcaagataacacgcctaaactagtagggttgttgaaaattattttaccaggatct

SEQ ID NO: 136115 - DNA, 702 bp, Cannabis sativa
tctcgatcatttagccagacattatgtttgttcaagatgcagtctatggaattccttcttcctctaattgcagcagatagaaagaagaatttggagcatttatctccatccttgagccactcaattctcgccctttgtttccaataaactgcttttctggttcttgcttcattcagattctgacggatgtcacactctaatctccagtctcttgagccagcaggcaacagctgaactctatcaagtttttcctccaaatcttttataaccacatcaattttaccaaattgcgttctcttccactgaaggagcgccaccctggtggcaccaatctttttaaaaactcgggcgggggcccaaagatggtgcaccgaatcccaggcattagcaacaacaagcttacttcttccatccctcgtccaattttcctcaaacttgaagcaccttttgaacttgggcacattcccaaccgtatcaagggacaaaggtctatgatcagaagtactcgtctggattgaacagagaatagctttgggaaacaagtgaagccaggcgtcattcatgatgcctttatccagggccgacttcacgtggctgtctcccgagcggtgattgtcccacgtcatcatgtccccttgaatgctcatgttaattagaccacgggactccaccaggttagatatgaacgggataaaggggtct

SEQ ID NO: 136116 - DNA, 752 bp, Cannabis sativa
acaccacaaaaaaataacaaatccccaacaaaaatagaggaaacacaatagataaatgcaataaaaatatatttccataaatgaaaaaataaaagaaaaatagcccaaaaattggaaaaaatcgaaaaattatgcccccctttttcttgaattttttcaaaataagcaccccatattaaattgcaaagaacgaacaagacaacacacaaagatacataaagcaccaatcaacactttagagcaaaaatagtgtctaagaaaataataaaacacaacaagtaaaaaaaacaagaatttttaagaaagctcaattgacaaaatcggtcacaattttttttttttaaaaaaaaataatcttgatatttttgccaacaaaaattacacaatgtccgcttgtctttgtccctgatgaaaaaatcaaactcagaagaatagtcattaattattttatcaagctaatgaactagtggaatgaggtcatacatgttacgcaggaaaaaagtggactcaataccaagaatattaaaggcaattcaaatagtatgtaacagctttataacaccattttcaaagatatgagaattttaccacaaattgtgtcaagcataagtgtgtgaaactgtaagcagtgaacattgcccaatttttccaaaagactttttttgataaattgtaaccataggaaacactgttacactacctcaatggtagcccttttcaatggtagtgtatcttctacataactcctaatt

SEQ ID NO: 136117 - DNA, 629 bp, Cannabis sativa
agtgagcaatgcatatgctatgaagtcagcatatccaaacttgcttggtggtctggtttctcttctcaccctgtctctaggaagttgataggtgcttaaatcagtagcaccttcatttatgtcaatttctgcactgatttcagaattctcttctgcaatttgagtatcaggttggtcgacctcaagttgtagaccttgaactggcatagcaggctgtatatcattgggaattttggttttcattgccatttcatcctctttgaagacaacatatctacttatgatgcacttcttgaaaccaggttccatacaccaaagtttatagcctttaactccatcagggtaaccaagaaacatgcacttcagtgctcttggctgtaacttatcttgttttatgtgtgcataggcagtgcacccaaacactctgagatgatcaagtttgggaacatgccttggccacatttcttgtggagttttaaacttgtttgcaatagatggacatctgttaacaagataacaaacagttttgagggcttcaccccaaaattttctctctaaaccagcaccaagtagtagacatctcactctttcaagtagtgtcctattcattctctcagccaaaccatttt

SEQ ID NO: 136118 - DNA, 549 bp, Cannabis sativa
  modified_base (59)..(64): a, c, t, g, unknown or other
  modified_base (123)..(130): a, c, t, g, unknown or other
cgatctctcagttaattgattttaattaatcaattattattctaaaattagactatgtnnnnnntatgaattttcactaagttagggcccaattgtggagaaaagagattctagggtttattnnnnnnnnaagagactttattaagtctaattagtaaatatgttaaacggaaattttatttgatgattaattttaattattaagataaatagttttggcatttaagtggttgaattggaaaaataatatttttaagaaaataagataaatagttgaaaaaatagaaaaattgcaaagtgggggcccacatcctatggccgacctctattgctttattttaccatttatttttttttttgtaatgccgaaataattaaaacctaaacctaggtggttgcctatatagatagtgatggcctcaaattgaaagatgatgagaacacttgcctttactcaaattttgagcgttggtagaatgctaacaacaaagctcgatactttatgctatctagcatggtcgacaccttgaaaacaaggtttgcaaacac

SEQ ID NO: 136119 - DNA, 1214 bp, Cannabis sativa
  modified_base (1074)..(1079): a, c, t, g, unknown or other
tggagaaaataaaataccaggattagacggggctatggaatttgaccattttacccctagttttggaaaatatctaagttgtaggcttaggggcatttttcgtaatttgccaagtgggcgacttggtggctgcctagggtgttgacacctgaaaatttcaattcagcaagagatcaagttagtttatctcttttcatttgaagaaaatagagaaaaataaggaaaaagccaaaagttcaagattaattaacctctttccttcccttctctcctttcgaactagccaaaaccaggggagttgctgctgatccttggtgttttcagcaagaaattcaagtgggattcaagctaaggtaaccctagaatccatagacttgtgtttttgaagcttttactttggtttgattaggtgattttggaaattaggggctattagggtttagtttttgtgtggttcgaattatagggttcatttgagttgaatttagtttatagcagttggttttgatgtttggtttaggttttgtgcaagtttgagcatagaaaccttaactttgatctttaatggcatgtttgtttatattgagtttttctgggaaataatggttggattatgttgtatatgcattgtataggtgttctggaaagtatggttgcatttggttggggattgagcaagaaatagaaatttttgggtgaactggtgtgaatcggctagccggttttggcaaggttcctgaatgctccattttctcaattctcatccatttcaatgtagtagttgggtgtttccctatttcctgagttagagtaatccatagcgagtataacagaacctagggttgtgggtttgagtttcccggattagggctttaatcatgtgatttactcagtttcattatgtgatgagggcatcgatctagcacgagactctccgttcaggtcggccatcacacttgaatctggaaagaaggtaagaatagtgtataatgtgtaatatgaatatttacgtgtatatatatgttaagtgtatatgcatgcttatgtgttagttacactaccaacacttgtacnnnnnnggtacagagtgcattggtataatgaatattgttagagattacattacagtgataccgacacaagtacgggaaagtacagggtgtttgtgatatatcacgcagtggtactcagggtacgaaacaaaccctaccaac

SEQ ID NO: 136120 - DNA, 703 bp, Cannabis sativa
attccattgtacactcttaacaactaaataactatacttcagtaactaaaatttagtcatgaaagaattaatatttggtgaccaaatattttagttggcaataataaataaataattatataaattaattatttagtgacaaatgtttagttttaaaaagtaatttataaaattatttttaatttttaatttggagtttacatttatttaaattataaacaaaaataaataattcaaaagacaaaatactagacaataactggaccaaatataagaatcaacagcaaaacatagctgtcactacaatttatttatcgaaattccactctacattgtcttgtgttaaaactatatcatcaatcttcaagagacccaagctcctagcaacaatcttgacactttttgcagtaatctcgtgtcatgttctttagtaaaaatcactgcccaaaacatgaacaattagtcactattaatttcattcaatgaatcactatatatatgtatgcttatcttttactagtcatccataacccaaacaaagttctgaacaaagcagatacaaaagagatccttttctctacaatcaaaattcagaacttgttgtaactagtccttatgttaatatgccctgctatgcataatgctctcttaaattaaagcaactaaatccacacaaaaccagagttaaatatatagatatagt

SEQ ID NO: 136121 - DNA, 527 bp, Cannabis sativa
aaagtcatttctggcacgccaaatggcccagctgaccatagccgcctcctccaactcgccttctcttcctcggcattgcagctccagcagccaattgctgaaattgccatccatattaccaccgacatccacacttgtcttgttccagcaggaacgagcatgaacacacccaactaacgcatgaaaaatagtttcagttgtagtgagacacgaggggcatgttgggttaattggaacatgtctttttttcaattgaacacaagttggtgatgagcctaaagccaccctccataagaagttgctgactttagggggaactattaaactccataaatccttccaaacgccagtagctccagtaacaggccaagctccttttgcttcttgtaagaacttgtagggactcttaaccaagtagagccccaatcgttcgaaccaccaactccaatagtcagatattgcagtagaactcaattgtatagaaaaaatcagctcttgatctctatcatcaaagagatccttaatta

SEQ ID NO: 136122 - DNA, 550 bp, Cannabis sativa
aaaattacataaaagactttaattaattaaataggcatttagtaccgtgacacatcatcatccctaccgtaataccaaaaaaattgcataacagagtccaaaaatgaaacatgtcatcttggtctatgaacacgccatatcgttcaacaaattacggagagtttgatcctcaaaacaacgcgtaaaacacaaccaaaacgaaacctataaatttacttttttgggattcaaaatcagagctccaaaaaaaaaaaaaaaaccattgatgaacaaaaaaacttcgttcacaaaaacaccaatcaagcattcataacagaagtcatttctcaaacaacaaacaaggcctacaaaatcgattcactacgattgcaaaagagatcaaagtcacaattcgaaaccattctcacaaaaaaaaactccattaacgaaaaaaaagcttcggtcacaatcaccacaagatcgatcaagaatttagaaccgaagttgtttctcaacaacataaaatcatttctcaacaacaaaacagtgacaaattcattattggaaaagt

SEQ ID NO: 136123 - DNA, 1477 bp, Cannabis sativa
  modified_base (553)..(554): a, c, t, g, unknown or other
  modified_base (769)..(771): a, c, t, g, unknown or other
  modified_base (1023)..(1023): a, c, t, g, unknown or other
atattattctctgcaaagagatatgccacataaacacttagaatttaaattcaatgtttatgaataattgttaattcttaagcaattattaagattttttttaataaaaagatcttttgatctgacatgggtgggagaagttaagaaagaatatatgcagttcaacaatcttttatatctatggaactctagattatattcataacttcacgggatctctataacactcaggggtggaagaagctattgatatatgcagttcaaatattttttctttaaactcgagattatactcaatacaccacagtatctctatgacacacatattttgattagacatgaatgtaatgtaataaacaaattagcaaattattagaacttattcttgatcctgtaattgttccaattaatatgttactgtagttatagaaattgataccaataaagttcttggacatagtatcacaatatcttatctgagtgggagaattttaaaattctagcccatcattatttggatgacaattttgatagcttactatgttatgatcannataggaactttagaattcaactgagaaagtaaatctaaccattcatatggatataaataacttattagaattatgaggataagataggtagtttcatccaggtctattcgaatgacttaggcaaaatacctaatcctcatgtaatgttttatggtatctttaatgattacttaatcttaagcaagtattgtacattaatgttaatactagattgnnntgttgatgacttagtctagaagaaacttatagtttcagactaagataatatgtcacaacaagacgtccctgagaaacaatagtaacaagttaaatgtacttctatgtatgaatttaaccagactcctattgttgagtgggagccatctaagatgtcatcaaacaaggaacattaggagacagtcaaggaagagattctaaaagtgatctatatgttagatgataggggtgtatattagaatccttatatctncaccaactcataacctattagagatggtgtttactctaggggtggaggaattattctagatgatgtaaaaatccttctatagtaatttaagcttcatcagtgaagctacataactaagttgctttccaaaagcactggaaaagttattcaacttaagaaagttcttaactgtttaatctctattccattttggatagaattagagatatgtcttctatttattcagatacacgttataaacagtaaaaaattcagtatccctagatgagtaatgcatatagaaaatgatgttgcataatgttttatgaacacaaaggaagtaatcgtggagaaagctgtagcctaccatagacttacagatcctataatttgggtttagtcaaatacactacacttgatctggatatcaaaacaattaattgattgaaatacactacttgttttatgttagtgc

SEQ ID NO: 136124 - DNA, 705 bp, Cannabis sativa
ttatttcggttggagcttacaccagttatgtcaagctactgcaacctataaaaaggcagccacttctacttgttttctcaaggctttactagttcgatttgtacatagattcatacagaaaagagagtttcattttgagtgtttggagggttgtaaaagtcttcctcatgtatttgattgaggggactcaagtgagattaaatttgtaatgtttttctgtactgaattctttaccaatgtacctatgattctcgagtcattctccatgtacaatcaatgatcatttaaggaataaagtgactgtgagttctttgcttctttttctttcaagtgttcattaagttcttgtattcattgttcattatttctcttgttctatctctactttttatggtttatgtttcttgtccttgatgttgttgtttgagttcaatcttgccagaaaggtgagtttgaatcaccacaaaaacaaaaacggatacggaatagatcaagatttaaggggaaaaaaactgttttaaatattttatttttttttaaaaaaaaatgaatctcaatttaaaaagtgaaaaagtaaaaataattttatagaatgttattttttttaaatttttttttttttttacttttccaattaaaaaatataaaaaaactaactaaaaaaatattaccacgtgattattctcaccaagtaaccgattaaat

SEQ ID NO: 136125 - DNA, 728 bp, Cannabis sativa
  modified_base (362)..(362): a, c, t, g, unknown or other
aaatataacgtggcattgacaaattaaaacaaaaagaacatttcccctcctaatggtaatcaaatatataattagaaaattttataatgtatgctaaagggttcagtactaatgcactctcttatttctttctgtatttgagatactttttcagtttagtttcttttcatatgtaaatcttataattatttaagatatcttgcaaaattttaaaaaattcaaaaaaaaattaaaaaaaattaacacaccaatataacagggtttaaagaatctgtttcacgagtaactgaaataaattatttgaacattgatttctatattgtaaattactcttaacttctcaaaattttataaaatgtctnaaataactacaacgtacacaactaaaaaaagactaaaaaatctcctaaataacaaaataaataaagaatacatcagtacacattttttaaagaaatacattataaaaacaccatatataatatgacagagaacccaagtttttatatattaatttttgtatatatttacacggagcttcttagggccagtttggcacagtttttgaaaaagctaaaagctgctttttaaaaaaagttgtaataaaaagtatttggtaagcagttaataaaaacttattgaagaatttatgaagaagctacagctaaaaattaaaaactaaagctagtacaaccaaatttttaaaaaaaactgttttaattaaataa

SEQ ID NO: 136126 - DNA, 960 bp, Cannabis sativa
aattttcggtaagcatatacgtatataggatgttttatttttttatcgttatatgtaagatatttttgataatttacgtatataactaaaaattacccaatttaaaattagcttcagtttggttatatttggctaattatgatttttgtctcttaaactttgacatatataaaattatgcccttcaaacttttaaactgttaaaaattctctctaaactattaagattgttggattcaaggacttttgtctaattctattcaattttattaacatgacgattgtttatatgtactaaatcatgtctttttcattcacgtcaaactaattggacaaaagtctttgaatccaataatctcaatagtttagtgaatttttaatgacctgaaaagttaggggatataatttagtatatgttaaaattcaaggggtaaaaatcctattagccttaaaaaaattgatgaaaattgagtttagaatattattttgtaccattttaaaaaatacaaagtcttatttcgtatataataaaatagaaagtgtaatcaataaattttacaaaatattaaatttaaaataataatatttaagttgtttgttatttgattatatattaattttgttataaataatcaaaatcagtttttttttttttttaggaaaatcaaaatcagttgatagcctaaaatttagatataaaaactatttgttttgaaatagaaatagaacaggttagatacattgttagagatcaatcaaaaataaattaagataaattataatttattgtaaaaataatataaagactaaaataagagattgattagctaaatgttataatatatatacacaatatatattacatatattatatataaaaaaatgtaaaaaagtttaattacaacacatgtaatatatgttggaaattattttatcaggatctttgatctactcacaagta

SEQ ID NO: 136127 - DNA, 1056 bp, Cannabis sativa
tgccttgtactgtagtaacatgcaaccggatgaagtcaatcacattatgaagatttcaggtttcagcagacaggaaatgccattcacttatctgggtataccaatttgtgggaaaaatatctcagggaaagaatgtgatatattagctgagagaatgactgctagaatcagaagttggagctccaggaatctttcttttgctgggagaatcactttaatcaactctgttcttattgctatacagacatactggagtcaaataatgatccttccaaagaaagtattgagatctatcgaagccatctgtcgggcctttctttggaaaggtcaagctatgtttcaaggtgcagggtatgttgcttggaattacatttgtcaacctaaggcagggggaggtctagggatcaagaacttagaagcttgaacaaggctgcaataagtaagtacgtatgggctatttcaaataaacaagagagcttatggctcaaatgggtccatagtgtctatataaagaatcagacatggggggactactctccttccatacattctagttggtattggaagaagatggtcgccttgaaagaccaaatccgagaaaaggtagattttgatgcttttcagaagcaaaaatatagtgttgcagctggatataaaatgttttccccacccgtaactaggctgcattggagtaaagaagcttggtcaaggcttaacattccaaaacatagtgtcatagcttggttggcaatgctaaacaggttgaagacacaagatagactgatgcgatttggccttcatgttcagggaacttgctgcttatgtgagctacaattagagacttgccagcacttatttttttaatgtaatgttgctgagaaatgtttgcaggatctgaagaactggctgaactggcatgcccaaaccagtagccttcagcaacttctcaagtggattgggaagtccaaattgtcaaagtttaaaaagggagtcctcacggctgctgttatagggctggtgtacaacatttggagggcccgaaatgaagttgtttgg

SEQ ID NO: 136128 - DNA, 2051 bp, Cannabis sativa
  modified_base (263)..(263): a, c, t, g, unknown or other
gatatcattgttctgccaccaaacaagaaaataagatctggaagaccaaggaaaagaagatgaagatttatagctgattaggataaaaaaaacagaacaggtgcagcaaatgtgatcgacacagtcacaaccgaaagacatgcaacaatcaagcaataaaatagatacaacagaattatttgaattgtttaagtctctatgagaattttcacatgatcaaatgttatatttgatagactgctattaattggcaaagtttaaanagtttgctagtagttgcataatagtttcaggaaagttttgacacttactaagaatttattacataaagaattttaacagaaatattttttaaaagtcagaaatgattttttataagttgtataataaggagaaggaaaaagttgcataacagtaagaaatatattgagataagatgtcagaaattaaatgacaagtatgttgaataataaaaattgtttagagacagttgcataatagtttatctatagttgtacgacttaaaaaaaaacaaacataatcaaatgtaaaatcataacactattgctgttaaaacataaaaaaaaattgaacatattacaatggttaatgtcaaatatcctaaaagtttataactagtttcagaatataaaacacatagagtacctacaaacataaaaaaactaaaaactgtctgaaatgaaaatcaaccaataacaacaaactttccctaaaaatgaccctactttttcaatttagaagccttggaagacttgctttgcttctcatcctcgctatcaatactttaatcatttttcctttgaccatacgagaagaagaaggcagcaagtcgagtgcgataaacttcaatatcaaaatcaccaggaacatcttttccatggatgaagaactctgtaaatacagctacaaatgctccgcaatcactattaccctaaaaggaaaacaaaacagttaaatgactattatacaacataaaacaaacttaaaaacaacaactcacttttttttgctgagatggaagaccagcaatctccacaactcttagaggagctttagggtcagaacctaaatcaggaacatgggacctattcttccaaaatccaagtagatttaaaaataaagggagtaaaacaaaataagccttgattgcattcctagctgcagaattcattttggtagtcctcaaagaattataaagaaatataatcccctcattcaaatcaagacggccaaaaacccaatggctttccttcctaagattaatgatgaatagaacatgatcggcttcataccaaggcttagaacacggaatttgcatgccctcttatatgatgcgctattgggtgagcagcatgtatgtgagacatcttttttttcattgccttggctttgtaaaacttatgatataacgattaaatgaaatcatcgaaaaggcagtcagttgttgtaaaattcagtgtaacagcagaagaatatttccctttttttctaaggtaacagaagatagtgttcatatgctgaaacaaaacaataaagaaacacaaaagaaaagttaaaaaatattacaaaatcttaataacagtaaccaaactaaaaaacaatgataaaacaactataaaaagttttaaaaggaaaaagaaattttaccgagtcattgataaacatgtcacagcaagccaaatgataaaaccaggttttatcttcaacataatcgacacctaatttaaacccaaggaaaattttcttctcacaatcctcataacaattgtaagccctaaatcaataaaaaaacaacaaaaaaaacaatattgaattcaaataatagaaaaaacaaaaacagaattcaaaaaaataaaaaaaatacaaaacagaataaagaaaataatcacctaggatgttttagcaaaccttcaccaatccaagcattaaactttgccttaatttcaagagagacgggatcaacaaatgtatcgttaagagcgtaaaggcccttcacataagtaaccatcttaaaattcctctcatctcct

SEQ ID NO: 136129 - DNA, 650 bp, Cannabis sativa
aacatttaattaccaggatggtttagtatcccaaacggaatcatattcaagggaaaggtagttgagatagccatccatatcatcaaccactccattttcatccaagaactgggattcgtttgggtcggttgacttgcttccaaaggccaccacagttttatcccgaaagccactcaatttgagagtagtagaagaagtgaatgaatagtgatggacaaggttcgagaaatggggttggggagaggggagccggggacggagctgtagtatcggaactgaattggaaaaagagaacagagaaagtgttgccatatttgtctttgttaagacggaaaagaatatcttctctgcctcgctctcttattatataatataaaaacatttttaataagtgatgtaaaaattgagttatatttattataaaaattgattttgtgatatttttaaattaatttttaccatggtgttatattgcatatatcatttaatgtttttatttttttttataatttattaaaaaaatataaaataataataatataaaagtaaagaaagtaagaaaaagtagcttaaacaacttacaaaaaccacaaaatagaaaaattaggatttgaaaactattttatgtttttgaaaattaaaatggtggg

SEQ ID NO: 136130 - DNA, 689 bp, Cannabis sativa
  modified_base (38)..(42): a, c, t, g, unknown or other
gaaacaatggtggaggctcatgaaataggaatgacctnnnnnctcgcctaaacgggacaacgtcagattcttttttcgattgaataaaatattgctagaatgttagtcattttagatgagttgactactctattcaatggatgatgctttgactctcgcctaaacgtgacattgtatcagtttgttgaaaaccttgaaaagtaaaatatgttttatttttggtatttttataaacatatttgttatacttgttattttctaaatttgtttatgaagttattgaaccaaatgatttacttttgtatattgagtttgtagtgtcaaaatgaacaacccactcctagtaaatgcctttgcaaatgaactctatagtatgaaaatgctccctggaaagagcattaactcacacttgttaatgatgaatctgaaattccaaaaagcaaacttgcttggaacggaattatctagagaacaatgagttcagtatagtcttcctcctaagtataattaatttgttgtatcttatatgatcaataattttaactcatccaacatggataaggtagaagaagaattgcgcacttatgaaagacacttgattgcaacaccgcccccccggatttgcaaacttgtgtaagaggaaaagaattaaggatgaagcttctaacagtgctgcttcttcaagtaca

SEQ ID NO: 136131 - DNA, 636 bp, Cannabis sativa
atcatttttcacaccaaccagtaagtcggtctcttctccgtaaccactgccaaaaaagagagagacatatatcaactccaaaagtttatgccacgcaaaacctaaaaattaactcttctttcttgatcatttaaacgcagtctaacctcgtgcgctattctttgggaagacagacactgtatcaatgccaggagctgggttgaaaatttcatcaccaaagtcctggacatcctcaccaacaatcccaagatcactgctctcatctacagtctcagaagcagcttcatcctccgcactcgattgagccctagcaactgaagaaaagaaagctcaacatgttaaaagcatgtccattgccaatcgaaacaggtcaacccaacatccaccaaacaattagatggaaattcaaatctgcagaaaattaaatatagaaacccccatgcattcattcatcgatccaatataaaatttgtacaaatgttataccccacgattgaaagtccctacggataaactaaattgaaagaatattttgactgaatgcgttgactaattagcactccaatcatatcaaagttcacatttaaagaaatcaaacactccagtccctacccctttccccaagcaaataatccc

SEQ ID NO: 136132 - DNA, 507 bp, Cannabis sativa
  modified_base (253)..(253): a, c, t, g, unknown or other
ttcttcgagttttccagagagaaagaaatcctcagaccagaaaaccttcaaacacttacagatttctttgctaacctttgttcgttactgtcagtctacgattctttgttgatcaacagcaactcctagtttcaacagttcatgtaagtttatcgcatccctcactttactgtttgtgttcatggcatgctttactgtttatttgtttttctgggttttgtgtttgaagtttctgggaatgtttcaccttgantttttacgtaatacgtctagatttcccttctctgatgttagggtcactctctttttatacattattattatttttgtaaaggcccattcactttttgtgtgatgaccttcaagggtatggagaagactttgtctttctcgactttctgccccttctcttccttttccttttatgcgcaatgtcaccatctgtgagatttttgcacccgacttttgtccaggaaatccttgtaaggctttcttgttgacaactgt

SEQ ID NO: 136133 - DNA, 755 bp, Cannabis sativa
tttgatcatacaatttggtcttgtgttcttcctcccgtattgctttaccaagtcttggcaaaccatgatgttataggctatatatctaccttgaatgaaaccactttagttttgtgctatcagttcaggtagtacttgtctcagtctagtacatagcatcttagttgtcactttttaaataacattgcaacatgttactgggaagtcattcaccgattcgcgacatttcacttttggaacaatagtaacagttgtggagtttaactctttgagcaatttccctgtatctagaaaagggagaactgcttcacatatgtcttccttaaccatatctcaattatcctaaaagaaaaagctactaaatccatctggccctagagccttgcatcccggaatatcaaaaacaacttcattaacttccttaatatttattcaacataaactaattcattttatacttattaatattattttttggaatataaaaataccaagaaagccatccatatttttattgggagtttctctgttttttgacttcattatgatacataataatgaataagattttcatatagaaccgaaattcatgaagccaaaaccaggaacatagtaatcatcaattagagcaagtttttgaaataaaagatgtgaaaattgaacaagcttcttcttgttgatatcattaagaacaacactattgggatgaagcatttggttattgtccatatcaaatctggtgctaatagtggtct

SEQ ID NO: 136134 - DNA, 502 bp, Cannabis sativa
tttttttaaaaaaaaatatgataataatagtaataatataaaaataataactctataataataataataataataaaagaatcggttgtacatgatacttagaataatatttcaattgcttttcaccacgtttaaattttttattaaaaatattaattaacatctaacaaaaccctactttacttccgttgttttaaatgataactttaatgtcaagtatcacataattataattaaagagcattgctattgggcaccagtggtgcccaataccttttataggtggcaccctacgataggttagcgatattccctaaattttatttttttaagctatatgagatctgcttcttaattacaccaataatggtatgataccaacattacaaaaatctgctacatttattgacaactttttagtcgcaacataatttttttgtgactaaatgtgtattttagtcacaacaaaatgttactagtgactaaaacatattatttagat

SEQ ID NO: 136135 - DNA, 1259 bp, Cannabis sativa
atataaatataaattgtcaaaagaaaaagcaataacaataatatcactaaaattgtagtctaaaaatttacacaaaccagaaatggttgtatacctattttcttgctaattttctatgctgaattcttatgtaatcataaaggaaagaataaaaaacagctaataatacactaacttaaaatattataacaataataagagaccaaaagcagtaaacagaaaggatagttggagtgggtgatgagatgaagcatgatgattgatttgcaggcaaatccattcttcattcttccacatatattgaccctaaatttaacactatattcttcagagggacttaaattattctcaccactaatctctagcaaatacattatgtgaatcaaccacaagcaagcaaatcagaaactatatagattcatgcatacatacatgaaaagtgattaagtcatttctacaaacacatatatataacagaatagaatatatatactaacatcaaaagaaaattacgtaaaacaacatatgaaatcaagataaaaagagaaggagatttaagcacaatcgaaaaactaaaatctaaaagaccaaaatcttatttcagagagattaaacccaaatcaaacccaaataagagattaaatttaaaaacctagaaaaagctaaggagagattttttcaaactttgaaaatcctaaaatcagaaacatacaagaaaaaaatcatacttgtaatagtaaaaaaccttcctctctaataagctatactcatcgtcatcttcatgctgttctcatttttcattctcaaatctgagaataaaaaaaacataaataaatctgacagagagggagagagaaagccacacatatatcgatttcatgtaaatgtcaacataagaaattcttgtcaattggttcgactctgaataaaagatgattacatcattacagcataaaagaatcaaatcggtatatttcaaaaacaactacctactatcacctaatgctgttcttctcaattatataggttgatttaataataataataataacaataatataggattgacagaatataaataaaattcggaaaaagggaacgaagaaatttctgaaagctacaagtaaagaaagacctgttgttacctaatcactccttctcaaaaccctaaaacccattcccgtgagaaaaaccaaacaattatatttataacagtgagactcaaaagaccaactgagacaaaagtcgaaagatcttac

SEQ ID NO: 136136 - DNA, 1334 bp, Cannabis sativa
ttctatttataaaaaataagattatattgaaatgagttatttagggcataaaatcccaacaccttcttcacctataaaaagagagttccacaagcccatttttaacattcagaaaactacccacaaggtgagagcttctctctctagaaactagagcttaaacacttagccttttttgtaattcttgtgagaaataaaagtcgacgtaacatagcctcattaccatcgcaacatggggagtgaacaactataaattttgtatgtctctctaaattatttacgtaaacttattaatcatctcaccaatctagcgagctgatgttggctactttttagcgtcaacaatatatttctctctttaatattatttaaaaataatattatatttacctaattaatatagctttatctaataaaataaataattaaatactatttattatacaattcataattgtcataattatttaaaataataatttctataaattactatttttccctcaagaatttatttctcatacaaattaattctcactcaaatctacacatcaaataaaactttctcctgtatagtgttatataaagctcactcagggactctagatctatcttttgaagctccaataaacacttgattattatcgatctcatgaatagaataacctagtttattaatcccattattactctactataaatattgaattgcactctttaataatatagaattatattacaaatttgttacttctagtctattgatataatcaatataagcagttgtccctccaattattagttcataattagagttaataaaaattacagttttatccttctaattatctcttgaatctttatgtactattaattcaatgtgaacagttaatctataatttattatagatttggatccacctgttagtactcccaaaaataatactataagagaactaatattcgagccgttaggaaagcttggattctactattgtataacatgttccttggcactcatgttattaagctcccaaaatagaagttgtaagattcatcttctctgagaaactttaaggagtgaatcaaagactcaatgaacataaaaagttagtttatgtatactcaagattccgactgatctactaatgatcatcattgtgatttgaataaatctttcatggtaaacgacacgttaacgaaatatgtttattacatagcggttcagtcatgcataatcaaattatacacagaacctttactatatgtctatccacatgtgtgatccgaatcaaaatcacacatactagaagtatagtgtaacaccctaacta

SEQ ID NO: 136137 - DNA, 754 bp, Cannabis sativa
gtcaatccgaatgacattaccagaaaattgtagtgtccatctctggatcgaaatgcagtctttcatatatcttcttctcgtattctgagttgattatagccagatcgcaggtcaatctttgaaaatagcgtctttccctgaagctgatcgaacaaatcgtcaattctgggtaatggatacttattcttgattgtcaacttgtttagttcccgatagtcgacacacattctgagggaaccatctttctttttcacgaacacaatcggagctccccagggtgatacactaggtcgggtaaacccaatatcaagcatcccctgaagctgtaacttaagctccttgagttctgccttagccattctatatggtgctttagaaacaggttcagctccaggtgctaaatcaatcacaatgtcaatttcttgttgaggcgacaatctggcaactcctcaggaaatatgtcaagaaaatccttaacaactctgactacctcatgcccaaatgtttcgggtttgctggagtctaccaccactgctaaaagtcctacagatccactgtgtagtagatccctagcccttagcacagatataaatgggatccgagacccctgcactaatccaacataaacaaatggatcctcacctgctggctgcaaagtcaccattttccgcttacagtctatactggccaaatacttggacaggaaatccatcccatgtatgatgtcaaactcagttaattctagttctataag

SEQ ID NO: 136138 - DNA, 558 bp, Cannabis sativa
tgaagaaaagaggttttggggtttctttgttaattaaaaagacttgttaagtctaattaataaataaaataaatggcaattttatttgataattaattgtaattgttaaataaatagttttgacatttataggattcaaatttgaaaatatggttttattgaaacaaggataaatggttgaaataaagtggcaaaattataattgttgacctctactttgcccaaaataggtggacagtgtaacactgacacgtggagctgagagcctcaactcttaaagaaatcgactaagtcttcggcaacagcagtgtcgatgagaagataactcccggagaagatgtgagaaggatccacgtactcccggaggccagggccatgctaaggcacctccgggaggtactagactctatttgagcactcacctcgcatttaatgccgcatgggagaaaacgtattgtaattgccataagtaatatgtctgacagcgtaacccctcttttgcagctattaccctgtgattaataaagctagtgacggctactttatgagggatcacat

SEQ ID NO: 136139 - DNA, 1011 bp, Cannabis sativa
  modified_base (288)..(290): a, c, t, g, unknown or other
gtcctgtaaatctagggcataacttggctcttttcctgaattgattgatccccttcataggagacacccgtaggaacacatgatcccctacttgaaactctacatttctacgtttcagatctgcataactcttttgcctactctgagaggtaagcattctagttttaatcttttcaatagcttcattagttcgttgaacagatttcagacctaagtacttcctttcccccgtctcatccctatgaatgggagatctacattttctgccatacaacagttcatagggannnatccctatcgtactctgataaccgttattgtacgagaactctatcaacggtaggtacttactccagtagccctcaaaatccacaagacaggctcgtaacatatcttccagtatttgaatcgtcctttgggattgtccatccgtctgaggatgaaaagttgtactgaactttagtttggtacccatagcctgttgcaaactctaccaaaattttgaagtaaacttcggatctctatctaaaactttggagtttggcacacatgcagccttactatctctttaacataaaaatctgcatactgatccagtgaaaaagttgtcttaacaagtagaaaatgagtagatttcgtgaattgatctaccacaacccaaattgaatcaaataaactcacggttctaggtaatcaaaccacaaagtccattgtgatatcttcccacttccactcaattagggttaaaggctacaacaaccctaccagattctgatgttcaaccttgatctactgacaagttaggcatctctatacaaattctaccacattcttcttcattccgctccaccagaagtaagctttcaaatcctgatacatcttcgtggtacaaggatgcacgatatatggaatgatatgagcctcttcgagaatttcatttctaagttccacactattaggaacacaaacctttgtcttgaataacagcatcccactatctgacaccgtaaa

SEQ ID NO: 136140 - DNA, 579 bp, Cannabis sativa
cctcccctctctcttgctcttagggatagagctcaaaaacttgcccggctgccgggagaagaccagaatattatccagttgacctctgaggatagttttgtgaggtacgggctctatctcaaggactttactcctaactccatggtgggggaagaagaggaaatctggtgctggacggactgaacgagctcatccggagaattagctgattcaactgaagcgtgaagctaagttgaaaggaggtgcaagggccaacaagtattgtcaggagcccttgaatcctgaagatgaagctgaggaagatcaggtgaccccattgaagaggaagaagaaattccaggccctgcccaggccagttgaacatgcgattcgcataagggagcccatttcacctgttcggccatcccctcctgtgttcagaaaagggaaagctgttatgtctgaaataagattgctgtcaggtgatgatggactttagatcttgttcgggcagtcaccttgcatattactttgtcttgtttttgagcttcttgattttcatgccgtatgtttctgatgtctgttttctaaccacgttgt

SEQ ID NO: 136141 - DNA, 927 bp, Cannabis sativa
  modified_base (339)..(357): a, c, t, g, unknown or other
ctcgcatgcacgttgttttttgtgtaggaaagatcactaggggtacgatacatcttcaaacctccttcccagacgcttgaagtctatcctactcctcctgatgctttccctgtggtcttttcaagcgaagtctaatcttgaatttttatacaacttcagcctttcttctcgaaagtcgaagcttgtttcataaaaattcagcatgactctcgcatggaggttgttttttgtgcaagaaagatcactaggggtacgatacgtctttaaccctccttcctggacttggaatgactgcttgaagtctatcctactcttcgtgatgctttccctttgatcttnnnnnnnnnnnnnnnnnnntgaatttttatacaacttcagccttccttctcgaaagccaaagcttgttacatgcataaaaatttacacatgactctactctcgcatgcacgttttttttttcgtgcaagaaagatcactgggatacgatacgtcttcaaccccccttcctgcacttggaaggactgcttgaagtctatcctactcctcgtgttgtttcccctttgatcttctcaagcaaagtctaagcttgaatttttatacaacttcagccctccttcctggatgccaaagcttgttacataaaaattcaacatggctctcgcaggcacattgttttttgtgcaggaaagataattaggggtacgatacgtcttctaccctccttcccagacttggaaggactgctggaattttatcctactcctcatgatgatttccctttggtcttttcaagcaaagtctaagcttgaatttttatacaacttcatcctttctttcaagaaaccgaaggttattacataaaaattcaacatgactcttgcatgcacgttgttttttgtgcaggaaagatcactaggggtacaatac

SEQ ID NO: 136142 - DNA, 2029 bp, Cannabis sativa
tattataaattattactatcatatcatgtatagtttaatatactcacacttcaatagcttatatttaaaatttaataactatttagtatccatcaataatttttttttaaaaaaattccttttagtatcttactaaaattaatcaatttatacaatatttatttataaatgatttattataaatattgtataaagtataaattgattatgcaatatttataaagacccaattatacgcgtccgggtccgggtctaggttcaagtcctgagctcgtttggtacggcgtataaggatcgaattgtattaaataataaataacattacgtttagataaaacaatatattgtattaattattacgaccaaaatttttgatacaatgtatgttgtgttatttaatacataaaaaatggtccgtattagcttgtattataatatttacaaagaattcggggtccacaccaaactctgacccggactcggacaccaacccggacccggacctggaccaggatccggcacccggacccggacctggactagaatccgagacccggaccccgaacctggacctagaccctagacctaaactctggacttggacccagacccgggacctggacccagacctagacctaggactcggacccgggctcgaaccaaggacccggactcgaactagggacccggaccaagacccgcacctagacccgaaccaagtttaaaacccgaacctgaactcgggacccggacctgagatccgcacccgggacccaaacttgggacccagacccaaacttagaccagagacccaagacccaaacctaggacctggacccgaactcgagacctagacccagacccaaactcgggacccaaacctggacctagacccggacccggacccggacttgaaactcaaacctggacccctaactcgaacccgaacccagacgcgtgacccggacccgagacccaggactcaaaccaaaacccggacccgaactcgcactactacaaaattgggttttagaggcaatttttaagagcttttagcgtcaattttggcaaaattcgctaccgacgatgttctaggtgatgttgtatggttcataacaaccgacgctatagggttcctatggcgtcagttttttcataacaaccgacgccatagggtccctatggcgtctgttttttcataacaaccgatgccatatggtcttggtatttttcagctttacaattttattttttagcataatttatatatatatattatttcattattaatataattaaattaagtataaattatatataataagcataaaaaaaattaaattaaaaagttaaataaatacacatttacattaatctaagtgtttgtatattagttatctttttattaatattttatattgtacattatatgtttgtattttgtagtatattaatatcatttttataattgtttaagttatattttgtataataattagtatattaaataataactaatgtgtaacacttgaatttttaggtaatttaatatttatattcatttaaatttttcaagactaataaaataaaataataatttaaagaccagaataaatagaaaaaaattagagaaatggctaaactttgcatgaattttttaaaaaactttgaatattaataacttttgatctgattgtccgtttgatgcgatttttttttttttttgaacttgggtatttttttgcgttctacacatcccaaacagcctgcagcagtttggccaaccattttgtccaaaaaatgctcttttgtatactgtaatcatgttatgcacccctttcacccaattttttgtgttttattttgctattttacttaaaataaactaataaaattctaatgttaagtattataatcaatgtttgtgatatatttgttaattctactacaatgaaatgtgcaatactaatttctttttatatttcttctaatatttaaataaaattatagtagctaatttatataaaga

SEQ ID NO: 136143 - DNA, 510 bp, Cannabis sativa
tttatcaatcttatttttttcactctctcggcctatctccttcttcttctattaatttctttattttttatcttttgagattgtggttagcaatttttgcaaatctaccaagaatatacatgcatctactcagagaaagaatgatcaacaaaaggaaagagttggtttggcattctttttaatatcactcctttttattcttttacattatctttatgctatgttatttcatcttatatgttttttttttatttttatgtagcaacaagtacgcaataataatataaataattagtatatgtaccaaatctttacaccattgaaaattactaattattttttgtatattagtggaagttttattcacagataaattgttgatggtataaatgtgcaattttattgagatcaaaataaaattattctccatatctaatatgtatgaggatatgtaggttggagaggtcaattctcatagtttttttcaaagaaaaaaatatcatttaaatt

SEQ ID NO: 136144 - DNA, 760 bp, Cannabis sativa
  modified_base (27)..(33): a, c, t, g, unknown or other
aaaatagattacattgaaatggagttnnnnnnngggcataaaacccaacaaaagctaacactagagttgttatcaagtgttgcttcaactcctaaaagcttggttcacatttttctgaccatataaatcgctgattcttcttagttaactcgtttagtggcatatagatcttagagaatccttcgacgaaacatcaataatacccagctaaactgagaaaactttgaacttctattacagatttttgcctcagcttgttcttcactgattcaatcttactcggatcaaaaataatttcattctacccgataatatgtcccagaaaagatacctctgacaaccagaaatcacagtttttagaactttgcataaaacttatgatccctgagtcgctgtaataccattcaaagatgatgctcatgctcctcttctgactgagagtaaacaaggatgtcatcgataaacactatgacgcagttatcaaggaaaatccttgaatactctattcatgagatccataaaggcctcaggagcattagtaaatccgaatgacattactagaaactcacattgtccatatctggtttgaaacacagtcttcggtatatcttcttctcgaattctgagttgatgataattggatcgtaggtcaatatttgaaaacacagtcttcccctgaagctgatcaaataaatcgtcaattcagggcaacagatacttgttcttaattgtcaatttatttagttcctgataatcaata

SEQ ID NO: 136145 - DNA, 558 bp, Cannabis sativa
cataaatttgaacaaagaaacaataaaataataaaaaatacattaaaataaactccaaaaatgcataaaatagacctaacgaattctccaaaacttaacatttactcgccctcgagtaaagaccaaactaaactaatgaaaaagaaaaacaacagcaaacacacaagtaagccaccattgttatctatactacattgtcttttttttgaaatctcaattataatatttaatcaggatttaactcaattgccttaaatttcaattagagaaataaataatatgacttacaaatgaccgcaatatttagactcactgtatatgctcaactcaatttaaacaaatccacaaactaatttttttaataggaaaatttacaaaaatactgacatttggggtaactttacaaaaatactgtcacacagagaagttttcaaaaatactgtggaatcagaatttttcttactgtcaccagtagaacacaaaatagtacaactcaaaataacagtagaacaactaaaaaacaccagtagaacaccagtaaaaacttaacacagtata

SEQ ID NO: 136146 - DNA, 789 bp, Cannabis sativa
ttttttaaaaaaaaaaaacattcataatgtccgcgcgattaccctcaaaaaattttaaaattaaaaaggcttatttcacaaaaacataaaaataataaaaaaaaaattataaaaatacgattttatggaattttaaacatttttataatttttttgattttatttacagaaaatatgatgtttttatgttgtaattttgttaatttgttatgttatatgtaagttattttgatgttatttttatctagtttttcttttgattttatgttgttttcatgttttttatttgagaaaccgtacaaatgtaaaaaaatattctaacgtaaaaatgtaaatattttacaaaaagaaatagtatcttatataattattctaaattaaaaagtgtctaagagggttgaatcttaaatataagagtgaatgtgtggcctttcaaaactaaagtggtttttctttttaattgtggcgtaatcatattttataatcaaaagtcctagtttgaagtcttaacctctttctttttccccatctctccctcaccactaagataggtggtgtttagttacaaaataataattacttttttttattactaatctatatatataaaaaaaattactatttacaaattaaacaaataaataatatatctttacatatatcatattagaaagctccaattagtaagtagtatgtgttgcccctgaattcgcccaaaatacgtggactagtcgaattaggacacgtggatcagataacttgtaaacatttgataagtctttgtgcgcc

SEQ ID NO: 136147 - DNA, 877 bp, Cannabis sativa
atactataatggaatccaaactttcctaatgaatcaaatattagtttcctcatagtgttaattctgatagtgctaacagatggatttaaatctataataagttatagattaactgttcacattgaattaatggtatttaaagaatgaaaagataattagaaaggtaagacattaatttgaccaactctaattatgaactaataattggagggcaaactacttataatgattatatcaatagactactagtaagaattctataaatataattttatattatcaaagagtgcaatttcatattatagtggattaataatggaattagtaactagattattctattgatgagattgataataatcaagtatttattggagcttcaaaatatgggtccatagtccccaagtcacctccatacaacactgtatagggggtgttttatttgatgagtaaatttgagtgataattaatttctgtgagaaataattcttaaaggcaaaatagtaatttatgaaacttgttattttgaatagttatgataattatgaattgaataattaaatagtatttaactatttagttttatttgataaaactatattaactagttaaatataatattcttcttaaataatattaagagagaaatatattcttttagtaaaaaaaaatactcagcttaatccttatgaaataagaggttaatgagaattaattaattgttatttattaagaaaaaataataaatcttatttattgtaaaattgagaaaatattttttggaccttaaaatatggcctagcccacacgtgagggtgagatataagaggaaattgcatcctatacccattttgggttaactactttcatttttacc

SEQ ID NO: 136148 - DNA, 642 bp, Cannabis sativa
  modified_base (44)..(47): a, c, t, g, unknown or other
  modified_base (212)..(225): a, c, t, g, unknown or other
  modified_base (596)..(598): a, c, t, g, unknown or other
aaatttctcaaaaactaagaattttagttatataggcacacttnnnntagaatagatatatatatattaaaagcctactaatatatatatataattatatatcatcttcttaagtgtatgcctgaatatttgttggggattatttcacaaaatatataaaaataataaaaaaaaattataaaaatacaattgtatagaattttaaatatttnnnnnnnnnnnnnnattttatttataaaaaatacagtttttttatgttgtactcttgttaatttattgttgttgttttgatattattttcttgttacatttataatttttttattattttttgtgttatttctataaaaaaaaactgtaaaattatataaaaataaataaacagtctttgtaatttttcttttaaaaataatattttatgtaattacaataaaattatcatatatatatatttatttgctacataatcccaccttattgggttgaaatgctaaacataaaatagtcatctattatcttattgaaatgggcttatctcatcccattacaatacaatgaatccattattgcatttttttttagaggaaattacactnnntaccctttttatattgtcttcttttatttttaccctctttttta

SEQ ID NO: 136149 - DNA, 680 bp, Cannabis sativa
  modified_base (49)..(73): a, c, t, g, unknown or other
  modified_base (486)..(486): a, c, t, g, unknown or other
  modified_base (651)..(654): a, c, t, g, unknown or other
tatttattgatagtaaatcagatttgattgaaatgggttttatttaggnnnnnnnnnnnnnnnnnnnnnnnnnttgcactaacataaaataagtagtgcatttcaatcaatcaattgtcatgatatccggatcaactgtattatatttgactcaacccaaattactggatctgtaagtttgtggcaagctactgcttcctccaccattacttcctttgtgttcataaaatattatgcaacatcatgcattactcatctacgattactgaattctttagcgcttataaagtgcatctgaataaacaaaagagatatctctcattatatccaaatactagaatagagataacgcagtgtagaattttcttcagttgaataactttccagtaatttcgaaattacaaatttatgtatcttcactgatggagcttaaattattatagatggttttgttcttacatcctactagaataattcctccacccnagagtaaccaccatctcaaatcctatatgagttggtgtagatataaggacttctaatatatacatcctatcatctaacatataggttactttcagaaatctttcttgatggtctcattatgtaccttgtttgattacatttcagatggctcccactcaacagtannnntctggttaaattcatacatagaagta

SEQ ID NO: 136150 - DNA, 509 bp, Cannabis sativa
tttcaatggttcaccatcatttagagacatcggttttcctgttgtagctggtgtggggcatggcttcaagttgataaactttgttctttttaataggtcttcaatgtatttagtttgtgtcaagtaaagacctgtttcgtccctgtaaacttcaattccaagaaaataattaagtgagccgagatctttcaatgtaaattttctgtttaattcagcaataaaatcattcactttcttgctattgttgccggttactattatatcatccacataaatcaatgctatgataatagtggaatcatgtataaagaagaagagtgaagtatcagctcttgaatttttgaagttccagcttattaatgttgcctttaacttgtcaaaccaagctctaggggcctgctttaggccgtatagagacttgttcaacttgcagacaaaatgttctttccctttctcttcgaatccttcaggttgtgccatgaacacatcctcttcaagtgttccattta

SEQ ID NO: 136151 - DNA, 603 bp, Cannabis sativa
  modified_base (216)..(226): a, c, t, g, unknown or other
  modified_base (542)..(558): a, c, t, g, unknown or other
taagcctaattaataaatatattaaatcgtaattttatttgataattaattttaattattaaataaataatttttacatttaagtggttgatcaattagaaaatatgacatttgtgaaagaaaaggataaatagttgaaaaaaatggcaaaattgtaaatggtaggcccacatcctaatggccggccacttaaggtctttttaccatttatttatnnnnnnnnnnntgccaaataattcaaacataaacctagaaagattcctataaatagatagtgatagactcaaaactgacagttgatgcaacttaagccttcacagtgaaatttgagccttctctctctgtctctgtctctctctctctgtctctctctctctctctttctcttcaaatttttgcaccttatggtgatagaatacatgcccacacatagcaagtaagtacttaatcatagtatgtaagactatgaagaacccaacacttgaaggagaatcagacccgaatcttaataatactctgtgacagaaaggaacaagagttannnnnnnnnnnnnnnnnagtcatttaatttcgctgcaaccaatgtaaggttgcttgaacttt

SEQ ID NO: 136152 - DNA, 518 bp, Cannabis sativa
ttaattaggatgcacttttagagggcgaaaattgagagtagaagtgacaaaaatcgatgttgtttgacatattttatggttttaatataatttaatttctcccccaaatttttatttcattcgttatcaatttattttaattgcttgatcaccaataaatgttctattattttaatgcgaaatctgaaaagtgagtatcaattatgttatattagaatagagacaaattttgtcataggacgaaagtacctatgtggttggatagcatttagagtttttaaacttaacgcctcttatatgttaaatttatcacgacagtataaaatttccatataggttgaaatttatatgtcctaaccggaatataagttcctatgactggaaggaagctttccattttttcaatttccagctttacatggaaaagaagggtgtctttgggaaggacaaattacaagacttagatttctgtgatcagtgtgtgttgggaaaatcaaccaaagtcaagtttggtacag

SEQ ID NO: 136153 - DNA, 807 bp, Cannabis sativa
  modified_base (198)..(207): a, c, t, g, unknown or other
aatgatacgaatattgttttgattccgaagaagaaacaacctacttcgatgggtgaccttcggcctatatccttgtgcaacgtcttgtataagatattgtctaaggtgcttgcgagtcgtttaaaagaagtgttgcctcagatcatatcttcaaaccaatctgctttcatcccgggtcgccttattactgataatatnnnnnnnnnntttgaggttatgcactatctcaaaagaaagcgtaaaggcaaagaaggatatatggcgctcaaactagatcttagtaaagcttatgatcgtgtggagtggggctttcttcgagctatgatgagtaagatgggatttgacttgcgtttcattgatcttgttattgctatggttagctctgtgaggtataaaataattcatggcggacatgagctcggtctaattgttcctgagaggggtattagacaaggtgatcctatatcaccttatttatttcttatttgtgctgaggattctcacctttgatatggaagtttgagcgggatggtaggcttaaaagttgcaaggttgctaatggtgctccggttatatctcatatctttttgcggatgatagttatgtctattgtcgtgcaaatgatagagaggcttcgaatatattacatctgtttcagctatttgagatcgcttctggtcaacaagttaatttcagtgagttatctgtcttcttcagtactaatgtgcctaatgctactcgggaccgattgtgtgggatccttagaatgagacttgcagatgaacatagtacttatcttggcctccc

SEQ ID NO: 136154 - DNA, 604 bp, Cannabis sativa
actaacacccttaaaattacatttccgttagtgttagtagtgtaaacaattgataacatacattcattaacatatatatactttattctatcttaccttatttgagattcaagcgtgttgatcgacttgaatggaaaatcctaagtcacattacacaattgggtaaattactcgaataactattccgaaaccctagctcaaaaccaagggtaaatttaatgacacattcaatgtactattaccctaaatgccaatggaaaccaaactatgctcggaaaaataacacagattcgaaaaagttgtaattttggggtcctggcatgtaaaccggttaaccggttttacaaaccctgtaaaaccggtcgaccagtttgcaccagcaaaccccaaaaatcacacaactcgtccaaatcttccccaaatgcagtttgagctccatgaacttaaacttgctcaacctcacaaatcaccaccaaaagtagtacaagcaaacttagaacatcatttaagacctacaaaagctaaccctaaacgaaacttaccaacacataattaaattcatcaaaatcaaccctaaacctaacaaaaccttccaataacatca

SEQ ID NO: 136155 - DNA, 567 bp, Cannabis sativa
gttgtcttgtacttgaaacttaagcttctcaaattttttgttttctggtttattttttgtgttttagaaatattttgtgatatctattacacaatttatgagcaattacacaagtgtaggtaatcgtttgtagttttaaactcacacaggtgaggtcgatccacagagaattgttatcaagtaccacaaaattagatttgtgtttctatttggaaaattaataaaaagattgaataattaagtgactagaaatttaaaaaaaaaaaaatacaaagaaaagtgtaagtaattatggatgagtatttaggaatatgaattctgttagttcaatttctcaattgttaatgttaattatttattctccctctttacttgtgatgacaaacagtcaaaataaccctaacgcttctcaaatcattaaagtcctaagctatatatcatctgcttgcatctcagaagtaaattgacatatagcttgcattaaattcagaatcaaaaattacataagctatgtaaatactcttgttttatatcaaaacttacgtttattcatttagagcattctca

SEQ ID NO: 136156 - DNA, 1039 bp, Cannabis sativa
acataaatttaatacatacttatattatataatatgttacttataataaataaggtgaggaaacgaatccattcattgctatatagccccactaaaaaaagtataacacttatgaaaattaaatatatttattcgaaaaaaaaggacatattttttaatttaataattataaatttaacagaattaattacaatataggcacacatattttttaaaataaataagtcacctcgaagtaaaaattctaggttcattatttatcatacctacatgtggcccctatcatgttaaatttgtgtgtgaatacataaattattagaggtgttcatcaaaccgctcacgccgtacaaactgcttgtaccgcaccacacaacatataacggtttgaaattctttgtggtacggttgtgatttgcatttttatcatatcgcatggttcagtacgatttgcagttttgaatttaataatttcaatttaaaccgcaccgcactatatattataaattaagttactaatttttacaatataatttttatttttttttcatatatgaacaaaatatatgttactgtggtataattacattattttttagaaataatttaatataataatttgatgattagtgtacgcgttatgattttaaaattttaatataattttttttttcatattgttaaaactttattagtttattatttaaattctcattataatgtttggtaatgataatagtgtaaactgctcatactgtacactgtatttttgtagtgtagtttttgtggtttaattttaagatctcgcacgacggttgcggtttgagaaattacataaaccgtatatgcaatttggtttgaaaaaaactatcacccgtatcgcgaacactctacatattattatttcaaaaaataattcttttttaagtattagttttaccaatactataggagtgtatataaatagtatggggaaattctacaatgtgccctcttaaaatagatacattgatgcacccttatctgttttagtacccgaaat

SEQ ID NO: 136157 - DNA, 560 bp, Cannabis sativa
tccatctagaccctaatcaagtgtttaactacacatgttcatggaagcaaaatcacatatattaactttaagaaagagaagaagataaagaataaaatgatgctgaaaatcctttgtagaatgcctccattattgactttagtctctgagattcgtacttctttttccctctaaattgcttgactaaaatcaactctagctcaccctttatctaggcttccaaggactaaaaagatataaaaacgcacatgttaaatgcctactcgaattgagaaaccaccaaaacccacgtgagagaaaaagatgatttttttgttgtttagggaggccggccgcggcccatgttggagttttaccagatggcttcgtttcgacggtgatttttctactgcgtcgactgatagtattttggccataactcccttgatattgctcagaattggacgtatcaagatgtttcgaaaagataaaagaggaatctagaacttttatgttttgactatttttaaaatctaatcaaaagatagtcgaattctgacttgaagttttagctttatttt

SEQ ID NO: 136158 - DNA, 860 bp, Cannabis sativa
  modified_base (577)..(596): a, c, t, g, unknown or other
gtgatattttgtaacacaagttttatttcaacatcaatgcagaaataataaatgtacacgctacgtgatataatgtactcaactaccctcgcacaaacatatagaaaatatgaaggaatgaaaagataaaaaatctcactccgacaacatggactcactatttgcagtacgtttgtactattaactacctcaaacagtaactttgttgtaccttttcgtaccttaactaccacaaacagtaaattcattgtacctttttattttttaattaaaaaaattaaattaacaaccggtaaacaaacctacaacaaccggtaaataaataaaaaaaattaaaacatattttaagataccactggacccaccggccatacaatggatagcaatccgtttaaaatctaggcacaaaatcggtcgccttctctatcatatcatagataaataatatgagcatataatatatataaataaatttaagaataactatatgagaataaaaatatatacacatacataaataatatagatatataaatagataaaaagaaaaaaaaaagattcttgaaattgtttcagnnnnnnnnnnnnnnnnnnnnatatatatttagtgtatcatgaccttgaaataattcaagaactttaacaaaatacttaccttggagcttggacatagactcgtgctgataacatgttataaaataatataaaatataaaagaagaaaagaagaagaagataaaaagagaaagagaaactgaatacgaattttctagttgtttattttagggatttttatactaagtgactttttttttttaccaatatttaacatttatacttgctttctctctctctctctct

SEQ ID NO: 136159 - DNA, 990 bp, Cannabis sativa
tgaagtgagttaagcatgttttagcgtgtttattatcttgagatgcatgttgatgatagttgggttgttcttgttgttgtgagcatgctttgtgcttggatcttttgagtttatttttgtttaggtttataatgaatttaaaagattttattactgtttttattctgttatttagctctgaaataagttgcttgaagatgttcttgatgttcttgtgatttaatggtgcatgttgatgattataaggtgaaatattggatgttgttgattaatgttggaattgatgttattagctctttgttgtgatgatttttatctgtaaaaggttaattttgggtatggtatgattgaggttcaaatttatggaaaaattggcatgtttaggccttaaaaatggtgtttttgggtgttctaaaccaagtcgccgcgacgggatttttggtcgtcgcgactgggtttggcagtgagaaagtctatttttcccgatttcgttttggccataacttttgactcgggactctgtttgggacgttctttatattgtttgaaagctcgttccgatcttaatttgattatatgtgttttgaatgccatgtttatactatgtgaaagtgaaattacggattaaccctatgtgtgaaatcccgggttgtgtgactaggattaccgacacttgatcaagagcacccaggagtttggaatctctgttattgcgggacaacaggtaagacagtagttttcatgtagagtatgcgcggtggcgcttatgttgaatatgatatatgtaagtaattgtaaccaggattaggattattactttaatatgagcagttaatagccaagggttataaccctagtgatataagttgagtaaatgctatgccatgctaagtagattattatatatattgagatttaagggttatgcgttcaaggcataatcgggttggactcggtaaccataaacaagatgaaccattctaaggcctt

SEQ ID NO: 136160 - DNA, 829 bp, Cannabis sativa
atcataggcactacggacagagaaggaaccagatctttcacccctccaggaccaacagtcttcaattggtgtagcactcaacgggattccaaggatcaagtgagcatctcgagaattaaacatatcttgaaccagggggatatcccaagaggtctcatgaatatccataagagagttgaccatgtggttagtgaggccgagagcattggatgtcacaaaaggattgacgggatcggggagccaagggtgcttcaagatacttgttgacattccattaccaatggttcgttgacaacccaatttaaccaagctttgtgcgctccagatgctacgccaaacaaaacttggattgttgccaagctctgcagaaagaaaatcagagttgggataatacttggcttggaacacacgactggcaagggatgtgggggagacaagaaaccgccacccttgtttggccagcatcgcaagattaaaatcatgtaagtggcggaagcccataccaccagaatgtttgggaattgccatacgatcccaagacatccatatgattccttgacctttagcacttgaagttttccaccaaaagttagccataagcttctcaatctcttgacaagtttccaatgggagaaggaagacactcatagcataagttggaagagattggataacagatttaaggagaacttctttgcctgcacgagataggaacttgccattccaactattgagccgatttataatcttgtttttgaggaagccaagtatcacagtcttctttctacctataatgttaggtagccccaagtaaagagagccatcagta

SEQ ID NO: 136161 - DNA, 1257 bp, Cannabis sativa
  modified_base (1230)..(1230): a, c, t, g, unknown or other
gggtaatttcagttttaccccatgaaatttgttataaattttaattgggcattagtctttttaccttcctataaatagaagcttagtttttagaattcaagataatttcagacagagaaatcttgagaaaacactttaagcgctcaatgttagattaccactttttcttagttaattttcttatgggtttctaagttttcttaatattaaagtggacgatgaaacttagtgtatttaattaaataattatttttatgttgattctcagtataaatgcttatgatttttcgcttcttaaaataatttctttcatctttaatatcacatattttttatagttagaaattatcaatgtttggttctatattttattaaaaataatattatttgattttatgtatttactttaaattatttcacatttaatgcttagaagttataattttaaagcgaatgaaaatctatttttgttagaaaataattaatttgattactaattaaattatgagaatcgatataattataaatatttctataataatttctccgaataccattaaaaatatatgttacttgtcaattgtcatatttactattaaatactttattttattgtgttaccaaaaacatcattattttttaaattaggttagaattttaataatttaaattaaaaaagaattttcttcgatctcacgcaattcttatggatttggctttgttctacttttgggtccaacagtcaacaaaataattgaatttttaaaatttacttgagtgctaattacaatctcctattacaatttcttagtcaacctccacacctgaaaatatatgtcataatatttttattcataatggtactacaatatcatctctgtaaatttttgaatagtttacagtgccaaaaacatgttttaagttttttgaacacggttggtaaattagaatattaggaactttgtagtcgataatgtaaactattcaaaaaaatttgaaaactataacaaacattgccataaaaaaattgaaaaaaaaatattctggcatgtgttttcgggtgcgaaagttgacgatagtactcttgatctatgtaaagtcctttttttggcaagttagttgacaaaataatttttccatttatggtaagattgttgtgcattcatatttgatttcttgccctgaaaattcggattgtagttgctcttttccttgtttggaaagttgcantttcagctgaactttcctttgttgaaa

SEQ ID NO: 136162 - DNA, 789 bp, Cannabis sativa
  modified_base (594)..(597): a, c, t, g, unknown or other
gtacggatgagattatccaatgggccccacacgtgtaagcatacgtaatgattgcgtataagtcccttaactttctattatttaacagtgaggatattatagcaaagtgctttgactcttgttgacgtaagaaggtttcgaagtgtactgagctgacgttttgtaaaatgagaaatgctaattacaatctcatattataatttcttaggtaattctcaagtttaaaattacatgctaaaatatttttttttaattttttttatagtgacatttgttatagttacaatattatctctgtaaattttttaaaaattccgaataatttacacagtgacgaaactctatatatgtatgaagtggccacgacccccctgactttttagaaaaaaaaatatacataatatataaattaaattagaataattaaattttacttattagaagaatgtgaaaattctcttactactaagcctaataaaaaattgtgaagttaaaattaaaaatgaaacgcaaatccaatagcccatttaaattagttatttatttaattctaaaaagtgacaaaaaaaaaataattaatataatttatttttnnnnagtacttttgtatgatatatatttataggccgccgattttgtacccagaaatgcaaaacacagaatgtattccgttgtacagcatgtgggtcccaggcaggggcggagccaggacttcaatgcaaggggggccaaattttaaaatttagtataaaataaaatttttatcatatatttattttcaatattaaa

SEQ ID NO: 136163 - DNA, 628 bp, Cannabis sativa
aagaagaagatgaagagagaaagagaaactgaatgacaatttatcagttatttattccaatggggtgaacctctatttatacaaaaatatgactaatagaatgggaaaataaatcaatgcaataaaagaaaatataaccaagcattaatggtgataattaattttgtgatttggacatccataaataatatttcataacactcacccttggatgtccataacaactgtctcattaaaaatcttgatgaaaaatttggtcaaaggaaaaagagtacagtataaactaactttccttcatttaggcattctagagatcttttaatcgacgaactctaatcttgtgaaccatcttctcaaatattgatgttggtaatgactttgtgaataagcctgcaaggttgacacttgattgaatttgttgaacaccaatatgcattctcttgaaatgtataaagaagaatttggtaaaatatattttaattctatctccttcaatgtaccctccttttagttgagcggtgcaagtaatatttatcttcatagagtactacttgtgttgatacttctttattgagtgcaatccatatatttcctgaatatgttatgtcaatgatctcactcccacaca

SEQ ID NO: 136164 - DNA, 811 bp, Cannabis sativa
taggacacaaaacccaacacaaagtccaatacacacgcccgtagcatatcctcaagtattttaatagtcctctcagactgaccatcagtctgaggatgaaaggttgtactgaataatttggtaggtacccattgctcgctgcagacagactttcctagaacttggatgtaaatcttggatctcgatcagagatgattgactttggagcaccatgaagtcgaactatgtctttaacatacaaatcagcatactattccaccgtgtatgtagtttgcactggtaaaaagtgtgccaactttgtatatctatccacaattacccaaatagaatcatagaaccctactgttcttggtaatccaaccacgaagtccatgtttatattttcccatttccactcagaaatcttcagaggttgaagtaagcccgcttgtctctgatgctctgtcttgacttactgagaagttaggcattttgacacacacttcactatatcactcttcatacctagccaccaacatagggcttttacatcttgatacatcttagttgttcccaaatgtaaggaatatggtatagtatgagacttgtctagaatctcctgtctgatcccttcatcagctggtacacaaactctgcccttaaaccgtaataatccatctattgaaactgaaaaagttccttgctgacccggcttcaaacctttctttgtacccttgaagttcagatcattctactgggctatcttgattctttttaacaaatctgactacaacgtgatattggctagttttccaactacaaactcaatctt

SEQ ID NO: 136165 - DNA, 982 bp, Cannabis sativa
aatacttaacattagaattttatttatttattttaagtacaatagcaaaataaaacacaaaaaattaggtaaaaggggtgcataacatgattttagtaaaagagcgtttttagacaaaatggttggccaaaccgccgtaggctgttaaggatgcgtaaaaagcgaaaaaatacccaagttaaaaaaaatcgccccaaacggacaatcggatcaaagttatcaatgtttaaagttttcaaaaaaatttatgtaaagtttaaccctttctctaattttttccatttattttggtccttaaattattactttattttatttgtcttgaaatattaaattacataaaaattaaaatattacacattatttgttatttaatatactaattattatacaaaacataacttaaaaaattataaaaatgatactaatatactacaaaatacaaacacataatgtaaaatataaaatattaataaaaagatagctaatatacaaacacttagattaatgtaaatgtgtatttatataacttttttaattaaatttttatttatgcttattatatataatttatacttaatttaattatattaataataatataatatatacgaaaaaaataaaattagatttttaataaaaataaaaaaaatgttaaaacacaaaattttatagctgaaaaaaaaattataggaaacccctacggagacagttattatgaaataaccgcatccctacggagtcagttatttcataataactgaagccgtagggaccctacggaggcagtttttccataataaccgtcgacgtagggtccctacagcattggttatttttaacccttttagcgtcacctagaacagcgttggtagcaaattttgacaaaaccgacgctgaatggccttaaaaactgcctctaaagcttaattttgtagtagtgaaaagaacaaatatgttaataaatgtataatttaaataa

SEQ ID NO: 136166 - DNA, 1341 bp, Cannabis sativa
  modified_base (159)..(161): a, c, t, g, unknown or other
cttctcctccttctccttcttctcattctccttcttctcctccatcttctccttctcctgcttcttcttcttcttcttctccttcttctccttctcctccttctccttcttctgctgcttcttcttctccttcttcttctccttctccttctccttctnnntctccttctccttctccttctcctccttcttcttcttcttcttcttcttcttctatggaacttcttgctcaagagtaagatccttagctacttgatcattttcttgtacctcttctaatggataaagtccatactcaaggagatttttagtggtaaacaggagagagatgttccaagcaaatgctgaaagttgaagaatattgtctgctctcttgaacactaaccccaaagtgaaagggggacaaaaataagattcagccaactgaaatgaaagatggttaacagtcatctccttcaaaatatagtagtcttggaggaagctaccaatctttgagatgtctttttgtgtcataccgcttagccattgatactcattttgagaaaaataaaagtagcctgacttgttctattttgggcttgacttcaaataaaagagtcaattggtgtcgtgggcataaggctagccccatccttgttgagtatacaacacaaataatgtggccaagtacttgattcccttcgaggtgaattaggtcgggaaaatcttataatagttcgcgatcttcctaaagtatggttgcaaagtgagtaggtagaaaatctttgactctgccaagaagacctttgtcatggaggttctttaacctcttgtatgtaaggttggacagaggggagacccactgaggaacccttctctcgctagtcctcataggacgggcctcctcgtactccttcttaacatagtcttgacccaaaaccaagacatctccaaaatcggaaacaggctctccgacctcattatatcctccaaatgaaagaacccaaggagcttcttccttttcttctgctacctcatctccatcgctgaaaggaggagtggatgcattgacctcgctctggtcctcaacctcttggatatcaatgtccccagcatttgtttcagcatcctccctagaaggttcagatcattccacaatgaccatcgcaaatagtcgagcaaagtgtgggtccttatctgaagctttcctaaaggtttccttggtttttgctattactttattcctgggcggcaagtttggtttggaagtatgcctcgcgatagtgatataaatttatgttagtgcatattgctttatgaaaggctctagacggccttttggcaatgtgtcagggacgtcag

SEQ ID NO: 136167 - DNA, 1689 bp, Cannabis sativa
gtgacccgaaattgaagccgagactaaacccaaaaccctaaatccctaaacactaaacccaaaaccctaaatcctaaaccctaacctggacaagggtttagacccatacccatacggagattggatcccaggccccaaacccagacccagatacagacccgaacctagacctagactcaggacctaaacccagattagaacctggtctgggacctagactttgattaggacccagatcaggatctagacccgatattgaaaacagacttggactcatcagaccgggacccggacccacactaaaacctgaacccatactaggacctcgactcggacccaaactcgggatccaaacccaaacttaaacttggacatagactgtgacctaggatccggacctacatgggggacccaggccccaaactcaaacctggaaccaaacttggactaaggatgtggacctagatgggggacttagacccgaaactaggccccaaaaccgggaccgagacccaaaactcgaccccatactcgagacacgggacacaaccttgtacccgaagcccaagacctgactacagggacacaaccccaagacctgggacataaactggaataagatcgagatccgaatctagacttgagacttcgacctaacccgtactaagtgtttgaatccaagatctggacccggatccgtatccagacccggacctagacccagaccgggatccaaacccgatctcagaatcagaataggaatcggaccaggtcaaggactagaacgcagacatgggaagtagcaagacccaaacctaaaccaaaactcagactagaacccataccgagacttggacccggatcgagacctgttactagggacctaaacaaagaccaggacctggacccagactgggacctggacccaaaccgggacccagagcctgacccagacccagacccaaaaactggggctggacccaggttctaagaaccagactcggaccagggatctgaaactcagacccacactgggagtgggacccaaacgcaaaccaagacctagactcagaccaggactcaagacccgaacacgaatcgaaacacaaactttgaccaggatcgacacctagaacctggacatagatgggggacccaaaccccgaaattgggaccaaaacttgggcctcgaaacttggatcaggatccgtgacccggccgagacccaaatcatgacctatgacccacctccagacttgggatccgggactcgatgcttggacctgacccatagtcagtgtgtggatttgggaatcagactagaacccgaacccaaactcgaactcaaaccaagacctggacacatacccagacccagacccacaatcgggaaccaaaatcgaaacttggactagaactggattaggattttagaaagagactaggccttccacccagatcggcacccaaaaccggacacaacctcaaaccctaaccgagaccgaaacacggacctaaacctcgccccgaacccaaatcaagactagaatccaaacacatacccaaaatcgaccagaactcgtaccccgtgacttgaactacaaccgaaactagaaggagatcaggaccgagaaacaagactagtactaggacctgaacccatacacaaaactgcaaccagaccaggac

SEQ ID NO: 136168 - DNA, 1577 bp, Cannabis sativa
  modified_base (360)..(366): a, c, t, g, unknown or other
gtcttacccactactaatggccctcacacaaggctcaaaagagaggaatttaaccttaatttaaacaattgttattaactgaatcagcccaaatactaattgggcctaaataaaatctatcaagtgtgataattttatttagaaacctagtccattttaattacaaaattaaatgggctccctatatgcatctaaccccaaagcaaacatataggctcacacaggcacactgatttggatggatccaattatgttactaggtttatacacagatgaaagaagattgcaaaatttacctgtcacaaattatttatttgacccattgacaattgaattattggttaaaatcagatcattggnnnnnnnaacaagttaaccatggcaatttaaatcaaacaataataggttttataaaaattatttaataattgaacaatatataaaacacacatgaatgtaacaagttggatagttggatataggatttatttaatttaaattatttaaataattatataattttgaaaaaaataaaattaaaaaaattattttcgaaaaaaaaatgaatttaaattaaataattaattttaaaattaaacctataaatttgaacaattaagttttcaacaaacctaaatatctatttcaagaagatgctaagaacttttcaaatttcatgttattaaaataaaattaaaaattcaataaaataaaatgataaatatatatataatttatctaattttataatttaatttaaataaaaaaataacaaaatttgaaagttagcaaaatatcttgttacaatttaaaatttcttgattagaataatcttattttaaattgcaaataaagtcattttataaaaaaattaattaaataatttataatataaaatatctcaccttaaatttaaaaataagacacaataatcaaattttaaaaataagataaccaactaagcaaaaagatagatttttacctattttcaaggttcaaaaataactaatatcttaaattaattaaaaaaaatatattaattaatttaattctgataattagatatgaaatatgaaaaataaaaatctaaataccaaattacacaaaaaattcgaaattaattccatgaaaaagcatgaaaaaattaaaaaattgcatttggtgcggatggtttgcaactgggttgctgggcgtgatttcacgcatacggatgctgctagaagtatttccgcacgtgtaggtggggttcagacaacatctgggcatgcatcctttggatagcccttgtctgaacacgggtgacacctgtgtgtcacgtgcatccacgcacgcatggggtgtgtcaccacccttatgatttttcaaatttttaaaaattcataactaattcaaattaaatcgacattaagttctgtaaaaaaagtgaattggttaatttttttccatagtatccaaaaaaaataattccagaataaaattcaaattattttttgtaaaaaatttgcaaacatcaaagaatcataaaaaactcatagatcaacatgaatcaaatccaaatcatacatacatcgtttcaa

SEQ ID NO: 136169 - DNA, 559 bp, Cannabis sativa
cctcactcgaacaaacagcccagcaaaccaaaaaacaagagagaagaaaccctcgccgaccaccgcctctaccacgatctcccccatttctcaaaccatttgagcccattttttttaaaaaaatcttccattttggatacttaatcacatacacctaaaaagtttttattttttacctgctttgagtgtcatccgaacccaaatagaaaagtttgggtttaaaatccggccacccttttttcttgagaaatccttgaatctcaacctcgtttaaggtataaatattatttctattcctttttataatgtgtacattgttttattttttgtttttgtaaattagtatttgggtttttttattttattagtaatattattgtgttgtatgtgtgccgggattttttacggaagtggtcgtcggattgcggttattaggtaataattgaaacctcaatatatagtatttatacgtatttgtatattttattgaatatgtgtgtatgtaatgtgtgtatattgtattttatatattctttgtaatatatatatttattgtgaa

SEQ ID NO: 136170 - DNA, 963 bp, Cannabis sativa
attaatgagcaatgatatacaatgacagcagaatcaatttgtaatttccatttatggaaatttttgctcttgttatttggtattatgggcttactgggccattggaggagggttggttgttgtgaacctattgccagagaaggaagttccctctagtatgtcaccaattgtttatctaaggcaagaataccagcaaatttccattgaagctgtccaaaggaagtacatgggccaattgagggtctctaatattttctctcctattttcaatcctcgggtggtcataaggaattttccctctttgttagttgctggttgggaattaaaaaaagggtatcaaattgtgagaaaatctcttaggatgattttttatagagggagacacaaagaacaacaactaccggaacaaaagctggccatggagagcactaacgtccatacggtgttggaatttgtcatgtttcacctaatccggacagagtatgctagttttcgagtttttgacaggggcaaaataatcatccatcggggatttattccgtggtcgagccccaccgaagctgatttggcagcaagcttgattgtttgttttctccatggagagatagaaatggagatccaagggactagattgattgttgtacagaaaagattggcagccgctaggaacagtagagtgatgtcaaatttggcaaactcaaatgccttttgtgttttgaattggggatccagagccaatttgaaattttttgttcttgctgccacatttatgcagtcactagttcagcctaccaaaggagggaatacaactttgctcagctggtttttcgagcgaggccgacttgttgattggagtcttctctttcgcaggaggaacaacgtgcacatgcttacttggttctttgacagaggacgagccaaaattgttgtggaagcttgtgttcttcaccttgaggacaaggt

SEQ ID NO: 136171 - DNA, 612 bp, Cannabis sativa
tttgtcactaaaataagtaaaataaaatagtaataagagagaacaagatgagaaaatgtatttctctcctctaaaatctgatgccttttacaattgatattggctctctatttatagagaaactttactccaagatccatatatttcgtgcatgaaaaaaatggagaaagtggcatgaaaagctgagtaagtggcttcactgcttcagttggataagcccatgtatcaatttcccggttactatatgatatacttgaggcatgggaaaaccaagaacacattttagttgatggcttgtgagtggaccaggtggacaaagcccctcaattaatgaatatcgacccaactacaaagggccattaatagatagattgaggagaagtgtattgatagataaatggagcccatggtgattaacgttgatatgttgggctgggaacttgggcttggactcatttgggttcttacattttcattcacatatatattattatcattatttgctcaaaatttgagaattaacacaaaatcaaaataaattaaatatttcaattaaaataattttacaattaaaaccataaaaatatttaattaaattaatcttatgtatac

SEQ ID NO: 136172 - DNA, 503 bp, Cannabis sativa
tttgaactttgaaatctctctttaccaacgttcaaggttaaaaataatatgtgcttggcatgtaagtgaacaaaatttctgtagtgttagacatttaatgaagaaatattacatattacgccagcaaaaaaagcttattgtaaagaaagagtatcgagaaaaatcttatttccgttttagacaacaaacgaagtacaattaaacatgttattaagcttttgatggcaaatttggttcagcctctttcttgttcttctgatcctcaaacttatctatggccacttgcagctcatctgtacctcccacagccctcattgtgtagaaatataccccaaagacgaatgatgtcaatccaccggcaactacaaagttcttggtcttaggtccaaggctcgcgaatcctgaaattctagccatcaagcttcttgtgattaagtaaactatagagtagcctcagcccctgccttcttcgatagtcctgtggccaaagtaactgcagctct

SEQ ID NO: 136173 - DNA, 660 bp, Cannabis sativa
attcaacaagtttttggtatataaaatacattaaactgtataccctattctcattctcttcttctaatttctaattttgtccaagatcacaaaatcaccaaggaatcataaaataagatcagattttaaagtttaaagaacaacaacaaaaaaaaaagtattgaaccgatctaagaactaagaagcacccaaggaagaaactaagagaaggtgagcaaatatgattatgaagaaagaaggtacctgccttgtggcgaactaaagccgaatgttgctgctgcaccaacagccaccacaaatgacgaggagaggagaaggacgtcgttcaccggagagattgctgatgatgtcgtcacgatttagggaaagcaagagagagaggtgcgtgagtctaagggagagaagaagagatttagggtttcattctttctttaatattaaaagtaacctttttaaggtggtgtttggtttactataattgtaataataataggaatagtaatagaattattattatcttattttgtaatgatctttgtaatcaattttttttttttatttggtttagtataaaaataaaattgaataattaaaatattgaccaaaatattctaattttatttaggggaattactacatatattatttttttaatttttt

SEQ ID NO: 136174 - DNA, 935 bp, Cannabis sativa
aaaaaaaaaaaaaaaagagaagtatgccgtgtgaacagtacacagcatatatgtcgtgcaatgtagcacacacggcaatttaatgtaatatttgcagttacgttggaggattaattgcacagcatcaccaaatttgaaaccttgttggtgatgctctaaaaattacactgaaaataatatttttaattatcatattatttttttaataaaatacaatataaaaaatagtattcaaacaatttatcacccacgcgtataaaagagttacgtgtataataaactgttttaactatgtttttggcatataatttttttttgaatttctcaaaattttacaaaatatctttaataattaaaatatacacaactgtgaataaaaaaaattaattttttttccaatgccaaaagacataagagtgtatcggtatacttctaaaataattataaaaaaaaataatatatatcatatataataaaataataaaaaaaaagaaagtgggatgccgtgtgtgttacagttgccgtgcactgtagcacacaacaaaatggtgtgttatatggagctacgttggagcacttagagcatcaccaaggaggcttcatatttggtgatgccgtggaattgtccctccaacatagctaaaacgttacacttaattgtcgtgtgtgattcacacggcatactttttttttatatatataattaattttgtatatgtttatattattaattgtatttattaaattacaatgtgtttttttaaaattggtacaccgatgtacttctacttatttcgaaattttagacttttcttttatagtaggatacattatacttatttaagacatcctacaaaattttaaaaatattcggataaatttaacacaccgaaaataaagttcaaactgtttattacacgggtaactcttttatt

SEQ ID NO: 136175 - DNA, 926 bp, Cannabis sativa
  modified_base (778)..(779): a, c, t, g, unknown or other
agagagagagagagagggtgagagtgaaaaatcaattttattttccctcaaacctgatacttattcttctttactttttaaggttgttagtttgtactgatatacatcacatatataatattataaatgaataacagaaatcagttaaagttttttattttattattatctttttaattaaataaattatctaataatatatttaaatcaattattaaaatataattggttaatttaatttgaattattttaaccaataaaataatcaaataaaattaacatgtgtgggtcatattatttaaggtccgaaattgatttctcaattttaccacaaataatatttattatttattctatcaataaataataattgattaattcttattaatctcttattttaaaacgattaaaataaatattatttttgctaaaataatatatttctctctttaatatgatttaagaataatattatatttaacttattaatgtagttttatgtaataaaacttaatagttaaatactattaattatacaattcataattgtcataattattcaaaacaataatttccattaattactatttaactcttaagaatttatttctcatagaaattaactcttactcaaatttactcatcaaataaaatattcccttgtacattgttgtatagaggtgacttagggaccatggacttatattttgaagctccaataaacacttgattattatcgatctcgtcaatagaataatctagtttattaattctattnntactccactataaatatagaattatatttacataattctcacttatttttcactgatctaatcaatataagtagttcatcctccaattatcaattcataattagagttggtcaaaattactattttacccttataattatctcttga

SEQ ID NO: 136176 - DNA, 917 bp, Cannabis sativa
ttaagttgatttattcaagatacttaattattcatttcaatttcaagaaatttaattaaatagataatatatttaagttaaaaattaatttattgaattttagacaaccgaaattagaatattttcttaaatattaaattagaattaatatttaagttgattttattctaaattcttaattatttctattttaatgaattcaattaaatagaaaattatatttaagtcgcaaatttgttagttccaaatcaaactcaattagaataatttttagagtatattttattttattttaagaatcattttttacatttattttgaaaaacatttattttaaatgtaattatttttaaatttttgaattttaaaaattatattaaaatcaaaaattatttaattaattttagatcaactaaaatcaagtaaattttcattaatgatttattaaaaaaatagactaaaatatattatgttttaaattaaaaaataagtaattagtttatgaaatatctagatagatattttctaggtagacttttttgtatttttctagatatatttatttaaataagaaaattaatatttaagttgattttattcaagacacttaaatatttaatgtttttcttaagagatttaattaaatagggaaattatatttaagttgaaaattaatttatttagtttcaaataaacataaattagaatattttttctaattttattttattttattttatagtgaatttcgaaaatgtattgcttccaaatacattagttttcaaattatgtcaagtatatttatataaaattagatttgagttgaaaattaattacttaattaatttgggccaacttaaattaagtaattttcataatatttattggaaaatatatactaaagatggaaaataaat

SEQ ID NO: 136177 - DNA, 2601 bp, Cannabis sativa
  modified_base (1034)..(1037): a, c, t, g, unknown or other
  modified_base (1755)..(1761): a, c, t, g, unknown or other
aaagcaaattaattaaattaaaaacggtacaaataaaacaataatattgataattttaaaagccacgtttatgaaaattagatacaatatatggctctatatgtaaattttcaattactatttttggtaaatttcttacacttttatattcaaatattttcattttatattttaccatattcaataaaaacaacacgaaaataacaaaaaaaccacatagaagttacaagaaagtaacacctaaacaacgtcaacaaaatataaaaataatatacaattagcaaaaaccaacaacaaagcaacaataaaataaaaagaatacaaataaataacatgaaaatatcaaaaaaaccatactttctataattaaaatattaaaatccataaaaatatttaaaagggctgagacacaaaatgaccctaaatttgaaaattaagttagtaaatgtccatttttttgaaaatattaagaaaatagccaaaaataataaattagctaataaaaactataagaaaaatatatttattacatattattattttaaaaaaatatatataataattaaattaagtcatataatttttttagtattgcatattattatattgtaacaaaaacgaataaatatattacaccatcaaatatatacaatagtatttgatatatcgtattactgaaaattaatataccataacaataaaattatataccacaaacacattataacactactaaatcaatactcaaaaactatatacataatgctaacaaaattatatatactactattaaaatatgtatatatgccaaaaaatttatatatgaataaataaataaaaactaaatgtcattttaaataaatgatatactatagacaataaaactatataccatacgacaaaatatatttacctataataaaaaataaaatgctataatattattaaaaaaaattgtatataccatattaacaaaattaaatacaactataaattaattatactatactaacaaaattatatatcacctttannnntaataaaataaaaattaaacatgcatgatctaaaataaaatgatatattatacaataaaacttatataccatataacaaaaaatatataccttacaaacaaaatatatatgtaataacaacaaataaaaatatatatgatgctaataaaattatatatattatgtctacaaaagtacaatagaaaatagaacttaaatattatttgaaaaatgatataccgtataaaaaatgcatataccattcacaaaaatattaataataataataaaaatatatattattaatatatatgtatacactaacaaaattatataccacaattaaaatatatatatatatataatgataacaaaattatataccaccattgtatataagaaactagaaactaattaaatattatttaaaataaatatatatcatacaattaaaatattataaaaataataattaattatatgtagcatgccaataaaattatatatacattaaaatatttgtattatgctaacaaaattatatacaactctgatacagagcaaaataaaaaataaatatcatctaagaataataacatactataaaacaaagcaaaaatatactatataacaaaatctatataccaacaacccacaacaagtcataaaaaattaaaaaaaattgacaaactttcaaataaaaaagatttaacgaaactaatatagatataccataatnnnnnnntaatttgcttctaattctaaaaaacaaatatgaaaaaattaattattgaattttttatgtggcaaaagacaatataaataataaataatatataaaaaaggatattatgctataagttttgaaatgggaattgttgcctcggatttttcccaaaatacgtggccgcgtctacgtatgacacgtggaccaaaaggacacctcacccgagaattagctgagtcgtatacagatggacaagtgtagttcggggagtgagcccccggagaagtacataaagcatgtccttcctctctgggagctaaaaatataataaagcatctcttggagaaggaaaacatattcgaacagtcacctcacatttaatgcagcatggggaaagcatccaggaacgcccataagaggacgtgtcagacaacgtaagccttatttacggcgactacaagataatcaaaggggctagtgacgactccattatgaagaatcacatcaatcaaggaatgataaagattaatctcacctaatccctacgatacctacgacataggttatgcatgtcctattttgtatctcttgggaacttgtgctcatacattactggtagtaaaagacaagtgaccccttttgaaccatccttgccaatctctataaatacccctgaacaaaataagaaaggggatcgaaaaaaaaaggagagataaagagagagagagagagagagagagagaaaaaaaaacttacaaagaacattttctgtataagaactctcattaataacaaagactcgtggactacggctcattaatgttggaaattattataccaggatcttagatctactca

SEQ ID NO: 136178 - DNA, 1601 bp, Cannabis sativa
tgtcaacgtcaagctgccttctgctttgtaaacccaattataaccctcaacacaccaaacaccatcgtacgatacaacaagaaacattgtcgatcttgcaatttcaaacaaaaaaggtgattacaggaaaaaaataccaaaaaaataacaaatattgacatcccatcgatacccatcgacattatgtcgataaaaacatcaactgtaagggtgacagtcctcatcgacaaaccatcgacacaccatcgacatactatcgatatagactccacaatgcactttgcatggcagacacgtgtacaatggtaattaatccattcaactatcgacaagctatcgacattgtatcgatattcagtcgacaaatacacattgcatgcgtttcacttgtacagttacaaatttaatgttaataaattttcctacattcccaacaactatttctaaccgccacattgcatgccagacacgtgtacaatcgataagctatcgacataacgtcgacatcatatcgaaaatatgtatgccgtttttggttttttggacattatcgacaaattatcgacatagtatcgatattctgtcgacaattacacacttcatgcgttgcacttgtacagttacacatttaatggccattgaatttttcctacattcccaacatttaaactgctctataaaagcaaatccctttctaattcttaagtgctcttgtcttctacttctctcttatacttaaaaattaaaggcaaatttctcttattcttaagttctaaatatgtctactagaaagaacaagcgcaaattctcaattctaactcctgaagagctcaagcaggagcctaatgttggcatagttactcctcaaatgtaaaaagttctagacgacaatagacgttttgaaaaagaacgaaatcagaacgagttaaggttgatacaacttgaagcacaatttagcaaaactggtgtatggccaactccaccaccagggttccccgaaggatgtcgtcgttgcaaattaggcatctttaatggtaaaccggtgagtctggatctttacgcaagtattgcatgtctcacccacaagccaaacaattttaatttgttattttatggtttgtggtgagttttatttaatgtttgttttttttttaatgaactttttaatattttaatgttggtttatggttgttatgaacttgttaaggttgttatgttattttatgttttatggttttttttaattttttttcttaaaatcgacaatatatcgacattgcatcgatatgttgtcgacattgttggtcaacttaatgtcgacatactgtcgacaacatgtcgacaacttctcgaataacttatgtatgttaatctgctttttaatcgacaaactgtcgataatggtcatcactgacctttctcagcagaatatcgacaaaacatcgatattctatcgataaaccgtcgataacatctgaaaaacccagattttgacacccagattttcacagaaaaccagatctgccagatctctaccatttcagaccaaaaaataccagttctaataaatacgacatatataacgaaagcaaactacataa

SEQ ID NO: 136179 - DNA, 1188 bp, Cannabis sativa
aaaaagagtttaatctatgttcatcaggatttaacacaaagtgatataggtaactttgtatatatatttttttttcatatttttctaatttttttagagtaccgtacgtgttaatgtactaagaaaacatgattatgcaatttactttttgtaacaatccaacattatcaatatatttatataaaggagagtttagaagtaatggtgtagcatttcatattatttttcatatatagtatttttactattttgtgagagcttcaaattttgtctaataaaaaaaaatctactaactttgtaaaaaaattccatattgtttagaaagtattgtagttttctatatccaatattctataaataagctttttttttttcacattcaatagtttaatcattattatttgctatagtatatagaaagtattatagcaaataaatatttttttagtatgttatttttttttttttgactaattaataaaattagtcttattcaattagctttatatttttagttttgttttattatttatgtattttttattcatataatatatactctttagtaatttaattttaatgtcacataatttaaagttaaatatttaattcaaatggtgtctttaattttttaaacaaaatattttttaaaaaaaaaatcaaacaaaaaatataaacaatgaatataattttgcgaataattcaatgtttatgtcaaattaatactaaaaaatagaccaatcatcaatatctacatattattataaaggaaagcatataaaagtgtaggtgactttctataatttttcttcatatttttctaatttttttagagtaccgtgttaatgtactaagaaaacatgattatttaatgtactttttgtaataatcccacattatttagaaagtatagtatcactaaactatgtctatgaccactgttaaatgattatttggaccctatgttttgaaacactaaatataataatatcataagctcaatattagtgaaaacaattacaataaagatagattagaaatcgggtaacaattatttataacgagggctaagaagaaaaaattttaagattagaataaaaatatttgattacaattagactcattgtatcgttatattttattttgtaaatattgagaactatagcttcttaataacttttttctctt

SEQ ID NO: 136180 - DNA, 2634 bp, Cannabis sativa
tgaccttagtaatcctataaatagataatgataggctcctattttgatatatataagctcctcaaactattctgtcacataactgaagataaagagcctctcatattttgaaattctctctctcttctctcttcataattcgaatgcccacacaattcaagtcagtactcaatcatagcgtggaagattgtgaataattccatgacctaacaagatcaaagttcagaacttgttaatactcttagacgaaaagaaacaggagttagtgatcaaaacaaaaggagctataatattttgctgccaccaatgtaaggttttctacaactttatatgtgtttatttcattgttttaggaaattcatgtttagaatgttagattataaaaaaatataatcatacatgttaataaatctagatcttagtaaaattaattccaacaactagcctcagagccacggtaatgatttattttcatgaaatatagatttaaaataatgtttggttgttttggatgtgttcatgttggtttatgtgcttcaccgatgattgaatgagaattacaatttttttacaaaaaatatttttatttttgttccagaagtattttttctagaaagttggtaaataattaatcaatttaggcttttacagaaattaatttgtatttaaattgaattagttatattttttgaagtttgaaaatatatctaggttagggttggtgatagtgtgcacgaatctgaggtaaagctcgatcaaacaaggcttcaaacaagccctgtttgagttttctcggacaaggggctatccgaagctacccctcactgagaaatgggcctcacgaaccctgcatgcatcctctcctctcgactgatttccccatttttgccattttcaactttgaaaaattatttttcaatgaaataaaagtctaattttggtagaattttatgtggaatcttatttttcaaataaaatataattgttagattgaaattaattttaaattaatttaaattagttttagatattagtaggctttaaatttgaaaaattaatttctcaacaaagttgctatttttgttatttttgaaaatttatcattttttatttgatttattaattttaattataagatctgatatttacatatataaaatatgaagtgatcttctgaattgcacctcaagtacaattgagtgttgtaccacatgcactacgtactcgtcccgtactagtgttggtaatgttgtgtcatacccctaaacaatatatactgtaccaatgcactctgtaccgaaactgtactagtgttgatagtatacaaatcacataatacaacatgcatattgttatcccaatttttgtcctcttgacatgggattcttacatggacaaaattagtgccacaagacattacaactcaccaataagaaggccaattcagtacctaagcaaatagagaccccaacactcaaatgggcatccagtggcagactagctccctcactagagttggtcagccagccttgggactacatcatggccgaccagcctggcctccataggggcctggccgagtaggaggtgctctacagggtttcttgtgcacttctacacgtggatagcaactcataggctatgaagtgggccccaaaagcccaacaaaatggctcaataatatctggattcaagggctttttagtcttttgtaattttctaaaaaactacacaaatatctagggatttatactgtaaactatggttttaggcctcctatataaaggccttaaccttagcctagaaactgaagttgaatctaagcctggaacctaccctcaagatctaagactatgtttgaaaaattctctcttcctcactacctctctcacacgctacacaagcatcatcccaacaattgagttttgccattattgattcataccttgtattcctaagggtactataatagatcccacctatagtgatctggatagtattaaccctcggttactacaactaaaaggggagtaggtcattacccactatcacaaaagggttggacctctataacaaatctgtgtgtcaatttcttttcattcttatttgtacaaacacgtggcaagcatcagatatatatgaccctgttgttggtttatcactttttaaggtcaatagtttggtgctttcattgagagcatggatattgtaatctgatcaaatgacatggtgaacacaagaaaatctctcgttgcaccatctgtatctttgtgtctcccttaagacccacaaattgcagatccaggcacttaggttccattcacaactggaatccccatgagcactgcagatgtggtaaatcctatcaccaaaataggcgtcacaagtctgggcactacagctagccaaactaatatgagcaccttggtggatccaagtggtaggaccctgcctctaaaagtagacccatcattggaacctcccactaaaggaaggacccaagagcgatagccccctgaaacaacaattggatctcgtctccaactctacgctagagagacatgcctaggagttggtgagcctacaattggcgagccccatctggacctaggagaagactttgagttagccaga

SEQ ID NO: 136181 - DNA, 764 bp, Cannabis sativa
tgtcactagaataacatccattagagttttaatttcactagctgctatacacaatttagttgtgcaccaaatggatgttaggacagcgttccttaatagcgaattagaagaagaaatatacatggatcaacctgaagggttcgtgatcccaggccaggaacataaggtttgcaagttagataaatctttgtatgatcttaaacagtcaccatgagaaatttgacaatttagttatctcacatggctttgctttgaagtgaatgaaagtgacaaatgcatttactataaatctgagaatgacatttgcactattatgtgcctatatgtggatgatctgcttatatttgttttaaatatccatgttgtgaatgctgtgaaattattattatgtgctaactttgatatgaaagacctcggagaagctcatgtaatccttggtattaagattactaggtcagaaaagagaatttctttggatcattctcattacattgagaagattctcaagaaatataattactttgatagtaaacctgcttgcacactatatgatccgtgtaaagctatttaataacagtggtgacagtgtgagacaatctgaatatgtgagcatcattgccagtctttgatatgccactgattgtacgtgacccgacattgcctaggtcgtgggattattgtgcaggtttactagtaggcctagtatagagcattggcatgctattgagagggtaatgagataccttaagagaaccatgaacctt

SEQ ID NO: 136182 - DNA, 545 bp, Cannabis sativa
ataaagtacatgtgtatatatataaatatataaatgcatacatatatatatttatactatggcagacagcgagaccatacttcacttatttttgtttctcctaaaattgaaaatgaatgtctatctgcaccaaactcacttgttacctaaacaataaaaatatatatagaaaacacctaaaataaaaaatagaagtgccccatacccgaagaggatcatgagataagcatatatcttacatatatgttattatataaataaatgtctatctaacacattttgttgtgtctaacagattttattgtgacttaacagagttttttatatttttaaacagaaagtgttaactttaacagaaatgtaatatttgcatcctttcacaaaagagataatcattcacaaatacattcattcacatatataggcatcctcctagaaaagaggcaattattgactattgagatgcactctttcatatatagtcttgtctatagtggaatcacatgccactatatagtatatagtgaatcacacgccaccatctt

SEQ ID NO: 136183 - DNA, 524 bp, Cannabis sativa
  modified_base (107)..(108): a, c, t, g, unknown or other
  modified_base (280)..(280): a, c, t, g, unknown or other
agacatattattccgctgcaataatgtaaggtttctcatactttatatgtgtttaatttaattatcgttttagaagttcatagttaggttgttaaatcaacatactnntgagtagatctaagatcctggttagataattccaacagatagctagcaagattcagatctcaccccagttagtagaggacatagtcagatctagcattgagtttgtggtaggcaagcttcacaacttgacgctgcaatctgatctgctagaaagaattaaagtcgctcagangactgatccagagttagtaaaaaacagagaagaggtttcagctggtcaagccatggatttttcagtgtcagacaacgagatgctcttgtttaaatctagggtttgtgttccagatagtgtggaacttagaaatgaaatcttcgaagaggctcattctacccattattccctacatcccggtaccaccaaagatgtatcaagaccttaaaccttacttctggtggagcggtatgaagaagaattt

SEQ ID NO: 136184 - DNA, 576 bp, Cannabis sativa
agagagagttagagagtttcatttgtaataaaccagaaaaataaaggaagaaaagagagaaaaagtttagagattacctgctggtttgtggcatggaatctctataatcttgtaactcggttttaacattcataaggagatttcaagcaactttgagggtcgcttgacggagacgtacctctgatttagagggaactccgaaatcaattgttgtggtgtctatagttttttctcttcgctggttttttatttttgctttcttgtcttgtattattctttggtttttttgcaggttttaaagcttggaaagaaaggttcgactggaaaattttgcagcaaggagaagaagagaagtttggctgctactgcagcaaggagaaacagagaagaagaaatcgcagcaattgttttctgccattgaagagctgctgctgcagcaagaaagaaagggagaagaaggagacattcggctgaagattttcttggagaagaaaagggagtggctgctagggtttcaaaggaagaagaagataagaagaagagaggctgaaggggtttgttcggctgctaggttta

SEQ ID NO: 136185 - DNA, 558 bp, Cannabis sativa
aacggtgtgacaataatctaaagggcccaaatgaatgagcaagcctcaagggtcagatgagatcagtgttagatattgttaattaggaacagttgtgaaagattccacctgtacaactgtgttgtgaaatttatcatagttgatatctatctatctactgctgtcttatcttcttctatttcttttcagttaagaaaatgaagtgctgaacgacatctctatttaaattttcaaactaaagattccagatgccctaccaacacaacacacttacatgatcaagtaataacaacaattacattatttgatttttcttatattgtcgcttttcccgagagtgtttcaagttgaaatgttaaaatttgtttttagttgtgtcttttggattgatagaaaaggaaacatagactagaagatctatgttaacataaataatatttcattatttagttgaactttcaaatcaatattgtaatactggattgactgattgattgattttaccgtaattcaggtttgattggtactatctttttcttttttgttaaaaaaaaaaaa

SEQ ID NO: 136186 - DNA, 804 bp, Cannabis sativa
gaaattctggaaaactttgttcgtaaagctatgaccagtctagatggttctttcggatagcttgtcttccgtaactaaagtcttccggatagcttgtcttatatttggagacgtccttctagatagcttgagtcaaccttgaacgcgtatccagaacatgtgattatctttcgaattgtccgtacaaaaagtgcatttgtgaagctagcgtggaatatgttgttggggctgacttagagaatttaaaacatcattaattagccatgatagaatcgaagctaattttagcaactataaaaatctatatgtataactatcaccttttgtaatcaatgagtggatcagcctattgaaagtttaagattaaatcgtgattgtgtaaggtttgagagagagagagagaaagtctaaactatagagaaagttcatcttgcaatctctgtaatagtttaagaggatttttgtaaccttgtaaagataaatatcaataaagatatggctgatgatattctaaacgagacgtagaggattgagctcgttaaaccgggtgttatttgttttgttttactgctttaatttgttacctagttctttgtgattcttttgagtattattcttgattgcttgtttgttggaccaatataatttacatcataagtcattgattgatttcacaaaaaaaaaaaaaaaactagtatcagagcttagttcataatcacggttccccaatttcggtttagagggactataggaaccagaattctagttggggaaccggtctaccagttgggacattttagggaa

SEQ ID NO: 136187 - DNA, 684 bp, Cannabis sativa
  modified_base (624)..(626): a, c, t, g, unknown or other
tcacttgcatttaaagagtgacattatgtgtatagtgtgtgtaagtagtaaaattgtaaataaaaaaacttaaagtgtacaaaagtaatagctgccgtgtatgagtatatatgtaataaaaaagccattttgtatttttaatgtaaaaatttcataatataatatatgttggagggtgtaaacaatgatattaatggcgttgacaatgaatataaggatgcatgatataattacatatataacaaacacttatgtcataaataatataaaaaataagttttattttaaatatttttcacattaaaaacaatttttaagatgaaatatatataagttttacatataatttatgtgtacacactcatatgcttttaatatatatacactacatactaaacgacaacgttctcattttctacaattgtaatattctgatcaacgcccatttaattttagagtaaatgacggtaaaatttttaaaatttttattttggtttcacttaattccaaaatttaaatttaggcggtcaaacctctaatactttagcaatttaatacgtccgtccattattttaagtattaattgcaatgttggactggacacagtgtacacgtgacacaatnnnattggtccacgtaaaaaattatttaaaaaaattaaaaaaaattataaataattttttt

SEQ ID NO: 136188 - DNA, 3107 bp, Cannabis sativa
  modified_base (36)..(50): a, c, t, g, unknown or other
  modified_base (429)..(447): a, c, t, g, unknown or other
  modified_base (1060)..(1061): a, c, t, g, unknown or other
  modified_base (2678)..(2678): a, c, t, g, unknown or other
aggcggtgtgggattgcacagcttacccggtatttnnnnnnnnnnnnnnngggactactgactgtcacatgtaggaaccgaaattccaattggttcccaggaaaccccatagaactggaattctggttgggaactggtctaccggttggggtaattttgagaaccctagtttttcccttttttgtgatgtttagggtattgccacattgtttattaatagggaaacttttagtttcaggtttaagtccccaaaaagtgtttagtgtgtcaattacctttgttatgattgatgtgatttaggagcatgtaattcgccgagaagtttttccactcaggttggctggcacacctgaatttggaaacgaggtaagataagtatagcaatatgcatatgtatatacatgtttagtgtgcatgttagttaagccnnnnnnnnnnnnnnnnnnntgtatgttggcttttgtactatccgacagttcacatcggtacggctagagtatgactagcgtactggctataggccgatattatggtcgataataccgtactacttgacagtatcacatcagtatggctagagtatgactaacgtatcgagtataggctgatattatggtcaatagtactgtcgtacgaacgttctagactcagcactgtgcggaacacagggatagggttatgattgggggtatgggcgcccaatcataatccaggttattgctatgttattgtttatgcttttcttattgagtctgtcgactcacaatgctatttccatgtgtaggtaagggcaagataaagctgaggaatcgtgagggagagaagatgaagattgtatatgtcggggcagttaggcatggatcgtacgatctttgggacatcaaggcttttgttgattagtcgcttggcaacaaaacttttgtatatgtgtatagcaaacttttataaatgtattttgtaaacggggtcccgatattttatatatgtaatacttcaagtgtctttttaattaagcaaattttaattaatcacatttttcaataatctcgttgattagcanngagctgcacaatacgtttaaaatcattgtaacatgcgtaagttagttagggtgttacaatttggtatcgaagccaccaggttgtcttccgaagataataacgagatgtataattatcatcagcagtcagcttgtttcacggttcagtaagcttttattgcattagtagtttattttaatagtatgatttaagaaaagcttgttaggaatcaaattagtagcctgatagtaaaataggcgcatgtttttaatttccaaataagcgactatattaagtgtttacttgatcacgatctgaccagactagctcttggttatgtaggttgttctaattagtatggacgccaggcgaaacaccaggagccagggcaattcgactggatctagtggttgtcaaggagctcatattcccctaaatatatatggttgaggtagaggtcttagaggtagggcacgtggttggggtgatgctaacccgcctcagggtgcccaagctgcccatgattatgaaaaccagtttgtagaaatgcaagccagaattaatgaataagatgaagagatccagcggttgagacagcagggtgctcatgcagttcttgctccaaaaataccagtagctcttgcccctactgtgcaggccgaacctgtagttgcagtgaaccgaatggaacccctgtatgaaaggctttgtaaacaggcacctctacttaatgtgggaggtctcgatgtcatgaaagctgagcagtggctaactgtcatcaccagaatcttgaactttatgggcgtcaccggtaatgatagggtggcctgtgccacattccaatttcaagaagacgctctggtttggttggacatggtgtccatgattcacgacattacgacaatgacttgggaaaagttccaggaactgttcaatgccaagtattacaacgaggcagttagaagtgctaaaagaaaagaattcacctagctgactcagaaggagaatatgagtgttgctgaatacacgactcagtttcatcggttggcaaggttggctttgggaattttgcaaaccaattttagtaagaaagagaaatacctagattggttgaatgagaaatacatgatttaatgattactaccgacgacaataccactgatgctgatatggtgggtaaggcactacgagttgagggcgcagtggggtgcaccctagagtctcatgggactccggttgttggtggagctcctgcccctcctgcatcaggctttagcaagggaggtagtggctcggctgctgatcagaaaagaaaggcatctactgcaaccagtggctcgggtcagaacaagaggttttgggggaagcagtgttgaggcaatcgccagattggcactataacccgatacacttaccaagagtgccccagttgtaaaaagcaccatctaggggaacgtaaagggcagcggtgctttcagtatggtatgccagggcattacgaaaggaattgtccctaactcagcactgaagcaccaaagactgcagcgaaacccactctagcaagggtgtttgcgataactcaggctgatgcagaaggcagcccctcagtggtaacaagtcagctctcggtcaacaacncttatttctctgtgttgtttgactctagggccactcattcatatgtgacagccaaaaattttagtaaattggatagatcacatgatagttatgatcaaggtttggaaccctactgcctggcggagaattagtcatcgccaaaaggtgaattaggtctatgccgatcagaatagaggatagagagttgagtgctgatttaatatgaatttagtggattttgatattatactgggaatgtatttcttgtccaaatactaagctagtattgattgtaagaggaagatggtaatcttccaaccagaaggtgaagaaccatttgtttttgtcggacctgttcagggatctcggattccggtattttaagtactaatagctagggaattgttatgagaaggatgtctagggtttctggtcgtggtattggatacc

SEQ ID NO: 136189 - DNA, 606 bp, Cannabis sativa
cgccccaagctaatagttcaacttgatgatcaagtggttattggatcacatttaatatttatagacttatgaagatcccatttaattatatattagatgttaaattttaccatttgatccgatttaattaatttctgtcattcaattgatctgatatttattagatgttagattgaatcggttctattttatatatatttattggtttaatttaaatttattcaatatttcaaacttagtatttttaatcgaatcgtgtcattttttattggtttaattattaaaaagtaatttgtggtttaaatatttaagtttaatttggttgtaaataaatatttaaatttgatttttggtgagaataatacttaagttatatttttaaatctctgtaggtacttagttgttaaatattaagtaaattgtcatgtggcaactcctgattggtccagatcatgaatttttactattttctaaaaaaaattaatttaaatatacccataaaaaaatacgtagataatgacttaatattggtcagtacctataaaattacagaaatataacttatgtattattgtcaccaaaaattaaacttatatatttatactg

SEQ ID NO: 136190 - DNA, 515 bp, Cannabis sativa
atgtgcggatagtgatgctttacttgatacaagcgtttttctcggaacagtgcgaggtataggacctattcggatactttctgctgaagaactagactttgtcaatttaaccctaaattgttctggacgaaaattttagagagtatatcctatctaggttttaaaatgaactcaacgtgtcaccctctacggaaaatattataacaatatcaatcaaattatatacagtatctttactaaatgtctatttacatgtttacatatttgacatgaatcaaaatcacatgtcaatctaataatctcatgaataccgaccaatccaatataacttcttctagcaaaaagtaagactaaattgatcattatatcaagaaaagttgaaagaaaaatcaactccatcttttgttttttttttaaaaaaaaaaaatcaacttgatccatcttgataataagtgaaagagaatttaaaagaaacaacttttagtgaaaatttttgtagtcacaacataattttt

SEQ ID NO: 136191 - DNA, 741 bp, Cannabis sativa
aaaaactgaaacgaaataaaataaggccaaaattatgattttcattcgtcatcatctccataaggggttaaaatcttaatatttaatagtaaaagatcatcttgtgctttagaaaaatttgaaagaaagatattaccattagaaaaatatcatattgtcaaaggctaagaatgattagttgcacctgaggttaaaatattttaaatttgtaactaattataactgatctgtaatatatatatatatatatatttctctcaactcaatgtgatcgtcatgtctctaaaaagataagtgttggtggtattcataggtttaggattaagatcttaaagtcagtttttgtaagaagttaagttattaataagttagttaggacttaacaaatgtaataaactttgatatgagtgagatcttcacgtcagcttaagtgtaggtgcttccaggagcgtgtatgagagcttctagactcacgaactaaagtacttgtaggaggagcttctcaaataggaaagagccagctgaagtcgactatccagaattcctttttaagggaaacatgatagccatctagaattccttttcagaggaaggctagctttcctgaggacccttcccgaaagggtaagtaagccttccaggacctacttctgcgagtcaacagcttttcaggaataacttttggagacctttttgatttggaggaactattccacaataacaaatacaaaatatagaaaa

SEQ ID NO: 136192 - DNA, 966 bp, Cannabis sativa
tagctggattggagaaatgaatttgtggtagagatgcaagaaattacatcgaaaagaaaaattcacatcatgttacgttgggacaaactaaaaccctaattttgaaattagagatttttttttttataacgaaggaagatgggtcaagtggttatgcagaaaaataatttgatgtcatttttaaaaactaattaattatttaaaaatttattttagaagaggggaagtctaatatttataaacaaaaataaaattttattgtaaatatataattaaatactttaactgttaaaaaactataataggaatttaaatataaaaaaaaattataaatattaattcttaaaaataattttgttaaatatttaaattaaaaattaattattttaagaaaattataattaaaattaatttaattcaaaaaaaaaattctattgatagaccactattatataatcattacaattaaaatattacgattgagtaattacacatgtaaaataattttatagtaattattctactctcataatttatttgttgaatattataaaaaaatttaataaataatctaatgcaacttaaatatgaactattatcatacacatattcatttactactatttgatctattatctatcactctaaaaaactttcataccataaggatagaacaataatcccactatagatagacatatcgtgtatatatatatggaatacttcttaatgagtattacacattgatggttacgaaatcattagattttgatcaatgacgaataataaaagaaaaattttaattcgtgtgcttaattagaaaaatatataataaaatatatctttttacactaaattaaaaatatgtatatatataaaatatttcgaaaaaatttacatgaaaaataccataagctacttatattataatttttgcaacgccctaatgctaaggcacgctacagt

SEQ ID NO: 136193 - DNA, 581 bp, Cannabis sativa
tctctctctctctcttcatacaccacaagagaaacaaaccacaaaccccatcactggcgtgacttcgaaaacccctttttggtcaccgtctggccccatgcattggaccatccgaatccccaggtgttggcaacctcaacccccaaccggcgttgcccattttaccactactagcttgagatctcaagtcaaaatttggaggttcaaactttgaacagattttccagccacctccggtgcccgtttgacgagttgtcttcaccattagacttagcttgtcgaggagaacaacctacactaagccattttgcccagcccgcttcctgtgacatttttgtagctctacccctttccgatgacttttcagcaatatcatgtactattttgagaaatggttggcatgagcttgatctactcgtcaatgtggttattttgatatatactatccctatttttggcgatgtttctggtacactgatttctactgccaccgatagttaatgtctaccgcttaggtgaggttttggaactccaaatatatatagtcatattatatgtcgttgaactcagttttgaatgta

SEQ ID NO: 136194 - DNA, 616 bp, Cannabis sativa
tgttttttttttctttggttacttcccttggaagttttctatttaatagcttctttcttttttaaaaaaaaataatgaccaaccctagaaaagtcaaaagggcaaaagaatatataattaccaaaagactaatctacccctccaaacttttaaataacttagagcattttggtaattttactaatccattaaacagacattctaaaatttctaacctagtccggaatacactcaaaataattcttccatcaatgtcgtgacatttctaactgaaattgccaggcctgatattttatttttaaaaaatagtggtatcctcgatacccacatatctcaatataatctccgtaattaataaattacgctttatatatcattagataaattctcagtagttaccctaagtaagatcataatcttacttcgttaccaaaatcacatgtttaataaaatatgtctttttaaatatcatttatttattatttattttcgggatattacaagaggcctgcatggttgttacagccattgaacataccagagtggaaatgggaagatattgatatggacttcgtggtaggtttgcctagaaccacgggacagtttgactctgtgt

SEQ ID NO: 136195 - DNA, 538 bp, Cannabis sativa
gcaactttcaaattgaaaaaataatcagtaaatgtgcacgatggaaaaaacaacaacttcatgtaaaaacacaagacctatatccacactcgcattggatggtatcttctattccaggaaccaagttccactgataatcttatgtaagcatccttgaagacataagttttggttttgatctaaatcagtagtttaatatcagcattggatgcgagttttataatgccaaaagcatgaaaaacaagataaccaaatcctgttgatgactcctaatgtaatccatgtctcattaaaaagttacaactaccctttatctcaaaactcaaacagcaaaatatcactgtgttctcgggttatatcagagtaatcgtccaccatattgctagagaaaataactaattaattggctatccacactctattctagagtaaggtaaatagtgcaaattagtcaattttactaaatgatcaacattttctcttggattgtcaatgtataaaaacattaaattaaatccaatgtaagaacataaatcat

SEQ ID NO: 136196 - DNA, 534 bp, Cannabis sativa
gccaaaatatgaaatttccctttgaaaaaggcattttcacgcccttttctttcaattgtgcacaagctaaagcttcccttatttcaagaaattcaaatttaattgttcttcctccgataacagatatttcaacaaaatcaagagtagcaaattcatacttaatttttgtcatcaacgtattctcttttgaatatatattatgtaatattttataagagtttaacatttttttttgtttgagagaattatcttacatactaaattttaaatttctttttttaaaaaaaaaataataattgttccgttaaatactgtgtatttttatgtaaattttaattggtatatgagttaatgtaaattttcataaatatgaaaaaaataaattattttaaaatgtaaaaaataaaaataccttttattaagttaagtattaaaagactaaaaaatatagggtgattctacaatacactcccgtaaaagggagatattgatgcactcctacttgtttcggtatcgagaaaaaaaaattagttc

SEQ ID NO: 136197 - DNA, 1049 bp, Cannabis sativa
gatcctgggacaagatctggatcctaatcaccggtcccagtcgagtttcaattcatgccccaggtcccgctctaggtatgggtctaggtgtgggactgagactggggtccagttttgggtctcaatcccagttctgggtcccgagtcctgttcaatgttcgagtctaagttcaggtctgggttcgggtcccgagtccagatttaggtttaggttcaagttttggttgcaatcccgaggtgggtctatgtccgagtccgggtccaggtctggttatagttttgggtctgggtccaagtcctggtcctggtcctcttcctgggtcatgatccgcttctagtttcggttccagtttcaagtaacggggtacggcttcaagtcgagttttggttcgagtctaggttcaggtcctgatttgggtccgaggcgaggttcaggtctgagttttggtctcggttagggtctgaggctgggtctggtttcgagttcgggttcgagtttaggtcccggtaccgttccaagatcccggtctggttccagttcaagtttcggttttggttattgtgtgtgggcctgggtctttgtatgtgtgcaggtcctagattgagttcgagtttgggtttgggttctggtctaagtcctagatccagacaccgactacgggtcgggtccaagcatcgagtcccgaatcctaggtcctgaggtgggtcctaagtccaggtttgggtctggggtcgagtcccggatcctcatcgaagatctgaggcccaagttctggtcctagtttgtgggcccgattccgagctctgggtcccccatctatatttggatcctaggtcccaatatatgtcaaagttcgtgtttcgggtccggtctgagtcctggtcccgatttgggttcgggtccgagtttgggtcccagtcccagtttgggtttgggtttcgtgttccaggtccgagtctggttcttgggtcctgggttcggccctggtttttgggtttggttttggcttcgggtctgggtccaagtcctggtcttggtttaggtccca

SEQ ID NO: 136198 - DNA, 648 bp, Cannabis sativa
aatataataataagaaatatttttttagtgtaatttttggtgttgtggttggagtataaatattttttgacgctaaatttagtgataatgcaacaccaaatttggtgtgtctttagagatgctctaataagataaagaaatactttaaaaagatttccatacattaaaaatattattaaaaacaataccaaacttgttatagctaatatatttagaatggcatgtaagatgtaaggaaggattatttagaatgattttggtttttggctaatcaattctcaaattataattacttgaaagattcaatacaaattgaaaatatattttcatcatttttatataacttcagaaaactaataatattaatatcatggtgctagatctattacatgcatatatataattttctttttttggttgaatttaaaatatacagatgcaaagtatctatatatctatatatatataaaggaaaagtattaggcgatctaaaattcttctaaataccactatctattttcttattatttttttaattttttattcatagtcttttaaaattattaattaataatattaataatttaaaaatctaaaatctatatatataaaggagaagtatgagacgatgacgtggcggtctaaaat

SEQ ID NO: 136199 - DNA, 541 bp, Cannabis sativa
  modified_base (494)..(508): a, c, t, g, unknown or other
ataattcctcaattaactcataattatctaattagggttttgctaatccttttcttaattctgggtattacaggtatagctaaacaaaagacattaatacccaaattttattacttttaaaaaatatctgaggatttaagaaaaaatcaaaaccattgatttaaatccaatggtctttaataaataaacgggtccatcccatttttttttactggtcgttagccagccgctatgttgttgaaggaattttacaacaccaagaatgaattataataataataagaaatattgaacaagtgcgagtattcaaccagaacgacgagtactcaaaccaagaacacaaatacttagtaaaagactggaaaaataaataacacaagagaaatatagtggttcagttagatcacggtctgcttagtccactgttgcaaagattctgtccccctttacttcacggtggatcactcctttatatacaaagcaagtgtcctatnnnnnnnnnnnnnnntgcattcattatcaatccgtttatacattgatt

SEQ ID NO: 136200 - DNA, 1152 bp, Cannabis sativa
tacactctaataatcaaataatacattaagaaatacaaaacccactaaaaatattatggcacatttattaaagtgtaactggaatcagaataatcaatgggagaaatgaatcggtttaaaatagaaaataatcggaaacaatattttattatgctatttactaaattgtccagaaagaaaaccggaatcatattattttgtttacataattaagaaaggtaatcggaatgctttaatttgacgaaattgtcattattagaacatgtaattattttttgtttatagatttttaaagggtatatttatctttttcattatttaaaaaaattaaaattaaaataaactaagttaggaaagggaaaagtattccctataaaaatagggggagaacctttccttttgttttttctctaatttgtgtgagccccactactttcttcctttctaaaatttagtaaacaattatatgaaaatcaataccatataattaattcacatttcctttaagtaaacataccattagagtagaaagaaaagatagagaaataaaaatcttaaaatacaaatgcaaaataaaccaaataaaaagataaaactaattgggctagaaacaaaaacatgaaatatgagtttagatattagatttacaaaaatatggcacatcaaatatcataaaaaattataaatgtaaaaaaatactataggagagtggcaaacttataaatgctatatttttataactttataatcaaatctcatattttatctaattttcacttaagcttatataactagaccttcttaaaaaatgaaaaataaaactattatgtttagatagttaagaaaattgggactattaattttttttattgttactttattaacagtaagaaataaaattatcaaaaagaagaaaaaaaaatggtagaacagtttttgatattatttaaataaaagggttgagtgagagagatgtaaaatggtcctaaatttgaaaactaagttagtaaatggccaaatataataaattagctaataaaaattataaaaatacattcatcacatatttttttagaaaaatatataataataaaattaagttatataatttttttaatattgcatattattatattgtaacaaaaataaata

SEQ ID NO: 136201 - DNA, 1104 bp, Cannabis sativa
  modified_base (449)..(459): a, c, t, g, unknown or other
aaagaactccacagttaagcgttcttgacctggagtaatttcaagatgggtgacctcgtggaaagctttcctaggaagcgtgcgagtgaggacaaagtatgctgaaaacactcgtgttggtctgtagggccagtcatcaggatcatgaagcagccggagtggcgtacttgtgtataagagccatcattctgtggatgtaagggcccaatagaggcttgaagcagggacgttaaaaatggtatcagagccttgacccagccaatagtgtgatcgacgagggcgtcagaccccgtaaggggggtgattaggaagttttcttaaaaagcgtgcaagtgagcacaaagcatgctggaaacactcgtgttggtttgtagggccaatcgtcagtccatgaagcagccagagtggcttactcgtgtataagagccatcattccgtgggtgtaaggnnnnnnnnnnngcttgaagcgggaacgttacacttttcttctctttctcttctccctatcatcatttcaagcaatatgtagtttttctatattcatattctttagttctttatgttaaccatatttttgttagattatttaggattgaatatatatatttttattattgatttattttgttattattttattatattttaaggttgttttatgtgttctatttcatttatttatcacattttctaaatattattgtactactctatttttaatagtaatagaaaaataataaaatttatatgtaagttatttttttcagtatcctatgctccaatatatattcagttttcctccattgttctgctgttgtttttagttgcttcttctcatttttcattttaccatcttttataggctgcttaaggggtatatcggtaatttgattttcaaattgggatttttccctaaaaaagaagtgtaatcaatacacatgaagagtgcaaccgaccctgcacaacccaaaagcttgattcccaatgttagaataatccatgccttgaggtatgaaaggacatcttgaaaatctaaaacgacaaatttgtccacccacctcgcatgtcggacacgtgttgttggaagttattttaccaggaact

SEQ ID NO: 136202 - DNA, 619 bp, Cannabis sativa
taatccttgtttccccattggctgcataagccctcataaccttaatacctagtgatggattctgatgaagatgctggtcgaaaaagatgttggaatggagtcttgagtgtttcgatatctgggcactaataaaaaactcttccaagtcatcagccagatatggactatcatacgcaagcaagtttaaacattaattatagtgtatattccatgattctcttgaaattgtttactcataatatttaaaaaattaaaatgataccgactaataaaattatgtcacgtgtacacttgtgtacacataaactatacaagttggcatttaactactcactataataaataccgaaacaaaattaaagtttgatttcgctccaaaaaaaattgtgaaattaaacatagcaaaaattgtaactcggatagtttcaccacaaatattccgtttttctttttcatttttggtaaattaatattaaaaaattaaaataacttcaaaaacaaaacgaaattgcacatagagtcaatttttttttttttactgtatcaagcaaaatccaacagaagaaaatgttgcatttttatttctttacattttctttcctacaaaaaaaaaaaaaaa

SEQ ID NO: 136203 - DNA, 1173 bp, Cannabis sativa
  modified_base (29)..(48): a, c, t, g, unknown or other
aggatcttttacgtggttttgcagttaannnnnnnnnnnnnnnnnnnntcaatcttattcagatttctaatggttttctcagtgccttttttgtatgattttttctatccctttttcgatcttacttgctactatttataatcatatagtgaacagttaattacaaagtttagtgtaatctttttacaacaattttccccttaaatcatggggtttgattacatatcacgtagtgtaaatgcggttatgatttgaaaatcatatagctgtgattttcacgcttttaccaggtcaaaatgcttgtgtatttaaaaacgtcattaattgttgtatccaaggatgtctcgatagaaacttggttccagttatcataatagcgagctggggccatttttccttctgaggtcgacgatgcacatcttgtgatgatcgcggttcttattcacaaagagttctttgaggctcattagaatgttaacttctgactcattaggattgtgagcctcactgaaaaaaatgtttgaagtttactaggtgaagttacatgaagccttcccatagcgagataggcacctcgcttactaggtctcgaacaaaccagactgtcacacttagtttgtacattatagactaagggctttcgcagtcaatatgtgtcactttcgtcttcctagatataaagtccttgatgcctcgttattcactattagcgacatatgatttctcgctaatctactaagcaacagtttgtatatttttttcctcgcataagcctttacaattagcaggttgcgaatgtactttaagacttacgtaattaatgagttatttcataaaacgcgattgcatcgatccatattccttttatcttgacacgtgtcccccactgagatgatagccgaattttgggtataacaattgccccttaaaaagttcttttttagtaaaaagtgctttttaataattaaaaagggcatttttgtcataatcccgttttggaaagacgcatcctttgattctggtagttgtacggtttggagggtaattatgaatcgtctcttcatattctgctctactcccaaccattagatttgccaatcttttgccttcttgtcactggactttgtgtataaaagggcagcttaagctttccattgttgggttttgtgccct

SEQ ID NO: 136204 - DNA, 1033 bp, Cannabis sativa
tcagacttggcccaagtcccagaccaagattggggaaccaaacttgaaatgagaaccaaaatcgggaccgaggagtgggattgggacccaagacccgaccccaatttcagtcctcgacgcggacccggacacgaacacagatacagacacggactaggacccagtatccgaatcggaacgagactgggacccaagattgggatccgaatcttgaaccacgactcgtagtcagtttctcaatcttggaatcgtaccaagacccaaacctggaaccatttctagaccaggacccaaatcaagactcggactcgggacccgaaatctgaacaagaatcagaatgaggaccttggaaatagaattggacttggacccaaaatcagatctagatgcagaaccgaacatgaacccgtacccaaattaggatcgataccaagacccaaaccagaacccgaaccgaaacttgcgccaggacctgcgacccacaacctggaaccctggacccgtgacccaagacctagaccagaacccagacccgtaccagaacctagacctaaacccagacccagacccagaccaagacccggacccaaacttagaccgaaaactggacctagacccagacccagacaaagagccggactcgtacaagaactcaaactcgaacccaagacttagacccagaccgagatcaggactgagacctagacacagactaggaccgagccctgaacctcaactgggactagaatctagattgggaccggaaaccgggacccgggaccgagacccaagacccaagacccaagactcaaacattggacataagaaccgaaccgtgacctagatgggggactttggctccaaacccgaacctggaccaagacttggacaaaggatccgaacctagatgagggacttggacccaatactgggcctcaaaaccagggtttgagacccaaaatttgaccctagactcgagacacaggacccgaccttagacttggaacccaggacctcactaccaggacacaa

SEQ ID NO: 136205 - DNA, 1321 bp, Cannabis sativa
tatgtttgcaggtaatcgtggaggagatgatgacgtgtcacgtcattttgtgtgtgatacattattaacgttatttttgtaaaaacttacctaatatagtatattcctaaaaaaatccctaaaaaaaatatacccaaattaattatgtattatttcatataactaaattttcaaatcaaagacaaatattgcaatggataccaaaattatatatgatttatatatatttatatactaggtagaagttacgtggcgagacacgtaaatattaattttatttaaagtttagttatttatttttattgaaatttctgtaactaaaggtaatggttatgtgaatgatttgttttattagagtaatagttgtgttatttattctcaaaaaaaaaaaaaaaaaatagttgtgttattatatttggttagtaaaatataattgtgtatatataagtcataacaatatatgaaaataatatttattatttacttatagaaaatttaaagaaacaatagatgtgtttgacaaaatttaaagcaaatattatttaacaaaaatttaaaaaaatgtgcgatcttaaaatagaaaaaaaattattaaataaagtcttaatatataatattattagaaaaactaaaaagagtatagtaaaacttcttcctaatcttccatcggctcagctgcttgaatggtgaattgattgtactttagactcattgttcgttttgaatctacatacaattgaattctccatgttttctccgtagttttttggataaacaacctatatttctgtaaaaataattattaatattatttttatgatgattaagataagattcattattcgatgactcttgctcttcacatccataatataaccatgtgcatttatgagtttcctaaccagtactcttattctcatggaaagtttttatttttttctcttactaaagtaattcttaaatccaatgaatactataaaaaataataagaatattaaaaaaaaatatacacattattatatactcgctatatcataaatttataaatgagttcacttagttcagctactcttaactcacccatgaaaatttcccatacgagaccatgctaggaatgcagggcctccaaagaaataatccaaatccttactgctcatatgaaatttctgtataagaaaagtgtaaaacatcaaaaaagagtatcagtgtaggggcactaatgaaatttaatttaagaattaaatatcaacaacaactaagtacagttctggcagtgcattgattttgaatgtaagttttgtgaagaaaaaatgagacttgg

SEQ ID NO: 136206 - DNA, 704 bp, Cannabis sativa
tgttagggtttagtttttgtgtagttcgaattgtagagtttatttgagttagatttagcttctagcagctggttttggtgtatgggattggatttgtgcaactttgagcttcgaaacctaaacttgggtctttaatggcatatttgaatttagtagctttttctaggattttctagttggattatgttgtgtatacattgtttaggtactctggaaagtttggtggcatttggatgagttttgagcaagaaatgaattgttggggaaaacctggtgcaaaccagctaaccggtttgccagggcctgtaaaactagttagctggttttggcagattccccgagcaactcgttttctcaattctcgatcattcaagtgccttagttgggtgtttccctatttcctgagttagtgtaatccctggtgaatgtaacagagcctagagttatgggttcaacccgaattaggattatgagcatgtgattacccaatttcgttatgtgattagggtatccatccagcacgagacttttcgttcaggtcaaccaacacacttgaatatggaaagaaggtaagaactgtgtataatgtgtaatatgattatgcgaatgtatatatgcatgatatatatgcatgctgtgtgtatgactgtatatgttagggtgatatcatagcgacacaactattgtgtcagttcagcagtaca

SEQ ID NO: 136207 - DNA, 692 bp, Cannabis sativa
  modified_base (370)..(371): a, c, t, g, unknown or other
tctctttcttagcctcgggcttctgtagctgtggacagttgttcttgaaatggcctgctactccacattggtagcaaactctagaccaacattcacccaacttatgtctcttgcattttgggcattcagggtaaggctgccaaaccttatttctgccccgacgaaagccctgactattttgaaactttttgtttggacccacaactggtggtccatctagtttccttttacggtcattggggataaagcttttactcactccaataccagatgaggtcttccacacgtccttcctctgagtactctttttacgaatcaggctttcagccccctcagcagtgtgagctaagtccacaatctgaggataagnnttcacgacccctgattgtttggctaccataaccacatctctaggaatatattcttcaactcctctgataaacttagcctttcttgtagcatcactagccacttcatcagaagcaaacttggccagcctatcaaacttggtagcatattcagtcacagtcatgctaccctgaactaatcgtgcggactcttcaacttaagcggcaagaatggattcattataatatttcttataaaatagtgccctgaatacatcccaggtcatagtattcacattattaccttgggaaacaatctcccaccatatccgggcatcatctcgt

SEQ ID NO: 136208 - DNA, 1632 bp, Cannabis sativa
  modified_base (961)..(967): a, c, t, g, unknown or other
acattcattttaacacacacctcatcttatcctactttctcaaccacacttttatattctaacattatgttcaaaaagtaatttttcttttatatttagaaaatgtttatttttaattttctactacaagatagaataaaatcttcaacaacgagtgaagtgattgaattatgctagtggatggactaaatatagttttttaaaaaattatgagttattcattcaataaatacagatttattactataattttttcgttttaaattattgtgacaatttaaaattgattactattagtataagtccattctcaagttatttataatttgtgaatttatcttaaaaaatgattggttgaattgtattaacacataaatgtgcataaatttgtgtctccacatattatattagaattttatattttaaataaaatttaattttaatataatatcttatttactatccataaaaattatgaattatattttgaccttgtcatatattttgttcacaagtttatttcatgattatatgtttaatatttaagttctattaaatctttaactgtttaccgagattcttaaaaatcgaattaataaaagattaagctaagaaaatatgattattaagtaaagaagataattttttttcgtgattgcactacaacaaaattaggctttagagacagtttttaagggctttcaacgtcaattttggcaaaatttactatcaacgttgttccaggcgacgttgtaggggtaaatacaaccgccgacataggggccttatggtgttggttattataaaattatcgacgccatagagcccctataccaactgacgctatagggccctatggagtcggttattatgaaataaccgacgccataggatcttcctataattttttttcagctttacaattttgtgttttagcaaattttttatatatatatatatnnnnnnnttattaatataattaaattaagtataaattacatatgataagcataaataaaaattaaattgaaaagttaaataaatacacattagcattgggtattgatttgagatggtgcagattttacttcgagtatatatgatggggtgcaaaaagtgaggtgagtgaagagcacttagtagctttatttgaatggcataactttctcatttcttaactaatttagtaatgtgatcacttatttttatataatttttcaagaccaataaaatgaaacaataatttaaggactaggataaatagaaaaaatcaaagaaagggttaaactttgcatgaaactttgtgaaaacttcgaacattaataacttttgatctggttgtctaaaaaaattctcttttgaatactaaaatcatattatgcactccttttacccaatcgtttgtactttattttactattttacttaaaataaactaatagaaaattcttatgttaagtaatagaatcaatgtttatgatgtatttattaattctactacaatgaaatgtgcaatactattttcctattatatctcttctgtatttaaataaaatcatagttgtaatacccgaaattaagaaaaagattagcaaaatcctaattagataattatgagttaattgaggaatt

SEQ ID NO: 136209 - DNA, 1230 bp, Cannabis sativa
tatatatatatctaaatttaaatatctattaatttagtaattaatatcttttaataagaaaatagatagttttccatatataaaaaaaacgtatagttattatttttcgtttgaaaaaaaaaaacatataatatataaaaatcttattttttgaataaatttaaatgcaaaataatttaatagtagatgtttgaaaaaaaaaatatcaaagtatagtctttaattttattttctatatatatacacactcatactcatacgtaacacactcaaattattattatttatttttagtttttctaattaaacaacacacacaaattatagccactatgagttcttctatgtataacgttttcttctccattctcataacttttattttcttcacttcatattgccaaggtattactattttcacaattgaagattttgttgatgataattattatgaccatactaaggtacacaaattctctcctaattttctttttctaatatcgtatttggttgtgttatacatgtaattatttattagttattgaactttatgtaggcatttacgaaagcatgggagaaatcgtgttctacacgaggaaccgtagttcttatagttcctcgaaatagaatatatcacgttaatccaattaagtttgggggtccttgcgaattcgatcatctcgtatttgatattcatggagccatagtagcctctaatgacggattagactatggtaactatggtaatcgatggcttaactttgagaatgttcataatttaattgtccaaggtggtggaatcgtagatggttacgctaacgagtggtggagatgcaaagtaaataatttataataattttgttctgagtattaatgctaattataactttctattccatctttttttgtctttgtgtcgaaaaatatatattggaatattattattattttcataaggctattctttattgttacaatattatctctataaattttgaatttttttgaatagtttacattatcaaaaacaaagttctcgatattccagtttaccatgtgttttttaaaaactttaaacttgtttttaagttggaacatggtaaactttaaagaaatattcagcatgtattttcggatatggaagttaagaaagtggttgtaattagcacttctactttatttttgtttttctttttagtataaaaaatatttattttgtttttttttttg

SEQ ID NO: 136210 - DNA, 1666 bp, Cannabis sativa
aaaataatttccaacaaaaaccacgtaaaaaaaaccctgtgttcatagttttactttgatagcttttattttttctgtgtgaaattgttattgtgaggctcaaatttggttaacgaaatttgcgttaacagtagagcctctatgaaaaagctcaaaaaaaagcctcctgacataaaagttatggatgacgtcgaagaaaataatcctcatgaagtactcaatcatcgccctggaaaagagccattgagtcctcagggatctatcgattcatcacatgaataggctgctagctctaggaaaacccagtattggggtcttagcttgaaggactgaggataaacaacaactggtcatttcctaaccaggttgatgaggatggcacctacgacccaaccaggtacataccaatcgttgaattagaaaatcaccatcttaggcgtcgattggaggaagcaaaccggcgtaatttcgagttagagcgtgaaatagctgcagccagggcagcgcaggagaatagtcctcaaaatcaacctgatcttggaagcagagattcacaaggcaaacctcgcaactcgcagaccaagggacaagagacaacccagagatattcccagaactctcaggagaggcaacctgaggaaattgaggaaagtttgggggcgcagcctgggatatgtggagcatcagacgaagatccccaaccctctctccaagttcataagaaaggaactcacgcaaatagaatggccactcctacacgtggccaatgataatgggctgcaaattgggcctcaaaagcccaacagaatgtttgaataatatctagaatcaagggcactttggtcttttgttaatatctaactaactatacgattgctaagggatttgaattgtaaacctagggtttaaggcttcctctataaaggccttaacctttgactaaaaacctaagttgcctctaagctagaaacctgatctcaaactctaagtgtctgataaactctctctttcacacgcctaccctaggctatccaacacttgagttttgtcaagcattgattcatacattgtaatcctaagggtactatagcagattccacctatatagcgatctagatagtaattcccttgctatgatataattaaaaggagagtaggtcattacccgctatcacaagggagtcgaagctctataaaaaaatcctattgtttattgcttttcattcttatttgtgcacacatgtagcaagcatcagatctgcacgacctcgctgtcggttgatcacttttcgagggtcaacaatataaaaaagcacgtgtatatttacctatacattattctggtggacccttatctattttagcattaagaatttttttttttttgtctaattttttcatggttgagtatgttgtaactatttaaaaccacttgtaaatgttaaaatagttacttactattcgtctaaaaaagcgtgcgtacaacaaaatatgcaaatcttatttttaatgttgtaaattaattagaattttttaaaaatttacaaatagtcctaactaactataatataatcataaactatcatgtaaaaatatctataaaatttcttttatgtgccgaaacacccatttagggctcgtttggtacgccgtataagggtcgtat

SEQ ID NO: 136211 - DNA, 766 bp, Cannabis sativa
tcttttctttttgaatccacaatgattcactttatttgagtctgaaatcgctcttccaatttatgactcatttcacaagtttggatccactatgatcttaattgttcttgcttatgacaatgcaagtccaataaaagtgtaaccctcataatccactttttcttatctcaaatatgagatgattatctcttataatccaatacaagatgtaacttttcaaaatcaatcttttattatctcataaagtgtgagatgttcaccaccaaatcaaaaaagaattcaaaaatattctttattcacaaaatagatgataataattttcacatcaatagtaataaataataatattattatattactatccgtattattatcatactatataactcatatattaatataatatgcatgttaataatcaacatctcatatgtaaccatacacatagtattaacattaaattcatatgttacatcatgtaacgtatatacatatatatcatatatcatatacacataatatatatattaattacacaattatatatgttacatacttcacacatatatataacatttatttacacttaatatacatgtatgatatataatatatactatatatgcatgtctctagaaaataattatttctacacatttaatctcacaatatatatgtatattatattatatctcatcatatatacaatacttactcatatttcatattatatattatatatctcatatttattatattccatacg

SEQ ID NO: 136212 - DNA, 1097 bp, Cannabis sativa
tgtcaaaccctcccttgctccatccatgtctactactctcaatgtggtaatatcactccgtatggttgtcatctcatgttgaagagttgaaaattggttgttcatttcacctctcaaggtggtgaaattggaagtcatggaagtggtaaggttggcaaaagcttcttcaaggttaaagtgaggagcttggggtattggaggcacttcctcttcgccttcctcttcattttgagcttggacatcttgctcttccccttcatcttcacttgggaccaagtgttcatcctcatggacatgggacattgaagtggtgggaatccacttcttttcctcttcatcgaatttgtagcgcatgaatttgaatgtgatctcaccaagagtgtcgaatccttgggttcataaacaatcaatttcatcttctattgggattcctagaagtgggaataaatagctaaggagataaccatagggtaatgccctttttagggaaggtttaaacacttcatgatggttaaggatagatagcctaggttaatttggttttcgcccattataagattgtataggagaacttgatcaatggcacttacctcatcttgatggcctttcctaggaataagattagagcatataaaggcatggactattttcccttgaagggtgaggtaggttcttttttgttttaacctaaaggagttacctacacacacatgattattaaagaggttaaaattgaaaaaggcattatttttaaggcgaggtctatggtcaagcaagaggccatctttaggtgcattaagaaaatcattaagcgagtcaatagttaactcaaaatgtactcctttgagatctcccctaacgctatatggatcacattgaaactcaatgcaagcatagaaggctctaactaacctaggatatatatttgtttgaatttctaacaatttttcccatcccatacgctcaataagaaaattaaagttgacatactcaagggcttggagatcacattgcttaccattgatgacatccctttgagagtaatcttccttgaacttccttgcaatttttccatgtgagaagagatcatgctttgc

SEQ ID NO: 136213 - DNA, 636 bp, Cannabis sativa
aatctagacttgaggcttcgacctaacccgtagtaagtgtttgaatccaggatccggacccggatccgtatccagacccggacctagacccagaccgggattcaaacccgatcttagaatcagaataggaatcggaccaggtcaaggactagaacgcagacctgggaagtagcaggacccaaacctaaaccaaaaatcagactagaatccataccgagacttggacacggatcgggacctatgacttgggacctaaacaaagaccgggacctggacccagaccgcgacctggacccagaccgggacccagagccagagccagagccagaccccaaaactggggctggacccaggacctaagaaccagactcggaccagggatctgaaactcagacccacactgcgagtgggacccaaaagcaaaccaagacctggactcagaccaggactcaagacccgaacacgaatcgaaacacaaactttgacccggatcgacacctaggacctggacatagatgggggacccaaaccctaaaattggtaccccaatctgggaccaaaacttgggcctcgaaacttggatcaggatccgggacccggccgagacccaaatcatgacctaggacccacctcggg

SEQ ID NO: 136214 - DNA, 1145 bp, Cannabis sativa
  modified_base (1073)..(1099): a, c, t, g, unknown or other
atgagaagcaaagcaagtcttccaaggcttctaaattgaaaaagtagggtcaatttttagggaaactttattgttcttggttgattttcatttcaggcaatttttagtttttttatgtttataggtaccatattcattttatattctggaactggttataaactttaatagcaacagtgttatgattttacatttaattatgtttgtttttttaagtcgtccaattatagataaactattatgcaactgtatacaaactatttttagtattcaacatacttgttatttaatttctgacatcttatctcaatatatttattacttaatatgcaactttttccttctccttactatacaacttataaaaaatcatatctgacttttaaaaaatatttctattgaaattatttttgtaataaattcttaataagtgtcaaaactatcttgaaactattatgcaactactagaaaactattaaactttgcaaattaatagcaatctatcaaatataacatttcatcctgtgtaaattctcatagagacttaaacaattcaaataattctggtgtatctattttatggcttaattgttgcatgtctttcggttgtgaccgtgttgaccacatttgctgcacctaatctgtttttttgtatcctaatcagctgtaaatcttcttttccttggtcttccagatcttattttctggtttggtggcaaaacaaggatatcttttatgttctgtggtacatcccatgttatgtgattgtgtactgaatatgttgagtcgctgtatgtttcaagccatgttcttgtcgtgtaataatttgaacagtagttgtaaacattcaagttcatctcttgtatcacagcaagcgcatgagcacacggtaatttgtcaatttggaatcggttgcaactgcatggtttctcctttagattgatcacccatgatcttgttagttctaccacttcgaacatgctctcgtttattggctttacctacaaattaggtcaatgtaatcaattgtcaaattgtacaggaaactaaaaaacaactattaggaaactgtnnnnnnnnnnnnnnnnnnnnnnnnnnnacattttctgtcaatgagtccacaaagttgttgactagcttcttct

SEQ ID NO: 136215 - DNA, 879 bp, Cannabis sativa
cttgtagtaccaaggaaccaatcctcatgttgtgtattgcaacttgatttttttttttttgaatattggcaatgtgtttggattaatggatgattagtaacctgtcacaaaaactaaagttattctttttattaacatataacattatttcaaaactatatatgttaaattggtaccatattttggaatgaagtataattgcattcttctatgcacaatggtaactcaagtataaaattgtaacttttcttcaagtctgtgtaaaaaagcatcgagttgttagtcaacatgttgattggtggctcacttttagctacttggtaggagatctcaatattgtcccaactagtgtttatttcatttttaatcaaattttccagatcaaataatgaacaattttctagaatatgtacaccaaccactttgttatttgagtagcagttactttcattccactctcatccataatgaattaatgctttaataaaattcattctccacgaaaattacaagtactaggtcacctcctgaagcaaaaagaaaaattaaaaatcattttacaagttactttataagaaatttaaaataacatgtttctttccaacacaacaaacacatccatattaaaatgtaaggtactaggttacttttagaagcaatataaaaccctaatatagaactaacatgtgacttttttttaagacatggcatttttttgttataaattccagtcacaacaaaacaaacaagcatattcatgtaaggtactaggttactttcaaaagcaataaaaaccctaagattgaactaacatatgactttttttcaagacatggtaatttttttgttataaattgcagccacaacaaaacaaactca

SEQ ID NO: 136216 - DNA, 1041 bp, Cannabis sativa
  modified_base (27)..(37): a, c, t, g, unknown or other
  modified_base (87)..(105): a, c, t, g, unknown or other
tatacattaaacaatcatgaaataaannnnnnnnnnnatgcaacataaaatgttatttttgttctttattaactagtaaatctgatnnnnnnnnnnnnnnnnnnntttagggcacaaaacccaataacttggtcctcttactcacaagctgtactccacgtgacattaattttgtctatatggacatgccacgtcacgtggaaaaaaattgagataacaattattataaaaatattttaattttctactcaaatttgaaaaggataaccttagtatattaaattatccaaaaataaattaaatctataaatataatacaatacaatcgaattaaaaaaacatacaatataacacatataacatatgccataaaataaaaaatataaacattaacttaaaaaaattactaatgattgtaaaattatatatttttattttacaaaaatatttcaagttttttattactaagcaactcttttcatcactaactattattattaactttattataaatattataaatttttacaaaaaattagagaatattacaattttacattaacatatttaaaagtttttaatttatactatcacaattgaaataacatacaccatataaaaaatatacaaactcatatataacatcaaacagtttgtaaattaaacatatatttttactaattaattccagtaacatatattttataagtaaataaatcaaattcaaatttaataaaaaatacgtttcacaaatataaattggtgaaacactttctccaagcttcaaatcaaaattgtggccaaaagtactttaaattccaattttattaaaattaacaaatcaatattaaaattctaatataaaaacatatatatatatatatatatttataccataacatcataaaaaatactctaaatactaaaaatagcgatctaccattacaaaaaaaggcttatctcggcaggctcgcgtgaacgtgtcaagataggcctaaattttttttaaaaaaattctgagcatagcaataacggcaggcc

SEQ ID NO: 136217 - DNA, 528 bp, Cannabis sativa
gttaagcttcatattgtacttccctcaatatttcgaagcactccaccaaggtctgtagtatgacttccactttcaaccgatttcacaaacatatcattgacgtaaacttccatgatccaaccaatttgatttgcgaacatttcattcactagtcgttgatatgttgccccagcattcttcaacccaaatgacacgaccttatagcaatatagtcccatgttggttacgaggcttgtatgttcttaatctgggacacgcatttttatctggttatatccagagtatgcatccatgaatgacataagctcatgcccagcagttacgtccaccaactggttaatcattggtagtggtaagaaatcttttgggcacgccttattcagataagagaaatcaatacaagttctccaagttctgtcagaattggctatacacgagggataaaacaactcgcgtataaagtcgttgaccaacaacttatccacttcctgtttgtgtgccccttgcctctcggaatctaagggcctc

SEQ ID NO: 136218 - DNA, 870 bp, Cannabis sativa
ttgtaaccttgaggggccgtgttaggagtattagttagagtgttacacctgtgttagttatttctatttgtaagtcttaacagcctgttatgtactacttgttctaactgatttcagttagctctaactaattctccatgcttgtaattgttggctatataatgccaattaccattaccgatcataataagattgctctttgttatcaatcttgtctttcattatctttctctctctttccctctcttttcctctttctcttcgtttctggtttctctgttctacttgttctttgttcttgagtgttcatcaatggcgaagagattcaacatggtatcagagctttttcctccattaacggctaacatggcaaacgttggagctagaggcaccaacactcagagcaattcgattcccaacagaccgactgttcaaaccaatggagcttcaaatcccagtcgagcaagaaacaactctgatgagttcaatccggtatatttcaatcacaatatgtccattagattaaatgatcacaattttctcttgtggaaacagcaggttctagctgcaatccgtggaaataggttacaaatgttcattcaagatcgaactcctcctcctcagttcttaaatgacaccgatcaagcctcgaacaacttcaatccagcttttcttgaatgggaggttcaagatcaacttctggtttcttggcttctttcttcaatgacagagagcctcctcactcgcatggttggatgcaacacagcgagacagatctggagtgctcttgagaaacattttactctgcaagtttcatccaaaattcttgagtttaggacaaaattgcagaagcttagaaaaggatctctg

SEQ ID NO: 136219 - DNA, 1895 bp, Cannabis sativa
agaaatatctgaaggcagacgccgattcttgcgagaagcagcctggccagaacctcccaacgtgtcctttattcctatggcaaaacctttgtttttcacccaatgtcacaattccttttgaaccaggtgacttggattttgaaatatgcctcccaagccacgtacatctaaaactcctcaagatcccagcgtcacctttgaggttgagttgataaaatcgaaggtgagatctttctcaggatatacgagcgagatgcggaaaacctgtggaattgaacttgggcaatcatgccaagttagatcactacaagagggtgagttcagttgctaccccctgcacactttgccagcagtaacccagggaccagtggtgagaccagtaccagtggttcaactagcatgggtgcctggagccttgagcatatcagtgtaggggccacccttcctcttcgggactacttcaaagactatatgaaccacattggacgtgccccattcaagctgactcccatctcctacaggattcttgctagtctgaaagtcttgtacaaaattacgagctgggggtgtcccactctattagagattgagtatctttactcagttaaggtcgttccatcatggaagaatgctacagggggctttttctatctctgtactcaccccagcgagcctaaaattattgtagacttggcaaataaagtatccattaagaacaactttttctggacgtttggtctctcccccatcggcaaacccatgtttcgcaaacttcgtaagtgattgttctcttcttacttatttacattaatcttcctttttcaagttttatgactaatatttttttgttctaacaactcttttgacaagacctactcttacccccgagatggttagtaggcataggcgcctgttaacccttccctacggtcttcggtcatgcagcttccttttgagcgaggttaacttgcgatcggtgggctttctcgctgataaagaatatatttgtgattacaagattcccaggtattcttcttggcaacagattattattctgcccgaatatcaagcgtggcatcgcttggctcaagcacaataccttcaaagtactgcccctcgggaatctcgtgaaggagcatcccaaggtaatcaatgtgattggtctcctactgtacttagagctgagcgtagtaccttagtcacctttgaagactcccgccttaatttttatatttggaattctcttcttgtggaccgcattgctcataagtttgacagctggtatcctagattccacgtccaagttaactgtcacgagtcattttatggtatagccgagcaatcccgtactatggaagatagggcaggtcacataaatgcgagctgggatttaggaccaattgagccttttgatatattcaaaattacaagctgtagggattttagcgaatattacggtccttctaccccttcatctagtgatagctcgccttctagtgattttggtaaatcccttaggcagaaagttatactcctcccttttttaattggcctttataatgattgtaacgcctcgtcttgttttgcagacatgggttatgaagacatcatggaccgtaaggggaataaaaggacatccaaccttagagtccctactactgccgaagtggttcctcctaagaggcaaaggaaaaccacctcccataagaagaaatcacttgttgagcctatcgatctcgaggtttcgaacaacgagatccaagagcaagttcctcctccagttgttcctgacgccaatgctcctcatcctgaggcgacccccactactgcttcttgagccaggccattgagaccctgtcggtcgcagctggggaagctgggtctaaatttgccca

SEQ ID NO: 136220 - DNA, 1994 bp, Cannabis sativa
  modified_base (694)..(694): a, c, t, g, unknown or other
ttaaaggtggtcatctaacctgagtacttgaaaattttatccgaacctttgggcgtggtccgcctagaaggccattcacttaagagcaaatgttcttttataccgtacttaatatggtcatccgacctgatacttttataggtagtattttcttaaatgttccccattccaataccttggtaccagaatgagttgcatcttttcatcacacttaccctatttgtatgcccctgattctagaacttcgaccgtttgatatggtccttcccagtttggtctgagcacacctaccgtactgtctttggtgttcaaaaatactcttcttaggaccatatctcccacaaataattttcgagctttcacttgtttgttaaaatatcgagctacattttgctgatgggctatcagttttaagtttgttgtggttcgtttttcttcaacttcatcaagtgattctacaaggagtacatgatggacctcttggttgtatgttaatcttctatgggatggcggttcgagttctacgggcagcatagcttcatatccatatgtcatgaaaaatggagtctgtctggttgttgttttctcagttgtgcgatatgaccacttcaggaagttcttctggccaatttcccttagcatcttcaagcttcttctttagggtgtccttcaatgtcttgttgactgcttcaanttgaccatttgcttgaggatgtgccactgcggagaaactttttatgatcccatggttcgcacagaaatcagtgaaggattgactgtcaaattgtttgccattatccgagactattttgtatggtaatccgaaccggaaaattctgttttttacaatgaagtcttgcacttttttggacgtgatggttgccagttgctcgacctccgtccacttggtaaagtaatcaactgcaaccactgcgtactgcactccgcctttgccttgggcaactgtctgatcaggtcgattccccaaatggcaaaaggccagggactttgcatctgagttagttcgttgggtggtgcccgatgtatctttgaaaatatctggcgtttatcacatttcttaatataggccttggagtcttcaatcattttcggccagaaataaccttgccttagaattttcttaaataaactctgcccagctgcgtggttaccacaaaatccatcatgtacttctgataaaagtcgtgcagcttcttcttgtgttacacacccaagtaatggcatggaaaatcctcttctatacataactccctctaccatgatgcatcgcgcagcctttctcctcattttctgagcttcgtttctattgtgtgggagttctccagcgttgaggtaggctgctattggcgtcatccagtttggggatgtatcaattatttcaacctcttccgtgtcgatgatactaggttttttgagaaactggataggaatcaaatttgctttatcattcacattactgctcgctagttgagctaatgcttcagtagtcatgttttcttcccttggaatttgcttgagagcatagcttttgaattgtgtgagcagatcatgtattttgctcagatatgctatcatcttttccgcttgagcctcgtactctctggatacatgatttaccaccaactatgaatcgctgcagatctcaatgtgttcggccttcatctcatgtgctagttttaggccggcgattagagcttcatattcaacgtcattattggatgccttaaatccaaatttgactgcaacatgcaggtggttgacccccgtgtgacaagggagattcctacactggatagttgatctatagccgacccatctacatgtagcttccaagtcagcctgtctttactattactcggttgaggtatttgtactggctctgggttgttttctaaaatgctctcttctttacccgtacattcaactacaaaatctaccaaggcctgacctttgatcactgttcagggttggaa

SEQ ID NO: 136221 - DNA, 613 bp, Cannabis sativa
gtttatatttttttaataataaagattcatcattttatgaggtgtaaatagaactcccctcggaactgtgagcgttggattgtacctgtgttaaacaagattaaagttaatgttgatggggctttatttgaacaagagggccggtttggagtgggctatgtagctagaaatcatcatggaaccatagtagaagctttcaagaagggaaaggttgggtatgtccaacttgaaattgctaaaatcataggcatcaaagaagcgttgagttggattgtgactcatccttgggacagtgtagtgttggaaacggatagtttggtgtgtccaagcggtccaaagtaaagtctttatgtcctcacagtttggtcttattgttcaagatgttaggaatttacttttagctttatcttttgttgagttatgttttgttaaatgatctacaaacaagttggctcattgtttggcaagagactcttgtttctcaacaggttgtgtgcttcagttggaggattgttcctatgaaatgcattctattattttgagcgagtttattaattaataaatctcttaattaattaaaaaaaaaaacactctgttaggttatttttagtat

SEQ ID NO: 136222 - DNA, 539 bp, Cannabis sativa
tagttagggtgttacattactgatatagcattttgtattcatatgtatttttatgtgagacttttggagtacatagctaagattttcattgcttatgaaggaacgtttactaggggtcatacgaagtttatggggataattatgtataagaaattttgttgagaacatcttactttttggctaaccatttgagttgtttcttagttctgattagcttacttcttactattttttttgtttaggatacaatttgtatagtgtttgggaaagaagataaatgagtaaaaaaaacccaatttcgggttctcgtccttaagggctttaaggatctgtggctcgatccttctgcatccaccttgaccaagaactgccaccaacagtggaggagctccagtgagcatttcagccagccactgttcctagcattctgggcttcgaatcttgagactcaaaacgtctgtaaatataagtttgagtgtaatttttttggtataatttatttcttgtaattacttgagttggatttgtttgtgaattaa

SEQ ID NO: 136223 - DNA, 511 bp, Cannabis sativa
tcaacttcccaagggatttcgactatccaaatccctaaaatataaaggtacctctaatcccatagattaccttgattaatttaatactataatggaagtggatcaggtaccacaacttgcaaaatgccgcattctcgcggcaacgctcgaggaaaatgcccacgattggtttacccaattgcctgaggcctcgatatcgacatggaaaacctttgtcgacttattcctcacgcactttcaggccacgatgacctataggcctccttatacaactcttgccaacatcaaacaagagcccggtgagtccttacaagactattttaaacggtttaatgcagaagtaacaaaagtcgagaaggctcctgagtcttcgcttgtttgtatgttgataaaaggtattttgccgaggaccaatttctggaaggagttacaagctcgaaggccagaatcgctagtcgaattcttcgctatggccgaaccccataaaagaattgagaattctctggcagag

SEQ ID NO: 136224 - DNA, 742 bp, Cannabis sativa
  modified_base (397)..(407): a, c, t, g, unknown or other
tttacacataaataactatatttactctttcgcacttatttcacctaaataaatatttctaatttattttactatttttccatcgaaacaaatatttattttttctaacaccataacacatactctatttatccccctcttcccaacactaattaaattaattaatttatttattttattttgattaatttaattctctaattttacctatatatatggtgttggaataccatttttcatatatctcttcaccccataaacatctcttcatctcttacactcttcactttcattccactcttcacttttaccatttccttaccattttctttctaccatttttatattttgaagaatatgtcatgtatgtcactttgtaatttttatttcaatctannnnnnnnnnnctaatcttttttcaagattattaagaggataatgaagcaaaatgtaactagattggatacatttttgtatgttaatttttcatttatgctaagttcatgaattttttttataaaaaatatgcatttttttactttcaatatcatgtatttttaattgttaaagcatgtttttactttgttgtttattatgcagaaatatgatactctttgattaaatatttttcattaaattctttacatctaattcttaaaatataagtgttatattttgcgtacacatagtttttttgattttgtgtagtttcattaaattgtaacacatttaatgcttaaaa

SEQ ID NO: 136225 - DNA, 518 bp, Cannabis sativa
ggattataggcacaaagccattgtgaaaacacaaagcaaaatggcattgtcgcatggataattaacaaaattaattttctattatttgattttttttcaaaattgaataattatttttttaaaaaaaaaataaattctgaaaatatatttttttataatttttaattaattatattaggtgaatcaatataaatgtcccgcgtgtacataatggtacacatagacagtccatgacatcagttaactgagataaatttgggtgacacctttgctaagagctcatttggtacattgtattaggtcgtattgtattgtattatattgaattaattatatatcatatttttatataatactatgttcaattttttttttttttttgaaaaagaggaaactttattcaaaaaacaagcaagttacaaccaaacaaggcacaggccaaccacaacaacatggcagccacttaacagccagcaaccaccaaaaaaacaaaaggactaccaactcttaattacatt

SEQ ID NO: 136226 - DNA, 550 bp, Cannabis sativa
cctctgtccactcgaattgcttatttcctcttaggatgttgaaaaacggaacacatttgtctgttgaatttgaaaaaaaactgctgagtgcggctattcggcaagtcaaagttttgacttccttggttcttgttggcgatttcatatccaagagggcgtgaatcttctctgggttggctttaattcctcggacattgacaatgaagcgaagaaaatttcccgagcttactccaaaggagcactttagggatttagtttcatgtgatacttcctgaggactttaaagcattcgtccaggtcatctatgtgcccctagcctttctggatttgacaagcatgtcatccacatacacttccatgtttcgtccgatctggtctttaaatatgttgtttaccaatctttcgtatgtggctctagcgtattttagaccaaacggcatgactttgtagtaatatcgacccatatctgttcgaaaacttgtatgttcttggtctggtggattcattttgatttgattgtaccccaaataagcttccatgaagcttaata

SEQ ID NO: 136227 - DNA, 504 bp, Cannabis sativa
ggtaaaagacttttacttaccagcgccagcgcagtaacgaactgcgaactgtgctgtgtgctgctaaaagtgacatttcttgtagtgattgatgagattactgatcaagttcttaatcgaatctccatacatcctagagttgttcctgctattaaggctgcccatgctcttgggtacgtatatatatatatataaataaaacattacttttgtttcttttattttccatgaataccttttgttccttattatacataatatttctgtaatattatacaaatttaatctccaccgaaagaatattgaaacatttaatttggggtgagagaatacttttcagagatcaacaccaattcaaaatgtatgtagatgaacaaggaacaccaattcatgaatggactgatggtgaggaatttgagaaggttctcctcaaacttattgacactggtttagtcttcacaccagcttccaaaatggagttgcagactgatgcttattgggcag

SEQ ID NO: 136228 - DNA, 661 bp, Cannabis sativa
agtgatacgctaaatcacttatcggggacttaaacttgaaactaaaagtttgcctattgataaataacatggtaataccctaaatatcgcaaaaacgggaaaaactacggttaccaaaactgctctaaccggtagaccggttccccaaccgaaattctgattctgaggggtttcctggggaccaaccggagctagttcctcaggtcccagtgaaccggtcgaccagttcagtgcaagaaaacttcaaaaattcctaactcactcaaatcaaccccaaactcaaccaaacctttcagacctgttcaatataccccaatgaacatattctatgcaacagaacaacataacatgctcaaaatcaaaattcaccattaaagacaaaactttgtctaacaaccaaaacaagctaccaataaactttaaatcagcgcaaaaaaaaaattctaacttcagaacacctcaataaaaacaaaacacaacaatagcaaccataattccaaaatcatgaataaaccttacttgaaccctaagaattaacaaagagaatgtgctaggaatttaccttgagcttgaaatcctaaaaaacttgctggaaatccctagtttatgcagaataatcctcaaaccctagctgctctagggaacgagagagagagagaga

SEQ ID NO: 136229 - DNA, 1178 bp, Cannabis sativa
tttaaatttgaaaatttaatttttccacaaactagccttatgattaattttgaaattttgattatttttgtttgttttatttattttgattataaaatgagatattacttattttattattaaaatttggaatgatcttattttgatattaaaatattaataaaacttagaaataatctaatttaagtttcaaatttgccaaccatatcacatttttaaaattggttattattaaaatataatttattaaattaaattataagatcagaaaaatgttagttttaacattttatattatttgatatttattttaattttaattttattcttggtaaagtaacatgaaattttgaaatatttgttcattttggtttgaatagaaattttagggttttcaaccgtaaatttttcaaacttaagatattttgttttatttaattattaaataaaattgataatatcctaaccatcaactatcttatgtttcaaattatttatttttattatattaaattcattacattataatattacaaaaatctaaatttaaaattaagatattatcttattagatatttaattaatttaaattatttaaataaactgaaaatttaaaaattagttagatatttgaatttcaattacaattttatatcttaaggatatttgttagatttttaaatattttttttaaattattctctaataacctaactttcaaattttagttaaaatatattttaaatatttaatttttaaaatagaaatatcttaactcactttctagttatctgttacatgtttgctatgtttgtttatttatttattcaaaaaaatttacaaacttgttatttatttgatctaaattgatacaattaacttgttgacaaatccaatgatctgattttaattatagtccaattgtcaaaagatcttataaatagtttgtaacaggtaaattttataatttttgtcatctgtgtaaacctagtaacatgatagggcacatccaaatcatttgacctgtgtgagcctatatatttacttttaggcttagatgcatataggaaatccatttaagttttgatgaattaaatggaataggttgctaaaataaaatatcacataagatagttttatttaggcccaattagtatagggcttattcaatgaataac

SEQ ID NO: 136230 - DNA, 584 bp, Cannabis sativa
  modified_base (398)..(407): a, c, t, g, unknown or other
gtaaaatattcccaacacatatacgattgtgaaaaaaattgattaaaaagttcttcgaatgtcgaaatagaaaagagtgtatcagtatactcttttatatagtaattgtaaaggcacaaggacgttgtgtgtgctacagtgcacgacatatacgacaaattaaacacccttttgctcttttacggtggagccatatataacaccaaacatggagatattggcggctaaaccacttgaactttacgttttgtaacacttaactacaaaaaccaaaattttggtggcaaatcctactgaactcccattctaatttgctctatacccctctatccaaaaatgacagttaagtgctacggtggactatttacgtgtacacacttgtacacgtggcaaatttnnnnnnnnnnacgtaatattaattttaaaaaatatttataaatatttaaaaaaaatatttttttatgcttttttttcttttttcgttttctaaaaaaaaataatttaaaaattattaaaattataaaattataaaaaataatttaaaagttataaaaataaataaaggatattagcggctaaaccac

SEQ ID NO: 136231 - DNA, 813 bp, Cannabis sativa
  modified_base (581)..(583): a, c, t, g, unknown or other
ttaatgcatgtatttctttctatacaacagaatttatattctttagacactatttcttctcgttcaagacatccaaagcggagatgaacacatgggcagtttttacttttgtcttttttgttattgtcggtgacaattatacaaagcttgaataactaagtttttactcaatagaaatataaaataattaaagcactctgaaaaaaaatgtaaaaaaaaacaaaacaaagcattactgagagtgagatttaagtaacgaagtaaaaataatcaaggagtgacatttcgaaccttcctcttgtgcctgataaccatttaaattattagttaatcaaaaacttagggacaattattattagctaatatatatatagagagaattaattatgactactatgatatatgtattgcatgtacgtacttatttttgtatttttggctattcgaccaaatatacaatttttcacatcactacttttattcaccagcttttcaattgtggtggtatcttcctaagaaattgcttgaacgctagcttggaattggtaagctacttaaactttatttctttatattttatnnntcctagaagagtttgaatatcctagatattcatccatagtgaaataagttctgggattgcatgactgtgatcggatggaaggtaatatttgtactgttaattatagttttgtttatttatattattgtggatgttttaatagattaattgcatgtctaaaattttcgggaacgtctgaattatagatgttatgctgccgaaatttcggtagaaatttcagtaggattagt

SEQ ID NO: 136232 - DNA, 2039 bp, Cannabis sativa
ttctggatctagttttttactgttgttttcaagtttttctaccattttttagcaaccagcttcgcatagtcaactatgtcgaatttgtcgttttcacattctcttgtttttaactctcctacttcttctaattggtgttccaatgtgtatgattatgttgttgcggtgttgttttccagtattgatgtgttgttttcgagcattgccacattctcttgaaataattatgttctttttcccattgtccattgctctttatgagaactggtatagattctatgtcctgtcattttttacaatatttcatttacgtggcctttttttcatattaaaataacagtaaaataacactacaaaacaatcacaaattgttttctggtgttttttttattcttgggcttatccctataattagcaataaatttgtgttactaagataaaaaaaaaaaaaactttaaaacaatcttgatttttatattgtacattattaatcgtttcttaggaatgatatatgtgaatatttttctttttaaaattccatgtatacttaaacaatttcaaattatattgttttaagtttttttaatgttcagatctaaatttgggtgtgttttttctagttttttaaaatttaaaataatgtgggtttaggtgtgtttacctctgttgtttctttctgctgtaaatattgttgttcgttcttgatttgttgttaatttagtaattttttctcttcactagattttatggttttaccctggtgtttctatgattccggtgttgatttgtttgtccccaaccacgaaggagaggtttcgtttgtgttttgttactgtttacagtataaaagtaaatatattgggcctcggtaatataaaagaaataaaaatgggcttagacagtaaaaatataaagtttgtcgtgtcccagtatttttgaaaacatttggtaaaaaagcagtatttttgtaagtttccccatatttttgtccttgtaattatctaattaataatagattaattttcttattctttaataaattcatgtgaaaaatgttttgaccaaaaatgattttcctttctgatcaaaattatcagtcaaaagttcttgttatttggagttcttcctttcactgttcttagtgaatgctcttgtacgctattttctcttttttatatatgctaactttatttcaatgtagctacaatctcgcttataaattatcctcagttgatacatttagatgattattttttctttaatgtaattgtgtatatttatttcgacttaattctcaatgtcggcattttgtattttggactagctcgttcacatgttgatgtgtctaagcttaagcttgatttttatctcgaccaaatttttgatgtttaatttaataggttcctttcctaatgatcgagatactatgggggttgctcggggtgttaggggtatgtcgatcttccagttcgctaggtcatttatcagattgaccaccttttttgtattcacgtattttggtatatccccctttgtttttaactaatctgtcccaaacataatttacttatacatcatgccttagtatctcggtttttccttatgtctttctttggacttgagcttataaggactttgtttttacttgtctcttgggccctttcggttcttttaggtttgcgagcctttagttggcccatgaaaatcttgttagggtctatgccttaaaaaacctataaagtatgtggtatagtttctctaaatgaaaagatctccgcaaacgtcatttctagaaagttgttcactcgtggttgccaatcctgaaaggagtcttgtggaatgatagtcaagtcggaatggagttcccaaatgactatcatgtccactccgggtctagttctcaagatacctagttgttacacctaagattcggctgccacctcaatgaaggtcacgtgtcaagataaagggaatgtgaatcgatgccattgcttttatggaataactcattaattacgtaagtatcagagtatatttgt

SEQ ID NO: 136233 - DNA, 758 bp, Cannabis sativa
gatgcaacaagttgcccctaaaaattgtctctaataattcgcgcctaaaagtactattaggggcgacaaaaacatcgcgtgaaatcaggagcgacaatgtctcccctaaaagtaatatatgaatttttatgtttacttttaggagcgacaatgtcgcccctaatacccataaagtcgcccctaaaaattcatctcagaaaagttgttattgacttctagaggtgacaatgttgcccctaaagatttttaaattaaaaaataattttttttttatattatttgtgtttgaacttgttttatcaggatctgaatttactaacatgtatgtttgattatatactataatctaacatcttaaacgtgatttcttaaaataataaaataaacaaatataatgttctaaaaaactttacatccgtggcagcaaaatattatggctccttctgttcatatcactaacccttgtttttttttgttgtagagtatttccaagatctaaacatggatctcctttagtgatgaaattcttcacgatcttccacataatgattgagtattgacttgatatgagtggacatgtactctatcactatgggacacgatttcaagagggaagaagagaagaagaattcgaatttctaaaaaggctctttatttttcagttatctaacagaatagtctgatgtcataataatgagagtcatcttattctttatatatgattttatctacgattaggatttaaattatatagaatt

SEQ ID NO: 136234 - DNA, 962 bp, Cannabis sativa
  modified_base (933)..(934): a, c, t, g, unknown or other
tatatatacgttatatatgtatgagatatgtaacatatacagttgtgtaataattaatatattatgtgtatgttacatatgagatgttgatagtaacatacaaaatatattaactagcataagattattatttgagatttataattttatgcatgagagttatatattaattttatattgatgtgtgagttatatagcatgataataatgttgatagtaatataatattatttattactattaatatggagattatcatcatctatattgtgaataaagaaaattcaaaattcattttctaatattgattttgagaaaaaaaaaattgtgacttgtgagaaattacattctttgagaattaaaagtgataattatctcattttatgagataagaaaagtaaactacgagagttacacttatgagaatattgtcttgtcataacaagaacaaatagatcaaaagtaaatataaacttgtgaaatgagttataaattggaaaagtaattatattagactcaaataaagtgatcaatgtaaattcaaaaaattgtgaaaaggtatacaagcaattttgaatctaaataatcaaagttgtgaacaaaattcatgagaattttgtaaactttagtgtaatatttgggttaatcgcattaatgagataactttaaaataatgggtaaaataatcatattattttgtaaatggtgatgtgagtttgatatttagttttgttgagaagactaagaatatcaaatgacatatttctaataatgatctctaagaggcattttagaaaaatgattaaattaagttatttaaataatgtatagattaattagataattaaattggtgaaaaatgattattataaaaatttcactttatgctagaaatgtaagggtgaaccacaaatttaatcaaaatatgttganncattgttgattaatttatttgattttga

SEQ ID NO: 136235 - DNA, 810 bp, Cannabis sativa
cttggctcttggagaataagtgattggctatggaagaagggaaaagaaggaagacaaaagtttatggagcttagaggtgattttagcttaagtatcaacaaggtctaggaagtgttttcttgagagtgttggcttctttgtgaagaaaaaaaaaatgaaatgagttaggctctatttataggcctcctaaacacacccctctaacccatttcgtaacaatatattaactctagttaaaaatttaataaattttgaattaacaagctatacccaatcaaaccgcaactccctcccgatatatatatctcccttcacaatcggtacaccttgaccaagagtgtagcactcatgaccacattaagcttttatctaatattttaagtctctaaattccacgcagactaagtagactaagtttaaattttaaaatttatattcaatcaccctatattatctacatgtgataataaaaataatactgataagctatatcttttttttatatatacatatttctaaactcctcatgcataaaagaaggcactaataacgatgaagaataattaccaagaccatgtgatagtcttgatcaacaactttgatacttttagttccattctcctcaactaagaccttgcgtgtccttttcaacaaaaattaacactatttcaaagccttgtcataagctcctaactctactattgccatttgtataataataaaaaatccaatattcacttaataatacacaacatgcaaataataataattgaaataatactaactggaacaacaataataacaataact

SEQ ID NO: 136236 - DNA, 2356 bp, Cannabis sativa
  modified_base (72)..(77): a, c, t, g, unknown or other
  modified_base (798)..(808): a, c, t, g, unknown or other
  modified_base (1220)..(1231): a, c, t, g, unknown or other
  modified_base (1917)..(1919): a, c, t, g, unknown or other
aactggatcgatattgatattggataagatatcataaacttaccgttacatctttctaagtcaatatcactnnnnnnatcttaggtcaatagatcttaattttgagatggttgggttctagcttaaatgtattattcatgttctttgacttgttcgttaaagttgaccaagtggatcttcctaatacttataccttgggaacatggtagtacaattgagtaggagccctaatcatagatatcgaatctatagcttctataacttttagaagtgaaacgataatttccttcgagcttggcttaacgcgatcaatgattgagcgctcatttcagtaattctattagtttactaaaatattatttacaagtagctaactgttttaaggataaaatatattgaagggtggaacgataaatttattcctactcgatgtagatcatctatagaggatctttgattattttgattgaaacaataggtaattcaaagcgcatctatatttgatatatagagcgttctatgtaatcaggagtgcaattcagtggagttaggaagaattaataagttaggaaattcaccaagtaaatttcttaactacttattgggagcttggttacataggccattgtccccacactaaatgggataatattgttttgtagtcttaattaataattagttttaagtaatccattagaattctaaataagactatgtcttctttgtgaatttttcactaagcaagggtttatttgagaagaaaatagattttaggatctatttattaattaagagacnnnnnnnnnnntaattaataaataagttaaataataatttatttaataattaattttaattatcaaatagatagaattgatatttatagagttaaaattaaaatatggtgtttgtgaaacaaaagataataagttgttaaataaatagtaaaattaaaacctgtggagcccacactggcgttaataaagccattattttatatttttttaattccatttaaattttaaacctaaccctagtatcactctataaatagaaaggtatagtttttattttcacagaactatagtctcttttatcaaatctccatccataaatttatcttgtttttgatagaatttggggatatgatgaatgaggttccatctcaaaactaattggcaatgggaggagtaaaccattcatcttatatatcacaattnnnnnnnnnnnnttagcaatgtgggactaactcttattaatacacccttctcacgtttgggcctggaaagtgtaggtataacgaacgacctttaagaaaccacaggaccgagtgtaaaatttaaaaaaatcccacaagggtgtacacgtcgggaaatttattgattttgaaacaagtcaaagaccccaacactaaaaattggcacacattggccgaaaggtcccaaatggaggttaaaggagagacaatggaagtatctttttggaccggtggcaatttgggctcacaacagatcacaagttgctctgataccatgatagaattttggggataaaatgaatgaagttccatctcaaaagtaattggcgatgggaggagtagcccatgatcatcttatatatcataatttatttccacacattagcaacatgggactaactcttaatagttttggagttatttgcggcataacctccttaagtggtcaggtatttacaactaacccccaattctaaaattttggtagtaaaacctcctaaacccagcttctgttagcagttagccctttccgtctatgtttaggtgttaagtgacaggttggaatgtctacgtgtacacaatgtacacaagggacaatttaattagtcaacgtaatatatatttaaaattaaaatataaaattaattattttaaaaatnnnaaataaaaaatatatttttatttaataatcaaaaaatttatttttatattttttttttcttttctttctcttttctttattcacgcctccttcttcttctctctctaacttcttcatctttgaaaccctagcccccaaaatcagccaataataagctcaaatcaaccttcaatccttttttcttagtctttccctcaaatgtcagaactagaaaacagccctttcaacttatccttacttctttctcacaaaccctttcaactgttcgacaaaatgcctcaacggccgaccctatccttctacaacactagctctcccctgcttatgcttacattcaccttcccttctgtcgaaaacactgccattactgtgactttcccatcgttgctcttggctctggttccacccaaactgaggacgaggacgaccctcgaatg

SEQ ID NO: 136237 - DNA, 964 bp, Cannabis sativa
cggtttttttagaccctttcgaagttcttaaggttgatggtttacctcaacaaaccttgaagtaagttgtttaaagtttattttttcaagtgttgttttatttatttttaggtattttcattttttttagtttttctgatgttgtttttgggtttttttctaggtggttgttttgtggcatcgtttgctgaatacttcattgatatgaaaccaattccacccatatttgatgttgagaaacaccgtgataggcttgctgtgttgttcttcaagtatgctcgcatgaaagaagtgatagtacttttttgttttattgatggtgaagatgaggctcctccaaagggtccacagaagattttgttttagttatgtctttgttgtttcttgcaatagtactttttatttagcttttgttttttctattatcagattatgttgacaatcatagacaagttgttgtttctagcatgtgttttttttattgaaattgcttttattttcgtaactagttttagatttttagtttttatattcagtttaacccacgaaagcatctcattaacaacctaattacaaccatcatacaaacaactaaacttgcattttaatcacttatgtaattttgtttggtacatataaatttcaactttcttgcaaacatttaagtatttaactataatatttatgtcatttatatattaatgatcataatatcaattctctattatcaatatatctccatataaaaagttttagttaaaaataacgaaacaactaaatagtaataatcagtatgtttatctaaatgtttcagtatagttgtttttggttgctgtatagttttttgtacttctatgctgtaattcttctgcaggtctttttgttatgtcccttttgtccacacttgccacacttgttttgcttctttgtttcccaagcagccgccattcttcttttcctcggc

SEQ ID NO: 136238 - DNA, 1359 bp, Cannabis sativa
ttttttctccttaattctctctttcctttaattttttattaatttcatatatatctctctaaaattatttttttcttctcttcttaattctctcatttttaatattttattagtataaatttaaaaattaataattttctattatattaataattatttttaaaaattattattattattagttttgaatcagatattttttagatttatcaattatttttttcataaatttttatgttgtgtgagaactagatacaattatatctattttatcattattaattaatagattttatttgatatatttttttataaaaaaaaatgttatagattcacttatttataaaagtgaatagttaactcatcgtttgatttgttttatttatacaacgaacatatcggggtcaagcctagcttcatgttatacatgtaagatatgataataacaacacccttaaatataataataactacgataagtgagatacggtgatgagaacgattttgaaaccatatgatacgtttttcataaatttatcaatttttataacaattcgatgggtcaagcctaatatcatgttatacaagttgtgtctggcttctattacaataacaggattcggtaatacgagctggatccgtccgtttgtacacatctaatttttcatacaaaattatatgaaaaattaaattaaattcgatacaatttatcactttccattaaataaaagttatgacttattttatatacataactagagaactaagtcgtgcttcgcgcggtgtttctaaacttttataatctttatatataaatatatattgtacttataataagtgatataatctaaaacataatattttcatgcatgtttatattattattaattactagaaaagaattgattttaaatttattaatttaattatataattagattctattatatcattaattataattaattattttatataacttttttggtaagcatatccaatattgaataaaaaatatggaaaaaataataataggttgctaactcacatattttggcttataaatatatagatatattatataaatatatatatttaatttgatgacataaaataataataaaaaattaaattataattaactgagcaagatcaagttatcaatcattcatatatttttagacgaatcaagatgaatgtaagaatactttgtttatagtatagaagtatactaataatgtagttcttaatacacgtgggatttttacaaataataataataaaaaaacttactaagtcatacatctcaacatctacaaatatataagataaactaaatttattaaaattcttttaaaa

SEQ ID NO: 136239 - DNA, 565 bp, Cannabis sativa
taagggcttttagcgtcgattttggcaaaattcgctaccgatgttgttctaggtgatgcagtagggttcataacaactgacgccgtagggtccatactgcgtcagttttttcataacaactgacgccacagggttgttataaaaaaactgacgccatagggttgttataaaaaaatctgacgccatagggttgttataaaaaaactgacgccataggatcttaatattttttagctttacaatttcgcttttagcataatttatatatattatttcattattaatataattaaattaagtataaattatatataataagcataaataaaaattaaattaaaaagttaaataaatacacatttatattaatctaattgtctgtatagtagctatctttttattaatattttatattttacattatgtgtttgtattttgtagtatattagtatatttttataattttttaagttatgtttcggataataaataatgtgtatttttatgtaatttaatattttttatacatttaaatttttcaagaccaataaaataaaacaataat

SEQ ID NO: 136240 - DNA, 1512 bp, Cannabis sativa
tcgtagaaaagaagaagcatatggataataagattgaaaagggaacaactcagaaggagtcgaagtactctgtctatggatatactgtagcattgcagtattgagcatatgagtccatcctagagcttgctgagaaatttgcaatcagaaaatcgcacaactttcctagaatggtgaactaggagagtaaggatgtgccactcggcaaagaggaagtcatcagattgtttgcaagaaatgtaagttttttaattaactttatttgttcatgtttatttatttatttcattttaatccaagtataataatcattttgttcttatttgcagttgacagtgtactccgttttatgtccgcgagctcatgaggtcgagtttttgagcaacgtcactggaggtgaggcgcctttatttgtagatatggaggaattggttattagcagtgatggagagcctactcaagatagtttgcgcagccaggcttcgaagcttgcacagacgctaggacaacgagcggaggaagatggaatcttcagagctgatacaccaccacactctccacaatcaggggcccgttctgttccaccgcctgcatcaatgccccattctacatctatgcctgagtcagcatctattcccagtacttcacagcctcaggaaccaatatcttctggcatattggcaagattagagcgtgttaagaaagaacagcttgctttgaagcaatggcaaactgatattctgaaagggcagataaagataatgagttacttgaagaccctattggcactcatgggagatccgagaaggcccaatgtagaggcagagccacagccagaccctgtctctccaggagatgagttcattcttcccaatgactacaaacctgatgatgtggaagatgtactccatacacctgaaaacatgtcgatcacgtccattggagatacgcaagatgcatgaggacaaggaaacttcatgcgctggaacaagctgcaagtgcaagtccgttcctgcaagtccactacgccaccgaactgaactattcctccagggtgaacctgcaacgtgtaaggtccacatgagtcaacgttcaaataccgagatttttcaaaatgcaatgccaagtcctcctccatttctaatgctacgggtttcctccacttgttagctttttctttcgtgtagcaaaccactttttggactttggacctcgggaatgctacagcagcagtgatcgggaagcctcttgcgtccttagttgtgttgttgaagctctcagcccaattgctcgtcattacattgtaacgtacctctggaaagtacgaccgaacccatttttcaaatctaatttcctcaagatattatgcaaccacaacattcattgcccgaatgttgtcaaattctctgtgaaactctgattttgaatacgtgtaggcacacatgtaaatgtgattcgtgaaggcatcagtcttgaacttgtggttgacgttcataataatgtggtggtagc

SEQ ID NO: 136241 - DNA, 552 bp, Cannabis sativa
  modified_base (419)..(422): a, c, t, g, unknown or other
cagattcgatgtgttcggctttcatctctcgggatagtcttaggccagcgatcaaagcttcatattcaactttgttattggatgctttgaatccaaacttaactgcagtgtgcaggtgttgccccccaggtgtgacaagggcgattcctgcaccagataattgatctgtagcccatttgtccacatgtaatttccaagtcggcttgtcttcactattacttggctaaggtatttacactggctcggggttgtctttcgatatgctttcttctttgcctatgtattctaccacaaagtctggtagggcctgtcctttgatttgttttcggggttggaaggtaatttcatactgacccagctccaacgcccacttgagtaaacgtccagaagcgtccggcttttgcaatatttggcgtaannnntggtcagtgtacacccgaacaggaagcgcttgaaaatagggccttaactttcttgttgctagaatcaggcagtaagcgagtttctctatcaatgggtatcggccttcggcctcaatgagtcttttactaa

SEQ ID NO: 136242 - DNA, 796 bp, Cannabis sativa
taaaataatttccaacatttaccatcttgattgagggtatagaaagtgtttacatggctactcagtcgctaggcccgtataagaagcctacgccgatgaagaaagacgtcagcaagagagacatgacagagtgtttttagtttcatggagactacggccacgacaccaatgaatgcaacaatctgaaacgagaaattgagttcttgataaggaaaaataacccgcatgtagaaaagtatgtaaacgccgaccagaatcaaaggaacaacaataaccaagacttgctacctccaccggtagatggacatctgcaagtcatcattggaggcccgcacatagctggagattagggcaaagctcgggagaggtatgcctgaacagcacagcacgagcaagaagaagtgatcctggccgtagaagaaaggaagcctaaaatcccatgggcaggagggcctaccctaaccttcaatgatgaagatgctttcaaaattaggttttcgcacaataacccgttggttgtggaggtccagatagctatcaagatggtggctagaaccatgattgataatggatccccttccaacatcttattcaaaacatcctatgaaaagatggggctccagcccaaagatctaaccccctatctcctgcctgtatatggtttctccggccaagtagtagcacctctagaacaaattcgcctacccctcactgttgggcaagctccgacgagcatgactattatggcacaatttctgatattagatgttccttcagcctttaacgtcatgctagg

SEQ ID NO: 136243 - DNA, 2346 bp, Cannabis sativa
  modified_base (665)..(670): a, c, t, g, unknown or other
  modified_base (2308)..(2311): a, c, t, g, unknown or other
caatctttggtaggtagctccagcgttctttagacaaaatggcatgaccttataacaatatagactcatatctgttcgaaaacttgtatgttcttgatctggtaaatgcatttttatttaattatacctcgaataggcgttcataaagcttaggatctcgtgcccggctattgcatccacgagctaatctattcttggaagtggaaaacagtctttggggcacgccttgttgaggtcagtaaaatcaatacatactcgccatttcttgttgggcttgggtaccagtacggaattggctacctagtctggatagaaagcttcatgatgaagttgttattgcgtagcttttctacttcttcctttaatgcttgtgcccgctctttgtacaacaatcttcttttttgctgaacgggacagaagttcgaatcaatgtttagggagtgtgaaattatagaaggatcgataccgaccatgtcttcatgcgaccatgcaaaaatgtctagatttactcttagaaattttatcaatgctgattttacttcaagcagcaaacctttgccgattttgagtttcctggtcgggacatttgggtcgatttctatctcttctaattcttctactagcccaacatttgtatttggttccccaagtcgaggatccacatnnnnnntccccgccttgggcggctccctatttcgcaatgcttttccccctgtccgaactctggccagaggattcttcctttttagccttggtcagggcaaggttataacattcccgtgcaacttgttgatttccctttaggcaccctaccccattctttgttgggaacttaatgcacgaatggaaaattaatgtgatagtatttaggtcatttaaggctggtcgacctaacataacattaaaagctgatggaatatcaattatcagaaattgtgtcatcacagttatgctcctcgaaacttgtccaacagtgaggggtagacgaatttgccccaaaggtgcgacactggtcggagaaaccatacacgttgggtacaggggatcagatctttgagttggagtcctatcttttcatatggtgttttgaacaaaatattcgaagaagctccattgtctatcatagtccgagccattgttttattttctatttgtacttccacgactaagggatcgttgtgcgggaatcgaacgtggatagcatcttcttcaatgaaggttatagtgggttcccctacccgtgttagttttagcttcctttcttttacagtcaaaactacttcattttgttcgtgttgtaaagttcgggcatacctctcccgagctttgcctgaatctccagcgatgtgtgggcccccaatgatgacttgtaatgcccgtccactagtggtggcttgggcagcccgcggccatgacatacttttgcacatgcaggttatttttccttatcaggaattaaattccccgcttcaggttgttgcattcatttgtgtcgtggtcatagtcaccgtgaaaatggcaaaatttggacatatcccgcttgcttatgtcctttttcatgggagcaggttttttgtacgggaccgcagactgggttgccgtgtagattgtctctaggttgtcagttagaacaaagaaggcagtgaatttggaggcattttctctaggggtttgttcgaatttgcttgcaaactttattttcttcccgttaccttgtttgccattgttattggatcttttattgctcagagttgagctgctaggatactggggtttctgagcagatgctcctgccgaggggacctgtggtttgcccgacctaagttcgacatctgctcgatgaatagcctcttcgagcttgataaacccatctgctcggtctaaaaactctgccatagatcctacagggccagttttcttgatatccttccatagttctccaagtacttcaatgcccccagtattacggtcagcctcccttctttagttaaccttgctacttttgtagcttctgtcatgaatctacttatataggctctgagaggctctcctagtgtttgtttcacttcgaccaggtcttctaaatgtatcgggagttggcgagaagaagagtaatgtgcatggaactccaaggagaaggctttccatgaattaaaccttcctggtggtaacttaaaataccattgtcgtgcgacttctaaaagtgtagcagggaatactctacactaggggtgtatggcggtcggtttagtcgagttatagcatatttttatcaaccccatataaatatcgggttgcaaatatttannnntaacccgcccaatcaaaaattagagaaagttcaac

SEQ ID NO: 136244 - DNA, 962 bp, Cannabis sativa
  modified_base (270)..(276): a, c, t, g, unknown or other
  modified_base (575)..(575): a, c, t, g, unknown or other
  modified_base (680)..(691): a, c, t, g, unknown or other
  modified_base (823)..(835): a, c, t, g, unknown or other
tgaaaattaattttaattaattgtaggccaacttaaattagaatattcattcttagatattaaattagaattataattaagttgattttattcaaggtacttaaatatttgtttctaatatttagatacatttaattaaataaaaaattaaatattgattttattctagacactttaattttagtctttttcaagatatttaattagatagaaaattatatttcagttagaaattttaatttcagtacaacttaaattagaataattttnnnnnnntattttattttattttattagtcattgacccataataattttgaaatgcatttaattttttaaatgcagatgttttgaaattttgaaaaatagattaaagttaaaaattaattgtaattaattttagaccaacttaaatcaagtaaatttttcataaatgatttattaaaataaatagaccaaaatctgttatattttaattagaaaataaataattaaataatgaaatatatgtatagttattttctgtgtagacttatggcatttttctagacatatttaattaaataaaaaattantatttaagttgattttattcaagacacataaatatctgatatttttcttagaaatttaattaaatgaaaaaattatatttgtgttgaaaattaatttattaattnnnnnnnnnnnnacataaattagaataattttttaggatttattttattctattttgtataaattttgaaaatgtatttatttttaaataaattgtttttcaaatttagtcgtataaatttattagaaaattaaatttgagttnnnnnnnnnnnnnaattaattttagaccaacttaaactaagtactttttattatatttatggagaattaatactaagatggaaagtaattttatttattttcagatctatcaaagtataattttataaatattaaattaa

SEQ ID NO: 136245 - DNA, 505 bp, Cannabis sativa
aattctaagttcaaaagaaaatgtttcatctgcagcaagaatactcatctcaggaaggattgtccaattctgaaaagctacaatcagaacagatctggtgatgcatgattaatttctgatggtgatgacagtgaggaatatggcagtgcttgagctcttgttgtctcagactcaaattcaagaactggatgggtgatggactcgggatgttcatttcatgtatcacaattcagtgaatatcaagcattggaaggtgggactgtaagactaggagataacagatcatgtcctatcactggaatgggaaaaatcaaattacagcttcatggtggaggtgttgcagagttgaaacaagtaaggcatgttcctgagttaaagagaaatatttctgtggctatgttagatcaagaagggtataatgttcgaatagaaagtggaacaatgaaagtgattatgggttcaagaatggtgatgaaaggagtcaaagaccatgggatctacatat

SEQ ID NO: 136246 - DNA, 680 bp, Cannabis sativa
  modified_base (540)..(550): a, c, t, g, unknown or other
attgcttatatgaatagttaggtcgtctattcatatattaggtttaagtattttttttaaagcatcttggtgtctcatttattactttcccacaaaatgcgagctattactattcagcttcgcatgtagcttatgagttatatctcatttacaacttttgatttttctttctagtaagaaaggttctttaataaaaaactattaaattttttaaaaaattctaaagtaatgggttcgcaatatatcatgtatttctagataaattctaattaatcatacacatatgcccctcaagtaattttaaaggatgacactttgtaattacttgaaaaatgattcaactttatcaataactgaagtttcaaaacactacatcagaaatatgagtcacagcatcagtttactggtagtagggttggcattattccacgttctagaagttctttattagcgagccattcagtcgagccaatttgtaaaccccaattcctattattgcttcgatcacataaggaccttcctgttgggttttgtgccctnnnnnnnnnnnatttcaatataattagaattactaattagtaaagatagaaaatcgcattttatgttgcatggtacacatgatttatttcatgattataattaatgtataaattctattaagtcaagaacatatgtatttg

SEQ ID NO: 136247 - DNA, 605 bp, Cannabis sativa
ataaaataaaatattttttttttactttttttaattaatttttttttctttttcttcttctttcttcttctttttctgcagaaaatcccagccctttttctctctctcgtctcctcccctgcaaagggtttatcatttacttggtctagtggtatgactctcgctttgggttagattctcggaatgccccattttcttttaaaaagcatttatttattttatattattattttctttattttcaagtaaagcgcaccatccaaaactgaaaacgacataaatatatttccctccaaaaaccctacacacgtcagttgatttccctctatttcccaaaaaccctaaccctcaatttcttctctctcatttgaaatcatccatcggtgttcttaggtatttgtttaaatctaattagaaattcttcaatcttctcatgtaattgtattatgattcttaattcctgatttgattttgatttatttgttttcgcatctcataacagatgtgtgcaataatgagctctcttgcaaagggaggagacgagagagagaaagagggttgggattttctgcagaaaaagaagaagaaataagaaagaagaagaa

SEQ ID NO: 136248 - DNA, 939 bp, Cannabis sativa
ggtaactaggataaaattacagggatgacttgaaaggcacaatcgatccaaagaatgtctaaattactttcttagtcatgcataacttattatttcgactcaaatagtaagcaagcaagtaagttttagaattttttaaataacttttcacatttcacaattagcatacataaaccaattcaattgctagaaaatttacttattatgattccgtgttcttttaaagcacaaaattaaaactagctcaagaatgtaatatcaccaagcacacgaattttttgaaaaataaatgaaattttcaaatcatgttatctacctactttcaaattgactcacatttagtaaattgactcaaaacaaagaaacaactaaaaactaaaaatttaaaaaccaattaaaaataaaaatataagttcacctccaaactaataaagtgacacatccctaatgtgacattaaaaagaaagaaatgggaacttacctgagcgccacatcaacaagcgattgatgcccataataagcttggcatgcgacgagtttgaaccaaaagcagcgctaacaacacaagactttggatgatgagcttaggaagaagcatgtcgtagctcgtagaggatataatatggtggaaatggtgttgatgaaaaatagagatccattggtggtatataagtcaatatcattgatgaagtcgaatcaatgatgccatgtgcttcctcatcctacaatgtcagattatctacactttcatctaatggataaccgaccaaaccgatccaattatcatctaatggtcatccaattatatttatacatttttcaaatacatttataattttatatatttaatatattatatttaaaaaaaatatattaattgatttaatatacatttaacacatgagattaaagaaaaaaaactttagatctaaaatatta

SEQ ID NO: 136249 - DNA, 549 bp, Cannabis sativa
cctccaagttttggcagagtttgccacgggctataggtgcaaaactgaaattcaatacagcatttcatcctcagactgatggacagtccgaaaggacaatacagatactggaagatttattacgagcctgtgctatggatttcgagggcttttggagcaagtacctaccgttgatagagttctcttataataacagttatcagagtacgatagagatggctccctatgaactgttgtatggaaggaagtgtagatctcccatccattgggatgagataggggagagaaaatacctaggtccagattcagtacaacggactaatgaagcaattgagaaaattaagactagaatgcttgcttctcaaagcaggcaaaagagttatgcagatccgaaatgcagaaatgttgagttccaagtaggggatcatgtgtttttacgaatatgtcaaatgaaggggatgaaacgtttgggaaaagaggcaagttatgccctacaggaccttttaagattctcgagaaggttggacaagtggcgtatcgattagcttt

SEQ ID NO: 136250 - DNA, 508 bp, Cannabis sativa
  modified_base (58)..(65): a, c, t, g, unknown or other
gagtgtttagtttataatcacaaacataataaccacaataatcatgttcataattaannnnnnnnacaaagaacaaagaagaagaagaaaaaaactcttaattatgaaagttgatgatgagtgctttgaatctcttttctctcactcttcaatgtgttttctaatctcaaagttgcttgtttctatctctccaatcgtccctaaatttgatttacctccttctttatataggccaaaaaaagatagatgaatctcatcagaattaaaaaatatatatataaaaaaaaagataagtattgcactatcgcgccatgcggtactccttgaggctttgttttagcgcaaaaaatataatttttttcagattcggtgctataacgcagcgatttgggcgttatagccacatgctattttttgtcgctatttttctacttcgaccttgctcaataaatcatgcataacttttgcatccagactccaaatgagatgatttaacatgttttggaaa

SEQ ID NO: 136251 - DNA, 902 bp, Cannabis sativa
  modified_base (133)..(134): a, c, t, g, unknown or other
  modified_base (577)..(577): a, c, t, g, unknown or other
atattgagcataagttattggatcgaccattcgatggagtagatgatgaccatatgccgctcttccgtcaaagatggggagtagatttattctactagaacttttcatgaactttggatgttttatttattanntttgttgaacaatctttacttttatgctttttgatttgaacaatctacttatcagtaaaatcattttatttttgccacatatgtttaacaaagtccaaaaataattcaccaagaaatacataacagtacaacacataataatattaaattcaacattcatgttcatgccacaaattaaaaatattttacaccacaaatattaataacaatacataacagtacttttacataacattatgactaaatgaaaaattcatttttaaccttggtaggtgcaagtgcttctgttgtgccccttcgcactgcacttgccacaatttcgtagtttgataatccttttaccattacaagcagttcggtttgacttaattcttccaactttttgcttcttgggttgccttactggatgcttctcaacaggcactccaactgtcatgttcttnatgtcattaggcaattcccaatcatcctcgtcaccaactggcataattgtaccttcatacgtgctcatccaatattgtgttgtttaatatggcgagcatagtgcgtacatgctaatacttcgctgttgagttgcagcacatgcatgaggacagggaaacttcatgcactggaacaagctgcaagtagtgcaagtctattcctgcaaatccactacaccaccggtctcaactgttcctctagggtgaacttggaacgtgtaaggtccacatgtgtcaacgttcaaatactgagatttttcaaaatgcaatgccaagtcctcctcca

SEQ ID NO: 136252 - DNA, 1350 bp, Cannabis sativa
ttaatctcatagaacttccccagtccaatcgtttattttatcaatcttccaagagtatctagttttgataaaacgagttttgatgtttagggtcaatccctaacatactctcacaattgtttcaatatccagggacaatccctgacatatcccggggttccaagtgaagtaatcctggttttagttttctatttttgactgctactggttgacgaccagctttccacgtggcagcttgatatgacaaccatagtgggtcgatatctactcacgtcacaattttttttctacaaaattgctttaccggagcaacttccccttgtattcttgtgacttgctccctcttgagataatcgaggtgtcccttcctcctacagaggagggttataatccctagtagttctagttattggacagatcgagctaactatggacatcgtcctacccctttacatattgttgaaagtgtccttgcgatatgagaccttctatctcatctttcagctgacgatactcttccgtcgtatgaccaatatccccatgatattcagaccatttagttggatcccttttatgcctcgcatgtttcgtaggttttggctcgctaaaaatgacttcccgtacatgtgcgaggttgatatttttctgagtttcactaagctcggtatattcaacataaacaggaatatatttgttgtgtttcttatccttgggcagccttttggaatcatcttttctctttgatcctgaggcttccgattcaaattctccgtagaatcatgccccggttatctcttgggtttcgtgacttgatgccttctaaacttattcttcaactcgtccatttgcaaatggagtgaatccttttgtttttgactgagtcgttgacgaagatcaggcttcttcaagttcaaatgctctcatagatcactcctatcatgactgcggtcggaccttgctcttcctcttaaggtttgattcaccttattctccctataagggtttgtgggagtttctttctaatgaacctgaagagagggttggtgatctacatccatgttccacatatcccaggttgtatccctagattttcctcagtttcctgaggttgcacctcctaagagttctgagtatatctctaggctgtctcatgccccttgttttgcgagttgcgaggtttgcctcatgaatcttttctcccaaggtcaggttgattttgggtaccattctcctgcgctgcccttattgagattatttcacggtctaattaggcattacgctggtttgctgtcaggctaaaattagtctatgttttgggtcttattttcggttagttttcactctttgttt

SEQ ID NO: 136253 - DNA, 1114 bp, Cannabis sativa
  modified_base (1034)..(1041): a, c, t, g, unknown or other
taccagaactcggacccaaacaaggactgaaaccaagacccagacctagacccagacccaaactcgtaccaaaactcagattcaaacttgggactcagacttggaccgagatcaagactgagacccagacccgacttggaccgagatcaagactgagcccagacccaaactaggactgagacctgaaccttgacttgtactaagactcagactaggatcaagaccaggacccgaactgggacccgggacacgatagtcggacctaggacctgaatactgaatcgtgacccagacccaaactaggccaagacctgagacatggaccaataccgaacatggatcgggacctgcactcggactgaaaccctaacccagactggacctaggtccctgacataaattacgaaccaggacccacgacatgagctagaactggaccaggatctagatttggaccaaggacccaagacccaaggcttgaatccgacccataatcggtgtctaaatttgggaattggaccaggacccggacccagacccggacccagaccgaactagaacccgaacctgtaccagaactcaaactagactcgaaatgtggttggtgttttgatttgggagcaagagtcagacctgaacccaaacacaaacctagacccagaccaggacttgaacccagacccacacccgaaccttaaatcgtaccctgtgacccgaaattagaagcagaaccctaaacgctaaaccttaaaccctaaatcctaaattccttacacttccccaaaccttaaactctaaacaataaatccctaaacactaaaccaaaaaccctaaaccctaaaccttaacgtggagacgggcccagacccatgttggaataattttaccatgatctagatttaccaccatgtatgttgtttaacatcctaatttggatttctaaaacaatgtaaattaacacatataaagtttgagaaaccttacaatgggtgcactgaaattaaatgagtcattccactcagatctctaacccnnnnnnnntttctgtagcagagtatcaccacgatctgagctcgattctccttcttgttgattggattcttcacagtcttac

SEQ ID NO: 136254 - DNA, 718 bp, Cannabis sativa
  modified_base (31)..(39): a, c, t, g, unknown or other
tttcataattaaacataaacaactgctaatnnnnnnnnnaactaagcgggctttacacatttttagaaaataaaggaattgtaagaaaaaccaaatagaactcaccctctctctttctctctttcggatggggcaaaaaccagagggatttaccctcaaagttttgtgtttttctggattgaagttaaggaattgagcattcttgaagcaaaggtaaaccctagaccattggtttcatgttttcaagcgttttctttaggttgagtttgtgaaattatgatgtaggggttgttggtttaaggatgattataatgtgtattctgatgtttgattgtgacgtttattgctagcttgggctaggttaggtgagtatttcatagtttgagttaaattgaagtttatgagctcaagttggagctctaagggtgattttattttatgagctggttgttgagttcttttggttggtttgggtatatttgagtatatacaggtatactggagagttttgcaaagtttggtttgattttgaggtcatgggggcattttttgggttcccagcacagaaccgaaattctggttctggggaacctgtggcaaccggtcgaccggttggtgtcttagaaccggacttccgtttggaaaccggtctgccggttggggcagtttttggaaccctaatttattccatttttgagatatttagggtattgccatg

SEQ ID NO: 136255 - DNA, 627 bp, Cannabis sativa
agtttataaaatcacacacgtggcgtccctatagattagggcgttacagtgaagttctcacagctatattgtaaaaaatttcttcaaacaaatttttgaattcctcccaggtcattccactaacatctcgggtttggcccacgatatcccaccaaacgcgcgcatgatcttacaacatgaaggtttcacagttcactctctttgttcctgtcactcccatattatcaaggatacgggtaatagcgctcatccactgctcagcctttattatgtcaatacctcctagaacggtctaaggtcggaggttgcagcttcacaaaccactcaaatacagaatctcgatgcggcataacaaacccttggttacccaccactggcataggtgctggtggtatcacttgttctacaggggcacccggttgccttaaatgacgcaactcttcttcctattaaagtatgacactttgcatttcttgaaacatctgctgccagtcagcaggagtattagcattgccaacccccgcattgtccccctgattctgcggaggtggaggcggtgttgatggatctgtttaggcagccctaggctgtacttgctcgccctgtggtcaagatgattgcggaggg

SEQ ID NO: 136256 - DNA, 2287 bp, Cannabis sativa
agcaaagaactatccaatcaacccaagttttaataaaaccaataaaatttaatgtaagcccaaataaaagtctaacagaacacaaataatgtgcaccacgcacttgctttcttagagtatgtacacgaaaataagtgaagaaaatggaaaatgggagctttacctaagttgaaacaaaaatggaaaatgaagttttgccctaatgtgaaagaaagaagtagaagttcgaagtagaagaaggtgatgagtgaagaaggaagaaaaaagagtaaaggacggttgaggttgatatgactgatggtggtcatgtcagtttttactttttaaaatttattatttttttattacaaaaacttaacctgttactattttctttcatcctaaatattcctatattaactctagccctcagatcaaataacttatccatctaacggtcaaggtacatcacggagtatatacccttaaatacattaacgtgacaaaatcgtatcccaatattttaataataaaattatgttgaaagaagctaaagtttattatgtttatatgagataatattgatccatttatatttacagaatgatatacgtgtgaaagtatatatttacagataatagattaaaaataatattaataatataagtgtaaaagtatacatttagtaatttaatattaagtaataaaaaattaattatttttttaaaataagaaattaaaaatattttaaaaaaattaatttttattatatataaaaactatgtatatatatacattctttaaactccagttttagtaataacaaaatggatcaaagtaagttaacacgaatatgatacgattttttatggatcaggttagggtggaaaaaattaaacgcgagtcaaaaacaggtccgatacatctaacacgaaacataagcaagttaaataaaatataacacaaacacaacatgatgacaaattttttcattcctacatagagttaaatccaacattcttttgccgcacgcgaagcgcagattgtttactagttattttataatttttttttttaaatttaacacaacaaataaattaaagtaagtaaaataaataaaaaaataataaaaatatcaatatctaagagaacttctttttttttttagagagagtgagctaaatcgcactatgaaaatcgtcaacgcagaagaatttccagtcaaacaagctaattgtctagccaaagatatacagagtcagaatatgagtaactacaaaaaagtgacttatataagaccaagttatctcagaaatttagacaaaataacttgagaccaccttcaagacgcatctgatgtaaacaaacacctggatcaaaactacctacaaaataaatagatggataaatgtggattagcacactatacaacgataatgttgtgaatttttaaattaaggataaaatgcaattattgttataacaagaaaaaacttatctttgaagcctttttattgtaagagctaagtctaccaaagtagaactatactagccaatataacttacaacatacataatatttaagagattaatcaaactaaataaatcaaatcccaaataaattaacaattttttaaaaaatgtaagaaaactcaattgcctaataaataaatgacacgaaaataatgatataaaatgatagaaagaaattcctccaaacttattaaaatataattaaaattaaaatttaaaacttatctatgaaaatctacaatagcactctttgaggttgaatccacgcgcaaacgagctaacaacaacaaactaactaaataatatagtacaaaattgccaacacaaaatggcacaaactagccaaaaatggcacaaactacaaacataaactataaaataaactatccccatagaaccaaactagataataaataaataaatataaattattttttatatattacgaaaatttataaaataattatttattaatataattaaaaactcaattactaaaatatataaagtaaaaataatttaaaaatattaaaacttaataaaatataattaaagcacatttaaagatataaatatcaaataaaatactaataattcattaaatatatacatacatactacaatgactttaaatatgtatactatttaccttaaaaaatagtttaagaaatagtaaatattgataattgttgaccgagattttcggcaactattagaatatgattatattaaggagctgtaagaaagtgagatgaagatttttacgtggttgggg

SEQ ID NO: 136257 - DNA, 807 bp, Cannabis sativa
  modified_base (278)..(283): a, c, t, g, unknown or other
aataaaaaataataacattcatcaaaccaacttttcattccatttgcttaatctgtgaacttaatctgtaaaaatttgaaaaaggagagagagagagagagagagagagagcataccagagtatcaaaagctgaagcagaaatcggtggtcgatggcaagcacggtggaggtagagatctgaggttgaaagaggggctctcggcagtggaggggtggcggagctgcgtcgccggtggtgtcgggttccatcaccgtgagagagagagagagagagagnnnnnnagagagagagagagggagagggagtgagtgagttcgagagagggagatagagtgagtgagatcgagagagggagatggagtgagtgagttcgagagagggagacggagtgcgtgagtgggtgagtgagtgggtgagggtttcagatagagggaagaaaaatggagggaataagaaaaatggggggaatgagcaaaatctaatttttttaaccttatacccgacggttttgaaccgtcgggcaaagaatgagcgacgctttaaaactgtggtgaatactttgcccgacggttctaaaccgtcgggaatagtgcatcaattttttttttaattttttctctacatttattaaccgtcgcctattgtatacgagtgttaaaaactgtcccctatagtacaatataggcgacaatttttaacactcaaataatttttttagcgacgagtccccaaaaaagaatttttaggaccgtcgcgaatttggcattttgtagtagtggagaaaataagatggaaaaatgagaaa

SEQ ID NO: 136258 - DNA, 501 bp, Cannabis sativa
ttgtaatgaaatttgctagcactttctatgattttatttagtagcttttcttgctgagtcattatgactcacgggtgcttcgtggtgcaggtaaggaagtgagaagttgtgttcagccatgagtcagaggccttccaatgatgtacatatcaaccgtggtgtcttggcttctgggaagcaggatcaaattcttttctatgtttggaaatgtaacctattgtaaaagaatttttataaagaggggatcctcgtattatggtatattaagtatataagttttatttcaacttaatcaaaaaaaaatatttttaattaaaccatactttttctaaactaatagattagtaagaaataagtttgtaaaagcacacacgtggcgtccctgagggtcaaggcgtcacaggtttcttttttggttcagttaagaagaagaaagaaagaaaaaggaaaaaaataaaagaaaaaggaaaaagaaaataattttttttataatttatttat

SEQ ID NO: 136259 - DNA, 969 bp, Cannabis sativa
tggacgtttgattctggtgaggtctttaaaggtgcgacatgggaaacctctagtgttttagccgagcttggtaacgccatggctgatgaagggtacacttatctctctagattttgaggctgttttgtgatcgtacagaggcgaagactttttcttttagacgatgaagaagcaaaggctttatcatcatgattttgtgagagatagaactgtgaatgttggacaaaagatcacttaaaatatatatataaatatataaatatttattcaatataaagtgaaactatatagagaggcggagccaggttcaaataagagggggccaggccagctattaaattttagattaaaactgaagtttcaaaatgcacatgcacgtgaaacacgtgtacacatgtaatcaaacttatagtatataactatatataatgaaaaatgctaaaaaaaaatattattggtgactagtatcgttctcagtgtcatatattaagtatcaagtaccatataacttaaaaaatgttagaatttgaggaataagatgaatgaggttccatccctaaaccaattggctataggaggagtagcccattcttcttatatattctattatatttccacacattagcaatgtgggactctctaacaaaaaaataattttaaataaatattgctaactaatcataagatataagatgcaaccttaaaaatattgagtaccattgctgtccaataacaatactctaactgattaaaaaatcttaattttgataatttagttaataatgtcatattattagtaggcaatatatttatataactattagagcttctccaaggaagcggcattttatataaatgtcgttcctttttgttccaaggaggccccattcaacacagtattttgaggttaatgctacagtgcacggcatatatgctgtgtactgtagacacggtatatgtttttttttt

SEQ ID NO: 136260 - DNA, 810 bp, Cannabis sativa
cttgtaaaataatttccaacaatccccaggagaaaatagacttgtaattggcataactgccaattcaggaagaatattttgaatattcgcatctttttgattgcttatctctggaatactcgcgggtatttggatgagcatctcgaatactcgcatatctgcttcctttaggaattctggggactttatcatttttacccgttgtttagaacttagggttttctccatattctctatatatttttttgtggggatactggttaagtctttcaaatggtgggtgtgtcgccgtattccaatgctcatgcatgcgattgcatgttccttgaggtactacgatacacccagccatttgtgacatgcgccagcgttcccttttcccatacaaccgtatatttcgactagtaggtttgctcgaaacagtgaggtgtttccattagcccaagggttatgcgagaaaggcatgctccttgagatataggagattcctcggctgttttcttaagatatactgctagtcaaatatgcgtgatatactcgcaggttgtgattggttagatttctcgaaacggtgggtgtttcccagtaacttcagggcatgctcgaaaatgcatgccccttgggtcactgggtaactcccaaccattttttgaggtattcttctagtcgcacacttgcgattttatgccttggtgggctggttgggttttcgcgagaatccgagttagccttccaaggagatcttgaattttttatgcgggtgaggtcacttgtattgttttcgcacattcaccacactgaaaagatctt

SEQ ID NO: 136261 - DNA, 2117 bp, Cannabis sativa
gattaatctatctctataaatcttaaagttttatttaagttaaataaattgcatgcttcgtagatttactgcttaggtaaaagagttaattattattgagcgcttcaccttgattatttgtaataaggagattgagataattgactgcttcaactttatctacgggactaatagtttgattagaaactgaaattacattcgttaatatgaattaggaatgattgttgagggtgtcgaataacctttaactaatttctcatatcgtcatctcacttttaatttgtttttatttttatttatgctattttattctaaatctcaaaaccccattttctaatttctgccattaatttttgagtaattaaataaacatagttctcgtggaatcgacatttacttacaattatgctaaaataattggaggtattagaaataaatattagtaaatttgttgtggcttatgacacgcatcaaaatttttggcaccattaccgggttctattgttttattttattattcatatttaatttttgttactaacttgttcttcaagttgtggttttaatttcagatctttctttagaaatatggctatgtacaatcaataatattgtgatccatattatatctcgccacaagtgtatcgatatgatcactactacgatacttacacttacaatcaacaatggagagattattcaagcacttcctatagtgggatcaatcaatatattcaacaaacttcttactatcatcctgtagcaccacaagatcaagatcattctcttactgatctactcaacactttggtggcttctactatttagatggaacaaaatcatccacaatttcaataacctactcatgttgcaccatatagtgaaaagccaactactgttgagctgattgaaatgctagaagctaataccttgcagtttcagcaaagctttcagaaaattgtgcagagcacccaaaaatctttacaaaagttagagaatcttggggagccaatggaaacatctatgagtgggtatgaaattcaaagttcaaatactttacctgcacaaataaagagtaagccaatggagaatatcagtggcatcactatccaacgtggtacacaacttgaattaccaccacaccaagaaattaatgagttgattccaactaaaggagtcaacaattcatcccttgaagagtcatctccaccaaaggttgaatcttctactttagttggtccactatcgttgaaagagtcatacaaaccaattgtaccaacttatgtcaatcctccaccttttccaagtagattgaaaaaatctaagaaagtagagcccattaaggagattcctgaaactctttcaaaaattgagataaaaattccatgtcttgaggtaatcaaaagagagccttgttgtactaacatttttaatgagttgtgtccaaatgagaaaaagttgaatggagatgagaaaataagtgtgggggggaatgtttttgttgttctccaaaaaaagttgttgcctaaaacaagtacattcaatgcacaattagtaacactaggtttgatcattgcatggtagatttatgagcaattattaataatatattttattccaattttgtttatttaaatcttggtccattaagagaaactcatgttttaattcaattaactaatcaaactaatccttatccctcagggatagttgaagatgtttatgtgcagggttatagacttgtcattccaggtgatttctacatcaactctattcgagagactcttcttactcactactaagaagttagatatgaaagcatggatacctataatagaatttaatggtgcagtaattaagtataatgtgttagatttcattaataaatacataatgaatgagtctttcttagaaaacttgacttgaagaccacatgagcacaacatgcagtcgagctaacgatgttaaacaaagtaaacttacgggagttcttcttacgcttttcttttttttttcttttttttttttttttaattttgcattgattttatttaattgagtcatgaggacaatgcttatattaagtgtggggagagattaactatcgtgtctatcca

SEQ ID NO: 136262 - DNA, 729 bp, Cannabis sativa
  modified_base (52)..(56): a, c, t, g, unknown or other
cttttcagcgtggtgaatgtgtgaaaaacaaagtaagtgatctcacccgcannnnnactataaaatcgtcttgggaggatgatttgaattctcacgatagctaaccatcccaccaatacgtgaaaagatgggtgtgcgaatagaaagacatctcaaaaaatggctgggtgtatcccagtgacctaatcgacatgtgttttttagcatgaccctggagtaactgggagacacccaccgtttcgaggagtccaactaatcacaacctgagagtgtgtcacacatctttagctagcaatatacctcaaaaaacggctgggagaaactcagtgactcaaggggcatgcattctcaagcataaccctgaagttactgagatactcccactgtttcgaaaatatctactagccaaggaatacgcttatcagaacattagcgcataccgcaaatggctgggtgtatcacagtattacaaggaacatataatcgcatatatgaacattagaatactgtgacacgcccaccattttaaaggcttgaccaatgttcccacaacaaaaaatacagagtacaaaatcctaaagttctaagtaacagttcgaagtaatcaagtctctataaaaccaaggatgaacaaacatgcgagcattcgaagtgttcatccgaatacccacgcgtattcaaaatataaagttgcgactattcaagcattcttcctaaagtccacgattg

SEQ ID NO: 136263 - DNA, 4293 bp, Cannabis sativa
  modified_base (2657)..(2668): a, c, t, g, unknown or other
  modified_base (4047)..(4048): a, c, t, g, unknown or other
aaagaacatagcacttatctaaggtgcaagtaaactatgttgtagattgtcatatcagttaaaccctctgtgtactgataaatctaggaatatatatttaatcacctacacttgattacttttcactgtgttggcgacacaataaattagaacataaatgtgagaaggatttggatgaatttatcaatcaaataaatatataaatgataacatgaaccaaatgacacacaaagtgatgataatacttctatttctttattgatatttaaaagataaatattacattgaatttgagttttatttagggcataaaacccaaaaggttcggaggcaaaaattgactgctcgttctttatttctttcacacatctcttctgagcgttattgctttccttagcaatatgcggccctcctgacataaccaggatgtcctctccttccataggaagaggttgcaaccccaggtcgtttgggttattaggctgacggggctggttgtattcctggccctatcttctcacatacttcttaaaatggcctcgagcaatgagactttctatctcatctttcaactggcgacatacgtcagtcgtatgcccgatatcattatgaaatttacagtatttgttaggatctcttttcctcctcgaattcctcataggcttgggtttaccaaaggctaccttctgctcatgtgcgaggtaaaaatattcccgagtttcattaaactcggtataaatagtatatactggcacatattagtcatgcttcttttatttctttctatcttttgatggttccctacctccgtcctttcttttcagactagaaacccccgacttatcaattctcgtggaaacagcccctattgaaacattgttgggtttacctcctgagcttgttttcaataagttcatttccttttgggcttcttccttctagacaaacacttgagctctctcattgaactcagagatgtttcatactggacatccttgtaggtcatcccacaactcgcccctgacagttaatggatcagtggagattcccgcctgaagggctgtaagttgcgtgctgtcacccaagtttctaaccctagcggcatccgtgttaaaacgactgaagtgtttcgtcaggctactgctttatattgattagcgaggccgcttcaggtcgcctatccctagcggcttggaattgcttcttaaaatatctggatagctgctcccaggaaattattgaatgatgagtgaacttgtgaaacaagctactcgctgctccaacaagcgaggtggggaacaaaatatgtcgtaaattgttcgtcacgttactcgctcgcattatcgtgttaaagttattcaaatgcgataccagatctgtggtcccgtcataggacgagacatgcaagtttttgaatcctgaaggaaaaggggtattcataatatctcggtgatacggctcaagctccttgtcagattcctatccagatgatttccctatttcccccacttgatatctcctgaacttgttctctagctcatttatctacaattggattggatcctcttgctttggaccaagctgttagcgaagatcaagtttcttccaattcaagtgctctcgtagatttggttggcagtaattgttggcagatctcgtattactcattgaccgcatcctacttatagactttctttttaagtggcttgcggatttacttgttcccatactatcctgatcattggctcgttgagtactttctgctcttcgagttgatcgtctatgagttctttcctcccgagagcggtttgtcgtattttccccatcaaggtacgtacgagtcctccctctatgggtttgggaagaacgctagtgattcctagtaggtgatctccgttcccccagttgagttccaagaacggggtttctcattttccccaggttgttcttctcaggccttttcctgtctcctagttcgtgagccacgaggtctgcctcatgctcttctcacatcaggttcaggttgattttgagtgttcctcccctgcgctgccctggtcgaggctacctctcgctctaactcagagtttcgatgctgcgcctcttccagacggcgtcttaggcggcgactttccgtttcataagttctttctcccacagattaggcacccctacggttgagctcctcatcccccgcctcgggattctgaccattcccacactgagttctcctcgagcgtgttgtcctcgtactcaaaccaacgccgggttgagttctctggggatgtgttgtccgagcactgggaccatcctcagattgagccctcctggaatgggtagtccttctggacggcgaattagttgatcttttagagcccataggctcttttcgtaaacgatggttagtttcctcatgtggggtgttaatattctctggattttcagccataaaggagaaggttttttctttgaaagaggggaagactttttctgattttttttagaggctctcaatgaaagcaccaaactattaacacagatttttgttaaccaaatttgagcctcacgaatatgattcaatgcagaaattaaaaaaaaggagaaaattgtagaaaaataaaataagaacactgggttttttacgtggttttgcagtnnnnnnnnnnnntagtccacgagtcaatcttattcacatttctgagtatgttcttttttttttttcagggcctctcgtgtaagagttttttttctgtccccttttcttgagattgtctgccactatttataattgcatagtgagagttaattacaaggctgaccaaaatgtaattacagttatcatcccttaaagcattggatctgattacatattacaaaatgtaaatgcgttgcacgatttagaaagtcatactgctgtgattttcccgcttttactgggtcagaaatatcgtgtattaaacatgtctttaattgttgattctggagatgtctcgacagaaacttgattgtagtgatcccaatggtgagctggaaccatttttctatccgagattgacaacgtacgacgatcgtggatataaggaaatctattgacttgccagggttttgagtctcgcttccgttagttagatgaaactataggaagttttctcgtagcgagatgatcgtctcgtattattgtacttcgagctggttcgtcttttatacttagtgtgcgtatttgtgagctgaggtatgtgttattcttctatggtgcctcgctattatttttcagccacatacagtttcttgttattactctaagtaccagttcgtacattgattcctcgcctaagactttacagttagtgggttgcaaatatactctagtacttacacaattaatgagttattctataaaaagatacgacaccgattcacattctctttatcttgacacgtgtcctccagcaagataattttttcccaacatactttatgatagtctagacatataccaatatcaatatgcgtttaccataaacatattcttatcatggtcattactatgctactttttctaacataaaatactacaaaacaagcctttagatgcagttttttcaacataataataaataatcgacgtcatatgattggaaattttaagaaggaaaatttatgccacttatggtgtcggttatttccaaataattgacgccaaaagggcttataaccctagcccagtccttcatcttcctcattcgatcagccaaccaagaaacccccaaaccaaagaaacccccaaaccaaagaaacccaaaaccctctccaccaaccaccacagaaaagcacccccgtttcaccattttttcaccattttaactcatttttattcctaaatcttctattttttcataccaaaaactatatacctaaaaacatcacatttttctttattttttagggtaaactgaaggtagagatagtggttgtggtggttatacctcgaccaccgtttttagtggagaaacattgtatctcaacgtctattaaggtataaatctnntttctactaattttagtaatgtatattgttttattttttattttctaattttgtttagggttttctatattattaaatatgtattttgtgtatatgtatagtgaatgagaaatgtgatataatagagtactttatatattgtataagcatatattgagtattttaaactaatagttttgttaaatattatgaatgagaatgagataggagagtattaaaataaaaaattaaaaattaatttctaa

SEQ ID NO: 136264 - DNA, 796 bp, Cannabis sativa
tagacttattgggatattacagcacctctcactaaggaaagttcccatgatgataaaagggaatttgagaggtgggatcgttcaaatcgcagagtctaatgattatgaaactgaaggggttactatggccaagaattttcttgaacaaattgagtgatgttttgctaaaaacgataaggttaaaatgacaacacttgttggttctttaatgaacataaagtataagggtcaaggaaatgtaagtgagtacattaaggaaatgcatcatattgtctacaaattaaggacacttatgattgacctttctgatgatgtacttgtgctcatggttttgttaacacttcccccacagtttaaccaatatattagttacaactgtcaaaaggagaaatgctcaacaagctcatttttcattgtgtgcaagagaaagaaaggttaaaaaaggacaaaactgaaagtgctcacttggccactacctctaaggataatggcaagaaaaggaaatttgagaatgaagctactaagggtccagttcaaaagaaagaacaacatgattttaagggttatttcttttgtaacaaacctggacatgttaagaaagattgtgccaaatatcacgcatattgtgtaaagaaaggtattaatcttgatttagtctgctctgaggttaatttagtttcagtacctagaaacacttggtggatagattctcgtgctactactcacataagtatttctatgcaccgttgcctaagctactgaaagccaagtgatggtgaaagatacatctttgtgg

SEQ ID NO: 136265 - DNA, 3531 bp, Cannabis sativa
catgaatttctctgatgatttcgtatgcttctgtagggagaacacaccgaagtagaggcatcgaataacctcttctatatagtttgccttcaattattgtgtagcgaggcaatgagtacaagagtttttgtgcctcatttttgtcagttggaagttatccgtcgagtagatagttgattatagaagtcatccatgtaggagaactgtctataatctctatgtcttccttttcacatatacttgactcgcttagcaattccaccgaaaccaagttcaattcatccaaatcgttctgcgaggccagttttgccaaggcattagcgttagagtttttttctcttggaatttgcttgattttaaagtaatagaatatttccaagttctttcgaaccttctctaaatattttgccattttcaagcccttggcctgttattccccgagaacttggtttacaatcagctgggaatcactatggaagatgagatttttgaccttcaatgcctcgactatctttaagccagcaatcaaggcttcatattcaaccttgttgtttgatgtgtcaaatttaaatctcaaagcataatgaaacttaaagccttccggtgagattaatattacccctgcaccctagccctgctcgttggatgtgccatccatatataacttctagttgtccgcatctcggtgaacatgcaggatttcttctagagttataccggctaggcctttaaaggatgttcgagggtggtatgttatgtcgaactaccccagttcgattgaccattttatcaatcttccagaagcatatggttttgataaaacttgtctcaatggctgatcgattaaaacctttatgggatgtgcctgaaagcacggctggagcttgccaaaactagagacgtcgctagatgcctttttatgttctgaaaggctttttcacactcttctgtccactcgaatttcttgttgcctcacaatacattgaagaatagaaaacacttatcaattgacttcaaaatgaatctgttgagtgcggccatccttcctgtcaaggcttgtacttccttaggcttttttggtgatgtcatgtctattaatgccttgattttttcagggtttgctttgataccccttgcgttgactatgaatcctaaaaattttcttgaggaaactccaaaggaacatttttttgggtttagcttcatgttatacttctttaatattttgaagcattccgcgaggtctgaggtatgattcccactttttactgactttactaacatatcattgaggtaaacctccatgttctgcccgatctgatttgtgaacattttgttcaccaatcgctgatatattgccccagcattctttagcccaaatgacatgactttgtagcagtagagtcccatattggttacgaagctcgtatgttccggatcaaggacatgcatttttatctagttatatcaagaatatgcatccataaatgacataagctcgtgcccagcaattccatccactaacttgtccatcctgggtagtgggaaacagtcttttaggcacgccttatttagatcagaaaaatcaatacaatttctccaagttctattgggttttgggacgagaataggattggttatccatgacggataaaacacctcacgtataaagttgttgactaataatttgtccacttcctgtttaagtgccccttttctctcggaatctaagggtctccttttctgcctctttgcttggtagtttggatcaacatttaaatgatggcaaataatattagggtcaatcctgattatatctccatggctctaggcgaactgatcctggttcgcccttaagaaacttattagctgctatttcagttgctcgtccaggttcttcccaatgtaaacacactttgcgggatttcttgggttgagaacaacttcttccaattcttgaattggttttaataagtttctttcatcttgaactcgagggtcaagatcttcatccttcttttccctttcacctgctaagaccgccattaactggttaccgacttctctatgcgatagcaatcacgagctagcatctgatcaccttgcaccactcccacaccttctggtgtttggaacttcaaggataggtgcttgatcgaactaactgcccctaatccgatcaaggctagatgacctaacaatatattgtaagctgatggtaggttgacaactagaaagtcttgcataactatggcggataggggtgcctcgcccaaggtcaatgcgagctcgattatgccttgactggcaatactgtcaccagtgaagtcgcaaagggttaccatacaaggcctcaatttggctttttgaagccccatcttcctcagtgtttccttataaaggatgtttactgagcttccgttatctattaacaccctttttatccttttattggcaagctaaatagtaatcaccaatggatcaacatgaggatatctcacgttcttctcatcttccttcgagaatatgattggaggttctttagtcattaccttcttagaaggttctggggcaaataccgactgcacattctttatttctttcacatatctcttttgggcattgctgctctcccctgcgatatgcagacctctgaaataaccatgatgtcctctctttcaacaggaagaggttgtaacccctggttgtttgggttgtgagacagactgggctggttgcgtccattgccctgtcttttcacatactgcttgaagtggcctcgagcgttaagactttctatctcatctttcaactgacgacattcgtcggttgtgtgcccaatgtccttatggtatttgcaatacatggtaggatctcttttgctcctcgcatgcctcatgggctcgagcttgccgaaggcaaccttttgctcatgcgcgaggtaaatattttcccgagtttcattaagctcagtataaatagtatacactggcacgtgcttatcatgcttcttatatttatttttatcctttgacgattccttaaaattttcctttctctttgagccagaggcccctgagttatcaactttaactgagacagcacttgttgaaacattgctgggtttgcctctcgagcctgttttcaaaaattcatctcttttttgagcttcctcttttcgaacgaacacctgagccttttcgttgaaatcagtgattttctttaccggacgaccctgtaggtcatcccacagttcgcccccagcggttgatggatcagtagaaatccccacctgaagggctgtaagttgtgtactatcatctagattcctaacccttccagcaaccgtactaaaacgacttaagtattccttaagttttttgccggcctatttctttatattggttagtgaggccacctcgggtagtctatccattgttgcctggaactgtttcttgaaatccctagacaactgttcccaagaagttatggaatggtgagtaaacttgttgaaccagctgcttgctgctc

SEQ ID NO: 136266 - DNA, 511 bp, Cannabis sativa
gatatcaagttaaggcaaatgtttagaacatgcctaacatctttaagaatccatttgatgccaacactggtttctaagtaaatatctccaatacccataatctttgatgcaccattatttcgcattctgacattgccaaaatcactagtagtagtaagaagtgaagaaatcactacgagtagtaacatggaatgaagtactagaatcaatcatccaactagaatcttgggttgcaagactaacacacccatcatcacatacaataacaacatcaccttcagcgaaaactgttctctttctcatttttcttccgttgattatgctctcttctgcaatcccttattaagtgacctggcttgttacaatgataacacttgatacattttcgagacttggatcttcttcaagaaccatgctaatttctagtctgacttcgtccctacctatcatgcatttcaggtgcaagagccccagaagaagaattcaccttgtgctttccttctggcctctt

SEQ ID NO: 136267 - DNA, 633 bp, Cannabis sativa
tgttatagaactagttctattttaattataactggtttgagttatcttgtgttatttgtttttattcattatgttatagaaccagttttatttcaattataacgggcttgagttattatgtgtcatctatttttattcaatatgttatagaaccggttctatttttatttatatctgagatatctacttctgatgacttttttcggcgacagtgacttttccagcgactgtgactttttctggcaacttttttgacgacttttctggcgacaataactttttcggcaagttttccagcaccaacaacttttccaataaattttctagtgccggtgacttttctggcaaaacatattattgttttacaaatatgagattttggcataaaaaatttcatataaatataaaaaaaaatccataactcaatggtattatttatttatgccataaaagaaataaactcttataattttctcatatatactgtaatttctaccatttaagtaattttttaaaatccattgagagtaaattatgtaattttattacaaatatatatatatatatatgtataaatatatatctattctacataaagtgtggctatgtaacagaaattcttagtttaacgat

SEQ ID NO: 136268 - DNA, 796 bp, Cannabis sativa
gggggggggggttcgaaaatgtgagggtgagagagagaggaaatgcaattttgtctaacttttgattttttaaaaaaaaatgagaaaagaaatgatttacttgataatattcagcatataacttaactaaattcagattaatcaacttaaaataaaatccacaaaagacaaaactcacttaggcaaaatgactattttgccctccaaacactaaaagttataaaatggcactaaggggtaatttgggaaattctacattcccgactaatctcgacattcccaatgtctaacaataccgcaccgctatactaaaataccaagatgtgattctactgagccatacaccgcgttccaatgttgacgggcactgaacatgcaaaaatatgacatttctatatatgacttataaaatgcattctgaattcaaataaatcatcataaattaataattgagaaacaataactgatttcataattaaaccctaattatctgctaatttctaagttaaagctaagcggtctttacatttgtcctcgtaatttacttacctaaataactctggatatctaattctcatttcctcttcgcgctcccatgtagcttctttcactagtaaaggtttaacgtccccgattcaagcctccattgggtttaattatgtcatcaacctttgtttcagttcttggaaactaccttaacaaacttacaattcttttgggtcaattcggttaagggcgtagaaatctttgcaaagccttcaacaaatctccgataataccctgccaaccccaggaa

SEQ ID NO: 136269 - DNA, 1418 bp, Cannabis sativa
aaagatttgattactttaaaatcgaacaaatttcgagagaacaaaacttcaacaccgatgccttagcaaagctggcctcgcaaaatgacctgcatgaactaaatctggttacggtagaaatgttgagcgagccaagtgtatgtgaaactgaagacgtcaagatgatagatagctctccaacatggatgacacctattatcaactatttactcgacgggcaacttccaaatgacaaaaatgaagcatgaaaattattgtatacagtgcctcgctacacaatgattgaaggcaaactatatagaagagggttttaatgcccctacttcggtgtgttcctcccgcagaagcaaatgaaatcattagagaaattcatgaaggtatctatggggatcatgcgggttggccaagtctgtctaaaaagatcattacacaaggatattactggccaacgatcaataaggacacacacgagtttgtcaagaaatgtgataagtgttagaggttttcacatgtacctcacgtaccgccaacacaacttagaataatgacctcgccctacccatttactatatgggagatcgacctaattggggcattacccactgcgaggaggagctaattctgcggtaatagcaaccgacttcttctctaaatggactgaggccgagcccctcgtctccataacttgcaagaaagtccttgactttgtctttaagaacattatctgtaggtttggaactcccgtgaagacattatccgataatggaacccaatatgatggcgacttattcactgaattctgcgagaggaataaaattatcaaaagcttctcgtcagtatccaagcctcaggcgaatggacaagtggaagccgttaataaaaccctaaaggatactatcaagaagaagttagatgctgccaaaggcaaaagggttgatgagctacctcaagtgctctgggcccacagaactaccgagaaaacaaccacaggacacactcctttctcgttagcatttggcttggaagtaatgctgcctattgaattaaatatatcaactcacagaagagagtttcatactcaagaagaaaactgaacttttaaaattgtccatggatctacttgaggaaaaataaaatgagtcgcgaatccccaacgtcgcataccaacaccgagttagaagattctttaacaaaaaagtcaagaaaagactattcaatgttggagacttggcgctaagacgagtctttacatcagcatgagtgtttaacccgaactgggagggtcgatatgtaatagaagcagtagttggagtcagagtctatgaattggctcgacttaattgctcgctaataaagaactactggaacgtagaacatttgtgaccctattatctataaataaatgatgtaactcgcat

SEQ ID NO: 136270 - DNA, 891 bp, Cannabis sativa
attaaatactgaactggtagagtatatctataactcgctgattgtaaagtcttaggcgagacacagatgtacaaactattaattcacatattaacgaaaaaaccattttgtatatgaagatatgatcacaaggacgacatcattaatccaaagcgaggcaccaacctcgctacgtatgaagaaaaataagcgagacatgttaactgttagaatacttatcgtataatgtacattatacaaaccaagcataacagttggatgaactcaaactaatgaatagcgaggcatccatctcgctataaagagacatactcatggtacttacactaatcagctccaaacatctttcaataagatccactactccattgagttagcactctcagatagaagctgacattcaaatgatgttgactgctgaagttcaccttgtcaccaagaattgcgattgtcagatggagcgttatgtcttcaagcacaaaaatgacgagatttacattatcaacctcgaaaagacatgagaaaagctctagcttgctaccagggttattgttgctatgttcccagcgagatgtcccagaacgatacgctttacaacatatttaatacacgtatgcattgacctggtaaaagcggaccaatcacaactttgtgattttcaaataataaccgcatttattttacgtgggacgtaaacaaatcctaccattttaggggattatttttgtaagatatcagtccgatttgtaattaactgtgctcctatgtaactataaacaggggcaggttacgttgaaaaagggacggaaaatccttaagaaaaaaagccctagaattgtatcagaaatatctaataagatagactcgtggactatgcagaattttaacagc

SEQ ID NO: 136271 - DNA, 1138 bp, Cannabis sativa
  modified_base (50)..(59): a, c, t, g, unknown or other
  modified_base (613)..(615): a, c, t, g, unknown or other
  modified_base (1085)..(1086): a, c, t, g, unknown or other
tgaagcatataatcacaattacgttccactgtattgacatcactgtaatnnnnnnnnnntatatgttctggacttaacggattttgtacacatttaaactataaacatgaaacatgtaaacataaatgacttcttatcttctattgataacggatcagattacattgaaatgggttttatttagggtataaaatcccaaaaaactcccacttgcactaacataaaacaagtagtgaatttcaatcaatctattgtcttgatatccagatcaagtgtagtgtacttaactaaaaccaaattacaggatctataagtctgtggtaagcaactgctttctccaccattacttcctttgtgttcataaaatattatgcaacatcattttctatatgcattactcctctagggatactgaattctgtactatttataaagtgcatctgaatatactgaagacatacctctaattctatccaaaatggaatagagataacacagttagaactttcttcagttgaataacttttaggtgctttcaaaagcaaccaatttttgtatcttcgctaatggagcttaaattattatagtaggatttttacatccttctagaatnnntcctccacccccagagtaaccacgatctccaataggttatgagttagtgtagatataaggattctaatatacaccctatcatctaacatataggtcactttcagagatctttcttgactgtctcctaatgttccttgtctgattacatcttagatggctcccactcaacagtaagattctggttaagttcatacatagaagtacatttaacctcttactattggtactcatggatatcttgttgtgacatattatcttagtctaaaactgtaagttccttctagactaagtcatcaacataacattctagtattaactttaatgtaaaatacttgcttaagaataagtaatcattaaagataccataaaacatttcataaggactagggaatttgcctaagtcattcgaatagactttgcaaaattctcccatcttatcctcagaattctaataagttatttctatccanntgaatggttagatttactttctcaattatattctaaagttcctatcatgatc

SEQ ID NO: 136272 - DNA, 715 bp, Cannabis sativa
agaacaggaccaggaccaggacctagacccaaacccaaaactgtaactggaccagggcgcggactcggacataggcccactctcgaattctgtgtctgggttcaggtttgggtcagggtttgagtccttgttcgagtctaggtccaggtctgggtccaggtgtggattccgatctgggtttgggttcggtccaggtccgtgttcaggtccctggtgcaggtccaggtttgggtttggatctggatctaggtcccaggtttcgatcttagtttgggtctaggtctgagtccaggttcgtaccttgatccctatctaggtttgtgtctgtgtttgggattgggtccctgatttaggtctaatccaattctcggttacgatctaggtacacgaccatgtctaagcctgagtttcggtctcggtttgggtcttgggcttgttctgagttcagttctaggtttgggtctaggtcctagttagggtcctagtcttgttacacggtcctggtatggcagttcttgtttaggtgctagtttcgggtctagggtctaggtctgggttcgggttatggtcctagtctgggttcaggtactagtctgagtcccagattcaaacaccgactacggttctattctaagccccatttactggattccgagtcaagatctggatcactgtcacgggtctaggtctagttctggtttagaacccatgtccc

SEQ ID NO: 136273 - DNA, 518 bp, Cannabis sativa
gatttaagaaaaatttaaaccgcgaccgcatcccaaagaacttcaaactatattttcttttgcaatatggtgtggtacgggcggtttgaacggtttgatgatcacccctatttcagagactccggtatagatgaaacaaatggatgaatgacaaagtatgttttagatgatagccacctatttgattggagcatggattatttagagcgtttccattcggctaattgtcactctattactcctgataaaaacattggagacgagctagctgatggtctaaatcatcttctaaggtggttaaaattaattatcacgtgggtttatgtaataatttggctaaaattggtgttggggtgattattcgtgatgccccgggtcctgttctttcttcttgtacttggacatgaattagttgtttatctgtattgttgctgaaatattgagagcttgtttggttgtgttttcagttttcagtttttaaaattgtatttttaaaagtgagaatagaaaataatttt

SEQ ID NO: 136274 - DNA, 1447 bp, Cannabis sativa
cgagtgaaaagttatgataaaaatgaatttttgatctcttaggaatttccaaaaacggcgaaacacgaaaatcccaaaatttgcactcaccgaaacactaccaaaacatatccatatcactccaaacttcacaggacacatatataccataaatactactatccttacgtaacagaaattaaaatcgagcccttaaataaaaaatgcaattaacgttcagactaagctttcaaaagttccaaactcaatttctaactcaaaatcgcctcaaattcaacaagtaaacatcgaaactagtcgcatagctactaaagaacaatcatataaggtcggaacattcataactattctaattccaaaactcctatacaaaaccaatcgtttttagcttaaaatgaaattaaaccataccttaagttttctctctttaaaaatttgctatcgcactactactggagcttagatcgccaggttttggattaaaaatcgaaaaaaataaatcaaaaaagaaaaagtttcgtcgaagaggaagaaaaaaaacttccttcttcttgttataaatttataatatatatatatatcaaacataatatataataaaaaccgtttaataaaaagttttttatatataaaaaataatataataataatattaatagatataatattaataaaaactttattattcataattatcttattattttttagccactaaaaaatttatactttcaggacgctaagtcaaataccacatactcctaactacctcaatacttatattattaatttattacaatattctcatcaattctatcaattaaagccgttataacatttctgacccccgatcgagtctttgcgaaacctgaaaaatatttttattccacatgtagctcatattacattcacacatgctatataaatctccataatttataaattatgcttatttactcacttatagtgaatttagaatttatattgaactaaattagtaggatcataatctcacttattacctgcttagcccataatataattataaatctttattacttaccattaggcttattgtgatactacaaaaaatttaatgataaatatatgaaattaatttaaaaattttaattattcttaaaaaaaatattttcaaaaaatattttatttataaatatgtatcttaaaaaatcaaactgaagttattaaaaattcaataaataatttaaacaaactaaaacgttttcaagataaaattaagcttatttatattttgaaacatatcttaaaaaataattaaaaatttaataaaatataaaattatttttaaaaaattagaaattaaaaaaaaaacacaaacttgttcccgtaatatttaatttttaatatatattttttattaaatggatttttaaaaaaataaataaataactttttaaattgctta

SEQ ID NO: 136275 - DNA, 823 bp, Cannabis sativa
atgatttttatggattcttcatcaacaaaataaaaaccctattcattagggattattagttatacattttatatttcaaataaacgatgtaattttcctattttctagggatatttctatgtaacaacttgcaagccctaacactatataaagagcaagatacacacgctcaggaggacactctgaacaaagctaatcacgctcaaaagcactaaggtatagaatcctctcttttttcacacttcccacctacaaaacacattttcattgtaatgttgaagagagtcatagttagaaattacaaagtgttagcctgtaatctgctttttattatctcaagaattaatacaactaaaagaggagtaggccattacctgattataagggccaaacgtctataaataattgtgtcttattattaattatcattccacacatgacagtcataagtaaaatttgatcctagttactccacgtcagttggctaaatctacagtcaacacttatagtgttaattctgggagtgaatacaattagatctaaatatataatgggaattatagattaactattcacattgaattaatggcacataaagaattcaagatgtagttagaagggtaaaacataagttttgacaaactctaattatgaactaataattggaggaggaactacatacgttaattatatcaatgcactgctagtaagaattctgtaatataagtctatattttcaaagagtgcaattctatatttatggtcaagtaataatagaattaataaaccgagttattgatgagttcaatagtaatttagagtt

SEQ ID NO: 136276 - DNA, 1209 bp, Cannabis sativa
  modified_base (39)..(41): a, c, t, g, unknown or other
gcctccttttttgtctctttgccgggtagtttggatcannntttaagtgatggcagataatcttacggtcgatccctatcatatccccatgattccaggcgaattgatcctggttagcctctaaaaagcttattaattgctatttgagctgctcgtccaggttcttcctaatgtacacacatttggtgggatttcctaggtcgagaataacctcttccaattcttcaattggttttagcaggttattttcatcttgaacttggggatcatgatcttcatctttcttctcgttttctcctgccaagatcgtcatcaactgatgatcgtcttttctatgctacaactctatgcgatagcaattgcgagccagcatttggtcgccacgcaccactcccacgccatcgggtgtttggaattttaaagataggtgcttgatcgaactgactacccctagtccgatcagtgctggatgacccaacaatatgttgtaagccgagggcaggtcaacaaccaagaagtcttgcataatagtagtagttaaaggtgcctcacctaaagttaatgcgagctcgattatactaaggctagcgatggtgtctctggtgaatccgcaaagattcaccatataaggccttaatttggccttttcgagccccatattctttagagtctccttacaaatgatatttaccgagctcccattgtctattaacactctcttgatcctcttataggcgagttgaatggttatgaccagcggatcgacgtgaggatatctcacgttcttctcgtcttcctctgtgaatgtaatggggggtttctcgattttcaccttcttggaaggttttggggcaaagaccgactgctcgttctttatctccttcacatatcttttctgagtgttattgctttcccttgcgatatgtggccctcccaaaataaccaggatgtcctctccttccacaggaataggttgtaacccccggttgtttgggttattaggctgaatgggctagttgtatccctggccctgtcttttcacatactgtttaaaatggcctcgagcgatcagagtctctatctcatctttcaattggcgacattcgttggtcgtatgccaatatctttatggaatttacaatatttgttaggatctcttttgctcctcgaatacttcataggctcaggtttaccaaaggctaccttctg

SEQ ID NO: 136277 - DNA, 829 bp, Cannabis sativa
tatacaataataattataagctagttacttaatgctaagcgttttaattacatatgtaacgtgtcctacataagatgtttattatttaaatatattttacatagtatttataatatttgtacataatttatatatttatttatattattttgcagatacttcaagtatcattcgtagtatttgaagtgcttgattcactatcactttcgagcagtgagataacattgtatttggtttgactcccaccactatatgcatccgctcttgctttttaagtaaataaaaaatttactcactgtagaaagccttgcaaccgatgatatgttttgatcctgttattaataatatcattgagaaagataataatattaatgtatgttaatgaagtgaatgaatttaagtagtacaaattacacttgggatgtgaataagctcttgtgcagtacaatttaacatcttttctgcattttcgccgaagaatgttgctattagtgagcatgtgtggtctgttagttgagcttgaaagcggcacctaataaattcaaatataaataaatttatttaagtcacaaattatgatagtaagatttgtgcttaattgagttaatataaaccttggaattttctcaacagatgattcgttacagttgtagcagttaaaacatgatgtttgattgtcaagatctgctttttgacggcattttatgcaagtcatgtaccaaaaggattgtcctaaattcttgatggagattgatgcattgatccaaaaagtagtttgctaataaagcataatatagttattgatataaagtatataatattatgtaaa

SEQ ID NO: 136278 - DNA, 1101 bp, Cannabis sativa
agtaaaagactcattaaggtcgaaggtcggtacccattgatagagaaactcgcttactgccttattctagcaacaagaaagttaaggccctattttcaagctcatcttgttcgggtttacactgaacaactattacgccaaatattgcaaaaaccagacgcctctagacagttactcaagtaggtgatagagctgggtcagtacgaaattacattccaaccccgaacaacaatcaaaggccaggccctagcggactttgtggtagaatgcacaggcaaagaagaaagcacactagaaagcaaccctgagctagtacaaacacttcagccaagtaacagtgaagacaagctgacttggaaactacacgtaaacaggtcggctacagatcacctatctagttcaggaatcgctcttgtcacgcctgggggccaacatcggcacgctgtagtcaaattcaaatttaagggatctaataacgaagccgagtatgaagctttaatcgatggcttaaaattagcccaggagatgaaagccgagcacattaaatcacgtatcttgagaatacgaggcttggggagaaaagatgatagcacatctgagaaaaatacatgacctgcttgcacaattcaaaagctacggtcccagacaaattcgaagggaagaaaacacaactgcagacgcattagctcgattgtcaagcagtaatgtaagtgataaggcaaacttggttcctgtccagttcctcgaagagcctagcattactggcacggaagagatcgaaatgattgatacttccccaaactgaatgacactgatagtagcctacctcaacactggggaactttcagataatcgaaatgaagctcgaaagatgaggaggaaggcggcacagtatatcatagtagagggaattatgtacagaagaggattctctatgccattgctcagatgtgttactcaagaagaagctgcacgacttctatataaggtgcaagaaggattttgtggaaatcacaccgctaggcagagcttatctaagaaaattctaaggcaaggttatttctggccgataatgaatgaagattcaaaggcctatgttaa

SEQ ID NO: 136279 - DNA, 547 bp, Cannabis sativa
tagtgaaaatattgatttttaaaaatctactaataatgatattggacatagttaatcaaaaaaatcatgttatatatattgaattttaaaaatatttcatacaattattatgtcgattttggacgtgatttgtatgattaatacaaattttattgtttattagtagtatctgattatgttttgtaactattaatatacaattttgttaattagtaggcttactcattaatactatataaattagtcataaaaatagtcacacaaatctaattatagtaagttgactcattaatatatctattataattaaattaagaatttgtatgaatctatgtaaatatgtttttaaatcggtacatttttaaaattgtgttttttgcacattttttgtaataaaattgtttttactgtacactaatgaaaaaacccataatttcaatacttatttttttattttttatatttttttttaaatcacatatatatatatattttatgtgcacgtcaaaatatatatattttttattttttttaagaaaattttata

SEQ ID NO: 136280 - DNA, 805 bp, Cannabis sativa
ttttatttattattcataattttttgagataattacataaaatataatttttttataaaaattttatatttttatgtttaaagatttttctttaagaaaattgcattacatacctcttttaacttgatgcctttaatttttatcctctcttttaaaatctttaatgtttacctcttttttcaatcattctactaatattacccttatcacttcacgataattttcattcttctctattaaattttgctcaaacttttttccataaacctacacatccatctacaaagaacacaaatctattatgtttgaaattatgtcttaattatgtaagtgtgtgaggataatttgtgtaatattataaaaattttgaaattaattatttagaggtaaatttggttaatgtataaaaaatagtattcttcatcttcttatatttttacggcgctatataaaaacaacacgaaaacaacaaaaagttatacaaaagtaacagaaaaaatatctaaataatttttaaaaaaattaataataataataataacatacaaataataaaaaattaccaacaaattaacaagaatacaacataaaaatatgtcaaaaaattgtattttggataaatgaaattataaaaatcataaaaaagtttaaaattttgtaaaactatatttttataattttttaattatttttgtgtatctgtaaaataatacctaattttttttttttttgaggacttatttaacaaaatttcctttgataacaagttatttaagggataattacaccacatattgaaatttct

SEQ ID NO: 136281 - DNA, 915 bp, Cannabis sativa
  modified_base (136)..(136): a, c, t, g, unknown or other
aattaaaaatttatattagtttatatatattattatttatgattataataaatactacaattaataagtaaaacttacgtttttttgatcttgtatataacagttggggcttgcacgtgcgacgatgtcagtcatntatttaaaacataaaaaccacattcttagtttttagtatgttctgaacaacaagctagtgaaatttctggccacgggccaagatacccatttaattcccctatatatttgtatgctctgtttgaaaaattatattaacatttcaattcattagttaattaaataatttgttacgtaaatagtcaataaattattaccttgccaacatttgagtaatttgttcagaaacttggtgccacgtatagggtctaaatagataattttttcttgcgcaaagacctctagcatccaatgcgcactagaaaattatattgggatataagtaagatagtataaaaataatttcaagttataatgtagaaataaacaattagcactaagaaattaaatatagtgtttacctgatattccaggaaataaaaaacatttggtggttgttattcatcaatgataacactactgcaaatatcagaattcgtgacggtcctaaaaacgatttttttcagggaccgtcgctaaaaatattaagtaactatttaaaacttttgggaaaaatttatagtattactaaaaatcgtagtaaacaaaataggcaacgttttttaataaaatacgattttttaatggacccttataggagacggttgaaaatcatcgcctatactataggcgacgctattaaaccgttgcctatactataggcgacgctgttaaaatcatcacctacttctcgccacatttcccacgtgcctacctactttttttctatttcccacatgc

SEQ ID NO: 136282 - DNA, 705 bp, Cannabis sativa
aaaatcgaatcatctgcgtaaaataagtgggatatagggctagcagtacgagaaacccgaactcccatgatctctttattctcttcagccctgagaacaagttttgacaacacttcactgcataagatgaataagaatggggatagcaagtcaccttgccttagaccacgattaggattgaagggagccagtggggcgccattgagaagaatggagtaactgattgtggtgacacattgcttaataaggttacaaactttactgttgaatccattagcttttagcactcggagaagaaagttccattcgagacgatcgtaggctttgttcatatcaattttgatggcgattacaccaattttccccttcttatttttcatagactgaagaactgcttgagctatcagagagcattcagcaatccaatgacccgggatgaaggctgattgaaaaggagacaccaatctatccataacttctttgagtcggtccgttagaatacgagagattattttatagctgaaattgcacaagctgataggtctaaagaggtctacacggtcagtgttggaaactttagggataagacaaataaaggtgtgattgagtttcttatttaaaactccagtcaagaaaaagtcctttatctatgttaatttcaaatttattaattatttaatttgtcatataagataattttaatat

SEQ ID NO: 136283 - DNA, 1196 bp, Cannabis sativa
  modified_base (1144)..(1166): a, c, t, g, unknown or other
gtaatgggttttatttagggcacaaaacccaacagttgggtgctcaagctaaacaaggggcagtgctgcctttgcacccgtactttaggaaggtggcacaattcttgcgactctgtccgacccaattcactcccaagggcatcaagtatctatctcccttgttcattctctacgcctcccagaagtgggatatgccctctccccatgaggtcagttagttttttaatttgaagtctactcccagcaaggcaggtcgggatacttctaattctctcagcctcacttcaagtggttgacgtgcaccggggacgaggccattagcaaaattgggaattttgttgatgagtattacatggtggatggcatgggcaccacctacactcggttctagcagatccctatatatcaccgtccacccttcacactttctcccagggatagagctcaaaggcttgctcaactggcgggtgcttcccggaatatcactttgttgaccttagaagacaactttgtggagtacgtgctttacccgaaggatttcattcctgagcctgtgaaggagaaaaagaggaaatcctgtgctggccgggcttagggagctcatcaggagaatgaactcgttcaacttaagcgtgaggctaagttgaagggaggtgcgggggcaaaacagtatgctcaggagcattttgagcaggacgacgaggttgaggaggaagatgaggttgaccaggaagacgaggttgaggaagaagaaacttccaattgagcacatgcccgttgaacatgcaattcgaatcagggagcccagtctacctgctcggccatccactcctgtaataggaaagggaaaatctgtcctggaggagataagagacttgtcaggttatgataagccttcaagtcttgctcgggcgaacgcttctcccgaaacgcaagatactccgtcttgttttttaaccttcttgattaatatgctttcatagctccagtgcttttctctaatcatgttgctgttatttcgtgcagacatgtctcagaagatgatcgaagtgctgaagaagagagtgggaggaagctcgggctgatctcctccggccaagagatctaggggcggtaagataatacctgttggaaattattttannnnnnnnnnnnnnnnnnnnnnngtatgttggattaacatcctaatatgaatt

SEQ ID NO: 136284 - DNA, 800 bp, Cannabis sativa
ttagtatacatggtaattattttagaatactttttggtttgatttcttttaattaataggtattaatttagtgttagttattggttacatactaattatcttttttaaaagaaattagaaaaataggttattagaaaaaataagaaggttaagcatggcacacaactctttaaaaccttcatttatatacattgattgatattgatgtttaaataatttattattattattattataagtttttttttataattagattagataaataataaaactgtgaaccaataacaacatagacatgataaattaaaaaaagtaatgggtattaagtaattatgtgcacatatctttttacaccaaattttataatatttgaataggattattattttttaaaaagcaaatttgagcaagattattatctacaaacaaaacacaaaatgggttcaaaaattagtaatttattctaaataataaactttaaaaaataaaaaaattgagaaatattttatatcacctattgaaattaaaaacttattaattctttttttatatgcatgacttataattttttatgttcttcacatctttttagcataatcaattgagaacaattgcatcttaatttaaccttatactttttataatgtaaaatgttgttagtgaatattgtaattcaaaatcaaatgaaaaaggtatgttaattttttttttaaaaaaaagtaacgtaatcatatattaataaaagttattattggggtgctataagagatttgaataaaattattattattattatt

SEQ ID NO: 136285 - DNA, 606 bp, Cannabis sativa
gcgtaatttattaattacagagatctatttaaaatacatggatataatatgagttatttgtgaaataaattttttttcaggttttacgaccctggagacccgattggaggccaaaaatatcacaacggttttagttagaaatattgacgggattattaggataagttgattttagaaatattgaaatattttaaggtactcggagttgaccaaataccctaaaaatataaatttcttagtgactaaaaaataataagataattatcaataataaaatttttattaatattattaataatattatattattattttatttttattaatattattatttttatatattattattataatatataaactgataagtttatcaattttgttgtatatgtacaatgtatattaagtttaatatataagagtaaagaacgaagaataatgaagctctcgttctccctcattcgataaaactttctctttttatatctacttttttttcaatttttaacttgaaatttagcgatctaagctccgatagtagcatgatagttgttgcccctaattttgcccaatatacgtggaccaatcagacagggacacgtg

SEQ ID NO: 136286 - DNA, 1126 bp, Cannabis sativa
  modified_base (341)..(341): a, c, t, g, unknown or other
gggtggtgacaccccacaccgcgcggacacccgtgtcacacgggatgcacgcgggttcagacaaggggatgtccgagtattcttggacaggggacaaaaatttgtgtctgatcaggggcttgcgcgcgcggagaggctgcatgcggcctccctgtgcgtgatttctcgcccaagccttccccatcacgcacgcgaatggtatgcaatgcataccatccgcaccaaatccaatttttttttcattttttttttctatttttcatgttttttcatggaattaatttcaaattttttgtgtagttttgtattttgatttttatttttcaaatttcaaatctaantatcagaattaaattaattaatattttttaaattaatttaagatattgtggatttcatagaataaaggaaaaaaaactttaatatgaggatatttgttcttctagagagagctatttttgggtcaacatatatcttaaaaaatacattatgtgattgtatatatatatattaaaaggtaatattaactattttttttattttttaatgtattttttttatattattttactaacgtatttttcattttatattcccattagatttaataaaataaaacgtataattttagtacacaataaatgtaaagttattaataaaaataaataataataaactatattttataatatatattaatattagtttttttcgttggattaaaaactatataccttttagtatatatacgatcatgtaaatatatatattttagtatctatacacaacaatttaaaaaatatatacacatgcaatttaaaatatagatatatatatatatatatacctataagtatatatatacaaatatacaatattacataatgtctaaaatacatataccttctagtatatataaaattacataatttgttaaaattacaaaatatgattataactactttctagtatatatatatcacactaattataatataataacatatagaaatcattattatataaataaattaaaataaatatattagtataaatatttgtataattggtatattttatatactatgtagtatcaatgtttaatcagttgttagtatctaaagtt

SEQ ID NO: 136287 - DNA, 730 bp, Cannabis sativa
gggtcccctaaccgctagaaagagcctccctccggatgtttgccaaaaatggaaactccagggtttcccctagacaaacatcgggtgcaaatatctcaaaagtagcgaaagcagaggaaaagaaaaataaaagaaacataacgtggacgtgaaaactgtctcatattctgagcaatctctcagcagaatggttgattgcaaattaaaagaaaaagaaatatatacaccacacggaagtcttcgccaaagtcatttcctagaaatcaagcacttaaccaattttttttttaccctagcatgcaagtgaacaacaaaagtataaagtacccagaaaacttacacaaaggttgtgaactgggggctggtagtgatcgacgcggtagaatgttgattggcaacgacagaggaatagcagtaaaaaatctatggtttctagaatttttctcgaagatgttattggggcgaaatggcaaagtggtgaaggtaacccagtgaagaaaaaaggaaggcttttatagaccagaaagggtgcaaggcagctgtgatcgggcgccatcgtacggtgggaatggtaatcgattcacattctacgaatccaacggtggagacaaatggacgccagggcggttgaaaacgtttgagtacttagctgacactcggattaaataccccggtttctcaatggatgggaagcgaatcgttgcctgcaaaaggaaatcaatattaatga

SEQ ID NO: 136288 - DNA, 875 bp, Cannabis sativa
tttcgttcagcactttaacccttgttttgttgcagagtaataacaagtacggagcttggatctccttccttaacctgaaaaggaacagttcttcataatcttccacaaaggtttgagtatcaccttgaatagtgtgggttctactcaactcacttttggaacacattttgaaagagaaataggcagtgttttcgaataagagaaagaagaagatgagagcttttttgacatagaattagggttatctaacattaggaagctctctctcatcactttatgtatatagccttcacttagggttaagttagatgagatgggccaaaataaagacaattgggcttaaaatcaaccctagggtcgaattccacataaggaaacccatggattttatttttgccactctatttcaatttaatgaaataatttatcttttcctattttaccacttatctcttctaattatttaaataataattttaatttaataattataaataattatcaaataaaaataaaatttaaatatatttattaattagactcacaaaaataatgtaacatcctcgcttcaagcttttactaggccctccccacaaatttatggctcttatacacgactacatcactctggctgcttcatggactgacggttggccctacagaccaacacgagactttccagcgagctttattctcactcgcctgcttcttgggaaaacttcctagaaggtcatccatattaaaattacccttggtcaaacacgcttaactgtggagttctttcgtgatgggctactaaaaaagaagatgcatcttgttgatataggtagtaccaatcaattcatttaagccctcttcaactgtgtagtcccata

SEQ ID NO: 136289 - DNA, 1437 bp, Cannabis sativa
gtctctatcttctcttctcgcttggcaccagcaaccctgttgtacacatctcgaagttgacatggcattctctcgtaacctccactttgcaaagcaacttgaaacattatgttgggagttttaattcctacggagttcatcgacctaacttgggcaagcaacccatcgaacacaacttgatataatctcaaaaattgtgcctcactcggtgaagccagctcgtgattatgtccgatgagaacatcgtacatcgtcttgtcttgtgccgaaacccatccgttttgcgtacatttcgtagaatgcttcccatttttccagtttgtcgagactcttgcctagcacgtcatgtatttcaatctaattcactggttttgtgatgtttagctctgctgttatggtttcccattcataagtttgttcgtcattcatgttggcttgttattgatgtctaagaatttcagatgaagaataagggaaagagagtgctcaggggagtgaaattagattttatgagtttaaaggcttaagataatagagttgtatgggttggtgatcacatttaaagttgtttggctgatattaatgggcctttacaatattagaatttgaattcaactcctctcgtaaatcagaacagtacaatagtacaaatattttttttaattccaaatttaattgtaaaataaggttattttataagtgtaaaggcctaatattattgagttcaaagggttggtggtggcatttaaattcattggccttatgttaatgggccttcacctaaattttagaatgaattaaaccattttcgtacgtccaaaatgaaacattgtactttttgttttttttttaaaaataagtttggaaaataaggaaatttaattaatgagtttaaagtacttagatttttgagtagtatgggtagttggtcccatttaaatctattgggctgatattaatgggcctataccaacatcttttaatgaattcaaccattcttgtactttacaaaaataccgcagtactattaacaaaaccccctacgtgtacacgtgtattaaatttggaattcatagattttactaccttttttttacacatcagatgtggccaatggagtaaagctaagctaaaaacgtactataacttatccttgggacaatatataacacacttgagaagtgttgcaatccatcatcaattttatatagcaaattaacttgtaatttagttattcatatcattacaatatatcaaatatgagttttggtcctcactgggttgttttcaatggcccgaacgaaggtatttatagtagctacgacgatgctatgaagaaaaaccctaattcagattccacaatcaaaatatgtcgatatgattctttcatagaagccttttctgctgcatgtctacatggacagacgggactatgct

SEQ ID NO: 136290 - DNA, 852 bp, Cannabis sativa
  modified_base (780)..(792): a, c, t, g, unknown or other
ttacctttctctcccccagccacccacaccgctgcctcccatcaccggcgatcaaaacgaaggccaccactatcccgcctctttccgtcgaagctcagcttgagaagaaggagagattaagcgaacccggcccagatccgactgaccccagtctagatctgaccggactcaacccagatcttcccatatccaacagccacctgcaagaagaagaagaaaaaatacagttagacgggctgggcgagaagaagaagaagaacagaaaaagagatgaagaagatgaagaagaagaaaaatagaaaataatgaagaagatgaagaagaagaaaaatagatgaagaagatgaagtggtggtttcggtggatgttggtggtggtggatgccgattatatgaagaatatgaagaagaagaaaaatagaaaataatgaagaaaaaaaattgttggaatgaaagggaaacgaagcccagaaagggaaacaaaatttgggtttcgaaattgctagtcaatggttcgtatggagccctcgttttcgattttcaacgaatttcaggatttgaaagatgtgggttcggataaagaagcgttgcagatgactgtgactattggagaaaccattgaagatggagatttcaatttcgacaaaactaaaatgggtttgattaaggaggaagaaggggaagaagaaccagaggttttaggagaagaagaagaagaaccacagagagggtgagagaaatgggtttgattaaggaggggtttttttttaatttttatttnnnnnnnnnnnnntttttaattttaaattttttaatttttaaagaaaaagaatttttttttatttttttattt

SEQ ID NO: 136291 - DNA, 766 bp, Cannabis sativa
aacaccttaatactagaggaaggatgagtcattttacaggtcaatcatgtaatccaccaactatgtcaacacccaagcaagatcctgatatcggagaattgagtgatggtattcaaggtgttttgatcaagcaggaaaagctggagtataaggttgatatgttgaaatctcattttcaaacaaagttggaaaaaatggaggagagtatcaatggagttgataaaaaggttgatagttgcttgaagtatcttgctgatattaaagatatttttctcaaagtcaatgttagttgcaataaagacaagatttcttctatgcttgacacagaggtataataatcgatatttaatcattttgttaagttttcgtattcttgtatatcaccttagtttttggttggcacaatatttatattattgttcaaaatgttatatctaacacaaggtgaagatatgagtagtgttttatctatgtttgtgttagatactagtttgtagctattcttcttttttattgtgttaattttattattaactttgtttctacagaattgtgatgatgatataccaagttttaatttatttagtcagcttttatctaattatgaaattacaccaaccaactacttcattgagggtcagaaaaataaataatcacgatggggataaagtttttttttttcaaaaaaaatatatatatatttaattataatacataattatggtgtcgatcatataataacaatcagtatactaactctttttta

SEQ ID NO: 136292 - DNA, 721 bp, Cannabis sativa
atctagatcttggtaaaatatatccaacaacagcagccttaatttcttcacaagagtaatccttgcacagccatttagcatgctgatcatatacaacagcccccaaatgcaccaggttttttattacaggtattctcccttgcattttattgcccagcaaccctttgtaatatgacaaaaaagcttctaaaaattttacttcttctgttagtctttccccctcctgattctgtattgaaagtactctatttttccttcttctagctttaatacttgcatgaaataaagccgtgttttcatctccacttttaagccaagtcaccttagcttttttttgaagataagactggtaattttttagtgaggcaatataagcttttcgggcttctaatttctcctacaacaaaatctggtttaacgggtctgatgcactctattttgcatctggtttaacaaatctttagccttctcagtagccatttgtatgtccaaaaaagcttgcttattcaactcccttaatacccctttcaatattttgagcttagtgaccacttggaacattttgagaccctgagtttgttgattctaggaggctgctactgttgctgcaaaatctggatgagtgtttcacattttgaaatatctaaatggtttcttgccactaggagccatatatagaaagtcataacagctggtatatggtccatcaactcttcattca

SEQ ID NO: 136293 - DNA, 505 bp, Cannabis sativa
tttctcatttccagctcacccaaaaatgaagagttttgagtctctcatttttacaaaatagcattatctccgagaattggtgaacaactttgccataatataaaaactaactaagtggtgtcaaagtatcacttaggcatcttaaagtacatcccttgaacgtttttacacttacccaacgtccaggttgatgtcatatgtcaacttgggcgtcgggatgtcaacctggtcgctagatcatgatctgcttcagtaaaatagccataactcactcaatattgattcgattgacatgattcaacttgagtttcgaacctaattcaatgatctatcaagtcatgtctcacacttcaatcgtaatctgaagttatcgtcatcaaattttacctcaagggagttataaaaataagtttcgagttacccgcaacgagacccactgggctccaaaaaatggtcatcaccacaaagagctaattttcacctttagatcatcatcaacggtcaa

SEQ ID NO: 136294 - DNA, 542 bp, Cannabis sativa
caactttctacatttaattaaatattaaaacaatataattcattcaattaatagtactatgcataaccaagtaaatacagttataagttttcaaacaataacattttctaattaattaaattatatattttcaacacatcgtactaaatacttcatcaatctaatttaatttcttatatatttgtagtacattacattctattgaattcaaaaacacaaaagatattcatggcttggagtaaaattatccaattaagtaaagattattttggaatgtatatcgaaaccatgtgaatataccatgcatgtttgtttatgttaattaatactaatttgtaggactatgcaaacagcaatgggagtgttcggaggtgattgctctacaattgaaaatcaaaataggccaccctttattgctttagagctttgccgagaacttttagtacgtctttcaaaaaccatttctataaatatatatatatatataatatccatatatgctcatatttttaaaaattaattatactaatatatattacaat

SEQ ID NO: 136295 - DNA, 1042 bp, Cannabis sativa
  modified_base (317)..(339): a, c, t, g, unknown or other
  modified_base (406)..(410): a, c, t, g, unknown or other
  modified_base (472)..(475): a, c, t, g, unknown or other
  modified_base (595)..(606): a, c, t, g, unknown or other
  modified_base (889)..(899): a, c, t, g, unknown or other
attttcacatgtctttgttacttatataatcatttctgaattgtgtatgaatttataattaaccatgctgttttctgttattaattgtagttgtaaatttcgtgtaaaataggaatactctcacctaccgggacattgttggattcctattttaatcgaaataatcatttatttttcgtcttagctttttcatttcgaatttgctatgataatatatcattggatgaatggtctataaattatctgcttatgatgttattcgactttctctaatgaaattgaatggcccagattactatattcccgacattctatcnnnnnnnnnnnnnnnnnnnnnnncttagaaatctcctacttgtatgtatttactttagacaaatcaaacttagagttatattagtagtgnnnnnccaagctagaataaaactcattttatattttgttaagtttaagtctttgactttaaattttnnnntccaaatagaaattttatatttatgtttccagaatacaatacagttcaactttcacaagtgtttaatatccattttctgtcaatagattcaaactatatgttaaagtatggaatatgagnnnnnnnnnnnntgaccaagatccacttggactattctaagaactcttcgatgtaactagacctaagtcatcaaaagaccacaaccagattcttattataaatcttggcatttgcatcttgttcaaagtgtttttgcgaagatcattctctacaaagagtaaatatgcctatatccactgaatgtaggatcatctatattcgaatatggatgtacattcaggggttgatatcagttttttttatattcttaatacgatcactctagattttatcttatgcaaagaaatttgaaannnnnnnnnnntttcatgaatttctagcaatgttgcaaaacattatggtaagtggttaacgattttgcgaactgataggggtggagaaatatttggtagatatgcagttcaaagatcattaagttaattttttgaattatatccaaacatacct

SEQ ID NO: 136296 - DNA, 551 bp, Cannabis sativa
  modified_base (200)..(206): a, c, t, g, unknown or other
  modified_base (260)..(273): a, c, t, g, unknown or other
ttttcccacctaattttgaattgtatttatttatttgaaatgctaatatttcaaaaaaattcaaaatttgaaagttagattaaagttgaaaattaatttattaattaattttagatcaaatcaagtaattttatttaatgatttatttaaaataaatagattaaaatatactattttaattagaaaattagtaattagtnnnnnnnttatctagatagatattttctaggtagacttttttggtatttttctagatatannnnnnnnnnnnnnaaaattaatatttaagttgattatgttctagacacttaataatttgatatttttcttaagagatttaatttaataggaaaattatatttatgttgaaaattaatttattttattttagaccaacataaattagactaagttttctagttttattttattttatttaattgaattttgaaaaatgtattgcctaaaatacattggatttcgaaattcagttatatgtatttgtagaaaattaaatttgagttgaaaattaattgtttaattaattttgg

SEQ ID NO: 136297 - DNA, 949 bp, Cannabis sativa
tgggagctatctgagatgtaatcaaataaggaacattgagggacagtcaaaacctacagttttcaccaaaataaagataaaccttgtgtttaccaactcaaggataatcaagtggtagtattcctggtcctctatgttgatgacattttgattattggtaataacatcaagaaaatgactgatataaaggaatggcttaacactcaattcaaaatgaaagatttgggtgaagctagttatgttcttggtattcaaatcattagaaactggaagaacagatcacttgttctctcgcaagcagcttacattgataaggtgctagagcgattatcaatgactaacaccagaggggcagttatgccttctagacctggtatctgtctatttaaggaatagtgtcccactgatctccaagagataaaagacatgagaaagtttccttatgcttcagcagttggaagtctaatgtatgttatgttatgcactagaccagacatttgctatgcagtagaaattgtgagtaggtatcagacaagcccaggagaggaacactggactgcagttaatcatattctgaaatatttgaagagtacaaggcattatatgtttgtccacaagggtggtgctttaaatcccatcggctataccgactcagatttctaggcttgtcttgatgacatgaaggccacatctgggatggtatttactcttgagggtggagcagttatttggagaagtgtcaagcaatacgcaatatcaaactctaccatggaggctgaatacatagctgtcaccaaggttgctaaggaactggtctggttaagaaagttcttcacagaacttggtgttgttcatggaatggaaaaactactagttttactttgtgacaacacttgtgctatagacagcagtaaagagcctcaaagccacaagagaagcaaacacattg

SEQ ID NO: 136298 - DNA, 658 bp, Cannabis sativa
  modified_base (590)..(596): a, c, t, g, unknown or other
acctaattagggtatatacaatatgttccagccagtatttcacagaaaaatcaaatgaaactcaactttccattaaagacgaaagctttgagttcgaagctccaacttgcataaatccaacacaacaccactaaatcagctactagaaggtaaaatcaactcaaatgaaccctaaaatttgaatcctaaacatcccaaaccctaacaaccactaattctcaaaatcataaactcaaaccaagaaaaactcacaaactatagaagggttattctagggcttacctttccttgattctcctaagatttccttgttaaaatcaccacaaatcagcaacaattccccttgttcttgccggttttgaagagagagagaaaggaaagagagcttccacttgatttttttggtattttctttaatttttcctatttctttctaaatgattaaggattaattcacttaacctttaaatgagtaaactagtactaggtgtcactctaataggcagccaccgaatacaccattcaacaaaaagaccaaattgccatttaacccaaaattagggtatttcaaaagctaggggtaaaatggnnnnnnnccataaccccgcttaatcccgatattttattttctctaaaacattttccactaagaaataag

SEQ ID NO: 136299 - DNA, 1472 bp, Cannabis sativa
cccagtagcttcaaaatcaatgtactgattgtttggctattctccaaactagtggacagactgttgaaagaacaactatttgtagttatattctttcaacagtctgtcccctaattgtgtatattttcaatttttttggatgcatatcccagtagcttcaaaatcaatgtattgattgttctcatcccaatgtccattgctttgaactagatcaagtattgattccatttttcggcaaatcaactaaacattttccaagatcttaaattaaattgtatttttgatgtataaaaatatttgaattacattagttaaccaataaatcaacaataaattttatttatttttttttttaaaaaaaaactaattctttatcaaaccaaaatttaaaatttctcataagcaattaagaatatcaattttgttccaacttattaacaataaatcaacaatttctatttgtttcaagatatacgaaattcaatttttttttttttctgttttgtacatggataaattgaacattcaaatgatttatagcaattaaacaattaaacaacaataaacatttgaattaaatttgaattttttatgtatgaaaatatttgaattacattaattaaccaataaatcagcaataaactttattattttttttaaagaaaaattaattctttatcaaactaaaatttaaaatttatcacaagaaattaagaaaattaattctgttccaacttattaacaataaatcaacaacttctatttgtttcaagatatatgtaattcaattttttttgtttgttttatgcatgaataaattgaacattcaaatgatttacagaaattaaacaattaaacaactataaacattcacgactatatatttttcttaaattttttttgaatcaaatgttttaatcattaatatgcaatcatcagcagtaatctaataccttgttattttctctttggatttgatagggagctccgataaaaaaaaattcaactcattcttgtatgatctgcaatatttaaaaaacaattatatattatgtagtgtagatctttctctcttcattttgagttttatgactctgttttttcatacctattttcaaaatgaatctggatttagtaggaagcttcaatcaataatttttcaactcattctagtatgatctgcaacatttaaacaataattatatgttttgtactatagatctttatctattcattttgaattttgtggctctgatatttaatacttgttttcaatttgaatttggatttagtagggagctccaatcaacaatttctaaactatttattgtatgatctgcaacattcaaatgagaattttaggttaggtagtatagatattactcagttccttttgagatttgtgtttcaaatgtttgatacaggtttgtaagcagatttgttctatgagattttgttgttgatcgattgac

SEQ ID NO: 136300 - DNA, 575 bp, Cannabis sativa
  modified_base (412)..(413): a, c, t, g, unknown or other
tggaacgccgatcacctccgaaaatattaccaatagtccaaatgtgtagcttaggctttgtttaaaggatttgtaccgtctaagtgtaagcaacctctgtattttaaataagactgagtgccttaaaactaagttttcatgccactcatgggggtactaaagcataccacacagacagatgaaaaataaaccgaaagtaaaatatccggacccaaagggcaggtccaaaaagaaaaaattatgcatcaaaaaggagcatatgtataaatatcctgacccaaagggcaggtccaaaaaaaaatcatgtatataaaaatcctgcccccaaggacaggtcaaaataaaaaatatatacatacaaagggcccggggacaggccttaatcattgtctccccttagaaaataaggcanntattaagataaagattgtcttaaacaaaagaaaaatagctgtaaataaaaaaaagattagaaaaagcttggtgaagtgagctggattcaaacgacctaatcaatgcgaggaggaaggcgaggaccaatacgcgcctcaagcatggcgtcaagtttcttcttc

SEQ ID NO: 136301 - DNA, 1048 bp, Cannabis sativa
  modified_base (366)..(376): a, c, t, g, unknown or other
  modified_base (503)..(519): a, c, t, g, unknown or other
ttgtttttgggtttttttttttttttttttctgaacaaaagatgatttatttattcggaaatattccgaatcaaaaatagacaaaagttcatgaggagctattaagctcactaaaaatacgatctaagtgaaaataaaatgctccagcaacaataagcagtcttattagtagaccgtttaataaaatgtaaagacacacaattaagaaaagaaaataaagaatgacaaccttaaactgagatggcattgaaactgagccaagaaaaaaaaaatgagaaattataataaattgggattatttcacaaaaacataaaaacaacaaaaaaatcacaaaaatacagtttcatagaattttaaatattttnnnnnnnnnnntaattttatttacagaaaatacggtattttatgttgtactcttgttaatttgttgttgattttttgttatctgcatgttattttttgttgttgttttgatgttatttagatattattttcatgttannnnnnnnnnnnnnnnntgttgttttcgtgttatttttatgtaaaaccgtaaaaatgtaaaaaaaaatatgtaaatgtaaaaatgtaattttttttacaaaaaatgatacctcgtgtaattatccttaataaattatgagaaattacttatatacttacttttgtcatttttttataaaaatactgtcaagtggtattttttatttttttactgtgtatttttataaattttatactgtagtatactgtttttattttttagcttttttttgtttgttttagagtgttgtgttacggttgttttccataatttatttttttaacgttaattttactgttcttgctccattttgttgaaattaataattgtttttttgggtgttctcgtggtgctgtgatggatctatccatagatgtggaagataaggctataaaatacatttattcttccttctatatggttattttgtggattttttttagttttcctaaaaatacatttgacgagctcactagaaaaaaagttttgaggtgtgtggttctttt

SEQ ID NO: 136302 - DNA, 598 bp, Cannabis sativa
gtttttcttttgattttggtgaaaactcattataaaagagaaattttactttttacccttaataaaacatcgaatattaaaatttaaaccctccactaatttgtacaaattaattctattgattacatgaacttcctattttaccatttttttaaaaaataaaataaaatttaaaaactaaaaaaacctccttctctcttcctctctctctcttccttctcatgcacctctctctctctctagaaaaaactgaaaaaaaaaacttccctttctctctctttcctctctcttttccctgtcgaatgtttatttctcggtgggcggtggtggaaaaccgaagcacaccccaatcactcaagaatcttacaccattataatggataagttgtgttttaagtattttgttagactttatgtagtttgctttcgttatatgtgtcgtatttgtaaaaactggtgttttttagtttgaaatagtaaagatcttatagatctagttttctatcaaaatcttggttttccagatgttatcgacagtttatcgacaaaatatcgatgctatgtcgatatcctggtaagaaaggtcagggatgaccat

SEQ ID NO: 136303 - DNA, 897 bp, Cannabis sativa
  modified_base (32)..(59): a, c, t, g, unknown or other
tttagaaagttcttatttaggatgttaataannnnnnnnnnnnnnnnnnnnnnnnnnnnggtaaaataatttccaacatagcattggtatccctagcatttaagattttaccttagacactagttcccacatgaccagttggtcaatgggatttctctctcaccaactcgaaaatacctctatgggaagcagttccacgattagagcaataagcttctctaatccattgagacaacttagctctctgttgttctttcttaatgcattggctttcaaagttcttctagtttttcatgaaccagtgttgaaaccattcatgttacttatcgagagagtctcccaagtgttgttgcaagttagccacagtttagctaagctgagctacctaaggattggtctcctcagggtcttctatctccatgtgcggctccccgggtgggatctgatcgttgttgccagccctaggagcagttggtggtggccttggagggcgagttgaggagctggttcaaggcctactcttggcgcctagcgtagagaagtagtcctagttccaacttcgtccactagcatgcccccagttgcttggccagttattggagtttgtttgtcaacacttgtagaacgtgatgcaacaatcttgatgagtgactttcttgagctatggttctcagtaaaagcactaaaatattgactcaaaaatctggactagatttctaagccacatccgctcgctaaattggcaagaatgaaaagtttgttaagtaattaataagagagacccaataatttatagtagttcaccctctatatcgcgatagtaatagggctatgtctacttcaagtttttatttctcacgagataataactatagtaatagactaagtatcaaaaac

SEQ ID NO: 136304 - DNA, 1281 bp, Cannabis sativa
  modified_base (350)..(351): a, c, t, g, unknown or other
  modified_base (647)..(656): a, c, t, g, unknown or other
taggctaatttttatattttgttctcaaaatactcctctcataatataatttatcttcattattttcctcccaacagattccccatttctcctaatctcgcaatctcttcactaaaattttacacaaaagggagaatttttgctgcactaaagcacagattggaggtggaaggaggtagacgctaactacagggaagcatctacggtcatccacgagaatcaatgggtaattggtgtcttttgtttctttttgttgttagttgttattatttgttgagaatcatgaggttccattacaaaaccattggtgatgagtggagtagcacatattcttatatatggctcaatanntttacatttaatccatgtgggacaatgttctccaatatccccctcaagatggtgactatttttgctcaccaatcttgaatcaccttatcacaggccatgccatgtgctcgcttagtttttgttcggatctcaagcgtctttgcactatttggatctcgtgcggctggctaaccatctggatatgtgtggatcgaaagcccgatagggatatgactctaataccatgttgagaatcatggggttccatctcaaaaccaattggtgatgagttgaatagcccatgttcttatatatgnnnnnnnnnntttacatttaatccatgtgggacaatgttctccaatattattggtttaaaatgttgttaaatgccaaactagtacatattttatagtataaaaatacaaagttaattaaattttaaaaaatattttcatgaaattaaagtgatattttaaaaatattttatgtaagattagttttatctttgtttataaataataattagtatttatgacataattgagaaaaagaaataaaaagataaaaaaattgtattatttttattaaaagaattataaattaattagattttaaataaatatttttattgaattactgtgatataattctgtgttgaaaatattttgtttggatttaattttgtttgtgtttgatcgagaaaataacaattgtaaaaagaaggaaaaaaaaataaaaaatggcaaaagtatggcccaaaggcataaaatttggcatttttgaagcccaaaagagagcacaaaggacaaaagctcaacaggcccatttttccctctttagccgacatcaggtgccatgtggcacctccaaattcacgtgtcaacagtcgggtgttgtgaaaatttatattaatttataattgcgcaagtgtacacaatcacaaacaagtaa

SEQ ID NO: 136305 - DNA, 964 bp, Cannabis sativa
  modified_base (936)..(938): a, c, t, g, unknown or other
attctaacatgatcaaacttatcaaataaactgttttaagaaatggaactttgcttcttcaaactctcaggtttggtttactgagtcattatatagatttgttttgatgtatacttgagtcatgctttcatgtatatgtgattttatttggtgaaatttattattatgtatttaagttttatgctttaatgggtattatatgtgtatgttttcgatttgtgattgaatctttgtgaatcttttctcatttatatactcctgtagttgcatgtgagtctgaacatctctctttctcagttttctttttctcttttgcaggcatgttctaactctattttggtggatttgggttacaaaattctctcacaccttcaaacgtcaattttttgaattgtaaaacatatttacagtaactgattctcttgttttatttcaattattggtaaaaatttcaaattttaaggggttcatttgtatataataaaaatatggaaaactaaatgtatattacataattttctttgaatattagtataaaatatactaaataaaactatttcatatctatatgcttatttgttatactatataaaaattaattacaataaacttaaaaagtaactaaaaatataactttaaaataactaactagcgatttaaatatttaccaataagttatgtgtgtttttttaagtttattgtaacttattagtttattaaataaacttgaaagtaatataaatatttttacaaaaataaaattaaaaaattacataaaagtatttaaaataataaattaatttaatataatctaaaaataaatacataagttttaaagtagcaaaaggttatataaaataattggtaaatgaaaatagtaacttattatattagggccttttttatttttgcacttcaaaataatttttttttttnnntttttttttttttttacaaaattcta

SEQ ID NO: 136306 - DNA, 669 bp, Cannabis sativa
gggtactttgtggtttggcaccttggagttcagctttacatatcagatcctgaatatatttttgttgagataagacgacaccttcagtagtgggaagcacttgtattcccaagaaaaaggagatgagaccaaggtctttaagtgtaaagttggaactgagtgctacaattagggaagacacttgaggactatcagaaccagtaatcaagatatcatccacgtatacaagaatataaagccagcttgaattggtgatcttagtaaataaagaatgatcttattttactgattgaaaccccagggtgagtagagcagatgacaacttttcaaaccaagcccgtggtgcttgcttcaacccatatagagccttgttaagtttgcataccttgtttggatgttttggatcaatgcatccagggggttgaaccatgtaaatctcctcatgtaggtctccatttaaaaaggcattgttaacatccaactgccttattggccaaccttttgtcactgcaagagttacgtaactcgaatagttgtaggcttcacaacagagctaaaggtttcattgaaatcaaaccgaagttgctgatgaaaacccttggctacaggtctggctttgtattggcttacactacaacttgaatagcctgcagccacttcttgccatct

SEQ ID NO: 136307 - DNA, 628 bp, Cannabis sativa
tatggtgtcttttcttggacacaatgttagcaaagatgggattaaagtggatccgagaaagatagaatccatcaaagattggccaagaacgaaaacagtgacagaagttagaagcttgttgggtctggctggttattatcgtcggttcgtagaaggattctctaaaatttcaatacccttaaccgacctcaccaaaaagaatcaaaattttgtatagcctgacaagtgtgaatcaagttttcaggagttgaagcagaggttaattacaaccccagtgttagctctgccttctgacagagagaagtttgtggtttattgtgatgcatccagacagggtctggggtgtgttctgatgtaggcgatcgggtttttgcttatgcctcccgttagttaaaagattatgaacaacgatactcgactcatgacctagaacttgccacagtggtgtttgctttaaagatttggcggcattatctttgaggagagataccgaccataaaagtctcaaatttttctttactcaaaaagatttgaatatgaaaaagaggcattagttagagttggttaaggattacgattgtgaaatcctttaccatcttgagaaagccaatgtagtggctgatgccct

SEQ ID NO: 136308 - DNA, 675 bp, Cannabis sativa
atattacatgtgttgtaattttctccttctacctttcatatatatatgtaatatatatatagtgtatatatgtgtattgtgtattatatatttgatcaatcccttttattgtgcttgtattatttttacaattgagttgtatatatcatggtttacattgtaataaaatctctaacatagtttactatacactatactctagtgggtgtgattttgatttgcattacatatgtggatagacatgtagtaaaggtgatgtgtataatttaattatacatgattggaccgatatgtaaataacatctttcattaacatgtcatttaatatgaaagagttatccatgtcacaatgatgatctttagtagatcagtctgaattctgagtatacatgaactcctatttgtgttcattaaattctttgattcactcgttaaagtttctcagagaatacgattcttataacttttattttaggagcttaataacatgagtggctaggaacatgttatacaataatggaatccaagcttttcgaaatgatcgaatattagttcccttatagtgttacttttgtgagtactaacagttggatccaaatctataattagattataaattaactcacattgaattaatggtacataaggaatcaagagataattagaatggtaaaa

SEQ ID NO: 136309 - DNA, 509 bp, Cannabis sativa
  modified_base (156)..(166): a, c, t, g, unknown or other
  modified_base (475)..(483): a, c, t, g, unknown or other
ctttctatagtgattttgcacctttttcattgttcttcaccaattcgagccatagtgatatagtaccatgcccacacatagcaattcaagtactcaattatagtgcagaagatggtggctcagattttgttattactctgcgacagaaaggaacannnnnnnnnnntctgagtggaaggagtcattaattatgattatgctgccattaatgtatggtattttaaactcttatgtgtttaatttcattgtattagagaattcatatttaaggtgttaatgaaacatacctgttagtaaatctagatcctggtaaaatagatcccaacaactggccttagagccatggtaataattcactttcatgaaatatggatttaaaacgttgaattttttaatttggatgtgttcatgttggtttatgtgtgatttgatgattgaatgtgcagtacgaaatctttgttggaaattattttannnnnnnnntagatatactcacaagtatgttgatt

SEQ ID NO: 136310 - DNA, 3340 bp, Cannabis sativa
  modified_base (401)..(405): a, c, t, g, unknown or other
tcaggattaagatcgtttgatctaagatcaaccagtgatattgacatagaaagatacaactgcaagattataatatctttcaagatcaatatcggtcccagacagatgtatactccatacatccaatactaacatactttgccaatgttctagaaagaatataacacttgttcaaggtgtaagtaagctttatcgctgactgtcacatcaatgtaaattgagtgcactgataaatcatgggacattatcttttgaagcatataatcacaattaccttccactatgttaacatctctgtaattgtgaataactatatgttctggttttaacaaaaattgtataataaaccataaacatgaaaactacatgtagacatataatgatttctaatcttctattgnnnnnaaatcagattatattgaaataggttttatttagcgcataaaattccaacaaactcccacttgtactaacataaaacaagaagtacattacaattaatctattgtcttgattcgagatcaagtgtagtgtatttaattaaacccaaattacaggaactataagcctatggtaagcaactgcgttctccaccattacttccttctgtgttcataaaacattatgcaacattatttttctatatgtatcactcatctagggatactgaattctttaccgcttattaagtgcatccaaatatacagaagacgtatctctaattctatccaaaatggaatagagacaaaaacagttaagagctttcttcagtttgaataactttctagtgcttttcaaaacaactaagttatttagttttctgatggagcttaaattattatagatgggctttacactcttctaaaataattcatccacccccagagtaaccaccatatctaataggtactgagtttgtgtagataaaatgattctaatatacacccctatcatctaacatataggtcactttcagaaatactttcttgatggtctcccaatgttccttctttgattatatctttgatggctcccactcaatggtaggagtctggttaaatccgtacactagtgtacacttaacctcttactattagtgcttagggacctcttgttgtgacatattatcttagtctgaaactataagttccttctagactaagtcatcaacatagcattaacattaaagtaaaatacttgcttaagattaagtaatcacttaagataccataaaacatttcataaggactatgaattgtgcttaagtcattcgaatagacattgcaaaaatctcctatcttatcattataattctgataagtcatttctatccatatgaatggttagatttactttcttagttttattctaaagttgtcatcatgatcataacatagtaggctatcactagtgtcatccaagtaataatgggctaaaaatttaaaattctcccattaagataaggtatggtgatactatgtctaagaacttcattggtgtgaatttctatagtgagaaacattggaacataagtaggatcaagaataagttctattagtttgctagttcgtttattatattatatccatgtctaatcaaaatatgtgtgccatagagatactgtggtatattgagaatagtctagagtttaaagttaaaagtgtttgaactacatatatcaataacttcttccacccctaagtgttataaagatcccatggatttatgaatatactctagagttcgaaagatataaaagatctttgaactgcatatgttgtttcttaacttcttccacccctattagatcaaaagatatttttattaaacaaaatcttaataattgcttaagaattaacaattattcatcaatatttaatttaaattctaagtatttatgtggtataatctctttacagagattaatataccatagattttgtatcattaatcaatacaaactacataaaatatgataaacatataaacataatatggtattggcgtacaagttaaagtaaatatgaagctcaatttaataaaagaaatccataataaaaacgtcttaaagagaaaaatttattaatactcttaaaaatgtcataatgaattgtctgcataaatatgtaataggaaataaattttcaaaattaataattgaaactaaattgtttgataactaaaacaattaattcaaaaaaattaaaaaaagataacgagcttcatcttcaacttggacaatctccacccttctatccaattatttgactcaacttgctaggatagcaatccaagtttaagtagctagagctgaaataaaagaaaataaacatggtttgtagacccagaattaataattcaaggggataataattctctaaaacacatgaatttataacaaagttagaaataccttgtttctttgccaaaaacataggacactggggttcccagtggcccttttcgttcctatagaagcactttcccttttcctttgcctttggattagcagcccttttcttattagtcgtgttactttaacaggcttcttgctattcttccatttattctttttgccaggtttcgaagtggaggcaatgtttgcctcaggcttggtcgtaccatttgtagcagtgctagaactaggagctttgtttcctcctttcagcagtcctccaatcaaattctcaaatgtctgaaggttgttgattaactcgtggaagtcaaaagtcaacttgttcatgaaataatttgaggtgaaggacagaaaatctggagtcaaactatttaagatcaaactcacttgagtttcttgatctataatagatccatgattctcagcttcctggtgatcacaaatgttctgatgaggcttcatccgtgcattgatgaaattcttagtcacctcaaaaacgagcttgattttgatgccatcccgaacagttcagttaactggttcatgttttctgcagctgtgagaatgttaccaaaccttctcttcaaggtgttaactatgctagacaacataaagtatcgagctttgttgttagcatttggccaacgttcaaacttttccttaactgccttggttgcattctcacctggttgttcaagagcatcttcagttaacacaaacggggcattttcacctatgagagaaatattaatgttctatttctatttgacaaagttagctccaggaagcgtgctcataatcatattgtgtactataaataccaataaatagaaatcaagtaaggttcaatacaaaatcatacacattcagaaattattaagcatttagcaagtaggaatgacaagtgaaaatacaaaaaaaaaa

SEQ ID NO: 136311 - DNA, 549 bp, Cannabis sativa
  modified_base (480)..(480): a, c, t, g, unknown or other
tttattgttggttttgaatttattttgttcttttctgggtttggtttttaaatttgattttgttttctttattttagtgtttttttgtgctttaggttttttttttagttttcatttttagtgtgtacaatcagtcgtatgtagtttcttattagtttttttatagtttaatgttggtatgtttgatgtgttttcgattttcattaggtttagttgtttgctgttattttttaggtttcaaaacgattttcagatctttgctctttatttttgtatagttgtatctgttttttagtttgtttgttgtttgtatatagttttattgtagttttcctactgtattattcactattaataattttattgtgttgttatgtttgatgtgtttttcgattttctttaggtttagttgtttgctgttatgttttaggtgtcaaaacgattttaagtctttgctgtttatttttgtgtagttgtatntaattggtagtttgtttgtagttttattgcagttttcatactgttttattcacgattaataatttattg

SEQ ID NO: 136312 - DNA, 698 bp, Cannabis sativa
tctgcccgcctaccgctaggcccacaagtggaactcgtgaccggggatttggcggctgaccatttgtagtctgggaagtattcatggcttgatcttcgttcgtctctcccagggggatgacactcggaggttgctgtcctcgaatttggtaggctttttgtatcagcacagtagcttgccgactacgattgtcaatctctgtatgatgagcccttaacacttccatctctttctctctccactcgacaaacatacgcctttgttcctcgaacgtgatatttaccgtagcgcggagttcctcccgatcatgatgtagggtattggcatgacactacacgagtccaagagcagcacagaggttttgtaactcagtatcatctccaatggtcgtttgagtgtttgtagcaggcagaacgactctgttatgaatgccctggttgggtgctgaactgtgattcctagtctcttgcacaccaggcgtgatttcatctacaggagtcgttacactgtgacttacgttcaccagctattcaggattaacagctggcagaacccttgcgtttcctgggttctgcaatgtaggatccaccgtctgtgaatttgctggatcaaccaggcccctacgagtctgtactacaattgtacttgtggttagactttgaatgaagagcgattcttgattctgctctcaatgaaag

SEQ ID NO: 136313 - DNA, 516 bp, Cannabis sativa
tgatttagttgaactttttttttaagtttttgctgttaattttctttttcggttttaattagcattcctcaaaaaaaaaaaaattaattttcctgggactcgcccagtggccgcagcgagatagaccttggccgcggccataaggtccttacagagagacttgaaatttgtcgaaatctagccgcggcgaggctttatatggccgcggctagaatggtcagttttcccttttaaaaaggccaaatccctacatttcaaatcaaaccccacattcaaatccctaacttctccagccgaaaacccttctcctcaccatattttcttcacctaatcccattcaaaaccaactttcatcaaatttaaccattaactttcatcctaaatcatcataaacccttatttcgctcatataacactcttttcctctaaaaatccattccaaaatccctaaacctcacccaaatttcagaaaaatcactattcatcttcttcttccctaaagcttcaaggttctca

SEQ ID NO: 136314 - DNA, 1404 bp, Cannabis sativa
aatatcatcacattatcaatacttaaccaatcaatctttttattatataacaacattaaccatatctcaatattaatcaagtcagaacaatacttattgtattacaatacaacatactatgcagtacaatatacttttcttacctttaatctaggttgatacatgttggccaacccaagtggaaaactatcctctcggcccgccctcctatgtcacaacaacgctaaaccaataagtgtttatctcaaaacactatttaacactcgcataagacaatcttggggtttctacaaaacctcgcaggataaatactaaaacaaaacttatattttggctctaaaacataaaccatattgtagagctcattgcaagcttcaaaacagtatataagacgtccaaaccaaacaccctagtgaaaagttatgacaaaaatacgattattgatctcctacaaatttctaaaaacgacagaacatgaaaatttcaaattttacactcaccaaaacactaccgaaacttatccaaattactccaaacttcacaggccacatatatactataaatattacaatccttacgtaacaaaaattaaaattgaacccttaaatgaaaaatgtcattgacgttcggactaagcgttaaaaaagtttcaaacttgatttctaactcaaaatcacctcaaattcaataagtaaacatcaaaactagtctcataactaccgaagaacaattctataaagtcagaatctccataactattataattcatgaaatccttatataaaactaattattagcttaaaataaaattaaaccatacgttaagctttccctcttcaaagatttactatcccactactatcagagcttagatcgctaggtttttggtagaaaataaaagaaaatagatagaaggggatgaggatttcgttgaactaagagagaagggtttcgttcgtttcttttgtttatgtttttaaaacatataacttatatatataaactgataaagatttgtttatatattataataaaataatattaataaagactttattaatagtaattatcttattattttttagccactaagaaatctttaattttaggatatttggtcaactccaagtaccctaaaatactctggtatttctaaaatcaacttacctcaataatcctatcaatatttttaactaatgtcgttgtgatatttttggcctctaatcgggtctctaaggtcgccgaacttgaaatattttaatttcacaaataactcatattatatccatgtatttcaaataattctccgtaattaacaaattatgcttatttatccacttatcgagtcttatgctgttagaaatttattgggatcacaattgtatatataaaatgtgtgttggg

SEQ ID NO: 136315 - DNA, 1507 bp, Cannabis sativa
  modified_base (203)..(208): a, c, t, g, unknown or other
tttttttgtcttttttttttttaagtttgttatattatctttttatagagtcaaaactaaatttataggtttttatgagttctatttgccacttataaaatgataagtacaccctattagaaaaatacttatataattttaaaaatcactcttaatgtatttttaaaatcttttccttgcattattttatgttaatttcaatnnnnnntttgattttattttcatatttttttctaaatcatgtatacatatatttttttatttttcttaagaaaattttatataattttttgtcataatatttaaaatataatttatttttgttttaattggtatgttttttaagaatatgaaataaaaaagttcaaaaaaaaattgaacaattaaatatatagattttatataaaataaaaattattaaaatatggcgtctttaaaagtttttggggtgtagataaaatttctttcttaattttttttatagggttaagactggtttcataaattttatatgattttcttatagggtcgaaagttgtttcacagattttgaaggttttgtaatgcgattgcttcattttatgattttttttattttaagtttctttatattatttttttttctaaatttggaattggttttcacatctatattatgttcttaaattattgttatgtgttgtttttgattatttttgttagtattttttttttaaattattgtttaaaactagtttacatattttgagaattttgtaatggagttgccttattttataaagttattacaaattttttattttatgttatttttttattattattttatttttaagtttgaaacttatacttatattttattttaaaattattggtatgcattgtatgttgttttgattatatttgtgattagtattttttttatatttttgtatgtatttttcttttttcatttttcttttgattgtctgatgaaactggttttagttaactttattatttaacatttattattttttatgattttttatagcgtcaaaactagtttcacagggtcaaaactggttgcataggttttaactgttctgtaatggagttgctccatttttatgatgttattgtataatttttaatttgtctaaaatcagttttattattgtataatatttgaacaacaatttttgttttattttaaataattagtttctcacacacatattattttattattttcataactggtttttttaagtaactagttttcataactggttttatttaatgttgttcataattgagttttaagtttcaatttttttatttgattatttcaagaaactggtttttatttatttgtttttattttgattgttttactaaatggtttctcacattccactatttttttgttatatttttatagtttttattacatttttgtctctttaattttctttgtttctttttttctctttgattttaacttttgattctctttgttatattt

SEQ ID NO: 136316 - DNA, 2039 bp, Cannabis sativa
taagttataaaaatgagaagacacaataatttaatgattcaaaaatatgtggttttgataattaaaatgagagaaataaaaaaaaataattaaatttgaaaaaaatatgagaagaaagattaggaagaaaagatcatttaagatgccacatggaatgttagaattagagaaagaatgacaatttttgtgctttcctttaatgatttttttttttaatttagtatacatagtaattttgttagaatactataagattttggtttaatttttttaattagtatgtattaatttaatgttagttatcagttatatactaaattttttaaaataaattaacatattcaatctcaattctgtattttccaagcacaagagagattagaaaaaaaaaagataaaatgtaaggaatccataaacaatcattttatactttcaatagtaacatcaaatataatttatatagtgtaattttttttttttgaataatttatattgtgtaagttatggaaatgaaaagatagcattattagcattattaataataatgagtactatatgtttaagagttatacaaatgaaaagatatcattaattttatttattattgaattatatatgtgagagttagaaaaataaaaatacattattaattttatttatgagatttgattgataatataaatatgtgtatttttttttaagaaaataagaaatttttataaaatagataagctaggctaaaaaaaatttaagatgtcacatagtctttgttgaacattcttttatatctatagatttgagtgatagattgattatatatatatatatataattgttttaataaataataaaaagttgaaaaaaaacaatagaaagggggaaaaaaagaagagaaaatattattattattattattaatttagaagagatagataaatatatagatatatatattttattgcataataataattataataataaaatgtgttataaatgatgtaagttataaaaatgagaagacactataatttaatgatacaaaaatatgtgcttttgataattaaaatgagagaaataaaacaaaaaaataattaaatttgaaaaaataagagaagaaagattaggaagaaaagatcatttaggatgctacatggaatgttagaattagagaaagaatgacagtttttgtgctttcctttagtgattttttttttttttaatttagtatacatagtaattttgttagaatactataagtctttggtttaatttttttaattagtatgtattaatttaatgttagttattagttaatatactaatttttttaaaataaattagaaaaatagaaaaataagcattagacaaaataagaagattgagagtgccacatcaactccttcaaaccttcctttatatatatactaggaaatagattcgcgcttcgcgcagttttaataattttttaaattttacattaaaaaaataaatttttagttacgataaaatcttaagtctaatattattttatattttttttataaataacataaaattatataatatatttaggtaaaattaaattattttaatttgtgattagcacaaatattaatcataaaacaataaaaataaaagcacatcttgattaaagttatttataataagtaaaagctattaaaaatataaattttttaaaatgaatcaaatattataatggtacaattttttttgtaattaaaaaaattttcatttttttattcatttaaagcaaaatttaattttttgttcatatatatatttgaattaaatatttttatagttttttttatttatataaaaatattaatttaagtattaataatttaaacattataaatttttattgaatgagtgaaagatattttaaaatatcatttattaaattaatgaatcatgatttgttatcttttttattactattattatttataatattaattgtttctatcaatttaagttagactaatatcattattttaattgatgaatatttt

SEQ ID NO: 136317 - DNA, 1021 bp, Cannabis sativa
tattgaacaataagaaaaacacccttcaagtgtggaggaagatagtagtagctcaattctaaagcagctggaactatcttgctccttttatgtgtcaactcccaaatatcattcttcgctatttgtttccatctctcaacatccagtgttgatctcaagaggcctcctagaactttagcagctaatggtaaaccattacatttattagcaatttctctgctgatactttctaattgtgggttttcaatgaactttttagagtttccattggaagcgtgcttcataaatagtgcccaacactcatcttttgacaattctctaaggtggtgtgtatcaacagttcgaatgacatctgcaactttttcatttcttgttgttactattattttgcttcctcttgtcccactgttgaaaggcttcatcacttctgtccttgaataatgccatctctttcaaacgacttaaccactttcatcaaatcttctttgattacctcccattgagactgaaacaaagccaaactgaaaccatcctgtttggtcaaatgttacctaacctctcttgatgcctttttcaattttcctcagaaataagctcatgatcaaagcaaaattttgattgttgtaagtattttgttgtgtgatcttccaagtgtgtgggataaaatgcgttttacaagatgttctatggtctcagaaggtagtagagctttggctctcctttcttttaagtctcaagacatgaatgacagtcttgataatttgggtcttgatgagcttcatgttttggaggattgggaggataagttcatccacaagtatcccaaggttgggaagcttgtcaaacaatcaacctcgaccgaagaaccatctcaaattaggttgcagatgaaacttttgtgagctgctgcaaatcaatgtaaattgattaaatccagtttaatggaaatgatttgattttgttgtgtaattgtcattaacatgtttcttttaggctatgtttgccaaatattgaatgtatt

SEQ ID NO: 136318 - DNA, 901 bp, Cannabis sativa
  modified_base (819)..(822): a, c, t, g, unknown or other
accaggataaaacgcgtgagataaacccgttaaaattagtttcttattttaaatgtaatcaaatccctatttaaacgaatttacacatgtaattatcataatttaggaaagttattagattgcttaataagttttgagaaaccatttttcatataattctattatttagggatccaaaatattactttcagaagagtacttccgctgctgaattctctctaaacactttcgagtgagatcaagtcttattgcttctcatctcataagtgaaatacaatcaaagtggagtaggttattacaatcaaaatggggtcgaacttctataaaatatcatgttcttagtttatgctcttatttcatatatatattctgtctaaatttaatcaatatgaattactttcaaaactccgtgtcgttggcaagaagcgtggtcaatattttgatgcttttattgagagtttaactcaagacaagcaaggatggttgtataaacacgaaagggtaacccaaatgaaataacagaccctatatatggtggctgattcgaatagtcaaactcctgcaaatctgagagatcctcttacaaatgatccgaacaacaactctcctagaactggtgccactccaagcattcaggagactagaactatcagtacccattagaggaataatttctcaattaaaatctccgtaattgagaaattattcctctaatatctatttctgacaataagacttattttctactaatgcacataatattacaacatatacaattagattttgtcaatcttattattttaattttaattttattannnnaaaataaaaaagacaaatataccccttaaaaatctataaacagaaaataattacgtgttctaataatgacaattttgtc

SEQ ID NO: 136319 - DNA, 530 bp, Cannabis sativa
ttgcttcttcacgctctattcttttcccctgagtgtggtttgtcgtatttcccctattagtgtctgtatgattcctcgctctatgggtttgggaagaacgctggtgatttctcataggtgacctacgttctcttggttgagtcccaagatcatcctcattgtcatgaggaatttctcattcatcagtttctggttgcctcccatcctcatttcagtgagagggttctggctgatcatttggatttttagagggtatctcattttccttaggttgttcttcccgggcattttcctgtctcctggttcgtgagccacgaggtctgtctcgtggtcttctcactccaggtttaggctgattttgagcatttttcccctgtgccaccccagtcgcggctgcatcacgttctaattccgcgttctgccactacgcctcttctaggcggggtcttaggcggtggttttccgtttcataagtaccttctcccataggctgggcacctccacgattgggctcttcatccctcatccca

SEQ ID NO: 136320 - DNA, 1464 bp, Cannabis sativa
tattaccaattttactaagtatatatttagggaaaaaataatatggttttgtaagtatggaatttcaaatttcccctataaatttagtcatacatcttttaattgtcgtattaaaaatagattgtttaaaaaaaaaaattacaaaatttggttaaacaaaattttaaatatttttatggtttttatgatttgcatgaaatatagtatttttatattgtgctcttgttattttttgttgattttttattattttgtatgttgttttttttttcatgtagttttttttgtatttttataaaataccgtaaaaatatatatataaaaaaataaaatgtaagagtgtaaaagttttaccaaaaaaacagtttatgtaattttttctattaaaatagtatatctttatataaaaataattatatcttaataaaaaaattttagtgttttttaatagaatataatatatatagtttataaatttatttatgtaaagttaataattttattctaaattataatatatatataatattaaaagatttacataataaattgaatttttttaaaaaaaattataaaaatacgacagcatgatattttttttttatttttacgctttaaattttttttatttataaaaatacctcgtcagtaattacaagtttttttttgttttttattttataatttatgtatagttgtattatagttgtcatgaaattatttttctagtttgttttttactattttatagtttatttatagttgtcatgaggttgatttctcgttattttttagttgttttcttatgtttcattgagcaaagtgtatttttgtaattttaaactttacaagtatttttataaataaaaattttaggccataaaattgtaataacttaaaaaaaaaaattgtttattgttgcattgttttgaatttttttagtgtatcttttagttataatctctcgattaaaatataatttatctagttggagtgtattcttaaataaaagttttacgatatatatttataaattatgcaacaacggtatgtatttgtaaattatgcaacagcccaacatcacacacaacacactttgaacaggagtggcaaaatgtgtcatcatgtcgtgttcgtatcatattttatgtgaccatcttctttattatcatgtgtcattggtatatatttttattttattattatgttgctgtatttttgtgttatttttataaaaaaaaacgtaaaaatgaaaaaaaaaattaatagaaataatgatttatctaattagggaaatttacatggtatactaacttttactatttcttttacaaaaatactgccaagcgttattttttattttttactgtgtttttataagtttcattactgtgttaagttttcactattgttctactggtattttttagttgttctactgttgttctattttgtgttctacta

SEQ ID NO: 136321 - DNA, 514 bp, Cannabis sativa
agatgggtcatcagtatgatacatgatatattatttgttttcaaacacaaaatgtaaaatttgggacagaacagaagagaaaagagtaatatacctatattttcttgtaagtaacagttatatttgggatgcgagcaataattggccagtcctcccctgtctccctctccactcgtggtcttagcaattcacacaaaatgatatgaagatcagaaagagaaaagggtagttcttttggcaagcattgcagcttaggacactcttcaattctcaactcctcaatggaggtgaggtgttgtaaggccgcctcgtctaactgcctcaagtttccacatctcataattctaagcttctttaaactgatcaaaggggcctgctccatcagttgaggtcttgggagtaataatggtggtatttgttcctcactgacacttacttcaagcactgtcaatgatggaaaataatctcctaacaatgtcactttgagtttattacaattatgaagatgaagatt

SEQ ID NO: 136322 - DNA, 1213 bp, Cannabis sativa
aaaactatttgtattcttctactaaaaaaataaaaactataggtattctttatatagctcttacccctctatgtgtatatatatagtgtctcaaatacaaattaaagttttgcatccactctttactcttaacttagaagtttttgttattatttattttttctaattcataattttttttttattttcaaattatttagccatgactatttatttttaaagttttgttattattgatttttctaattcttgatgttatttttcttttttttcatcatattattatgacaaggaatatttatagacaaaattttctctcatgacagattatcatggaaatgactatttatagacaaattctttttcactagatatttgcatcaaacataaggagaacatccaatctaaaggtcacttagtgttctcttttaaagttctactttatctaattgataatttttttttattttttgtatttaatatttactaataacaaaaattaattgataaaaaatagaaatccaattgacatttcatattggagtttttatacatagtgataggaataataatatttattatctcatattttacatactatgtctatttaatttaataataaagattaataaaataatatataatataaataattcatatatatatatttatgaatttgtaagtaaagagaattttatatgaatattggtgtaggtgggtatatataacacataaaataatatatattaatttttttatttataattatttgtaatgataataattgttatattttaatagccatatacttattataataataatatatattcatgtatgtatatatcaattatgcatagttataactaattattaataataatttagttttagttatttatatatgatagtatgtaaattcatattttatataacttttatatcaacaatatttacttttatgctacagtacacttttatgaatttaatttattaatttttcttaacaaataaatataatatgatgtacattaatttacaagtaaatcccttaattttattttttggcacatatatgttatatatagtaattagatatagattaatttaaaaattgtacatatacctacattaacttacaagttataaattacatatgatcagaatatatttaactatttggaagaggtttcaatggttacatttttattgt

SEQ ID NO: 136323 - DNA, 1289 bp, Cannabis sativa
  modified_base (333)..(333): a, c, t, g, unknown or other
aggaaattaaattccctttccaatgataccaaaatctttaaaattataattatagttagagagatattgtaattttagaaaaacaattgcaagaacaagattcaagaaacgaatcacatgatatagaagaaaactaactttttgacctagtacgacttcgaattaacaaatgtttcttcatgaaacttatgaaaaattgaataagctttaaaaccatatatagatcattaaaagtggatgagaattgagagagttattgtattttaagtgaaaatactttttctaggaatatgaaaaaaaaaccaaattacaacaacatcagaaagattatanttttcgacatagaatatcaccgaattggtgaatagttcttcataaaaattgtagaacatcgaataagctttccaacaatagaaaaatcactgaaggcggatcaatatcgagagagatatcatagctttactgaaacttatttttctgaaaacgaaaaaatataataagtttgaaccctagataacatttagcattattgagcaagaaaatatttcatacctcttcaaaactttcaatgtgatgtctcaaacctagaagcctcgattaaaaatccaaaagttaaagaaagaaggtagaaaaacaagaagaagcactgaagggttgagaggagcaaccatgatgaagaatgaggttttgagtaattggtttgcagagaaaaaataaaactatgatcaagattatgagatatcgtattgtaataggtttaagttaactaataataataataaaatgctaaaatattattaaatcaataaatatctaatttttaaattttaaaagtaagccttctacgtcgtaactttaggctcaattttgacctaggaaacttccgaattataatatgactatttgtacaaaattcatagagttttgaattatctttctaacgccaccggaatcacctaaatccaagctctagaactctagatatttcattttagtaaaataatttttaatcctacgaatttatccaaacgtatgaatttttttaacattaattctataataatgttatttgatatcacttatacaattaattaaacccactaaatattttatagaaccctaatggaccttcatattgggctttaagtaaacgattacctaccttgtaaaaacaccacaatatttaacttttatagttaatacaactttaactttctctaaaaaattggtacaactactttaagcaaaaatctcaacttactaacaacacaaataaatgagataattat

SEQ ID NO: 136324 - DNA, 1016 bp, Cannabis sativa
  modified_base (699)..(702): a, c, t, g, unknown or other
cagatcgggatccggacctggacccagactcagacccagactcggaccaggaatcagacctcaacccagacccagacccagactcaaactcgaacacggacactgaatcaaaattgaaactaggactaggacccaaaccggatcctaggactcggacctggatgggggacctagacctaagccacggaacccagaacaaaatcggaacacggtactcggacccgaacttggtcatcggggccaaactcaggacccaagaaccagactgagacttgggactcgaagcccagaccaagaatgggactgtgacccatactcggaccctaacccaaatcgcgacctaaactcggatcgaacccgaacccgaacctgaacacgaacttggattcagaccgaaacctaggacctgaacatagatgggggacccaaacctgggaattgggcccccgaactaggaccagaaattggtctcaaaacattgatcaggatcaaggactcgaccccagaccaaaacttggacataggacccacctcggaacctgggatccgggactcgatgcttggacccaaccagtactaagtgtatggatcaaggacatagaccagaactcaaacccaaactcgaactcaaactaagacctggacacatacgaagacccagacccacacttaggaacaaaaatcgaaacatgaattagnnnnggaccaagatctttgaacgggaccaggacctgggctgagacccagcctcgaaccctacctgagaccgaaacctggacctaaaccttgcctcagacccaaatcacgacccgaacccagactagtatccaaactcaaccaaaacccgtaccccgtgacttgaaactggaatcgaaactataaccggactaggacccagactcggtcaaagacccactcttcgattaggtccaaaatctagatccaaacccgaactgggactcaggacacaaacctatacctgaattcagaccagaacattgaacatgactcgggac

SEQ ID NO: 136325 - DNA, 567 bp, Cannabis sativa
aattgtgtaattactacgataggtattacaaggtatatttaaatgtgaatttttataatcatatttagcaagacaattggtaattacatattgtctaatatttaatattgttgactatttttttagtcaacagcaattaaatgacaatgaaagtttttgataattaataacaaaaaaaggataaaccacacaaagtatttatagatgttcgaccctaactttaataataacctactcccattacttgatatttcttgtagatatatcaagatcgcaagaactcgatcaagtaagtttcttgatattctttttgaaagaattatagtagtagttttgtagcgtaatagttctttgtaaagttaagaattcgatccccaaaacagtgaatatgatccactatttatagggtgtaaataaataatattaattacaagatattcaataactgctatttattccctcaatatcttaattgtagggaaccattatgacatattcttcatgtatctagagattgattttgtggattttgaatacactcgatcaagcctaactgatcggtaggcc

SEQ ID NO: 136326 - DNA, 584 bp, Cannabis sativa
tttgagtccgagtcctagtcaggttatggttctaggtctaggtcgaggtctggttacgcttccaggtccaggtccaagtcctggttcggtcctgttcctgggttccgatctacgtctggtttcggttccaatttcgggtcatagggtacgggttcggttcaaagtttgggttagggactaggttcggtcctggtctgggttcggttcagggtcctggtctaggttcaggtctggggctgggtctcaaatccaaacaccgactgcgggttcggtccaagcctcaggttcaaatttggatcctgatctcgggtcccgatctggttccattttgggtgtcaagtcacgagctggtacctaggttcatgtccgagtcttgtatctggtcttgggtcccggtcctagtttcgttgctgatgtccctatcctgattctaggtcaagctcccagttcttgtttgggtttgggtcctagtctaggtttcggcttgggtcctcgttgcggttcgagtttgggtctctgtctatgttttcatttgggtttgggttcaggtttgggtccttgtcgtggtcgttgtcctattctta

SEQ ID NO: 136327 - DNA, 540 bp, Cannabis sativa
tttgaagatgaagacgatgaggtctaacatttgtatggtcgcacagattttcgaaccacttgtttaggaattcgtttgggcttcactggctgagattcacgctgaggaagcaatgaatctcctgtttttgcagcagtagggggcaaggttgaagcagcaggaggagcattcgagggggttgcatcggtttctaccacctttttgggatgccctaggttctttgttctaaccatggtgatctgaaagagagaaagaacaacaaacaagcaagaagacaaagaaatagaatcgggtaggtggtgagaataaatgacaaaaaattggtttaaataaacatagaagaatgaagaaaaaaggaaaccaattttgagtttttgaaaataaccgacagcccatgaacaaaaaggaaaccacccactatcttgcaaaaatatatttttctcttttcccttttttttaagaaaaataaagggaaactagaaataccaacattatttccaaaaatatcccatttaagaaaatctttcaagattaaagaca

SEQ ID NO: 136328 - DNA, 619 bp, Cannabis sativa
gtacttaatttaccaaacattatacataaaaaactttattatttctctaattgacttatattttcaatgagcttttaagagaattgaattcataataaataggtcaagctttgcacattgcttctaatagcacaagtttaggcattgtagtagatttgctttcagtcatatctatttagcaagtcaacttgtacgttattatcacattcataaggattaagagtgagccatttattactacatttatatatgtagaataattctatggtacatacccttattttgttctcatagtataggaacatttttttaatcattgtatgacttttgagtgtacacattaactaacatagacttacatatacccaataaaaatattaaatttttaaaatagtattgagcctaggaaaaaaatcttacacctataaccaattatttataggtatcaaataatatattttaaaataatgctaaatcaattaatattaaacatattatgtatttctttaaatttgttatatattttttttaattatataaatactaattaatatgtaattaattaactataactaaactaacagaatttttttttcttttaaaatagaaataaatttat

SEQ ID NO: 136329 - DNA, 633 bp, Cannabis sativa
gtgtaaaaccatcgagaatttggggttttttagtagtagttttgagtctctcattttcacagaacaacatctttgagaaatagtgactggctttgccagaacacaaatacaaactaagtgatgtcaaaatatcacttagacatcttaaactatatcccttgcatgtttttgtacttatccaatgtctaggttgaccttatatgtcaacttgggcgctgggttgtgaactgtcttcagtaaaataaccataactcactcaatattgatctgattaataggattcaacttgcgtttcgaaaatatttcagttctctatcaagtaatgtctctcactttaattacaattctgaagttatcgacctcaaatttcactctaagggaattacaaaaataagctctgagttatccgctgcgggtcctgtcgggctccgtaaaattgctatttcattcgaaagttaattttcacagttaaatcatcatatatgatcagaaatatccaatttttatttttattactttattcctatttttgtgggcctctttcacctagaaaaggatagctcccttagcttatttttcacatccagaaaactacccataaggttagagcatctctctctagaaactagagct

SEQ ID NO: 136330 - DNA, 988 bp, Cannabis sativa
gatcaatgatcccgagccctaagtcataacaataataaactaataagtttttatcccaaacactacttaacagttgcaaatgacaacctagggtttcccactaaacctcgtagttcaaatacactaaaataaaccttatattttggctttaaaacataaactatatggtagagctcgttgcaagctttgaaacagtatatagaacgtccaaaacggacacccgagtgaaaagttatgacaaaaatacaatttgcgagttcccaaggctgccgaaacggtaaaccggttggccagaaccggttgaccggtttatcagggggaaaaagagattttccaagtttatgcactcaaagaaatgctaccagaatctatccaaaccaccccaaacttcatagggcacatgtataccatacatactaccatacttacgtaatagaatctaaaatcgagcccgtaattggcaaaatgtttggacttaagttataaaaaatttaaactcaatttctaatacaaaatcacttcaatttcagcaacaaaacatcagaactagttccatgattactcgagaacaatcttataaggtcagaacctttataactattctaattcgcaaaacccctatacgaaactaattgttttaaacttaaaatagaattaaatcttatcttaagcttttctctcttaaaggattgttgttccactactactggagcttagatcgctagattgtgggttgaaattcgaaaaaaaaatggataagaagagataaaagtttcgacagaaaacgagggtttcatttcgttcgttcttctgtttaaaaaattataacataaataatatatatatatacataataaaaaactgataagttttagaataaaaataatattataataatataataataatattattaataatataaaaatgttgaccgaagttttcggcaaccaataaaataatagaagattaaagagctgtaagaaat

SEQ ID NO: 136331 - DNA, 548 bp, Cannabis sativa
caaggcatgagaggtgttttcgggttgtgtagcacacatggggcaaagggtagaaacatttacatgtttggtgacaagatttaggcaagttgggaggcaattagtcaaggcacgccacagcgtatttttaacttttggtggtattttcagctgccacaactctttccagaacccgaagttgttaggtacaggtctagaggacttgctttgttgcagcaaagagtacgcactactcacactgaaactcccatttgattcaccattccagtaccagcaatcatcatcaagagtatgactcaacgggaggccaaggatgagagcagcatctctgggattgaacatatcaatgactaaatcatgatcccaacatagcgaatcagttgagaataatgccaaaacattctgattcaagagcccaggattgttggttgtaacaatgctgaatcagcatctctcaattttaatattttattaaagcataaatctacaaattgatattttactattattttaataatttttctataaaaagcataaatctacaaatt

SEQ ID NO: 136332 - DNA, 1090 bp, Cannabis sativa
  modified_base (303)..(310): a, c, t, g, unknown or other
tttgcatgttagggtagaactttttgttaagtgcttgatttttgggaaatggctttggcgaagactgtcgtatggtgtatataccctctcttatttgtgttttgctacttcactttcttctattttgtaatcgacccctctgtcaaaagattacttaggatatgggacatttttcgttcccacgatctatgtcttttatttttcctctgctttcgctgcatctgagatacttgcacccgatgtttgcctaggagaatccttgaaatttccatctttggcaagcatctggagggggcctctttnnnnnnnntaggggacccccattccctcttttaacattagagtttggtttgggggctaattgctggattttccttttacagaaccaaatatctacctctgcatccggaagcaaatcttcccgcaatggggcagttactctggctaccctagaagaagtgatgaagggctcggtcgtccacgagaaatacacgtgtcgatccaatggttgggaggcggatgagcttcgctcaaccttgatctatgcccatcagttggagaagatcgtgaccgtggctggtatcaagccgtccgcttctagggtttttcaccgcctgcctcgagacgaagagacgcccaaccataactatggtggttttggagcttggagccagacccacctcatgtccggagccatgctcccacttcaagattacttcataatttttttagtttttgttggccttgcgccttatcagcttattcttcaataccgcttgctttcaggcttgtttatttcttatgtagccggtcaggccaaccgaaattttgtatttttatgaacttctgtctgtccccaagaagggggataaacttaaagacgggttttttacactccggggcccatcttgccaatgagggtccggttctttataatttccattccaaaaaaagaaaagaatgtcaaggagaaggagtatcgtcaccgatttttcttctcttcttgtttccaagccatggaacgcccagaactgctcacagagtgggtcagggttcctccgatgcaccgcaccgctcctacccaactctt

SEQ ID NO: 136333 - DNA, 551 bp, Cannabis sativa
  modified_base (327)..(331): a, c, t, g, unknown or other
  modified_base (416)..(425): a, c, t, g, unknown or other
atatcataaacttattgttatatctttctaagccaatatcactagttgatcttaggtctatagatcttaatcctgagataattaggttctatcttaattttcttatttatgttcttcaatttgttcgttaaagtcgaccaattggatcttctcgtgacataaaaattaagaacaaattaagaacatggtagttcaattgagtgtgagcgctaatcatagatatggaatatataacttctataagtatttagaagtgaaatgataaattcattcgagcttgacttaatagagataaatgatcgaggcctcatttcaataattatattnnnnnactgaaatatcatttataggtaactaagtgtttgaaggatataatacattgaagtgtagaacggtaaatttgtccctattcgatnnnnnnnnnntatagaggatctttgactatttagatcataacaatggataattcatagcctacatatatcttggtacatatagagcgttctatatagttaagagtgcgattccaatagtggcgcaaggaggaatta

SEQ ID NO: 136334 - DNA, 537 bp, Cannabis sativa
ggatctttaaaccttggtcgctctgataccatgttgtaatgccatgtccaatagggacgccacatgtgtgcttttataaaattcttattcactaataagtataagtatgccaaaaagtgtgcttaaattaaaatttgataattcaaatcaaacacacaaaatttcttttataaaagataagtattattatttacggggttcccttattttcaaaatatttacaaaccagattaacagtgcttttacattataggtttatatttcaagatacaatcaaaatggaacctcctgtccactggaccatggcaccgcgactgatatgtacattgacgctacgacctcaaactcgtggctgctcaactttggccttccctttacttacaccatttagcacccgtgaatcacagactcggcaagaaaaatgaataaaattataaacaatacaacattcatttagtcacatcatgcattaatcatgttttaacaaatacacatcattgtaatcacacaatattggtacttcataaagtaccctta

SEQ ID NO: 136335 - DNA, 504 bp, Cannabis sativa
gaaatttgggaattagattatactagttttcgaatcccagttttactttgtgattgggtaagaagtgacaatggagttaaagatgatgaattaggattcaaattagtggacttgaatcgagtaggacacaaaaatgataggtttataatggcatcacaagccattcaagtgttttacatgagtgatccattagatgaccgctggtccgttgtcctcacaacacaaccgaaagactatgaaaaaaaagagtctagtggggatgattctcatgcttagtgaccaaacttttgaaatcaatccaccgcctgttgatgtgactgttggggatgacatcatatcttcacgtgaggatggagaaggattatgggttgatatggattgatatcaatattaacccataatcgatattcgcattgatacgcgatgtaatggtactttgtatattttatgtatatcattttaatttgctgaattgtcatacttttatattgttatttaatattt

SEQ ID NO: 136336 - DNA, 1713 bp, Cannabis sativa
  modified_base (1668)..(1672): a, c, t, g, unknown or other
ttttattttttaaaaatatttatttacgtggatcaataaaattgtgccacgtgtacactgtgtacacgtagacattccaccatggtagttaacaactaaaaatatatggaaatgttaaactgctaccagaacacaagtttagggagttttaccactaaaattttaaaattggggattagttgcaaaaagttgaccacttaaggaggttatgccacaaattactccaaaaaaaagtatatatttatatcatacataaaaagtaaaaaaaaaaaataggcatccactaattgaattacataattagccttcaatttaaattacaaaaaaaaaaaaataccacattacactacactacttcttaagatcaatgctaaataagtttgtcatttccttttaaaaaaaaaaaaagtttgtcatccaattgacattttgtcttatgtgaaatatttgtggaggtgattattttatcaaagtctctcaattacaaatataattttaaattaataaggtttttcttattcttttaagtgaatattttgcatttgataattatataactaatatatatatactaataatcataccatatactcaaaaaaaaaaaatcataccatataataaatgaatttattagtatatataattaaattgagacaatatttatctataatctataactgtaataaaattgttaataattttggagttctatttacacccgtatacttcattattaaaaaaaattaaacttgataaaaaccttatgtattatttattttataaatttattaggtatttcatatattgattatttttctcaaaaaaaatttaaagtattctattttacaaaaataaaatatgtgtaaaatatcctaaatatttttaagagccacaaaattaataaataatttgggcccttgttaatttataaaaaacaatgaaaactaagaacatctcgaatggagatacaaataagtaatgcaaatataaaatataagctcactttgtcaaaagtctactccgatgatgtatcaaattgtgatgcaaatatctcacgtaacaaaaagtgatctaaatttggatcacaatatagtataatgcaaaatttgcattacaatgaatgctatgattttgtaattactattatgttattttaaatattttattataaaagtttagttagaatgcttatttgcattaaatgactttcataattattaatgttttattattaaattttatatttattattgtatgattattattattttatattttaataaattgttagatggacatttaatgataaattgaatttacattaaatttataataataatacacataagcggacctaggagtgttgagggagggctaaagcccatcttgaaatttgaaaatatatttaatatacaatttttgttttcatatatacatagggctagtttggcataactgtgctgtgggaaaaaacagctgtagttgtgctgtgagaaaaagcagctgtagcaaaactgtggaaaaaagctgagctgagtatttggtaaattataaagttttaagtactatgagttgttaagatctactgtaatgataatgattatattataatctaatttattatattcacaaatatgtaaaaacttattttatataatattttatttnnnnnatatttttaattttttttcaaatataaatttatatgtattt

SEQ ID NO: 136337 - DNA, 1411 bp, Cannabis sativa
aaaaactaattaattaagtagttgcatgtttgttgttaaaaaaattatgtaataattgatattaataattgcaacttattattgaaagtttaaataatgttttatatatatatataatttttttattaattgatcagtgaaaaaaattatgctattagtgactattaatttcattttaaaaaatagtgatcattgatttctaagaaagaaaatacacctcgacaacttttctcaaaagatattttaataaattaattgttaataattaaaaaaaaaatctatatatgtaagactaagaataataagataaatcatattttttcaatgcatttatattattttttagaaactttagttttttctatgatgtaactttgtaaaaaactcacatttaaaaaatattaaagtttttttatgtaaactgtaaataaattttttatttgtccaataattaattaatattttactaatttaatattttttaaaaacgtaaaccatttttaataatgtatagcttatgattttttaagaccgcacaacacgaggcttttgcttcctagtttatgataatgtataatgtttacaaatttaataatttatacataacatatgactactaagtaagaatttaaaatcttaaaataataagttttataacttattgttttgttgtttttattttatttaatattaatatttttgttattgttgtattgtattttcaaatatgttagtgtttatatcagttattatttttgtaataatttatacataaatacatcaatttggtgtagattcaaaatctaacacaattaatggtgtagaatttagtgtatactaatttctacattttatttacatttttatagtttattataaaaatgcgcttataaaattttataattacaaaaatacattttactcaacaaaaagtaagaaaacaattaaaataacgaaaaatcaacctcacgacaactataaatcaattataaataaactataaaatatcaaaaaacaatcagaaaaacaaccttatgacaattataaataaattataaaacaacaaagaaaacggtttattctttttactgaaaaggtatttttgtaaataaaaaattttaaagcataaaataattttttttatattgatgtatttttataattttttttttgaaattttgagtcatgtaaatttttattaaattaaacattataatttacttatttatttatttttcttttttcttagttaaaaaaaaaaaaactggttaattacatgttacaataattgttacatgcgtcaaggagcaaaatttgttaggggtaagttgaaaaatacctcttttattaatcaattaactaaatttgcctctaattttatatttatttgaaacatacctttttttatatg

SEQ ID NO: 136338 - DNA, 799 bp, Cannabis sativa
tctctctctctctctccatcaagaaaccaacaacaagtaggggatttttcagctcaattctgagttttctagcaagattttagtttttccacttctaggtaatcaaattccctttgttttctctttaaatttttatggttttaagtttaggtgtcatggaatttttgaggataggtttttgtaggtttgtattgttgtgtttctattttcagaggtagttttaaggttctttatgtttgattaagttgagttagaggctggtagagaggtttgatcaaggtttgagcataagacctcaaactttgctctttaatggtgtttttagtttctgggtatattgcttgaattatgtttgttgtgactcaaaacgcttaggaagaatgacctggggaaactgagggaccccctgaaaatgagcaacccggggaaactgaggtttcccctaaaaacccaaatgatcagccagaaccatcacatagaaatgagaataggaggcgactcaaaaccaaggaataggaaattccacgtgaaaacgagaaaaatcttaggacacaacctgggggacgtaggtcaccagcgagaaaccaccagcgttctttccaaacccacaaggaatgggctcgtacaaatcttagtagggggaacacaacgaaccatgcccaaggacccacaatcgatcaacatgaggaggagaaagtacccgtcgcaacaatgatcgagaaagcataggtacaagtaagactgtaagtcactcaaggacgaggtccatgagcaggacgaggtccgtaagtaggacaca

SEQ ID NO: 136339 - DNA, 774 bp, Cannabis sativa
cccaactaccacactttcagaaactaatttcacgaagcactcttctcttcttctccgcctctatagatttgacgaagctttttctccacctccttcacgaagctctcttctctcgctcagaagttcgaactttacgctcgaaggtttgccttttttgttcagttcgaattctctctgttcgccccctttttttgacaaacagttactcaatatttttattgagaatatgtacatgttgataagatgatcttatatgtttcaaacacggagaacttgtttaattttagattgaaaatgatttcaatattcggtactctctcaatcttagtattatcatttagttgaattagcatatttgattttaggtgatggttcttttactctgtaacctctagccattgaagatagcttggaaagattcggtagcagtgtagttgcggagaggagcttaaacttcttcaatcgtctgaacgaaggtataccgtcacgttcttttcgattgttatttattattttcttttgtttgggagttgattgcatttagggtttagtgattttatttgaaattagatattccagaattaagtgaaattctgcattgaattaacaatgatttaatatcatttatcatgtgaaattatggaatcatttctttgatattattattgcatattcactgttttagctatatgatattattgcatataagtacgctgttgtttgatattattgcatatacactgtttaataaaaaggcatagtgaataattgttt

SEQ ID NO: 136340 - DNA, 662 bp, Cannabis sativa
  modified_base (634)..(634): a, c, t, g, unknown or other
tctccaaggcattgaccttctccttcaacctgtccactttggctgtaagctcccccaccttggcgtccttctcctccttcatccgaagaagcattgctcgtagagaagtcatctcatcctgaagattatttacctcagcggataagatctcgatggtctcctcaaaacagtcagcagcctcgagatcctttgtcagcacggagatcttcttctcggcagcgaacaacttcttgttagcctcgcccaactccaaccgaatagctccaacttccgccctggcttcctcagcttccttcttggccaagtccacctctgccttcaaggggttggatagagccacgcttttggaagcaacaaatttagcccgggagtaagtgtaggccaacttgagaccgccctgcacaaaggaaaaacttcagcatatggagctaagtgtggaaagttaaagggaagtatcaaaaaaaagaagtaccctggcgaactcctttaggactccgcccaccaacacatccagagatgagtcactatcagcaccagccagttgctcactgacctcgggaacgagccggttcatataatgggccaccatctccttgccctttttggcctctagaagcacgggcaaaggtggagntggtgcctgcacccgctcaggattactc

SEQ ID NO: 136341 - DNA, 714 bp, Cannabis sativa
tcacccttctttgttaagtaaacttcagagcgaaaagaaaatttcttggcttcaaagtcgccgaagtgccttcgtacaagctgcttgtttaattgacgttgctcgaaaccagacatttgaatcttgagtaagtttttgattcccctttatgcttatctttgcatgtttgcattttgaatgcgccttctattgtactgtagaaaaatgtttaggaaaccctaggcttagaaacctctgcgattcttctttatcatgtcttcatgcgggtttacagccataatgcttgtttctaaactgcataatgtccatttttcatcttgcttattctaagtttcatgaacttttttgccctaactcaagaaaatttttgacttcttgagttctgacttttctttaacataatcgttctttaatctgttgattactcctggtcggcatatttgcttgtttattgttcgatattccaaccaaacactcatctcgtgtgttgtcttttgtagataaactcaggtgattcttgggaacttggacatcgaatttaccaggatctgcttcaacttctgcacgaggatcatcctcgtctttgttctagtcctccttcctctagcgaaggacacacttctaaccctgtacctagccataaatgatggctcgtacaaagaaaaccacgcgtgtagctgacgcatctgatcctcaagtggctcggcacgccac

SEQ ID NO: 136342 - DNA, 635 bp, Cannabis sativa
tcagccttagctttgcccttacctacacatacaaacaatatctgtgagccaacagactcagtaagaaaagcataatcataacatagatataaactggattacgattaggcacccatacacctaaccataaccctatccccgcatcccacacggtactgagtcaagaacgttcatacaaagtactatcgaccataatattaacctatactcggtactctattcatactctagtcgtaccgatgtgatagcgtcaatcagtacttgagccaaacatacatttatcggtatctaatacaactctacgtatattgatactgctatcaatgtaatctaacaggctttataaacatgtaatcacatatgtatatcattatactaatcttacctcattttcgaattcaggtgtgtcagtcaacctgagtggaactactgctcggcgatttataggcccttaagtcacaatattcataaaacaggtgagtgactctctaaatcacttttcgggaacttaaaatcaaaactaaacatggacgctaaacatgtaattacatatgcatatcattatacttatcttacctcatttccgaattcaggtgtgtcgatcaacctgagtggaactactgctcgacgattta

SEQ ID NO: 136343 - DNA, 765 bp, Cannabis sativa
tagaaccataacatagaccagcatcattagtttggtgagatttttgaatcttttcaaaaatgttggaacttggattcaacattttgacattctttttaatgttttcaagtttcttagtcaaagaaacaatttcagactcttttagagacagttcagattcacatcatttaatttttttcttcaagcttattaatgttgttacacaagtctttattatctttcaccaaggaacgattttcagcacatatttcaaaccacttaccaaacattaccttgtaagattcagccatagagttctcatcagttttttcctcatctgatttggatccaacttcttccttgttgtcatcaatcaaggtattattcatgcaaatgatttttcctttttcctgcaaatttattaacaaaacacttgttagggcaaccttttctttttcatcttcactactttaagaatcatcactccaagtaacattcaatccctttttatttttctttaaggtattggcacatttagattgagtatgaccataccattcacactctatacatttaatgttagatgaaaaaggttaagagggattgttacctaaaatgttaccttttgaggtttttgaaaaattctttttatttccaacagatttcatttatctttggaatttttttgcaaacaaggccatttcatcatcagaaacaatatttttagaaatattaaacgcaatacctttgcttttctcattcaagaaactttgcttactctttttc

SEQ ID NO: 136344 - DNA, 591 bp, Cannabis sativa
tgggtgattgctgggtggttggcttaatgttacatcaaacaaaagtttcaatcccaagaagcatggatcgtgcgctgctgttgaaattgtaatgcaactgttatatctgttgcgagccaactaacgtgtaacttcattgcaactaaaaaaatataaaatgtgaatgtgtatatgtaagaaactatttgtaattttttttttgttactgatcgataattatttgtaccttaatagaattatgtggagaattaactgttagcaaaatatttatgcaattataatgcaactgatatgaaacattaaaaatcagaacagtgtttccacatacgtaactctatctacatgtctcttcgtgatttaatatgaataattcaccattagaaattaaaacaacgaaaatacaacaggataaatattttactatagtactgatgtagtttttttagattatacttgagttggattgtttgggaactccagttcaactttttgagatctgcatttcatggacctgaaaattgaagtctggatattaattttatgcgaattaaactggatttctagttgaattttagttccgtagtaattttt

SEQ ID NO: 136345 - DNA, 519 bp, Cannabis sativa
tccttgtgattagcatttctcaattttatgcttttcaagtgttgatttgagattgtaagatgccccaaccctgacttacaataagaattatcaattgtcaaagcctcaaggagtgggaggtttgtcatgagatcttcaaatgatgactgatcagtcattctccatgtacaactagatagtgtgagagattttttattgccttacatgcagacaaatttactttcgcaaagcaagcccaacatagcaccaaagattcaagatttatggtttcaactcgaagaaatacgtaatgtaattttgtagattatgaatagaatacgaacttaacgacagtttctcaagggaagggcaatccatgaaagacttggttagcacatcagtagttacattatttgaaagtcgaacatcttgcaatgacaatgatttcaaggatggaaaaccaaatgagtaacacaactcgattccactcaactacaaaatggtcaaagatcttaagttgaatactgttttaggtaagca

SEQ ID NO: 136346 - DNA, 828 bp, Cannabis sativa
caggaaaagttgtatctgagttttttaagccagaggagcaagattaaatggatacagcagggtgattctaacactgcttatttccattcgatgctcaatgaaagaagagaggataacaggattgtctcttttaccacagagcaagggagattgaatgatcactttccagaagtggtccagcacttccttaaccattttcaaaacattatgggcaaagagaaaccaacatcaaggccgattcagcaggattgtattgatatgggctcaattctcactttggaccaacaggtacatctattgaaacctttttctcttaaagaagttaggactgcgatgtttagtatcccaagtactaaatctcctgggcctgatggctttggttcggggttctttaaatctatttggctagaagtgggaaaggaaatctatagggctattattcatttctttgaaacaaataaattccctgctaaccttcataacacagctctctctctagttccaaaagtggaaaatccttcaaaagctattgattataggcctatagcttgttgcacgactctttacaaatgcatctctaaattattatgttctcgattagctaaagtgcttcctactttagttaatcagaaccaaggtgcttttgtgaaaggtcgttcaataacttataatatcttcattctctaggatcttttgaagaactataagaggaagaattgttcccccgggtgcacggttaagattgatataagtaaggcttatgatacggttaattgggattttcttgagaagttgctgaatctttatcgttttcctgctaaattcata

SEQ ID NO: 136347 - DNA, 719 bp, Cannabis sativa
ttaacaaaacagaatgtccaattgataacttttacaaaatacaagatccaaaataatatttattttttttcttttattattatagcataaattataaacaaacaaaaaaatgtttagaatcaccgattttttaattataaaagattaatgtgtttactattgcatagggattcttatgaataattataaaatgataacattttttaaaaagattgtttctttttttgttcacaattgtaatttctgtttccacattgtcgacagctcatgccctatttgtggaatggaggaggcatggagcacttctttcttttttgcgacctggctttccacctttggcggtcctcaccttggggttcttccctgtctctggattagggatccgtatgtgggactgagttaaatttttatggaacctaaatagcagaaacataaatactgatgaggtgtttttttatgcctctattgtgacagacacgatttgcgaaatgataaggtacataaccagaggatagataatgtgaatcaatgtattgactctatttctcactcctatgcggactacagagattctctcatcccacctcctgcaccgaaccaactcgttgttgggagcctccccctcaggactggattaaactaaattgtgatgttagagtgggtggggagcattgatgtgtagcagtcatcgcaagagactatctgagtaaggtgatttg

SEQ ID NO: 136348 - DNA, 599 bp, Cannabis sativa
  modified_base (200)..(203): a, c, t, g, unknown or other
gataaaataatcaaattttaaaattaagataaccaactaagcaaaaataatagattttatctattttcaggttcaaaaactactaatatcttaagttaattaaaaaatttaattaatttaattctgataattagatttgaaatttgaagaataaaaatcaaaatataaaattacacaaaaaattcgaaattaattccatnnnnaagcatgaaaaaatgaaaaaaaaacgaaaaaaattgcatttggtgcggatggtatgcgcgcgcgcacaacagggcagctgggcgtgaaatgccgcacacagaggctgcccgcagcatttccgtgcgcgtaatggggcttcagacaaaggcgtgcttgttccttcgaacaaggtgctgtccgaacacgctgacatgtccgcatgcgcatggggtgtcaccacctgtgattttttccgatttttaaaaattcataactaattcaaataaaatcgaaattaaattctgtaaaatagcgaattgcttaatttttcccatactatccaaccaaaataattccagaataaaattattttacgtaaaaaatttacaaacatcaatattgttgggttttatgcc

SEQ ID NO: 136349 - DNA, 895 bp, Cannabis sativa
gtttggagaagtgctaaacaaactgcaacgtcagactctaccatggaggccgagtacatagctgctgccgaggctgctaattaacttgtctgacttagaaagttcttcacaggagtcagtgttgttcctagaatggaaaaactactgggtttactttgtgataacaccggagccatagccaacagtaaagagcctcgaagccacaagagaagaaaatacatagagagattatatcacatcatcagagaatatgtggcaagaggggatgtactggtggtgaagtggatactgaagacaacttagctgatccattcactaaagttttgattgcaactacatttcaaaatcaccgaatgaatttaggattaattgaaatgtactaattgttttatgttagtggaagtgggagttcgttgggctttctgccctaaataaaattctattttaatgtaatcttttctactcaattatcaataaagaaacaaatttatttttattacttatttagtatgttatttggttcacgtgatcatttatatgtttatttgatttataaattcgtccaaatccttatcacattgatatttttgtttattgtctcgtcaacacagtggaaaataatcaagattatgtgattaaatgtattcctatgatttatcagtacacatgatttaattgatatgataatctacaatgtagtatacttgcaccttggataagtgttatgtcctttccagggcattggctaaagtaagcttgggttggatgaatggagtatgcattggaagggactgatattgtaaaacccaaacaaataagcacgctacccaaggtgattaagaaaccctaatcccctaaatgcgattattagaaagataagcatgggtaatttaaa

SEQ ID NO: 136350 - DNA, 897 bp, Cannabis sativa
ttaaaaaattatatttcattatatttatttgccttttcatcatttgccaactttcattttgttagagatatggtatgtggtatgatgtttattttatgtttttaaagtatgttgtcaaagaaaaggtaggcatttaaattaaaaatttcttaaatactatttggtcattgattgtcaatgttaatatatgcatgtacagtaactactatttggtgattgattgtcaatgtcaatatgtgcgcagtacactaattaatctagtgtcaattaataggatttaaagataaatatcagtaattttgacaatataatccaaaaagtctcatagtaacttagtgaatattgttgtgtttcactatattgcattttaaaaatacttcaacttttttttcaaagttttaaattacatgatttacttagctatgagtttaatgtttaatagattggtaccattgtttataatttttaatatattggaggtattcatataattgttcctccctataattgttataaaccttgatgttcaatacactgcatttttgaaaaacactaacctttcttttttttttttttttgattgctttaaattacattatttagaaatggtaaaattgttatgagggaaattgtgtgaaggtcaaagttattatttctcattattgtactgtacttacactttttgatccaaatttatgtccaaggccagaattaatgccttcatctctacaatgggaaagtacataagtataggtatttttattattttggctatggacataattggactaaaatagatagtgtcaaaaagaaggtaaaattggttaatttcattttcagaataatgtacttcacatattgttatggtaaaaaaatttcgaaaacctaatagtaatg

SEQ ID NO: 136351 - DNA, 540 bp, Cannabis sativa
ttagcattttcatggtattgtttaaatattacttttgttgatatacatttttttttatgaattagaaattgtatctaaatattttaaaggttatgttgatttaacgttgtttataagttgttttatagttgtttcatcttttaatttttttttattgttgttgtttcaccaagtcatccattgaagaagcttttcagggaaaaatatgagataatgatgatgaggttgcaactttaaagattaatgtatttgtttttgttgtctttatctaatttcaaagacttattttattatgtttattttttttatgtatttagttgaaagaattgctcaaccttaaatggtttatgtcttaattattttttagttttaatttagttattatacgattcttattctaaggttcttaagttttaaaagaaaaactagatcattaggttaagtattacatttatcaattatatttgagttttaattagaattgtttagttgcatgcatgtttattaaattttataaattacgttattttttagttgtta

SEQ ID NO: 136352 - DNA, 610 bp, Cannabis sativa
agaatgcttgaaggccttccaagctcttaaagagaaactgatatcggcacccatagtcacttcacaaattgggagtttccattcgaattgatgtgtgatgcaagtgactacgccattggagctatcttgggtcaaagagctgacagggtgtttcataccatctactatgctagtagaaccctgaatgatgctcagttgaactatgccactacgaaaaatgaaatgctagctattgtgttcgcgtgtgacaagtttcagccatatctgattgggaataaggtgatagtatatacggatcattctgtaattaagtacctcatgagtaagaaagatgcaaagctaagactgattcggtgggtacttttgctccaagagttcaacattgagataaaagacaagaagggaaccgaaaacttagttactgatcacttgtctaggcttgaattagaagagagttaaaacacaaaagaggtgcatataaatgaagagtttcccgatgagcaactctttagtttgagggaaagcttgatggtcccttggttcgcagactatgtgaacttcttgcctgcaaatgttacacctcttgagatgtctcgtcaacagctgaaaa

SEQ ID NO: 136353 - DNA, 546 bp, Cannabis sativa
tcatcttgcattggtagcagtggagtcatttcgtgttgctaccttcttagttggtcgtgcttggatttatgaacatggcgacatagatttctctacaatgccttatgttgtgaaaagtatgtagtaattcctttcaggtagttttggatggtgacattccaaccgggttgtctaggtgtgtgttctttttgtttccattcttaaaatgtatttcattttattatgattaattttgggtttaacttatgtgttttccttttttttttatttattatttgtgtgtagagatagcatgatatatatgttctcatttgttaagtattttgttgaggggaaaaagattcaaaatttggatttatatgtggaattaatgtcgacatagatctaggcttgtttattgattatattcatatgtaacgataaagcaaaccgagctagagtatccatgtctatattagctagattattctcaataacacaatgcatgtcaaagattgaaaacctgcaactttatgtactcttagttttctcatcatgttttttttt

SEQ ID NO: 136354 - DNA, 584 bp, Cannabis sativa
  modified_base (480)..(489): a, c, t, g, unknown or other
ctttatgtcaaaccacaatagaaagataacacattcagaacaataaagataataaaaccatcaactttattatgcaaaaaactaaacctagctaaagtagtgtaatagtgtcaatcaacaaagtaactaatattgaaaacaaacttccactaaaattgaacatcatcgaataaaataacacccctataagcaatatgctcatgaaagatcttgggtgtcaaaactttagttagtgggtctattaggaataagtttgttcctatatactctatatacactatcttactcggaactatatctttaacaactagaaacttaatgtatatgtgcttagattttgataagcttctatagtcatctgaatatagaactgctaatagattgccacaatttacctttagttgtcttttaattccttacacaacctacaactaagtgacaaaattttacagccatattgtgtgacagtcagtagtcccnnnnnnnnnnaggggaaataccgggtaagctgtgaaatcccaaatcgcctggggaaggtcaagtgggatgattctgagactttgtaggtatgggactacacagtt

SEQ ID NO: 136355 - DNA, 1765 bp, Cannabis sativa
aaagcaacatggagagagaaaagtaactaagtatgaaagcataataattaagaagattaaaaataagacggagtattttgcaaagcatttgcccgagcaagacttgaaggctcatcatcacctgacaagtctcttatctctgccaggacggcttttccctttcctagtacaggagtggatggccgagcaggtagactgggctccctgattcgaattgcatgttcaacaggcctgtgcttgggcggaactttctgcctccttttaagcggagtcacctgctcttcctcagcctcatcttcaggattcagaggctcatgagcatactgttttgcccccgcacctcccttcatcttagcctcacgcttaagttgaatgagttcatcctcctgataggctaccttagcccggccagcacttgatttatttcctctttttctccttcaccaactgaggctgagggacggggacgaaatccttcgggtagagcccgtactccacaaagttgtcctcagaggtcaacaaagtgatattccgggcaacacccggcagctaagcaagcctttgagctatatccctaagagcaagagtgaagggtgggcggtgatatacagggatctgctggaaccgagtgtaggtggtgcccatgccatccaccatgaagtactcgtcaacaaaattcccaattttactaacgaccttatccctagtgcccgtcaaccacttgtagtctggctgagagaagtagaagtaccccgacctgccttgcttgggggtagacttcaagtcaaaaaactagctaacttcatggggagagggcatatcccacttctgggaggcgtagagaacgaacagagcagacagatatttgatgcccttgggagtgaattgggttggacagaggcggaagaagtccgccaccttcctaaagtatgagtgcaaaggcagcaatgccccttgcttggcatgagcacccgaccaagcacacattccccttttagggtttgtaactcgattgttataggcaaaaatgtaacagtctaacttggccaagtagccgccctgatcaagatcccgtaagcgtgcttcagtgaccttggacggagggctcacccacctggcgcccaatgcactctgcctcctctgaggaaccgcgacagtaagttcctcagtggcgtaatccacgccctctaccaggacgtcgccgtcagcatcaactggctccccagcttcattatatcccccaaaatgttggggtgcaacctcctcgtcttcctcctcctcggggcgactgccaagacggacatcgcccagctcctatatctcctggacctcagcgtccgcttcatgatccccctcttgctgcacgggtggatcctgttcggtgttgggcatggtggcatgttgggccacatgaagatcggatgcgttggttttacacattgtttgtttaatacgagccatcattctttggctggacgggaaggttaaatcaaaatgtctgtcgcttgaagagggcggactagagcaaagacgaggatgattctcgtgtaagagttgacgtcggtcctagtcgattttgtgttcgcttccccaaaactcacctagtttcatctacaaaagacaatacgcgagatgagtgtttgctcgggatatcgaacattagacaagcaaatatgccgaccaggagtactcaacagattaaagaataaaaatattcaacgaaaagtcaagactccgaagttcaaaattttcttgagttagggca

SEQ ID NO: 136356 - DNA, 577 bp, Cannabis sativa
gtgttaggaactggaactgaaggtttaggcttggagggtctccgctccggggcaacttccaaacaaagggacctcccgactgcagcctgggccttaatgtaagccagctcctgctccctccagaaaagatacttctgataccgctcttcagccgaagtaataatgtctagccagagcgccctttccatagccggagtccttacgttcgggcagataaccttggaaaggttaaagtcatccactgactggctttcagatatcaacttggcttttcaacagttctctgtcgtgaccaagtccccaacattgagagccttctggtcgtaggtatagaaagtcttagcccgctgaagaaatacttgggtaggcgcagtccgcaggtatagagggatcctaacctactctgtaagaagctccgggcagtccatggcctagaaacctgaggaaaagaagaagcggtggcagtactccttcacgtgcttctaataattgaaagggactgggccctcgttcaacgggtgggaccgaagtccataaaatccgtctttatgtttgtcccccttcttggggacggata

SEQ ID NO: 136357 - DNA, 651 bp, Cannabis sativa
gtcacttattttgttttcgcacattcaccacactgaaaagatcttctatctttcagatgagcgatctatcggacagccaaatgcttggctcacgaggcgacgcattcgatggcgagcaggaccatcaggaggatagctttatcccgacttcgatctcagaagaagggatccctactgctggagacacagagctgggtccgttgtcttctgaggatatcgagaggatggtagaggagcttgctgaaccagggactatcgagattcgacacagcgagtctatggtgtcagcttgtgaatacctcgttcattctaggcatgctcctgatgtcgaggtcgaggagatggacgaagactggctggccccagatcgtgagtcagatgaggaagaggatgcggagggaagtgggaccgattcagtggacaacactcaattagatgagcctttctcatgcgaggacttggtctcgcgagtcaccaaatcggatcttaccacttttacgagattaaatctgctgcgacttgcctccttgcgtcctcgccctactcagggatcattcctacagaggatgtggtagtctcaatacccattcttcgatgtggagtatcgatccctttccatccattcatctccgctattcttaagcggtatga

SEQ ID NO: 136358 - DNA, 811 bp, Cannabis sativa
ctatgttgatgccatgcttagaatgttataggataaatgtttaattaattggaatgaatagttgagttagggtttaaggctataagtgcataagtgttgtatttgtgcttaactcgttggggttgttgattacaggggtacttgtaaaaatggaccctccgcaatcatctagaccacagggtgagcaagtagagcctggtgtagaccaaaccaatccactggcattgcctgcgcctccacaaaatctgaaggataatgcaggggttagcaatgctaattcccttgctgactggtagcaaatgtttcaagaaatgcgaggtatcatacttcgtcaagaggaagagttgcgtctgttaaggcaaccgacattggctgcccctgttgagcaagtgttaccatcagcacctgtgccagtggtgggtaacaaggggttcatgttgccacatgagactccgtgtttgaacggtttgtgaagctgcaacctcaaactttcctgggaggtactaatataattaaagctgagcagtggatgagtacaatcacccatatcctagacaatatgggggtggcgggaacagagagagttaatggtgcaactttcatgtgacaagatcatgtccgcatctggtgggatattctagaacgggagtcgtgatgtcagtgtgatgacttgggaagaattcaagagtttgtttaaggaaaaattctataacatcgctgtgaggacttcagatatggaacattttgtgaagctaactcaagggaaaatgtctgtggccgaatacactctggagtttaatcggctgtccaa

SEQ ID NO: 136359 - DNA, 804 bp, Cannabis sativa
gattatattaaaatgggttttattgagggcacaaaacccaacatgtataactctaaaagaaatcccatttgatcagcgagatgcggaaagctggaagttatatgtggatggcgcatccaacgagcagggttcgggtgcagggctgatattaatatcgccggaaggctttaagtttcactatgctctgagattccaatttgacgcatctaataacgagactgagtataaagccttgatcgctggcttaaagatggcagagaccttgaaagttaaaaatctcatctgtcatagtgattcgcaactaatcgtaaaccaggtcctcggggaatatcaggccaaaggcttgaaaatagcgcagtatttagagaaaatttagaagaacttggaaagatttgattactttaaaatcgaacaaattctaagagaacataactccaacgctgatgccttagcaaaactggcctcccagaatgatttggacgaactaaatctagttccggtagaaatgctgagcgagccaagtatatgtgaaacagaagacgtcgagatgatagatagctctccaacatggatgacgcatattattaattatttactcgacatgcaacttccaaatgacaaaaacaaggtgccaaaacttttgtatatagtgcctcgctacacaatgatcaaaggcaaactatatagaagagggtattcaatgcccctacttcggcgtgttcttcccgcagaagtaacgaaatcattagagaaattcatgaaggcttctgcggggatcatgcgggttggcaaagtctgtctaaa

SEQ ID NO: 136360 - DNA, 508 bp, Cannabis sativa
caccatatttttcgtaaagtttaaaaataaaaaaatatttatattaaatttatgaatccaacctatatatagacgcactccaatttggttatgtgagttttggttaagaataagtaaattacaatatatgcattgtgagatacgttacctaattaaaaaaaatttaaatttaaaaaaatacgcatatatataatcacatttaaaagacacaccaatgtagcaatagctaaaaaaaatttcttaaagagcaaaatctcaaactccatttcaaaaatttaaaaaaatacattacctaattaaaaaaaataaaacatacatgtattgcacttaacatcaccttattgaacataattaataaaattaattatacatgcattgcacggaacatcaacctagtattctaacctagtatcctaattcaatgaatcatttgcacctaaaaataaaataaaataaagtagaatttactatatttgttcaatgataattgttaggctaattttagtct

SEQ ID NO: 136361 - DNA, 707 bp, Cannabis sativa
taggtcccaaatccatacaccgacaacatgttttgtccaagccctgggtctagattcgtatcccaatctcgggtcccagtctggttccatttttggtgtcgggtcacgagctgggtcctatgttacatttcgggttggggtcggctactaggtcccaatcccagttctgtttccaaggtccctatcctgattcttggcctaggtcccggttattctgtgggtttgggtcccgatcaaggttcgggttcaagtcctagtcttggtttgggattaggtctcaatctgggttttgatttgggttcgactttgggtttaggtcctggtcctagtcctagtcctagttcagttatagttccatttccgattctgagttcgagtttgggtttgagttcgggtcagagaaagattccttgtctgagtttttgggtttgggtccggatttctatctaggtccatatcaggctccgggtgtgggttcgcgtccttggtcttggtctaggttgcgtccaagtccagtgttccaatcccgatataagtctaaattctgttctgagtcatagtccttaattctgatcgtggtctgggttcgagtttgggtgcgggtttgggtctagctttgggtctgattctaggtgtgatttgagttagggtccgagtctttctccgagcttgtgtccaagcctggaccccgatctgtgtgtaggttc

SEQ ID NO: 136362 - DNA, 519 bp, Cannabis sativa
acagaacccatcttgctccgcctcctctcccggcgagacccaagaacaacttcagctccatatcctccatttcaggtttattttttcttattatttatcattgtatactaataatcttcctaattctcggctgagtttttttttttttttatcaattttcatgactattattattgttactatttggcttttaatggagttttatttagggcaatagaggataatggccccaaaatggtttagcaattaaataaatgtcaatattttgaaaatattaagtaaatagccaaatatcacatccttaggcattaaaattacgtacgtgtctttacttttgcatgctatattatttttttgatctctcattattctttattaattttttttcagttttatttttccaacaactctatctttctttttaattgaataaaatatattatattttttttaatttctatgtgaactatattcaacattgatatacaccatggtacaaaaaaataaatataccttaat

SEQ ID NO: 136363 - DNA, 1433 bp, Cannabis sativa
tctaccaaatcatgcccctcaaactttgatatgtactaaatcatatttatttattgctaatttttccttgcaaaatactgttgccactgatgttagatgctctgtaaccaatgctcaaaatgaagaacttttgaaaccaattgtcgaagaagaaattaaaactgtcctattccagatgcatccagacaaagcacctggccctgatggcatgggtctgggattttttcaaaaacattgggaaattgtgagtgcagatttggttaagcttgttactgatttctttgataccggctagtttccgcgggagttgaatgaaacaaacctggtttgatccctaagaagaagaatttcacctccatgggtgatctacgaccgattgctctttgtaatgttgcttataaggtgctttcaaaagttcttgctaaccgtatgaggagccttatagaccttgctatttctgatacccaaagcgctttctttcctggacatctcatttcagataatgttatggtggcgtttgaaatgatgcattatcataagaggaagactaaaggcaaaaaaaggttttatgactctcaagctagatatgagcaatgcctatgaccgtgtggagtgggattatcttagggtcgttatggctcgtataggtttcgttgagagatggattaatctaattatggcatgtgtctcttcggtcagttataatgttattcatggaagccatactatgggtccaatcattccttcgagaagtattcgacagggtgaccctctttcgacatatcttttcatcatctgtgccgaaggtctttcttcacttatcaagaagtttgaatctcaacgacatttacaaggatgcaaggtggctcatggggcaccacttatcactcatatgttcttttcagacgatagctatttgttttgtcaatcaactactagtgctgccggcagtgtctcaaacttgctcaattaatttgaaactgcatctggactaaaggtgaacttttctaagtctactgtgttcttcagtcctaatacgtgtcctgcaacttgtatccagatttgtgatattctccatatgcttgaagcctctgaaggaagcctctatctgggacttccaaacattattgggagaaacaaaaaatgttgtactaggatttctaaagaccaaggtaattgcaagaattaatagttgggattaaaaacttctttctcgtgccggcaaaaaaattctcttgaaaactgttgtccaatcgctccccacatatgttatgagtgtcttcctccttccacttggtacatgtaatgaaattgaaaaatttatggcccggttttaatggaagacatcttctagtaaagggaaaggtattatttggaggtcttgggatcgtatggctgctcataaatatgatggtggcatgggttttcagcac

SEQ ID NO: 136364 - DNA, 887 bp, Cannabis sativa
caggaggttgttcaacaatgtggtttatgtgatttggacatgtttgggcatcctttcacgtgggagaaaagtcgggatacttctaattggatcgaggctaagcttgatagggcgatgtgttctcagagttggcttaatgttttctcgacagcaaggttgtttaatcttgaagtctcaccttcggatcattgtcctctccttcttgatgttcagcaccgtgaacctcgtgaccaaccgcgtccttttaaattcgaaaattgctggtgtagtcatcaagagtgtgaaactatcatcagagatagctggggtacaaccaatggtactcggctagagcaaaaaattcagcaatgtggtcaagctttacaagtttggggtaagggagtgacggggaatttttcttcacagataaagcagtgcaacaaaaccatgaagcaatttaagaagagaagagatgaggaaggaaagcaacgattcaaacaagcgaagcagcagcttttccgagtgcttaaccaaagagaagttttttggcgccaacggtcaaaaaacaattgtggttgaaagaaggggatcacaatagcaagttcttccatgctaaagcatccgctcgaaagagaaacaatcaaattgttcagttgagagacactaatggtgttgcggagttgggataatgggctgggggacgttatggtggactatttcactagcatttttaaagctgaagaaggagattgggcagatgttcttcaatgtgtggagccgagaatgaatgaggcacacaatcaattattgcttcggccggttagtgaccaagaagtgaaggatgccgtctttcaaatgcaccctgataagtccccgggaccagatggtatgaatcctaaattctttca

SEQ ID NO: 136365 - DNA, 833 bp, Cannabis sativa
  modified_base (50)..(53): a, c, t, g, unknown or other
tttttttgtacagccctagtatatattatgtggttgtggtcttttgatgnnnnaggtctagttacaataaagagttcgtagaatagtccaagtggatggtggtcataaaatacaaaaactcataatgcatacattaacatatagtttggatccattgtaaaaaaaaatagatattaacaacttgtgaaagttttactgtattgtccaatgtattctggaaactataatttaaaaattctatttggaatctaaaatttaatgtcaaagacttaaattaataccaaatattccttgagtaattcttctagcttggaccaccactactattttcactctaattttaagttacctatagtaagcatatacaagtaggagattctttaagatcgaggatttatatcatttcaggatagaatgtttggaatctagtcatctgcgccacttatacttattgaaaaaaatagagtgacatcataaacagatgatttataattttcgttatccaatgatatgctatctaagcagtttcttaatgaaaaagctaagaggaaaaataaagaataattttgattaaaataagataccaacaatgtcctttttaggtaatagtcaaagttactcttattttataaacttcttcattgtttcatattgtaaacactagtcttagttgcttctttggatgagacaactagatgtctcatttacaaaaatttatatgtcgagatctatcactgttatgttgtctaatggatgacaatgctttgagatttgtctcattaaaaataacaagtcaagttagaccaacaatgaagattcagatcggaagagcg

SEQ ID NO: 136366 - DNA, 597 bp, Cannabis sativa
attgtttgattagtacgtaataaaatattgaatattgataagaagtaataacatacacataaatagacacatactacacaattatatatgtattgttttcatataaccaaaaaaatggccttacttaatcactttattgtcacttagtttcggttttgtattttgtatatagctaaaaatacataaaatgagaaataaaaacttttcatttcccatcttgtagtgcatgtacaaagatattgggggaaagaaaaaaaagaaaagcaaaacaattctcaagttttgctagaaccctaattactcaaaaactctttaatagtgtcgcagcaacaagaattgggggagctaaatcaagagctgcaattccctagtgttggtcacttactatgttcaaaaaaaagacaaaagctatatatgtctactatagtttttttgtatccataccaagaaattaataaattttttttatagtataacatattgctaagaagtaataacatatcataaataagtacctactacataattatatgtattgtttttgtataaccaaaaaaaaaaaaacccttgcttaatcactaaattgtcacttagttc

SEQ ID NO: 136367 - DNA, 786 bp, Cannabis sativa
tgtgtataaatactctatcttgtaatcaaacacttaatcaataatacaattcaattctttcagcttttcgtttctctctatttctctgttttctcgttttctggctttgtccatttcgtcacaagtggtaagttattctcactccattcaagagaatagagattcaaaactcaacttttttgatcaaaaaaatattacaattttttcgttgctaagtctcgattcttgaattgtggacttggtataggtataagaggatcaacaatggtaatgccattgatgttgcttgacagattggtaggcccatatacagcagaaaaaatcgttgctgacagtaagcaacatagtttaattttttttttgtttatatttttttttaaatttatttattttttatttaattggttaattaaattaaaaaaaataataaaaaaaattgtatgtaagatcaagcaatcaacacctacagttgcatgcgttgatgatactcttaaagagcctaactagtaacattatagtacaaaatcataatttttggtacacacatttttaagggttgcacgacgtagataaagaagagggtgtcatgactttttttaaaaaaaattatatgtgaaaaattattttaaaaaataaaaataaataatttttatattcttacatgtgttggcttccattaaattttggactagctttgccattagaagtatgaggagtgctactgtcaacctcctattataacctcttagtcaactttcacgcccagaaacacatgtcagaatattt

SEQ ID NO: 136368 - DNA, 648 bp, Cannabis sativa
atggaagagcaaccgagctattaagagcttgaacaacagcaatacaatctgtctcaactatcacattggacaaattctttgacttcaaccaactaagggcccccttgactctcaatacttcagccacagccggctgacaagccccagaatgcaaagaggaactagcttcgattaccttcccctgacaatccctaatgaccatgcccgtaccatattgagttgttgcctcaaaaatcgccccatccgtgttgatcttcagctttccaggaggcggccttacccaacaaacactgctaccaacaacagtagcatcaaacaatagcggttgaaacctgttctcctgagccaacagccaactagaatgacgtgaccttgccactcgaaccacatccgcagcctgagaagaacgacccagccaaagaaactcatttcgagctttccaaataccccatgctaccatcaagagctcatccaccaaagccactctaccccttgacaggaatgccttaaaccaatcagcgaaggtagattctgcagagaaatgtaaccccacacccgacctatgccaacatgattgagcaaaatggcaaccaaccgaaacatgaaaaatggtttcttcatcagaattacaaaacacacaacgaggat

SEQ ID NO: 136369 - DNA, 564 bp, Cannabis sativa
ttacctccaattacacacaaatccaattacattgtggctttccaaacgcacccttaacgttatttttttattcatgtatatttttttgaataatatatatatttagtttcttcttgacaattaatttagttgtatgtgtgttgttttgtaatttagaaaaatatatttagtttattttttgacacattttattaattaaaatacaatgataattttttagtttttttaattgacacaatgtacagtagtagatagtgacatattaattatatattgcccattatatataccacatttagaaatcataaaattttattatttatattattaatgtaattatttatttaacttttaaaaaataaattattattttaattgccactaactcaaaaaagaaaagaaaaaaataaaaaataaattttatgaaaaaaaataatataatagtataaaaagataaatcaagttgccaaaaaaaagtaaaaaataaatttcgtaatacaaaaacatattgaggagttgatattattttgcatattgcaattaggtcattgttttgttattttt

SEQ ID NO: 136370 - DNA, 1595 bp, Cannabis sativa
agggcataaaacccaacactacttagtgatgccgatgtacactcgcagtagtgacactatcactgtagatgtttaggggtcctctgacacaaagtatgtaatcatgttagctttactgtatcggagtcaccactttcgtaacgaaatcactaatcgataccaatatagggttttacttagtggtgccgttgtagactcgcagtagtgacactatcactgtagatgtttaggcgtcccgtgacacaaaatatttaatcaagttagttgtagtgtatcggagtcactagtttcgtaccgaaatcactaatcgataccgaaatagcgttctacttcgtggtgtcgatgtaaactcgcagtagtgacactgtcattgtcgatgtttagggctctcatgacataaagtatgtaatcaagttaggtgttgggtatcaaagtcaccagtttcgtaacaaaatcactaaccaacatcgaaatagagttctacttagttgtgccgatgtagactcgtagtagtgacactatcactataggtgtttaggtgtcccgtgagacaatgtctgtaatcaagttaggtgtagtgtatcaaagtcacccactaacagataccgaactagggtcttacttagtggtaccattgtacacttgttaggtgaacagtctttaataaagttatatgtagtgtatcggcgtcacaaatttcgtaacgaaatcattatccgatactgaaatagggttctacttagtggtgccgatgtacactcgtagtagtgacactatccctgtagatgtttaggggtcccgtgacacaaagtatgtaatcaagtttggtgtagtgtatcagagtattcagttttgaaacaaaatgactaaccgataccgaaatagggttctacttagtggtgtccatttacactcgcagtagtgacactatcactgtagatgtttagtggtcccgtgacacatattatgtaatcgaaatacgtgtagggtatcggagtcacaagtttcgtaacgaaatcaccgaccaataccaaagtatggttccactaattggtgtcgatgtacactcgcagtagtgacactatcactatagatgtttgtgggtcccgtgacacaaagtatgtaatcaagttaggtgtagtgtattagcatcaccagtttcgtaacgaaatcaataaccgatacaaaaatagggttttacttaggagtgccgatgtatactcgcagtagtgacactatcactgtagatatttaggggtccagtgacacaatgtatgtcatcaagttagctgtagtgtatcaaagttaccagtttcctaacgaaataactaaccgataccgaaataggatttactaagcagtgtcgatgtacactcgcagtagtgacgctatcactgtaaatgtttaggtgtctcgtgacacaaagtatgtgatcaagttaggtgtagggtatatgagtcaccaattttgtaatgaaatcactaaccgatataaaaatatagttctacttagtggtgtcgatgtacactcgcagtattgacactatcactagaggtgtttaggggtcccgtgacacaaagtctgtaatcaagtta

SEQ ID NO: 136371 - DNA, 578 bp, Cannabis sativa
tatttatatatgattttgtcttactacatgacttatatctttagttggttcttaacacgaacctacaaaaaataatttaaactggaattattttataaaaaattgcatatttaaataaagtatgtgttgaccccaaaatttcttaagcataaatgttggagatcacatgattaaatggaagaaagatctcaaaatgcaattaagtaaaggtgtatgagaaaaaatatgtgaggccaactagcaaggtgagacgccacacaagaggaagagctagcacgagaaggggccaaggcacgggttgagctccttgtgcgaggagctccctactcccactctctctcccattgctccctgttctttcaatggagctccctgcttcctctcccactttttggtcgccggacttccaagggagctccttgctcccactctcaccctttgctcccccctttcttccaagtaagctccctactccatctctcaccttttgctccccagacttccaagggagctccccactccctctctcacccattacctccctttcttccaagggagctccccactccctctctcac

SEQ ID NO: 136372 - DNA, 509 bp, Cannabis sativa
ctaaaatcagtgtaagtgtactttttattcttttgttaggttgtgttagcttgttagttttttttagttgttagacagttttatgttagttttgcaacttttacttttttttaattttttaattttctatttcaggttccagattccaatccaaatgatattattgaaaaggcagatgccattgcttttgatgaagaagtggatgacactgttacttatactcctctattggataagagaaagtctgccccgacattgaaatcgccttttattgattttgggtcggttgatgtgagcagcacttcaatggaggtaatgttctcaggttctcaatctagaggagatgagagggatttttagatgattacgtatgtgaagggccttcacgctcttaacgattcattttccgatcccatctctcttaaaattgaggctaagtttgatgttttgattagcaaaggacttcaaaaatatcttaggtgattattttctttattctattttttttt

SEQ ID NO: 136373 - DNA, 644 bp, Cannabis sativa
attactcataaatgaataatattagaaaaatttgagtttttatgcataatttttctatttaattaaaaaatctctcatttttacattatatgggatgaaattgctccttcagatgaaaataaaataataaaaaaaaatcagcaaaaaaaatgataaaaaaatattgagtttgacataaatatttttcatataaacttatttttgatatagtgtaaaaaaaaaagtatttttttgatgttttctttaattaagtagttaatttaagtgtagaaattaaatttttttttttattattcgtcatcagatcaaaatctaataatttaatatttcatgttattttgcttgctgcgaatgacatacctatacattaactacttttgttattaatcagataaagtatttgaacatattattatccctaatttttaacctctcttgtaacagttgatattttttgttagatttgaatcataacagttcattttttgttttaattgaatgcaatccttaaaaaatctctaagttgcctaaatagataaaaaagtgtattagaacaacaattttatagatttttccaaaaaaaaaaaaaaaatactatttttacattatatatgtattactttaaggctaattagcaatttttt

SEQ ID NO: 136374 - DNA, 671 bp, Cannabis sativa
ggctgggtcccaaatccagacaccgactgcgggttttgtccaagccctaggtcaagattcggataccaatctcaggtccgaatctggttacattttggtgccgggtcacgagctgggtcctacgttcaagttcgggtctagatcgagaactacgccctgttcctagttctgtttcccatgtcactatcctgattcttggtccaggtctcggttattgtgttggtttaggtcccggtctaggtttgggttcgagtcctagtcaaggttcgggtttaggtctttgtctaggttttgatctaggttcgggttcgggtttaggtctgtgtcctcgtccttgtccttgttcggttctagttctacttgcaattctgagttcgagtttggggttgagttcgggtcagaattcgagtcctggtctgagtctgggtttgggtctggatttgagtctagggtcagatcaggctccgggtgtgggttcgcctccttggtcttggtctaggttgtgtcggagtccaaagttccaataacgatctgagcctggattcagttctgggtctaagtcttttgttctgacatggtctgggttccactttgggtccgggtccgggtctaactttgggtttgattctagctgtatgtttgagttcaggtccgagtctgtgtccgggttt

SEQ ID NO: 136375 - DNA, 748 bp, Cannabis sativa
acgaacccaaactgtgatcgaaacccaggacttagaaacaaaactaaaccctaactcagttcgagatcgaaacctgggacctggacctaaacctggaccgagaccaaggaccctatcccacacccaggaccctaacccacacccggagcccgatccggacctagaccgagatccaaacccgaacccaaacttggaccaggacttgaaccccgaccagaactcgaaccccaacccgaactcgaacctaaactcgaacttggaatcacaattggaatttgaattggaaccgaactaggactagggccaggacacagaccaggacccaaacccgaacccaaaaaaatacacataacgagaccaaaacccaaaccgccatgaggacccagacctaaacctagattgagacccaaacccagaccagaaccgagacgtggacccagaatcgggatagagacctaggcaacggaactaggaccgggacccaagagccgaccccagacccggacttgaacataggacctagctcatgacccgacacccgaaatggaaccagaccgagacccaagatcgggatctagatctggacctagtgcttggaccgaacccgtagtcggtgtttggatctatgacccaaccccggaccccaacccagaccaggaaccaaaatcagacccggacccaaacccagtcctagacacaaacatggacccgaacccgtaccctgtgacccaaaattggaactgaaacc

SEQ ID NO: 136376 - DNA, 530 bp, Cannabis sativa
ctcgaactcctacatatggacttattgggtccaatccaggttgaaagcttgaatggtaagaggtatatttttgtgtgtgttgatgatttttctcaattttcatgggtggaattttttgagagaaaatatgatacttttgaagcttttcaatccttgtgtttgaaattaagagttgaaaaagattgtaacattggtaaaattgttcggattaagagtgatcatggaaaagaatttgaaaataatatatatgatgacttttgtaaatctaacggtatttctcatgaattttctgctcctaaaactcctgaacaaaatggagtggttgaaagaaagaaatgtactctaacaaaattggctagagtaatgttgaatagcaagaagcatacgaggcgtctttgggccgaagcaatcactacaacttggtataacattaacagagtgttcttacgtccaggtactcacaaaacaccatatgaaatctggaaaggtaagaaaccaaatgtaagtcattttcatgtgtttggatgtgt

SEQ ID NO: 136377 - DNA, 638 bp, Cannabis sativa
ggtcttagctttctcaaagctaggagcaagcattatgtcaacttttcaataagtgggtatcgactttagcattaataagtcttttgctaacatactatactaagtgttgaatgccattttcttctctaatgagaactgcaatttcagcaaactctatgacttatatgtatatgcccaattcttcattctctagaggcttttccaggttaggaggttgagctagttgtttctttagctcttggaaggcagcttcacactcctctgtccatgtaaatttttaatttcctctaagtatgttaaagaaatggaaacacttgtctgtggattttgacacgaatctgcttagtgttgctatgcagccagttcatctttgcacttcttttatctttgtgggcgacttcatgtccaaaaaggcttggatgctctctgagttttcttctatttcttagaaattcactatgaagccaaggaacttgtctgagtctactttgaaggaacacttaaggggattgagtttcatgttgtactctcggaggatcttgaagcatttagttagatcctctatatgcccccaaccttttttgacttaacaagcatgtcgtctacatagacttccatgttttgaccaattacgtctt

SEQ ID NO: 136378 - DNA, 1307 bp, Cannabis sativa
ccccttaaaaagttcttttttagtaaaaagagcattttaataattacggagggcatttttgccaaaatcctttcttggaaaggatgcctcctttgattctgtcgattgtatggtttcgatgatcaatatgaatagcctattcatattttgcatgattcccaactattagatttctcaatctttggctttcttgtcactgaacttcgtgtataaaagggaggctcaagcttgtcatttttcataaacctctggcttctttagtgaaatccatattcagaatagattactttcttcctgccaaaatatctcttctgagttcagaagtttatccttcgagactcataatacccaaatgcaccaaccattttccatttgttcctacagacttcaagcctcaaccagagccggaaatgatggattcgagggttgaggagcttccgaccaatcaaaacccggggaaccccgtagcctgccatggccgatcctcacaagtgatcccagagggtatagatcttgtgagcgatctcaaagatcctcctcaggctgatgaagaattccaaaggaagattggcatggttttaggtgcatctgggaaggcatttggcgtggtttctacacagaatccagccaaaccaagaccctaacctgtgccaagagatctttgcgttagcctctctctagtgttgagaaatttcctaaggtgggaaagagatctcggcttcaggaaatgtgatctgatgatgaggagaatagggtctgtgcaaagatcaaggctctctacgtgcagacggtctttctcatctacgtgtagtcggtctttctctaagctatgtgtagacggtctttctctttcatcctctacttaggagaatgacttaatagtttgcccctagtggcatttttgtaaagacaagtttgtaactagtcttaggtttttcttatcataaatgccttgtactgttttcattcgaacttaatacaattgtatttgcttgcatttttattcacaatgtaaacgactatattttgatcaaatatacaacacttttgggtttctccattgctcgtaatcttttagtttaaatagttattaatctaccaaactttataatttttgagtggttgtcagttctgccttgtaattgtagttataatctgccttaagcaaacttaaatatactttaaagattttatcacttcgtatatttttaattcgctcgtatggatagttatattatctatccattttctaggtttaagtacttttatcaaggcgtcgtgatgcctcgtttagtactttcctagct

SEQ ID NO: 136379 - DNA, 538 bp, Cannabis sativa
aatggttgccggttaaatgcaaaaattgtgggggttttgggcatatcatggctgagtgtaggaaaggagaggttaagcaatgggttaaaaaagatgcaaaaagtgtaggggctggtgaggaaaagaatcgtgttaatgatgctcaaattaatgctaagaagactagtgagatgggagatgatggcaagaatagagtagggggcaaattgggaaaggaaggggagaaggaaggagctatatctcaacagagggtaggggacttgagagaccgagaggaagataaagattcttgtcatggggctttgatagctggggtagtgaatgagggagaggctgaggagagttgggaaactcctaaaagagctcatcttctcaagaataagcaagtggttagggaacatggagaacatcataaagctaagaacactttcgaaatgttgcaaaataaggagggtgggacacatggagatgggtctttggttcattttttatgaattgctgcaatgtgttatgttggaatgttagaggcctcaataaa

SEQ ID NO: 136380 - DNA, 506 bp, Cannabis sativa
tttcatagttggatcactctgtatctgtatgtcttctacaacgattgtaaaagctctctctatgtttattccacttctccctaacacaaaacacaaaactctgacctcacaaagaattcgatactttctgaacccaaaaaattcaaaataactattgtgctctctcttcatcgtcattgaaggcattaagaattatcgtcattgaaggcacgacaaattatcaagaatcgtcacaactgctaggaagaggaattcatatttggattggttgagttcatcgcttaattaggggcagggtattaggattttattcgcaagagtagagagaaaattgagaatctgttattattttgaattttcctgcttaaagaaaaataaatgtgtttggaaaaattgacgtgagaatctaaataaataataaaatagtattaataaaataaaaatttaaaatattgggtttaaaaaaacagtttaaaatattgttaatttaaaaaaagattgtttaa

SEQ ID NO: 136381 - DNA, 543 bp, Cannabis sativa
atactatattttaatattactatttttataagttatatctaaaaaacaaatcaatcattcaaaaaaaatgaaataatactatatagcttaaatgttatattcatatttatacttgcatgaaataaaatacaatatttaaaacaaaaatactaaaattagtcatcaaacaatgggtattatgaacataaattttaaacccacataacaataacaaaaatacacaccaagaacttgaatacagacccaaaattattgtaataaaaaacattttaaaaatattcagatccaaaagaatgccgagatacacacgccgaaagaggagtcgttggtgtggctggtgtcactggactaaccggcatcgacagtgatctaatgtacaccatattgctcattttcctgtcgcccactataatatatatacacatatgaacatacaaaagttaattattacaacatatataaaattatatgtagggatctatatgttgggttttgtgccctaaataaaactcattacaatctaattagttatcaatctaagaa

SEQ ID NO: 136382 - DNA, 549 bp, Cannabis sativa
actgttaaattttttttaaaagtgcattacttacgcgagggacaactgccgtcctagggatgttcacactggcccatccaatccatcctagttcgtcaaagtgatggtgcagggagaatggcttaacgatactgtaagttatttcttaactattcaaatttattattttttaaatttttgtgcgacttaaatacgatctatgtgcgatttatttgcaatattaacaacgttatgcgattattgtgcgacttttgtgtgatttctacacatttttattttatttatttttgtgattattgtgcggcttctgtgcaatttatgtacaattactacacatttttggtgttattttatttttgctattatttgcaatttatgtgcaatatttgtgcgatttaattcgatttaattttaaaataattattttttacagtttttgtgcaatttatgtacgatgtttatgcaatttatgtgcgatatctgtctaacttttttcatttggaacacaacaaattgatgccatggcgcacttattgagaagaagatgga

SEQ ID NO: 136383 - DNA, 678 bp, Cannabis sativa
  modified_base (154)..(156): a, c, t, g, unknown or other
  modified_base (391)..(391): a, c, t, g, unknown or other
tctatggcatttgaatcttgttcatagcgattttgacaatatcattctctggaaagagtcattatgcctatatccacttgaaagtaagatcatatatggatgtacattcacgtgtggatatgagttttggttatattcttaagacgatcactcnnnattttaccttatgcaaagaaatttcatgaatttctaataatgttggaaaaatattaaggtaagtggttaaagatcctgcgaactgataggggtggagaaatatttggatacgcagttcaaagatcattaagttgaattttgaattgtattcaaacttacctccccaaaaattcgatttgcatagtgatgatagtgaaaggtttatgattagttactagtagttgcctaagtcctnctagggaaataccctagtgataagatgaattcagaatgatggaatggttgtgtacttagtgtaaaccaatattagattcatgaatgacccaatcgtgatcttaagaaaatctggaactgttaaccaaggttcgcatgtttgatagctattctaagtgattaggggtggaccatccaatagtcattaagataagaaagtttttttttttcaacaaataccatttttctaagaaaatgactaagtctaaaaacaaagtagcaaagtaaaggagatattttttcttgatt

SEQ ID NO: 136384 - DNA, 1220 bp, Cannabis sativa
  modified_base (1161)..(1193): a, c, t, g, unknown or other
ttaaaagtacaatctgacataaaataggattgtctagcaacccaatgggcagccctatttgcagatcgcttaacataagaaattaagacattgtttaaagaagagaccatcatatgacaatcatgcaccaaggggttcccagttttgtgtgcatgggtgaggactcacacactggaccaccacacacacgcgcaccgccgccgtccgtccgaccgggtctggccgcgcttaattttttaaagaaaaattatttaattaaataaaggtttatttttttatttatttattaattaattttaacacgtgatcagaagtagtaataaaacgcgatcagtcaatgatccgctttttactcccatgatccaactcctccacgaacgataacattaccgttttcttaccatttttttttggatcgacctctatataagttgtatcagaataacgaaagaatacatcttttccaacattaaaaaaaaaaatcttttcatcttccttacgatttttttagcaaattttagggtataacagagcgatatagttcggtgtagaacatatcgtaagtatacagaggctgttttatcctggggacgccgtggttgttagactgctatgcacacttcgggcagagccgcgaaacatcttaaagagagcgacattgtccgcgactcagccagattattctatcggtaattcgttccaatttcattgtttttaaatttcagtttaacagtctgtgtatggaatatatcttccaaataacttgttttaatcgggaagtacactcctagataatttactatcagtcttaaaggttcattccgaactgaagtcttgtatctggaaggcttgttgccaaacataacaagtgagtatgccttaaaatattgtcctttgtgccatattgtataaagtcagtgataatgctttatgtacttgagatgccctctaaattgcaaatttccaacacattaaatgttgctgatttgttcacttatcactctcctaattaaaacccctcaactacatatgataagcttggagtcaagtttcgtgacagcgggggaaggctaatgcagtgcactagccctggacctctgttctcctatactaattttagcaacttaggtgccgtttggtaatatttttgttttttaattnnnnnnnnnnnnnnnnnnnnnnnnnnnnnnnnntttaaaaaatttatttttgaaaaacaa

SEQ ID NO: 136385 - DNA, 776 bp, Cannabis sativa
gacagcataacattgaatgcatcagcagtagcaggaaccttcttaccccgcaccttcacctccccattcccgcggtcgggccaattggcgagaaattcacatgccatagtcacattcgcccggctccgagcatccacaaaactaccccatttcatcctctcaatttgagcccgaattgcttcgaacctaggttgacgccttaaggggttttcagggaattcaataccccgatctttaatgtaaggtctaatttttaacctcatgaaacgattttgagcctcctcattcacaaatcgggttctatcgaaacccgtagctggcgggtttgacgtcgaaccttcttcaacatgccttgttctttttggccccattttctgtgaaattttttttttcgttcttctttattttttctttttctgtgtttttttttttctttcaaaataattctaagaaaaattgggcagcacctccccttaaatatctacttcccaaaaattaaaaactacaccaacaaacccaatacgacaacaataccacaatacaatttcaacaaacccaatatcaacaacaattttatcacaatatgcactattaccaccaaaatttataaatagtaaatcaaattcctagatatggttcgaagtgatacttacaaacccacagaagcttttactccttctccattgttgaatattcttgaaaacttgaggttgaagatgaagaataaaggtattttcggatttgggggtaatattgatgatttttggtgtgatttt

SEQ ID NO: 136386 - DNA, 570 bp, Cannabis sativa
atccttcagttgacgagaggcatacgctatgactttgtcagcttgcatcagaacacatcccagaccctgtctggatgcatcataataaacaacgaatctctcttgatttgatggcaaagttaacatctgagctgttatcaaatgttgtttcaactccagaaaacttgtttcacatttgtctgaccacacgaatcgctgatttttctcagttaactcggtcagtggcatagagatcttacaaaatccctcgacaaaatgtcgataataccttgctaaatcgagaaacctttgaacttgtgtcactgattttggcctcagccaattcttcattgactcgatcttgcttggatcaaccataattccattctttccgacaatatgccctagaaaagatacctcggacaaccaaaattcacactttttgaactttgtatacaacttgtgatccctacgtcgctgcaataccattcgatgatgatgctcatgcttctctttagaccgagagtatacaaggatgtcatcgacaaacactatgatgcagttatcgaggaaatccttgaacaccctatt

SEQ ID NO: 136387 - DNA, 585 bp, Cannabis sativa
  modified_base (517)..(537): a, c, t, g, unknown or other
acttgtttttagatacctatttttaagttcatataaaaattaagtatatgtaattactaaagctttctatattttaatttaaatattgttatatatatacatgcattttataattactaactagtttagaaaaattaagtatttgtaatgactaaagctttctatattttaaatattataatatatatatattttataattactaactaatttataaatgaagataatatataataagatattttacacttcacacttatttttaatataattatcaaaaataacttgatcaagtatgaataatatttttatttgtttaatatgtttgctatgacagaaattttttctttgttgctgaaatgaaagttatatatgagggaatttcatagcaataaagggtatgaatatgaatatgaaattttttctttgttgctgaaattaaatgattcaaaaagattattgcgtcgattattaatgtctactttatcgtaaattcttatagggctcgtttggaacnnnnnnnnnnnnnnnnnnnnnttgtattgtattatattaaattgtattttatgcaatatttttatgtaa

SEQ ID NO: 136388 - DNA, 1560 bp, Cannabis sativa
tcatttggttactttcgctattttgccaaattttcttagagcttccacaaagagaaaaaattccagacaccatagattatctgctccttttccttcgtcgttgcgagtcttctttgtatcgacaatcaacaccaacccccagacttcaaacttcgtgtaagttctcaggacactttatactcgtctactgtttatttgtattgcatgtttagagtatctgggttgaatgttgagtttcaggggaataatcttgcctgagtttgttgtgtaatgcgtagaatctctcttatttgtgccctggttgtttctctttattgcctcttctccttggaaacgtctcctctgttgaaatagcgcttttagggcataggatgattcttctttccttggcattttttttttcactgtcactgcctttgggattttttcacccgatgcttgttaaagggagtcttttgggtttccttatttgacaagcatccggagggggcctctatccagcggttaagggacccccattccctttttaaatattagggtttggtttggggcctaactgctagatttcttcttcttacagaaaaatgtctgcccctgcctccgggactaaaccttctaagaagggggcgaacaccatggctaccttggaggaggtcatgaaaggacctgttgcccaagaaaactatacttctcgcaccaatggctgggaagcagatgagctccattctactttggtttgcgctcatcagctcgagaagattgtgacggtggtgggcgtcaagtcgtctgcgtctggggtcgtgcaccgcttgcctcgggacgaagagacgcccaaccacaactacggggggttcggagcttggagccaaacccatctcgtgttcggggctatgctcccccttcaagattactttattaattttcttgttttttttggcctcgcgccttaccaacttatcccacaagcttaccgcctgctctcaggcttatttattttttacgttgctagaggctgggccgcacctagcccggccgaaattttgtatttttatgaactcgtttctgtccctaagacaggggataagtttaaggatagttttttcaccctccgggccgatcctttgaatgagggcccaatccctttcaatcacaaaaagaatgtcaaagaataccgcttcgttttttcttttcttctggcttccaggctgtggaccgcccagagctcctcacagagtggaataggattccacctcttctccgcacggctcctacccggctgtttctccaacatggcaagaccttccccacttatgataagaacgatctcaacgtcgggacttggtcacaatggagaactgtcgcaaggctaagttgatctctgggagtcagttggtggatgactttaatctctccaaggtcctctgcccgaatgtacgcaccccgaccgcagagaaggcgctccgggctgagattatagcttcggcggaagaccggtaccaaaagtacctctttaggagggagcaggagctggcttatatcaaggcccaagctgcagccggg

SEQ ID NO: 136389 - DNA, 1136 bp, Cannabis sativa
tatataaaatcaaatttcccttattaaaaatggaatttcaattggtatcagagtagttcactaaactcttagtgagatcttgtgtttaatttttgtttatatttgtttcttgtgtgaaatgtctttctttgtagatggaagttcggtatcttgtcctcgactactcaatgacacaaactatccatactggaaagtgaggatgagagctttcattgaagttcaagatgaaaaagcatggaaagaaattttgtttggatggtctcctcccacaaagaacaacgatgatggtagcacaaaggtaaaatttaaacttttatggactacaaaagaagagaagttatctagttataacaataaagctcttcatgctatctttaatggtgttggtaaaagtttcatcaaacttgtttctacttgtatatctgctaaagatgcttggactattctttaaactgagtttgaaggaactgaagatgttaaaagatctagatttatcatgttacaaattaggtttgatgatctaagaatgactaagtctaaaacactatctgaattctatcaaaggtaatctgacatttcttatgaatattttgcccttggtgagaaacttgataattctgttttggtgagaaagatagtacgagtacttcctgacaggttcaatgtaaagctcacggctatggaagaggctaaggattttagtactatgaaagtagattaatttatggggtctcttcgaaactttgaattaaatcaaaagattcattcaaagcagaaactgagtatctccaagaaaaaggaaaagactattgctttcaaaagtactgaaaaggaagcgtcagatgatgaagatggtgataatgacatggcttttcttgcaaaaaaatttcaaaaatacttgaagaaaattggaaataagaaggctaatgttaagacttcaagaggtatttcttcttctcttaaaccttttcaatctaacagaaaaaatattcaatgcagggagtgtgagggattcagtcatattcagtcagaatgtgcaaataccttaaagaggaataaaaaaggtatgatagcttgttggagtgataatgactccgagagtagtgaagatgaggaaggtaatgttgctttaactt

SEQ ID NO: 136390 - DNA, 605 bp, Cannabis sativa
  modified_base (577)..(580): a, c, t, g, unknown or other
agagagagagagagagagaataggctatgatgtattataattttataatcgtgtaatgcacccaaaatatatcacagaggcaaaagcttttcatataggtatacgtggcaatttttttttttttttaaatataaacggtacaaaactgcattaaaacacacaaggccatatctgtaaataaattcaatctgacatcgcttggtgtaaatttttctttttctaaagtattctctttgatggggaaggagataatacacaaattctagtatttcttgggaaccactacctattttgtagactcatgttagagtgagtttagagtatttataatttggcccctcaataaattataaattaatttttagtatctacacattattttcatgataatttaattctattttgatacacataaaataattagtcatttaattttgtatcacactttataagagcatatacattatacatatgtgcccacaataggatttttaatctaataatctcctacttgggcaacatattttaccttataaatgtatagccttatgagctcaaaatttactattatgtaaannnnttcacaacaatctcgtccatcaact

SEQ ID NO: 136391 - DNA, 1158 bp, Cannabis sativa
  modified_base (149)..(149): a, c, t, g, unknown or other
agtattcttcttgttgaatcttggtagtcccttctggccattctataggatcattaagtactctcaacagtttctgttgagccaagagtgacttaatctttctcgtccaaatcttgtaatcacaagaaccatcaaatttgtcaatgtcnacctttaaattgctcatgattaatgaaattagataagatcaaataaagataaataataataagcaatttagttataaagattatttggaaatgtcccagaaatcctctgttaaagatttcagtttgatcaggttgagttcttgaaattcttgtttgtgtttcttgatttcttgcttgagttttcttccttcctgattagcttgaatgttgaattttccagctttaaccaagctctgataccattgtaggaatttgtaagtttttccaattttaccctacaccaacattaagtaattagtatttaaccaaggtcagtttcaacctttccttctctctgacttttcaaagtcagcagagtaaaaaacgactccgttttggctttgaacaaaactaaaagaatctagacacttctcgatcacttccctcagccctaggtttagattcgaaaccctagcagagagtttctcctctgagaaactcgaacccaaaccattagcaaacccagaaatcccaacacaaacacaaaaccaagatcagatctagaatgatctgatctatacacaatcacacacaaaaaatcacaaagagtaaggttagaatacaccagattttcccgaagttcaccaataaattggctacgtctccgtttgagctgctcctcaaagttgagagctcgattctactaatttttgttgatcagaagtacatcaatggagattccaagtcacctggtaatttttcagactggtaatctcatattaatacaagtatctagtgtttaatccctctctctctctctctcaatatctaactctctgttgttttcttgtgcatgtgagatcatcaactccttctccttcaagctttcaacctctggatcttgaagagaacactcaaccgtacctggttgtgtatctgatgtaggtatatatagatctagggttctgttttttgcttctgaatttgttagttagattagttacagaaattagttaggtgtggattaatc

SEQ ID NO: 136392 - DNA, 1040 bp, Cannabis sativa
ctgctttttcccacagttgtgccaaactggccctatgtgttttttgcaacaaagatttactgcatttggagggttcgaatgttaattactgggaaaatagggcctgatctataaattgtacaatataaaaaaattaaattgtaagttttcaataggattaagtatactagtttgcaagggattaaacaagtggatatatattgggttctcttagatttgagtttgcttattttttttttcagatatggtttgacctttttttttttcaaatctaggtttggatttgtatcatggtgtttagggttgatttgaagtgattattattgcaaatgttgtggttgtgttagttgtggttggtagtggggtggtggcaatggtgatggaggtggtggtgatggtgaaggaagagagcgtgggaagagagagaatcattagcgagaaagaataaaataaaagaaaagaaaattaatttatttattttattaattttatatttttaattttgaaatatttttttataatttttaaataataatattatttgtaccaatataaatgtgtcatgtgtataagagtatacacataagcagtccatgttggcacttaactgtggataaataaatggattggatgtcacctcaccttaaattaaattttttgctaatagtttagtagtttggagggttttaccaccaaaatttaagtttagaggattaattgcaagtgaattgaaagttcgtagggtttagccgcaaattattctaaatgttatatgttgtgcaacttttgtatttatttgggatctaatgtaaaatatagcaaaatatcaataaataaagtaaataattaaaaattgaaaatttatatgatagattaaaaattaaaaaaaaaattactaaaatacattaatatggaattttttttattttttctttaaacttttttatttataaaaataattcttcagtgaaaataatgaactgttttttttagttgtttcatagtttatttatagttttcttgagttttttttttttttt

SEQ ID NO: 136393 - DNA, 803 bp, Cannabis sativa
  modified_base (754)..(759): a, c, t, g, unknown or other
tggatcatatgtgcatgagggggagacatattcatgttgcactctttttctcttagttcaggttttggtccactgagttttcctaacaaggtttgtaacgagacaatttgcacataattatgaatgtgaaatatatatattgcgctctatttttcttagctcaagttttatctcattgggttttcctgacaatatttttaacgagacaactttaaatcatgctaatatacttgcactttatgaagcaagtagaaaatatatgaaagtgagattattggcataatatattcggaaaatatatgaattacactcaataaaaaaatatcaacacaagcaattctctatgaagataatactgcttgcatcactcaactaaaatgagggtacatcgaaggagatagaattaaaacacatttcaccaaattcttcttaatacatttcaagagaatgcatattggtgtccaatatattcaataaagtgtcaatcttgcagacttattcacgaagtcattaccgctattaatattcgagaagatggttcacaagattgaaattcgtcgattagaagatctccatgaatgcctaaataatggggagttaattcatattccactcatttttctcttgaccaagtttttgatccactaggttttctggcaagatttttgagcacctattatggacatccaaaaggaagtgttgtaaaatattatataatatggaagaggtttcaatagttacatttttattgtannnnnnatggttacatttttttaagccattggattattattaaatggttg

SEQ ID NO: 136394 - DNA, 767 bp, Cannabis sativa
aaaaaaaaaaaaactagaaaattaccttttatatataatataaaccaaataactaaatttaattctctaaaaaaaacccaaatttaaagttgagttattagctaaagagtaatttgcagcataatctccataagtgtttagtttattgcaactaaccttcaattttaaaattttggtggtaaaaccctctaaatttgtgttctattagcagtttaacatttccatctatttttagctgttaactttcatgttggaatgtctacgtatacatagtgtacacgtgacacaattttattggtccatataaataattattttaaaaaataaaataatttaaaaataatttgaaattaggaaaataaataaattttgaaataaaaaaaaaatataaaacataattaaattaaaaactaaaaaaaaatcctaattttgacacctaaaattatcgcaccctctccctctcagctacatctcccaccttctcctcgtgttcaatatcgcacctctctccctctgttcattatctcacagccacccattcgaccacctcaaaaacccatccacgaccaaaatggaagccaaaccaccatttgaataatccccgtgacccaaaaactctaacctgattgtctccgtccatccacggccaaccccaaaccaccatccgatttctttctttcttttgatctctacgtttagctcgacccaacgctggagggttgtctccgtccatccacggccaaaatggaagccatgaatggcttccc

SEQ ID NO: 136395 - DNA, 933 bp, Cannabis sativa
gaaatttttgctatgacaaaaaaaaaatatttatatatacttagtgtggacttttgagttatatagtaattttaatagtcttgacaatgaaatggtaatggaaatagctagtaatgtaatgagttatataattttagtttgaaacttttaatacttagtaagaaactttcatgaaataaaattattaattaggtatttagttcattgtaatgtaataaaaatggtaatatgaatagtaatgtaatgtaatgtaataagactatatagtaaatatgaattaattgtagtgctaatagtgtgtaattatataagtatgtagtcactagttatatatttattagttacttgttactattctcacttaattttacattgatttttttaaaataacatttaatattgtaggttgtggattgctattggaaaacgaattaaaatatcgataatcattgattgctagctagaggtatattgttgaccaataaatttttactaattataaagttattagaggagtttgaatatgttagatattcatctgtagtgaagtatgttctgtgatataaatgtatagcagtcggatgggtgtcaattattatattgttaaatatttttttgattattttttcttgttaccagatttaattgtgttgtttgttgcattgttagatagttattaaattgaaaaatactgtagaaataggggaaactctgcccaatttttttaggattcttaaatgaacatgttttttaatatttaattactaagcgtgcttaagatttttctagcaacttttaagttttctttttcaatcttgtttgttaggagattttatttttaaaatggataaatcattgatggaagagaagagagaaaccccacaatttcaataaggattcaaaaactttttagagtttgaaaaaccgtgtttt

SEQ ID NO: 136396 - DNA, 1486 bp, Cannabis sativa
  modified_base (853)..(853): a, c, t, g, unknown or other
tgacccgagacacgaacctcgaccaaaaccggaatctgaaaaacccatcacccggactcaaactaagactcagaccgcgaccacaacctggacccaaacccggagccagaaccaaacccagacccagaattagaattggaactatgactagaacccatagctgagagcagaaccgaacccaaaccataacccaaattcagataagaacttggaccgagaccttgactaggacagggacctgagacttaggacccgaacttagaccgggacctggactcgacccatgacccagacaaagatccaaaccctgaaaaggacccaaacctgaacccgaacctagactaaaaccaagactcgagacccgaactcgaacctagacccaaaccaagacctaggaaccagacacaaatgggggacatagaccagggacccaggcctcgaaacccaaacctagatctaaatccgagattcgaacccgaaccaagacctggcttggacccaggaattcaaagtcagacccagacccaaaacaaaaacctgccctggaccaaaatcatgacaagaacctggacacgaatccatactaggattgaacccgaacctacacctgaacacaaaatcaaacccgaacccgagactcgaactcagagccaaacccaaaatgagactcaaacctagacctgcaccaagacgtatactcgaacccagaccgggatcgaaacccaagacctagaccgggaactaaaccctgacttagatcgagatcaaaacctgggactcggacccgaacttggacccaaaccttggaccctaacccacagccgtagcccgatccggacctgaacccaaactnggaccagcactcgaacgccgaaccgaactcgaaccgtgacccgaactctaacccaaactcgaactcggaatcgcaactggaactagaaccagacaaggactagtaccaggactaggacaaagacccagacccgaacccaaacctaattaaaaacgtagaccgagacccaaacccgaatcgtgactaggacccaaacccgcacctagatcgggacaaaaaacccgaaaaaaactgggaccttgacctaaaatcaggatagggacttgggcagtgaaacttggactgggacccaatacctgaccctagaccttgacttgaacctaggacccagctcgttacccggcacccaaaatggaagcaagtcaggacccgagatcgggatctggatcgggaactaagccttggaccgaacgcgtagttggtgtctatatttgggaccagcctcggtcccgaacccagacgcggaccgaaacctagcaccataccaaaacctggacccaaacccgtaccatgtgacctaaaattggatccgaaacttgaagtagaccaagacctatgaatgggactagaaccaggacttggatctggacttggaaccgtaaccagacatggaccatgacccggaaccgtagt

SEQ ID NO: 136397 - DNA, 606 bp, Cannabis sativa
ttaccaaacgacaccatagttagtggggcccatctaatggccggccactatagggtttaatttgctattatttgatcattttttattccatgtaattcaatcctaaccctaagtgaaataatataaaaaaaaaataagatggtctcattatctaactaatgcttataaacctagtttacattctgtcagacaactagagttttgagacctccttcttctttcttcttcttttattttctaaatctcatagtgttcttcataaatttttgagccattagtgagtgagtgcatgcccacccatagcaagtctagtactcaatcatagtgtgtatgactgtgaagaattcaaatacttgaaggagaatcgggttcagatcttgataatacactacgatagaaatgaacaaagtttaatgatctgagtgggaggagtcattatatttcgctgcaatcaatgtaaggttactcaaactttatgtgtttgaattccattatattagaaattcatatttaggatgttaataaacattcttgtcagtaaatctagatgtcggtaagatatgttccaacaactggcctcatagccataataatgatttactttca

SEQ ID NO: 136398 - DNA, 891 bp, Cannabis sativa
  modified_base (834)..(844): a, c, t, g, unknown or other
attgattgtgaaattaattgtttgatagttaattttggtacaattcaattaaggatattttttcttgtattaaattggaaatcaatgattaagccttctttatacccacttgaagcctggctgagagaaatagaagtaccccaacctaccttgtttgggggtggacttcaaattgaagaaccaggcaacctcgtgagcagaaggaataccccatccttgggaagcatagcggacgaacaaggcagacaaatacttaatgcccttagaagtgatttgggccgggcgaagacggaagaagtcagccacatccttgaagtactcatgcaagggcatgaacgctccttgctgaccatgggtccccgaccaggtgcacatccccttgtcagggtttgtggcacgattattgtgagcgagaatgtagcagtccagctcgccaaggtacctgtcctggtcaagagttcgaaggcgcggctccttaatctttgacggaggatttatccatctaacgcctaaggcaccctgtcgtctatgaggaaccgccgcagcaagctcctcactgacgtagtccacgccctcgaccaggacgtctcctttagcatcgactggctgcccagcgtcattgtaccccccgtaatttggggattcaacctcttcctctccctctgcctcggcgggactgccgggacgcatatcctctagctcctcaaccgcctggacctcagcgtccccctcacgatcctcctccatcgggacggtcgactcctgttcgacgctgggcagagtggaaagtcgggccacttgaggatcaatagcgtcagccagacgcgtggtttnnnnnnnnnnngccatcatcctatggctgagtacaaggtcagaagaatgtccttcact

SEQ ID NO: 136399 - DNA, 734 bp, Cannabis sativa
tgttagcataaaattccttcacaattcgatccacatagccatcaaaaccaatcaaagtatccacccattgtctttctttcaacatgttataaaccgcaaatggcttatgagcaatgtcattgaaatttttctcaacagtaaaattcatattctcataaaatttcatgtctctagcatgatcattataacaaaaataatgagaatgaggcttgaagtttttaagagaaataccagagggcctctttcttttctgaggaagaatatgacttggagagacaatgggtctttttcctttgtccttctttggaattgtagcagggacaacaacaggttctgcactgacaggttcagcttcaggttcttcactttcagacccagaatcatcagcagagggtagttgtttgggcacaaactcttcacttgaatcggataagccctctgattcgggatcctcctcaattgcttcttcaggttaataatttgaagatgagacgaaagggggattttctttgagacttttggcctttgaagatgaagacaccaccgttttccctttggagacatttttgggcagaaccacttcgggtttttaaggagtggataccttggaccttgtttgagaactcaccgtgggaaaagtagccattgctttctcgacatttggagcaccattcgaagaagaagacttcgaaagagagtgatcggatgaatgggattcatcatgatcaccaaac

SEQ ID NO: 136400 - DNA, 830 bp, Cannabis sativa
aataaagatttaaatttaacattagatattttagtttctttaaaaatgtatatattttagatattttattagttgatgaattataataatatttttcttaattaattaattgaacgatatttataaactgaatacaaaattaaaaagtgagataattaaggagagatcaaataaacctattaagagtaattatatagtgacatgtaaaataaaattagcacacaattatagaaatatgtattaccgagaatggagatttctactaaatattatcattataaatataaggggagaataattgagatttctactgaatataatcattataaatataaggattagattaatgaagagtaattatacatggaaagaaagcatatatatatataactcaaaattcgagatttatacatggaaagaaagcatttatataactcaaaattcgagatttccacacaaattataattgcttcactaaataaatgtttctttataacatttgtaacaatatctatgtggaacaataaattttaactttatgacttaaaacaacagattaattttcagtgatagtaaaatatgtgccactataaaatatatatatatatactatattgagacatttaaattcagttaaaagtataagattaaaggaaacaaatgttaaaattctttgtacacttatataaaaatatatagataattgataggtaatttttttgttatgaaaatgataaaaagtataagaaaataaatatatgtagattttttttataaaaaagccacgtttttatagaaaaaagcttaaaaatattaattaatataattat

SEQ ID NO: 136401 - DNA, 676 bp, Cannabis sativa
tataattacctccaattacacacaaatccaattacattgtggctttccaaacgcacccttataactcattttaatgatgttaattttttttatgtgattatctgtaaaatattgttcaaaagatatataaatatagctaaaactttgaaatatacatataatttagcaattgtaaaaaaaataaaaaagtaaagcacgaattttagcccggatatgaaaatagactggcttgtttaagaaatacgagccaacacgagcaaagcacaacacgaatccgagcatgacatgaaaataccaggcctacaggccttgtcgagcctaccttttaaaaatattggcacaacctatattatatgtggcacagcacgacacaatctgtgttttgaaaagcacagataaataagagtcgagccagcacaacacgcacgaagttacatcactatataatgttaataaaattatatataccattattaaaatatatataccatgctaaaaaagttatatataataaaatagaaactaaatatcatcttaaataaatgatatatatgtatatacaacaaaatatgtatatcatacagcaaaatatatatctacaataattaaaaataaaataaaataatattttaaaaaagtatataccatactaacaaaattagagtaatttgcggca

SEQ ID NO: 136402 - DNA, 599 bp, Cannabis sativa
tgaagtgagatgcaccaacccttccattatataaggggtcacatttgacttagaaagaggatccaaattttatcacttagagagcggaaactcttctatttttacttcttgcattcaagagtctgttcttaactttgtaactcagatcaataaaatacaaggggagtagactattaccaacacttggggctagacctctttaaattctggtgtcattattgacatttattgctcgtattttcgtttaaatctcatttattatgactcattgtcagttgactaaaaattcattcaacataaattattctaattttagaagggaaatttcactatttacccataataaaatatcccatatcaaattttagacccctttataatttatacaaattaattcctttgattacatgaactttctattttaccctttttttaaaaaaaaaaattgttaaaatatgaaattgtccaccctctctctcttccctcttgtggggttctttctctctctactttgagaaaaaatggaaactaccatccctctctctcttccctctcgtgtttctctctctctctctctccccccccctctctctctctct

SEQ ID NO: 136403 - DNA, 1176 bp, Cannabis sativa
caaattaaagcagaacaccaaaggccggcaggtttgcttcaacctctaaagattcctgaatggaaatgggaagacatcaccatggattttgtggtgggacttccaagaacggtagggtactatgactctatttgggtgattgtggattgatatacgaaacccaacagcccagcacccaagttgacctaggtctgggcctagcgcccaagtagacaatagacctgggatggtgccttcaattgctcaaatgccaaatttgataagaccattcaatttggaaaggtcaaaaacggggaaggagacctcatcctcaagttcaaaagcctttgaagtatcaaaaatgaattcccgagacctcgggagtaagtacccagcgccaggttgacagaaggcttggtgcgctgggttctacttatccaaattagatgtcgtttcagtcgtccctctagtttttcacaatgataataattcataaagttaaggaaattaaattcacaactttgcatttctcatttccagctcacccagaaatgaagagttctgagtctcttgtttttgcaaaataacatctccgagaatcggtgaccagctttgccgaaacacataaatagactaacactactacaaaaatgacattttgcttcagtttttaagtgacgtataaagaatttgtgtcggtttgtgtaaccaacgctacaaccgtagacgcaaatagtcttatttttttctttacttaataatagacgttaaaagtcttatgcttcagtttataaccgaagaaaatagtaaagcactgacgcaaattagttttttgctttggttatgaactgaagaaaaagaataaaaaaaactaaaaaaaaacataaactttcagaccaacgcaacccttcggaccaccacaacaatcaaacaacaacaacaacaacaataaatatcgccaccacagcaacccatcgtacaaccaaaagcacatcaaaccacaaccatccaccatacgaccaccatcccaccggaccaccaccacttcttgcaaaagaaaaatcacaaagagagagagagagaactcgaacgaaaaaagagagaaattagagttggaactaggcaagcgaaatggggaaccagaaaaaattatgaatctcacctttgaaaactccattttagagagagagagagaga

SEQ ID NO: 136404 - DNA, 680 bp, Cannabis sativa
taatatagaattatcaagtacgatttactatacactgtactttagtgtgtgtgattttgattcggatcacatatgtggatagacatataataaatgtattgtgtataatttgattatacatgactagaccgatatgaaataacatctttcattaacatgtcgtttaccatgaaagggttgttcatatcacaacgatgatcattagtagatgagtctgaatcccgagtatatatgaaatcctatttgtgttcattgagtttttttattcactctttaaagtttctcagagaaaatgattcttacaatttctgttttgagagcttaatgacatgagtggctaagaacatgttacacaataatagaatccaagctttccaaaaggattgaatattagttcccttatagtgttgagtgctaacagttggatccaagtctataattagattatagattaactgtttacattaaacagaattagaagggtaaaacggtaattttgactatctctaattatgaactaagaattggaggccgagctatttatatattgattatatcaatagatataagtaagaattctgtaaatatattctatattgtaacgttctactcagaggaacgccatgtgtcgtgattacaacatactaattgttggagattattttactaggatctagatt

SEQ ID NO: 136405 - DNA, 913 bp, Cannabis sativa
aagacatgctttcagtgtgcggcatggtggggcatttgaagaaagatttcccttaggcaaataaagaagagccgaagtatgaggcaaaacctgtacctgctcaggtgttttccatcacccaagttgatgctgcagccaatccttctatggtgtcaggtcagcttctagtcaacaactccttgtatactatgttattttaatcgggagctacacgctcatatgtggctacactggtaattgatcttttgggtaggcattgtgatattcttgaaagagggtttgcctggcggggagttggttatctctaataggcgcaataggtctatgccaattaggatcgaggatagggagttgagtgttgaccttatagaacaagaattagcggagtttgatatcatacttgggatggattttttgtccaagtatacggccagtatagattgtaagcgaaaaatggtgacttttcagccagagtttcattcggggtctcagatcccggttattttagtactaagggctaagggtctactacacagtggatgtgtaggatttttagcggttgtgattgactccagcagacccgaaaaatttgggcctgaggtagtcatggtggttaaagattttctcgatgtatttcccgaggagttgccgagattgccgccacaacgagaaattgacttatagtgatcgagattttggcacctgtggggagagtcgaactctaaagcgctccccgtataggatggctccaaccaaactcaagaatacgggaagaagatacaccaaagattgtgttctgaaccaaatatgggcactacgagtttctggtaatgtcattcggattgactaatgctcctacagcctttatggatctcatgaatagggtattcgaggattttctcgataactgcgt

SEQ ID NO: 136406 - DNA, 807 bp, Cannabis sativa
taaaataaattccaacacttagatggaggacgaggagggcctacagctttcgagggagattgacgacacgacgaagaacgagtgactcgtttcgacacaggtggggaaggagatgacagtgaaggtcgaacctttttagagatatgaggagccttacctagaaacgtacgaggtttctgacttaccgggggtgagggtggagacggagtcgactcaggacttgggggatgtgcagaactaccaacctccaactggtagaggacaatgtcacgacagggattaggcagtgcagactcaacagtaggagccactgtaggatcaccagtcgatgccatggatggaacaaccacagcaacagggggtactgcaatgggtgtgatattttccatgagagagaggaaaaaaaaaatttgaatgatgcagagcttagggtttctgagaagaaagtgaagaagtgagactgatcacttttcgtaggccttaagtataggcaccctgacacaactgacaggaaaaaaaaatgatgatgatttttgttttaaaatttgattttccccaaagaagacgtacgcgcccaaaatgaatatatgctaccacataatacaacacactaaacgaaataaaccaacgtcatcaggtaatgagtgtagtaaagaaaccagaaatgtgacaaatataccaacaatatttgcattgagcacacacttagacaaaacagagaataataaaaaaaaacttagagatactcaaattttaagaaaaaaaatggtatcaactgatcaatgaatacagtttctgagtacacac

SEQ ID NO: 136407 - DNA, 541 bp, Cannabis sativa
  modified_base (492)..(500): a, c, t, g, unknown or other
gtgatcaaacttggaccttgtgaaaccaatctcctgaacatagttgtcgaatcttttgttccattgtcgtggtgattgcttaaggccgtatagggactttcccaacttacaaaccatctctttttcatcttgttccacctaaaatctaagtggttgctccatgtatatctcttcttctaaataaccatttagaaatgcagttttgacatcaagttgctccacttctaagccttgctgagttaccattgacaacataagtctaatggtcttatacttcactacagatgagaacacctcagtgtaatctatcccttccgcctgagtgaaacctttggaaactaatcttgccttaaatcttactgactcatcctctgttacactttctttaatctttagaatccatttgcatgagattaccttcttatcctcaggtctcggaacgaatacccatgtcttgttctttatgaagcgagcttaattcatcatccacannnnnnnnncactccttcttgtactttccatttaaagcctcttctatact

SEQ ID NO: 136408 - DNA, 536 bp, Cannabis sativa
tcaagagtgtagtatgtagtagtagtattattcctctccaataggatctgacaggttgtatactatacatcttttctccactattatataaccttaatcacaaaatccttgatattgtataattttgctctatatgtctactctagggacactggattctttactttttggcaactacttctgtattagtcaggaagtaacactagaagttaattaattattggtataatgccaaaaactgtataaaacatttcataggtttgacaagtatctttcctgcaacttttacatcagtctcactggtagagttagagactcaaatagttttctacacttccccaaaatcactgctccacccctagagtaattaccatcttaacattaggctttctagcactaacactactctagttacctgatttggtgtagtctaagagtattaaaataccactcttatcaattcacatatagttcctctttacgattttaagatttacttgattgtattccaatgttcctttcctggattaatttga

SEQ ID NO: 136409 - DNA, 627 bp, Cannabis sativa
gaatcttgacttttctaacggatcgaatgttggttccctttaagtgttaattctaaaattgaaaagttgtgcatgttgagattttataccctaaataaaactcatctcatggtaatcttattgtctattaaagaatgatatagaagttaaactttatattatttggttcacatgattatttcgtgattctaggtttaatatgtaatttctatttgaatccaaaatttatggataatcatgattattgtgttgtgtacacattaaaaaataatcatggtcataagcttcaaacttttagtctcgcgatttaccagtgcacatgatttacactgatgtgataatcagtgatattgtttactcacacttggataagtggaatgcctttttcaaggtattagtagagtaacctaagatcggatgcattggctatacaccagactagaccgatatttacagtggaagagatatcataaacttaccataatatcttctctaggtaaatctctaatagttgatcttagatcaatgatcttaatcctaggaggattaggttctggcttaactatgttattcttgttctttgacttgtttattcgaagcctactagtaggtttggctcaatactta

SEQ ID NO: 136410 - DNA, 560 bp, Cannabis sativa
ggcatccattgaaagtaagaaatgggtggcattgatatgttattattataaaaagttgacaatgaagtttaacttcattaattaattaagtttagtattgtgttacttcatgcctcataagctactagtttcacaccataattagtttaaatacttgtttactaagttagctcgatttatactttttggttttcaaaaatgagtcgtgtcatgttagtttataagaaaataatatggattatgccataaaaaacatatgagcattgctatgagatacttatagtgtctaacaatacgatgaagtataactttataattggttatcaattttctataatatttattacattaaaacaattggaccccggtattgagttacaccaataacaatcttatagatgccttttagtattttttaaaaaatatggatcatgttatgtcatattatgatgtgtcaataattttataggttaagctcggtacggcccacaagctcaataattcgtgctgtgttcagattcatgttgtactttatttgggttggcctatttttttttttt

SEQ ID NO: 136411 - DNA, 1705 bp, Cannabis sativa
tcggttaatcatttatgggctagattaagaaaggtaagttattctgatttaaatatcattaaatttgtgttcggttggtgctttccttctaaaggggccatttataatttgattcaattagtgtctgaaacaaactgaatgaatggaaacaattcattagcttggctttggatgtgaagaaagttaacgaaagtgatgtgtagatgtttagctattgctgtttatgatttttcctttgtcatgaccgttgattggctacttttgcagtttgtatggtgaggcaattcctgttaaggaactggctgaacgtgttgcaagctatgtgcatctttgtacactatattggtagctcaggttagataataaatttataatgactcattaaatagtgttgtcaactcagcccacctttgtaatgtgtttgaaactatctataattattatttattttaaattgttaatgtttaatttttttagaagttcatttgattttctcgatggtccaacaaagtcttcctcttttatcggtggttctccgagtgatctcctcattctcggtatattatttaactggataaggttatgtatatgttaaagaatttgagaaaattgattagtctcaattaaacatgttaattaacagttgatgcatattttaaatttaatttttaggtatcgggtcttttgtgttgattgaagagtacacaatgaaagaaagagttgaaaaacaatgaaaaaactcaagatgaggaatagttctgattaccattcaaggaatatagtagtacgtactagtaaagtttttattttgtccaagttcttagtagtaccatttgagtgttgtctttaaaaagagttcttagtaatgatccttttttaaagagttttgtttttgcttacatttttaatgttttcttagctagtgaattagttaactgtttctggttcttttgattaagttaagtattgtttattttctttatttggttgcttttagtctcttttaggtcacagttttgatgtcctaatagttcaaaaattgcatggacaataattatgcttgttatgcttttatcataaatagaaatgaaaatatgtattggctaagctgaaagatctagtaaaaaataaatacaaggagcactagagatttatagccacatatacattagtactaattaatatataatttctttcttttttgttttgcaaggtaagagcaatccgtaacttaaatgacgagatgaatcttctgcgtgatcagtgaattggatacgttcgagcacatgcagtgcgacaagggctattataataattagtttttatttttatttatagtttacaatataactatttactttcatataactaaagattaattaatgtttatactttatgtttgagtacatagttttatatttaagtttttgttcattattaatttatgtttatactttaccttaattaattagtgacaatgtataaataagtaaaaattaattaatgcaggagaaaaaagcaatttttttttatatttttcattttttgactgtcaaaaaccgtctatgaaaaatataaaatttaaaattaacctgaaaactttactataagcgacggtttgaaactgtgcctatacaactattggcgacattttaaaactgtggcctatagtataggccacggttttaaaccgtagcctatacta

SEQ ID NO: 136412 - DNA, 960 bp, Cannabis sativa
tcaattttaattacgttaaactaatataattagcctaatacaattatttaaataatggcaaatgggtcttcacaattgtgatagttcatgtgaggaatgattgggttagtatgtcgtacccactactatgacccctgactctcacacgaggcctaaaagagagttatttaacctttaaataaataaatattattggtagaaattacacaatatatgagaaaattataagagtttacttttttatggcataaataaataataccatgaggttatggattttttttattttcttacttttatatggaattttttctgtcatatttttgtaaaaaaagatggaaatcctatatttttaaaacaataataagttttgctagaaaagttatcagccctggaaaagtcactagtgtcggaaaagttaccaaaaagtcattgtcaccggaaaagtcaccgttgccggaaaaagtcaccacaatagtcactgaaaaagtcatcagaagtagatgtctcagatataaacaaaaatagaactggttttataacataatgaataaaaataaataatacaaaataactcaaatcggttataattgaaatataatcggttgtgtaacataatgaataaataacacaaaataactcaaaccagttaaaactaaaaatagaaccggttctataatagtgttataatgcaataaaaataaataatacgaaataactcaaaccggttataactcaaatagaaacggttatttaacataatgaatgagtatttttggggtagatatgatatgagtgtaattatttggtgggttggagcatgttgaatgggtgattttattttagttattttgtttaactgatttttgtgtgtgagtttttatcttagtggctttacggaactaatttttttgtctcaaatttttaactagttgataaatataaccagttctttatata

SEQ ID NO: 136413 - DNA, 1518 bp, Cannabis sativa
tgtgtacaattgtgtacacatggataatccatcgtggcacataagtgagactcttagacggaagtgtaaagagcaaaacagaatatgggtttcgtaggttttgccgtcaaaaaattaatttatgtgattaagtgttaaaaaaatataaagttcgagtagttttgccgccaatatccctaaaaaaataatattttagtgaaaaccacatttttttataactaattgggtaattaatcaattacccatataagtaaaaataaattaaaattaatattaaatcacatcaaagtaaaataaaataagagttttatttataaacttcacgagcaatatttaaagtatttttaaacaatgtaagattatttactaaattagtaaaaaagataagacctttttctttacggaaaacttaaagcaatcaaaaaattaaaaaaaattatattgaaaaaaaaaataaaatgccacctcatcaatcttaaagtcctttatataaatatatagattagggaaggaataattagtatttttgcttcctaaactttcggcactatctgattttgtcccctaaaatataaggcttgttaaaaattctccctaacataaaacagttatataattatatcccttttgttaggttacgtttcttttacctttaaaaattagtatttttgcccctgaattttgaccaatacaaaattttgtccccttttatttaaaaaaaattaattttaaaaattataatattctatctttttcaaagcatttataatattctattaattcaaaaaaaaaataaattaattttacttaaaaaaatattttcaaactttatattatttatcaacacctatcttaaaaaattaaacaaaaattattgagaatttaataaataatttaaataaactaagattttttgaataaaaaatcaaacttatttatatttataaacgcataccttaataaataaaaaaaataaaaaattcaataaaaatataaaattattttgaaaaaaattataaattaaactagaaaaatgttatgtatacataaataaatctacacttttggataaaaacaaatatattcaagtttatttctataatatttagtttttaatatatttttttaatatctaaataaattttacaattaaaaaataaataatttttatatcaggtaattatttttaaaattttagtttattttttaatttttcttttaattattcaaaataatttttcttaagatctaaattaattttgtaagatttaataaaaaaaatattaaatctttctcatttttattttgaggaggtacgatttgttagttgtcaatgtttagggggctgttgacctcccttttagccaataacaatgagtcaaatagtaagcgatagaaaatataattcaagtatgaacatataagcagtaagaacacaggattttaaagaggttcggccctgttagttaggtaatagcctactccccttggattgtattaactcaagaacaaagaata

SEQ ID NO: 136414 - DNA, 705 bp, Cannabis sativa
  modified_base (529)..(532): a, c, t, g, unknown or other
ttggtgcataaataatttatctttacttttattacacttgagataaataaaaaaaaaaaaaaattaaatgttaagcaccaaatctatatctaaaatgcacatataaatatgtaattaaaagtaacatgtacataattttccaatataccaacacagcagtatcatttatatacttatacttaattattagaataatataaaatggcacagaatttttttttttaatatatctgactccatgatgttaaatccaagatgagattatggctacatgaatttccacatactaaccttttctttctctgatttctcactcaattaatgggaattaagaagagtgattaaagattagccttgggaccaaacatgttctttatagaaataattacatattaattttggtaaattttacacgtacttttatgttcaattttttttatacatttttacggtattttattaaaatacaagaaaactacataaaagtaacaaaaaaataacaacaaaataacatcaaaacaacataaannnnaatatacaaataacaaaaaatcagcaacaaaataacaagagtacaacataaaaatatataaaaatacaatattttatgtaaataaaatcttgaaactgtaaaatatttaaaattgtgtacgaccgtatttttgtaatcttttttttttgtttttatatatttatgaaattatc

SEQ ID NO: 136415 - DNA, 735 bp, Cannabis sativa
caagatcctaatgttacttttgagatcgagctcatcgaatccaaaataagggccattagagattttttcgggggtgtgttaaagacttgtggcatcaagcaagggcgaggatgttgcattagatccgtttcccctggataatttagctgctttccacccaaaaaggttattcgagaagagtgtggtgaagtcagcactagtacctcgtcaggaataggcgcttggagcctcgaacatatcaaggttggagcaatactccccttgagggaatattataaggagttctgtaattatcttggaatcgctccctttcaattgattccaagttcttacaaaattctagcaggcctaaaagtcctatatcatattttaggctgggagttccccactcccctcgagatagtgtacttctccgtcaaagatgttcatgcaaggaagtgaggttcaggaggtttttattacttcggtgcccatacaagtgatcacaagatcattgtgaggttatcaaacaagactgagttcaaggatgagtttttttagactactggtctttctcctatcaacacaattgcgttttgcattatacgtaagtgatttttgtctcaaaaacttggttttgagttctttttatatttagaaaattgaagtcgcttacttatttcacttattatgttgtagcggttaccaaaagaccaatccccacccccaagattactaagcgtcataaaatcttgc

SEQ ID NO: 136416 - DNA, 771 bp, Cannabis sativa
cggacctcgtgtacctgctaggtgtgcgaccatgcgaggacgaggaggcggattctacattgttgtctcgcgaaggtctgctgcgagggttacgtcgctcggggtctgcgtctatttgtgtctcctggttgggatatctcgcaaattggtctctcgaggttggttgattcaggtcgagtccttcagggttggcccttcgttccctgcgagcacggttattacgacgtctagagtgtgttacctgagggttttctgtgcgagtagtggggactcgaggagggcatcgggccctgttcagtccatccacctcagcctatagggcgcgtagctggtcttagatcgcggtatactggtcagtggttagctggatgattccctcgaacactgccgccggagtgatgggtggaaagtgccccattgttactgttggcgtggatgtctctccgacttgtgggccagcagtttcagggaataagttaaggggtctgacattacctcgacctactctgccattgatgacatctacaggtggtgttgtaaccccagacaatggaacgttcatcattccgatgttgatggattcgttgttaacaccttcgtttgcttagtttccagccctgatgattcccttcttgtatttagtaagaacgtacttctcgaattcccagagacagcgccaaatgttgtcgagcaaaattcgcaacaccaaaaataaataataatattaataataagaagaaattatatgaagaacaaatgcgagtattcaac

SEQ ID NO: 136417 - DNA, 847 bp, Cannabis sativa
aggacgattcctaggccactccccttgctattgcttgatccatctactgctagcatccatgtcgagtttgtttgctcgtttaagcataataatttcttttctacttctacctgtccatcacaagaaaagtcagcaataaaatctgccaatacctgtgacttgatggctgtcctcggttgatatattatgtcatattcactgagctcagcatcccatttggtcatgcgtccaaaaagttccggtttgtgtagaattctacggagtgggtattgggttagcaccactataagatgagactagaaatagggcctgagcttgcgccctgctgtgataagcgctaaggccaatttttccagctgagtgtatcttgtttcagcatctagcaatgtcttcaaaacatagcaaatcggttgtttctttccttcatcttctcaaactagtgcagcgctgaccgctgcttctaaaactgccaaatacatgtacaatgtttctccattctttggcttctctaagagtggaggagaggtgagatagctcttgagttgtcttagcgcttcttcgcattcctccgtccacacgaagtctttagtctttctgagggttgaaaagaataagtggcaatggtcggacgattttgaaatgaaatggctgagcactgctatccttccgttgagactttgaatgtctttgattgactttggagattaaatattttggattgatcttatttggtttggattcgcttcgatccctctttttgtgacgaggtaacctaagaattttcctgaagagacaccaaaagagcatttagtaggattaagtttcatattgtatttttctaatacct

SEQ ID NO: 136418 - DNA, 628 bp, Cannabis sativa
cattatatcaaatgtcactcgaattatgtcccccacattcaaattgtaacctttcataattccataaacccacttaatcctgtcaatctgagcatcagaataatgtttttttcgggagcatccttgcactaacgaagtatagccatgccttggctactgggttgggttcacaccgatacaattgatacggttctccatcaaattcatgaaacctaagtccaggataccctagagttttggctatatccacataattcaaactccttgcccgaagttgctgcttcaatggttgatcttctaaagtgaaggttggtagctcataaagagcatgaattgcagctgtggaagcaggcattttaacccccctaaccctcaccttgtcatcctctctttctggctagttggctaagaattctaaagctaaggtttggttgctacgctcagtgacatccacgaacttagtccactgcctattgaagatttgatccctaatggacgcaaatacagcaggaatgtttgcagtttggctcaggttaacaatatcaatcccactatcttcaatcaatgccctatctttcaatttcaaaaaccgctcttgagcatccatattggtaaaccttactctatc

SEQ ID NO: 136419 - DNA, 745 bp, Cannabis sativa
tgtttctttattgatattaaaagaatagagattatattgaaatagagttttatttagggcataaaacccaagaaagtcgtcctcctgtgggatgggaacaacgtttccaccgagaccatatcctcacaaccgctattgagaatggcgagtggccggttgtggttcttggggtggtctagtatgctcataacactcttgacaattctttgggccatttctttttgcaggccagcagcttcttctttagggcgacccttacgattttattgacgacttcttcttgtccatttgtctatggtcgtgctaccacagagaaacttgtaatgactccgtgttggttgtagaagtcggtgaattcttcgcagtcaaactgctttccattgtctaagactattttatgaggcaggccatatcgacacactatgcttttgataacaaagtctagtgcttttttagcagttatggtcttcatgggctcggcctctgtccactttgtaaagtagtccacgactactatggcatactttacccctacctttactgttggtaacgacccaatgagatctatcccccacaccgcaaagggccaggggctagtcattaggggaatctcgttaggggggttcttggtatgttcgcgaacctctggcatgaatcacatttcaggacatagtctatgcaatcttttttcattgttggccagaagtatccttgtctcagtattttctttgagagactcggacct

SEQ ID NO: 136420 - DNA, 712 bp, Cannabis sativa
ctgctattggcctcctaactctcatacaaggcccaaaaagagaggaatttaaccttaattaaataattgttattcattgaataagcccaatacttagccctaaataaaaactatcaaacgtgacatttttattttaccaagctagtctattgttattatcaaaattaaatggggtccctatatgcatctaggcccaaagcaaacatataggcacatgcacacattgatttggatggatcctgtcatgttactaggtttatacacagatgaaagaagattacaaaattaacctgttacaaattatttatttgatctattgacaattaaactatggttaaatttatatcattggatctgtcaacaagttaactatagcaatttagatcaaacaataatacattttataaaaccagtttgaataataaacaatatataaaacacacatgcaacaaattagatagttggttagtatttaatctaaattaatttcaaaaaatctaaatattaaaatattatcttcaaaaaaaaaaattaattaaattaaataattaatttaaaattaaacctacaaattgaaaaattaggttattaacaaacctaaatatctattcaaaattatcaactaacttttctaaatttatgttatttttaaatgaaaattaaattaaatgtctaataaaataaaataataaataaatatcatttatctaat

SEQ ID NO: 136421 - DNA, 718 bp, Cannabis sativa
tgtcgtatttcgtctacattaacgatcacctccatggagcttgctggctggtgccgttatctgatgacgacgaggaggatgataatgacaaaaacaacgacaatggagattgtggaggttcataaggatttccaccctttttgattcgtcgcagtgagagttcgttctgggggttgcttctctatttttgactattacggctcaatcgtctgccccggctccggctccggctcccaccagcgacagtgagttctttcagttttttttaacagatttgaattattaattttgattatatatgtcaatgcagccatggtcaatgacgaattagggttaaagaaaaatgggtcttcaaaatatgatgatgcattgttgatttctctctaattgaatattagggttttctttaatcaaattgggtactgtatgtaataaagatttgatttttttttttttttgtgaattttcaggggcaacgatagatcaagggattgcatgcctgttgatgttggtggctttggtattgacatacctaattcactgaagagagattatttgaattggggttggattatacgttgtgtgatttattcatgaaattggggcaaattttatagatttacataccaattagtgttctgatttagacaatttttgattgtgttgttgaggattctattctgtttggtcactgtaaaaaatattgttgtaatattta

SEQ ID NO: 136422 - DNA, 612 bp, Cannabis sativa
  modified_base (216)..(222): a, c, t, g, unknown or other
ataacatggaaataccctaaataacacaagaatgggaagaactagggttcccaaattttccccaaccggtagaccggttcctcatctagaattctggttcagggaaaattcctggaagccaaccggtagaccggttcctaaaggcctccctgaaccggaattccgtttcagtgcaggaatgggtcaaaatttcatatctcaaccaaaacaaccccnnnnnnnatgagactctccagacctgttctaaatatcccaaagaacaattacaaagcaacaaaacaaacctacacacacagaatcaaaatccaccatgtgagctccaagtttgagcttcaaagctcaaagcttggctaacaccacaaccacccactaccaccagcttaattcaacctaaaacaacatgaataacatccagaaaccaaactcaaacacaaataaaagtcacagcagaaaaaacaccattttaccattaaaattcaaagttttgagttgaaagctttagacatggttaattcccactaactaacaacaaaaccagcttgaatccactcaattaaacatatctaagcttctgaaaacaacaacaagaactaacagcaaccacaacaccaa

SEQ ID NO: 136423 - DNA, 999 bp, Cannabis sativa
  modified_base (50)..(69): a, c, t, g, unknown or other
tagggtcagtcatcagtccatgaggcagccagagtgacatactcgtgtannnnnnnnnnnnnnnnnnnnggtgtaaggacccaatggaggcttaaagcggggacgttacaggtattccctataaaaataaaggaagaaacttccccttttgttttctccctaatttatgtgagcctcactactttctcctttccaatgtctacagaaatatacacatgacaaaattctattgatccacctaaaatcaactatttacttattgtaaaaaatttatttaaaaataaaaaaattattaaaatctggaataataatttaaaaaataattaatttctttttactctttttctattttccttttccttttttttcttttctattagagttagtcacacattgctaatgtgtggaaataaattgtcatatataagatgaatgggctactcctcccattgccaattggttttgagatggaaccccattcatcttatctcaaattctaagatggtatcagagtcacttgtgatccgttgtgagcctaaattgccaccggtctagaaaactaattgtgatcagttgtgagccaaagtgttgtcggtccagaaaagatacttctgctgtctcccctttaacctccattttggacctttcggccaatgtgttccagtttctagtgttgggtctttggcctgtttcaaaaatccacaaatttctcgacgtgtacacccacaaatttctcaatatttggccttgtgggattctttcaaatgtcacgtttggccctgtggtctcttaaatgttgttcgttatacccacacttttaggcccaaacgtgagaagagtgtattagagttagtctcacattgctaatgtgtagaaataaattgtcatacataagatgaataagctactcttgctattgccaattggttttgagatgaaatctcaatcatcttattctaaattttaagatttttgtaacgtccccgcttcaagcctcca

SEQ ID NO: 136424 - DNA, 680 bp, Cannabis sativa
  modified_base (445)..(450): a, c, t, g, unknown or other
  modified_base (520)..(522): a, c, t, g, unknown or other
tcagttaattggttttaattaaccaattaaaattctaaattagactaagtcttgtttatgaattttcactaagcaaaggctaaattgagaagaaataaggttttagggtttatttgttaattaagaaacattgtaaggccatgtgcgtgcggggagtgttcatactcccctgatttcaccatttttttttttgccatttttcaactttttaaattattttcaatgaaataaaatttaaattttggtagaattttaagtagatgcttatttttcaaataaaaatctaattatcagattaaaattaattattaatttaaattggttttagatattagtaggctttaaatttgaaaaatttatttctcaacaaacttgccattgtggttatttttaaatttgattatttttatttgatttattagttttaagggtaaatactattttnnnnnntgtgttttgcaaaagttatcagttgaaccctctgttttgttaaaagacaaaatggaccctgtattttctnnnatggtacaaataggatcctgaattgattttttgtcaaaataaaatttaattataatacaatctattagtgttatgacaaaattgtttacattttctgtatctgttcgtattaggaattcttttcaagttgattatattaaaaaaaaaaattgtcaaaa

SEQ ID NO: 136425 - DNA, 536 bp, Cannabis sativa
ataattgtaacaactatatttcataatatttgaatcctatcatcaattttgtgtaacatctcttttattacacaaaaatatgatcaaccaaaagaagttactaaaacaattaattttgtaactcctctccatgttacaaaatgtaggttgcaattttaggttaaataaatcatatattacacaatttatttatcaaacacttaatatatattattcacataataacatatattcccatattttaatgtacatatattattatattaaataatataacaatatgtacaaaatcctactaaattttagtcaatatatttatatatttatatatcatatccaatatcaaatcatacaatactaattagaatggaacaattgtttcgtcatgattccatggtggggaacgtctataaagtgagatattatccacaaggggattatctttctgcggagcttgggtcaaatccaagttttgtttggagtagtatctttgctgctcgggatgttgttagagcgggtttgaggaagaggattgg

SEQ ID NO: 136426 - DNA, 1043 bp, Cannabis sativa
  modified_base (44)..(44): a, c, t, g, unknown or other
agcaacgagctgcacagtacatttaaaaatcacgtaatacgccnaagatagttagggtgttacacaaccggtgcatatagtgagtcatttcttttcactttcataactagacaaaaactatacatctaggtacatacaaatatatttaactacttcacgtagcgattgtatgtaagactccttcgagaagcttttcaaaaaatcaatttgtgattctttatcactatgattatattagattatattggatcactaacaaatattagtaaattatatattcacttctaggaatatgcaaactgaattaagtagtaaatatatatatcttgtaccaacaatagtttgaaactattggtttcaagaaataataaaatatatatattaattttcttctagcattactaatatatgtaaaatttatatttattgaaatagaatttcatgtttattcattctcttcagagaataatacttaaatattctaaatatacaataaatttgcgatagattaaaatatgtgtataattcacatctattcaataatcaaatataattttactttgattataagtgtgtccgttcataggtacatggccgctattattcaatttcacgcatgatatatagatttcatgcactttaattgtgtgtggtatttcatcttcttgttgttttcaatttcttttggaaatatttgagtaataaataataccaatgattatttcaaattgttgcattcacttcagggaatgacgttgaacgagtagaatattattataaatgtcttaaaacttattaattcatcaataaaaatataagaaattattcaacaatttattttacaatatttcaaagaatatatgaatataatttttgtataatctccaagatgtatgcaaaatttgatttttaatatatgtcacgtgtaataatttctaaatattgtaagtaataacaatacatatgtataataacatgactaacatatagagtatgaacactctttaaaattaaatgaatttaattcatatcattctctgcag

SEQ ID NO: 136427 - DNA, 592 bp, Cannabis sativa
cgagtctcgatccgagttttgatttaagtccgcatcccaatcctggtttgtgtctaggtcgtagtcagattccagttctcgaactcaaaccaaaactcggactcggagccaagtttggggtacgggtctgggtctgggtccgagtctgggtttgggtttgagtccgggtatgggtcctagatccaaacactaactacaggtcaggtccaagccccaagtatagatgtggatcacggtctcgggtcccagtctagttccacttcgggtcccagctcctggtccggctctttggtcggattctgggtctcagtcccagttctgatgcccgtgtcctaggtccaagtccccaatccagttcgagtcctaggtcccgctctgagtccaagacctgatcggggttaaagtccttgtccaagtctgggtcagagttctgatcttgacttggctccagatctcggtttgagtcctgctccaggtatgggtcctactcctgagttccgatctagatcggggttccaaggcccaagtcaaggtccgagtcctaggtctcggtctgggtccatgttcaggtttgggtcctagtcctagtttc

SEQ ID NO: 136428 - DNA, 640 bp, Cannabis sativa
tcgcatattcatgagaaaccattttgcgtcagaaggaataatcataaggatgacatcattaatgcatagcgaggcatcaacctcgctgcgtataaaaaggtgttgacgagatgtgttggcagtcagaacacttggcgtataatatacatcataccaactaagtataatagttgtaagaatctgaacaacggatagcgaggcatccatctcgctataggaaggcatattcttggtaccttcactaatcagctcaacacaaattttaataagatccgctgccccgtcaagtcagctctctcagaaaaaagttgacattcaaatgatgttggctgttaaagttcaccttgtcaccaagaactgcgattgtcagatggagcgttaattcttcacacgcataaatgcaagatttacattgtcaacctcggaaagaaatgggaaaagctccagctcgctgccaggattattattgctattcaagttcccagcgagatacacttagcagcgtatctaaatccacgtcagcattgacccaaaaaagcggataaatcacaattgtatgattttcaaataataatcacatttatatacgtggtgcataactaaagcccacaattttgggaaaatattattgtgggatttg

SEQ ID NO: 136429 - DNA, 549 bp, Cannabis sativa
tttttcaaaaatgtatgttgactgtaaatgatatttttttcgaaatgtatgatgtatttctgtattaattttgagaagttattgatataattagtattgattttgtttgttgggtttaaattgtgcatttttaattctgtatattgaaaagattattattggtaaaaaaattattcatttgtaaattttgggttttagcatgattattaaaaaaatattgattagtgaattaattttattaagaaaataattaaaagattatttaatacttttaaaattttaaaaaaaagatatatatatatatataaatataaaattaaattaaaaaataaaataagaaatgatatagtgacacacattttcagttactatatatatgaaataaaaaaaaggatatagtgacacacattttgcaactctaaaaagtatatttcctgataccgacattagtgacatgcattgaagtgtcactaaaacactttagacactctcaaaacatgtcactgaaaggcatttttgtagtagtgaacccttttcacatacttgatc

SEQ ID NO: 136430 - DNA, 1524 bp, Cannabis sativa
  modified_base (1053)..(1058): a, c, t, g, unknown or other
cccagaaatttgaattgcatattgatgaaagtaaaaggtctatgattagttactagaagttgcctaagttcttctagggatataccctagtgataagaaattttcagagtaatggaattgttgtgtacttaatgtacaccattactagctacaggattgtcctgattgcgaacttaagaaaagctagaactactaaggtttgcatgtttgatagcaattctaagtgattccgagtggaccatcctatggtcattaagataaaaaagtgtttgtttcaacaaatactaaaataacaaagttgaggagatatttttgattccaaaagtgttctatcatattattcgatataagatggtctcacagcctctactgtattgacacaatcgatgaggaaattatcacttatgttcttagacagaaagtcacggtaccttgtcggagtgggagggtttcaaggaacttgccatgttatgactttggagatacttgtaattaaaatctattattagtttaaacaagtaatggaaagccagaataaggaaccaagaagcaaaaccaagagaactgtggttaaaacaattcatatggaataactgaaaagttttctagtacaaggacaagaaaggaattttaaaaaataagtctattcaatggacttaaaacttcctgatcctagtgttatatgtttgagattatctaaacctatggcttatggcatacctaatgatttacttactctggtgctagtagcttacttttgtaagatgctgaagcacctttttctgatggctaaatctataggaagctttttgaattctagacatagattttatttatctaaggaaaagtctcaactatgctagaaaagataatggctaaggaaagaattccttaggatcaacagtgtgaggtctcaaatattctttgtaatgcattagaccagacacctgttgtttagtgggagtaatgagtaggtatcagataaatctaggaagagaatattggaagacaatcaattgaatcttaagattaataagaggaactatatgttannnnnnaagggtggtattttaatactcttacactacaccaaatacggtttctagacttgccttgatgctagaaagtctactgataagatggtgattactcttggggtggattagtgattttggagaagtgtaaaaagcaatctagaatctctaatgtcccagtgagactaaatgttaacgttacaggaaagatacttattcaatctatggaaaattctatacaggttttgagattgtaccaataattagtgaactactagtgttagtttctgactaacacagatgtattttccaaaaatagaatccagtatcgcaagaggagtagacatataaagaggaatttcgaattatcaacaattttatgattaaggatatgtatgttgggttttgtgccctaagtaaaacccatgtcaatttaagaaatttgaagtgatttatgtttgcatgaatttttcatgctcatggtttaata

SEQ ID NO: 136431 - DNA, 681 bp, Cannabis sativa
  modified_base (184)..(184): a, c, t, g, unknown or other
ataaaatgtcaccattttatctccaaaaaaaaaaagactatttttatataaaaaaaaatatatagttttggtgcatattaataaatcacgcaattaaataattataaaatttatgattaaattgcttaattcatatatattttttaaaaagtactcttctagcacaatatttaaatttatgtantggggatttatataatacgtaaatcgttcaagtaatattaattaattagaaactaatttgcgctttgctcgcatgcagtcatatttagtttattgataattaatgataaaattatcaaattttaaattttaatatttttaatataatatttttttagtaatatgagtaattatattactaaatcttcattatttgtacttagaaaaataaaattattgtaaataaatttattataaaaaaatattatatatttaaaattgttgttattattgtatcttatctatattcacactataatcaaaatagatgtatctcaactgtagtggccactatatttaaaatcactatcattcacatattttacttgtaaaatataatcaatgaatatatatcataataaataaaattaaattttttctttcaataatatttttaaatcctatgttgtatagggtttttaaatcctaatgatattttttttcttaaatgtaaccata

SEQ ID NO: 136432 - DNA, 665 bp, Cannabis sativa
cttgagctttccccaactctcttcttcaaggcatcaagtatcttctgagacatgtctgcatgaaacaaaaacaacatggttagaggaaaaaaggcatcaaaagcataaaacatgatagtcaaaaagtttaaaaacaagacgaaatatccatcaaagcgattgtccgaacaagactcgacagtccaccatcacttgataagtctctcgcctccgtcaggaacgccttcccttttcctagcatgggaaaagatggccgagcaggtgaactgggctccctaatgcaaattgcatgttcaacaggcctggactgggccggaagtttctttctcctcttaagcggagtcacctgctcttcctcaatctcatcttcaggattcaaaggctcatgagcatactgtttgacccttgcacctcccttcaacttagcctcacgcttcagttgaatcagctcattctcctcatgagctccctcagcccctccagcaccacatttcctcttcctccccttcactggcttaggaatgaattcctttggatagagcccgtacttcacaaagttgtcttaagaggtcaactaaatgatattctggtcatccctcgacagctgagcaagctcttgagctctatccctaagagcaagagtgaagggagggcggtaatatgtg

SEQ ID NO: 136433 - DNA, 788 bp, Cannabis sativa
  modified_base (54)..(54): a, c, t, g, unknown or other
gatctaatgcctgagtacccaagactcaccagagttcatctacaaaagacaacncacaagatgagtgttggacggagtatcaaacgaaaaacaagcaaatatgccgacgaggagtattcgaaagattaaagaacgactatgtctaaagaaaagtcaaaactcaagaagtcagaaagttttcttgagttacggcaaaaaagttcataaagcttagaataagcaagatgaaagacaaacacaatgcggctcagagagaagctctatggctgtaagctcacatgaagacatgataaagaagagttgcagaagtttctaaaccctagggtttcctaagcatttttctacagcatagttgcattcaaagtgtacacatgcaaagaaaagcataaaggaaatcagaaacttactcaaaggttccaatgtctgggtttaagcaacgtcaagcaaaccagcggtcgtatgaaggcacttcggcaactttgaagctggaaaactccctttttgctctagagtttacttagcaacgaaggtttataaaatgggttatgtgctagtactatgggtatttataggcaaagaggtaactgcatcaaaaggaaccttagacgccttagcttcccgcctagaaaacgaatatgggaaatcaaaagtaatcaattgcaactgtcagccgtggagagagaaaattggatttcgaaatattaattgtcagagaatttattagccgaaaaccgaggggacgcccagttggcttcacatcgagtctcgaacggtcatgctcgacacgt

SEQ ID NO: 136434 - DNA, 706 bp, Cannabis sativa
gggagcttgaagaggaatgctcttaatcaactgctggtctcgggtttcaaatagatcttctataatttcattatcccaacccccattgtccatggacataagacttgccacagtatcactagcaagggtcgggtgagatgaagtaaccaatgggttattttcgtctggtaaccaaggctcacccatgacagatatagactgtccattgcccacacaccaccttatacctttacgaaccaattcttgagcctcccaaatgcttcgccacacaaagcttgggttggagccgagttgagcagtgagaaaggaaccatcattataatatctagctttgaacactcttgaagctagagagtccggtctagacactaatctccatccttgtttcccaagcatcgccaaattaaagtcccgcaaatcgcgaaagccaagaccaccccctttcttattcttgcttagtctgtcccaggccatccaatgaatacctttttgagagttcttagaggtttgccaccagaatttggtcatcattctctcaatttctctgctaatctccaagggtagtaggaaaacactcatagcgtaagtcggtaaggattgcaaaactgttttaacaaggatctctttccccgctctagacaaaaacttgccttcccaaccttgtatacgcttccgcaccttgtcttttaagaatcctagaacaata

SEQ ID NO: 136435 - DNA, 524 bp, Cannabis sativa
ctaggttgtccgagtcagtcccaagtagttccaatgaatgccgatctgagtctggattcagttcttggtctaagtccttggttctgatcttggtctgggttcgagtttgggtccgtacggtttcgggtccacttttaggtttgggactgggttcagttccgggttggggttttggtccttgtcaggttcgggtgcagggctgggtcccaaatcaagacaccgactacgagttttgtccaagccctgggtccagattcagatcccactttcgggtcccagtctggttccatttctagtaccgggtcacgagctgggtcctatgttcaagtttgaatctaggttgggtactagctcgcggtcctagttatgtttcccaagtccctatcctcattctgggtctaggtctcggttattgtgtgggtttggatcctgttgtatgttctggttcgagtcctagtctcggttcgggtttaggtctatgtctgggttttgatctgggttcaggttttggtttaggtcctagt

SEQ ID NO: 136436 - DNA, 954 bp, Cannabis sativa
tcatgatatactaatgaacataaagacaatattttctagtgaaatataacaatacctcaaatataaactaatattccacattttttaatttccgtctttcgttcattatgtaccatagcatattaaaatattataccacaatcttaaactaatatactaactttcagttttttttaatacactattgcacataaaaatgatatactattgtgcaaaataattataccaaacacttaattattcaaggttgtaattgtaatttcatcatcaaatttttaactgaatgacattttgttaattttttttttttttttttttttataaaaagagggacatttattaacttagttgttaaatttatggtcattttgcatcttgacccttataaaatactgattctaatccaatccgtaaaatgcggatatttatacttgtatggattggattggattgaaaaatttaaaatctacacttgtgcagattgaatattgattgacatgtaaaaataaccgatccaacctaatccacatatatttatataaatttttaaaaaaattatacatacaattaatattttaatattaaaataaaaagtaacttaaaaatttaatatatacatataatacaaataaatttcaaaacttaatagattaaatatttattcctattcttgtatgtattatatatatattttttttattttaaatttgttattttatttattttaatttattgttggagacatgaaacaacaacaatttatttttttttgctattagttatgtgaaaaaaaaaatatatttttaataaatatgttaaataatttaatattgaaaagtaactaatttaaaataatcgatctaatctatacttttgtaaattagattggattggatttgagctattatgtaacgccctactgctaaggcacgctacagtgctttttcaataatt

SEQ ID NO: 136437 - DNA, 1045 bp, Cannabis sativa
  modified_base (268)..(269): a, c, t, g, unknown or other
aaaaatttctatcctcgaaaatggtgttataaagttgttacatactgtttgatttgctttaatattcttggtgactgagtcaatttttcctgtgtaaccggtattaccttattctacttcttcatcagcttgataaaataatttctgactattcttatgagtttgttttttcatcagggacaaagacaagcagacattgtgaattttagttacaaaatatcaaagttattttctttttctgtcttttaaataaataaataaaaaatannaataataaaaaataaaaaaaaacaaaaaatttgtttcattatattcttaaaaattgagctttcttaaaaatttcttgttatttatcttgttatgtttcattatattcttagacactttttttgctcttaagtggtgattagtgatttatgtgtctctttgtgttctcttgttcattatttacaaaaaaaattcttttcggggggtattttttgaaaaaattaaagaaaaaggggggcatattttttcgattctttgttaatattttcttttattttttcatttgtggaaacatgttttaattgtattctctatattgtgtttcctttatttttggagatttggtcttattttggtgtttttaggaaacttgtccttaaataattaattatttttggtttcctttttggcgacaattttggattggttgggatatttaatacttagattttgtggggatatttggtttcctttttccatttaaggaaacatggaccatttttttaaaaatctttttcggtatcctttttcctctccagacgtggttccaaggtaaggaagttactttccttttcaatttttttttttgattttcggtaagtaaaatcatgtgtatatattctcaactacccattcacccacgatcaccactctctcttatctttctatgtttttctcaaaggtcttatttttttcaaagtgtgagagtgtttgtgttctagggtttcaaagagaaatggccaaaactaagaatgcccaaccgtccaagaagccctct

SEQ ID NO: 136438 - DNA, 938 bp, Cannabis sativa
aaaatacaacactttaacttaagacaaagtctttcaaaaaaaaaaaaacaacactaaaaaactatatagcattgtcttaaaatatcaaatacaaaaaaaaaataataaaaaaaaccaaatgaaaccagtttgtctgaaaactaaaaactatagaacattgtttgaaatcatttcgctttgcgctttccctttggaatatccttccctttgacatttgccttatcctttgatttcttgccctttttcatcacttcatcatccgttatataaccaccaatttgtttcctcttagcatgaataaacaagctcacagcaatatcatctctatatacggctaccaaatcagacatgttagctggaatgtcatgaattttcccacgaatgaaaaattcagcacaaatttatgacacaaacaactctccacagctgcaataaaacaaaaaaaaaaatccagtaaaaaaaccagtttctgtccaaacaaaacaaaacctgacagaaaatataaacagaaccaaacataaaaactagtttcaattaaaaaaatatatgatgaaaagaggcagaattacctattgacttgacttggaagaccatctatgaacttgaaattcaaaggttctcttttcccaacggaatatggaccttgatccaaattaagatccggcctagaagaatacacatcaagatactccaaataaaacggcagcatagaagaataagctttgacatgatccaaagcgcgtttcttgttgacagcaccagacatggagttatatatgttcaacatcctctccttgatgtcaaaatggaccaatatccaatgtttgtgcttttgaatattgacatacataagaacatggtcagtaagcacccaaggagtattacaaaacaaatactcaccaaccatgtatctaggaatgacattatcaaagtcaatc

SEQ ID NO: 136439 - DNA, 1610 bp, Cannabis sativa
  modified_base (1473)..(1479): a, c, t, g, unknown or other
tcagtggtggaatcaccaccatccctaccataaacaagagtaggaagggtgggggttccacaaacattcggagtcactcggggctcttgaaggaattctaccgcacccgcagatcgcagggccttctcaaccatttgcgcataggatgttgcttcattggtagtgattaccagatcatgtctaatctttacattcaaaccggctaagtacttttctttcttactgaagtcagttggcacgttacccacggcgagtttggccaaacagacgaactttgtggtatactcagtgactgacatcccctcggtttgtaccaactcagtgaactctttcctcttagcactgcgaacagcttcattataatatttggcgttgaataactctcgaaactcttcccaggtcataacagtgacgtcccgggtgagggacaccaactcccaccacacgagagcgtcatcctggaactgaaatgtggggaaggtcactcgatcatttccaactacccccataaaatttaaaattcgttcaatcacagtgagccactattcggccttcattacatcaggacctcccagaaacactggaggcttgcttacggaacctttcgtatgacggctccatacggttgctagcaacaggttgttctactggcactactggagctacagcggcctgagcttgttgtggaggcaccgcaagaagaccttgctgccttaatctcagaatttcttcatcttgttggcagattcaatcttgcattttcgcaaaccactgctcccaatctagaggagcttgtggtggattcacaagacgaccaccctgagctctgccacagccacggcaacgaccacggagattctggggaattttaattccctgaccgcctccggtctcaaccatattatcctgacttcttgtattttgctgggcgtccattttataggacttagcctacgaacccataagccaggcaggttagacagcgatcataaagcttaataccgctcttatgcacttaaaggtaacacacttaaaataaataattataatctaatattcttcctaacatgctttaattatcacagagatactaaacaagtacgagcttactgatccgtgagccgagctttctctcatgaagattgtacatgtcttggcaagcttcggcagataaacttagcggctctgataccaaaattgtaacgccctaatgttaaggcacgctatagtgctttctttgctaatcaaagattttctcaaaaaacgtgtcaaattcaaacttttataataattattaaactttataatttacataataatttacaaagaccgagatcccgattctaaacttttatacaaaatatgccaaaataccatatccaggtcgcacagcgagtacaaaataatatccctagatgtcctttcatggaattaatttcaaattttttgtgtaattttgtatttagatttttnnnnnnnatatttcaaatctaattataaaaattaaattaattaatatttttttgttaattttagatattagtgatatttgaaccttgaaaataggtaaaaatctatctttttacttagttggttatcttatttttaaa

SEQ ID NO: 136440 - DNA, 701 bp, Cannabis sativa
tttttttttttttttttgagatgtgttgtgtaagaatttttattaccataaaaagaaagaaaactgacatattaatagtgacactgacaagatattataacgtgaacaaaaagatgaaatcaagtttggaatatattagtgtcttttcaccatttaataccattattaatcgtaaatttgtcgtttttctatcgttacattttgattagtgtcctggttctttttttttttggttaattttttttaatattgtttttgtataaaatagtagtcttctacttattaagaagaagagatttttttacttttacactttaaaatagtttattttttgtatttttacggaattatacacagaaactcctattataactagtgctgtaacaaaaaatcgtacagttactcctattgcaactagcgctgcaaccactctaaaaaatcaaactgtaaatttaaaaaataatatataaaataattcccctaaaaaaatatagtagtcttttaccaaaataaataaattattattcagaaaaaaaataataataataaataaaaaatttatcaaaaaaagtaaaatattatttaaaaaaattgcttattttaattaaaaaaaaatataaaaacaacaataaaattataaaaatatagtatgtacggaatttttaatattttacgatttttttaaatttatttataaaaaa

SEQ ID NO: 136441 - DNA, 826 bp, Cannabis sativa
ttttttttttttttaaattatttaacttgaatttttgtttgtttttcttccattattattgggagaatttaatttatccatagaaagtgggtttaaacattcaataattgataaccattttgatctacatttgaaatttttgaaagtgtaaatgtattcttaaagtttgataatttagtacttttagctcaaaagtgcagacaattaatatgttatagttaaatttacgagtttttatacaatccccatgtttctgcatagaaattttaagaattaaaaaggtttggaaagattaattagtgtttttctttctattatttgaatgattattcttgactaattttattattaatttattcttttgggaaatttagattgctaatggagttcagggccggccctgagctaagacgaaggaggtggccgccttaggcgccccaccgctcagggttccatttcgaaaaaaaaattaaaatatagttcgtaataaaataaataataatacttttaatgttaaatatgtgttgtagtctagtgataatttgattaattaacaactaagaggttgagagttcaaatcccaatagtttcactttttcacttggccctgttaagcaaaaatttcatatttaaaatattaaaaataaatgtaaaacacaatttcacctatgccaaaattatagcataagagtttatttatttaagttcgacccattcaagattataaaaataatatctcttaattacaatcttttcgtttaaaatcctttggtttaaaaaaaataccctttgataacaattgcaatgatattaaataattaaaata

SEQ ID NO: 136442 - DNA, 508 bp, Cannabis sativa
acaaaagaaaattgaatcatcccctttcatagtcctcttcttcttcctgcccttcttcttctatgtgaagagttgtttaatgatattatatttgtttgggtaaagggagtacgttctcccttgatcatggggttcatcgtcttctttgcatagagaaaattgaaaggtcattcccctacatctctatcccatttctctattaaaaaccctaatttattttccccattttgcttcaggtcttcttcttctccttcttcttattctgttttgaaagaatgtgatgtttttaatctaaaaagttgtggttttgatgagagtttggctttgattttacagtcccttgaaaggagtgtttttttttttaacaggaacttttgtagaggaaaaagatgttagcctctaaaactgaggagagtgttcgagttgggggcagttccattttgcagcctcaatacacgcgtgaaagttcggctatggttctccctgctcagagtcggacggagcaact

SEQ ID NO: 136443 - DNA, 759 bp, Cannabis sativa
atgatctagtattatcaaacaatacaatatataataaaatattaataataatataaaagcctgttattattctatattaattaaatgagttaatctatttttatcgttaattaacaattctataataactttctattgtgcaagagacattttatattcattctcctaatagcattaattaaaaaaaaatagaatgaataaagttgctatgtatacaaaagagacactccatgataaactatatctatattctttataataacttttgaaattccataacatatctaaataaatttaaatacttaatccataatatttaaataaatcaagagacataattgtattgtacacactaaataacaacatgtcttttgaatttcctatgagaactaaaaatattggtgcaattaatagtgatgataaaaataacaaaaatattaaattaataagagaacagagaaaaaataaaaaataaatgaataataattcataatcttattattaaatgaaaaaaaaaaattactattaatattaacaataaaaaaaacgtagacataaatgacaacaaaatgaattagaaacatgtagcacaaataataatagaataagttaaaaaaaaaataatgtaatgaataaataaaatagaaaaaatattaatcttatgatggagtactattagtaaacgataaaaaaactaaaaaaatcacaaaaaaaaaaaaataacaatcctgaaaagataaaatgtcttctcacctctta

SEQ ID NO: 136444 - DNA, 540 bp, Cannabis sativa
taggacccagctcgtgacccagcactagaaatggaaccagaccgtgatatgagattgggatccagatctggacccaggccttggacaaaacccgtagtcgatatttggatttgggacccagccctggacccgaaacatgacaaggacccgaacccacacccggacctgaacccagtccaaaatccaaaagtggacacgaacccgtaccctatgacccaaaattagaaccaaaactggaagttcaccgggacttgaactaggacttggacttggaatcataactaaaatttgacctagatacaaaactgcaccccagtctcgatcccgaacccaaactcagaaatttgacctgggacttgaaccagaaccaaagcgagacccctgacagtgatccagatcttgaatcgagattcaggtaacggggcttggaccagaacagtagtcgttgtgtagatttgggacttagactaggactagaacccagacgcagaaccaaacccgaacccagacctaaatctaggacccaaaatttgaacctga

SEQ ID NO: 136445 - DNA, 797 bp, Cannabis sativa
aaataatttccaacagaaaagatatcataaacttactgttatatatttcctaagtcaatatcccttagttatcttagatcaaaagatctttatcctgagatggttaggttctagcttaactgtattatttgcgatcattgacttgttcgttaaaagtgaccaatggatcgccccaatacttacatcttgggaacatagtaatgcaattgagtggaactgctaatcatgcatatagaatctataacttctataattatatagaagtgaaatgatgattttctttaaacttggcttaacaaacataaatggaagagctctatttcagtaattatattgtctactgtaatatcatttataggaagctaagtgttttaaggataaaataaaattaggggtagaacggtaaatttatccctactagatgtaaatcatctatagaggatctataattatttagattgaaacaatgtataattcacagcgtatctatatttggaagatatagagcgttctatgtaatcaggagtacaattctgaatctatagtggagttaggaggaattaataagttaagaaatttacttggtaatttttggatctacttatttggagcctggttacataggctcatggtccccacattgtctgtaataatattgtcttgtaaactcaattaattggttttaatcaagcaattaggattctaaataagactatgtcatgtttgtgaattttcactaagcgagggcttaattgagaagaaagaaaggatttaaggtttgtttattaattaagaga

SEQ ID NO: 136446 - DNA, 768 bp, Cannabis sativa
ctttttaatggtgttggtgaaggctttatcaaattaatatcatcttgtgaatctacaaaggaagcgtgggaaatccttcaaactcagtgctaaggtattgctgatgtaaagaaatgacgttttaccatgttgtaaactagatttgatgaattgagaatgtcagaaattgaactttatctaatttttatgaaagattatttgatattgctaatgagttttttgcttagggagaaaaattagatgaccatgtgttggtttagaaaattgtacgtgtgcttcctaacagatttgacacgaaattacaagcaatggaggagataaaagattttgacaaaatgaagatttaagaactcatggtttcattaagaatttttgagttaaatcaacaaatcaagaaaaagagcaagcaaagcgccttgagtgaggaaagcaaagatattgcctttaaaatttttgaaaataatattcctaatgttgaaatggccttgttgacaaatttttttcaaaagtacatgaaaactgttgaaaataaaaagcatttcgttccaaataataaaaaaggtattcaatgcagggaatgtgaagggtatggtcatattcaatctgaatgtgccaataccttgaagaaaaataaaaagggcttcaatgttacttggagtgataattatgaaagtagtgaggatgaaaatgaaaaagttacattaacaagtgttttgtcaagtgatttgcaggaaaaaggaaaaatcatatgtttgaacaataccttga

SEQ ID NO: 136447 - DNA, 890 bp, Cannabis sativa
actattttcacttatcaattttttttaaataagaatcaaaattttaaaaattttgaaaataaaaaaaattactttcaaaatttttttaaacaattttttttcttaattaatattttatacttcgaccccaacctgaactttgggacccggacttcagccccgacctcattcccagactcgaccacggccccggccccagtcctagacctgaatctaaacctgacttaataaaataaaaaaaaatgaaaataaaagttattaaacacgcttttattttttgtttttaaaattaaaaaacaaaaaatagttgtagaacacattttcattttttaaaaatacaaatttaacttttatttttgtaattaaaataatataaaacaaaagtgttaccaaatgcccctttaatatttatatgtatatttatatggttgtgtatgtttaagttatttaagacatcctacaaaattttgagaaatttagaatagtttacaatgttgaaaatagaattcagaaaatatgttgcacacatgactcccttatattatacgcgtgtgaaatagattgtttgaattttgctttctatattgtaaattagttcgaatttctaaaaattttagatgatatcttaaataactaacatatacaattatgaaaaaaaattaaataaagggtacactaatgcattattttagtgaggtgcagtgtagaattaattttcgatttcataaacttatatgtcacatattttttttacgaattaaataccacatgttaagtttctatctatttctgttactactaatttgttaaggtgacatttggtaacacttttgtttttaaaattttttaatcacaaaaataaaagcaaaaattttatttttaaaaaacaa

SEQ ID NO: 136448 - DNA, 1034 bp, Cannabis sativa
ttttatatttatataaaaaagggtattagagtcattttagctttattttatttagtcttttgtaatgtaatcctcattacataacttttctaatgtaatggagattcccttgtttaatgtaattatgattacaatataatcccattacatcacttttaaaagcaaagcaaacattgtaatggataattcgattccattaccattcccattacaacaaaccaaacatgacataatataaaaggcaatcatatgtgagagtcagccgacctattatcttattcctccatcaatattcaaattgcaaaacttcatcttctcacttcttaacgtaaatgacatgtagtgttcctaatttgaggcagtgtggtagaccaatggagtgatcttcaagaagaatgtttatgcaatcacaacttaactcacgggtataatattttatggttctatatttttttgtttttatatgtaactaacctaatatttatatataaaaaataaattatttttgatctctccctttccgatgaaagaaatgttttcttacttgggtgttatgatgccatcaactctatttttgtagcaaaagtgcttgtgatgtgtatccttgtttgcttgtcaaaggtggaaaaatgaaaataagaatgggcatatctttaattctgatcagatcccatcccaatatgaagcaaataatccttttacgctgcacagtttagaatgtatgtgaacaattcttttagattgtgaccatctcgattcttttgaatggacatgtatctcttaattctctgtagagtatcattattatagcattattgttttcttttctttgtcctcttctttaccgtttttggtcaaactaattactcacccataccatgcgtaattctggtttctgcaatgcccgaaccctagaaccacaagttttggttgttaatcttgatttggacagtccccttttggacacaagttgtttgtataattcattacatttattgtgttatagtgagatttctctcatctagaaactcgag

SEQ ID NO: 136449 - DNA, 631 bp, Cannabis sativa
  modified_base (229)..(229): a, c, t, g, unknown or other
ataatatgaaataaaataatatatttataattttactatacattagaattatatttttaagtaactatttattataatactaaaaaaaattacattagccgcacgaagagcgcccatattgcatagtttatatatatgtgtgaagtttttatttactttggagaatatagaaaaagtatttttttattaaaaaaatttattataaattgaacaaaaaaaaaaaaaaaancaagtgtgagattatgcagaagaagaaatatgtgtgagattatgaattaaattttttcataatccattatttttatattttaatcatataaagttgatgtcattgtaattcctattgatatcctcaaatttctaaacttaacactcaatttatcgttttactagtttatcaataaagtgccacacgtaaatatagtattggccaaactaataattcttttagaaaaaataattttaaaaaacaaaaaataattaaaataaattcatataattaaatgatataaaaattaatttttccatcttcttccagctatataatctttacagattaacaataaactttaattctcgattcaaatgctatttttaattctatttttatatattcaaaattctcattcca

SEQ ID NO: 136450 - DNA, 902 bp, Cannabis sativa
acaaaacaaaataattaaaaataatagtagaacgactaaaaaataatcgtggaacaacagtgaaaacttaacacagtacacaatattttaaaaaaaaattatatcccacgtacagtaaaaaaaaatgttgaaaatttcagtatgtagtgtaaaaactccttcttaatgtgattttgattctggaagtttaatgatgattttttcattcttttttaggattttattgatgttttttttaatgtatttttgatattgtatacaattagggcttatttatttatttatttgtatgttatagagttgtatagtgcatattatatttaattttttgtatttgatttattttattgatctttggtaattcaaataaacttaaaagttatcacaatattgtatcttaaatataagctatatgagtgactctcaataaaataaacaagatgaataactaaaaaaagtctattaatatgtaatatgcttaatagtaacttttttaacttttaatattttaattgttaattttttttttttttaaaaaaagttaaacttaaataatttttttcttactaaattgaatatatatttcagtatattatacatataattaattaatgtataaatttatcgaaaaatatatatactttttttcatatataaaaaagtaactagttaatatattattagtattatactggtaaccaaaaaatttattagtaaaatatctacatatataaaagaaattaggaattgagattttttctagtttttattattaagtttgaattaagtatacatatatatgttgatgtggcacgatatttttttaatatttatttgttttgaaatatttttgtaattattttaatttgatgtatatttatgtaaatttttataaaatatat

SEQ ID NO: 136451 - DNA, 635 bp, Cannabis sativa
gtttaatcaaatgaaaaacaagagaaagggagagaaaacaccagaattatttcagagttcacctaaaaatttgggctacgtctctgtcaagatcatctcagagatctagcttgatatatcaacaattgcgatttacaatattttggagcttcctgtcacagaaaacgatcaagtaagaatcgattctttctttgtacactttttgattttgttcttctctgttttgttctcaatctatctcagttttctatttttgtgcatgtacttccttccttctacctcctcaccacgagaacttgctttctcttctctggatcttgaggcagaagtctcaaactagggtttattcctttactcttctctcttttctattccgagtctattttgcctttgattttctacttatatattatgttgaagtcagttgatcaaagatctgggagttagttacaaaaaacagttgtaactaactcctgattcttggtctagtagaggcaaagccacgtaggattgagtctttttgtttttctgctgtaaatgtgttgatatatgctgatgtggatattgtatttaagggactggttatatgtggaatttactcaacaatttccacctgaattcctcttataaccagt

SEQ ID NO: 136452 - DNA, 510 bp, Cannabis sativa
ttttttaagtaaaattaatatattgtaataaatttaatatttttatcagatttttttaatactttttattatttttttagaattaatagaatattataatttttaaaattaatttttgtaaaagaggacgaaattttgtattggtcaaagtttagagagtaaaaatgttaatttttgacggtaaaagaaacataatttaatagaagaggcataactatgtaactgttatattttatgggaaatttttaataaaccatatattttagggaacaaaatcaggtagtgccaaaaattcagagaataaaaatactaattattttataatgtatatatgtatgtatgaaatgttgtagggcacgaggcccatatcaaagcattaaggacatgttccttttgttttaacttttatatacttaactcccttagttttttttttttgtgacaaaactcccttaaatttatttttctttacaaatttaaggtatgagttagatattaccgttaaatact

SEQ ID NO: 136453 - DNA, 509 bp, Cannabis sativa
aatttcccaagatacccttagtacccttttatgttatttttgtgtggaggtgcaaaatggtcattttgccccatatgtattttgtcctctagtggacttagttataatttataattagatttttatggttatctttagcttataataagttaataaaacttcatttattcattttattcaaaattagcaaagttagaaaaaaaaatcacactttctctctcaatctcactctctctttcagcccccttagagcagctatggttgggagtttttctattgatttcaagctgttttctcaaggttttggtggtctcaaactctaggtaaagtcttatgcaacctctccttagtttcttgcttttaaagaagtgatattttccatgctttgaggtttttcttgctgtggttgctgtagttgattgctgttgtgttaagaggtttaattaatgtttattatgttgatttatgcttgaattagtggctgttatgttgtttgagcaagctttgga

SEQ ID NO: 136454 - DNA, 589 bp, Cannabis sativa
tttttggtcgcccgttctttcaaaattttcactttccaattgactagagttttccatattctaccgaaaacagttttgaagaaatttccattgatgagatttcgagctataacatgaccaatcaaagacttcttcccaatcttcttcattatctactatcaacttgtttgtcagactatgtcctctactgtctctctcgtatccagaaataccataaatcctaataagatcaaaccaatcatagtaaaagagtcaaaagatagtatattgcaaggctagagcagccattacagagagaaaacgacttttttttttagtaatttgcggcataaatacctaagtttaactcgcagttgcaaataaatacctaagttaaatttttggcggtaataatacctaagattctaacaccaattcacccctttcccaacctgatcacagttcccccttacatccaaaactacactcccactcctttagccaacccgatgctcacaactttccatcctcctctacagaacaaaataatcactctagtagcactttaagcaatgtccccactccttccacttactcatcaacctcatgt

SEQ ID NO: 136455 - DNA, 815 bp, Cannabis sativa
gaggaagaagaagaatccaccaccaaatcttcatccttcttaaactcgaaacatctcgcaaaaaactcgtctagattccaggtagcagacttgccctccttaaactcggagtacagtttaaaggacgactgataactcccactaaggaatgccttcttgacttggcctgtcaggactttgatctccttggccaaggattccttctgaccaaccagaaccttttgagcttcagccgacgccttttcggcttcagacaaattttcacttagggaagagagtttgtcctttgccatctcagcctgagaacgaaaggcatcgggttcttgcaacaaagtggccttctccagattcaccgccgacagactagtctctagggaagccaccttgccacttagagcccccttttctgactcaagggctgaccgagtaaggtttcaaccccttttctctaactcaagattgtcggctttgctcttcaaaatcttaatgtcgacctccaaggcgctaattttagtaagagcagccgtcctcacggcaacaactgcttcgtaattctatttatagcgcgaatagaccttggccaaactctccctctccctatcagtttgtggggcgaacttcatagcatgggcacatctcaaagccgtctggcaaaaatagaggtatatatgagtaatagtaagtaaagcaataactaaagcagaagagatccatgcaaggagtaaattacctttattcccgatatggttgtatccttcaaaatagaatctgttgggttttatgccctaaataaaactttttacaatctgattagt

SEQ ID NO: 136456 - DNA, 1062 bp, Cannabis sativa
gtaaatatctaacaaactatgcaaatatctagggatttaaactataatctagggctttaggcctcttatataaaggccttaaccttaacctagaaaagctaagtcactaagcctccaaatcactctaagtcagagaccctagtctctctttatctctctctctctgctacacacccccaagggctctctctcatctcttcatctctctcacacacatctaaggcaatatcactctctcattagagatctgtctagcgattcatattttgtatccttatagagagctacatcagatcccacctataatgatcttaatagtattatacataggtatatatacaacaaaaaggggagtaggtcattacccactatcacaaaggggctgaacctctataataaatctttttgtttattgatttttattcttattcgtgcaacacgtggcaagcatcaaatctataggaccccactctcagttgatcactttttcaggtcaacaggttggtgctttcatttagggcgtagatatcgtatctcatcaaatgccatggttaacatgagaagaacaccagtcacaccatttgcgtctttgggtctccctcaagacccacagactgtaggtccagataatcaggttctagtcacaactagaatcctgatgaacactacaaatgtggtgaatcctgtcaccataatcggcgccacaagtctggcctcctctagacagagctatagtgtaacaccctattccgtagggacgccacgtgtgtgattttataaactagattaatactaatatattaattaattattaaaaattgtgagaatatttaaagcttgactaaagtaaaagactaaaaatggacattataacgacagtaaaaaggtgttctggggatccctgttaaaaaaagatttacccaaaagactatagacaatagaaattcaaaacacaattcaaaatacagcagatacaaccaatccaaaacaactcctggcaactcggcacataggtcggtggggttaatatgtaaattgctggagaaggtagtcacctcatgg

SEQ ID NO: 136457 - DNA, 869 bp, Cannabis sativa
  modified_base (693)..(727): a, c, t, g, unknown or other
tcacttagaatgactattgttactctttatcaatactatttgtttgcagtgaaaatttattataaactttgtaataaattttttttatttgttataattattattttttatttttttttactaatgtattttttgtttattttcaattaaaatattttctctttaagagagtcaattctcacaagtacaagattgtcacatttgtgctgctaatttctctcctaccgagagttgttcattgttgagttttttcgtttccattgtagagagtgatgctgaattgtcgattctgtcaattcattttctgagagtgtttctgattgaggttgtttttctagatctattaaatccttattatctgtcttttcgggtgtatctcttttacatataatgcaaaatggtactacgacatcacattagttagtaagatatgcactacaaatggaaaacaaaaatttgttgttgtttaataatcaattaattaatgtattgtttgactctcaaaaataaattaattattttattaaataaaaataatattaggtacatgtcttcactaaaatttatggctaattaattaactcgcattgtctagatagaaattatttactctaacatatgtagctccattaatggtgatcaattaagtggtccaaattcatattctagatatgtaataataataataataannnnnnnnnnnnnnnnnnnnnnnnnnnnnnnnnnnataataataataataaattattgttgtttttcagttccatacatcgacaaagttatatattttgtaacaccctaactaatataggcgtattacgtgatttttaaatatgttgtgcagctcgttgctaatcaacgagatttat

SEQ ID NO: 136458 - DNA, 572 bp, Cannabis sativa
tttctcgtcaaaaaggtttggccatgtagttataacggttcgactctactttcgtcaaaagaggtttagtcgagaacctttgaatatcaaaaaaaaaaaaaattgaaatggtgattttctattatacaatgtatttccagatgaattccagttagtcatacataaatgccccttaattaattttaaagaatgaaaatttgtaattacttaatgtaaatgattctctttattcataactggagtttaaagcttacatcagtaatgcgagttacatcatttatttattgatagtagggtcgcaaatgttctaagttccagtagttttttattagcgagccatcaggttgagccaatttatagactttgactccaactactgcttcgatgacatatggaccctcccagttcgggttgaacactcatgctgatgcatctctcgtatttgcaaagactcatcttaacaccaagtctccaacattgaacagtcttttcttggctcttttgttgaagtatctagtgactcggtattaatatgcagcgttggtgatttgcgactcagttcgtttttcctc

SEQ ID NO: 136459 - DNA, 1119 bp, Cannabis sativa
tattcagatttttgagtatttttctttttagggcctctttcatataagttgtttcgtcccctttcttgatcttgtctgccattatctataattacatagtggacagtactttacaaaagttgacaataatcgttacaacaattattccctcaaatcatgagatttgattacaaatcaagctaaataaatgaggtttttacacagctgtgaatatcccacttttattgggccaagatgaacgtgtaattaaagatatacattaagccttatctcacagggatgcctcactgagaatggaccatgttaactttgatggcgagcagttgcttgtcatttggcttctcgagactaatattgttttaagtcttataactatattttctggtgtcgagatgatcttcctcacatgcataccttcttctagcgagataacacatcactgtctattttcttgactcgccacactatctacactcagtttgtatatcgtataatatacgctaagtgtttttagtgttatcgtttctcttccacgcagcaaggttgaggcctcgtcatgcacacgtgcacccacatgatttctcgtcaatacataagttagcaattcgtacgtttccgtctcgcagaagccgagttataaacataccctgcgaattatatttccaacgagtcgttccatgctaagtgtacttttcgtttgcgtgtttgagttctttgttcttcccagctcgacacatgtcttcctctaatgtacttaccgaattttgagtataacaattgtcccttaaaaagttatttttaattaaaaaaaaggtttttaatgattacaaagggtatttctgtcatgttcctcttttttgaaaagacgcatattctctgattttggcggttctgcggtttcgaggtacatcagaattaaatgaccatcttttccacttccgctttgaatcatgtccataggattaaatctttctccgatctaacgaaaccactatcatgggcataaaataagaaaaaatgaaccacctttgcaccatttcagaaagtttgagaaaaacccttaaacttcttcgtcaaggatcaccattaaatccgtttgaagacttgcatgacatcctt

SEQ ID NO: 136460 - DNA, 820 bp, Cannabis sativa
  modified_base (791)..(794): a, c, t, g, unknown or other
tgcctttactaatccaaattactaaagcggtcattacaatttttcatctcggaatcctcattgaatagggagtgtattcttgactcgagatgcatttatcacatgtgttcgagtcaagaatctttttttggtataaatcagtttatggaggtaaagttctaatgggaaatgactattcatgcatggtcattggaactgaaaacatttccatcaaacagtatggtggtaaaatcaaaatggtattgctgaaaggatgaacagaaccatattaaacaaagttatgtgcttgttgttcagttctagattagagaaactattttagggagaagctttagctactgcaacctaacttataaatatatggctaaatagagttataggcttgaaggccccctatgaaatgtagtacaatagaacaccaacctaatgcattgaagaatcgttgggtgtacaacgtatgtacaccaatctattgacaaattggaatccagatgagttaagagaattttcttaggttatgccttaggtaccaagggttatagaatatgtatttctaagaagggtagacaaaaggtagtaattataactgatttagataattcaattaatgataaatatataaatgatatgattagggaggaagaaggagataaaagatcgggaaaaatctcataaactttatttacatgtgaaatcagaggttgagagatgcatagcttatttgaaagaaaaaagagaaaaagatccttactgaaacctattgtgtaatacccggaattaagaaatggatnnnnaaaaccctaactagataattatgtat

SEQ ID NO: 136461 - DNA, 839 bp, Cannabis sativa
  modified_base (202)..(205): a, c, t, g, unknown or other
  modified_base (442)..(450): a, c, t, g, unknown or other
tactatgaatataaagattggttttgcgttaaattcgcttaaaatgaccccgtaattcagaaattaaaaatatttttctgtttaaggtaaattttaacaagttttttccttactcttaaactcgttaccgttctcttaaaaactcaaacaacacatcttgaaaaaacatcaaattttacgactgttgtgcatcacttttctnnnngacacgttgagagaaaaagtaattttcaagcactaaaaatcattttaatcgaaatagtgaaaatctcacatttctgatcgtagtacccctttgtgaattgtggcccaaacccatctcagaatatttttcaccactagtcacaatgaattcgtactactaagatttttatatgaagattagttttgcgttaaattttgttaaaatgaccctctaattcaaaaattaaaaatattcttnnnnnnnnngtaaaatttaacaagttttttcctcactcttacactcgttagtgttcttttaaaatctcaccaaacacatctcgaaaaattattaaatttcacaaggacaaatgataataatcgttcttacctatacgcttagcagtgcataatgcttttcttacctcaattcaatgtgaggcgtgcgagtcgaatacgcttagagagcatcatgtttcttttatagtgtttcaactagggcttatggttgaattatatggactaaaaaaaataaaaaaaaatgggaaaaaatcacttaatggtcagccacttaagaggtcattctctagttacaattttaccactttatttcaaccacatattcttctttcaataatactatattttccaattttttt

SEQ ID NO: 136462 - DNA, 711 bp, Cannabis sativa
atacattttcaccgcctctcctttgggtggcgtaacccacgccgtaggggccaagcaatctctattactgtgtgccaacatcccacagttgaagcataagtaaggtaacttctcgtatttaaactgaacccacacctccgggttcgcaccggtcttgaagaagaaacctgctgggactggatgacttaaccacacgtccacccaacacctgaggaatcctctccttacagtttcctctttacttttcccatccgacttaaccagctggccaacctttttagcaagtatgggaatgttgttttccgacagacagcgggtcggaagaccatggaactcaacccaaaaacgagctagctcgaactccgacaatcgcacctccccttcaagtggccatggcttaagatttagcaaaactccattaaccagccacggtcgcttgttcagaacgaaagagcaatctgcctccgattcaaagaagaaaccaagcactccctcctcgaactttttcatcctccaaccatcttccaaattccatatgcccaaaagaatcttttttactactgaggcagccatgttcttgcaccccattaccttaccaacacaagctttgttggctacaatgtcttcaagagtcaaatcctcaaacaactccatcatttctatttccatctcactatccctttccatcgtcttcgccaccgagtcatctct

SEQ ID NO: 136463 - DNA, 923 bp, Cannabis sativa
  modified_base (36)..(52): a, c, t, g, unknown or other
  modified_base (888)..(892): a, c, t, g, unknown or other
agttcatattgagggtgttaataaacatacttgtgnnnnnnnnnnnnnnnnnggtaaaataatttccaaaagttattacatgtgtgagcactcctccacttatccagagattcatgggttgtcagtgtttaactcattaaaaaaataatcgtagttacctcaagaccaactctacaatatttgttcagaacttgagagtgttgccaggtctgtgagctgcaatttattaataccaacgaagtaccaacaagctttactcaatgcttttattcattacatattaaattcaattacctcactgtgagctaagttgaaagaaaaaaaaaagcatagtaattgcaaatttttatttttcatcaaagcataggatttgtcattctataaaacacatgattcaaaaacaaaagcattaccttcattcgaattgtttagaagtctgggacatcgttcttcctaatgtcccttctcattacaatttgaacaatgaagagtactaccatcaattgtacttaaagaagcaacattgttagaagcttcattcttaattcttttcctctaacacaagtttgcaaatctgggggccgacattgcaatcaagttccgttcataagctcgcaattctgcttctagcttatccatgtcggaagagttaaaattgttgatcatataaggtacaacaaatccattatactcaggaggaagactattaagaatgaactgaaccaatcgttctcttgataattcaattctaagcaagttcgctttttggaatttcagattcatcattaacaagtatgacgtaatgctctttctatggagcattttcacattatagagtttatttgcaaaggcatttattaggagtgggttgttcattttgacactacnnnnntcaataaacagaagtaaatcatttggttcaa

SEQ ID NO: 136464 - DNA, 1103 bp, Cannabis sativa
aaaacctactcaatttaaaaaaaaacacaaattgagaaataccattagataagcacttttaatatataaagatatctatttgtattttttgtttgctttagaattgttttacgatttagagtagtatatagattttttactttttaaaaaaagtacaaaaataaatagataggtttgagatattttagatagataaaagtttaaaaaatagagaaaaatatgagaaaatgaataaatatttatatatttttaataaaagataaaaaaaaaaagagaattaagaagaaaataaatagtgctatttggagagattctaaagtgtcatgtactgtctcatatctctcttttatgtatataattgattgatatattaatctttatatattgatttattttttcaatgcaaactatgcaacaagtaaaaaaaattagattttgcatatttgagctagtgtctgaaaagtatcaattggaaattagggcaaataatatccgattttgggtcaatttaaaaccggcaaaaataaacttttttgtagtaataaaacttttttataatttaatttcttatgcaaaaaaagacaaggataaattcgaaacttgtgatgtatcttctatatatactttataatttgagtggaaatatgaaatgaaatagaataaaaagagataattttcattccattgtcttatttgattacgtattaaagtattgaaatgtcattctaataaaatgacctttctaatattttggtaaattgattatttcattttgaaatgaaaataaattctattccaagacattatgaaaaaaaaattaataatttttatattaatttttttttcatacattttaagttttattctatttcatttttacttttatttctattctcattactctttttatgttttcattcctcctaagcacactttattttacgttttcttatttctttatggattgtatttatgatggcagttatctcttttttttctctttatactttttttttttttaattatttttcagaatttaatgtgtccttaaagataaaaactttgtgtacaagtggtacaaagtaacatatatcttttttatt

SEQ ID NO: 136465 - DNA, 1328 bp, Cannabis sativa
  modified_base (555)..(565): a, c, t, g, unknown or other
catcttgactattaaaccaacctacatgagagagttccttccttagtgatttcacctccttcattgttctttacttattcgaaacccatagtgaatgagtgtcatacctacacatagcaagccaagaactcaatcatactgagtaagacgatggtaaccaaacccaaaggagagaacgagatgcaggtttagatcttgataatgatcttctatagaaaggaatcaagggctaaagatcttgaacggaaggaatcattatatttcgctgcaatcaatgtaaggttttcttaaacgcttatgtgtttattttatttttgtagagaattcatatttaggatgttaattcaacatacttgtttgtaaatctagatcctggtaaaatattctcaacaactgatttactttcatataatatggattaaaacgatgaatattgtttctgtgttgatttggatatgttcatgttggtttatgtgttatttgatgaatgtatgtgaattacagaatttttccatgaaaataattttattttcgttttgaaaatattttatttgnnnnnnnnnnnaaaaattaagcaattttagttttatggaactcgattttgataaaaattgaaagatttatgaatttttgaaaaattgggttgaattgggtgtcgagtgggtgcaccacacgcactcggcctcggacaaggaggtgatgcgcgcacggacatggggcaaaaccatgtctgaagctgtgtcatgccccttgtttagacacgacgccgcacgcctgactatgcacacatcaagcaaactcggccaaatcaccttgccctttccccccagcacgcgcggacagggctatttgcagcctatctaggctgcacgtgtagcctgtctcgtgggcagccccaaaaattcgatttttgtgggatttttacacaaatttttgaatttttgcaattttcaaaccataaaggataagtggaagccgtaaataaaaccctgctatttttctcgtcagtatccaggcctcaggcaaatggacaagtggaagccgctaataaaaccctaaaggatactatcaagaagaagcaagacgctgccaaaggcagatgagttgacgagctacgtcaggtgctctgggcccacaaaactaccgagaagacaactacaggacacactcctttccgctagcacttggctcggaagttatgttgcctgttcaagtgaacatatcgactcacagaagggagttttataatcaagaagaaaactaggaacttttaaaattgtccttggatctacttcaagaaaaaggaactgagtcacaaatcaccaacg

SEQ ID NO: 136466 - DNA, 1124 bp, Cannabis sativa
aatacactgctttcgtgtcccatcacccaagatacattcacaacagtatgtcaaactatcaaaagttacgtagcatggccgaaagactatgttacgtacaccagttagaaaacacttggtatgttttaattagtttacttaacttattgtgtttattgattaatggaatttctaactttattgtacttttttttcatgtacacaaccacccaccaagcaacttaagaagcaacccgtgaagagaagcaggcaagagtctgaagatttacttggtcctcgagcacaacctccaaaaaaccctgacaggccaagtaaacaaacaagccatggtcgtcatgtccaacttcgacaaactacctcaatcactaacttttggaaatcggtgaaaaagtggtcacaatcatcaataatctaattttaggttgaagcagatttatttggggtcgaagacgactcgatttgacttctaaaaaacgacatacaagaattgtgcaccgtgcaatacttaggagcccaacctatatcgatttggtgcaagtatgatttttaactcgtaataaacttgatgagagcgacaattattaattatgtatttttattaggtacttaaaagaacaattgctggacttcaatggatttaatagaatatatgtatttctaaatcctggtgtcattgccaccaaatccaagattgatagtatcctttttcaagcactagttgcacgtatggccaagataaccaatccagataaatgggttatttccccttacaactatcggtaaatagattttaaaatgaataattttataatttataactcttcataatgtatattattatgtattaacagttttgcatgtttgtttgtgtaggaaaatatttcattggatgtttgtactcatccaactaaatacgcagacggtggcgtacttggattccaataatggggacgtaccggatgatttgaaattcatcatttttacataagttctacatccaacatcacaatatgtaagtatgttttctatttaaatttatatgctaactttattttttgtgtaggtcgtttaccatttacaatcaaatatcaaactagcccgatagacctattgagtggataact

SEQ ID NO: 136467 - DNA, 628 bp, Cannabis sativa
gttgctgacattttcccctgagtaagattcacatagtcttcaatatgtgaagtcctcacagcaatgttgtaagacttctcttcaaacagatttttaaattcttcccaagtcattacactgacatctcgagtctaccccacaatatcccacaacacaagggcataatcttgcaacatgaaggctgtacagttcactctctcagctcccatcaccgccatattatcgaaaatatgggtaatagtactcatccagtgctcgacctttattatattagtacctccgtgaaaagttggaggttgcagcttcacaaaccgctcgaatacagaatctctgtgcgacattataaatccttggttacccaccactggcacaggtgctggtggtaacacttgatcagcaagggtagccgattgccttaattgtcgcaactcttcttcctgacgaagtatgatacctcacatttcttggaatattttctgccagtcggcaggaggattagcattgccaacccctgcattatcccccgaattctgcgaaggtagaggcggtgccggtggatcagtttgggaaaccccaggctctacttgctcgccctctggtctagatgattatggagggtccattacta

SEQ ID NO: 136468 - DNA, 2177 bp, Cannabis sativa
  modified_base (1442)..(1451): a, c, t, g, unknown or other
  modified_base (1537)..(1546): a, c, t, g, unknown or other
  modified_base (2118)..(2135): a, c, t, g, unknown or other
ctaatcaggtgagctcgtaccaacgctcggtactcatcatgtatcactgacgcccgtacttacgcccactatgttgccaggaaaatcacatcacctaatcagttaagtccatatcacatgcataataacatcacattatcaatattcaaccaatgagtcttttcattatataacaatattaagtatatctcaatattaatcaattcataacaatactaattgtattacatacaacgtactatgcattacaatatacttttcgtacctttaatccaggttcatacattttggccaacccaagtggggaactatccccgatgatctcggccctatgtcacaacaatgataaaccaataaatgtttatcccaaaatactccttaatattcacataagataatctagggttttctaccaaaccccgcgatataaatacactaaaaataaaacttatatttttgctcttaaacatataccatatagtagagctcgttgcaagcttcaaaacggtatatagaatatccgaaatggacatacaagtcacaagctatgacaaaaatacgatttctgatctcttaggaatttctaaaaactataaaactcaaaaattacaattttttcgcactcaccgaaacagtaccaaaactaatccaaatcactccaaacttcacagggcgcatatatacaataaatattaccatccttgcgtaacaaaaattaaaatcgagcccttaaatgaaaaacaccattaacgttcggactaagctttaaaaagttcaaaactcaatttctaactcaaattcaacaagcaaacatcgatactaatcccataggtaccaaagaacaattctacaaagtcagaatctccataactattctaattcacaaaactcctatataaaactaatcgtttttagcttaaaacgtagttaaaccataccttaatctttcccttttcaagggatttgttatcccgctactaccagagcttagatcgctaggttttgggttaaaaagtgaagaaaatggatataggaggagaaagttttgacgaagaaaagagaacgcgagtttcgttcgttctttctttactgttatatatgttaaacttaatatatatataatatacgtacgaactgaaacttatataataataataatatattattaataataaactaaaaatataatataatattaataaaaatttgattattaatagtaatcttattattttttagccattaagaaatctctacttctaaggtatttggccaacttcgagtatcctaaaatacctcaatatttctaaaatcaacttatcccgataatcccatcaatatctctaactaaaactgttgtgacatttttgccctcctatcgggtctccaagatcgccaaacctgaaaatatttttagttcacaaataactcatattatatcnnnnnnnnnnaaataaatctctgtaattaacaaattacacttatttatccacttatcggatttttagggtcgctgaacctgaaaatatttttattnnnnnnnnnnctcatattacattcacacatgctagataaatctccgtaatttataaattacgcttatttactcacttatagaaaaatttaaattttatgttgaaatagattagcgggatcataatcccacttattacctaattaacacataatataaatctaaaccctaattatttaccattagacttatcagggtattacaatcatcccctccttataaaaatttcgtcctcgaaatttatttaagaaatttgggatattacccccaaatctatgattcttactctcaaattgttatttctatcttgctgtttttctacagcactttcttaactagtggaattgtctcatttcatagtacttcctttttctagtctaaaacctggacaaaatatttttcctatataataaatttttctaaaggttaacatcgtcacagctcagaatatggatcgagtctgatacatattttctcaacatggagacatgaaacacattgtatactccggacaacgcaggagttaaggctagcaagtaggtgttgggtttggtgccctagataaaacccatttcaatataatnnnnnnnnnnnnnnnnnnaagatcagaaataacattttatgtcgcatggttcacatgatt

SEQ ID NO: 136469 - DNA, 856 bp, Cannabis sativa
  modified_base (220)..(222): a, c, t, g, unknown or other
taactcgttgggcggagctcgaggtatcttcgaaaatctttggcatttgtcacatttcttaacataggcctttgagtcataaatcattgtctgccaaaaataaccatgccttagaattttcttagataaactctgcccaggggcatgatttccacataatccgtcgtgcacttcagatagaagttgtgcggtttcttcttgagtaacaaatctgagcaannncattgagaatcttcttctgtacataattccctctactataatatatcgtgctcccttcctcctcatctttcgagcctcattccaattacttgggagttccccagtgttgaggtaggcagctatcagtgtcatccagtttgaggaagtatcaatcattttgatctcttccgtgccaatgatgctaggctcttcgagaactggataggaaccaagttcgccatatcacttacattactacttgccaatcgagttaacgcgtctgcagttgtgttttcttcccttgggatttgtttgagaccgttgcatttgaactatgccagaaagtcatgtattttgcttagatatgctatcatcttttctcccccgagcctcgtattctcggatacatgattaaccaccagctgtgaatcactgaagatttcaatgtgctctgctctcatctcctgggctaattttagtccagggattaaagcttcatactcggttttgttattagatgccttgaatcaaaatttgactgcagcgtgcaggtgttggcccccagtcgtgacaagggcaattcctgcaccagatatgtagtaccctagaattaagaaatagattagcaaaaccctaattagataattatgaataa

SEQ ID NO: 136470 - DNA, 723 bp, Cannabis sativa
gaacaatcatactccttatgaactgctgtttgacaaggctcccaactatgagcatctaagaaattttggttgtccagtttttgcttcaaccctcactgcacacagaacaaagtttgattcaaggactagaacatgtgtgttcgtgggatatccacaaggggtaaaggggtacaggttatatgatataaataataaacaattttttatatcaaggaatgttatttttcatgagaatatatttccctttcataaactaaacaacaacaagcactatattgatcctgtctttcatattgtttttccttctaatgaaattactaacacaaacattgaagactttcctataccagataaggaagacaataattcccacaacactaatcagaatgaccttcctgctgaaaccgaaactcacttgactgccactcctgaaggaaataatgaagctacagaccaactgctgcagcaagatgaaaacaccacagttccaaggcgctcaaacagaaataacaagacctccttcttatctccgtgactatgagtgtcactccgttatactggacaaaacttccactccacattctctaaataaatatttgtcttatgaacacttatcgcctgcttataaaacgtttattcttgccttgacagctcattttgaaccaacaaactacaatcaagcatctcaataccgtgtatgaatcaagctatgcaacgtgagct

SEQ ID NO: 136471 - DNA, 605 bp, Cannabis sativa
  modified_base (36)..(39): a, c, t, g, unknown or other
ataattatcaaatttaaaaaattacatttaattttnnnnaaggcaatatttttgttagtggggctatagcccccaaactaatacacttgggtccgtccctgcacatagacaagattaatgttacgtggagtacagcctgttcgcaagaagactaagttaccatgcacaacgtaccagttcacgaagagtccaaatacccaaccaggacaaagagacaacaaaatggccaactagaggggtctggccggaccacttctgcccggccatggtgcagcataggccaccaacttctcgtcttgcagacacttttggtgtctttgtagctttcaacttggacagacatcctcagctacgaattgacttcaacaacccacaaaaataaaggtttaacttcagttatttacctattctttaggaataattaataagttattttcttatttatttagtatgtaataaataggtgatatctcctcattttaaggaatatcaaactacgatcttctgtaagctctctcctatataaagagcactaggttaaacctaaaagctctaagttcttgagttcaagcacttgaaaccctagttctctctctctctctctc

SEQ ID NO: 136472 - DNA, 1393 bp, Cannabis sativa
ccaacaaccctgcaagaaacatcattacccattagtactctaccaccattattggtttcttaataatcaaagaaagattctaagttgggacacatataattagtgcacaatgaatcaaggatccactctttactattattattttctgaaatagaaaacaattccccatctgatcttccatctctattgttctcagccacgcctgcagagtcttttctttgatttccatgatcattagattttgagtactagttctggtttctgttgcatcttttgtcatcatagtttgatctgaaaccagattgcgtcttcaattgactgaagaatcttttaaagtggccaatctttccacattaataacattgtcgattgtctttgatctttgactttgatcttgatggtgactggctattccttgatgatcctctctttggacttcttcctcttacaagaaaggtttcgtctttcctagtctccttctcgagatgatattcaaagtcttttgacttgaatgccgcatgaacaccctccaacgagatcacatcccttccatatttgattggtgctttaacttcttgatatgccattggaaatgatctgagcaatatgattgcatgactttcttcatctaccttatgatcaatgttagctaaaccaacaattatttcattaaatttatcaatattatcatctaaggaaagagaagagtttattctaaacctgtataatctttcaagaagattaatcttgctcgatattgatggtgccatgtacatctgctctagtttattccacaatccttttgcagtcttttcttggattagctttcttctaacttcattggacatgatgatggtgtagtatgccatctcctccatctctgcaatcttttctgtcttcttctcagccaacaacttttcatccccgagtacctttaggtgtagtatgccatctcctccatctctgcaatcttttctggcttcttctcagccaacaacttttcatccccgagtacctttagcactttttggtgcacaagtatacccttcaaactttctcaccatagtgcaaaatttgttgatccatcaaacttctctagttcgaacgttgccatcgacatcctccttcaatctgtgttcttgtagaattccttcatgaattcttgtagcagaagcaagtgatctttgaatctcccttgatgatcgaagaaccaagctctgatttgtaggaaatttagctctgatacataggaattaacctttgtaattctaaattcaagatcacactttaaataaaaaaagttaaatcaaaacaaacaaataatcaagaacaaaaaaccaacaaacacattaaacaagaaaaatataacacggatgaatctaaatggttgtca

SEQ ID NO: 136473 - DNA, 1037 bp, Cannabis sativa
cattaaatgcatagttgaaaatgtgcatatgcctcaagtcaaaaattactattgtaactttttcacatggttgaaaaacaaccatacccatcaattattcccctttttcaatccatgaggaagaattgaatttgtgtcttcatcattgagaactcatcccaacaagcttggaacacaactcaagcttatgccgaggaatcacctttgttagcatatctgctgcattctcgtctctatgaattttctgcacctggaatagcttttttcaagtgcatcacgtgtccaatgatatctaacatcaatgtgttttattctatagtggtaagtagcattcttgctcaggtcaatcgcactttgactgtcgcaatgaatcacgtacctttcttgcttcaaacccaattcttggagaaaattccttatccataacatttctttcccaggttctgtaagagcaatatactctgctattgtggtagataaagcaacacatttttgcaacttggactgccatgatacagctccccctgcaaaagtaaacatatatttagatgtagactttctactgtcaagatcactagccatatcagcatctacatacccttctaagattggttctcctttcccgaagcttaggaacatttttgatgtccctctcagatatctaaagatccattttaaaacttcccaatgctgcttgcccgaattcgcaaggaaacgacttacgactcccactgcatgagcaatattcagtctcgtacaaaccattacataattcaagcttccaaccactaaagagtaaggaatagccaacatcttcctcttttcttctttcaaagaaggacatgaattcttagtgagtctgaactagtcaccaagtggcgaagaaactgactttgcatccttcatgttgaacctttcaagaattcgttcaacatagttctcctatgacaaccataatcttcgagaaggtctgtcacgaatgatttccattcctaggatttgtttggctacccccaagtctttcatatcaaagactc

SEQ ID NO: 136474 - DNA, 662 bp, Cannabis sativa
aatttcatatttttgcatgttcggcgcccaacaacattggaacgcggtgtatggctcagtagaatcacatcttagtatatttgtatagcgcggcagtttagttagacattgggaatgtcaggattagttgggaatttagagttttcccaaaataccctaagtgatttgtatgactctttagtatgggcaagggcattatggtctttttgccttttgagttttgtcttttagtggggatttattattaagttttaaatctaattttaatggttttaagctgatattaaacttagattaatattattttacttcatttgcatgaaagaaaatagaaagttagaaaaaatctcattttctaaaatctcattttctctctcaagctcactctctttttcggcccccttagagcagctagggttgggtgtttctttgtaattttccagcaagtttctgcaagaatttggagtgcttaagctctaggtaagcttttgactttgttttcttgagtttcttgaattgtaagtaagtgaaagttgcatgttttgaggatttgcttgctgtagctgctgtcattatttagtgttgttatctgaagcttaaatatgtttagttatgtggattcaaacaggttttgttgattgttagttagatttaaccaagtt

SEQ ID NO: 136475 - DNA, 636 bp, Cannabis sativa
tcagttccttgactatcaaacaactttcccttactagcaacaccctcgacatcatttacacttgcatctacatcaactgctttcccttcaacattatatttattactcgcatttgcaacatcttttgcttcttcaatattctttccctcaacattatctttatttgtcccatctgaaccaatagctttaacagcatcaccaccccccaaaccctgtaaatatacaaaacaaaataaagaacatttgacagagacaaaaaagaacaaagtaaccaatcatcaaaataaacaaaaacctaataataaataaacttgtctggtcatctccaccatcatcttcatcctccttagattttttaacaccatcgttaaaaaggccatgatcatcaacaacctgttcttcatcattcactttatcagtattcttattttcttcagtaaaccaatcaggtttactagaaataaaactcataatatcaaatgaaggagcatcatcattaaaaacctacaaaaaaaaaataaacccatcaaacaataaaaacattaataaaacaaacataaaatattcaaacaaaaacaataaacaataaacaatatactactttacaaaacaaaaataacctgggtatattgaata

SEQ ID NO: 136476 - DNA, 531 bp, Cannabis sativa
aagttagacaaagaaaggtcgattttgaccttgatactgatattaaatattcttgttggtgtagggtaaaagggtaaaaatcctacagtggtattagagcctagtttggctaaggaagatcagcaagattcaaggaaaatatcaggaaggaatttggcaagaaatcttgaaagaaagattgacaatcaagaacacactcaaaccaggaagaagatcaaagttctaaattgaattcagatttaaaaacagaaacatcacaaactgagaatttctaaaattctatctgtttttcaattttattaataggagtaacataaaggttgatattgataaatttgatggtacaggggattacagaatctggagaaggaaaattaggtctctcctagctcaacaaaaatttctaacggtgctggatgaacctatagaatggccagaaggaacttcaaagattcaacaggaagaatacctagaaactgctactggaatcctaatcttcaatctatcagatgcaattattagattggtaga

SEQ ID NO: 136477 - DNA, 574 bp, Cannabis sativa
tgattttctagattgcactcacacgtgtaatttagaggatattcagtatagtggcaatctatatacatggagcaacaagcaacaagggcgcgacaagatctttgccaagttggatagagtccttgcaaatgagaagtggattgatttatttcagcaagccgaagctttatttttgaatgaaggtctattcgaccattcaccagcgataatcaaagtgtatccagaaattccaagtgggaagaagccatttaagtatttcaatatgtgggctatgcacccagagtacaaggcagcagtaaaacaaatatggcagcaagaagtttagggctccaaaatgtttcagattgtctctaaacataagctattgaaaggtgtctttaaagaattaaacaaaaaaggcttaaatgaaattcaagcctcagatattaaagctcgagaagatctcaataataggcaagaaatcctgcagaccgacccactaaatgttgtatttcagcaagaggagaaagaggcaagagaacattatgctatgactcataaagcatatatttccttcttacaacagaaatccaaa

SEQ ID NO: 136478 - DNA, 704 bp, Cannabis sativa
gatagtatcaggaattgaggagggttccacaaaacctgagatgttctgggcaaacgcccaattagctacattatgggcggcaaaattacaacgacgagaaacagacgtaaaattacaagataaaaagtttttagagagttgattacataaataaacataattatcaatattccaaatagattgaagacctttcagtgctttgataaccaattcagaatcactctccaccaaaatatagttgtggttcttgagtccagccgagtccaaagcgaggtgacacgccgccgcctcaccaatcaggggatctctaaagttgagcttagtaacagcagcccacagaacggtaccaaagtgatccctagccagagccgcaatacacattgaatctccaccaaccttagcatcacagttgattttgacccaatcttcatgcgggggaatccaagtcggagaagccaccggagttttcgggggaagtaagcagaaaacataatctgtataacaatgagaaatagagtcaatggccatagcaatgttactcgggtgtgagctatgaaccttgtcatttctggctttccatattgtatcaacgacgattgaagcataaaggaacagattgtcagagtccaccccattcatctttaagttccaaagaaatttaacccaatcccaaactcggcctcccgagtcagggatcgggaaca

SEQ ID NO: 136479 - DNA, 566 bp, Cannabis sativa
  modified_base (297)..(298): a, c, t, g, unknown or other
tttggttcctctctcggttgcaccatggcagtcgacctcctcgcaccatcaccgtcgcatcaccgtcaccgttgtttcttattttcaagtatgtattttgtatttatttttgaagaattttctgtgtaatatatgtatgtgtttgtaattagtttgaaatttctaaataaaatcaattttctgtgagatttttgtgttatgtaatataaatttgtgttatatattagttttatatataaatgcatgacttgtgattttttagggtttttaatttttggtatgtaatataaatttgtnntatatattagttttaggatttttttatttgctgtgatatataaaatgtatatatttttatatacactttaatgttatttttcatagtatatatatattttttgttaatatataaaataaataggtgtattatatatattatattttttttttgtataagtctatatattatatatattgtattttttaatttttaaataattttatattgtatatattatattttttttatatataaatatatgtattgtatatattatatatttttt

SEQ ID NO: 136480 - DNA, 1280 bp, Cannabis sativa
tttaaaatattttatatatctgccgcgaagcgcggtttgtttcctagtaattaaataaagctaatggattatgaacttttaattatgtttacatttgaggaaattacacataatatagaatttttaaaagagtaatttgcggcataaatacttaagttttatgtcgtgtagcagataagtacctaagttgcatttctggcggtaaaaataccttccgttacactcttggaacttccgtaggtacctctctgttaactgccaaatcagtacctacgtggcagcccctgataggtccatgtcatttaatttttatttttttctaacaatttttaaaaattaaaaaaaaataataattaaaaaataaacatatattttcctttttctcttctccaatctctctctttcttctcaacttcatctccttcaatcaccatctcatttttccattaataatcatatcataatacaaaaatttaaaatcattaaacagatcaaatcctcatcttaccaacctgttttcttttttttttttgtctctctctctctttttcttttacactctcttgaacagtcaacaaaaacccaaaaaataagtatgaacaatgaacacaactataaaacaaattcaaaaaattggaatgagcctaaaagaaaacttacgcacaaatttaaaaaatattttggcactaaacctcatcacaccataatatattttggcactaaaattacactatcccatccttatcttcttctccattttttttttttgaacaatatcttcttctccatcttagattgacttggaaccctaaaaataaaaacatgaattagaacccagaaaaaaaaaattgatttcatgttcttcaaaatcacactcatccccattcttcatcatttttaaaatcaaactaatctctaactcaaatctcagaaagctcaataatcattagccataacaaattaatcaataccaattcttttcaaaatataccattcaaacccattactcattaattattcaaaaaaaaaaaaaaaaaatcccattactcattactacaccatacattttttttctccatatttattatctaatggaattgagagcataaaattagtcaaagcatttaaagggagagagctcacctcggtcgatgcagagtgagagtagaaagacagcaatggcgtgtttttatgactgaagctcgacggtggagagccattgaagctgacaaagatatagagagaaagggataccacgtggggagagtgagaaagtacag

SEQ ID NO: 136481 - DNA, 622 bp, Cannabis sativa
  modified_base (397)..(397): a, c, t, g, unknown or other
ttaatcaggtaataagtgggattatgatcctactaatctagttgaacataaattttaaattttctataagtggataaataagaataatttataaattatgatcatttatatggcataggtgaatgtaatatgagttattggtgtaataaaaatattttcaattttggtgaccttagagactcgatcgggggtaaaaaatatcataacaggtttaattgatagaattagtgggaatattgtgataagttgataatgcaggtattaggataattaagagtatatgagattttaggttgcgccctagaagtagaagttttttagtagctaagaaatgataagataattattaataataaactttttattaatattattgttatattattattattattantattattattattttatattttttctaaagttgaaaagttgatcgtgtgaagtatatatatagattatatataagttataacttatattatataagtctgaagcagaaaaagaacgaatgaaacccttgttccttctccttcaattaaaccttctctccttatacctattttctttgattttaaatccgaaacttagcgatctaagctccggtagtagcaggata

SEQ ID NO: 136482 - DNA, 1174 bp, Cannabis sativa
aaagttccttatatggttacttaaatatctatccaacatttatgtatattaagtacaaatatatacattcttgagcataaattagattccaatatatattaagaattttctatatttcttgaattctaaggtttctttaaggacaatgacttagacaatttattttctttagctacaaacctttcttctggtatagtatctttcatgccaaaagttttgaatactttattgatatacttcttttcttataattcaagaatatctcaagaataatttcaacatatcttgaactcttaatacaaaattagtatatcatcaatggcaagttattttttaccaatatataataccaggatcatattcttacttccactgaacttgtgatgtatacacaatcatcaaaagcttctatctcaaaatcaaatgagaatacttaataaaattgtgttattgttacgagaagcttacttgagtctatacatggatttttctaatttgtaaactatattctttggatctttggatacaaaattttctggttgcacaatataacttttgtcatcaatattatcattgataaatgacactttaataatccatttgatataactcaagaccataatgagcagtcaatgtcatgcttgtcctgaaatagtctttcaaataaaccaaaaaaagtctatttaaaatgaatatatactttatgagtaattatttgcatacaagacataatgtgcatctctccatattgcaatttgcatccctcttgatcataaatattaatttataacttattggttttacaccttatagcaacagaaaaaatattaatctttattgtctcacattaatttgtactccttatttaagatatcaatcaagtttttagagctaggaccttcatggcatgataaaagttgattggatcatcgtctatcattcttttatttcattatgtcctttctctcatggatttttaaatgacactgatctttgaggttgttgagtttgattatctgaaatatttaccatatcttgaatgagaagttgtttggtattgtcttatcaaggttctagtcttatcaaggttctggattcacttattgatcaatgaaagtcatgaaaacctaaacattgtgaaaagtgatagttagaattgagtttaacgtcaatt

SEQ ID NO: 136483 - DNA, 541 bp, Cannabis sativa
  modified_base (51)..(56): a, c, t, g, unknown or other
  modified_base (301)..(325): a, c, t, g, unknown or other
gtttcaactattccagaaaagataaaggccaagaaaagaattccttaggannnnnngtgagaggtctcagatatgctttcttattcaatagaccagacacctaatgttgagtgggagtaatgagttggtatcaaattaatccaggaaatcaacattggaagacaatcaagtaaatcttaagatcaagaagatgaactatatgttagtcgataagggtgttattttaatacactcagactacaccaaatcaattttctagacttgcattagtgctagaaaagtctgctgatgagatggtgannnnnnnnnnnnnnnnnnnnnnnnnttggagaagtgtaaaaaccaatctagaatctctaatctaccagtgagactgaatattaaagttgcaggtaagatacttactcagtctatggaaagttttatactgtttttggcattgtacaaccaatttattaactactattgttacttcctgactaacagagaagtagtttccaaaaagtaaagaatccagtatccctagacgagtagacatata

SEQ ID NO: 136484 - DNA, 557 bp, Cannabis sativa
ctcgctatgtgttgtttatgtctttctttaaattatgccttctgacgcaaaatagtttctcgtcaatatgtgaatcaatagtttgtacatccttgtctcgctaaagactgtatagtttgggagctataaatatactctattgattttgcatttaatgagttattcaatttaatatttattgatataattatcaatatattcgttgatttatattccctaagattgacatgtgtcaccttctaaagtactagtcgaatttcgaatatagcaattcccccttaaaaagtcatgttcaatgaaaagtactttttaaatgttactgagggtatatttgtcataatctattttgaaaacatgcatgcctttgattttggcggtttgtggtttcgagagacatcattagcattaatgagccatccttttcacttctcttccacttttatccattggatctgttgggtattgtgccctaaataaaacctatttcaatataatcagatttaccaattaataaaagatcataaatcacttttgtgttacatggttcacatgattta

SEQ ID NO: 136485 - DNA, 829 bp, Cannabis sativa
gttaatcctggacagctggcaagcatgggcaatggtgtaacaactcctatagatgaagtcgcgcctggtgtgcaagagactgggaataacagtttcgcacccaaccagggcattcataacacaagtgttctgccctggaaccaacgcccagaggaccatcggagatgctactgagttacaaaatctctgtgacgctcttggactcatgcagaatcataacaataccctgcatcatgatcaggacgaactacgcactgtggtaaatctcgcgttcgaagaagaaagacgtatgtaatggaggaatagagagatggaggtgttaagggctcaccatgcagagattgaaaatcgtagtcggcaagctaccgttctgatacgaaaagcctaccaaactgtaggtcagcaacctccaaatgtcattcccctgggtgagacggacgaagatccagcgatgaatacctcccagactgcaaatggtcagccgcccaatccccggtcatgagttccactcgtgggcctagcggtaggcaagcagaccttgtctggtaattcatcaagagaaatcatacctgacggttccaaccagatcaatggtgccattccgcccgacaaccaagcgaatcaatcgctaacgcagccaggcacttctgtattcgaaagattggggcgacccatgacctaaggagtgatctgaacagaaggagggaagtagacaaacagaatgtcgcaagaatcgtgcagcccggaacccgtactcaaattcccgctcaggaagatgctgacgtaattcaaattgaccagaatgccgagtaggttagcccagccgtac

SEQ ID NO: 136486 - DNA, 808 bp, Cannabis sativa
tctttctaaaaccctacaatatatacttaaccctaaaattaaatcttcttctccaaacactacagccgccgcctccttcctcttaaaaaaaataaaaaaccaaaacaaagcagctgcctcctttctaggttttttcatttcattaatttttcaaagtattgggtgtttctcccttgtcctctctaatattggctgatggcggaagcacttctcagccccggtgaaccttggcacgacttcccaaccaagattgctaaacgtctctaatgcgtcactagacgatttttcgtttttgggtcaaaggtggatctcgccatttttgggtcgcacggtgtctccgctttgccctaagacaccaacggctgaagattcaagtctcaacccctaaacctaaggtcgatctcttttctcattcatttctcagtttctctctctctctctccctctctctcatttgtgcaggatctcgatgttcatcgtttgagttcgtggttgatggagtttgatactcgttgtggaccgcaaattttatggtgttttcgttcgtggttgatgacgttttgagttgggaatcatggccgatgacgttcttggtgcaagaattcatgtgtatcggcattcttgtgtatctgaattttttaaaatattttttgttactaggtctatattatatttatgttcttgatgtgtgttattcttgttattaatttgggttaaaatttgagttcatgatactcactgttatgactaattttaatttttttatttcaaatgttgtattatatccatgtatgaatatagcatttaa

SEQ ID NO: 136487 - DNA, 975 bp, Cannabis sativa
taccgtcaaaaattaaatttagatatttatttacaactaagagttaaagttagatatttatgtcacaaattactcattaaaatataaataacatgaaataaagagagtgaaacacgtggaaattcactctgaagtgactatttcctagatacacacgtcataatttatttattttatttcaaaaaaataataaataaaaaggtaatcgatttaaaaaaaacctaaaattagggatttatcagtaggtaatgttgctcaattgttttttcctttccattcactcatatgtcttccgtttcatcgattttttctggatcctccttttcttcagaaaaaagggaaggagaaggatcttcttcggtggatcccccttgttctcgtttagtccccgtttagtccctttcgtttccgtaaatgtttgttgtaaatggtttggataaacttttgcaatcaacatcacaaacatgtacttaacatttttggtttgttgtgattttttttctttcttgcaaagaactattaaacgaaggttatttaatactagagcaatttgcggtgaaacccgcttatgttttaatttttatatacttaattttttttattttttttagtggcaaaatctatttatattttaatttttgtatacttaactttcttatcgttttttggtggcaaaactctcttaagtttaattttctttgcaaatttaccattaaatattaattgggttactattgtattgactttaaagttttactgttacatatacacaagtatatacagtggtcgtccagttgatatttaacggtaatatttaactgacgtgtcaaatttacaaagaaaaataaacataagagggttttaccactaaaaaaacataaggagattaagtgtataaaaattaaaacataagagggttttgccactaaaaaaaaataagtaggttaagtgtataaaaagagtaatttgcggcaa

SEQ ID NO: 136488 - DNA, 529 bp, Cannabis sativa
gcttcttgaatcgttgaggaaatgatagaggtggcttttgcaaagactttctgcagcagaatgctgacctgatgctgtaacatctgggggaattttagcagctgaaatttcaggttttttcttcatttccccgtctttttggattgaagagggctccttgctgccttttgttgcagccacatttgactctaaaatttttccacttctcaaggttaccgattttcaatgctctttaccatctcttcgtgggttttcggtgtcactaggcaaggtgccttgtggtctattcttcaaatcattggccaattgccccaattgaattttaagatttcaaagagatgctgcctggctttgaattacagcatcattcttggccatacaatctttcattaagctctccaaagatcttgtttgagagccttgaggtttgtgtggttgttgaggtcttagttgttgagaaaatcccggtggaaatgattgttttccttgtgcttgtgctccacttgaacttgctccttgacctccccat

SEQ ID NO: 136489 - DNA, 1191 bp, Cannabis sativa
agttcgaaaaaaaagggtcagaggtaaacacaaaggcaaaaatgttgaagaagagctctacaaaacaccatctgccaagttacacattgaattacatgcagtgacaggcaccccagttggcaaaaacaaaaaaaaaaattcaataatatgtgtaaatggatggtttgcatgtccatccccatgaataaattcaaatgggaagatgttagtagagctgaaattaatgcattgtgggacagacttggggtatttcgtaataaatttttttaatttttaatttactatattcttattagattttaattaatgtattaatgtgaatgtgtaactttttgcagaccaagtttgtcctcccacgagataaccctacatttgtaggtgagtacgagatgctaaagggtttacgtgaccggaggtcagattctaagaaaaagtggatacaaaacattgaggagcttggataggagagggccgacatgttaccccctaacggagtaactcaggaggtgtggagtgactacattgcttactgaagcacagacaaacaaaaggtatttaataaaatttctaattttagtaatgtttcatgttatatagtcaataataaataattaattgttagaaaaattattcatttgaggagagagcagcgaaaaataaagaaagtcggggtaagatgaaacttcaaggaggctagggatcaaagcctattgtttcacatgttgtcgagggggtaagtttatatattacattatcattgatttaattttttttggtaaaataacaataataatatatttttcttaaaaataggctaacaccgacacaggagaactgccaactgcggtggaaactttttaaaagtttcaccataaaggcaacaattggcgcaacaagtacgcgcaataagcttacattagaattcatttctatttattttgtattaaaattaaccatttaatttatttgtttgttttaggagcaaatggttgaaatagtggcaactcaaccagcgccactaaagatcagcctgataagactgatgtcgatcctacacagtacccccgagacttgcctgttatgacgcaagtactcaggaagtgatctcgacatttaagaggctttggccatctccccagactgaagggagttggggccaaaagagcacctgccacgaattcttcagcccca

SEQ ID NO: 136490 - DNA, 1011 bp, Cannabis sativa
aaaacagattcaaaaaaaaaaaagtaaatagaaaacctgaaacatgcacaattacaaaatgaaaaaccggtttcttacaaaaaagaaaaattaccaaaggaatatcaacggaaggagcctcgctcttcttcttgccgagcgattttgaaactggtttcttcttgcctttcttggcaacattaacaaccttcggatcatcagcaaccctaggctcacaaactttatcctaaataaacataaaacaaaatacagttaaaccaaaatgaaaaaaatcaaaactattaaattaaacaaaacaacaaaaaaaatataagaaaaaataaagacataccaagttagaatgttccccaacattctttgattttcttttctttgacgcactagcgtcatcagaaacagcttttcttttcttagttgaaacaggttttgcgacaattttttcggtttcaaaatcatcatcactcgcagatggaaggacattcgtatccttcttactcacctttttacaaccgtgtttctgagaaacaacatcggctttaggcaattcaatatcaacctgaaaaaataaacaaaataaacataaacaaaacaaaacagaacagataaaaaagaaacacaaacaaacaaaaaaaaaaccagtattatataacatattaaaataaataccaaaccgcaatgaaacataaaataaattcgaaaccgggttcagtgaaatttaatacatacattagatttccttggagatcttcttaatggtggagctttcgaaggttccataacatgatcaaccttaaaaaaaaaacacaacaacaatttcaataaaaaaaaaattaaaaccagtttagaataaccaaaaaagaaaacatatacaactaataaaaaccggtttcaatacaaaacataaaacatactttgcctttctgtgaatcttttttcagtcgacctttagccttcttagaaggctcaaccttttgaacattagatggtactttatcatctgattctctctcc

SEQ ID NO: 136491 - DNA, 1079 bp, Cannabis sativa
ggacattgtgaattctagttgcaaaaatatcaaggttattttatttttctgtcttttgaataaaaaaaaaattgtgaccagttctgtcaattgagctttgttaaaaaattcttgttattcttcttgttatgtttcattattttcttagacactatatttgctcttaagtgttgattggtgctttatgtgtcttttagtattgtcttgttcgttctttgcaacgaaattcggggggcatatttcgaaaaaattaaacaaaaaaagggggcatacttatcgattctttggattcttttcttttattttttttcttttatggaaacatgtttttattgcattctatctattgtgtttcctttattcttggagttttttgttttttggtgttttaggaaatttgttcttaataattatttattttgtggtttcttttttggtggcaatttcggttttggttgggcttttaattcttagattttgtggggatatgttgtttcttttttccatttgaggtaaccttaaccaatttttgaaaaatctttttggtttccttcttttctctccccacgtggtgtctaaggtaagggagttactttcctttttcatttttttgttctgattattgggtaattaaatttgaaatgctatatatgttcaacttcccacgcccaagctatgggcaagaagggcaactgcccaaggcccatgaatgaaaaaggcccttcttttttacctatatgctcatattatataaatatatatttactttgctattttcaaactaaaaagaacaaatcaaatcataataatgagatagtacacggttgaggcactactacaagtaacctctaattttcattttttttattatcttttaatacttaaatagtagtacctattttgcggagaaaataaaatctgattacactatacaaatattattcaaaatttatttatttttttattaattagccgttagggatatattgtttagataaataaataaatataatgtatatatatatatatcattctcttttatttttcactaacttcatttattcttcttctattttctt

SEQ ID NO: 136492 - DNA, 596 bp, Cannabis sativa
  modified_base (234)..(247): a, c, t, g, unknown or other
ataattgtattatatgtattaaacttttaaattactattttctttacattaaaatattatttgtgtatataattttttaattttgttataaagatgtgtggtttggattgaatcggttacttttacatggcaatcaacatccaattcgcacaagtatggattttaaattttccaatccacacaaaagtgcggatatccgcactttgcgtattggattggattggatcgtgcggnnnnnnnnnnnnnngctattttatgaacacccctatgttgtatttgttatagtgagatttctctcacctagaaactcgagaccatactcttgtttagaggacacgtgtactcagttttccaatgaaagctgagtcgtctgcaagagactcctcgaagttttaaacctcgctcaagatagagtcggggagatatagcgagcacgaccaaagtctaatcgcatgattgtaactcatattatgcgagacaagagagtaactcgcatgtaacttgcataaacatagagaccgactctctataatgcgagttggtcccaatgaccctacaaccttgataaaccgatatagactcgtatgtctaggttc

SEQ ID NO: 136493 - DNA, 705 bp, Cannabis sativa
cttataataaggtatcatctatattatattgggtaagtctataatctacactctttattttgtaaatctttaaatctgttttggtatttaattgaattttttaatttttattgttagtgagtcccacattattaatgtgtggaactataatagaatatataagaagaattagctactcttcctactgtcaattggttttgaaatggaactccattcactttatcccaaattatgagatgttagagagttccatagggtttgaattttatttttgacatagtaatttttttataattttttaaaaatttacaactaattttaaataaatatagctataaaaaattactatataattatattaggaaaagagtaaactccttaattaaatggattttatggtagaaaccctaataacctgttttgatagataagaatttaggaatggaaatcatggtaaagtgtgctctcacataatcaatttcacaaattattacatttttttatttttatcaatcaaatcagattttattcacctaatattttagagcattttttttaccaatattttagtttttattccttgatatacattatagacaggggcggacctaccttgtagcgagggggggcagtcgccccccctgaaaaaaaaaatcgagataaaaatatatatgtattttaattagttacaacatatatttgtat

SEQ ID NO: 136494 - DNA, 564 bp, Cannabis sativa
gtgacgtactcgtgtataaaagccattattccgtaggtgtaagggcccaatggagacttgaagcggggacgttacatgttttaacaaggttgatatcttattatatattttttctattgatttataacggtcttttttgttattttataattattttaatattattgtgtaggtgttttatagttatttttctgttattttatgtttttttttatacaattattgtttagtttatgtacattttatgtagtgtatatttttagtttattccacataattttctattaatcacacatcacacattatattatatattccattttaaaattataaaatattattatttctatgattaatgtaataatttatttaacttttaaaaaataaattatcattttaactatcaataactcaaaaagaaaaagagaaaaaaaaaattaagagtataaaattctaacaacaaattccatgaaaaaataatgtagtagtacaaaaagataaagttgtcttaaactaagtaaaaaaatagtaataattgttataaatattaataattatgtggat

SEQ ID NO: 136495 - DNA, 863 bp, Cannabis sativa
atttatcttcagtttattacgtacttgtgatgttttgtgtattatgcatttctattaatgttttgtcttgtactatttctatttgatgaaatatatatttctcacattatccttattgttatctcttgaagtattaaatggattgtactcttaatgaagatgaacgtaaagataatatcagagattcttgcatactagatagtggcacaacacatactatccttagaaataaaaaatatttttctgacttaaaaccaacaaaagcaattgtaaacaccatatcaggtcctgcagatttgattgaaggtattggcaaagtaattttttataaccaaatggaacaaagttctctataaacaatgctttgtttttaccaaaatccaaaaggaattttttgagttttaatgatttatatcttcatggatatgatactgagtctgttattgagggtgacatgaaatatatgaacattactaaatgtaatgcagggaaaaaatacatactagaaaaactaccaatgctccccactggactacattatatatatataagtgtaattgagtccagggccggtcctgaaacaaagtgggccatagggaaaaaaaaattttgggcccttatgttagaaaaaaatgtataattttaaaagaggaaaaaaaaaattggggcccctgggctgggtgggccctaggcacaggcctagcccgcctatccccagggccgggcctgattaagtcacatgtggtagttaaaatagataagtaaagatctctcaatattaaatacttggcatgatcgtcttggtcatcctggttcaataatgatgcgaagaattattgaaagctcacatggtcattcattaa

SEQ ID NO: 136496 - DNA, 1118 bp, Cannabis sativa
ccttttagccatatagcttcctttatagcttcagttgtggccacatactcagcttctgttgttgatagtgccacaacatgttggagccgaactttccagctaacacaattacctctaattagaaagaaataggcggatgtagatctcctattatctctgtccccagcataatctgaatcactgtagccttcaattatagtgttaccattttgtttcttgtagactaatccaaccttagttgtcccaagtaggtatctaaacaaccatttcatggccaaccagtgaacttttcctggatttgccatatatttactaagtacactcatagcatagcctaagtttggtcttatacttaccataagatacatgactgaccctacaacattagaatagggtacatccttcatcgcttctatctctttttctgttttagggctctgctctttagaaagagtgtactgactagtaataggttgcttaacaaccttagcatctctcatagaaaacttatctatgattttctcaatgtagtcttcttgtctaagaatcagtttttccttgtccctgtcccttaggatagaaatcccaaggatcttggtagcatttccaagatctttcatttcaacttctgtcttgagtagatttttgaccatgtcaactctagccctttcttggcttataataagcatgtcatctacatatagcaataggtagatgacatcttttatagagcttcccttatagtacaaacaagtgtcacgatagctcctgttaaatccatgctttagcataaaagcatcaaacttcctattccactgcctgggagcttgtttgagtccatataaggacttaaccaacttgtagaccatgtccttcttctctttaacttcaaaacctttaggctgttccatgtagatctcttcttctaggtctccatgtaggaaagctgtagtgacatccatttgattaatttccatgtcaaattgatttgctatagataacatgatccttatagtcttgtacttggctactggtgagaatatctcattatactcaatcccttctttctgtgtgaaacctttggctactaacctagccttaaaccttataggttctcc

SEQ ID NO: 136497 - DNA, 749 bp, Cannabis sativa
gatcctaacaaatattgtaaatttcataaagatattgggcatacgaccgacgaatgttgccaattgaaagatgagatagagattctcatcgctcgaggccattttcagcagtatgtgaaaagacagtgccagggatacaaccaaccccgtcagcctaataacccaaacaaccaaaggttacaagctattcctgtggaaggagaggacatcctaattattttgggagggccacatattgtaggggaaagcaataacgctcaaaagagatatgtgaaggagataaagaacgagcagtcggtctttgccccagaaccttccaagaaggtgaagaccgaggaaccccacattacgttcatagaggaagacgagaacaacgtgagataccctcacgtcgaactgctggtcataaccattcaactcaccaataagaggatcaagagagtgttaatagataatgggagctcggtaaatatcatttataaggagactttaaagaaaattgggcccgaaaaggccaagttaaggccttgtatggtgaatctttacggattcaccggggatagcattgctagccttggcataatcgagctcgcattaactgtagctgaggcacctgtaactgctactgttatgcaagacttcctggttgtcgacctgccctcggctacaacatattgttgggtcgcacagcactgatcggactaggggtagtcagttcgatctagcacctatctttaaagttccaaaca

SEQ ID NO: 136498 - DNA, 1065 bp, Cannabis sativa
  modified_base (60)..(67): a, c, t, g, unknown or other
aatgcaagatttgaaaaaaattaataaattttttaatcatttttttatgcattttaaatnnnnnnnnattccattcctattcctattcttatattttcattcctctcacgaaataccacctagtatttttactttatggtataggcaaacaaattaagccaatccgaatttaaagaaaacatattgtatagaaattttgtttcaggtgtagatttttttttttgagagaaaagctatatatatatatattaatgaacaagttcatttacaatgatagcttcaatagggcttggacaaacaaccctccaaacaatattagatccatcggtaaagtgaatctagtaagatcatgtgtagctgagttagcactccgacgaacatagcttagagggacacctgggaaagatgataaattatatctcgaataagatcatgaaatcttccataatgttgttgattattatcaacactttgtgagatagtcatattgggatttattttatcaggatctagatttactaacaatgaaaacacaaagagtttagaaaacattacattaatgcatcgaaatattaatgactccttctgctcagatctctaacccttgttcaaatctgtcgcatagtaataacaagatctgaggctgaatctctttctctcattcgggttggttaccaccgttttcgcactatgattgagtacttgacttgctatgtgtgggcttgatactctatcactatggctcgaattggtgaagaacaatgaatgaggtgcgaaatcactatctatataaagaaaggagagtctctcatctaatagttgtcagagaatgaaaactagatttagtttggttgaaagtcagttgttggatgagatgagagcatcatgtttcttttatagtatttcaactagggtttaggttttaattatatggattaaaaaagaaaaaaaataataggcaaaaattcacactatgtggctggccactaatgagtctcactagttacaattttgtcactttatttcaatgacttattcttcttttaataatgccatattttctaa

SEQ ID NO: 136499 - DNA, 606 bp, Cannabis sativa
cctaacactttcgtgacgcgcacaaaagagtgagtcactaaataatgtcactaaaagccacagttatagtagtgttattgtaagtattagaataaattgatctgaccttgaagggaaatttgatattgatattaaacaaacaagctaccataattctgacaggttttgagagcttggggtctcaccatttgatgtttaaatcaataagcagactaaccataaacatagtaaaccactcaagaaaaatatataacacttacatgtcaaaccaaaagtaaaaaaatctaacatagtgtcttgtcttttgacatcgtttaattgttttctctgagtgtttttgtgtttgtcttgtttgttttatgacttgttttgatggcttcgcatcaagtactagtagcgaatatggaggcatagtatgccactgttacgattgacggtgaagataacatgtatcaattgtttgatgcactggttgaggattctgagattgatgataggtggtgttttgtgggatgtttttcacgaatcgatgtatcgactttcaagcaatgcaacacaaaatggcattgcttcggcaaccaggtagaggagtttacatgaaggaat

SEQ ID NO: 136500 - DNA, 865 bp, Cannabis sativa
atattgttttactgtttgtaaaaaggagaagaatcaaactcctcgtttgattgaggtttgtattgcatttttttattttgccatattttaggttttatctcttttaggtatgattcttatgttttgatatatattatttcctagtttgttttaggtctgttattgagtttcatttgtactttgtattagatggttttaggtttctttccgtttctcaactccagaaccatttttctctttttaatggtttattttacttgttgttgattttaatttttatggttttgaatttatgtatgttgaatacttattgtagtgatttgttatttttataattttttataaatttcttaggtttcgcttatgattcattatttttttttttttttgttgatattcatgattatatttatacattgttgcagattttaattttgatgtgaaagttctactaagagtagtggagattgcttctctgcttggtcaggaaaaaaagtatattttatttatgttgttgcattttagttgttgatgtgtttcaatatagttatttttatctattttgattattgttttattgcacagtgattgtagtgtctttgttgctgcatttgctgagttctttatacatgaaaaagatgttccactagattttgatatcaaagcttatcgcacgaggcttgaaaaaaacattgatagtgagtatgagaagcctaacaagtctatgaagaatgttcaagggaagaacaagagtttagtgattggagactgaaatctatagcctgttgaatgttattatttattttaattgtttgtttttttaatgctagatgttaagatttggttattcatgttatagttctat

SEQ ID NO: 136501 - DNA, 765 bp, Cannabis sativa
  modified_base (43)..(52): a, c, t, g, unknown or other
ttttttaatttttttttctattgtaactctatttagttataannnnnnnnnnagaatataatttacttggtcccaagtgtatttttggatggaagttctactgtattaggattatattatatacatgttagttatttaaaatatataaaaagttcatttaaatatatatataaaattatgaataatttatcgtaataaaaataaaaattaaataaaatatatttttgatatgtgtatataaaaagaaaaaattatcttatatactatttttaacgttttttttttcttttaaatttatagtttgggttgcttagtaatttctatctgggttactgtgtagatttcggtttcaatttaagttcctccgttagttgatatatgagttttgattttctatatgaattttcggtaaaaatacaaaaaaaaaaaagatgctttaaaatataaaaataaaaaaaactcctaactaaaaatttaacttaagaggaagcacgtgttatttttaaataatataatatgctaaaaatttattaaaagttgatataaatttgtaatttttataatgttaaatataatttaatgtaaaatataataataacatatttaatcacaatagttaaagtgctaatataacttggggtctaatcctagctagaaggaagatcatttgtttttgattttttttttttttttgaattttttgttatatactagtggagaaaacacgtgctatgcacgtgcattatataattaaaatagaataaa

SEQ ID NO: 136502 - DNA, 1002 bp, Cannabis sativa
aatcatcaataaaagtgacaaagtactcataaccacctgtaggtttgacatttagtggtccacaaagatttgaatgcactatgcctagtgattccttggcacaatctccctttgcagagaaataatattttttcattttgacttctaggcaagattcacaaactggtaattcatttaaggtgacatttttcaatagaccaccttaggttaacctgtgaagtctatcatagcctatatcaccaagacgtaagtgccatagatatatttcatcttcattatcaatcttttgctttttgtagtttctaggtttaagtaccttaaagagttcgttaataagtgtaaatggttcatatggtctaagaacataaaccctttgttccatagatgcaacacagatttgaatatcatttcgagatatgatagaaccaaaactcaaaaaattcaatttatattgttacaattctaaacatgaaacaaaaatcaagattctactgaaatttggaataaacaaaatattgtctaaattcaaaattctgttctgaaacttgagtttggcttttcctctagctctaaccgatgccatttcgccattaccaactttaagtttcaactctctggattttaaataattccagttttcaagtaattgtaatgaacaacagacatggggtaaagaccgtttaactttaatttggaaattagcagataattagggtttaattatgaaacttgcattttagtttggaattatttattcacggagatttatttgaattaagaatgtattttatatgtcatatatggaattttataattttgcatattttgtgcctgacattattggaacgcgttgtttggctattacaaccacatcttagttatctatgttatcatcgatgtgattttagggacctgtaattcactgagctgttgttccactcaggttgggcggcacacctgaattcagaaacaaggtaagattagtataatgtcatccatatg

SEQ ID NO: 136503 - DNA, 1517 bp, Cannabis sativa
acagacaagtgtgtcccattcttcaacattctacgaggaaataagcaatttgagtggatggaggaatgcgaaaaagcttctcaagagctaaaaacgcaactcgcaaaacctcatgtgctctcaaaacctctggacggagaagaacttggaatacacgtggctgtcacgaaacatgttgtaagtgccgtactaatcagagaagaaaacaatatccaacacccggtctattacatcagtaaaagactcattgatgtagaagggtgctatccattgatagaaaaactcacttattgcctattcctagcaacgagaaagctaagaccctactttcaagctcatcctgttcgggtatacactaaccaaccattacgccaaatattgcaaaaaccggacgcctctggacggttgctcaattaggtggtggacttaggctagtatgagattatttttcaaccccgaacagcaattaagggtcaggccttggtagattttacagttgaatgtgcgggtaaagaagagagcatttcagaaagtaacctagagccattataaatgctttagttgagtattagtgaagacaatccgacttgaaagctacatgtggacgggtcaactatagatcgactatcggatgcaggaatcgcccttgtcacgcctggggggcaacacctgcacattgtagtcaaatttggattcaaagcttctaataatgaggtcgaatatgaagctttgatcaccggcctaaaactagcccgggagatgaaggccgagcacattgagatctacaacgactcacagctgttggtaaatcatgtatctgaagactacgaggctcgggaggaaaagatgatagcttatctgagcaaaatacacgatctactcgcacagttcaaaagctatgctctcaagcaaattccaagggaagaaaacacaactgctgatgcatcagctcgacttgctagcagcaatgtaaatggtaaagcaaatttgattcttgtccagtttctcaaagaacctagtatcaccggcatgaaagatgttgaagtgattgatacatccccgaacaggatgacgacaataacaacctacctcaacactggagaactcccagacaatagaaacgaagcttggaaaataaggagaaaggctgtgcgatacatcatagtagagggagttatgtatagtagaggattttccatgccattacttaggtgtgtcacacaagaagaagctgcacgacttttatcaaaagtacatgacgaattttgtggcaaccacgcagcccgacaaagtttatcaaagaaaattctagggcaaggttatttttggccgacaatgattgaagattccaaggccttcgttaataaatgtgataaatgacagagattttcaaagatacctcgggcatttcccaacaaacttgctcagatgtaaagtccctgacctttcgccatttggggaatcgacctgatcggaaaattacccaaaggcaaaggaggagtgcagtacgcagtggt

SEQ ID NO: 136504 - DNA, 856 bp, Cannabis sativa
agtctttgttagaagaccgatgaagaccacatgagcacaacatgaagtcgagctaacaacgttaaacaaagtaactttacgggagtttttcttacccattctttttattttgcattgattttatttgattgagctttaaggataatgcttatattaagtgtgtgggggggagattaactgtcgtgtctatctaatttttttcctttgttgtttagttatttatttattatttttagtttatttattattttaatttaattttattgagtgtgggttgaatgaaattatgttgacaataattgttcatgtttgatatgtgtttttactttgatggcttatgcatggtcttgggaaaaataattttgttgatgataaaatttttgattgtgtgatagttataattctaggaaaatgatagattctcataatttgtgtgcctaactcatgattaattactgctcaagtttgattgattttttaaaacttttgtacatcaattgaattattatatttgctaatgtttgaaaagatgaatgcatgcttgacttttgatttaaaatctcaaccactctagaacttgtttgataatcatttgaggtgaaattaataaattacacatagttttgagatatgacataggcaaatttttggaacgattgagcttttcaagcctactttatttgtgaattccctagttttacccaagttgagcctaaatgttgaaactttgttttttttttcttttaaccctatacactaacgtttgagcttaaaaataatccttattcatcgtttttcacactattatcccaatttttgcactctgatgtggcatctcacgatggtgacacgtgga

SEQ ID NO: 136505 - DNA, 710 bp, Cannabis sativa
aagagtggcaaacctaaaaatggctcttaattttttgtaacctttttttttttataaatttcatatttcatgtaattttcacaataataataagtataaaagagttaagttttaaaataagaacatttacttatttaatgctatgatttgaattatgggaaattatctcatatgctattttttaaccttttttttttctttctaaatttacggtttgggatgttctgatgatttttctagtggtttctatgtgagttgttatacgaattttgattatgatttaggttgctccgttaattgctataagaatttctatgtagaattccgtaaaaatgtaaaaaaaagaactattttaaagtgtaaaaatgagaccatatgaatatagttgagaaatacttttttttttctccactaatcaaatatacattcatattatattttattaaaatatacccacttttatgaatggcttgcctaatatactcactataacttatattaatttaaacggtctaataaagtcattatctataaaaataaatatatcttaaaaaaaaataaagttaaaaattaaaaagtatatataattattggaaaatttttatgtgagagcatcacttatgctttcactcatgagggtattttttaaacatttgatttttaatctaatggtaataatttgttgtagtttatttgattatcatgaggta

SEQ ID NO: 136506 - DNA, 897 bp, Cannabis sativa
atgcaaaataatcttaccataaaaaaaatattttgtcaaaaaaggactttacaatgttgttgttttaattattcaaaacttttggctacattacacgtataacgatagtatgtttatgaagtagtttaaaaagtgatacttagtttttacgtatatttttcataattttaagttattaatattaaaatttaagtgtgtgtatccaattaaaaaaatcgatccaatctatttagtaattggattggattaggattggatcgggtgatgattttccaaattcaattcctaattggattgaatctgatgaagaaaaaaaagttggattggatcggatgtccacccctaatggttggtattagagatatttaattaagtggagtgttatggtcaatatttcattacaatcttttagtcaattttcgtgcttaaaagtatatgtcagaatttcttttaatttatttatgacagtattcgttatagttataatatcatcactataaatttttttaaaaaaaaattataatagtttacagtaccaaagataggtttgaagttttttgaacacgcgtagtagacttgaatatttggaactatgttttcggtattgttaactattcagaattttttaaattttacaaggatgatattataaataaaacgatcatctctataaaagaaatttgataaaagatattccgacatatgatttcaagcgtaaaagttaactaaaatgttataatgaacactcatctttaattaataaaaaaaatcgtgtttcttccttgaaaatgaaatgtagaactttaagaactcaataagggctcctttgggacgttctattgtattgtattgtattggagtagattgtattatattgtattgtattgcattagtatt

SEQ ID NO: 136507 - DNA, 510 bp, Cannabis sativa
gactcaaggccaatgcgcattgaacaagaagctcaagactatttggacttttatcaagcagctcaagacaagcggaggacacagacccaatctaccacagacctaaaccttttggcttgggaaccaccaccagtgggagccctcaaactcaatacggatgttgcagtatctactcaccagaatagaacaggaggtggggctctagttcgtgatcacactggaaaagtacttgcagcaacagccttcaatcgaatgggacaaatgcaacctcaagtagcagaaggctgggttttgttggaaggtcttaaatggagccgtgacaatggactcaacattcaacatatagaagtggactgtaaaaacctcctcacggatttacaatcaactcatgaaaatcttttaagctattgaaccataatcaatgctattcgacggatgttatcttcgctccccactgtaacccttcaccacactcggcggcaagggaatacagcagctcataatttggca

SEQ ID NO: 136508 - DNA, 534 bp, Cannabis sativa
tatttaagtatccttaacatccttccacaggttggagtatggaaaacatcatcaacaacgaattcctccacctaatttttgaacactcacaccatcccctattgaataacttaagaccaatttcctagtgccccggtgtttgagtgctacttcagatgtcacactctttggtacttcttgttgttggtgtctagcttaagtatttattcccaattgaagaatcaacattactaaaaaaaaaaaaaaaaacagattcctaagtagaggcgaactgtcttccatgctaattattattatttttttttataggagttactttgatcataagagaagaatttgattgaagaagaagaaataaatctttatttacttgaaagcgtactaaatctctagttacatagtcattggattattggaataggaacaaaaatatcttctttggataaaatttgacaagttgaaagagactattattcgtcctccacgcatgactcggcttcagatccttcagggtcttcttgtaggtcctcttct

SEQ ID NO: 136509 - DNA, 972 bp, Cannabis sativa
aatagcattcgagaaaggtcatccctgaccttgcaacacctgcttcgagaactaatctataaccagtcgagaaaaatacaaaatccaaaagactcatatcgataagtattggcttcgagaacctatcgaaaagcattcgagaaaggtcatccctgaccttggaacatctacttcgagaagctttcgagaacttatcgataatcagttgagaaaaataatgtcattacatgacattgaggcagttgagacactatatagaactatcgacatatcattgatatcatatcgataaatattggcttcgagaacctatcgaaaacctttcgaataacatttgagaaaggtcatccttgactttgcaatacctgcttcgagaactaatcgataaccagtcaagaaaaatacaaaacccaaaagactcatatcgataaatattggcttcgagaacctatcaaaaatctattgaaaagcattcgagaaaggtcatccctgaccttggaacatctgcttcgagaagttttcgagaactaatcgataatcagtcgagaaaaatacaaaacccagactactctgaaataataaatctcgcgattttgacgaaaattctacaaacaacaccatagatctaccgaaatatgctatacttttacaattatttaacaaatgtttttaaaaaaactcttacccattaatccacaatgaaagagaggtcgaggaggggcggcacggtggttggaatgaggcgtgaaggatcgccggcgtccttcacggtggttgggctggttcgagttgctggccggacgtcttcaacggttgtaggcggcggatctagaaagaaaggaggagggctttattttttaaaataaaaaggaagaaaaccattaatggagatgagaaagaggagttagttgatggggtgggtggtgggggatgttaataaaaatggtattttttttttaggttttgaaaaaa

SEQ ID NO: 136510 - DNA, 805 bp, Cannabis sativa
atcaatctctgtttcagctcctgaaagcttgcttcacacttgtctgtctaaaaaaactgctgattctttttggtgagttcggctaggggtgtaaggatcttagaaaatccctctacgaaccaacggtaataaccagctagacccaagaaacttctaacttctataactatcttcgatctcgaacaatctttgacggattcaatcttccctggatcaaccttaatcccatctttattgacaatgtgtcagagaaaagacacctgagatagccaaaattcacacttcttcaatttggcatacagtttatgttgtcgtagccgctgtagaaccatctgaagatgtagctcgtgctactcttctgattgagagtacacaaggatatcatcgataaatataataacacagatattgaggaaatacttgaataccctattcatcaaatccataaaagctacgggagcgttggttagtccaaaagacataacaagaaattcacagtatccatacctagtgcaaaaagtagtctttcaaatattctcctctcggattctcaaatgatgatagcccaattggaggtcaatctttgagaagaccatcttcccctaaatttgattgaaaagatcatcaattctaggcaaaggatacttattcttgatagtcagtttatataattccagtagtcaatacacatgcgtaaggatctgtctttctttttaacaaacaatacaggagctgttgggaattcttttaccaggatcttagatctactcacaattatgtttattaacatcctaaataagaactt

SEQ ID NO: 136511 - DNA, 507 bp, Cannabis sativa
tggcaaatggagtctgtccggtcagccagtttcctttagcatcttcaagtcgtttctttaggatatctttgagtgtcttgttgactgcttcgacttgaccgtttgcttggtgatgtgccactgcagagaaactatttatgatcccatggtttgcacagaatcagtgaaggactgtctatcaaattgtttgccattgtccgagactatcttgtatggtaatccaaaatgacaaattttgtttttcacaatgaagtcttgccctttttttggacgtgatggttgctagtggctcagcttccgtccatttggtgaaataatcaactacaaccactgcgtactatactctgccttttcccttgagtaaccgtctgatcaggtccattccccaaatggagaaaggccaaggactttgcatctgagttagtttgttgggttgtgcacgagttatctttgaaaatctttggcacttatcacatttcttaacgtaggccttggaatcttcaatca

SEQ ID NO: 136512 - DNA, 680 bp, Cannabis sativa
aaaggtaacaaccacacacatgaagtgttactatatccctttttttttatttttttatttattttttattaacattttcggagccatattgacacacaaaaatagtcactatacttattcatttatttattttaatattttttttgatatagggttttatttttttatttatttattttaataattaatatacttatatatcagatttgttttattttaattttcatataaaaaaacttaaaaagtgtatatatatatttgcattaatttacagaaaaaaaaaataaaaaaaaaataaagtattgaacaaaaaatattcctttgaatcaatataatataagtatggttcaatacaattttttttactaaaatatttttagaacaatgggagtgggtattaacacttagatgaaaaagaaaaacccaaaaataggcatgaacacatctgtaaaaaaaaattagacacctaaaacaacaatcaaaatcagattacaatagtccaccgtaaacaacataaccccgatctccatcaaccagaaactcaaagccgctgtggaaggagagggattcgaagggtgtcaaattctagtgaagtaaaacggacgaccttacaaacccccaagcactggtcattcccctgcaaagaaatagatgaagaagagaagggaaagacttcagat

SEQ ID NO: 136513 - DNA, 784 bp, Cannabis sativa
tctttcaatatatactagtaaacagtcacttaaaaattcaatcttttcataaaaagtgtaatttttattatattcatagttgaattaataaacatattttaattagttttcaactaagtgactatggtgactagattaggaaaacagactaattaatattattaggaaagaaaaataaatattttgtaaaaaggaaacatataaatattttataaaaaatgaaaagaaattgtatttaatttagcatttaactttctgatgataaaaaaaaattaaaaatttgaaattttagtttgacttttttttatcaatgggggccaccatataataaataccaaaaaaaaaaagttcacataatataaatttgttaaaaaaattatgtaagtgtatattttctagggggccatggccactatagccttaagtgtacatctgcccttgattatcgcaaaaaattaaacttaaatatttatttacaactaaaagttaaatttaagtatttacactgcaaattactctttttataaaataccgtaaaaatatgtaaaaaaatctttatgtaaagatgtaatttttttttttttaaaaaaatactttatctaataaaggcccaatatcatagtaaaccaaacaagggcacggggtgtcacggccaaataaataaggacattttttgtatcatttttaaatttttttagactcgtttggaacgtcgtagtaggaagtattgtattatattgaattagattatatatatcatatttttatataatactatgttaaa

SEQ ID NO: 136514 - DNA, 641 bp, Cannabis sativa
aaacatctcattagttttattatatgttttattatatatttggataagaaaaagagtaagaaaagaagtgatgccaattatttgattatttgcattgattctagaaaaaaaaaaaacacaagagaattatcgttatgaaaaaaaagaatatgtattggaggagtactatatgagagacaagaggcataaataatgaattgttatggggtgaaaaaaaaatacttagtttaatttattttaaataattatacatattgcctattcatatgtaacttatttgaaacacaccaattaaattaatttaattggtgaaactaataatcacctcaaactaataatcactctaaaatataattatgttttgtttgatttataaatagcatatttgagttttacttcattttttcttttttgcaaattgatttatacttacttcgaaattaatatagtgaaattcattttttatttagtgtaccataaatttgattacataatatatatttgtatcacatgcacacgtgccttacatatcatatcttccgcattacaatactgttagaatatattttatcaggagctagatttactaataagtatgttttaaatattctaaatatgaatttctaaaacaataaaaataa

SEQ ID NO: 136515 - DNA, 628 bp, Cannabis sativa
ccaaaacacaatgtcatagcttggttggccacacttaatagattaaaaactcaggacagattgctgagatttggtattcaaacttctgctgtgtgttacttgtgtaatttgcaggtggaaacatgccaacatttattctttgaatgcccggttgcacaccattgtctgatagaagttaaaagatggctggggtggcatgcccaaaccagcaattttcagcaacttctaaggtggataggaagatctagattgtctaaattcaagaagggggtgttggctgctactttaatcgggctggtgtatagcctttggagaagccgaaatgctgtagtctagaaagatcaaaatgtcaacctggttcgaattgttgaagaagtgcagtggaccacaaaggctcggattgagagaattttgcccaaaaaaaattaagaacattgacaaagagtggttttttgcattatagaacttaaacacaatgttgttagggaaagattataccattgtatattgaggtatatagagttcgacccttattgggtgtgcatagtttgtaaaaaattcgtattatgcaatacaattcattgatttgtcaaaaaaaataaaattaaataaggtcaaataatttaaa

SEQ ID NO: 136516 - DNA, 1482 bp, Cannabis sativa
  modified_base (1091)..(1098): a, c, t, g, unknown or other
gctccccctcgccctgtgggaagtgccccaattagatcaatccccatatagcaaatgggtaaggcaaggtcaacatcctcaattttgtcggtggtactcaaggtatatgtgagaatctctgacacttatcacactttatgacaaactcatgggtgtccttgttgatagtttgtcagtaatatccttgtctaatgattcttgtttatagactttgccaacctgaatggtccccacaaaagccttcatgaatttctctgatgatctcgttcgcttctgtaggaagaacacaccgaagtagaggcattgaataacctctcctatacaatttgctttcaactattatgtagcgaggcactgaattcaagagttttcgtgcctcgtttttgtcagttggaagttgtccgccgagtagatagttgattataggaataatccatgtgggtgagctatttatcatctcgatgtcttcctcttcacatatacttggctcatttagcatttccactggaaccaagtttagttcatccaagtcgttctacgaggctaattttgcaaaggcatcagcattaaagttttgttctcttgggatttattcaattttaaaataatcaaacctttccaagttcttccggactctctctagagacttagccatttttaggcccttagcctggtattccccgagaacctaatttacgatcaattacgaatcactatgacatatgagattcttgaccttcaatgcttttgctatcttcaaacaagcgatcaaggcttcatattaagtctagttgtttgatccatcaaattgaaatatcagagcataatgaaacttaaagccttttggcaaaattaatattacccctacacccgagccctgctcgttggatgcaccatccgcgaataacctccaagtgtccgcgtctcgctgaacaagaggattttcctctagagttattccttctattaggaaatacgccaaagcttggcccgtggtggatgtctgagggtgataagttatgtcaaactgccccgttcaatcgaccattttatcagtcttccagatgcatctggttttgataaaacttgtnnnnnnnnttgatcagttaacactttaattggatgtgcctggaagtaaggccataacttgtgagatgcgtggattaggcataagacaagtttttaaagagggggataccttgattgtgtcccccgtaaccttttactgacataataaatatgttggcggtgctttccctcttcttgcactattgctgcactaatcacgtcttccgagatagctagatagaggagtaatgcatcttcagttactagtttcgccaaaaccggaggtgttgccaaatgccttttaatgctctgaaaggcttcctcgcattcctttgtccattcaaatttcttgttgcctcacagtacatgaaaaatggtagacacttatcagttgacttcgaaatgaatctgtta

SEQ ID NO: 136517 - DNA, 529 bp, Cannabis sativa
tgcattgaaaaacatagataaaatctaggattagttgaaatatactgattgttttatgttagtgcagacgggagtttattggattttgtgccctaactaaaatcctatttcaatgttatcttgaatttcattatcaatattagaatataattattttattacttgtttagtaccatgcttggttcacttgtttattttatgatcatatgcttgatgtataaattcttttaaatccttatcacattgctattcataattagtgtgttatctacacagtggaaaataatcaatattatgtgattaaactaattagtcctatgatttatcagtacacaagatttacattgatatgataatcaacaatttagtttactaacacttgtatattggaatgtcttttctaaggaattaaagcttgcataagatgcatggttatacttcggactggaccgatattcacagtgaaaaatatatcatcaacttactgaatatcttttctaagtaaaatcacttagttgatcttagatca

SEQ ID NO: 136518 - DNA, 562 bp, Cannabis sativa
tgattataaacagagaaggaaatttattaaagatagcaaaagcacgtaatgctgggattaaatgctgcccggtcagcctgttgtctgtaaaatgaaaaataattctaagttagaaggccgcttggccgatcatgatctcttagaaaaggcctaatggccgaataagatatataaaaaaagaaagataaaaagagaagtatttaaacaactggagtcctaggctcttggttcaggtcttctgggcctgtaggagctggaggatctgttgtctgagcgaaaggtacatcaacattctggccagaagtagaagtaatcgccttgggttcaccataagccacttgagaagcacagtacttgagatacatgtctttggcctcgcccaggtaatcaaaattttcttgagggctagctttccaaaagtcataaaaaatcttgagacccacacagaatgacaaacactaagcaaatttagcattcgcatcgtgagtcatcaaggaaatccctataacttggggatcagattacagagatatggcagcctgtccaaatcccacgatcagtg

SEQ ID NO: 136519 - DNA, 520 bp, Cannabis sativa
attataaaaaaataataattaattataatcaaatatcacaaaaaagataaataatcacattctatttcttataacgttctactaataataattgaaaaagaaagatatttcccttcaatacattgatttatatctttctaagtgagtatttactcatgaccaattatatatagttgtgtcttgagtcatcatataaaaaaaataaaaacgacgatgatgagctggaagaccctaatgcacaaaaaaaaagtattttaaaatattctctttatcaccacaaaacaaaaatttatagttttacaatttttttaattaaaaatgtacacaatcattttattattcctcatctgaattatatattttactaaatcaatagacaaagacaaatttaaatatttgattatgggataaattagttttatggattatgacctatcttttcatcattacaaattaagatacaaatttaacatccacataatttgttcaacatttcatctaaatatttcatattgaaaat

SEQ ID NO: 136520 - DNA, 748 bp, Cannabis sativa
  modified_base (166)..(172): a, c, t, g, unknown or other
  modified_base (721)..(721): a, c, t, g, unknown or other
cttaatgttcgatactgtaaattacattaaattttttgaattataatttactatacatacaatgtacacaattttgacatcccaaaaaagaaaaaaaaaatagtcgaaatttttatggttatgtacgttataattattattaacatcctgtaaaattttgagaaannnnnnntaatttataatataaaaaataaagttcaaatagtatagttcatacgcgtatgaaataaaagagtcatgtgtgcaacaagactgtttgaaatctatttttgacatattaaatttcaccaaatttttgaaaattttacaagatgtcttaaataactgcaatgtacacaaccataaaaaaattagactaaaaaatttgttaggatgttgaaatactccttttaggagtgtgcactataagtggtaaaaaataaataagatgcttctccgatccacccaaaagacaaaaaatggtgcacagatgtgcatcacctattgtttcggtatttagaaaagaaaaaaaaaatagtcaaattttttcatggtcatgtatgttattgttataattatttgagacatactgtaaaattttaaaaaatttagaataattaacaatataaaaagtagtgttaaaacaatttatttcacacacatataaaataaagagttatttgcggcaaaaccaacttaagtggccaggtttttgcaactaacccctaattctaaaattttngtggtaaaacctcctaaactcaagttc

SEQ ID NO: 136521 - DNA, 639 bp, Cannabis sativa
cattggtatcaatttctattgctaatttgttcattatactatatccatgtctaatcaaaatatgtgtgccatagagatattgtggtgtattgagtataatctcgagttcaaagaaaaaatgtttaaactgcatatatcaatagcttctttcacccctaagtattatagagatcttgtggagttatgaatagtctaaagtttaatagatataaaagatcgttgaactgcatatattacttcttaacttcttccacccctattagatcaaaagatctttttattaaacaaaatcttaataattgcttaagaattaacaattattcataaacattgagtttaaattctaagtgtttatgtgatattatctctttgcagagatgaatataccatagattttgtatcaataataaaacacaagcacatacaatcataataaacatataaatataattggtattggcatacacaagataaagaaaaatatgaagctcaattcataaatgcaattcataacttaaagggaaaactttattaatattctcaaaaaaataataatgattgtctgcataaatgtaaaatagggaataaaatcccaaaccaataattgaaactaaattgttcataaactaaaacaattaa

SEQ ID NO: 136522 - DNA, 522 bp, Cannabis sativa
ctgataattagatttgaattatgagaaataaaaatctaaatacaaaattacacaaaaaattcgaaattaattccatgaaaaagcttgaaaaaattggaaaaaattatatttggtgcaaattgcataccatccacgcgctcacaacaggggatctgggcgagatttcacgcacacggaggctgctagcagcattcccgcgcgtgcaaggcccccaaatcctgcccacctaaccgagaaaattcggacatcaggcttgtccgaaggcgcgtgcacatgagaaaaccaggcatccgcgcgcgcatggacgtgtcacacctcctaagatttttccgattttcaaagattcataactaattcagataaaatcaaaattaaattctgtaaaaaaaagaattgcttattttttccattcaatccaataaaaatatttccagaacgaaaatcaattattttacgtacaaaatttgcaaacatcaatcaatcatcaataaacacatagacaaagatgttggctagaattgg

SEQ ID NO: 136523 - DNA, 593 bp, Cannabis sativa
cgaattgcacaagtggagccgattgacatggctccttgagctccaataatggagccgaatggcacaatggagttgaattgcacaagtggagccgattggcatggctccataagctccaacaaaggagctaaatggcaagtggagccaattggcacatgaggacccaattggcatggtttcctaagttccgccaacaaagacaaatgaggtatttgttcaaaaagagacccaattggaacaattctcttttaaaaaaaaagtatatatataaaaagggaggtctggggatgtgtatatatgtttatgacatatatactcatcaattccacctattttcgcctactctacctttttgtctttactccctaaagcctaaatagccacaaacacattttcccctccatttcaaatttttttggatcaaactagggatttcaaatgttcatcactatcatcatcatgttctttatttttttcccgaaaagtatatccaaatcacaccaaatatataaatctctctcatttctaaaataaagagtggattaagataacccatagcctacattgctaagtttcattcatagattctaaaa

SEQ ID NO: 136524 - DNA, 680 bp, Cannabis sativa
ttatttaataatttacatgaaaaagtttattttttttatgttttatattcataaaaaattaattatatttatttacatttatatcattcatgttaaaaaaaatattttacttattaagtatttttttcaataatatagatttatcttaatttttttattacatttttcaaaaataatcaattgtatatcaattttatacatatttacaagttttttattattataaaatattaatgacacaaaatttcttgagaaaatttaatactaaaatctataaattacatttattattacataatatatatataacaatatattaaatatacagtatatacagtgtatatattgtactgtatatactgtatacacagtatatatactgtaactatatatactgtatacacagtatatacatgtatacacagtatacactgtgtataaattgacaatatgtacacattttccattcacaatacacagtatatatataaaatatataatatacaatatacagtatacacaaaacaacaattaaaattacactaaactaaaaattttcaaatataacacatacatatataatattttttacagaaattttttttatgagatatatacacaaatattgtaagaactaacctccaaatatttagagcaccaaccgatcccggcgttttact

SEQ ID NO: 136525 - DNA, 1361 bp, Cannabis sativa
tccacctcaatttggtccttgttgctactgttttttgatgcagtaatcctgaccttccttttcatagccatttcttcctcattgaaaaccacatccctgtcaatgatgtatttcttgtttgctggttctaagcaccatagcttgtaacccttcacaccatcaggatagcctaggaatatgcattttagagctctaggttgaagtcgtggtgagcataggcagtgcagccaaatacctttaggtgatcaagcttaggtacttgacctgtccacacttcttgtggtgttttaaacttcaatgggacaaatggacacttgttcaccaagtagcaggttgtctgaacagcttctccccaaaagggtctatccaaaccagcacccttagcatacaccttactctttcaataagagttctattcatcctttcagcaagaccattttgctgaggtgtatccctaattgttaagtgtctagctatcccatgttccttacataactcatcaaattgctttgagcaatactcccaaccattgtcagtccttagctttctaattttgcatcttgtttgattttcaatcaatcttttccaagtgacaaaagtattgaaaacctcatccttgctcttcaagagaaacactcatacttttcttaagaagtcatctatgatgctaatgaaatagcttgcaccaccaagattcttgattttggatagaccctagagattagagtgtatgtaggccaatttttctttggtagtgtgctgaccagtagtaaacttaaccatgcaacttttaccataaacacgttcttcacagaaactaagttagccactcaatccaccttgaaacaacccttgcttgtcaagtttagtgagacctctctcactaacatgaccaagtctcgaatgccataggtttatgctgtcatttttgacatcattgacagcaggtgaacagcagtaccaatcaagtagtgcagaccatttttgagtttacctctaacaaccactagtgaacctttagaaatgttaagagtgcatttgtctattgtaactgtgtatctatgattatcaaacataccaatagacaataagtttcttttgagatcaggcagataccatacattttgtacagatcgagttatgccatcatgcatcttatgtcaacattgccaataagaatcttgcatgccttgttgtttcctaaaagaactttaccaactgaattctcttcataacttgtgaacaaattatttggactcatgtgaaatgaacaaccagagtcaagaatccattctccttctgaatcttcacttgagacaactaagacatctgcaaaatcatagccacttgatgcaacatct

SEQ ID NO: 136526 - DNA, 959 bp, Cannabis sativa
ggtgacatggggtcaccctgcctaagtcctctcttcgcttcaaaaaacccatgtagggatccattaaagagaaaagaaaacctaggagtggtgatgcaagtcattatcagcttgatgaatgaatttgggaattgaaaggcatgtagcatttcttctaaaaaaaactccactccactgtatcatatgccttttatagatcaagtttaatcatacaatttttcttagcatttttcctcccataatgtcttattaaatcttggcaaaccatgatgttatgagcaatgaatcgcccttttacgaaccctccctgattttgagctataatatctggcagtataagcttcaatctgctacaaatcattttagttgcaaccttgtagagtacattacaataggctataggtctataatcacttacaacattcgggcatttactttttggcacaagattgattatcatcgaattcagctccttaagtaaatggccagagtgaagaaatgaagttactgcttcaaagacatcttgtttgattaagtcccaattgtcctggtagaacgagctgttgtacctgtctggccccggggcctttactgctggtatgccaaaaacagcatcttttaactcctccattgtgtaagcaacatttataatccaactatgttgttcagttacacacgctccttttctgattaagctgatgtttacaggcagtctgttcaccatctgagatcccataattcttggtagaaagctaagaaagctttagtgatgctctccggatcttcatgccttgttccattcgcatctgctatagataggatattattgtgctgccttctctctttgatgctcgcatgaaatagtgctgagttttcatcaccctctttgagccaatgtaatctagacttccacttgcactaatataaaacaaaaaactgcatttcaaataatctcaaca

SEQ ID NO: 136527 - DNA, 638 bp, Cannabis sativa
  modified_base (592)..(596): a, c, t, g, unknown or other
gtaaaataatttccaacaacatctcataaggagtcatccctattatactttggaagttgttgttgtaggagaactcaatagaaagccaagtacttactccgtgaaccctcaaagtccatgacacaggctcgtagtaaatcttctaatatctgcattgttctttctgactgcccatcagtctgaggatggaaagctgtactaaacttcagctttgtgcccatagctctttgaagacttacctagaattttgatgtaaactttggatctctgttagaaacaatggatttaggggctccatgaagacgaactatctccttcacatacagctcagtatactgatccattgtataggtaatctttacaggcagaaaatgagctgactttataaaacggtccacaatgacccatactgaatcaaacattcccgtggttctaggcaaaccaaccacgaaatccattgcaatatcctcccacttccactcaggaagggctaatggctgcaataaccatgccgacctctgatgttcagctttgatttgttggtaggtaaaacacttggacacatattctaccacatctcttttcatcccannnnnccaaaaatagggttttagatcctggtacattttggtggttcc

SEQ ID NO: 136528 - DNA, 954 bp, Cannabis sativa
  modified_base (43)..(57): a, c, t, g, unknown or other
atttgagataaggtgaatggagtttcatctcaaaaccaattgnnnnnnnnnnnnnnngctcattcatcttatatattctattatctttccacgcattagcaatgtaaaactctctaacacacacatatgataaatatctaaaaataaataaaacaatcaatttatattgtctagtcaatcatcaatatatgtaaaggacaagtataagacggtgacgtgacgttctaacatcagttcaaaataggtccatccattctctctataattctctaattttttattagttttataatatataaatggataaattaattaaaaaaattatatctatctaatttaaattttctcatttttatatataatttctattattaatttaaaatatctctaaaataaacattataatcctcagcttcaaagtttttttaaaacatataaacataaactaattaagatttttgtcccccgaactatgacatgtaccaaatcataccccatataaactttgaagattgttagaaatttctcctaaactattgagattgttggatttaaggactcttgtctaattttagtaagaaaagtctaacatagatgaaagttcagggggcatgattttgcacatgtcaaagttcgaggggtataatttagtagatatcaaagtccgaggagcatgatttagctcatggacaatcaccgaattagttaaattgaatgaaattggacaaaattccttataaagtcaataatctcaatagtttaggagaaatttttaattgccagaaaagttttggaagcatcatttagtacatgtcaaaattcagggaacaaaaatcctaatagttagcctataaacatattattaaagactaaaacattactaatcatatatataatttatagagcattgctattaggcactagtggtgcctagcacattctcgatatgtcgcg

SEQ ID NO: 136529 - DNA, 958 bp, Cannabis sativa
tttttttaaaaaaaaagagagaaatgctgaaagacactagtgctgcttaacaacctctacgtgtcaatatcgctattagtcaacaaaagtatcgggtctcatatagtttaatgtaataacttttaaacagtattgctagccaattgtaaaatgacacatctaaaaggtgttaagtaccactaatgtccaataacaatgctacaaaaaaagttataccaacttatttagctattacacattaaaatttttaaggaaaataataaaataaataaatacataaatacgttggtctaggcacatattaaaatttaattttagtttctatttctttgttaaaaaataattaattaattaaaactaaaataacgtaaccatctcaatcaccatttgtcacagcttcaccactaccaccatcaccattaatgccaccacccatcaccaacaccgccggccacctcaatcagaatttgggataagatgaatgaagttccatctcaaaactaattggcaatagaaggtgttgctcattcatcttatatatgacaatttatttctatgtgggactaactctaatgcactctcctcacgtttgggcctggaaagtatgggtataacgaacgacctttaaaagatcacaggatcgaacgtgacatttaaaagaatctcacaaagccaaatattgagaaatttgtgagtgtacacgtcgagaaatttgtagattttgaaataagtcaaagattccaatactagaaattgacacacattggccgaaaggtcccaaatagaagttaaatgggagacaacgaaagtatatctttttgaaccggtagcactttggctcataacggatcacaaacggctttttagaccggtagcacgttgggctcacaacgtatcacaagtggttctgataccatgttagaatttgggataaggtgaatggggttccatctcaaaa

SEQ ID NO: 136530 - DNA, 990 bp, Cannabis sativa
  modified_base (438)..(440): a, c, t, g, unknown or other
gtgtgggtgcggtttgggaaattggaaaacccgcatgtgcgggttggtttaaaaaaatggtcaaaaatcgcaccactcgcaccgcgaacacccctaaggtcagtcaagtccgttaggcacgacagataatgagagaattagagagaagaatattttttgagatttttgaaaagagtaaatgggaaaggtagtttgggttataaggataaaatagtatagtataattagggcttttttttttaaaaaaaaaataataatttagcattttttaagtatggattatgaaaattttctatttaaataaggtatttttaattgggtaaatatcattttggatcatgtgtttcaaaaaagttattaattggacaatctgttttgttaaatgacaaaatagacaatgtattttttaaaatggtacaaataggaccctgaactgannntttgtcaaaataaaatttaataataatctgatctaaatgtgttatgacaaaactgtttacattttctgtatttgtttgtgttaggaatttccttcaagttggttatattaaaaaaaagagttgtcgaaaattaagctcacgatcttatttttttcattttaaaaaattatggtctattttgtcatttaacaaaacagagaatccaatttataacttttgcaaaatacatggtccaaaatagtatttacattttttaactttatttactttaattgatgtagtcatctttacccagtttttctaatgtaataagaatttgattctattacaattccaattacaccaaattaaatatgtgatcaatttatttccttaatttatatttccacacatcatacacaatatccataacacattacatctttccaatccatccttatcacattccattcatttttcctaccaaaatatttgattggaggtaatagaataaaattgttgctataatttataaacactacgcaagtatacgcaatcaagtagtaaactc

SEQ ID NO: 136531 - DNA, 575 bp, Cannabis sativa
  modified_base (44)..(47): a, c, t, g, unknown or other
catggagaagcaaagagcacgcgcaagaagaattacgaggaaannnnaacgaatcatacaagttgctgccaagttttttgcccatgctccagaaaactaattccggaacaattgtacacatgcaaacatgagaagacaacagcttcaagtacttgtttgtggcactagatgctttaataaaaggatggaagaagtgcaaacccataatagctgttgatggaactttccttaaatcaacatatggagggacattgctctttgcttgtacacaagatgcaaatggacacatttttccccctgttgtggattcaaaaaataacaactcatgttaatggtttttcacaaaactaagggaaacatatgggatcagagaagagcagtgttgatctcaaacagacatgagagcataattaaggcagctgctcatgtatttcaaaaaataaagcatgactattgtgtataccacctcgataaaccattcttcgcagtagcaagagcacacagagagaggaaatttgaataccatatgagcaagcttaacagcttggacattcgtgttagaccatatttacaac

SEQ ID NO: 136532 - DNA, 765 bp, Cannabis sativa
  modified_base (440)..(453): a, c, t, g, unknown or other
  modified_base (572)..(578): a, c, t, g, unknown or other
agatgatgagaaagcaataataatgtacaataacaatattaacaataaacaataagatatttttgtattaacgacataaatgtaaagttttgctcaactaattacaataatagatttgggcctttagtattaaggacataacagcccaattttaagaactgaagcagcccaaacccaattcgtattcgacgctggcacatccaccagaattttggagctgaacgagtaagcacagaaccggcccacgtatcctaactaaaaaagttcaaacatacctgtctttttttagagaaatttacatgacatactaacttttgctatttttttaaaaaaatactgtcaggcggtatttttttacttttttactgtgttttttataagtttcatactgtagtatattgtgttaagttttcactggtgttctactggtgttttttagnnnnnnnnnnnnnnttttgagttgttctattttgtgttctactggtattttataaaaatactgtattttttaaaaaatttccttgtgacagtattttagtaaaaattaaactaaattccagtatttttgtaannnnnnnttttttttttttgaaataggaaagtacttatctctttagattttattttatacaaaatatttttatttttcattattattttgtttacagtcttagagcatctctaaggagcacaccaaatttagtgttatactatccctaaatttagtgtcaaaaaatattaccactctaaccataacaccaaaaa

SEQ ID NO: 136533 - DNA, 697 bp, Cannabis sativa
  modified_base (117)..(121): a, c, t, g, unknown or other
gagagagagagagagagaacgaaacctcccagcgagctttggtcgtcgtctccagcaaccgacctccgacccattgtctccgacccattgtctaagcagagaagaagaagaagaagnnnnngaagaagaagaagaagagagaagatggtggcttgacagagacagaacgagaagaagagaaggaatgggatagggttattagggtttttttttaaattatttttttaatttgtaaagaaaaataatttttttattttttatttttaaaataattattttttttattttttaaaattatttatttacgtggaccaataaaattgtgccacgtgtacactgtgtacacgtggacattctaccatggcagttaacagccaaaaatggatggaaagggctaattgctaacagaacttgggtttaggaggttttaccactaaaattttaaaattgagggttagttgcaaacacctgaccacttaaggaggttatgccacaaattaccttattatttaagaatgtgttgatttagtgggagttcgtatttgagatgttttatcaagctgacacatatttatggtttaattctgcagataaagtatggacttaagttttgagtactctgaatattttctttctattaaggttagaaagaactaataaggaactgatctcaattaaggagaaccagttagaaata

SEQ ID NO: 136534 - DNA, 1057 bp, Cannabis sativa
agctggtgcaacatctggtataggaggactttctggtgcagggggggtgggaggatagggaaggttgggaggcctccatcatcatctagatgagctaagttctccccagcaaaggccatcatatcctcaaaatcttcatgatcaccctcatctaaatcattctcctcatctccatcatctccatcatcttcatcatctccatcatcttcatcctcttctccatcatcttcctcagactcaaactcagatgatgatgatatcacgattgtctcaggaatagtatttcctggttgggggttgcactcacgagaatgaacttcctcatccatccactgtgttgctaaatctccccacttgacaaatttgttgtagaacatgtcattgggttcataatgaccatgtggattgacaacaacatctgccaaaattccacaatttgatggcaactccaccaaagtgcacttctccagtttttaagatggtggttctagattataccttacatcatcctcagacaaataccaatccaatgcgaatgttgaatctgacagtaccaaatatatactcgcctccctgtagcttctagacctcaaatcatccaacagcatatcgacttggtcttgttcaaccaccctgaatcccatattcaggtgtttccctttaggcttaaatagaaatccaaatggaaactgatatcccaattttagagccatttcttccaaatgcagcctgttgaacccttcaaacccacagtgatcaaaatatggaattcgaccaccctcatacatcttattgccacaacgggtataccagaaacccccatggaataatttcactatgaaattatccaagttcaaacctgcatggataacataaactagagttaatggtagatgtttactaggcaaaacctaacaactttacccaattctttgacaaaaccccctaaacatttagcccccacatcctacatacagacaaaaaaaaaaatatatgtgcaaatgttcctttttcagaagacaaaggcataagattccctaacagcctttgactactt

SEQ ID NO: 136535 - DNA, 1273 bp, Cannabis sativa
accatatcaatatatgccagccgaaatatacaaagaataataaaatatttttgtcaattaaatatgctaaaaatggaattaacaaattatttacatagcttgcaactcactgactcacataatcatgagtatgctaagagactaagggtcacattcccaacatgattcatctcataattgtcatactgtgatggtgtctttcatttgcttcgtccaacacttatggaaggatgcgagaagtattacttaaagtatacttaggcgctaacaaccctctttaaaataaaatatcttgagaagattacttgtattacaaaatttcaaaaaaaaaattataagagttttatcataattacaagttcaattaatatactatcataaaaatttaaaatagttaattaaaactcatctcaaaactgaaatgaatattataaaaattgaatcttgtgggatctttaactaacagtgaatatgaattgagcatgtcatctttagggttgtgggaagcaaagaaacaactgtctcgcgctgaactatttactttgtcaatatatatatattggtcaaacatataagcatccaacaagcttctttatcaggttgttgtctctctatcgaccagatgataactcgccctcaaggaaaatacctctctgtacaatcttaatatgccgacgagatacggtcttatgataataacatgtcttactacatgttacaattttgattgcacgtcatacaggccaaaatatgcaaattttaatcttaaaatataagggtagcaattcgatcattcagtacgtctaaaacatctcatagttatccaaagttatccaatttgaatgagatcaaccgtaatcgagattattcagatctttttttagtgaaaaactttttatctatttattatgcatgttttttttttttgacaaagagccataacttttcatttgaatattatttattaatgcatgtattattttattgttcactattataattcatgcaatacaaccgtcattatatatattaacaataaaaaaatataagactttccactatgataagtacaaccttaaaatttttatagtataattgttccagacattattgtttaaaataaaaattttaaattattaaattactttaaaagtcagattaataattattgcccctgattttgtccaaaatacgtggaccaaccggactgtgacacgtggactgaagaagcaagactttgagataattagactaagtctccttaatcaaaagg

SEQ ID NO: 136536 - DNA, 523 bp, Cannabis sativa
  modified_base (100)..(105): a, c, t, g, unknown or other
gtttctaagttctattattattaaggcgggtgatgaaacctagcgtatttaatagagtatttatttttattttgattctcagtacaatatatgcttatgnnnnnngcttcttaaaataatttttttcatctttaatatcacgtatgtttatagttaaaaattattaacgcttagttctacattttataaaaattatattctttaattttttgtatttacattaaattgtttcacatttaatacttagaagttataattttaaaagcaaaataaaatctatttttattagaaaatagttggtttaattactgattgaattatgagaatcaatataaacataaatatttttatatacacttatataaattctgaacccttaataatatcttcaaatatcactaaaattatctgttactgtcatttttactgttaaaaacactttattttattttgttaccaaaattctcgctatttttggaattaggttagagttttaatagcttagattaaataagtatttttt

SEQ ID NO: 136537 - DNA, 567 bp, Cannabis sativa
ttcacaaatcatttaaactatcacttgttcctgtaataagtttcctacttaccatgcaaattttttaaaaaaaaaattgctgttaaggtgaacatgctctaattaaattgtcagatctaataaaatagaagaaaaaagaaactcacatattgtttatttttagttcattttaaaggtatcatttatgttagagttctgaattttaatttttactttgaatccttaactttctgaaaatatatgttcaaaaactacaaacaactgagtaaaataagaccgacttcaaggtcagcgttctttttctttttgaaatggtaatgtgtttttgaagaatgatatctactatctaaatttaggttaatgggccgaagaagatataatttttttttttgaaaatttacacaaattattatttttggcaaaattttaggagaattactttttttttttaacttacgatttgggttgctccagtagtttttatacgggttgctatgtggattttgattgcgatttaagttactctattagttgctatgtgaattgttatgtagatttctgtaaaaa

SEQ ID NO: 136538 - DNA, 641 bp, Cannabis sativa
aattagaatattttttgaatttttgatgtggaacttttttcaccaattataaatatattatttactgacccttaattttcattatttataaaataattaagatttgactgtttacttttgattgtttatgatttaatatacgtttctaaaatttaatgatattttcatagaaagatttttttttctctctcttctcttttcattttagattcaatgggaaaatgaaaagaaaaactaaactagcttacaaatgatgacaatgacaatgtttgaagcgtcttaactttgtaagaggtttcatttttcataatttgatgattgactccaagatattgctaaggagatcatgtaaagaattggatgagtagagtgaattggctaattattatatattttttgaatgtatatgatatccacgaaggattcttttggatttgtttttttatatttcttaaaatttacattgaagtatgaacttactgcgagttccttgatgtctttccagaagttttaccgggattgcctcctacccaggagattgagtttgttattgagttggttccgggaccggatctagtatctaaagcaccgtatcgaatggctctagcagaattgaaagaattgaagatacaattacaaga

SEQ ID NO: 136539 - DNA, 576 bp, Cannabis sativa
tcgagccatttccttctcgatttcaagacatgtacttttggtgaggaggaagacactcatggcgtaagttgggagtgattgaaccaccgttttgagaagtatttctttaccagctcgagaaaggagtttaccatcccaactattaacccttgcaattactttattcttcagaaaacccaggactgcatttttgtttcgaccaacaatattcgggaggcccagatacaagcttccttcagatgcttcgggcatgacaagtctattgcaaatttgagtccgagtttcagcactagtatttggactgaaaaagatggttgacttgtggaaatttattttctgacctgacgcattctcaaagacttggaggagattagaaatccccacggctgcaccaggtgttgcttgacaaaacagataactgtcatcagcgaagagcatatgtgtaatggatggtgccccatgagccacacgacaaccttgaagaagctgctgggattcgaatttcttgatgagagcagagaagccttcagcacaaataataaagaggtaagtagataatggatctccctgacgaat

SEQ ID NO: 136540 - DNA, 704 bp, Cannabis sativa
gggttcaatgtgaagttgcaaaatgatatgttattcacattttggtatttgttatgcgaagtagcaaaaagagtatgttctgtatttgatatgttttgtatttaatatgctctcaaaatgcaaatttactaagtttgctaagtttcattgtctatttacatatggttaaagaaatgggagttgatatattttcaacattgtgtacaaataattgtgaagtatggattcaatctgaaatttaatctgttgtgaaaactaagtttaaacttcaatgagtacaaagatttggtaagtatggttcaaagtcaaatttaacatgttagagatatgtgaagttgtaaaatgatttcttgtcaattttgatatttttcgaaatctgagaattaacatgattttcttcaaataattatgaaatcacctttgttgtgaattctaatattatagtacaattcataaagttttggtataaaataatttcagtgaagtataaaaatgtataaaaattatatcattgccataactaaaaaatgattttcatcaaattagaatcgttcgataaaagaaattggaaatgatgtgttttcaacagtaattacaaatatttctgaagtatgggttcaatgtcaaacttaatatggtgtgagaactaaatttaaactttaatgagtacaaagatttgctaagtacggttcaatgtcaaagtt

SEQ ID NO: 136541 - DNA, 506 bp, Cannabis sativa
atatctatatatatctataaaggacaagtatgaggcagtgatgtagcggtctaagaatgctttaaaatcatctttcttttttcttcttaattctctcagttttttaattttttaataaatttataaacattaattgattaattaattaaaaaaaattaatgttatgcctatataaaactcatcattaataaaaatcatcattaatagatttataaacgttaattgattaattgatgtggcggtgattttttctccgaatattttgagtaatctatataaaactcatcattaataaaaatttccactactctcactccctaattcttaaaggtatgcctattcttattgataaatgtacaattaatttactattcttttaacgacttaatatatatatacatatttttgtatttgctacatcattcacaaccatctttcattgattgcaatttttttgacaaattctttgtattgtcatgctttttttttttttttttagttttttt

SEQ ID NO: 136542 - DNA, 609 bp, Cannabis sativa
  modified_base (306)..(310): a, c, t, g, unknown or other
attgtgtataaatttatatcaatcctgtattgttttctgttattaattattgtagtatcaatttcaaatctttattgttggtctaacttggtttgttatttttaacggacgtcgtcaatagaatttcatccgttagacaaacattatagtgttagatctcgacagataagtatttgtggatacaaaatctagttgactcatccctatgatgacaacttagactagtatttacaatatgaaacaatgaaaaagtttataaaataagaataacgtagactcttgcctaaacgggacatcgttggattnnnnntttaatcgaaattatcctttagttcttcttttagctttttcattaagaaattgcttagatagtataacattggacaagaagatttataaattatatgcttatgatgtcactctattttcttcaataagattagtggcgcatatgactatattcaagataatctatcccgtaatgatatacctccttgatcttataaacatctcctacttatatatgctcagtaaaggcaactcaaacttagagttagattagtagttgtggtccaagaaagaataattactcattgtatatttggtata

SEQ ID NO: 136543 - DNA, 669 bp, Cannabis sativa
aaccaaattgtgatggcatatgaactgagctattaattgcttggacaacaactaaagcatcagactcaacaaccactgtatcccaacccttgcgctttatccaacttagcgcctccttaatgccaatgacctcagctatttctgcagatacacaaccccatctactttcagaaatagcttcgaggagcttaccatgattgttgcgtgcaacacaaccaaaaccaaatttttggcgagcctcaaaagtcgcaccatcgacattcaccttgaccgtaaaaacaacaggtttatgccaacaattactctttgaaatgtaccctatagcaaataaagcattaggagactcaaacttaggaattttccattggcaaaggacatttttttgccgactttaccacttccaaagctgaccgagacttgctttgccattgcacttcgtttcgagtattccaaatactccaacataccatagcagcttcaacaaccagcacgtcacgacagtcagctagaagctcaaaaaacccgctgctgaactcggcatttgcactagaagccgactggtttggaactgaaagtgcccagcaggattgagaaaaagggtagtccaacaaaacatgaactattgtctccacatgcatattacacaaaggacacaagagatcaacatta

SEQ ID NO: 136544 - DNA, 605 bp, Cannabis sativa
ttattgttgctttaagccaagataagtggttattttaatctttgagtcaaaatggagcttaagagctcaagatggagctctaatggtgatttcatggtttaagttgtttgctatatttggatgcttgaaataagttcgttgggacatgaataggtatcctggaaagttttggaaggtttcgggtcaaattgagttaaggggctcgatttttgcgttcccagcacagaaccggtcgacaggttgtgggggaccatttagaaccggtcgaccggttggtacccagtatcgggcttctggttgggaaccggtctgccagtaagggctttttcccaaaccttagttttcctcgttattgcgtaatttagggtttttgcatcctatttatcgatagggttatccttagttttaattttaaatcctcgataagtgttttagtgtgtctctcattgagttttgaacgttatggtttaaggccctgtaaagcgtcgagctgtgtttcccctcaagctgaccagcacacttgagcacggaacgaggtaagatagcataataacgtatatatgaatgtatgcttgttttaactatttacactactaacactaatt

SEQ ID NO: 136545 - DNA, 606 bp, Cannabis sativa
taaaagattatatccacctaactcttaagatacctacggtataggtcatgtatttcttattttgtatctgctgggaataagtgtctgtatgaagctaacatagaaagacaagtgatccattcctagggatcatcccagaaaaacactataaataccccacaaacatactgaaaaaggggtccaggattctgggttcaaaagaatcaaagagagagaaattcaccaagaacattctctgtaataaatactctcactaataacacagactcatggactgaggctcattaattccccaaccacgtaaaaatctcatgcattaaacttcctacagcttttcttatatattatttaactggttgccaaaaacctcggttaacaatttataacaacatgtaattaataataattataattaatttaaataaggaataaatataaataaaaatggcaatgaatagaataataccaaaaaagtaattagaaaagaatacatataatactaaaacttttttattatcagaagccatgaataaaaatatacaagcacatatctcatgtaggagtttatacctccttctgtggtgttctctctaatgacgatctcaa

SEQ ID NO: 136546 - DNA, 1433 bp, Cannabis sativa
attaataattgagaattaataactaatttcataattaaaccctaattatctgtaattttcaaattaaagctaagcggtctttacaaaggaaccaccctttcaccgtctttgccatttcaaaatttttttgagcttttctgcgaaaaactccatcccagttttacgaagctttgcatgccctcaccgtcactcactttctttttgtgagtatattcagatcgattgttcgacctcaaggatcacgaagatcatcacgtcatttgctccatcctcatttgcagagccgttcatcacaccacaacccgatttcaaatagtaagtgtctcatcccttttttgtgttttttcttaaattcctgggtttgatcattatttttataatctacttttttgccattccatttggttttagtgattttggtttaaaattgtctgggtaattttttaagatttaggcaaagtgcagatttttaggtttctcatattcgtaagtttttggtttgataaactttcatccaggaattgggattgcccttttttgtttttgtaaaaatgtcccaatttgattcaaaagtttatcccccagaattcttagaaatcgagtgtcctagtgaacttgccatcccatacaaaccaagaacttcaaaatccaagtccaaattagaaataaatgatgcaaaaattagagaccatttaataaaaatgcaccatgatgatattgctagtcgtcatagacgcttcttgcatgaaataacagagggtaaacatcatttcttgcgagatgctacttggtctgaacctccaaatttatcatctattcctttagctaagcccttatttcagagtcacaattgctttttcaccaggtgacatggacttcgaaattatgacttccaagcctcgtaaatcaaagactccctaagaccccaatgttacctttgaggctaaacttatcgagtcgagagtacgagccatcggagactatgtaggtagcatcctaagtacttgtggcattgaccaaaaacaaaaatgtcaggtaagatttgtatcccctggtgagtttagctgttacccaccaaaacgacttactcgcgaggcacccgaggggaccaatggcaaggcgagtactagtggctcgtcgaggataggcgcttggagcctcgagcatatcagggctagagaaatccttcctctgtgagattattttaaggacttactcaactatctcggaattgtcccattccagttggttcctatttcctacagaatccttctaagcttaagggttctatacaaaattttaggatgggagtgccccactccactggagatagtctatttttactcagttaaggtagtccctgcaaggaagaatgttgcagggggcttttattatcttaggactcacataggcgtgttaggttttatgcccta

SEQ ID NO: 136547 - DNA, 808 bp, Cannabis sativa
  modified_base (683)..(687): a, c, t, g, unknown or other
cattttacatcacattgtctggaaatagttaaaacgtctcttattagaataaacccttttttgtaaaggaggggaatagtaatttattccttgaaaacatatagtaaaaagaagatttaatcagcaatatcgacagatccccgcgtagtcaaaagaaatatgaaaaaaagcctgtaaagtaccttcccttggtcgagttctcatacaacaacaactaccaggcaacaatcagaattgctccttatgaacttttatatggaagaaagtgcagatcacctattcactgggatgaagtgggtgaaagaaagtttttaggccccgaagttgttcagagaacaagtgacgcagttgatgaaattagagcgtgaatgctcgcggctcagagcaaatagaagagttatgcagatctaaagcgtcaggatattgatttccagatcagagatatggtatttctctgagtgtcacctatgaagggcattaaacgtttttgtaagaaaggaaaacttagcccaaggttcattggacccttcgagatccttgagaggacagggcaagtagcgtacaggttggctaagcccccagcgcttgcaactgtacatgacgtgttccacgttttgatgcttcggaagtatgtctcagactcgtcccatattctgagttatgaagcattggaatttcaaccnnnnntatgatacgaggaacaaccagtgcaagtactggatagaagagaaaaagtcttgagaaataagaaaattgcactgataaaggtattgtggaggaatagtaaagtagaagaggcaacctggga

SEQ ID NO: 136548 - DNA, 725 bp, Cannabis sativa
caggctgtgaagggccagatatcaacaatgtgagcatagtgaacttcctcttcattaccaaccaaggcggtaaattatacatcacaagcaaaaccggccaacaactatgcttactactaagggtggtatgtggattaattccatctgcagaaagaccaagacggatattcctaggttcattggcaaattcaggccccctagcatcgattgttttccaagtgggggagtcagttggatgtctcatcttaccatctagttttctatcggtggcatgccaggtcaaattttttgcatgattgacattttgaaagaatcgaaccaaacgaggtattgggggtaagtaccataataccattgcagggacactaatctttacctcatcagaattctttttcttttgccacctagactcaccgcacgtgggacacgatattgcatccacaaacctcttacggtatagaatgcaatctttaggacatgcatgtatcttttcatattgcatacctaaggaagacagtgtcttctttgcctcgtagaaagacaaaggcatcacattacctttaggtaataactctactaggaaagctagtaaatccgtaaaaattttatcgctccacccatgtttcgcttttatattgtataatctaacaagcgtagacaatttagtaaacctattacaattagggtaaataggtttctcagcatcctctacaaaattttaaaat

SEQ ID NO: 136549 - DNA, 593 bp, Cannabis sativa
attataatacaagctaatacaagttatttgttatgtattaaataatacgactcacattatattaacatttaatgttgtattaattaatacaatataatattttatccaaacataatgttatttgttatttaatacaaatggggtgttttaagaattttacttggtgggttttagttgagaagggttgagattaaaagaatcttaagctgaagcatttaaggagtttgagattactttaaaataaaacttaaactaagatctacttaatcacgtcttccactaaaatcatatcaaagataagtttagttttacattcttaatcccaaaaactttaaactctcgtaataaacccccaattaaagtttgactttttgtacctaaatatcgtggaaagcctcatagaaaaattcaatgttttaaattttatgtgagagatttattaggagataagttgtattgggcatcttttgagtaattaataagcatcaggttttctttgtatgagatgtttgtttcccaactttaactctttggtcattccttctaaatatgtctcctctccctgctttaatggagaacaccaactctaatac

SEQ ID NO: 136550 - DNA, 538 bp, Cannabis sativa
attagtaagtggggtaaatatgttaactaattaacactcactattttcatagtttatctagttattattatgttaatgacacttacaaattgagagaggaatctaagatcactgacttcaccaatttcaaaagcccttcaagccattaatacaactctgtatatttaccaacattgttacaatttgtaaataaaagtctcaactggacacacttcactaaatattctcaaatgtaattgtatttataacagaaataactaactctaattttcctatatattcccttgcctcttaaacctctctctctctcacacacacattcactctttcgttctttctttctttctttctttctgtcttgttgcaatggatttaggtgtagcatggaaccatgtctcgtcaaacatttacaacatattaatggataactcacaagaaattgaaaccgcacccgatttagaacaagaattctgctctctccttgaggctgcaccaacactttttcagagtaaacatcttaatgcatttgacaaacaat

SEQ ID NO: 136551 - DNA, 1199 bp, Cannabis sativa
  modified_base (768)..(768): a, c, t, g, unknown or other
attagtgagttctttaggagaagaaaaaatcccacatggtttaaaaacctttgaaaatatggtattataggctatataagggtgtttagtaagcattttaaatgttatataatgggtgattaatcaaatcaatctagcccatttagttttttttttttattaaaatatatatcattttttttatcttggttaaaattttaatatttaaaaaataaaatttctttaaaaatttaattaattaaaatattttattaaatttttcaataaaatattttttttaatattttcaaattagttaaaatattaatatttgaaaaataaaattctttttgagatttttaaaaatttcgtaaataatgatataacaactttttttaacataaaatttgaagttctcacaaaattataaaatttaaaaatatattaataaaaagtatgagaagtcaatttatcacttcgaaattagtacgagaagtaactttaaataatttgagtggggaatttacaaattttgtaagcataaaaaatcattcaactactatttatctatttttatcaattgctttaaaattatttaactaactttgctaacataactccagagtttttactttaaaatagtctcacatggtttaagagttatttttgtgatgcttgtgagatataaataaaatattttttattcacttctctttgatttgtccaaaaatgtataagtaaatttaattttgtccaattaattatattttttttaattattattttganttatcaaataaaatctatatatttgtctaatatatttatattggaggtaatatcctattattctaggatatcaatatcaatatttacatatactataaaggaaaccacaaaataagtctaggtggcatattagacttttttcattctatttgtgaattttttttatttttttctattttatttaaaaaataagtacacaaataaaactatgtataatacttcttcttcaaatatattagaactgaatgtctcatattgtttataaattatataggtattatttatataggttatgaatattgttcttattatgccatattaaattatcaacgagtattttttatgggtggttgattaatctcttaccctataaatttttatttattttttttacttttaatgtcttactctataagtttgttatttttcat

SEQ ID NO: 136552 - DNA, 937 bp, Cannabis sativa
tagccaatcgcaacaatcgcaacgcgacatgtagagagggtgttagtgttagacaccactagtgcctaatagcaatgctttaatattaaatataaaagcatagcatgtaacataaattttgtatcatgctatattgtgatccaaatttaaatcacttttgattatgtgagatatttgtataataatttgggacactattaaagttaaattttgacaaagtaaactatattttatatttgcatcactgctccaattaaaattaccacctaaacaactaacatgtcctataatatttgtctaattgacactgttatttatctgtgttgtattattttatttatttccttaattttttttttaattaagggaagtctttgtttccttgtattctctctcaaatgggaaacaacatttcttctcttttttttttttttttttgataaactttgtgcaaaaatatagagaacacaccgattattatttttagtggaagaaagttagacttttcatttttccgaaagtaattaaataaatttaaggggttttttttttcatttttacactttaaaatagtttttttttttatcatttttacggaattctacatagaaattcatattgtaactaacagagtaacctaaatcgcaaccaaaaatcatatagcaacatatatagaaaccactaaaaaaaccaccttaaaaatccaaccataaatttaaaaaaaaaaaaactaaaaatagtatataaagtaattttcctaaatttaatacatgaagaacttgtaaataatttaaatttgttatttcataaactttggtctataattatattcaaatcattttgcatttaagatattgctattagaatttgcaacctatcatctttgttctgcttaattcagtaatcatgctatgcttccgtttcgtatttatttttt

SEQ ID NO: 136553 - DNA, 562 bp, Cannabis sativa
atgtttactttgcatgtttactttttgaatgcaccttcgactttgttgtagaagatatgtaggaaaccctaagtttagaaactctgcgatttcctttgtcatgagttcatgcgatttcacagtccctaatatttgctttctgaactgcataatgcctatatttcatcttgcttattctaagcttcatgaaattttttgccgtaatttggaaaatttcaaacttcctgagttttgactttttgttgcacattcttattctttaatctgttgagtactcctggtcggcatatttgctagttttcacgttcgatattccgaccaaacactcatgttgtgtgttgtcttttgtagatgatcccaagtgagttttgggagagcaaacattgaattgaccaggactcgctccaactcttgcacgaggaccatcctcgtctctgttctagctgaccttcttcaagtgaaagacactctcccttgaatctttcgtccaaccatagaatgtgttggaaattattttaccaggatcttagatctactgacaagtatgttgtttaaacaccct

SEQ ID NO: 136554 - DNA, 1490 bp, Cannabis sativa
  modified_base (62)..(64): a, c, t, g, unknown or other
  modified_base (858)..(875): a, c, t, g, unknown or other
ttttaatttcgcggtgcgggtgcggtttgagaaatttgaaaaaccgcatgtgcgggttggtnnnaaaaaatagtcaaaaaccgcaccgcaaacactcctagttgggagcagggatgcaaactgggcggggacgaggacgcccctaatccgtcagaagaaaaaacatgtagtatataagtgtatgaaatttaaaacatcaagtatttatgctacaaatactctataattgaataggatttaacagaaatgtagtgacagaagtaacgaaaatgtaattaaaggtatttaatccgtcgaaaaaaaacatgtcgtatttaagtgtataaaattaaaaacgtgtatggtatttatactgcaatatctctttaaaaaaatatgatttttaatgtatttttatattatactcttattaattatttatttttctttattattttctaattatttttatataatttttttattattttaggatattagcagcaaaaccacttgtactttatattttttaacaattaaccacctaaatcgagtttttattggcaaaactactcaaatcttctttctgttagctatttacccttttcataaaaaaatctcatttaattgtcacggaactacctatgtatacacgtagcacgtttttagtgatccacgtaatattaataaaaaaatataatttaaataatttacaaattataattttttttctttttcttttctttctctttctctttcttctaccagaacccccaaaaaataaaaaactttttttctttttctttttatttactttctctctttcttctcgaaccagaaccccccaacccaacctatcatcatcatcatcttcttctnnnnnnnnnnnnnnnnnntcttcttcttcttcttccttctaacgatacaaattttgtgatcatgtgaaagtgaattttgggattaaccctatttataaaatctcgggaatgtgtgacttgaactaccgacgattgttcaggaacacctgggaatttggaatctccacatacttgagataccaggtaagacaataattaacacgtagagttaagcgcggtggcgctcatgtgtgatattacaattgtgattaaatgagaatttgggattagggttattaccctaaagtgagcggatatatgacctagggttattactctagtgattaaacgattttaagtgtaatgtcatgctatatatgttgaagtaaagaattatgcattcaagacataattaggttagactcggtaatcagaatcgagataaaccattctaaggtcttattgtatatagacgtgtgagcgtaacacgtgggtctatgctatatagacataattaggcgtgtgagcgtaacacgcaggtctatgtcaaatagacaatagatgcaatgacaacagtagttatatagcattttattattgtgtatattgatattttactgtcttgctgggcttggctcacgggtgctctactgt

SEQ ID NO: 136555 - DNA, 692 bp, Cannabis sativa
aaaaaaaaaaagttatctcaatatttttttaaatagtttcttttaatccaatatttttaaacttcgattagacctggatcgaatccaaacccggcccctgatttggacccagactcgaccctgacctagacctgacttaaataaaataaaaaaataaatatgaaaatgaactttacaaaacacacttttgttttctatttttaaaattaaaaaacaaaagcggttatagaacgcatttttatttttcaaaaataaattttttatttttatttttgtgataaaaaattaaaaaacaaaaaaaaattaccaaacgattccattatacgtatttttttaaaatatatatgtaaaatatacatagctacattctttattttaaaccaaaaaaaatattttttcgtctccatgccgcgctaattaaagaaatggtttttttttttcagttttaacaaaagaaaagtaacaatattacaaaaatacttcaagctagccaaatcaataaatatacaacccaaattaaaacattacacaaataccacttacacacaccttcaatccaggatctatgcttcttgggcaaccatcgtgcaatcacgtagcaacccaatgcaaccgaaacgaaaaattcaaccagaaagagaaccaccattaatttcggcgacttcacctgagaagacgattagaatcaatca

SEQ ID NO: 136556 - DNA, 575 bp, Cannabis sativa
  modified_base (38)..(61): a, c, t, g, unknown or other
  modified_base (131)..(138): a, c, t, g, unknown or other
attcaattttactgtttcaatgattgtttatgtactannnnnnnnnnnnnnnnnnnnnnnntctaccaaattatgcccctcgaacattgatatatgctgcatcatgcccactgaactttcatccatgttannnnnnnnttactaaaattagataaaagttcttaaatctaataatctcaatatttcagcgggaattttaatggccaaaaaagttcaggtaacatgatttggtacatgtaaaagttttgggagaaaaaatcataattagcctttaatcagaacaactttttctaaaagttgggttgtactaactttagcttttaactgtagtttttccataaattgtttaataagctgtttcttaactgcttaccaaacacttttttataacagcttttttgaaaagcagcttttagctttttaaaaaattatgccaaacgggccctgagtctcgtgtaagactctaaaaatctataatgacatacagtaaaagattttaaaaagggttgagatgcaaaatggccctaaatttggtaactaagttagtaaatgtccactttttaaaaaaattaaga

SEQ ID NO: 136557 - DNA, 716 bp, Cannabis sativa
cttattattcgaaagaaacgtggaggaagatttacgatgataccatcaatcttgctggtgatgaggatgattgggttctcccagaacacatcaagaatatgaaagttacggtacctatgaaaaagaagccagtaggtcgtccaaggaaaagcaacgctggaagaagacaggatgaccgtttcccgtctggtgataaaaaaaggatctgtacctcaaaactgcagccgctgtggcagttcaggccacaacagagcaacatgcaaagcccgtatttgaggcgtactatacttattagttttaataacatgttttgtatttcttattcaaaactgctttaaaataaggttgaggttgataattttttgttgtgaatcaaagacaacgttaaataattttacaaggggtgtttactaggggtacaacataaaatataaagttagtacaatgtaaaacatattttaatactatagtacttttttatcgctatgtactaggggtgtttataaaaactgaaaaactgaaaccgatcatcaaaccgaccagaccgtaaccgaatttttggttccacgtcatcaccgaatttggcggtcggtttggttttggcttttttgacatggcggttgggttcgatttttgaaataaaaaaatagtttaaccaaaaaactgtcaaaactgccaaaaaccgcctaaaaccgccaaaccgaaaactgccaaaa

SEQ ID NO: 136558 - DNA, 890 bp, Cannabis sativa
atacatatgggtgactattcaatgattacatttttaatgtaaccatgatagttacattttgttttacctttaatatcaggttactaataggtgatcattccttatatagaattaaattaattatcattaagtatatacttaaaaaattaatttattaatatatttaataaaaaaatttagtaaataatatatgtaaataattttatttttatatttaagtctctactataattttttaatattcaaaccatttgattgtaatatatttgcaataaaatttctttttttttctttttttttttacaaaaaatagactttcttctaaaattaatttgtcgagcgataaataactatttgttattgtgtgttttttcaaaatataaatttaataccttatgtttctaatcacttagtaccatttatttacaaattctacacatttggtaccatctctttgaatttaataaacctaaattcttggtataactaaattaccctgcatttaaatatttcatatgattttaaatatttttaaatattatatgactataaataaaaaattaaataaaattctattcgattcaacttctacttttattcatctgaaaaaaactttcatttttatcttcttgttctcttttttgttcctcctagttcacatatacaataccaatgctaatatattttatataaataaatacaagacttaaattaaacaaagagaatattgaatttacatcatctaaattataacaagtcacctccttataaataaatatattagctcaaaactataagactactatagctatatatattgtgttgcgaacacaatacatgaaccaaaaaaaaaaaaaagaagaaagaagaaaagaccaaccttcagattt

SEQ ID NO: 136559 - DNA, 589 bp, Cannabis sativa
tttaaattactattttcttacattaaattaataattgtatagataatttttttaaaaaatatataaatatgtgtaaattgaattgaatcagttacctttatatgtcatttaacattcaatttgtacaaatgcaaattttaaattttttaatccaatcttatctgtatagtgtggatatctgtactttgcggattagatattttatgaacacccatgactaaattatacatggcttgatgagattgatttagcttatttaaagtttatttattatttcttccccaaaaaaggtttatttattatttaaaaaattaatttaaactaattttaattctttaattgttgcaaaactaaattaaagttaaataatatttaattacataattagtttttaaatggaaatttgagcttctacacttaataatcttttttattttaataaaaaaccatactaaccacatcaaatttttgtctttccattatttattttttttgaaaataaagaaagcttcattaataaacttctttcatgattacatcacgaatatcaggagtaaaatcattactcctaaaaacacgatcagcgaca

SEQ ID NO: 136560 - DNA, 775 bp, Cannabis sativa
  modified_base (31)..(31): a, c, t, g, unknown or other
tagaaaatattacattgaaatagagttttanttagggcacaaagcccaacaccaacaacatcaatatggttggtaaagtccctatccgtacagacatctacacagggacttggggggcaaatgttatcccaatttttttcctagtgatgtggcatgcttacgtggacaaaattagtgcaatgtggcagtacaactcaccgaaaggaagaccaagtcagcaccctctcaaatgggcatcaagtgacaaaccagctccctctcggggtggtcggccctatggctgaccaaccttgtgactgaaccatggtcggccagcctagccaccacatgggcttggctggccaaggatgcactgcaggctttcctgaacacttctacacgtggacaacaatctatgggctgggaattgggtcctaaaagcctaatggctgaataatatctagaatcgatggcactttggtcttttgtaaaaatataacaaactatatatattaagggattggaaatgtaaacctagagtttgagacctcctatataaaggccttaaccctacctagaaacttaagtgacctttacgccaaaaacttgcttctaaactctaagtgtctgataaactctctctcttcctcacttcccctctctcacacgcctaccctagcacatcttaacacttgagttttgccagtattgattcataccttgtaatggttctatagtagatcccacctatagtgatctggatagtatttcccttggtataaatacaactaaaagg

SEQ ID NO: 136561 - DNA, 540 bp, Cannabis sativa
aatattcttttatttttaagtataatctgttaaaccaagaatgccgttagataggctcttttaatatataaagatatatgaaaataggacttctgtttgctccctagaaataattgaatcttaatatttgatgaaaatagataatataacctaaatacttttcgaaaaaaactccttggaattgccttaggttgacaaaatgtcaatctgggagatgggccaacaccaagtgtcaacctgggcgctagtcccttcttttggccaccaagttggtttgtttcttcccctaaagtacttttttctcatttttgatgaagacggagaagatgcacgagtcaaatttttggtctaatgcttagaagtggcccagtttggaaaattgtcaacttgggcgctgggtgctctgggtgctcaaaaatgaatgttctctgaatctaattcagatgtctctaatatgttcgtggtatgtctagctcatgtcccaaagtaaagtttgacccatttgcactaagacagtctcacactacaaaaaatcttact

SEQ ID NO: 136562 - DNA, 752 bp, Cannabis sativa
  modified_base (439)..(442): a, c, t, g, unknown or other
tcattgaaattgcagaactagagaacgagagagaagcgagaaaagaggaaaaaagtgtttttaaaaatttttaaaatcgttcaaaatctgtttttaaaaatttacataaatttgattttaaattagaaaaacaaaaaataaaatattttaccgaacgtacttttattttaaattactaaatatttgattaaaaaaacaaaaaatcatttttaaaatgattaccgaacagcccctaaaattaaatatactctcaatattaaaaataacaataaaaaataataatgttacaaattatatatcaatatttacatatatttaaattaatttaaaattgatgttcaattaactaaaaacaaacaatattaatatttataaatattaatttcagaaaaatttatttatatatattaaattaatctaaaataaataatattaatannnntatatatttataaaactaatcctactaacaccattaaatttaaatggaatattgttatattttaaaatattctgtttaactaataaaaactgttaaatatagctgtattttatatataaaactattaatttttctgtacatatatcatatgaagattattattttatccaaatattgatgatgtatatatatattcaaataatttattgataggtaatggaattgtaacaccctaactaacataggcgtgttatcgtgattttaaacgtactgtgcaactcgttgctaatcagcgaggttattgaaaatc

SEQ ID NO: 136563 - DNA, 884 bp, Cannabis sativa
attaaaactttctttaattacttataaatactaaaatcataacatatatatttaactgggatcccgttacaaaatatttacaaatgtttcatagtgtatactacaaagattgtcgcctagcgactatacaaaatatgtccaactgtcccaaagaccgtacgctctaggcctaaccaccccgacatgtaaaatcttcatccgctcgctctcacggcctcaacctttcccttgcccttacctacacatgcaaacaatatctgtgagttgacagactcagtaagaaaaacataaacaataacataactataacctggattataatcaggtgccctacacccaaccataacactatccccgtgtctgacacgatactaagtcaagcatgttcacacgacagtactattgaccataatatcagcctatactcagtacgctagtcctactctagtcgtaccgatgtgatactgtcaatagtacttaagctaatatacatttatcgatatccaatataatactaaatatattgatatcgctattataatgtaatctaacagacttaactaacatgtactctaaatacgtaaacacatatgcaatcattatactaagcttacatcatttccaaattcaggtgtgccagccaacctgagtgcaacaggctctcgatgatttacaggcccctaagttaaattattcgtaaaactaatgagtgacacgctaaataactttttggggacttaaacttgaaactaaaagtttccctatcgaaggataacgtggcgataccctaaatatcgcaaaaaaagggaaaaactaggcttccctaaaatgccccaaccggtagactagttccccaactagaattccagttttatggggtttcc

SEQ ID NO: 136564 - DNA, 656 bp, Cannabis sativa
cacactcaattatccttcttacaatcatgtaattactgagattacatcgctgaaattaaatcaaaattacaattattgagcatattctggttaacataatacaaatttactcaaagcttcaagtaaacccatttaattatttataaaaagcatgatttagtacccaaaagctataaagaatttttctcccaaccagctgttcctttttgtcttctttgttcttcacctacttttatgggtttagaactaaatcagtgagacatttctacaaacatttagagtgaattaactattatattaaataaaggaattaatttgatgaatctaacaaaatttcagtgaaaaacactgtaaattgagagaaaatgaagtgtacaccgtaaatgtgagagaatcttggtagaagtcctctccaaatccaatattttcgatgaagaagatgacattgctctttacaaatctcctttctgatatcaaatcacccaaatgaaatacaaaattaaagaaaaaaaaatgaaattaatgtagacccaataaacaatatatatgaaatttgagtacataagttgtaccagataaaaaagataacaaataatataagggtcatagctacataaattatagaatctcacaaaaatttaattggtgcatttaac

SEQ ID NO: 136565 - DNA, 1121 bp, Cannabis sativa
tttctatttattggtatttgtgtgtcaaaatggattacccacaccccgaacctccttcctctcactttttacatgcctttgcaaatgaactacatcatgtgaagatgtctcctagaaaaagcatcaagtcacatataatggtgtttaacatgaaaatcctaaaagcaaaaatgctgggaatttctttgtcaaaacaacagcatgttcaattcttactcaatagtcttccacctgagtataatgcatttgttgtatcttatgatcaacaattttaactcatccgacatagctaggccagatgcaaaattgcatgcttacgagcgaactttgcctgcaaggaggcctccctctagatttgttgacaagaaaaggaagatagtaattgagtatgatgcttctgacattgctgcaaatattgaaacaatggatagtcgtactcttcaatgttcatattgtgaaaagaagggacatcaggaagaacgatgtcctagacttttagacaattcaaacgaaggtaatgcttttgtttttgaatcatgtgttttagaaaatgacaaatctttttggattgttgattctggatctactaaccatgtttgttcttcattgtagctgcttgaaacatgggattatttaaatctatgggagttaaaactcaaagttggaaatggcaaattagtatcggtccaagctaagggaaaagctcgcctcaagtttcaaaagaaatttttagttttagacaatgttttgtttattctaaattttaatagaaacttgattagtgtttcatgtttacagacacaattttatcaattgaatttttcgagttctatttacactatttctcgtaatgcacttcaattatgtgttgcttacatggaacaagggctttatgttttgagaccggaaatacaaattgcgcttaataacgaacttctcaatgttgctaaacctagaaaccataaaagaaaagagatcgataataatgatgaaacatatctatcgcatttacgacgagatcatataggctatgacagacttcacaggttaaccaaagatggtccattgaaaaatgtcgtcttgggtgaattaccagtttgtgaatcttgcctagaaggaaa

SEQ ID NO: 136566 - DNA, 535 bp, Cannabis sativa
  modified_base (379)..(379): a, c, t, g, unknown or other
tgtgaaaatacccgctttgttcgaaattgacatttagaggcagttttttgataaaaaccataggtataaaaattaattaaacttatgccgtcggttggaggttgaggagttttaagcctatttattacacatatggcgtcggttattatcgaaataaccgacgccataggtgggcacgtgtcaatagactgtgaacgctgccgaataaaaggaagaaggagaggtggctggtgaggcgtatgttccacgaccacacgctcgtgacggtgaggatgagggtcaaccacaaacatatgttgaggagtttatttccctcaacgagccagctctcctgtacaatttcgatgaccatgcgacccttgatcagcaagtatatctntgctttgacaacatcgacaacattgtggcccgagcgtatttgtacgaacatgttcgtaaaatcactgttcactgcacggactacgatgattcacatgctcggattctgatttcagaaatgctgcaagaggacgctgaaatcccaatcccaattgaa

SEQ ID NO: 136567 - DNA, 826 bp, Cannabis sativa
tataatatttacaaagaatttggggtcaacaccaatctccgaccctaaccctaacctgggacccgagacccgaaccctaacctgggacccgagacccgaacccgtacccagacttggacccagaccctggactcggacgtggaccccagacccagacccaaagccgaaccccagacccagactcggacctagacctcgaacccgaacccggaccccagacctagaccccggactcagactcgaacccaaattcggaccctgacttggactcggacccagacctgggactcgggactcggactcggatccaggactcgggacctagacccgaacttgggacccggacctgggacccgaactcgggacccagacccggacctgaacccgaacaagaacccgaacccaaacccgaacctggacaagaacctgaacctggactcggacccggaccggaccgagacccgaacccagactcagacctaggacccaagacctggacccagaaacagacccgaactcagaccccaaccccgaccctgacccgaacccagacccaaactctaaccccgaccccaactcgagacccagaccccgacttgggaccccaactcgaacctaaacctaggacccggaacttgggaccgaacccgtagttgttgttggggtcgagtgtattgaaaatatattataactttacacaatcaaataatacaagtcaataccaaatattgtattataataaatatgggctttttcatttttacacttcaaaacaattttctatgcatttttacgaaattctacatagaaactcttattgcaacta

SEQ ID NO: 136568 - DNA, 764 bp, Cannabis sativa
taattggattggatcggatgatgattttccaaatccaattactaattggattggatcggataaggaaaaaaaggttggattggatcggatgcccacccctattgcacgataagttctttgccaaatgttggtgtcttgtggaatattgttttctggaaattatatttaggggtgtttggtatgcggcttgggtttgggggagtagagttgagaggagtttagattacggtaatgtggaactcattcaagatttcaagattaccgtcaaataaagctaaattgtgggactcacctggaaaacacaaaccccccgagtcattaaaaatagatttaccaaacatgggtttggtgggagtagagttaagaggagtttagattaaggtaatgtggaactcattcaaggtttcaagattacctttcaaataaagctaaattgtgggactcacctggaaaacacaaaccccccaagtcattaaaaatagatttaccaaacatgggttatcaaatggattgcatttgatataacctttcccaagttattaaacccccataacaaacaccccttaatggttcaattgaacttatccattgtcccttatgttgtgtataaaggttcggacaactcaatcaacaatgagaagcaatagtgcacaagtattatgctttgatatttcttttttttgaaaagagaaaagacccatttgtctagggtccttcccattatttattaataagcctcacttatggcggaggaaaaccttggt

SEQ ID NO: 136569 - DNA, 562 bp, Cannabis sativa
tctttcacatatcttttctgggcattattgctttcccctgcgatatgtggccctcccaaaataaccaggatatcatctccttcaacaggaagaggttgtaacccctggctgtttgtgttattgggcagactgggctggttgtatccatggccctttcttttcacgtactgtttaaaattgccccgggcgatgagactttctatctcatctttcaattggcaacacttgtcggtcgtatgcccaatatccttatggaatttacaatacttgttaggatctcttttgctcctctcattcctcatgggctcgggcttgccgaaagcaacctttgctcatgtgcgaggtaaatattctcgcgagtttcattaagctcagtataaatagtatacactggcacgtacttatcgtgcttcttctgtttctttttatccttcgatggttccttagaaccgtccttcctcttcgaaccagaagcccctgagttgtcaattctcgtggaaacagtgttaggttttatgccctaaataaaactctttacaatctgattacttatcaatataag

SEQ ID NO: 136570 - DNA, 813 bp, Cannabis sativa
cggtgtcccaaggtctcaacgatccttttttctttgttctacaggttgtcagtgcccgcgatcctttcattccgatcattgtagattttggcctctacaatttgacgcccaccgtggggccctgacaaactgaatagctactcttgtatctaagatgagggaaaccaatgaaagcctcagagcggtacaagaagagaataaagtattctgataagagaatgctctgctgaaatcaaaggtggagatactggagtccgttcaacgtagtacgacggagtctcagtcaaggtttcgtgttccaatttcatccatgcaatcccttgattccactccgactacaaacgtaggccaacgtccagcggtcatgggaacaccacaaaaccaaacaacacaccaacattcaaccacaacgaccattggagcagatggatcggtaccaggggatctactctaacacatggaccctctttggtaggtgacgagactatgatcgacgcccaggtcacatcagttccagacggaagtgttcccgcaccaagcactcaagaaggacaactcaagacctctaacccaatcattctaagtattttgatatctaatgttcctattgttccatcttcaggtcaagccgtcgcaatgacacctgaggagatgatcgaacaaatggtagcaaggaagcttgaaggcatggaggctatgattcatagaatcctaggagtccctgcacctatcaaaaagagcttaccaagtagcttcacggactctccattcgtggatgctatagctcttgtggagatgccaaaaaagtttgtc

SEQ ID NO: 136571 - DNA, 694 bp, Cannabis sativa
gctttgcaagcaagtctcgacttgagatgaatgaagctcataaaattttgcaagctcttactaatgattccccataggtaatgatatttatataatcggttcgataatttaattgaactatttttgagtttaattatatgattgaaaagttgatgaaatgtgttcccaaaacatttttgtactggaagataaatcaaactttatttttctgtgatgtattttgccacattaattatgatattttcattatgatatatgatattttgtgtgtgtatatatatagctacttatattataaattataatatctttgcatgcacgtgactgtaactgtagcaacaccatagaggcatatatattatataaagcgactataataagcttcgcctcttttttctcttttgaaaaagaaaattatcttttgtttttcatttactaactttaatataatatataaatctatctatttatatatacattttaaaaattgataatcaaataattaagctactgatctaaatactcagtcatcagtttaatgggtaaaactttggtctaattcataagatatatatgaatagaattagagtattttttgtaactttatttggttgattatatttgttggattaaaatcctcaatatgggctcatatgtatattagtgtattgctatttgaagtttggcccaaaat

SEQ ID NO: 136572 - DNA, 774 bp, Cannabis sativa
tctacaataactaagcattaatcagtgagataaataatatgtagaatagttaaagtttagctcacttgatataagctcaatttgtaatttttttctttataatttaaagattaaactattttagctcatttattgggagggagtttgagcttctttactttatctttcaaaatatatcaccaaaactttattttttattttaactcaaacttttacattaccatacatcagtgttgtaaaatacatcacctaaaaattattattttttcttttttgcaagttttaatatattttattcatttcaaacacataatattaatattacacatatccccatataaaaagtaaattaaaatcccaaagaattaataaaatatgtttagagcaataaatattattttataaatgtagagcatgaatcgtaaatttttaaagaagctttaaaatagagaaagagagtttagatcatttgatgtagcgtgtttttagtttaattctttaaatatttttagagaatctcactttaaagcttgatctctcagatcatcactctcaatgtcagctttaagaagctcagttgtcatcacctttccaccacacgccttgtctaagttcttaaacttagacatagttagctaagctctaatgaactgagccacatgggggtcatatataagaatattttaatttaggaaataattttctatttaaggaaataaaataaataattaattttctgataaatgaatgttttatattcattgaatctggaca

SEQ ID NO: 136573 - DNA, 505 bp, Cannabis sativa
  modified_base (376)..(377): a, c, t, g, unknown or other
aataaattgttggtacgatgccaacaaatgtatagaactttccatagactgaataagtatctttcctgcaacattaacattcagtctcactggtagagttagagacttcagattggtttttagtcttctctaaaagcactgccccacctctagagtaatcaacatctcatcagtagactttgtagcactaaggcaagtctagaaacctgatttggtgtagtctaagagtttaaaataccacccttatcgactaacatgtagttcttctttttgattttaagatttacttaatttttttccaatgttcctttcatggattaatctaatacctactcattactccaactcaacagcaggtatctggtctaatgcatannaaagcatatctgagacctctccttgttgattcgaaggaattctttccttggccgttatattttctagaatagatggcatttttccttagataaataaataaaatctatgtctagaagtcgagaagctt

SEQ ID NO: 136574 - DNA, 878 bp, Cannabis sativa
  modified_base (64)..(68): a, c, t, g, unknown or other
  modified_base (505)..(507): a, c, t, g, unknown or other
caaatatccatgctgtgaatgctgtgaaattattattatgtgctaactttgatatgaaggaccnnnnngaagctgatgtaatccttggtattaagattactagatttgaaaagggaatttctttggatcaatctcattacattgagaagattctcaagaaatataattactttgactgcaaacttgcttgcacaccctatgatccaagtgtaaagttatttaataacatgacagtgtgagacaatcagactatgcgagcattattggcagacttcgatatgccactgattgtacgagacccgacattgcctatgtcgtgggattattgtgcaggtttactagtaggcctagtatagagcattggcatgctattgagagggtaatgagataccttaaaagaaccatgaaccttagattacactatcaaaggtttacaactgtccttgaaggatacagtgatgcagactggaacactttgtcagatgactccaaagcaacaagtggnnntatttttagcatagctggtggagctgtttcttggaagtcaaagaaacagactattttagcacaatccaccatggagtctgaaatgatagcagtagcctctgctagtgaagaaggaggatggcttagaagcctgctagctgagatccctgtatggaaaaaaccgataccagctgtgttgatccattgtgatagtaccacggctattgcaaaattccaaatctgttattacaatggtaagaaacgacaaatctgtcgtaagcacacaactgttagagagttcctctcaacaagagctgttagagtggatcatgtacgcactgatgacaatttagcagatcctttgacgaaaggactagctagagagaaagtct

SEQ ID NO: 136575 - DNA, 681 bp, Cannabis sativa
  modified_base (600)..(610): a, c, t, g, unknown or other
ggcttctagtagtacattgtatcaggaggtggaagaacaatatgcgaatatttcacttgagggagaggatgatggggagttggggattgattttcttgtccctaatgatcaatctttgaatgctgagttatgtattgtgggccggttcttgactgcaagagccactgactttgaagctatgcaccatgttatagcctctttgtggcagccaggcaagggggtttatgctaaggagattgacaccaaccgttgtctatttcaattttttcatgaaattaatttagaaagggtggtagagggaagcccttgaacgtttaatagagttcagattgtttttcacaggctaagaaggggagatgatccgaaaagggtagtgctaaacaatctcgatatctgggtgcaaatccatagtctccaaccggggtttaagtctgcgagtgttgtggagaatttgggtaattttgttggtacgtatgttaaggttgatcctaagaatttttagaatgtgtgtgtaaggccctaatgctaacgcacgctacactgctttttcaattatagtgcagtcttcgctaatgaaagaattttctcgaaaaacgtgtnnnnnnnnnnnttttatattaattattaaactttgaaatataataaaatatttacatatatcgggatctcgtttttaaactt

SEQ ID NO: 136576 - DNA, 581 bp, Cannabis sativa
ccctcatttaaaggatgggcccagagggtgaaaaaaccgtctttaaacttgtcccccttcttggggaaagaaacaagatcgtaaaaatacaaaatttcggccgagctaggcaaagcccagcctttggcaacgtaaaaaataaacaagcctgagagcaggcggtaagcttgttgacttaaatgataaggcgcaaggtcgacaaaaataagaaaattgataaagtagtcttgaagagggagcatggccccggacataaggtgggtttggctccaagctccgaaccccccaagttgtgattgggcgtctcttcgtctcgaggcaagcggtgaaagacctcagacgtagatggcttgatatctgtcgcggtcacaatcttctcaagctgatgagtacagaccaaggtagaatggagctcatccacttcccagccattggcacgagaagtataattctcttgggcaaccggtcctttcatgacctcctccaaagtagccagggtgttcgcccccttcttggaaggtttagtcccggagacaggagcagacatttttctgtaaaaagaagaaatccagcagttaggc

SEQ ID NO: 136577 - DNA, 532 bp, Cannabis sativa
tcataagtaattttttattgtgactaaaagtcaaatttagtcacaaaaatttatgttgtaactaaaaagttatcactataaaagtagttttttaatgaatacataaattaataaatttattagttttaatctgaactttaaagttaaattacacgagaaacacatcaaatttagagtttaagtttctaagtgtatagttcgattaaaaaagataaaaagaaattcctttttggtatttgagcattccaatttgctaaaagaaattagtaaagtgattgtgatagtatcactgagaaaatagagactagattaatattctatttcattgaaaataaatgaaacataatataggtatgcatacatatcatatcatgcacacgtataccattatcagtattattattcattacttgtttatacgattgactttattagtaatatttcatatatatttataaatatatataaacgtcaatcaatagataattaaattacgtagttttactttggagggccaacgcaagctccagta

SEQ ID NO: 136578 - DNA, 1036 bp, Cannabis sativa
  modified_base (27)..(33): a, c, t, g, unknown or other
  modified_base (119)..(119): a, c, t, g, unknown or other
actaatcagattgtaaagagttttatnnnnnnnataaaacccaacaaaaatatcatttccaaatttaaaaattcaaactaattttaacatatggaagttttatttgaattattttatcnaattaaattaaatatctaataagataaatgatatgaaataaccaactagatatttttcatatcattttttaatcttataatttaataaaattaaaataatgaaataaaccaattttaaaatagatttggttaagcaattattgttttaataataaagtaataaataaatgataatttttaaaattatatgtcaaattatctcataagcttttttactttttttacagaaatatctaagttatttaaatatataaaatattatttataaatttctaataagtaaaatgatgtaatattgtcataaatattatttatgaaacttataatttataaataataaaatatatcataaaataactaatttatgaatttgaaaatattatggttagaatatctataaaaatatctaagttaattttaaatttattattatataatttatcatataagataattttaataccatattttaatgaaaaagataattatatcttttaatttaaaatatatcaaatattaatataaattttaagatctcaacaaaattttaaaatctaaccataattcaaaatataaaataaccatttattagatttaaacttcaaaatattatttgggaatttcagttcaactttttgacatatgcatttcataaatcttaaaattgaagtcagtacattagttttatgcgaattaaattggatttttggttgaattttagttttgtagtagtttttttgcattttttttttatgaattcgaaacaatctatgttttgattgattccggtcgtcttctcaggtgaagtctctgaaattaatggtggttttttttctggttgggttttgtttcggttgtgttgagttgtgttgtgaaaattatattgctttataattgcgcaagtgtacacaatcaca

SEQ ID NO: 136579 - DNA, 1214 bp, Cannabis sativa
atataatcaaattcagatgtctccagaagatgcagagaaaacggcgtttcgaaccccgttcggaaacttctactacactgtcatgccatttggtttgaaaaacactggggccacctatcaaagagctatgacggcaatattccatgatatgatacatgagaacgtagaagtgtatgttgatgatatcgtcgtcaaatcccaaaataaatttaatcacattcgcgatctcgagagagcattccaaaggtgtgaaagatacaaacttaaaatgaatcctcttaaatgtacctttggtgtgagcgcaggaaaattcttagggtttgttgttcacaaaaagggtataagcatagatgaagacaaaactaaagctatattagccatgggagcaccacagtcagcaaaagaactaaaaagcttccttggaaaagtatcatacttacgacgttttataccagctttggcggaactcacaaatccactacaggccataatgcggaagggtgtatcattttattggggagaaagacagcaaaattcatttgacaggattaaaagtgtgttgtcttctcctcaggttatgatgtcaccagtacaaggagtaccattgctattgtatttagctgttaccgaaacatctatcgggacactgttagcacaagaagtcgaagggaaagaaaagcccgtgtattatcttagccgaaaactgaaaggcgccgagacaaattacccctatgttgaaaaacaatgatgttttttggctgctttggtatacaccgcccagcgacgattattgcgacattacttagtagcacataaagtaatagtgatgaccaaggcagatcccataagatttatgttaaacaaacctataccttctagtagaatagcccggtggatactaatgcttagcgagtttgatatcactgtcatgtatccaaaggcacagaaaagtcaggccttatgatctattggcatatttacctgataatgatgaaaacttactcatggatgaaatccctggggagttacctgaggctatgatttgcaatgagaaaacacaagaatggtgggcaataacatttgatgggtcgtcaaccactaaaggaggaggtgcaggaatagtattaactgatcctatgggtaagaatcatattcaagcttataagttatcgtttgactgtactaacaatgaagctgagtatgaggcacttatt

SEQ ID NO: 136580 - DNA, 1519 bp, Cannabis sativa
tattattattattatatttaatataagtttatagtataataaggtggaagttagctcaccattgtattaaatgaagaactcttatttactaagaataccaaaaacggtaatgaaaattttttaaattataaaaaaataataataaattgatctttaagaatacaacaaaaataaaagaaataactttattaccttttcataatatgctatttgcatacagcattatcaagtcatataacatccttcagctctttaggccctaaaagtaacatacgtatttaaaaattaaaaaaaataaagagaaactaattttattatacaaaatgtatatagattaaagtaaagtgatacatttgtatagattagaacaaagtggttttttctagaaaaagaatggtagcaatactatttgaggcatctctatcaatactttttctttcctcttttccttattgtatatacttacctccttgaagaccaaatcaaccaacttcacagaattaaaaccaaaaccaaaaactgaataaaggcgatgcgaagaaaggggaagatagagagagaatgagctaaacaaacctgatatcaaaatgatcttcaacctgagttctttcaattcaacaaagaaaaacacacatgcaatacaacttaccacacccctgttattggatagttgaaaggtattatctcattaaaggttatagataaataaataatcaatatatgttatttttgtaaatagactatgaaaagtccaaacatttgtcattggataattgacatgtgttatcttagttataagtaaatgttatacccgaaattcgactatcgtttcaaaggaagacacagagaatatggatcaatgcatgaaacggtaattatatttgcaaatagaataactcattaaatgtagaagtgacagagtatatttacaacttgctgactataaggtcttacgcgagataaaggtatacaaactgttacctcatacattagcgagaaaccatatgttaatgcatgcgcatggcgaggcatcaatctcgttaagcatgtgtagacgtaagtgagatataatgattgtgaagacacttagcgtataatatacagtatacaaactaagtataacagaggggtaaacccaagcaagtgatagcgagatgtccatctcaccataggaagacatgcacatggtactttcactaattagctccaaacatctttcaatgagattcacaattccgtcgagtcagttcttttaaatagaagcttacattcaaatgatgtaagattgatggagttcaccttgacgccgagaactacgattgtcagatggagcattatgtcttcagcacaagagcggtgaggtttacattatcaatctcagatagataagggaaaagcttctactcgctattaaggtcattggtactgggttcttatcgagacatcctagaacgttatgatttaaaacgtgtttaatacacgattatcttgacctagtaaaagcgaattaatcacagct

SEQ ID NO: 136581 - DNA, 739 bp, Cannabis sativa
tgatgaaatagaagaaagaagagatcaagccaatgtaaagctgtaagcctaccaagaaaaggttacaaggcactttaacaaacaagtcaaggacaagaaattcttcataggagacctggtgtaatgccctaacaataggaatgccataaattgcgactaaaatatatactaatcttgctaaaccaggatttagtagatctaagagctgaatttaaactttaaaacaagtacaaaataaaaataataacttgtaattattaaactttaacataaaatcaaaagagtacattctatcctgggatcccgataaaactttttcaaaatattacaagttatcagtacatgctaacctaagcagtataagttgggattacactttttccccctggtacacccaacccccatggtctagcttggcttgaacatgtacaatacaccgcaaaagccctcgacttcatggctgatcaacaacagatttaccctttccagcataatagagcacccatgaaccaagacccagcaaaatagtataaacaacaatatgaatattaatttaaatcacttaatattaatgccactgatctattgtctatttgatatagacctacatattacgctcacacgtctatttacaataatgccttagaatgatttatctcggttttgattaccaagtcaagcctaattatgccttgagcgcataattctttatttcaacatatacaacatattattgcat

SEQ ID NO: 136582 - DNA, 973 bp, Cannabis sativa
  modified_base (165)..(184): a, c, t, g, unknown or other
tattaatggaccatattatgtggtccattatattaaatacaaaacaattactacaaaaacaactacttttagtgataattttttaatcacaatataaattttttgtgactaaatgtaactgttagtcacaacaaagaattatctgtgactaaaatatagtatttnnnnnnnnnnnnnnnnnnnnttagttttagtcacaacaagtactaaaatcacatttagtcacaacaaattgtaatttttgttactaatacttttaaccatggaatttttagtcacaacataagaatgttcatttataattagttacaacttttttacttttagttacaaattttattgtgactaaaagtaagatttttcgtagtgaatataaggtaacaatacttagattcatgatttttgtggaaagttccatcaatatatatagttgggattatttataaaatacacacaaaaaaaaaaaaagacaaaattcaattgcataaacttttaaatatttttatgatttttaagattttatttacagaaaatacgatctattaatatttttcatattatttttatatcgtacttttataattttgttattatttgtatattatttttatattgtttgaatattattttcttgttattttatgtgattttttttattgtttttatattattttatagaatacaataaaatatataaaaaaaaaaaaaaaaaacaaacgtaaaactgtaatttttttactggtacatactttatataaagattccctatatagtttctattaaatctattaatacacacaccaataaatactactatagtttttattttccataaaataattttagttttcactagattatgatcgtttcaaagttttattttctattttttttattcttttttgtgtgtgaaaaatcctccgaaatataaaatttattgcaaatgtgttattttaattgtattttattttat

SEQ ID NO: 136583 - DNA, 538 bp, Cannabis sativa
aactcatgcatatcaatctaagtacttttttttatatgaattataattgctaccatattaacattatattgcattaataatttattacatttgaaatgctacttatacacaataatttttaatattatttaattaacaattaacgaaatataattattaaatgtgcatttcagatgccgactctacaccaatcagttgatgacatcactccaaccacagttggatggaaaataaaaatgacagttctacaaaaatttccaccacgaacaagcatgagttcaccagtccgatatcagaagctgtatttatctgatccaaaggtaaatttattcctctttttttcaaataatattagtttgcacatttgcttagacaagttttaatttaaatagttatctaatacaaaatctaattgcatgtcttatattgataaacttcacacaggggacgagagtagatgcagtaattttcgcagaagatattgaagctttggaggacactttgcatgagttacacacctaccacatcagtgatgccc

SEQ ID NO: 136584 - DNA, 931 bp, Cannabis sativa
aaattaattggtaaatggagaattttaaaattagatgaggacaattgggtcaagtgaaaaattcattaaaccaaaattgtaacttcccttaaaagctaaaatcccaaagccaggtgggccaacttttcttaaaagttataaatttcacttaaatttttgaaaaagctattttttaaattttaccaaacacatattaaatcgtaactttttccaaaagtgattttagctttttaaaaagcttccccaaacagggtttgagttattattaacactacatccattctcttttctttgtcttgtaacaaatgtttcattgataattatccttaaatattaaagtcacgtgtacaaataaattgttatatgtatgatgaataagttactcttctaattgatttttgagatagaatctcatttatcttatcctaaattctaacatggtatcagagtcaaactaaactctaatgaatattcgatttaaaaagagtctcttgtgataaattgtgagcccaaaatgaccgttttaacctccatttgagacctttcgaccaatgtgtactaatttttagtattagggtctttgacctgtttcaaaacccccaaatttcgcgacgtgtacacccataaattttctaatatttggccttgtgtgattcttttaaatatcacgtttggctctgtggtcttttaaaggtcattcgttataccacacttttcaggcccaaacgtgaggagagtgtattaaaattagtcccacattgttatgtgtggaaataaattatcatatataagatgagtgggctactttttcattgccaattaattttgagataaaacctcattcatcttatttcaaattttaatattaattattctaatttgtttagagaagcctgttacgaaaattataaacactacgcaagtatacgca

SEQ ID NO: 136585 - DNA, 1153 bp, Cannabis sativa
taaactaagcggtctttacaatggcaataccttaaataacacaaaaatcggaagaactagggttcccaaattttccccaaccggtagaccgattcccccaaccggaattctgattttgggaaaaattcctttaagccaaccgatagaccggttcctacaggcctccatgaaccagaattccggtttagtgcaggaatttttcaaaaattcacaactcatgcaattcaaccccaaatcaaacccaactctccagacatgctatttagaccataatgaacatattccaagtgacaaaacaaccctacacacacagaatcaaaatccaccatgtgagctccaagtttgagcttcaaagcttaaagcttggctaacaccacaaccagccactacaaccaactaaaatcaacctaaaacaacatatgtaacatccagaaaccaaactcgaacataaacgatgatcacagcagcaaaaacatcattttaccattaaaatccaaagttttgagttcaaagctttacacttggttaaatccaactaactaacaacaaaaccagttttaattcactcaattaaacatatttaagctttagaaacaacaataactaaacacagcaacgacaacaagtaaaatctcaaaagcatgcaaaactccatttccttaaaacccaagaaatcaagaacaaattgtaagaggcttaccaagagcttgagatcactagaatcttgttaaaatcagcctgagaaaaacacaaagaatccccaaccctagctactctaggccgaaagagagaaagagagagtttgagagtgaaaatgcaagatttgcctaacttttctaatttttcataaaaatgagaaaatgagtgttttccttaatttaatacattactttagccaaaccaagctaaaaaagtcagatttaaaactaaatattaaaccttcactagagacaaaacttaaaaggcaaaaagaccaaaatgcccttgcccatactaaagagtcacacaaatcacttagggtattttggggaaactctatattcccgacataccccgacattcccaatgtctaacaatactgtcccgctatactaaaatactaagatgtgattctaccgagccatacgctgcgttccatgctgccgggcaccga

SEQ ID NO: 136586 - DNA, 1725 bp, Cannabis sativa
  modified_base (47)..(66): a, c, t, g, unknown or other
tgatttggatgtgttcatgttagtttatgtgttatttgatgaatgtnnnnnnnnnnnnnnnnnnnntccatgaaaataattttatttttattctaagaataaattattttgattccttgtgaaaaattaagcaatttttatttttacggaactcaattcctataaaaaaaatgaaggagatatggccgtttgaagtttcaggtgcatatggtgtcgtcgctcgataccacacgcacacaggcgcacgtaggcattcggacaaggtgcttgtctgtgcgtgtctgaagcctgccctgttgtctaaacacccacctgagctagcacccagcagggcacacaaaggctgcaagcagcctcctgcgcgtgcgaatgaggttgcacatagcctgtgtgtgcacagcaagggtgctttgcacccaaaatccgattttttgggatttttcacccaatttcaaattttttcaattttcataccctaatttcaaaataaaatattatttttaacatatttaaacttaaatatcaattttacaaattaataatatttaattttaattgtttattattaatttttgatattttgagttttaaatttagaaattggttattttattttttaaattattgtaagatttaaaaaaatttgttaatttctttaatacttaaatattatttaattataaggttagatattttaatattgaatatattttaaattaaatgatagtattatccttttaatttgaaatattatattaaaatgatcttatatgataaattaaataattaataaatttaaatttaacctagatattttttataaatattctaaccataatattttcaaattcaaaaataaattagtttgtgaaatatttaattgtttataaatcataagttagaaaaatgatatttatatcattttactaatcagaaatttataaatgatattttaaatatttaaataacctagatatttttgtaaaaatttgaaaaatacttaatttgagatattttgacatataatttggataattaaaataataattgtctaaccatatttatttcgaaattggtttattttattattttaattttattaaattataatattagaaaatgatattcaaaatatttatttggttattttcaaatcatttattttattagatatttaatttaacttgataagaataatttaaataaatctagatattttaaaattagtttcaatttgttaaattttgaaaagatatttaaggttgtttttgcaaccctaaattttcaaaatatttagttagttaaaatgacattttaattatattaatattttatttcacatattgttacatggacatttttgttatgtttaattatgttgaccttgcttttagccaacgacaacgagtagaatttaataagcgataagtgatttatagcaatcgatatataataaaataatgtaaagatacaggaattttatagaggttcagccccgagcaattcggtaatagcctaatcatcgttatttgtattgacttaagatcaaggagaaaggctccttttcttatagctcttacaacagtatctcggaatgtataattcttagataatatattttgggtataatctcagctcaactgttttcgaccccttgtcctgttgggttttatgccctaaataaaactcattttcatataatcaaatttacttattaatatagat

SEQ ID NO: 136587 - DNA, 916 bp, Cannabis sativa
ttgaagctgactaataagattggcttaacacttacatcgtgggaacacggtagtgcagttgagtgggaggactaatcatagatatggaatctatagtttttataatcacatagaagtaaaaaaataatttttttagagcttggctaaacgagtttaaatggtggagtactcatttcagtaattatattagattactagaatatcatttacaactacctaagtatttttaaataaaatacattgacgggtaaaacggaaatttctccctactcgattaaatcatccataaaggatcattgattatttagattaaaataatagataatttatagtgtatttatacttggtatagagtgttttatgtaatgaagagtgcaatgcataatctatagtggagtcaggaggaattatttagatagagaatttactcggtaaattctagaactacttattaaaagcttgattatataggcccatggtctccacagtacataagataatattgtcttgtagactcaaataattgattttgtaaatcgattagaattctaaataagactatatcttatttatgagtttcactaaacaaggataattttgagaagaaaaagaaattttaggatttgtttattaattaagtgactgtaaaaggtctaataaataaataagttaaatgacaattttatttgataattgattataattattaaatagataaaattgatacttataaagttagaatgaaaaatgttatttttgaaaagaaagataagttttaataaaatgataaaattaaacccatgggcctacctatgtgttttaaccacaagagtttaaataaggaataattacataaggcattattttttgtaatatatttacatttttacgtttaaaaatatttatatatatatat

SEQ ID NO: 136588 - DNA, 639 bp, Cannabis sativa
  modified_base (613)..(613): a, c, t, g, unknown or other
gaaaacagagtagccttaatttcctcgcgggagggccttctaatgagctcagcctggtcttctaaagagagtctatcttggattaagtcgctacgattcatctcaatactagtttccaccccggtgaagattcctcggaaaaagtccatgaattcattacctatttcctgtctcttgttgatccacaaattatttttattgagaatgcactcaatggcatttcttctccctctgatagaggcagagaggaaaaagaacttactacatttgtcgccttctttcagccaagagaccctggccctttgtttccagtataggtccttccgaacacgggcctcgttaagcgaacttcacaactttctttcagtctcccactctctagagcccactgggagcttttgaaaaatatccagtctcctttccagatcacgaatcaaaaagtcaattttaccgaattgtgatctgttccagtgtaagagtgcgactcgtgtagccccaattttcttgaagatccgagccggcgcccaggggtagctaacagacttccaagccgagtccaccactaaacggctcctttcatccctagtccaggctgttgggttttatgccctanataaaactctttacaatctgattagt

SEQ ID NO: 136589 - DNA, 647 bp, Cannabis sativa
  modified_base (166)..(167): a, c, t, g, unknown or other
aaagggagcaacacagaataagccttcattgcattcctagctgcagcattcattttggcagtcctcaaggaattataaagaaacaaaatcccctcattcaagtctagacgaccaaaaatccaatggctttccttcctaagatttatgatgaataacacatgatcgnnttcataccaaggcttagaacacggaattcgcaaacctcagatgtaatgcgctattgggtgggcagcatgtatgtgcgacatcttagttttcattgccttagctttgttgaacttgtggtacatcgctagaatggaatcatcgaaaagacaatcagttatcgcaaaattcaataaaacagtagaagaatatttaccttttttcctaaggtaataaaatatagagttcatatgctgaaacaaaaacaatacagaaacacaaatcaaaaggttaaacaactatttaaaaacttgaatacagtagctaaacttaaaaacattgataaaacaacttaaaaccaactatcataaattataatagaaaatagaaactttaccgagccattgataaacatatcacaggtagccaaatgataaaaccaggttttatcctcaacataatcaacacctaatctaaaccctggggaaaatttcttcgcacca

SEQ ID NO: 136590 - DNA, 662 bp, Cannabis sativa
agtttcttgaatttcttttattctatttaaatcttcaaaattatcgatttaccgaatagaatcataagtataatttagttgtaattaatccaattctctgtggttcgacctcacttgcgtgagtttactacttgattgcgtgcacttgcatattgttttacaattttcgtagtaatcctcgacttggaaaccgaagcagcaatgtttgacctgtggaagaattagaagagatcgagatcattcaagatatcccggccagaaagctaaagatcggaaaaggtttgttgctcaaagtaaaatcatcattgataaaatttctgagagcaaacctagatattttttcctggtcacatgcggatatggtcagaattgatccttctatcattttgcacgttcggaatattgattctaattttcagctagttcaacataagcgaaggctattggacaaagagcgagcactagccctaaaagaagaagtagaaaagctatgcaacaatgatttcataattgaagctttctacctagcttgggttgcaaaccccgtactggtagccaagccgatcaaaaaatggcgagtgtgtattgatttcacatacctcaacaaagcatgacctaaagactattttccacttccaagaattgatcagctcgtggatgca

SEQ ID NO: 136591 - DNA, 556 bp, Cannabis sativa
tcaattcatttataccatttttttcttctctttctctcccatttttttcctttttttttcttctttttaaagctactctctttcttttttctctctgtcttacttttctctcttcactcaaatttcaaaaaataatttctggtcacttcattactcgaacgagcctaataaaaatatcattataatttacacttcaatgtggacattttaagatgtggaaagtataaatttttttcgttatttttgtttaaaaaaaattatttagagactaatatagtgattagttagtgttttataatttttttaaattttagttaacattcattttaaaaaaaaatttaattgaattatattatattatattatatgataactttaaaataacaaaatatataaataattaatatataaaaatagtaggttaatatattattacatgacacatcattagtttcgaaataatttttaacgttacttaaatatattttaaattattatctaccataatataacttaaaaataactaattaattaccactacaaaaaatcttacttt

SEQ ID NO: 136592 - DNA, 813 bp, Cannabis sativa
acttgtcctccagcttgtttatctgcaattggattggatcatcttgctttggaccaagctgttggcgaaggttaggtttcttctaatttaattgctctcgcagatctggttgggagtaattgctggcagatctcgtcttactcataaaccgcatcctactcatagacattgtctttaagtggctcgcagatttacttgttccatactttcccgatcgttagctcgttgagtactttctcctctttgagttgatcggctatgggttctagatcacctcgaagtcacacttgcttcttcacgctctgccctttcctcccgagagcggtttgtcatatttcccccatcagggtacgtacgagtcctcgctctatgggtttgggaagaacgttggtgattactagcatgtgatctccattctcctggttgagttccaagatcctcctcattttcatgaggaatttctcgttcatcagtttctggttgtctcctttctggctgttcatcctgattctcaaggggtgtctcattttccccaagttgttcttccctggccttttcctgtctcctggttcgtgagccacgagctctacctcgtggtcttctcactccaagttcaggttgattttgagcgttcgtcccctacgccgccctggctaaggccgcctctcattctaactcagcgtttcgatgctgcaccttttctagacagcgtctcaagcggcggctttccatttcataagttatttctcccacaaattgggcacctccacggttgagctcttcatccctcatcccgggattctgaccattccc

SEQ ID NO: 136593 - DNA, 1045 bp, Cannabis sativa
  modified_base (161)..(162): a, c, t, g, unknown or other
attgacttacgatctagttatcacgagcttagaattcaggaagatgacataccaaacactgcatttcaaactagatatgggcactatgagtttctagtaatgtcatttggattgattaatgctccagcggcctttttggatctcatgaatagagtattcanngatttcctcgataactgcatcatagtgtttatcgatgacatcctcatatactctcagtcggaagaggagcatgagcatcatcttcgaatggtattacaacgactcagggatcacaagttgtatgcaaagtttagaaagtgtgaattcttgttgttagaggtatcttttctagggcatattgtcgggaaagatggaattctggttgacccaagtaagattgaattagtgaagaattggccgaggccaaaatctatgacgaaagttcgaagttttctcagtttagcagggtattattgatgtttcattgaaggattctctaagatctctatgccactaactgagttaactaagaaaaacagcgattatatggttcgacaaatgtgaagcaagtttttaggagttgaaacatcatttgataacaacatcagtgtcagctttaccatcagatcgagaaaagtttgttgtgtattgtgatgcatccagacagggtctgggatgtgttctaatgcaagttgacaaagttatagcttatgcctcccgtcaactgaacgattatgaacaatgctacccaacgcatgatttagagcttgctacactatctttatggtgaaaaatgcaagatttacactgatcataagagtcttaaatactttttcacctagaaagatttcaatatgaggcagagaaggtggctaaaattggttaaagactatggttgtgagattttgtatcaccccaggaaagccaatgttgtggcagatgcactgagtagaaggcatcccgagtaggttttcactgctataatgatagctcgtcaactggccttagagatggttaatgcgggaattgagtttgtagttggaaagttgcataacttaacact

SEQ ID NO: 136594 - DNA, 547 bp, Cannabis sativa
actgttcttatttttaatatttcacagcagttgcattacaattgcataaacattttgctaacagttatttcgtttgattgaaaccttcgtctgatggagtctttggccaaccacctagaaactatcgcctgatgcaaccttcgaccaaccactcagcaaccaccttgcaaccattgtctgattaaaattttcgtctgatgtaaccaccgcgcaaccacgcagcaaccactctgcaattattgcttgattgtgtaagtgatactgtaagtggtattttagtaattaaaatcacataaaatgtataaatgataccttatagagatatttttataaataaagtgacaatttatattttctatgtaataattcctttaatttatatacttattaaggtgtaagtacatatttttgttttatatgtctattttattaatttaatagataagtatgttgtaaagaatttaggctctatcctttaatgattttgatgcaccattattgtaacgccctaatctataaggacgccacgtgtgtgattttataaact

SEQ ID NO: 136595 - DNA, 602 bp, Cannabis sativa
ttaatctcatattaatatataatttgtcacatttaaatattttaatctatattatattatatcaaataatataacagtatcaatctaggaggatacgaatcaacaaatatcatggcaattatattaaaagatactaaatggaataactcattaaatgcagagttgatagaacatatctataagtcactgactgtattgtcttaagcgagacaaagatgtacaaactattgattcgcgtattgacaagaaacttttttgcgtcagaagacactatcataagagtgacatcgataatgcatagcgaggtgtcaactgacacctcgctacatacaaaaaggtgttgacgagatgtgttggcaattagaacacttagcgtataatatacattatacaaactaagtataacaacttaaagaacctgtataacgattaacaagacactgatctcgctataggaaggcatactcctggtaccttcactaatcagctccagacatctttcaatgagattcacttctccgtcacgtcagctctctctctctctctcggatagaagcagacattcaaatgatattagctactgaagttcaccttgtcaccaa

SEQ ID NO: 136596 - DNA, 789 bp, Cannabis sativa
  modified_base (30)..(32): a, c, t, g, unknown or other
  modified_base (350)..(356): a, c, t, g, unknown or other
gtgtatatttcattgttttagaaattcatnnnaggatgttaatgcctgataaaatatttccaacaatcccttcagaaaagggcgtgtcctaagcttgccccccatctgacggaggttccacgcccatggagactgcatgcagcccctcccacggccttctgctcccatccgcgcctagggagtattcaatgcatactctctgtgccaaatcttgtttttgtgatattttaactttcaaaaatactttttcattgaaaaaaaattcaaatttgagtagaattttgtgtagaaactaaatttttaaataaaaatttaattgttagaataaattaattttttaattaattaannnnnnntttagatattagtagcctttgaatttaaaaatttaattttccacaaaatagtcttatgattaattttgaaattttttaattattttatttattttaattataagattagatattacttatattattattaaatttgaaatgatcttattttgatattaaaatattaataaaatttaaaaataattttcaaatttgctaactatatcagatttttcaaaatttgttattttcttaaatatattttattaaattataagattagaaaaatattagttttgacattttttcttattaggtatttatttaattaaaattttatttttgttaaataacatgaaattttgaaaaaattgttatttttggtttgaatagaaattttagggtttggtaaccataaaattttcaaacttatgatattttgttttatttaatt

SEQ ID NO: 136597 - DNA, 589 bp, Cannabis sativa
ttgtagacaaactcgcgcaacttagtcactgtgatggttgctagtgctttggcctcagcccattttgtgaagtagtcgaccgcgaccacagaatacttgactccgccttttcatttaggtagttcacctatcaaatcgatcccccacactgcaaagggccaaggactagtgatggaatgcaagttgctcggaggttgatgggcatatgtagctatccgctgacatttgtcgcatttctttgcgaaagtgaaagcgtcttgtcgcaaggtaggccagtaatacccctgtcgcatgatttttagggcaagggaattaccacctgtatgattcccacaaataaccccgtgcacctcacagagtatgtagtcgcagtcttccccatcgatacagttaagtaatggttgactgaagcttctgcgatataatcttccatcatagatgacatatcgggcagcccgctgtcgcagcttccttgcttccatcttgccaccaggcaagatacccttctcctgatatgcgactattggagtcatccaggtgacctcttgggcgatatctatttccatcgtttcttctctatttatcgtcg

SEQ ID NO: 136598 - DNA, 1170 bp, Cannabis sativa
aattcatattaggatgttaatggaacatacttgttagtaaatctagatcctcgtaaaatatttccaacatgtagttctagggctttgtagctcaagagatgagtcgggtttgtcacgtatttcctcaacattgaaatgtgaaatacattatgtacagctgatagtgctggtggtaaagctagccaatacgctacctacctgaccttctcgagtatcttgaatggccctatgaaccaacggctcaactttcacttccatccaatgcgatttatcccatttattggtgaaacctaaaggaaaacatggtctccaacatgaaattcaatgtctctgcgcttaggaactgagtaacctttttgcctattttctgaagcaagcatctgagccttgatcttttctattgcttcattggtctgctgaactaactcaagacccacatattttctttccccagtctcatgccattgaatcagggaacgacatttcctaccatatcagggagccatccctactgtactctaacagctgttgttgtaggaaaattctaacaaaggcaattattttctccatgaatcaaagtccataacataggctcgtagtaaatattctaatgtatgtattgtcctttgagattgtccatcggtctgagggtggaaagcagtgctaaacttcaactttttaaccatagctttctaaagactcacccaaaattttgatgtaaattttttatctctatctgaaacgatggatttcgaagccccgtgaagatgtactatctcatttacatatagctttgtatactgatctatggtgtaaattgttttcatcggcaaaagtgtgttgactttgtaaaatgatccactatgacccatactaaatcacacattcccgtagttttaggtaaaccaaccataaattccattataatatcttcccacttccactcatggaacgtgtaataaccctgccagtttctaaggttctactttaatctgttgacaagttcagcactttgacatgtattcaaaaatgtctctcttcattctgcaccacgaatagtaaggtttcaagtcctagtacattttggtggttcccaaatacaacgaataaggcgtagtatgagcctcatcaagtatttcttttctaagctcatcaatgctcgaaacacaa

SEQ ID NO: 136599 - DNA, 552 bp, Cannabis sativa
gagcaccaccgtcactcatctctctctctctctctctctctcactctctcgctctctctctctctctctctctctctctccccctactatctctctatgtctatctttgtaaaaaaaaattcactactacaaaaacaactttcagaggcggttttgttgggctttcagcgtcgattttggcaaattcgctaccgacgctgatcagggcaacgctgtagggtttaatttaaccgacgccatatatacccctacggcgtcggttattagctaataatcgatgccgtaggggtatatatggcgtcgattcctagctaataatcgacgccatatacggcttaggaaccgacaccatatatacccgaattttagttttttttaatttaatttaatttattcaaattatatatttattaatttatatattattttatttaattcaaatttaaattacatatatacttttttaaaaggaaaattaaatattatttaaattaattttagaattggccaaaatacataattttattttatagaagtaattaaatattacac

SEQ ID NO: 136600 - DNA, 948 bp, Cannabis sativa
gggggggccccccccccccccccataactaatatggcaacgggaccatgcacaagtccctctccaggatcacgcgccaaataattcggagaggggagtattaactggaaatccttgccattcatagtcatctcctccacatattggaattgggtctcgctaagactgctaaaggggccacaaagggggtctgcttgattttgcaatgggaagtgcgaacctccttaatcactctcggggcaaactctctgattttgagagtggctggttctttctctttggcagctttgtggagggtattcttagcttcctcttccacccccttctcaaactctctgactatctcctccatggctccatcgtcgaaaccagtctcaagatcgtcagataccctccgtttagtgatgacctccgccttatgaggactgtcagaagagccaaccccactcttctttttagtgtgagccatagcgttcaacatggtaggtaaatttacggtggttatagcagtctcggccaaggggagctcccctgacgggccaatgggcacccctactggaatgttgacctcaccaaaggaagagtgtgtgtccactctcggggcaaataagatcgtatccccttttcaagctcccaaatgtgcctgttgtacacttcaccacctattctctctcagtagaggtggtcgggcgtctctgacacactactaagcccctcgtccccagacgagttgtgcgggggcgacgttggacaatcttcaaacaaaagctgaagaaggtcctcatctagtcggtgttcacctccccaataatcgctataacgcatctgcaaaaaggaaaacacgaggaggtgagtacaccgagtaatgctagtaagctatccatgatggactcacctactagtacaaaaataaaaggagaagagaaaatatgcacaacaaaaatttaca

SEQ ID NO: 136601 - DNA, 594 bp, Cannabis sativa
  modified_base (564)..(567): a, c, t, g, unknown or other
ttatctggggtgatccctaggaatagatcacttgtctttctgtgttagcttcataggggcacatattcccagcacatacaaaataggaaatacatgacttataccgcatgtatcttaggagttaggtggatataatcttttatcccctcttgactgatgtgattcttcataaagtagtcgtcactagccttcttgattgtagtgtaatagtcgataaaggggggttacgccatctatcacatcgtttatggagatttcaatacgtcttctcccatgtggcattaaatgcgaagtgactgttcaagggatctctgtacctcccggaactgccttagcatgcctctagcctcctggagagtaaagatacttcttatgctttcctccaggagacaccttccctgagattctcctctttcgtctaagacttagtcgatttccataagtgttggttcttacagatccatgtgtcagccttatccaggtccacgtattttgggaaaaatcaagggcaacaaattatatatacatatattgtaccagcaatagtttgaaactattgatttnnnnaaataataaaatatgtatatattaatt

SEQ ID NO: 136602 - DNA, 637 bp, Cannabis sativa
gtcaatgcacatccgcaaagatccatccttcttcttcacaaacagtataggagcttcccagggtgacacactaggccatgaaaacccgatatcaagcaacccctaaagttgaattttcagttctttaagttctactggatccattctataaggagccttagaaaccagttctgctccaggtgccaagtcaataacagaatcaatttccctttgcggaagtaaacccatgagttcatcaagaataacatctaacaattcccaaacaaccttgatgttctatggccgaattgactcaggctgagtggtgtccaatacaacggccagaaacactagatatccatctcgtagcaattccctggctattagtactgaaattactgggatctgagatccttgaacccatccaacaaaaatgaacggtcccttgccttctggttggaagattatcatctgcctcttacaatcaatactggatgagtacttggataagaaatccattcccagtataatatcaaaatccgctatacccaattctattaagttagtatttagtactcaactcctgatcgccatagacctaatccaccttttggagatgactaattctccgctcgggagtagggttccaaaccctgat

SEQ ID NO: 136603 - DNA, 803 bp, Cannabis sativa
aataaggaattttaagatatttaataattatactattataattattgtatcatttatcttataattttatttcatatattctctaatatattattcattaccttgtgcagaaattaagataacatctttcttttttattttcactgagaatatttttaaaattgacaaaataataatgtcaatagtaattgattaaataatcaatgttaaacattatcctaaatattgtatggaccatcgataaaattgctatcttgattttacggaatgctctacatatcaaatatagatatgttataatattatcctttatttgtataataccaatcaattatcctctatagatagtctataattaataaggactaaaaattactattttaccctctaattatattttatctttaaaatacttgttgaactaatgatatttcgctgaactaatatataatcactgaaatgagcgctctaacattaaatacgtcaacttagctcaaaggaaactatcatttcacttcttacatagaagttataaatttttaaatccatgattaacactttcacttaattatgatatcgagtacttcccaagatacaaatatgggctagaccttataacttgaacaacacaattaacttaaaacttaatcatgtcaagattaagatcaaattaatctaaaatattggtttactgttctatagatgattaattacaccaaatcactgcttttgttttctcttaatactcctgaaagaattagagtacaatatgtctcctctcttgcaatgacgatgacagaaga

SEQ ID NO: 136604 - DNA, 1370 bp, Cannabis sativa
  modified_base (377)..(386): a, c, t, g, unknown or other
tgaggacatttactaacatagtcttatgatttagggccatttgctatatttttttgaaatgaggacataaactaacatactcctatgatttggggccatttactataatttcccattctaaaagatgtaattcgttataaattggcccaaaaggcccaaaccttcaaataaattgaaatggttgcacataccacaataatttacgaaacgtttataataatatacattttttatttaatttataataataacattattaataggataaatactattttagaccatgtattttgcaaaagttactaattagaccatctgttttattaaatgacaaaataaaccttgtattttttaaaattatacaaataggaccctgnnnnnnnnnnttgtcaaaataaaacttaataataatatgatctagagatgttatgacaaaactggttatattttctatatctgttcgtgttaaaaattgtcttaaaattggttatattaaaaaaataaaattgttgaatattgagcttagggtcctatttttaccattttgaaaaatataaggtccattttatcattcaataaaacaaagagtccaattaataacttttgtaaaacatagggttcaaaatggtatttacccttattaatattcctgatcctgacgtgccacggcagccaaatgtgatattttttttattttttttattttactgcatttttgaaagtagttttttagttactaatagtgttgataagaaatcaattagttttttttttttttgaagtagaagaaaccaattaattacttttacataaaaaacttcatgtttatatcatatagtttgagatacattttggttacctttaaaatttatttgtatgcatcttagtaattaattagttattttaagttatattatggtagattataattttaaatacatttagataaccctaaaaattattttcgaaactaatgaattgtcatgtaatataacaagttactatttttatatgtcaattatttatatatatttaattattattttaaaagctaattagttatcctataatgtagtataattcaagtaacaaaattctaaaataaattgtaactaagattaaaaaaaaaaattataaaacaagttataaaaaaaatatataaaactgtaactaatcactatattagtaattaaatagtttcttttctgaaaataacgaaaaaatatatgcttcccacattttgaaatgttcacattaaaaagtagatcacaatgatattttttttaggctcattcaagtaatgacgtgaccataaatcatttttaaagtttaaaaaaagagagatgataactctaagatttagagttatt

SEQ ID NO: 136605 - DNA, 635 bp, Cannabis sativa
  modified_base (569)..(601): a, c, t, g, unknown or other
tgtttgactttaaaagtaccagtcttccctgcttcaatcatagcctgcctattaatcttatcacgcaaattaatatgtttacaaaagtaccagcttgtattctgtcccgggttgtaagtccaaaaatcttcattcttcatataaattgcattgacccatcgaacccaaagattgtcttgtttcatggaaatggcccaaatgtatttgaccattagagctatatgtcacttattcccttctcggaacccaatgcctccaaattttttttggcagacaaactttctcccatgaagcaaagtgtaatttacttcggctgccagatgtaccccaaagaaagtctttgcaaagcttgtggacttcttttgtgactttttgcgggagaatgaataggctcatccaataattcctgattcccaacaaaagaaaatgaactaggtgagctctacctgcaaaacaaaggtgtctactattccaaccatgaaggtttttttgaactttttcaattatgccagcacaatcaacatatttcaatttggctggacgtagtttatgttgggttttgtgccctnnnnnnnnnnnnnnnnnnnnnnnnnnnnnnnnntaattaataaagatcaaaaataacattttatgtt

SEQ ID NO: 136606 - DNA, 737 bp, Cannabis sativa
  modified_base (38)..(41): a, c, t, g, unknown or other
  modified_base (674)..(679): a, c, t, g, unknown or other
caactttaacattcagtctcactgctagagttagagannnnagattggttcttacacttctccaaaatcactgctccaccccagagtaattaccatttgatcattagagtttctagcactaatgcaagtctagaaacatgatttggtgtagtctaagagcattaaaataccacccttatggactaacatatagttcctcttgttgatcttaagattcacttgattgtcttccaatgttatattcctagattaatctaatacctactcactacccctactcaacaacaagtgtctggtctaatgcattttaaagcatacctgagacctcttactgttgattctaaggaattctttccttggcctttatcttttctggaatagttaaaacttttccttagataaataaaatctaagtctggaagtcgaaaagcttcctatagatttaaccattagaaaaaaaatgctctagcaacttacttaagtaagttgcttgcattagagtaagtaaattactaggcataccataagccataggtttagataacttcaaacctataatactaggatcaggaagttttgttaagttcattataagacttattttcaaaatttcctttcttatccttgtaattgaaaatctttttgttacttcatatgaatggttttaaccatannnnnnttggctttgcttcttagttccttattctgaccatccatcacttgtttaaactaacaat

SEQ ID NO: 136607 - DNA, 554 bp, Cannabis sativa
gtataaatacaatctaaaggggagtaagtcattacctgctatcacaatggggtcgaacctctataacaaatctttgtgtttattatttttcattctttgtttgtgtaactcatggaaagaatcagatccatatgaccacactgccgattgatcacttttttaggtcaacacttcccatcgacaagatacttacgacccttcccataaccattccctgctccaagagtcgttacacttgatcaaagagcttcgggaatactcacaagttcagttcaaaatgtaccaaggaaaaattgcccagcactttaattcaaaggtgaagagtcatacatttgatgttggcgatcttgtttttagaagagtattcccagctttgcgagaactgggagtggggatactttgcctaaattaggaaggcccctatgagatactcaagaatgtcggccaaggtactttttatttgaagagaatgggcagatcgagagtccttcattcctgaattgcagaccacttacgtcactactaccaataggcggaggacacaagatcctgat

SEQ ID NO: 136608 - DNA, 654 bp, Cannabis sativa
ttaataaaacaaaataaagaagaaagaaagaaaagacacaattttggtataataactctaggtaaaatctgatgcttttgctctcctaactagtcctatttataaagttaaaatgctccccaaaattgatattttcgtgtacagtataatggggaaagtggcacaaaattctgagagaaaatagctataatgaacaattttcaatcagcactaggagacaaaaggcaacatgggggatacgtggctttgttggagagacctgtgcgttagaattgttggggaagtggcttgtgcgcatcagtgatggggagtggtcccacgtacttggtttaggccttagatgagagtggttgatattggttgattggtaagagaaaatttggagtggtgcttgggcttggactcacatgaacaatatttttccaacaaatattattgatgatgacatgaagagaaggccttgattaggtcatgtattggacttcttccttgatctcattcatttataattttatcacctcataaaatttctggaaaaataacacaaaatgaatataaattaaatatttccaattaaaataaatttaccataaaaactaaagaatatttaatttatattaattatatatgtataaataaaggcttaaaatgtac

SEQ ID NO: 136609 - DNA, 527 bp, Cannabis sativa
ataattataaacggaaaaaactgtgagaatatagtatcaaaacttttaaaatagtaggcaataaatttataagagattatatatattgatattttcttaattaattttatgtagatattttattatttttttaaattcttaaattacatgattaataagtctttagatttgagatacaattaaataatatagtgttagttttaatttaaaattgtatataaatattttttttattaattttaattgagataattagatatataagactatgttgagtgatttttaattgtatatagatatatagatagatagattttttaattttttaatttttttaaaagttagttgttagatatttataattttttttaaaaaaaaaaattagtgtgttttttatttaaaaattagaaaaataaaaaaaatataattaaaaaaataagaaaatagatgaataagttttaaataattagataaatttacttagttgttaatatgttgcttgaaagttgttcatcttttaggctgac

SEQ ID NO: 136610 - DNA, 816 bp, Cannabis sativa
attctgacgacttttctggcgttggtagcaactctgacgacttttctggcgttggtagcaactctgacgacttttctggcgttggtagcagctattctggtgactttttcagtactgacaataaacttgggaaattcgtccgaattggcattgtcgtcggaaaatttaccgaaaaaatcaccaagaaacttgttttttttcttcatcaagaaaccaatttcttcatgaaaaaacaagtttcttggtaattttttttgtattttttttttctctatttggttgattgatgaaactggtttcaattattttcagtgtatatcatttttgtttcttgatgaaaaaaccattttcttggtgatttttctagtgattttactagcgacaatgccaattctgacgacttttttgacgctcgtgataactccggcaattttcccaacaacggcaactactccggtgactttttcgacaccgacatcaaactccagaatagtcgtcggatttggcattctcaccggtaaaattattgaaaaaatcaccaagaaaccggtttccaagaaaccggtttcctcatcaagaaacccatttcttgggtaactttttcagcgacaatgctaattctgacgactttttcagcgccagcagcaactccggtaacttttccagcaccggcggctactctgacgactttttcggtgccgacaataaactctggtgactttttcggcacgagtgacaacttcggcaatcactatagttttatttattaaaaaaataaatatgaagggaagttttttttttatggtaatttaatta

SEQ ID NO: 136611 - DNA, 1669 bp, Cannabis sativa
  modified_base (45)..(58): a, c, t, g, unknown or other
atgcaacattaaatgttattttttatctatattaataagtaaatnnnnnnnnnnnnnnatgagttttatttagggcatcaaactcaacaggccggtacaccagaatttaaaaacaaggtaagattagtataattttatgcacatgtttatacatgtttagcatacatgtcagttgctgtcagaataggaaaatctatagccatcacattatcatattagggcatcagtgaggtgtacatagagatgctctgagatgccaacagatatatgctaggatatcagatagtatgagtaatttgctaccacatcactatgactaaagtactgagtatatgctggattcacgggtagtcatactttgtcaagaacgttcctgactcagttagggttatggttgggtgtatgggtgcttgattataactcgggatattattatgttttatgttacgcttttcttactaagtctgttgactcatagttgctatttccatgtgtacgtaagggcaaggctaaggttgagcagctgtgagagcgagcagatggtggttgtacatgtcggggcagttaggcttggagcgtatgatctttgggacatcagggcttttgttgtgtagtcgctaggtgatagacttttgtatatgtatagttaaacttttgtaaatgggatcccagaattttatatgtatgtaactttatgttttcaattaaataagtaaaattttaattaatcatgattttcgataacctcgttgattagcaacgagctgcacagtatgttaaaaatcagactaacatgcctaaaatagttaaggtgttacaatttggtatcagagccaccaggttgtcttccaaagatcgtcacgacatgttcatcatagcgatcaactcgcctcacggttaaataagcctttattgctttagcagtttattttaatagtatgatttaagaaaagcctgataggaagcatgttagtagcgtgatagcggaataagtgcatgttttaaatttccaaaataagcggtaattagattttgactttgattgctgcttgacctagacgactcttgaatgtgcagggttgtcctatagaatggacgtttggcaagaatcatgtagttgggctaatgtgagcaatactggtggaaaatagaaagattgggatccccctattactcaagactgtgaagagacttttggaggtggtcacaaaaatccactgaagattccaacagatttggagcaaaagttcattgaaatggaagctaggattcaacgacaagaggaggaaattaagagattgagacaacaaaggtcttcgattgtacctttatctgaagtccaattgcttttattccgttgctctcagtagattagagaatggctggtaacataatggaattaactgttagggattatgtgatgcaagggaaatcaattattctgagaaacttacatgagatgaatacttttctagctgcgtacactttaaaggttgttcatgtgccctgagggactcaagatgttggtggagccactacttctcttacatctggttatggtagaggtggtagttatcggaaatatttgaccaggatctagatttactaccatgtatgtttcattaacatcctaatatgaattttaaaacaatgaaataaatacatataa

SEQ ID NO: 136612 - DNA, 834 bp, Cannabis sativa
  modified_base (764)..(776): a, c, t, g, unknown or other
cttgtcgtgtcgaccttgtaccctttgtttttctcggaacatgtcgttgagtgtagttgacttgaatatatacttgtagctttgtcaggttgctcacctcctcttatttattccatctaggtagggatcggtgttgagttggggaggtggcagttgtgtaggtcttctactctcctcgtactgatggtaaggacaaagaaaactttgcgtagggctcctccgtacgatccacatgtggccatggtagccacaagggttcgaatcatattggatgaagagactactcagcctcctgtcaaggctgagccaaatgtggactcggagactaggagctctgatgtggaatccgatctggaagaggttgctccagtgagcggaaggagatataaaacattctctatcctccctaaccgtccattgggccattatgatgcctgaggcaatccgctgaatgatcttagtgcgccttcagtaataggactagatcatgtcatagagaagtctcccgtaccgaagatattggattaaaagccacctaagagaaggtgggtttcaccagcttttgtttttcctagtgaggcctttgacaaggtcattgccagtggccttgttaggggtgttcgttgtgagattcctcacaagaactgtggggcgcacagacccctacgggttggctgtcatggtccagggtgctacatagaacataggggcagtgttgtcgcttcatcattacttcctggacgtgttggaaatattttaccagnnnnnnnnnnnnntaccatgtatgtttcattaacatcctaatatgaattctaaacaatgaaataaacacat

SEQ ID NO: 136613 - DNA, 569 bp, Cannabis sativa
tctcgaatcttataatattttattggttgcagaaaacctcggtcaacaataagtatatatatttatatgtatatatgaatataagtttgtgtgtatacatatatttttttttgaaattaaacatgtatacatatatttaaagggagctattatagtaggaattgggtattttacttattaataagaataataatttatagcccttgatttaatatatatttttttatttataattaatattgaatattattaattgtaggttcaactaacaaactccaaacctaattttttatcttttgattttatttctatttaaaatttagttttaattatatatttttttttatttgaaatttacataaaaaaatattttaattaaatttatttttaaaaaaataattatacttatgaaaaactataacatatccaacttaattaaaataatcactcttaaaataactaaaatgtcatgagtttaatattttagaagtaatattttcttttcttttctgtacttatatttaatttaagatttcaattaatttaatagttttaaaattctatcatat

SEQ ID NO: 136614 - DNA, 909 bp, Cannabis sativa
tagtcaaacaactactaaaaatagtgaccccaaacaacttaaaaattattgatcaaatctaatatatttccttttttttttgttagatttgtacccgtagctccaatggatactttagagaatatttgatcacattatatattttgccattttggtggctaaacctccatctgattcacttaaatttaatcctgtaatctaccctctaaactactaaagatcactataaactatttatgtatagactcttgtacacatatcacgtttatattcgtacatttaaattattatttcaaaatttattttaaaattattaaaatgaaaaataaaaatattataaattttgaaataatttttatatttttaaataataatattagtcgtaccaatataaatgtgacacatatacaaaagtgtacacataaacaatttacattggcaattaactgtaaatagatgatactttaaatttgctattagttcaatagtttggagagttttaccatcaaaatttgaacttaaagggttaagtacaagtaaagtagtaattgagagggtttagccataaaagtttcatatatttttgatatctttgttatattaaatgtggctatataacaaaagtgctgttctttttttaaaatattacaattcaaatttaaattcactacatatatatctcttatattatatctttatttttatctttatctaaaagtgtctatctaacgataattcttagtttaacagtatatttttctttattctgttaaatttaactagccttttaactctaacgttagttttaaataatatacaataaactcctaaaatataaattaaaccctgagctcgtttggaacgacgtattaggtcgtattgtattgtattgtattatattaaattgta

SEQ ID NO: 136615 - DNA, 600 bp, Cannabis sativa
gagagagagagagagatgagttattagacttagagcataaggcttagggtttgactaatgccctttatataggagagcataaattccttaaatctcttaaaaatgggtaaataaagccataattgaaatattagattaattaaatacaaatgactaaattgccccacgaaaatagggatgttgctaatattttccctctatttttgtgggttgttaagatccaattcgtggtctgacttactgtcaatagatgaaacctgcacaacaaagtcatgctacgccaaaggttggtcgtccatgtgatgtctagaagctagctagccgatgctggccatagcgcgagcaaggggtggtcagctatcccccttaaggtggttggtttatcacttcatcatcccggttgagtactcagacccctcgtttgttaaattattgagtagatggcttggccttcttattggtgagatgcactgtcacgaggtagtaatgttgaccacatagacatgccacgtcaggtaggggtgtgcataaatcgatccaatccaataagaactgacagatccaattacaaccgaccgccaaacattggatatccaattg

SEQ ID NO: 136616 - DNA, 908 bp, Cannabis sativa
  modified_base (52)..(65): a, c, t, g, unknown or other
  modified_base (224)..(234): a, c, t, g, unknown or other
aactcaacaacaaattaacaagagcataatataaaaagaccgtattttctgnnnnnnnnnnnnnnaaaatcgtaaaaatatttaaagttccgtgaaatcgcatttttataattgttttgttgtttttgtgtatttatgaaatgatccctttattaaatgacaaaatgaaccctgtatttttaaaattgtacaaataggaccctaagctcaattttcaacaattnnnnnnnnnnntataaccaactttaagacaattttcaatacaaatagatacagaaaatgtaaccagttttgtcataacttgtctagatcagattattattaaggtttattttgacaaaaaattagttcagggtcctatttatacaattttgaaaaatacagagtccattttatcatttaacaaaatagagggtcaaattggtaactttaacttttgcaaaataaaatacagggtctaaaatagtatttacccaatttaaaattttaattaaactttaaacatttataaatacaaccgaacataaaagttgagatctcgtcttaatagtttacaacaatattcaaaatatattttataaacacgtcgctccgcaactacaaaataaaggcccaaatcgtcctgagaccgaccgaactcgtcaggtctaatcatcctgatatgtagaatcattctcaagccttaaactctccacagactctaataaaaaatcacaaaacatataacataatactagcttttatctaggcgctcatacaccttttcacaatacttcaggtgcatcaacaacattcttaataaaactacaacctatgtaccacatgtactaagtactcatcccgtactagtattggtaaggctgaaccgcacctcaagtatcactaagtattgtaccacatgcactttg

SEQ ID NO: 136617 - DNA, 1157 bp, Cannabis sativa
ttattttacttttaataatgattatagaaaatcaataactatttagaaggcgccacacatactagtactaaagatcataatacttaatggcaatgtttattcttatattatgtaggcttcaacatttaataaaaattatagaattgtttataataaaatataaaataataaacaaatatgttaaaataaatttaagtgaaatgatattttaaatttattgctagtgttgactcaaaaatctggactagacttataagctacacacgctcgctagattggcgagaatgaaaagtttattgagtaattaataagagacacctcaatttataatcgctcaccccctatatcgtgatagtaatggggttacgtctacttcgagtttttatttctcacgagatggtaattacaacaattgtttaagtatcagaagcttcgaattctagatagagaagctttgaccttatgggtaattttctgaatgtgaaaaatgagctaagagagctctccttttataagtgaaggagacccacaaaaataggagaaaaaaatacaaaaaattttgtctttcaccattgatgatgatctaatggtaaagattagcttcaggtggtgaaggccaatttttggttcccggagggtcctggtgcgagttacacggagcttattttcgtaaatcccttaaggtttgacgatgatagcttcagaattatgcttggggtgtgagatatgtcttgatagataatttaaacagcttcaaaatgcaagttgaatcacatcaatcgaataaaaattgagtgagttatgaccgttttactgaagacagttcaggtcccaacgcccaagtagacatctcaacgcccaggttgacgtcaggttgacatctgatgtcaacctgggcgatgtatagtgtaaaacaatcaatggaagtcctttgagatgcctaagtgataatttgacaccacttagtccttttataggttctggcaaagctagtcaccaattctcaaagatgttgctgttttggagaaataagagactcgaaactcttcatttccaggagcaaaaattgaatttgtgaatttgatttatcctacttcatggatcattgcacttatgaaaaacttgaccgacagtcatgttggggattattttaccaa

SEQ ID NO: 136618 - DNA, 505 bp, Cannabis sativa
tatatatgaaatttcatatttttcatattttatgtctggtaacagtggaacgcgacgtttggccaataaagtcacttttcatttggtttagtaattttagtaatagcgggacaacttagatagatattgagaatgtcgggaatagttggggtattaaatttgaccaaaatacccctaggtggcaaagatgctttttgcttaagttaggggcaaaatagtcgtttggagaggatgagtcagtacggactcttaaatacgcttctccaaattatccaaactttattcccatggatagtttgagctattttatacttaacgtttgatctattgcttatttgattatttcattagtagagattttggtatgtcgtcttcttacacgttgttgtaagttgacaaacttactattaattttcttacttatgagaattgtggagaggcgctacaaatttttttacaaaattgaagcaatcttaagagcatagattgtactatatctatatta

SEQ ID NO: 136619 - DNA, 556 bp, Cannabis sativa
gcatcttgttttttggtagcccatcttaaaagaactccacgcttaaacgtgcttggcctggagcgattttgggatgggtgacctcctgggaagttttcccaggaagtgtgcgagtgaggacaaagtatgctggaagcactcgtgttggtttgtagggtcagtcgtcagtccatgaagcagccagagtagtgtactcgtgtataagagccattcattctgtgggtgtacgtgcccaatggaggcttgaaacggggacgttatagcctctgtctcatattcaaatcttttggaatagagatatatttaacactcttatggttagtataaatttcacatttctctccgtacagatagtgccgccaaatcttcaaagcaaacactaccgcagcaacttctaaatcatgagtcgggtatcgctggtcatattctttcaactaacgagaggcataggtgatgatccgatcggcctgcatcagtacacaccctagaccctgtttggatgtatcacaataaactacgaacttctctttatcagaaggtagggctaacactggag

SEQ ID NO: 136620 - DNA, 644 bp, Cannabis sativa
ttcattcttctttctcggagtcctcttcatcactattgagccattccgccaacattgcccttcctttgtatttgttcttcttcctcgttggacaatccattttcatgtatctgggcttcttgcattcaaagcaaattggtggatcatctttgctccttctttcttttgagtcactccctctttgtggcttctttccaaagttctttttgaatttcatgaactttttgtttttcttggagaagagtgccaagtcctccatgtgactacataagctttcctcatcttcttcactaatgtcatgggaggaggtagacttgaatgcagttttcttctttttcttctcaacttcctcttgttcttaagaagtcatgaaaatttcatggttcatgagtgagctaattaattcttccaagggaagtgttgagagatctttggcttaatgaatggaaaccactttcccttgataagtcttggtgatacttcttaaaatcttggtcaccatatccttttgagtaagtactatgctaagagaattaaaaccagtagtaattgtagtaaagcgagtatacatgttagcaatggttttatctgctttcatcttaaagttctcatatttagtggaataaatttgaattttagtctct

SEQ ID NO: 136621 - DNA, 738 bp, Cannabis sativa
tgcaggagaagttcgtgggcgaggagttcatatccaaggcggagaagatcccttctgaggagcttgttccgcgctctgtggagttggcttcgcagtcgatgtctctgttcatgagagccgttgccgctggttctaaggaagctgactcgctgaagaggcaaaatgtcctgctccaggagaacataaagagactgaaacaacaggcgactggtaaggacaaagagcttgaagaccttcgcaagtctaaggagcaggttgagcttgaggccaagaactctcagatgaggatcgaggagatggctcgcgacttagaggtcgagaaggagaatgggaagaaacagtatgatcaggcagtttctgattatatttataccactctgtccaaaatcccagactttgacttctcaatccttggagcaaaagccgctaaaatgggtcaggcttttcgcgccatgtcgcccacacaaactcaaggcagtggagggaatcttcccgaggaggctgaggctgaggatgctgaagaagtcgagaatgaagccgtcagcaaagtcgcagatggatctgctcctgctgctcccaatgcttgactttttctcttcctatgtttaaactattttttgaatttgctagttattttttaatgtggtacatgggtactcgcactctgtacttagacatatttgcaatttattttggacaaatttatatcctcgcggggataagtaatgtttaacattt

SEQ ID NO: 136622 - DNA, 1377 bp, Cannabis sativa
tcaattcaattggattggatcggatggaaaaatccaatatccaataaataattggattggattggatgggtccaaatccattggatgtgatccaatgaacacccttacctggcactgaatccgccttctgacccgaacccgaatccgaccctagacctagatccaacttaaataaaatcaaaaataaaaaataaaaataaactttacagaacacacttttattttctatatttaaaattgaaaaacaaaagtggttagagaacacatttttatttttcaaaagcgaaatttttaaaaataaaaattttactttcattttgtaattaaaaaattagaaagcaaaattgttaacactgaataaataaaaatgtaaaattatacttttcttttttatataatattgaaattgcctcacccaattgataattttatttattaaaaaaaacaaaactctataaaataaaagaattttttttaaatctatttaccttattaatatattataattaatattttttaaaagaaacaagatatttctaaatttgttgtgaattcatgtgttttagagaattattatttccttgggttattaattcgagatctactaaccatgtttatgttcttcttatttcagctccagttgcttatacttggattgttatcctagcgagttgagacagatagttagacagaagggtggagatattccaagttgaagatgaagctcgtttttttctttaattaatgaaataattgttttatttatcgagcaatttagttttcattttttagtatgaaaattttattttctatgtcatattattgcagacaattcattgttacatttttgagagtattaatataatatttttatctttaaaataatttcattatgagtttcttttatgaaattgagctttatattctataacttatatgtcaataccaattatatgcatatatatcatgtttttttttatatgttttgtatttattaatgatacaaaatctatggtatagtaatctctgcaataagataataccacatcaacacttaaattttatcatcaatatttatgaataattgtcaattcttaaacaatttttaagattttgttttataaaagatcttgtgatctgataggagcggaagaagttattgatatattcaattcaaagatcttttatattgacactagactatattaaaaacacaacagaatctctataacacatacgagtggaagaagttattgatatatgtagttcaaaaaacttttacattgaacttcaaattatattcataacaccacagaatctctatgtcacacatattttgattagacataaatgttgtcctcaaaagtgagtgtttta

SEQ ID NO: 136623 - DNA, 1262 bp, Cannabis sativa
  modified_base (1069)..(1070): a, c, t, g, unknown or other
  modified_base (1226)..(1237): a, c, t, g, unknown or other
tatcaatttagatcaaacaataataggttttatatataaaaaaaaaaattaataataaacaatatataaaacacacacatgcaacatgatggatagttggatataagatttatttaatttaaattaattaaataattaaattgatttcaaaattttaaataaaaaaagattattttcaaaaataattaaattaaattaaataattaatttaaaatttcaacttataaatttgaaaaattagggttttaacaaacctaaatatctattcaaaaatatcaactaacttttcaaaatttatgttatttttaaaagataataaaattaaatatctaataaactaaaatgataaataaatatcatttatttcattttataattttatttaaataaaaataataaaaaattgaaagttcagaaaatatcttgttaattttccaaattttttaagattgttttattaaaatatatcttattttaaatttcaaataaggtcattttataaaattatttaaataatataaaatataaaatatctgaccttatatttgaaaataagataaaataatcaaattttaaaaataagataaccaattaagaaaaaaaaaagattatatttatttttaggttcaaaatctactaatatctgaaattaattaaaaatattaattaatttcaaactgataattagatttgagatttcaaaaataaaaatctaaatgcaaaactacacaaaaaaattcaaaattaattccttgaaaaaaatcatgaaaaatgaaaatatcgaaaaaaaaaatggaattggtgcagatggtttccattgcataccatccgtgcctgtgggatggtgatcatgattgagcaaacacggcgcaaggcccaattttcagacaaaatttgcccgaatgggcgtggaacctcagataacacctatccaaaatgcgtgcacccccgagtttcatggggtatccgtgcgggtaagggttgatgccacccctgattttttttttatttttcaaaattcataactaattgaaataaaattgaaattagtgtattttatccttaaaanncttagctacctataaatgatatatcagtgaactaatataattattgaaatgtgtactcaaccatttatctctattaagccaagcataaaggaaatcatcatttcacttctatatccagactaaagctatagattttgtatttatgattagcgctcnnnnnnnnnnnnactaccatgtccttaatctatatgt

SEQ ID NO: 136624 - DNA, 798 bp, Cannabis sativa
tccgtgttcggggttgagtttgaggttcgaccttgagctggagttggcgtcagcttaggatctaaaatatgaggagtgataaacacactctctattacactctcttttgcactctctagttaatttaatgacaaatgtcatcttttcaaaaaagcttagttttacttaataactagtcataatattatatttttatttcaactatgtcattcccattaatttactcaaataatttctaacttattaaaattaattattttaaagaaagtaagtcataataaaaataaataataaataagcacaatacatatatatatataagttttttattgttacatatattttgttaattcctcttaattaataaaaaagaactttttcaaaaaaaaaaaaaattaaacacattataccacacctcacatgagtatactatctatataaacataattagtatcacaatataaaatgtatgtaaaattatattattattgattgtttttagtgcaagttgaatatataatatatacaaaattaatgtgcacattttacatataatctattttttatttttatttttttagaaaatatatctatgttatttatcaataacagtacataagaaaagaaatactcgtgtctataatattctcatattcatgacatgtataggtattaatttataatttaatatgtatataaagaaaaaaaaataagtaaaaatataaacaattaaaattaaaaaaaaaatgaagaggaaggaaaacaaaaaaaaaaatacattattatatatgcattaat

SEQ ID NO: 136625 - DNA, 921 bp, Cannabis sativa
atttgatcataagacatgatcacctactttttatgatgtgcataggcttgctataggcgtttggtgagactagacttgtctcttgcttatgatttgatagctcataatgtagtcgtcaaatgtgttagtttttatggtactcaatcaagtatgcaacaaaagattaacgtattatctaattatcattctaccatatcccaataaatttgtagatgtatatacattaaatcaaaacataaaataagtaagtttagagtatacctctcgaagcctattagggtatcttcgaaacttcttgtaagttgtacctcttaatcaagttgatgaggaatatgcaatttggacttacagttgtgtcttcaaaatcgatccaccacacataagaaagattgtgagctattaggataaagtgtataaccttattcttgttgagttcttaacaggtgagcaagaacaatatagagagaaaaataaattttcttttctctctatagattttgaaattatagagttaaaaggatgttctgatttctcaaattaggttcctatttatagtagttaaatctctttaattaaattattatttaattgtttaaataaataaatatctataaggaaatctcttaactacttgagagagtatctcaataaccttgaaatatctataacaacttttcaaattagatatttacctaattaaattaattaaataattaatgaactcaaaaagacaaatccaatagggataggaccaagcctaggcgcctaccttgtctatttaagacaaagttggtatcttttgtcctgacaacttttgtcttaacaaattttgtctcgataaaatttgtcttaacaatttttgtattttttcctatttaattaatttgaaaaaattatttatttatcacaaaaataaataat

SEQ ID NO: 136626 - DNA, 1438 bp, Cannabis sativa
tccctgtttttgttgttttccagttgctcaaccatttcctttgccacaagttttgcgtagtccatgaagttgaaatttttcgcccatcttccagcattgtcccttgcattgtatgttgttgagttgttgagtcttctgttgttgttgcattgtatttcatcggttctattgcatttgtctgtgcaactaatgccttaatattttccaagaacgatggattgatggttgttgttgggttgttaatgacattgacacacaatggataagttgtgaagtcaggttccttcagttttagttgtatgtaaaaatctagctttgatcatcctttatcctcaacggttggtatccttctttcacttggtatttcagttgcaggacaatattttcttggttggatttcaggtgctctttcagcttctgtattagttcatcatacttacaatcgattgagatgtattgtccactagcttcataattttcataattcattcgatcatcaaattgtccattgcaaaagactaggaattgaatgtcttctttttcctgtgattatgaaattattattagtgtaagacaactattttgaatctgttattgctaatgttagtaatgtttccgaacattttttatactgatttttaaaacaaaaattaaaatgatctttatgaaatagaaaagaaacttacttctattgcttttcttctgttcaagtcttgtatttccaattctgaaccctattttttctttttcatttttttgtttgaatactgttatgaaactatgaaaaaactgaaatgcaactattatgaaacgttttaaatatattaaacaaactattttgtcgaagtgttttctcttttttctctgtcaaaataaattcctacaatattgaataaaaccataatgaaatgatgatgcaactataaatcaacttgaaaaaatttggaaattaactccaattaacattgttttaccttatctttatcgtttatatttgcaactgaatataccttatctttatcgtttatatctgctttggattgattgggagctcgtgatctttttgttatttcaagtcagttgttgccaattgtgaaccttgtgttttttcattagttttgtttgtatcaaaacttttttgcaactattataaaactaatatgtaactatttctataaaacttaccatgtagaagtgatctttctttttcacagtcaaacaaaattcctacaaaatagataaactattatgaaacgataatgcaactataaggcaacaaaaaaaaacacactcatacgtaactgattgtagaataattcgaatttgcttttcttattgtgtttataaaaaaatatattctacattgaaaatcagaaatcaactaaaatgcaactgtatataacttagatctattattcatgacttttttttttttttt

SEQ ID NO: 136627 - DNA, 779 bp, Cannabis sativa
gcattataccaatcaataaaattcagctttgctaatgttacaacatcacttaccaccggctgtttagcattccaaaccaattcatttcgatgcttccagatcgaccaacacaccattgaagcctccaaccgctcggccatggtccatctgtcaagcccttcctcgaaccatgctgcaaatgtcatagcagcagccgccacaacagggacctgagacatgcaccagcaaccatgagcaaacggacagcgaaccagtacgtgcaatgccgtttctggtgctgcattacagaacgggcaaagggtgttaatgggcacatgcttcgtcatgagttggaaccgtgtaggtaagcaattcgttgaaactcgccacaagaaatttaggactttcggggggagtttcaactgccaaagttgcttccaaaaaccagagttggcagccataccaccgttacctttaatctcttgttgcaggccgtaagcactcttgaccgtgaataacccatggtcctccttcatccaataccaggtgtcattgacatagtgttgtgagagtggaattttgaagactaaagcttgatctctgtcggttaacacatccaaaatcacctcatcatcccattcaatttcatcgggcttcataagagactttacggagttaccaacaagagttggatgctgagattcaataaacagattcaactcatcagctagccacggatccatcaaaatgtttgttgtagatccatcgccaaccatcttcctaaccccagcccgaaccaa

SEQ ID NO: 136628 - DNA, 841 bp, Cannabis sativa
aaaaaaaagcatataaatctattatttatattattttaaatatatattgtgtgttaatttaatattatacaaagatattgatattaatatatttatgcttaaaaacgttaaaattatttatttattatttaagtttaaaaattcagctattacgtcaaaaaaaattcaatgaaaaataaaaaaggaaaatacacacttgtataataaaggaatatttttaaaaaaatatatacatataaaaataacaaaaaaaaaaattataaaaatacggtatgtatagaattttcaatatttttaaaaattttagattttatttacataaaatacggtcttttggtgtatttttatattgtactcttgttattttgttgttaatttttgttattttgatattattttgttgtttttatataataccataaaaatatatacaaaaaaaaaactttgaatgtaaaaaatattaaaaaattataaaaatgattttataaatttatataattattcttataaattacttgtatttaggcacatatttcggtccatatataagcacgtcaaagcatgacacaggtttgagcatgacaaataatttgggctcatagaccaagttgacttaccctcaatagagataagttgagaaatatctctttttttgtatccattaatcaaaaatattctcatattatattttattaaaatatattcacttttatgagtgagttttccaatataccctcaccctctagtctagcatataatttacattaacctaaggggtctaatggagacatcatctataaaagtaagtatatcttaaagaatatgaaaatgaaagtaaaaa

SEQ ID NO: 136629 - DNA, 606 bp, Cannabis sativa
attattttaaaaaatagttaattatagttaatttaattctaaaaaaagaatttttacatgttggtaacttgctattataggtcaacaaaaatataaccaccatagttacaataaaaatgtaaccattgagcagtcaccctattaatatattacaatttttataaaaaaaaaatcaatatattacagttttctgtgaattgtggtagtcatgtctctgtctattatctaaacaaaataataaaatgtgtcatgtcatatcatgggtgcaggttcataatagtggctaactatgaaaattttaatcagcaccttcctcatctcaaatcatttaatgcatataataggttgatcttaggtgtgtcacgaccctagccctaggtgtgtcacgaccctagccctaggttgtggcagatatgtaatatccataatttgggtggtcaaaggtcacactttgaccctcgtaagaagataaagcttataaataatgattttatttatattacaaaatactaattaaaagatatggattaactcctatattaataagaaaatattagtaacaaaatcaggaccactcatcattataaaagaacaataatatcccca

SEQ ID NO: 136630 - DNA, 619 bp, Cannabis sativa
cttcttccttctttcagcatgagtagagggattatgcgatttctcctgttcagtctgtcgtttgatcaagttcctcaaataggtgttaagcttgtagcactttggtctgatgtgccccttcctgttgcagaaatggcatatggggacaaatctttcttgagatggggcagttctcttcctaccagattttcggttattgttgaccttcttcagggaatcactagaaggaatttcgttctgactacttggagtgatttcagaggcaggaacaaacttaagcttatgttcctcttgaggagatgtggagccagtgatggaaggatttttcccttgttgatatagcagtttataccctatagaagtacgatccccaaatggtttttgactctgtatggcctggtttaaggctgcagttcctgagggcaaggaggacagggattgcttagttctgactagctctgcagttaacttgtagatctcactatcctttgagcacagttccagtgtgagtttctttagtttctcttcaaggtctgttttactggcatctaattctttattcagatcttgtagttccttgacccttttagccatgtaactccattgagcgaacatttct

SEQ ID NO: 136631 - DNA, 541 bp, Cannabis sativa
cttcctccttgttttttatacatctttgtttgtgaatctccagacttctttcatctcttttgccgcccagcggtgaggcttagaaaagattaaatacttggagagtgaggtctagaacttactaggccaacatgaagtcgtggtcaagaaatggaatgatgctcaactggaaattactcgtctcaccaaagaagccgagaggatgaagaagagccttgaagatgtcgagaaggcaacaaaggccaaaaccgatgaatgcgagaagctcaaagggaaacttgaggggaaagagaccgaaacccaagaacgatgcaacaaagttggccttcgtaccctttatcgagcctggatggcaaatccagacatggacacgaatttcttgaaggaagaggaggaggaaattcttgctttctgcgagaagaccaggaaggaggaggaagaggccaaggcagtacaagaagaagattcgtccaagtctcctactatgtaggcttggtttttatttattttttattttgtgtaggaaaatggccctagggcc

SEQ ID NO: 136632 - DNA, 905 bp, Cannabis sativa
ttaaaccacacttttctaaaattacaagattagtaataataagtttataaaagcacacacgtggcgtccctgagagtcagggtgttacaaggaatctcaatatactaacttctaacattgattaagtttaagcaatgcttgaacctgtttatggttaagaccttagtcccaaaatcggtaggattatcttttagttttgaccttctctaaattagccaatccttcttctatcttctctctaatctagtaaagtcttatatctatatatctgctcgtttcatgataaaccagattcttacaaatgtggatggaagactggctatctgaatacacagtcactcagccttgatttgttttaactcataaagaactccctgaagccataacgattccttaaaagcttatgtagtcgctataaattatgcttccatggtggaaagagcaactacaaattgtaactgagccttccaacatatacagttctggtttgtcaagaaaacataggaagtggttaattttcttgtatctctatttgaggcgtagtccgtgtccacgaaccctttcaactccaattctccttcttgtttctcataggtcaaacaataatcccatgtgaccttcaagtatcttaataactatttaaggactttccaatgttctatgcccaaattggagatgaacctgcttaggatacttaaggcgtgagctatgttccatctcatgctcaccatcacgtacattaagtgtccaagagccacatcataggtgttatactcaaaatttggctacacttcattaggtgacaggtgtcaattagtggaatatgaaccacctaatataataatgttatatcatttaatgcaaaaaggaatatctcattaaaatatagaattaatagagcatat

SEQ ID NO: 136633 - DNA, 2860 bp, Cannabis sativa
  modified_base (995)..(997): a, c, t, g, unknown or other
ttgaaaaccttagaaattatttaggattgtttgtttttgtattttcacttggcattcctacttgctaagcacttaataatttctgaatgtgtatgattttgtattaaaccttatttaatttctataaattgatatttgtagtacccaatatgactatgaacaaccccatggtgtcactgttgactgacaacaagatctctggagctaactttgtcaaatgaaaagagaacattcatattgatctcataggttaaaatgtcttatttgtgttgactgaagaggctcctgagcagccaggtgagaatgcgaccaaggcagtcaaggaaaagttcgagtgttggcagaatgataacaacaaagctcgataccttatgctgtctagcatggtcgacaccttgaaaacaaggtttaccaatactctcacggctgcagatatcatgaaccagttaactgaactttttgggatggcatcagatcaagcttggtttgaggcgaccaagaattttatcaatgcacgggtgaaacgtcattagatggtgcgtgatcacctgctccagatggcaagttacttctaggaagctgagaatcatggagctattctagatcaggaaactcaagtgagtttaatcttgaatagtttgactccagcttttctgcccttcaccttaaattatgtcatgaacaagttgaattttgacttccacgagttaatcaacaaccttcagacatttgagaatttgattggaggaccacagaaaggaggaaacaaagctcctagttctggcactgctaatggtacggccaaggctgaggcaaacattgcctcaacttcaaaacccaacaaaaagaagaagtggaggaatagaaagaagcctcttaaagttgttaatacatctaatgagaaaaaagtttctaatcccaatgcaaagcaaaaagaaaagtacttctattgcaacgaaaagggccactcgaaaccccagtgtcctaagtttttnnnaaagaaacaaggtatttctatctttgttataaactcatgtgttttagagaattattatcctctttggttattaattctggatctactaaccatttttattttctttttacttcagcttcagccgcttaaacttggattgctatcccagcgagttgagtcggatggttggacaggaggatggagattgtccaagtaaagatgaagctcgaaatcttctttaatttttgaataaattgttttagtttatgaaaaatttagtttcaattaattagtttgggattctaatccctatttcatattattacagacaatttattatgacatttttgagattattaataaaaaaaatttctttaagaaattttcgttgtgaattgcttttatgaaattgagcttcatatttctttaacttgtatgccaataccaattttatttatatatttatcatgattgtatgtgtttgtgttttattattgatgcaaaatctatggtataatattctctgcaaagagatatatcacataaacactcagaatttaaattcaatatttatggataattatttattctcaagcaatttttaaggttttgcttaataaaaagatcttttgatttgataggggtggaagaagttaagaagtaatatatgcagctcaacgatcttttatatcttttgaactctagattatattcataactccacaggatctctataacacttaggggtggaagaagctattgacatatgtagttcattttattttaaactctagactatactcaatacaccacagtatctctatgacacacatattttgattagacatggatgtaatataataaataaattagcaaactattaaaacttattcttgatcctataattgttccaattaatatgttaccgtagtaatagaaattgataccaaggaagttcttggacatagtatcacagtaccttatctgagtgggagaattttaaaattctagtccatctttatttggatgacactagtgatagatactatgtgatgatcatgataagaaatttagaatataactgagaaagtaaatctaaccattcatatggatggaaataacttattagaattatgaggataagataggagaattttgcaatgtctattcgaatgatttagtcaaaatctctaatccttatgaaaagttttatggtatctcttttatgattacttgatcttaagcaagtattttacttctatgttaatactagaatgctatgttggtgacttagtctagaaggaacctaaagtttcagactaagataaaatgtcacaacaagatgtccctgagaaccaatagtaagaggctaagtgtacacttgtgtacgaacttaactagactcctactgttgattgggagtcatctaagatgtaatcaaacaaggaacattaagagacaatcaaggaagaaattctgaaagttacatatatgtgagataataggggtgtatattagaatccttttatctacgccaactcataacttattagagatggtggttactctgggggtggaggaattattctagaaggatgtaaaaactcatctataataatttagttccaccagtgaagctaaataacttagttattttcgaaagcactagaaagttattcaaactgaagacagttcttaactgtgttatctctattccatttttggatagaattagagatttgtcttctatatattcaaatgcactaaacaatatagaaatcagtagccctagatgagtaatgcatatagaaaaatgatgttgcataatattttatgaacacaaaggaagtaatggtagaaagagcagttgcttaccacagactt

SEQ ID NO: 136634 - DNA, 530 bp, Cannabis sativa
agtagaataggcgcatgtttttaatttcaaaatttaagcagtattagtaagttctcatgatcatgatctgaccatgctagctcttggttacgcaggctgtttagagtagatggacgccaggcgaaataccaggagccacgacaactcgatcgggtcaaatgaacgtcaagagctcagtttcccccaaatgctcagggtggaggttgaggtcccagggcagggcacatggccggggtgatgctaaccagccacaggctaacaaagctgcctaagagtgggaaaacaggtttgcagaaatgcaaactagaatcaatgaacaagaggaagtgattcagcagttaagacagtaaggtgctcctgcagtccctgctccagaaatacctgtggctcctgccctttctgtgtgttacctgcagtatatgatggcatgttacaagctaagtaatgcccacaagttggccaagtggtggcgcatgttgtggtgcatgcaggtggcatgctgatgcttaggttgtatgtagtggcatttt

SEQ ID NO: 136635 - DNA, 902 bp, Cannabis sativa
  modified_base (571)..(573): a, c, t, g, unknown or other
tagtactttccttggtgtcataacgctataggtataatatcgagtctcatataagttaaaaaaaaatagcttttaaaaaatattggtagctaattatagggcgccacctataaaaagtgttgggcactagtgttagaattattattatggactaatataatcatgaacttaataccataaatacaatcattaattatgagcccaatatttatctaccataataggatagttaataattatatattatgttagatgctcatgagagcacccttaaaactataattggctcattaaattatagtataccattattgaaccacttaagcccaattagtgaataccccttagggttataagggtatgaaatatatatatgtcttatgtgaagaagtggtttagtgagattaatggtaaaaaagtaaagaagtggggatagctccacattgtgctcctctctagtcttgaaattggattgattcttgttggagattcttgaacttagatggctcgcatggatgcatcaatgggaggtatatatgcttattatatattttggatgctctaaataaannnttggatcttggtttgatgattatgagtgatgatgattagtgtataatcttttgtgtctcaatactcataatttgtatttgattttaacaaatggtattagagccttgttaaaatcaaacataaatcatgggcattgaaacacaaaagattgtacactaatcatcatcactcataatctgtgtttgattttaacaactagtacccaataacaatactcaaaataaaatacagtgtattcatttgtaaatgaggacttaaaatcctatatatatatatctattctatataaagtgtgcctatataattgaaattcttggtttatgagaaat

SEQ ID NO: 136636 - DNA, 935 bp, Cannabis sativa
atatttcaattaaatacaaaattagaggtaaatttgattaattgattaaaaaaagaggtatttttcaacttacccctaatttttgctcttagaatgagactttgttgattggctcttggattattgggcctgaaaaaagattgcaagtgtgtgagttacaaaaatacattattttatggacgcatagaatagagtaatagaaaattgaaaaatacgactttcagaggagttgcttcattttgaatgtttgtactattatggacataaaagggtatttgaggtttgaatgagattccagagatgggagatgagttagagaggaagaagaagaaccattcctctccgactgcctgacgatctatatttcagatctgttatctttctctatctccaaatgcttttaaaatctctcaactccttcaccatcatatccatgtttggcttcgcattctttatcctcttcttctcgggcttcctcgaattcccatctctatccaccaccatcaaacccatcagatatccaactctttcactaaccaaatccacgccacacccatttactgatttggtcactgccttcaaggaatgggattctcacgtgggttgccctcacttccgggagaaccacaaagtttctattcaaatagcgaatagctcttcttctctgcaagtttctgatgctgaatctgagtgtggggagctgaagatggaccatgtcagtgttttggtcaaagggtggacatggattcctgataatttagataatttgtatccgtgtgcttgtggtttgagctgtttgtggactaaatcttctgttcttgctgataagcctgacgccttgctgtttgagacaactacgcctcctcttcaggtatcttttcttcatttttttttcttttcaaaaataaatgattaccaaattgctataattaatt

SEQ ID NO: 136637 - DNA, 630 bp, Cannabis sativa
cacggcgccttctcaacacaggtattgaatctacactttcccatttttctattcgatttatggttttcatttgtgattgaattttttttgcgcttgtttgtgatttattttcatctcaaactgctaaaaaaattgtaggaaaaactatttatttttgtgtgaaaaatgtctaaattatatctgtatatgtattgtttattgtggtatgtatatttttgatatataatctgtgtattttagatcagattttttttttgttctgtgttagatcagtatatatattgttcatttgggtatatatatataataatatatgtatttatatatatatatattttatttgggtatatctatattaatttgtgtatatatataagatttgggtatttatataatataatctgtgtatatatatatatttaatttgggtatttattaatttatttgtgtatatatgttaactgtgtatgtatatttaatttgagtatttattgatttatttgggtatatatgtttactgtatatatatatttcatttgagtatttattattttatttgggtatttagttcactgtgtgtatatatatatttgatttgggtatttattgttttattttggtatatatgtt

SEQ ID NO: 136638 - DNA, 530 bp, Cannabis sativa
ttgtcatttaacaaaacacagggtctaatctgtaacttttgcaaaacacagagtccaaaatggtatttacccactttataataatcattaagtcttcatattgaatcgtataataatcattaagtcatcatattgaatcgtctctaaaaaaattaaataatatacactgtattatatatatttgtttttatatgaaaaaatcatattataaaaattggtaactttgtaatatatagtacaatgcaatttggcaaaaatataaatcgcaaccgcatccttaataacttcaaattagtacttcagctttagtattcatataaatataatatatataaacatatatataataggttattgttaggtgcaatgtagtatacttaattgtatttttaatattaatttttttttatatatctatatttaaaattttaagtaaaataaatataaaatttaagtaggatgaattgcggcataaatatctaatgtttttgaatttatacacttaaatacctaatgtttatttttggtgg

SEQ ID NO: 136639 - DNA, 625 bp, Cannabis sativa
catcatctttttatgctctaattctttctagaaaaaaaagtgtatcttaaagatatttcggtcccattttgtggttcccataaaactaaattacatatctcttgtcaattttagttatcttttactccaacccaattcttatttcttcccctttatttgataatttgttgttataatatataaatatatattaacaagagcctaatactgactctacaacgacctgtctaaggtcacatgatttacaacagtccaagatattgaatttgtggcctataattatactattaagacaaatcatgtagttttttctactgcaatattttgttggactagtcttcttgcacatattttaataagcaatgtaaataattgaagcttaagaggtatattaaaagtttgttattaattgacatgtaaagctctgtttatatatgtgttttgctttattagatctctcaaattattattttggagggactaaattgatctggtattaatccgtcaattgttattgggtaagttttgatttgaacacagtccactcaattttgtttgttctttctgaattaacataggttgtgaaaaaaatgacgtaactagtgttaccattgtactaaggatc

SEQ ID NO: 136640 - DNA, 781 bp, Cannabis sativa
  modified_base (656)..(658): a, c, t, g, unknown or other
aacatgattaatacacatctaattcgcataatacttattacacacaatactaaattcaccaacaaaagtagacacagaaagtaacaaatacaacaatagcaacacttaactagcacacttatttcagcaacacaacacaataacaatcaactaggttaattaactaaggaaaaaagagatactccctcaaatatcgaactctccacctttggagtctctgcttcaaaatgctgaagcgatgttgatgcaatgctgtaactactggacttactgcttcagcacacaaatcttctttacaccatattgtagcagcctatttttctgtcattccatgttgtgcacctgcaataacaatcaccacactattacaaattcattagtaactaaagaaattgaaattatataagtatgtatatatgtatatattattttttttctttttttttttccttttttttcttttttttttcttcttcttttttaacaaggggtggcacaccccaaacacctagttgtaaatacatatatttttctttttcaaggggtggcacaccccaagcttattaaatagcgtatatataactaaatataatcttgttcctccgctctcgggttgcccaaatgtgatataataaggccaaggcaacccgaagtcnnncttcaagcttctttcaaagtaatggaggtctttgcttggttcacctcaccacctccaaacttcactccttagcttttcaccaagaattttcttcttgaaagtgcatcacgtagttccaccacc

SEQ ID NO: 136641 - DNA, 588 bp, Cannabis sativa
tcataagttttaactaaataaattcttactcatttttattggctaatattctttaaaatcattagaaatgtatgtggcatcttagatataaaacatattcataagatgacataaatcatttcaaaacctaaaaatatataatttttaagctttaattataacctaaaaattcaaatcaacttaaataaataatctaattaaatggaaaagttacaaaagagaacgaagaccatgggtcctgatgtcctaaccccaaatctttgaaataaaataaaattagaatttttagaaattgggaatttattttagtttaatttgtttatttttgtttctttaaatttgagattgttttttcaaacaggaccctccccgttatgcattgagaatctcacttgtggcggaggaaaacctaggttacataaacaactgagacaacaaggcctaaagcagttagcactctacagtactgaacaaaataaactagacaagaactaataataccactacaacaatgtttttaattctctacataaatctaaaaaagacaaatcctcaaaatgtttggttttaaaaacccaagtagctgtc

SEQ ID NO: 136642 - DNA, 1908 bp, Cannabis sativa
tatacgggccagcacggcacgacccatattttttgggctttttcaaaacgggtcgggctgggtcgtgccagcacgaatttacagctctacgagtgacaagtatagaataggttggatagatgcaagacattcgtgaagactattcggaggatgttgggcggaatataggccggacaaagtcgtccagcatcaaacgtgctggacagaatgtgttgactagcattccgagtaaccaaaaagacgccccacagacaaagcatctgactagcgaattcacggagctaagtgtccagatttgtctcaataacctcatcccttacgaataagtcaatcgagttgcctagaagtgtgggattacgaggatcggggttgagaggatttcgtggattgactcaatcaaatattaaatattttattctataattaaatgtaaagatgctacattctttttcctataaatagtagatcaaattttctcttatggaataagaaaaaaaaggggtatcagaattatttgtaaaaaaaagagtgggtgaattgattggagaagcttatggtataggtgagcctaaatgaccattccatctacccgtacctaaacctaacattacaagcttagaaagaccttttgcttcttggttgtgcattgatttatattagtagagaatagtaagtattgtaagcttatgaaatatattgggttagtggattgatggttgtaattggcatgcataaattgtttcaactgttagttaagtgctaattatggtttcatgaattgaataaaagattaaggtgaatcaagtgtgtgattgaactgaattttggattattataggtgaaatttttgttcataaccatgataattatcttacttaaaagttgctcatgtttcggttgattgacttgtttcatttaagttgtgttgtttttagttgttagtcttactcgagggcgagtaaggatttagtttgagaaaatttgttaggatatttttagcttattatttatgtcatttttagagttaattttcttcttcattattattttttgggaatagaattacacttgttttctttaatttcaggtttcgacacttggaacgtataaattggtcaaatctcaaaaaaagatgatatataaaatagaaaaaattgtgtaaaataaagaagctaaacttcaaacctaaattcgactatgatctaattagattctggaaaagccaaaacataaaagttatagatctctctatcagctttccggaacatcttgaatcgtccaattccgagtaatatcaagagagttatggcgaaatactatcagtcgtcgtagcaagaaatttctagaaaaaaaaaagataaaaagatagcgaaaaagaagatagcttttcaagtagagttacgatttttatttttttaagtttaaattttaaatctttttagtatcttttaggtaattatgttagcctatataaacacattattattagtgttttgaagacgtttttagagctcaagaaactcagaaactcttaattaggaagcaatcaaggagtacgaattttggagagctaaatcgatattgaaggctttctcaacagggttttcaacattcttttcttctctattttcttcttctattctaaattaatatgtgtgaaattgctacgatgaacatgtgtagctaaacagtttattagggtttagatgaatattgtttgatattgatttttggtttaatatgatttaattctccctcaatttctatgtattctatttcattcgtactcaatttcttttaattgtctgggcatcaattatttatttatgattttgatacaaaatcttagaagtgagtgtcgattatgctatagtgaaatagaaccaaatttcgatatatgacgagagt

SEQ ID NO: 136643 - DNA, 635 bp, Cannabis sativa
ttaaactttctacagctcttcttatacattatttaactagttgccgaaaatctcggtgaacgttttggtgctttcattgagagctgaaggaggcgtctttaaacagacaacaatctgagatgttgaatcaacaatgttggaaactcgcaacaatacacgtcagccccgtcctcctcaggatgttcaaaatccaaaggacgaggaagtgccctcaagagtgaacgtggactccgaggaacgagatgaggccaacgacgatgagtacgagggaaatttttatgagtatgacgcctacgacgaaggcagttatacagagttgctgctcttaaggcaaaaggatgctgatcatgaagctgagatcgcggcccaaaaagaacaaaataggaaaatgcaagaggtgatggtcgccatgcaaaaagccatggagacagcagggattcatatacaccgtaaggccatcccagcaagactcagggaaatgccggaagagtcctcaccgagcactcggaaacccaagaccggggaaccgagtcctatacggtacccttctgaagaaaaccaacggaaaaaccccacttccatcccggggagaaagaaaaaggtgcaggatccgcgaaaggtccgctcagatttct

SEQ ID NO: 136644 - DNA, 568 bp, Cannabis sativa
aaagacaaagatcagtaaccaaggataaacaaaggaaaatagttacaaatgatcttcaagaagaggaacagaggttgttccagaccatctcttcgtccgttccaagagctgctcgagcgagattgtgagtgatggtgttctctaatcttgggagaaaaccaattgaggcacctggaaaagatgacaaagaggaaataatagaggcaatgaaacccgagagagccgatcgatcaatggagtgcttctaaattcgacgaaccagcgtctggaaatcagagacaatagttcttaggggaaagcgaactgcctgacaccataacaaagcacggttgagagcttcagcttcggcgtagattggggagctgaaaaaccaacaatgatctgaccttgaaaatcggtgacaacagcgccatagccatgtttggtggaaccgggagagagagctgcatccacactaagctgaaacatattacttggggcctgcaaattagtagtgaccgattgaatgggagtggactgagagttgattagtaattgagtgtaacgccctgaccctcagggacgccac

SEQ ID NO: 136645 - DNA, 1092 bp, Cannabis sativa
aagcctccgtaattgtgattgggcgtctccgcatcacggggcagccggtggtacgtcccggacgtcgcgggttttataccggacacctccacaatgttctctagttggtgagggcaagttaaagtggagtgaagctcgaccgcttcccatcccgtagcacgaggtctttacccctcttgggcaacgggacccatcatgacttcctccaaggtggccagacgttttcctcccttcttggaagatttggaaccggatgcagacatgttggttctgaaaaagagttaaaattccagcaattaggccccataccaaaccctaaatcaaaaaaaggaaatgggggtcccctaaccgctggaaagaggccccctccggacgactgtcaacaagaaagccttagaaaggttttctggacaaaagtcgggtgcaaaaatctcacagatagtgacattgcgcataaaagaaaaaggaagaggaggggcagaaaagcaagaaagacaaagtcttccctatacccttgaaggccatcacgcaaaaagtgaatgggcctttacaaaaaataataataatgtgtaacaagagtgaccctaacaccagaaaagggaaatctagacgtattacgtaaaaactcaaggtgaaacatccccagaaacttcaaacactaaacccagaaaaacaaataaacagtaaagcatgccatgaacactaaacagtaaagtgagggatgcgagaaacttacatgaagtgttggaactgggggttgctgttgatcaacaaagaaatatagactgacagtaacgaacaaaggttagcaaagaaatctgtaagtgtttgaaggttttttggcctgaggatttctttctctctggaaaactcgaagaaagttggcgaaagaaggaaagtaaccaaatgaaggaaaggttgtggctttaataggccaaggggcatgtggaacacgcacaatcacctaccaattgaacggttgaggaggtgcacaattcgaattcccaagaatcaacggtgagattgattcgtaattaaggcggtggaaacgtttgagtatccgtctgacacacattaatgcgccgtatcaat

SEQ ID NO: 136646 - DNA, 826 bp, Cannabis sativa
gaccgataagggggtatactgctacttagtcacgcctttcggactaaaaaatgcttgtgcaacatatcagagaatggtgaactggatcttcaagggccttctgggatgaaatatggaagtttacgtggacgacatgctagtcaagtctaaagcgtgcgtgagccatgcagacgatctcacaaaatgtttggaagtggtccggagatatggaatgaaacttaacccgaagaagtgcactttcggggtcaaatcagggaaattttgggattcatcaacagctaaaggggaaaagaggaaaatcctgaaaaaattcaagctttaatgaacatgcctcccctcaagaagcacaaagatgtacaaagcttgaccagaaaagttgccgccctaagccgattcatttctcgatcaatcgacaagtgcatccccttcttcaatattttaaagaagtatcagaaatttgagtggacagaagaatgcgaggaggcattcagaaaactaaaagaacacatggccaaacctccgattctatcaaaaccagttcacgaagaggacttgttattgtacttggccgtctccgagaacgatgttagcgcagccttagttcgggaagaagaaaaagttcaacatcctgtgtactacatcagcaagcgtatgataggggccgagatacggtatccattgattgaaaagttagttttctgcctcctaatggcttcaagaaagttaagaccctacttcaaggctcacctcatcaaggtgttaacaaaccatccgctccggcaagtcctgtagaagccggaagcgtccggaaggctcctcaagtggg

SEQ ID NO: 136647 - DNA, 859 bp, Cannabis sativa
  modified_base (312)..(313): a, c, t, g, unknown or other
ggccaaagtattaagcttgacttctatcccaagcctgaagaggctcttgctaaattcctagagaagaagaaaaggcttgatgctttgcttgaagcgcgtgggtgccctcgtcttcctactcgcatctactaggccgcggagtccaacccatttcagcattataatcatatctctttctttttttttttttatttacaaccatgtttctttccattaagacaattttaatttagctatttattttctaaggggagacagttattatggcccgtccccaggccctttatatattttttctttttggacctgccnnttgggtcaggatattttaaatatatatatatacgatcattttgatacatatgctttttgactttgcttttacttttagccttctttatgtctgtctgtgtgctatgtcttcgtacccccttgagcggcatgaaaattttgtttttaaggcactcagtttttatttgaaacttagaggttacatacacttttacggtacaaactctttcaacaaggcctaagtttacattttggactattggaaatacgtccctagaggatcggcgttcaaagcccttggcacaatggttccgtccatcctttttagcttatacgttccggaggcgatctcgtcctcaatttcatatggcccttcccaatttggcccaagtacccccacttcgggttcttcagtggctgggaagactcttcttaagaccatatccccaaaagtgaattttctatttctaactttagagttaaagtacttagtcaccttcttttgataagctgccattcgtatttgagactcgtcccggagctcttcaacctgatccaatgcttcctg

SEQ ID NO: 136648 - DNA, 537 bp, Cannabis sativa
atgactttttgtaggagttgatgtcacatgagtatgttcaggaatagactcaacaacatgatatttaccaatttgacgacaatcaactttcattcttgctaaacatccaaacattgtctcagcacgatgacatctcacaataacatcctggttattaatttggcgatgcccttcacaagagcaacaaaaagttctatttattatcacatcatgcttatctttatatcttttagtttttctaatgccaaaactaagcataagcattataaaaattatgagcttcgtcttcagtttcaaactctatgccaattttcggaattaaatttcagagaaatttttacatgaaaaatacaaattaataatttatttacaaaaatacctctatatggtgtgggcaataattttgtctttaatgagcttttatttaccaaaataccacttacatatatccatttatttcggcccaaatatcaacttttcttttctttttttctcttttttctttcattttttattttcaaatttagcattcagttt

SEQ ID NO: 136649 - DNA, 569 bp, Cannabis sativa
gtttaggtttatgccccgccaaaaaaattttagtttttgtggttaactgttacaaaactaaaagttcaagtggtttaaccgccaatatcccttcaatttataaaagttacaaactcaaaattttaaatacctattactatgaaatttttaaatgaaaaatataaattgacactttatttacaaaaataatacatctataataaggtggtgtgggccaataattttatctttaatgagcttttatttaccaaaacattacttacacatatttattcatgttagcctaaatatcacctcccaaccataactttcaccatcttcttcttccaactgcctcattaattagttttttaatcttttatttcgtatatataatggctattatttgtggcgctacttctccatctctattgctaaaaaaaagctttaaaatggttcataaattagttgctaacaaggctaaaggaaaacgcccagtcatcgacaatgatgacttcgattttgctcccctcgtgactaaaggtggtcgtcgtccagtgaagaagaagtcgaaggtgtctttgcctgaa

SEQ ID NO: 136650 - DNA, 1172 bp, Cannabis sativa
  modified_base (765)..(770): a, c, t, g, unknown or other
  modified_base (1055)..(1071): a, c, t, g, unknown or other
tctattcaaactaaaattaacaaacttttcaaaatttcatgttatttgccaaaaattaattttagttaaaataaatatctaacaagataaaaatttaaaactaacatttttataatattgtaaattaatttaataaaatatgtttcaaaaataacaaattttgaaaaaactgatatggttagcaaatttgaaattttaactaaattattttaaattttattaatattttatcaaaataagatcatttcaaattttaataataaaataagtaatgtctgatcttataattaaaaaaaataaaataaacaaaaaaaataaaaaatttcaaaaatacccttaaggctagtttgtgtaaaaattaaaattttaaattcaaaagctactaatatctaaaaataattttaattcattaaaattaatttattctaataattagatttttaattgaaaattctgattctacacaaaattctactaaaatttgaatttggtttcaatgaaaaatgatttttgaatcaaaatatatcacaaaaataagattgggcaaggggagtatgcaatgcatactccccgtgcgcacacaaggctgcacttgggcgagggaagggctgcaaacagcctttttgggggcaaacctcggtcatgaagggcttaggacagcccttgtccgagtaaattcgaacataagcgtgtctgaagccgcgtcaagccgttgtccgcgcgcacatgtgtgttgctcggtttcagatattttcatccaaattnnnnnnatcataactaattcataaaaaatataaattgagttttgtaaaagcctaaacttattaatttttcattactttccaataaaatatttttagaatgaaaaaaaaatagttttacaacatacattgaaatttccatacagtcatcaaatatcaaatatgcacataaaccaacatgaaaccatccaaatcaatacaaacatcgttttaaatccatatttcatgaaattaaatcattaccatgggtcggagaccagttttggattattgttttacaaggatctagatttnnnnnnnnnnnnnnnnnttaacatcctaaatatgaatttataaaaaaaatgtaatttaaacacatataaagtttaagaaaccatacattggttacagcggaattaaatgactgcttct

SEQ ID NO: 136651 - DNA, 710 bp, Cannabis sativa
ggaaccggaattccggttctggtctgggaaccaaaattccaacccccataattcaaattaaccccaaactttccaattctttccagaacacctgaatacattataataaactaaacccaagcaaaagaatccaacaaaacacacaaattttcaatctaccattaaagagctaggtttgagttcctaaactcaaactttgctcaaacctcatttcaaccccttaatccaattcaaattaactcaaccaacatcaaacaacctccagagtaccaaatcaaaccatttaaatttatacagcaatacaaaacctaaattcaccattaaagctccaacataagcttttgaacttgaattccaaccaaacactaaaatagctagcaaatttagcctaaaacaacaagacttacaataacctaacttcaaattaagaacccaaaccaatttcaaatacacagcccctaattcaagcttaaaaccatgaaacctatttcaaatactaagaaacttaaataggaaagctaggatgagattaccttgattcaaaggagaggaaaccttgctaaattccactagttccaaaagaaaacacccacctccttgctgggtttagagaaatcgaaagaaagagagaaggagaagtcttggtgatgaagaaagtggctctttcttgaaggtcaaaggctaactcaacctttgactaaagaaacccc

SEQ ID NO: 136652 - DNA, 572 bp, Cannabis sativa
agagagagagcggtttgggtcgaacgaaaccgagtggtgagaaagtgagatttcgggttggttggatttgagagttttgggctgccttagattatttcattgagttttatttcatccaagaggagttttagatgcgattagagggtctgtaatcgcaccattcgacatacgccattattacgttcaaaataccgttcttgaaacggatccgaatttgaacgtgtttaacttgtttcaaggatcaaagaaggttgtatttgagtttttgggaccctaaggcttggtttggacgaaaaataatggagctttgacgtcaaaaacacaaaaccaatattttgacaccataaaaggcggtacaccggagctaaagaagacaactcttttaggacgtgatttagttgtttctttggacaagattggatcggtttgagtttctgggcattgtggggatcattcctaattgaaaggaggcgtcgaaagcaagaaaaacgggagtttggaactcaccgtggccggagaagacgacccgccggcgaaactccggcgaagctccgttcaggggtttttaaagg

SEQ ID NO: 136653 - DNA, 870 bp, Cannabis sativa
aaaatacagggtctattttgtcatgtaacaaaatacagggtccaattaataacttttataaaacagaggattcaaaatggtatttaccctaaattatattgaagaaatataaatatttgtttctaaaagaaacttaaaaaataacttggatagtatgaatttatgataaaataataatacttagagtaattagaaccaatgtatatgatataaaaatatgattctgacaaaatataggattttttgttttttacaaaattatccttttttttttgttatttttatattataattgtggtacatttttattatatttttactgtagtaagtttttaaaaatattgtcttaaaattttaaaatcacaaaaatattatgtttcgataaaataaaaatataactaaaaaataattgtagaatatcttaaataacaatatgaaaacaacaataaaataatgaagacagttataaagcaacagaaaaataacaaaacatcgacctcgttacacaatatgcaaaacaatatcaactcctcaacttatttttgtattatgatgttattttttcacttaatatttgataacttgattattttttttgtactactataatattttttttttatgaattttttttgttataacttcatacgttcaattttttttttttttaagttagtgacaattaaaataacaaattattttttagaaattaaatgatagttacattaataataaaaataataaaattttataataattttaaaataattgggtataaaatgtaatatataataaaaaaataaaaaaaaataaactagataatatgtcaatatctactagtgcacattgtgtcaattaaaaaaataaaaa

SEQ ID NO: 136654 - DNA, 1741 bp, Cannabis sativa
tctggtcggtttgatggtcggttctggttttttggtttttatgaacacccctacccagattgacagattgtcaacttgggcgctgggtgctcggggcgccgaagccccagatgcttaaaaatgaacttgctctgattctaattctgatgcctcaaatatgtttgtggtatgtctagttgatgccccaatgcaagttttgatccatttacactaagacagtcccagaaactgaaaccctagttaggaatgtcaacttgggcatcgggtgaaaccctaggtgcctagattggcttccgggttgcaggttcatgtaattttagctcttgaggcttggattaggttgctctatgtcttcatggtagaaaatactaaaagataatgatgagttggattcaagttattgaagtccaaacttccatcatagagctcccaaagtcaacctgggcgcagggctagggtcccttcccagatcgactgctatgacttggatctactcaactttgtgacatcatccttcttgccacatgtcaaacattgatgtccacatcaccaggaaaagtttttgagctgacattagaatatcattcaagaggtgaatccatttaaaacacattattagaatttaagattaaggagttaattaataaaagaatatatattagagtatcgtttgtaaaatgagaaataaatattcttattagtcaagtaatcttaaataaaatcaactaaaatcaatagtgatttgaacttgatgagatgtagaatagaatcattaatttcggcatctgacatgattagtcatgagatttaataaatttattaattagatgtgactaatagaaggttctagattagtcaattttaaaatatcaaacttggaattacaaaatttaatatttaatatttcagaatattaaatgattaatcaagtcaagtgaacctgaaagaaataaaagaataaatggccaaagtcgttgtgaaacaaacagaactttgacatgtccctcttgctcaactccttcttgatgggaaagggctttctgtatgggactgttccttgattggccataaagatggcctgggatttttccgtcaggaaggtgaagcatgtgtacttctcctccttgtccttctgattttgtgacgtagaagaagtattaaacttccccttcttgccattgttttttccagagctattgttgctgcacttgttcctagtgttactacaggtctgggtagaattattggtatctgcttgtgcgcctggtaatcacgaggttactgaatgccttgtgactacatgttgataacttaccctgtcagggcctatcagacagcttcttttagtttggtaaagatgtcaactctatcaagaaactcctccatgttgttagttgagatcctctgaatgtctttctagaagtcacttaatgggaggatgccccacagtatgaccgtataccagccctcttctagaaactcctccatgttgttagttgagatcctctgaatgtctttctagaagtcacttaatgggaggatgccccctagtatgaccgtataccagccctcttctataaggcctttgaccttggtggcattggccatgaacctctggatgtaatccttcaaagtttctccttatcattgtttgacttcaacaaggtcttctagttgtgatggtataagccttgaggatgagaattgtgtgtaaaactctcgggaaaactcattccaagaa

SEQ ID NO: 136655 - DNA, 825 bp, Cannabis sativa
ttagttatcttttttgataatggtaaaaaaaaaatatgattctcatatgctaaaacgatcttcttaaaaaataaataatgatagtataatttttaagctcaaataattactagtgagattaaaaaattattttaaacttttttttagaagagaataagaaaagagaattttttttttaatattaaaaaaaactataaatatttttatgtttcatatttaataaataaaaaagagagaacaaaacaaaaaaacaaaaaggagaactaaacaattagcctatttgcattgatatatgggctgctcgtttttggcatatttatgtatacacatgtttcaaaaaaattaagatggatcggtattattgcttaaataaaaagaaaaatggtatttataggattaattattaaatttggtctgtcagcgtaattttctctattatataggggaattttcataggtaattgagggtatatatagtttacttttttatgacataaataaataacacaatagggttatgggtttttcttttttatttttttttacatttatatgggcttttttatgccatatttttgtaaaaaaaaatagaaatctcacatttgtaaaacaacaataagttttgccaaaaaaattaccagaaaaatcacggccgccggaaaagtcgccggaacgtcactggaaagtcaatgtcaccgaaaaagtcaacgtcactggaaaagtcactcgaaaagtcaccaaagtaaatgtctcatatataactaaaaatataaccggttatatgaataaaaactaataacccaaaccggttataattgaaatata

SEQ ID NO: 136656 - DNA, 507 bp, Cannabis sativa
tacgccatctgtcatgtcgtttatggagatttcaatacgtctttccccatgcggcattaaatgcgaagtgattgttcaatagattccagtacctcctggtactgccttagtatgtccctggccttcgggagcataaagatccttcttatgtctcctccgggagacaccttccctgagacactcctcttttgtctaagacttagttgatttctataagagctaatcctttcagctccacgtgtcatccttatctaggtccacgtattttgggcaaaatcaagggcaacatttaccctctaagcctcgtttggtggagaataaacgaggtttgtttggtgcctccggttggctcatcagtttaatggcacacgcttcaagtgcgtggagtgcatttatgatagtcatcattaacatgtatttgtttttgcaggcaacgattcgcttcccctccattaagaaatcagtgtatttaatcggtgtgtcagaaaagtgttgggaattatttta

SEQ ID NO: 136657 - DNA, 2052 bp, Cannabis sativa
  modified_base (500)..(503): a, c, t, g, unknown or other
  modified_base (711)..(713): a, c, t, g, unknown or other
taatagaaggaataactccagaggaaaatctgcttgttcagcgagacgcggacacttggaggttattcgtggatggtgcatccaacgagcaaggctcaggtgcaagggtgatatcaatttcgccagaaggctataagtttcattatgctttgagatttcaattcgacgcgtgaaacaacgaggctgagtatgaagtcttgatcgttggtttgaggatagcaaaagcgttgaaggtcaagaatctcatatgtcatagtgattcacaactgattgtaaattaggttctcgagcaataccaggctaagggcatgaaaatggctaagtatctagagagagtttggaaaaacttggaaaggttccattatttcaaaatcaagcaaatcccaagagaacaaaactctaacgctgatgccttagcaaaaatggcctcgcagaacgacttagatgaactaaacttggttccaatggaaatgctaaatgagccaagtatatgtgaaaannnngacatcgagatgatagatagctcgtccacatggatgactcctataaataactatctacttgacggaaaacttccaactgacaaaaacgaggcacgaaaactcttgtattcagtgcctcgctacacaatagtagaaggcatacagaaggggatattcgatgcctttccttcggtgtgttctttttgcagaagcaaacgagatcatcaannnaatccatgaaggcttttgtggggatcatgcaggttggcaaagtctatcaaaaaagatcattatacaagggtattactggccaactatcaataaggacacccatgaatttgtctaaaaatgtgataagtgtcagagattctcacctaaacctcgtgtaccaccgacggaactaagaatgatgacctcaccttacccatttgctatatgggggattgacctgattaaagaacttaccacagggcgaggaggagccaagtatgcagtggtggcagttgatttcttcactaaatggaccgaggctaaacctctcgtctctataacccacaagaaagtcctcgactttgttgtcaaaaacattgtctacagatttggaattccaataaagatagtatctgataacggaactcagttcgatggtgacttattcactgagttctacgacaggaacaaaataaataagagctttttgtcagtatccaggcctcaggcgaatggacaagtgaaagctgttaacaaaaccttgaagaatactttcaagaagaagttagatgctatgaaaggtagatgggtcgatgaactacctcaagtactttggactcatagaactactgagaagacagcaacagaacatagtccattctcgctagtatttggctcggaggcaatgttacctgtagaagtaaatatcttgactaatagacaagagttttataatcaagaagaaaaccaagaactcttaaaattttccttggatttacttgatgaaaaacgtacttagtcgcaaattactgcagcgtaccaacatcgagtaacaagatacttcaacaaaagggtcaaaaagaggctattcaatgttggagacttggtaataaggcgagtatttgcaaatacaagagacgcagctgcaggtattcaatccaaactgggagggtccttatgtgattgaagcgatagtaggaactggggtttactaattggctcggctgaatggctcgctgataaagaactattggaacgtggaacatttgcgaccctactaccagtaaattgatgttgtaactcacatttctgatgtaatactttgaacttcagttatgaataaagttaatcattttcaagtaattacaaagtgttactctttaaaattacttgaggggcatatgtgtatgagtaaccagaatttacctgaaaatacatgatatagtgcaaacccaccactttaaaatttttaatttttcttgaggttcttattgatcaaacctttctgacaagaaaggaggatcaaactattatgaataaatttttgattaaaaacctgtctgacgagaaaggaaaatca

SEQ ID NO: 136658 - DNA, 657 bp, Cannabis sativa
ggcaaatcctttgtaaacacattattataaccctactattaattctaaaatattcttactaagcttcctcttcttcaagaggaacatgtagctaggtcagagtaaagtccattctttttgtatttgtatcaacattcaccggccaaagaacctaataatagacttgtgaattaaggataattaacgcctgaactacgtaaaaaatctgttgtctatattcttacgatatgtgtttttattactttcttaagctcaataattatttggttactgaaaaactcagtaaacattattattattgctttcaatacgttttacttttgtttaatctatttttcataaaatactatttatctttgtttcatcttttacttttaaaactcgtaataaaaaacctattataaaacatagtatatttgcatcataacctagtatatataaagggttgaatattaattagatagtgttgttctgtaccataaatagtaatttcgctttggaccaaaatataattattcattcaaatacacgacttgccttgtccatatatatcttttttcatgataagagaccacatgaagttattagttattaatttgaatgagatatttcaccaaataaatctctaactgtattttataaggaaaatttgatatt

SEQ ID NO: 136659 - DNA, 1159 bp, Cannabis sativa
taccaatcaattttacaagttagtgaaactatctataaatttattaatgcaagtagaggtaacatattagtatctataaatttattaatgcaagtagaggtaacatagtagtatcttaatcagtaagacaatataatattacctaaaataagtaaaaagtaacaaaaatgtatgttaaacaataaaaatacatactttaacatcaaatagaaattataattttaataatgctaacgattaagtaaccaaaaattggtgaatatataaattttgttttaatttaaagtttgttgttttatctcttaatagaatataaaagaaactaaatataattttttttatatatattatggtaatcttttttggtgatattgcttttgaaggtaatttaaatgttattaaaaaaaaataatttaaaagtatcttaaacaacaatgtaatatttaaattagaaatttaataatataatttagttgttttattaattaggccatattcttataataacatgtaattaattagtagatatattgaatttcgtttaaatttaaaatttggctacttttttattaacaaattatatataataataataaactaagaggttgattttgaatatagttacacatttttggtaacaacaaaaaaatgtatacttttcacttcactttaaaatgtaaattataataatactatatttaaattaattggaaattatttttaaaataatagagaagagagagaaaaaaataagttaaaaaaaaaaacaaaaacaaaaagtatggtactgttcaacaagaaaaaaaaaaaaaaacaaaggaaatgtatatattttttgtaattcggtatagtaggagtagaggagcggcatcttcatattataaaatggttgagggcatttgtgtagttattttgtgatttacttatattagcaaaaaaattcccttctaaaaatgccatttttctatgctttagaccacatttttactacttttttttcttttcacaaatattattttctaaatcaaacacaaacaaaattaaatccatataaaatattttcaacacaaatatatcacaataaaaacaatgcattttcttaatttctttctcttatttgtatcataaaattgtcattttttcttacaaaattaactca

SEQ ID NO: 136660 - DNA, 1036 bp, Cannabis sativa
gtccgagtcttgggtcccaggtctcgggtcccaatcccaattctagttctagtcccaatccaggtttagggctcagtcctagtctcggtctgggtccaatcttgatctcggtctgcgtccgattcccaggtttgagtccgctgatttctggtacgagtccggctctaggtctgagtttgagtccgggtctaggtctgggttggggtttcggtccgggtctgggtctaggtccgagtcttggtttgggtctagttttgggtctaggtttgggtctgggttctggtacgggtctaggttttggtccaggtcctgagtcacgagtcctgggttccaggttttaggtcacaggtcctggcgcaagtctgggtccaggttcgggtttgggttcgtgtatcgacgatccctagtctaggtttgggtccatgtttggttctgcgtctagatcttgttctgggttgaggtccaattcctgttccaaggtcctgatttcgggtctcgggtccgagtttggttttggatcctggtctagaaatggttccaggttggggtcttggtacgatttgaagatccagacactgactacgggttaggtccaagccgtgggtcgtgggtcaagatctggatcccaatcttgggtcccagtatcgttctgattcagatcttgggtcgcagtctgggtctatgtttgtgtttgtgttcgtgtctgggtttgggaccgagcactactacaaattacactattcacatcggtcaacgctactattcatagtgttgaccgacgtgaatagtgtccaaataattggacccgtctatttaaaaatgtcactaataatatactattttcgtcgtttgattaaatgttgataaaaaggaaaccgacgaaataaagtaaaaatttaaaacttgtttttcattttgtgtcagtttgtgatagtcgactattgtgcttgcaaagttttaaaaatgacgtgaaatataattgtgagagatagaaaccgacgcaaatttaataaaatccctaaaacccaaaaattat

SEQ ID NO: 136661 - DNA, 923 bp, Cannabis sativa
gtccattagcatctctaataacagcccctacaccagtagtgtttgtggaggagttaactgctgcatcaacattgagcttaaaagctcttgcaacaggtggaaaccatggaatggaggcaggagcagcgtgttcatgctggtttaaagttgttggtgaagaaatagcagcaacaggggattttggttgagcttatatccctacttttaacatagttttttcatttatgtttaaaatttgaatttcataatttttttcttacaatttctccacctctctttttcaaaaatctttttcatcttctctcttatcaaaaagaataattagtaattttgttccttgaatttccgacaattttacttatgccctttaaaataaacggtttgttaaatatgctcctgaacttttacattatgcagaaatttaatccttctgttaggtcctatctcattatttcgtttaaatgttgacatgtctttataaattagcaattttgtcctctaaactttgacaactatcaaattgtaccccctcaaaataaaaaaaacgaaatagaaacgaaatagttacgaaatagttaatatttttttaatattttttttttttttaataaatttttaataaatcttaataaatcttaaaaaattaatttagatcttagaaaaaaactattttgaattattaagaaaattaaaaaagtttaaactaattaagaaatttaaaaaattaattattttttttaaaaaatttcattttgatataaaaaatatattaaaaatttaatttttgtaaaaattaaattttacgggaaaagtttgagtctattttattctattttatttttctccaaaaatctaaatttatttaagcaaacataataatttttttgtttaatttctaactattttcaaaataattttatatt

SEQ ID NO: 136662 - DNA, 616 bp, Cannabis sativa
ttgggaaggaatgcgtagtgatatcgggactttgacggtgcatggtgtgccaacaaaataagctcctcaccacttcacctgattactataggcgctgccactttcaacacaagtttgggacgaagtcacaatggatttcatcgaggctttcccaaatttgaaggaggagatacaacaatggtagttgtggaccgtttgaccgagtatgctcattttctgaggcttaaacatctctttactgacgtatcagtggctgacctttttatgcgtgaagttgtccggctacatggtctgcccatttccatcattactaatcgagataagatttttgtgtcatttttggacccacctatttaagttgcaagggacattcctcaaatgaagcactatcatccccaaaccgatggtcaaaatgtcacgttcggtcttttggtctcttagaccatctccaatggaagatctaaaatttgtgctaaatttggcataaaaaatgaatttgtgctacatttagctcactgtttacaattgtgctccaatgcacaagatgtaaaataaggaaaaaacaattaattatattgatggtcatttcatattttttgagaatatacaaaattta

SEQ ID NO: 136663 - DNA, 545 bp, Cannabis sativa
caataactatccgaatgtttcggatcagtaatgatccgtcggatcggatcactgatccgatccgaatgaatggatctttttgccatacctagcgccgcagaaactagaaggcctccttgaatttacagccacaaaaaaatctaaacaacttctacttaaaagattaatgacactagtcttctgctatatatttcgagttttgagttttgaccaataaccatttctttatttatatacatatacttaattatatgtgtagtaatccaagttgaatgacattaatgagagaacattctccattccccagtaaataaagatattggttacgtaccgtcatggatatgtctgtcactctctaatctctatatatagtcccatcgatttggctacagctacaactgcattaaatttcatctctctaagtgtcttatgcttaattttatgaagaaatgctaaaaggcattagtggtgctaagcacctttctacgtgtcaatattgttattggtctaattaagtatcaggtttcatgtagtttaatatatga

SEQ ID NO: 136664 - DNA, 707 bp, Cannabis sativa
aaaaaatggatgctcacatccataaaattattgtcaaaataatttgcggtaaaatataatttgatcgagaaatatttaaaagcaaagccaacgatcaaagtattcaaaaagaaaaaattgacttgaacaagttagtaaaacagatccgaaaatatcaatgcataaaaaataaatataaaataatagaactaatttgttttaccgagattcgtacaagtcaaatatatgtatatacctctgttgtatacacttggaatatatatcgactttaaaagaaaaaagcatgaagggcacatgtgcactattaatgtgtctcaagtttgtggtgacaaattgtattatatatataaatatatatatcattatgaatcaagttgatatacatacccattgaatgttgtgagtggtataaaccaatacaaacacgatactgacttatgtgtatgtttatatatatatatatcataatatatgccaaaatagataaaagaaagaaagaactcactgtgtgtatataatcagttgcaaaatttttactgttatcctaatatgcacgcagaccgtacaaaatgcctttgagagtataaccaagtgattgctatatactgtaccaaagatgtttcttgtgaaaataaacacgcagaggtcatatatatcatgtatctattacctaattcaaatatgaattgaattataaagtaaatatc

SEQ ID NO: 136665 - DNA, 980 bp, Cannabis sativa
  modified_base (328)..(329): a, c, t, g, unknown or other
  modified_base (596)..(625): a, c, t, g, unknown or other
  modified_base (822)..(827): a, c, t, g, unknown or other
agtttagttatgggtacctggtataagcaatgttgcctctatcgtgtaggttacatcaattcactttataacggtagttaactgtaattgatcgggaaattttaaagttgtgacagttcaagagaaattgatagaaattaagataagtaaaaatgaacaagattcaagttgataaaaagatgagaaatcctcaagtttaagtgaacagaaccgatgagaaattgtaagagatgaatgaagggagtgatggtacttgatttttttttacgaaagaatgaaagcaagaaatacaattaggaacgacaaagaagcatctactttttgatannctaccatgagcttaccttggagttaagcatacttaacttgagtaatcttaagataggaaatctttcagggagtcatctcgaaaggcatatgctagaaagatacatattaggatgcataatcgatagtcgatccagagatttctaagaggaaagaatgtgttaacaagtaaagatttaccaggtatcaagatgagttaatgttagtgggtggaaataagaaatgcactgattgaatacctataagaaatgaatacttaacttattatnnnnnnnnnnnnnnnnnnnnnnnnnnnnnntcccatataaggaatggaaagacataattatgaattgttgtgggatcttataatttcgactggatagtaatggttggacataccaagttaatatgttgtttatcaatatagataatttatacaataaataaggatatggaattcatacgaagaaataatctaatcttgtaaaattccaagattgatatctttggctnnnnnnttaagaattaaagaaggttattgagaaccatggagattaaaggaaaaatagtgtaatgatttattcttgaaaggtgggtaacctgagaagatcaatggaatattagaaacatgttgtgagcatatttgataaaggttagattatcttagaata

SEQ ID NO: 136666 - DNA, 943 bp, Cannabis sativa
  modified_base (347)..(349): a, c, t, g, unknown or other
  modified_base (903)..(911): a, c, t, g, unknown or other
ttgccacccaattctatcaacacctgggaggaattggccctaaaattcctttctaagttctttcttcctgcaaagattgccaagttgagatctgaaatcatcaacaacatccaacatgacaacgaatctctttatgaagcctgtgagagattcaaggacttattgagaaagtgccctaaccatgggattaaaaagaggctacaagtgcataacttctacaatggattggttagcaacacccaaacactcatagatgtcgcagctggtagggcttttatgaggaaaagtgcaaatgaggcttttaaactacttgaagagatggccatgactaaccaacaatggtcaannnaaagaagccaatctaaaaaagttgttgatatgcatgaagttgatgctataacaaagttgacaactcaggtggaggcattaacaaagttagtgactgctcaagcaaagtaagctcaagttatttgtgagctatgtggaggacatcgtacttatgatacttgcccggtagatgtaaatagttttccaatggagcaagcccaagccattagtaactatcagaacaataatcatggtttcaaccaagggggtcatcgacaaaattttcaatggcagtttctaaatcagcaacaacaagggttctaccaataaagaaatcaatcttaacagagccaacaacagaatcaacaaaaacaaggttctagtggagggtctaatcttcaggtagatatgttacttcagttcatgatagagattaaatcttccattaaggtcttaaaatctcatatggggcagttgactactcaaatggccaaccaaaatcaagataatttgcctagtactacagagattaatctgaaagagcgatgtcaagcaattttgtaacaccctaactannnnnnnnntattacgtgattttttaaacgtactgtgcagc

SEQ ID NO: 136667 - DNA, 831 bp, Cannabis sativa
  modified_base (748)..(757): a, c, t, g, unknown or other
atttgtgattctattcattttatcgaaaagaaaaaaagtaggctctaatagattttttttttttcacttgtgttcggttgtacatgtattctaaattaaaactataatttgatttttcttatagaaattatatattgagttgttagtgtaattaatcaaaagtaagtcaattagttataattactataaatttgtgaatgaaaagataaaagaaaaccaaccaattatgtgattaactacgaaattaactcaaatggttataggatcaaattgcaagttgtacaatctaaaatatatataaacattttaataaataaataaataaataatatttgattgactagatagtccaccaacattgtataatgttctatgatcataattttataattttatagtcaaatccaacataaatttttggattatttctttaacactactcattaattttttttgtaagatactcatggattatttatcttaatttacattataaataataaataacttcaaacaaatatattcatcatcaaaaagaaaaaacttcaaacaaatatatgaagacattatacttattttctagagacatttacacaaattatcatttttagtaaataataaataacttcaaacaaatatatgaagacattatattgattttcaaaaatgtatatatttatacttaatatatatacataatgaagtatatatgttaattataaaagtaacataaaaataacatcaaaannnnnnnnnnaaataacatacaaataacaaaaatcaacaacaaattaacaatagtacaacatgactatattttctgtaaataaa

SEQ ID NO: 136668 - DNA, 699 bp, Cannabis sativa
gccatggtagtgtgcatacgcaccgtaggacatacctttttcccaatagtttgaatagagagtatatttcaaaggagggacctttgcatgacacgtatcctaggttatacaaaatctcttattgcaactgcacgccacacaatgaagaaggttctcctcaatcgatggtcagatcatcttctagtatattagccttggcagcgtgtagggtacgaaaccctaggtaggtaaaatgaattcccttcaccccatgtgtgtatataaatactcctattttctttgggcaaggggagaacaatttttcaattacaattaccctgctaaaattcctagagagcttcctcccaagagagaaataagaggaatacagagagcatatttgtaattacctgtaatgtcaaaacacacgcccaaagaggctaatactactaactcatggactaaggatcattaacgcttgaaccacataaaaatcttcttgtctattatttaatatctttaactttcttatgttataaatatttagtttccaaaaaactcggtaaataacccttgtgtgaatagcccttgggcacaatgaaatgaggataaaaatagtttacatttgagtttacactttatatttttattgggccacactctatgttttaaacaagtgaccacgaagttggagacatccacacttctcatctcacttgg

SEQ ID NO: 136669 - DNA, 629 bp, Cannabis sativa
tattcactgggatgaagtaggtgagagaaagttcttgggtccagaagttgtccaaagaacaagtgaggcagttgataagattagagcgtgaatgctcgcttctcagagtaaatagaaaagttatgctgatgcaaagcgacgggatgttgatttccaagtctaagatatggtatttctttgaatatctcctatgaaaggtattaaacgctttggaaagaaagaaaaacttagctcgaggttcattagactttttgaaatccttgagaggatagggcaagtagcgtacaggttggctatgcctccagcactggcagttgtacatggtgtgtttcgtgtttcaatgcttcgaaaatatattttagatccatcccatgtattgagttatgaagcattggaacttcaaccaaatctttcatacgaggagcaaccagtgtaaatattaaacaaaagagaaaaagtcttgagaaacaagacaattgcactgatcaaagtattatggaggaacagtaaagtttaagaggcaacctgtgaactggagacggatatgcagtagagatatctagagttgttcaggtaaattttaggatgaaatttctataaggaggggataattgtaataccctaaggtt

SEQ ID NO: 136670 - DNA, 1470 bp, Cannabis sativa
ggatttatataaaaatgttagtgacagaattttctatgtgaaatgtttacataaaaagataaattttaataaattatgtagatatgaaatttatattttaaattgtatggagaattgacttacgcctcactcaattttaataattttttaaaattatatatagaaaaattcattgattacgattaaaaaattttaagtataattttttttaataaataatataaaattttataacatacttataaatatttttttatatgttattagcacaaatattaatcataatataatttttataaaaatacactttgcatgaagttatttatagtaattgaaagttactataatataactttattttaaatgagtcaaatattaataattaattaataaaatatatattattatagactacacaagataaattttaaaaattataaataattaattgaaaaaaaataaaaaatggcaaaagaaatattttgtatatatatacacatatagataataaaataattattattatagaatatagattgtgtgaactaaaaaatatatatataattgattgattggataagactgatttaatcgattatctcataaggagattaaatataatttttagacaaattaaaatagaaaaagaaagataaaaactatagagcaaaatatactcacaaaattattacaaagtaaataggagtagaggttactaactagttatatcatttatgataataaaagcacatgataggaataaaaattagtaactaattaatagttaataaaaaatataaaaacacatgaatagaaatgaaaaaaaaaaatttaatatgtaaataagaaaataaataaaacagttcatttttttctcatcttacatttacatttatttttgaaaaaataaattacatatacatatataataaattatatctcactaaaatttttttctaaaacttaatttctaaacttctattttaaaaatctcctatctcaattcctatctcaattttttttttttttttatattttctcaattgaataaaatatcttagtaatttatattttatttctatagtttttgctcttgtaatatttttctcaatctgaatattatatcttagtaattgtatttttttttttgtttttcatgtttggtgtatgtattttgttttagttacctatccgcactattttgcttatagtgcattcgatctgcattaagtgcagattttatattttgggtctaattcaatttgcacaatagatcaaatccaatctacaaaagtgcagattgaaccgattattttagattggttacatttaaatattaaattatttaatatttattaattgtttttcacataaccaagaacaaaataaaataaactattattgttttatgtttccaacaataaattgaaataaataaaataacaaataataaattcaaaggaagaaaaa

SEQ ID NO: 136671 - DNA, 640 bp, Cannabis sativa
tttttgttatttttatgtatttttcttttgtacagttgttgttgaattaattagtttatgtgcattttttatggtgtatatttttagttttttctatacaatttttttgtgtatatgtgcatttaatttgttatttttacattatttttatgttatttttttagttatttttaagtagttttctaaatatatttttgttcaacaattattttttattcatgtgtatttttatatagtgtatattttaagtttttcttgagaatttttttttgttgtatgtatgtgttgctgtgtagtttagataaatttatttagtttatttttttgacacattttattaaaatacaatgataagattttttttatttttttaattaaaataatgtgcagtagtagatattgacatattaattatatattacccattgtattctatatcctattttgaaataataagattttattaagtatactattaatgtaattatttatttgttctaaaaaataaattactattttagctgacactaacttaaaaaagaaaagagaaaaaaaagttgaaagttaaaaaagaaagaaaaagaaagagtaagaccattctatttcagtaaaaggcctacgcccaaattctatagctttg

SEQ ID NO: 136672 - DNA, 541 bp, Cannabis sativa
cactttaatttcaaaccagtaagctattcgggtccaaacaatgtcctagtatcacattttattacagatcaacgtgaatggaatgttccacttctcaatgcatactttcaaccgattgatatagacaagattgtcacaatccctcttagtttcttccccaacaatgatcgatacatatggcatcataccacaacaggtatctattctgtcaattcgggcttccatttggctgaaaatttagctgaaaatcgaaattctagtggttcaagtgcacacaaagattggtggaaaactttctggggtctaaatttaccatcaaaggtaaaaaaaatttgcttggagagagtaatgcaaaatgctctgcccctgtggctactgcactatgccgaagaaaagtcattaactctgccacttgttccttatgtctcaatgcttgggagtctataggtcatgccatgttcaattgcacaaaagctaaagcagtttggagagaaacaaagttcagtatagaccatgcacatgctcagaatatgcacagtgg

SEQ ID NO: 136673 - DNA, 799 bp, Cannabis sativa
  modified_base (754)..(761): a, c, t, g, unknown or other
ttattggacaatattattttacatggatcaaatgtaaaatataaaaatatcgagtcatatataagaacatggatcagtccactcatcaccaattggttttaagatagaaactcatagtttttaacatgctcatccaccaagaaatttcaagaaatctaatgctaattgtgaaatttggattgctagggttcttaaaaaaatttggtgtgattttagaaaaaattggtaaaaaaaaaagaaaaaattgggaattggttttgttttaaagaagttgagaagtgatttggtgaaaagaatttgagtttttgatgaagaaataagatggtaatgatggtaatgggtgatttgggcttgtaagagggagaaggacaagaagaagatgtgggttggggcgatttaaaccaatctgtccaaactcagccttctagggtcctgaccctaccttgtagtgcatcggcccgtgtcgtttatttcgagctctcttcttattttatttttttagctgatgctacaggggttgcagcactacatagaatttgtagtgccttgacacttcgaaaattgtatttttgactaattttcacggtttatatttttttttcaaaatagaaataaaactaaacaaaatgaaaataaatatgtgtctcattaaaataataaaacaaagattaaaaacttggattgtctcctaataacgctttcgttaaaatcatatagcctgttgaccgagattttcggcaactactaaaatatnnnnnnnntattgagctgtaagaaagtgagagaaggatttttacgt

SEQ ID NO: 136674 - DNA, 602 bp, Cannabis sativa
aggatgttaatgaaacatacatggtagtaaatcttgatcccggtaaaatatttccaacaagtgtgtatggcgtgttacaacaaaagtgattgcacattacaattgcaatattttatttcagtattaagagtagttgactctgttgtgaacacactaaactcatgtgataaatattacaatcatattgttctcttggaacttgagtattattcctccattaatggtgatgatattccatatgaagtgagaaagtcgtagggtcctccgttaatatcgtaacatgtacttatagacaacatgtcaatcactaaactgatacgacttacctgaacgtgtgtactaagaacttttcttgtttagattgttgtaagccaaagatgtatttggttaatggaagttattgttttcatgtatgatagatatgttaaggattgatattagttgttgaatacatgtatattctggataactctttaatattgcgtgtgcacacttgttgatgtgagccagtagcttagtctcagtgctatgatcgagtcgatccagatcattagttattattctcatatatgaatctcagatgtctcattatgtattatatt

SEQ ID NO: 136675 - DNA, 909 bp, Cannabis sativa
  modified_base (800)..(804): a, c, t, g, unknown or other
tgggagtttggttacataggcacagactccacgttgtctaagataatattgtcttgtagactcaattaattgcttttaattaatcaattagaattttaaaataagactatgtattgtttattaattttaactaagtaagcgcttaattgagaaaaaagaaaggatttcgggtgttatactcgaaatttggctacacttctgaggatgacacgtgtcaagtagtggaatatgaaccacctgatataatgaatttatatcatttaatgcgaaaaaaagtataactcgttaaataaatgattaatagagaatattcataactcgttgactatgaagtcataagcgagataaggatagaaaactattaaaacctatatcgacgagacacatacctgcctcgaaatacataggcctaagaagactcatttattcgcaagaataaatacaattatgcaatgcaacctcagataatgaataagcgtgacattcacctaaatattcaaaaggaacttggcgagacgaatcatctgctaacacttagcattttttccacattataaaagacaaggacaacaacttggagatatgcgagatgctattgtccaaatcaacattgaccatcaacaagccaagcgagatgttattgtccaaatcagtactaaccattgaaaggataagaataacaagtaattgtgcagttttaaattgctatcaaacacgtgatctatatgaaacgtgggaattaaccacgtttcattaaactattattatttaaattaatgtaaataactgtcaacctatannnnnataaataggggcagattccacagaaaaagggatggagaatttgaataaaaaaataaatacgatcaattgtatattgtattgaatactcagaaaatatcttgaata

SEQ ID NO: 136676 - DNA, 997 bp, Cannabis sativa
catgctgcccacccaatagcgcattacatccgaggtttgcgaattccgtgttctaagccttggtatgaagccgatcatgtgttattcatcatgaatcttaggaaggaaattcattggatttttggtcgtcttgacttgaatgaggggattttgtttctttataattccttgaggacttccaaaatgaatgttgtagctaggaatgcaatgaaggattattctatgttattagtgattgtggagcatttgtgggtgcatttgctgagttcttcattcatggaaaagatgttcctgcggattttgatatcgaagtctatcgtactcgacttgctgcccttttcttctcatacgggcaaaggaaaattgatgaaagtattgatagcgaggatgagaagcaaagaaagtcttctaaggcttctaaattgaaaaagtagggtcttttagattagtgacaatgtattgttattggctgactttattatcagacaattgttagttttcttatgttacaaggtattatatttggttttatactttggatctagttttaaactttttggatatttgacaataatcattataatatgttatttttgtatgtttgtatcagcatcagttttatatttttccaatttttgaagtttttatatacagtcgtacaactatatagaaactattatacaactatatacaaacaatatgcactttttagcatacttgtaattttaattgtttatcaatgtattattcactgttttgaaacatttttattatccttgttaattatgttttataaattcctatttgactttttaaaaactttaataatgaaattattttcgtagttaacctttaacaagtgtcaaaactatcataaaacgattttgcaactattagcatactgtttaaaatttatgaaataatatcacaagtgtatcgaatataacatatcatcctgtttgaattctcacagaaaattaaacaattcaaataattc

SEQ ID NO: 136677 - DNA, 806 bp, Cannabis sativa
atcttttcctttaattggcgattgattattttggtttgttcctcaatgaatgcatgaatggtattttcaagggagtttccttgttgttgagcatggtattgaggtgcatgatatgcctttggaggttgagcttgattctcatttctccattgtcctccagacgtttgaccttggttggaattatctctccaactgaaattcgggtggtttctccaaccagggttgtacgcatgggagaatggcttgttatattgccctaaggcattgcattgctcctcatgaacccccttcatttctttgtaaactaagcagtccttagctaaatggtcattttctccacaaacgaaacaaggttcgagtggtctagtttgtgcttgggcaaccatgcgccctttttggccatctttagtcgtaaggatttcaatttgcttttttaaagcttcgacttgggcctttaagctatcctcttcccgaagttggtaaatcccagctggtcgatttctgttggtgctttcagcagcacttggaccagtccatgtgtgagatttttcagcaagctcaatgagaaactcaagagcttcttcgggttccttttgaaggaactcaccgttgcacatcatttctacgaactggcgctcacgacttgtgaggccttcatagaagtagctgacgatgcgccaactctcgtacccgtggtgtggacactgacttaagagatctttaaatctctcccagacttgatagaacgtttcattgtctttttgggaaaatgttgagatttgtcttttcaaactgttggtcttatg

SEQ ID NO: 136678 - DNA, 778 bp, Cannabis sativa
ctacaaatagattagttgagcccaaaagcccaaatgtctacaccaaattttctattaaataaataaaatttatttaaatataaatatcaacatattatatacttatataaaaaaaaatcaatttattattagataaagtgtatattttgatttaaaaccttttaacacccaaataatttttgtatctcaactttatttcaaaaataccacgtataattaattttatcatctttaccaaatatactaactaagaactttacattaatattacaatatatcttttagttttaaaaagaaaattacaaattgattagttaagcccaagagcccaatgtcttctttcaatcccaaatttacatcatatactgaaatttctaattttttttactgtgggacgaattttttttttttcaaaaatactgtattttttttttaaaaaaaataatgtgtactgtgttaagttttcactgttgttctacggttgttttttagttgttccactgttatttttagttgttctgttttgtgttctattgttttataaaaacacaatatttttgaaaaattttccacgtagcagtatttttgtaaaaattaacttaaattccaatatttttgtaagtttcctattttttatttggaaagtgagcttcatatgcccatatggtttccctaagatccatatgatctaatacaaaatttcattcccaacctcaaaggtttcactgccttttggagccccaaaacaaactcatttcatttaaataataataataat

SEQ ID NO: 136679 - DNA, 747 bp, Cannabis sativa
tgagttaacttggttacaatccatcatcaaagacttcaacatccaacaccaacttccctccactttattctgtgacaatacaaccgccatccacatagcagagaatccagtttatcatgagcgaaccaaacatgttgaaatagactgccacattgtaagagagaagatcaccaaaggctgcatcaaaatgaatcatgtctcttcttcagcaaacttagccgacatcctaactaagccacttttcccgcatcaattcaagaccattgtgtccaagatgggtctacaaaacttgtacactccatcttgaaggggcctatcaagaattagttatagaaacagttagtctctattgtcggttatgttagttagaatgtgtcagtcctgttagttggttctgttatctacctacatcctttctctgcctatataaggctcactattgtatttttccattttatcacagtataataaaaatactttttctccaatttctctgttttaataagattaaataaaataataatttaataaacattaggtgtgattctatttgtcgaaaagatgttaaattcgtagtcatgataaaattataccataatgagttaattaggattattaatgtaaataattataaaatccgagatctcttttgagtaaaagatattcttttaataggatattttgtgtgatatttcactaaaaaaaatcatttttagtgacaactttttaatcacaataaaaaaaatt

SEQ ID NO: 136680 - DNA, 773 bp, Cannabis sativa
atccctggacaactgctcccaggaaattattgaatgacgagtgaacttgttgaaccagctactcgttgctccaacaagtgaggtggggaacaaaatatagcgttaattgttattcacgttactcgctcacattatcgtgttaaagttattcaaatgcgagactggatctgtggttccatcataggacgagacatgcaggtttttacatcccgaaggaaaaggggtattaatattatctgggtgatacggctcaagctcctcatcagagtcgtattcagatgatttccctaattcccccacttgatatctcctgaacttttcctccacctcgtttatccgtaattggattggatcctcttgctttggaccaagctattggcaaaggtcaggtttcttccgattcaagtgctctcgcagatccggttgggagtaattgttggcagatctcctcttactcattgaccgcgtcctacttatagaccttgtttttaagtggctcacagatttacttgttctcatactctcttgatcattagctcattgagtactttctcctcttcgagttgatcgactatgagttcttgatcgcctcaaagtcacacttgcctcttcacactctgttctttcctcccaagagcggtttgtcgtatttccctcagggtacgtacgagtcctcgctttacgggtttgggaagaacgctggtgattcctagcaggtgatctccgttctcccagttgagttccatgatcctcctcattttcatgagggattt

SEQ ID NO: 136681 - DNA, 667 bp, Cannabis sativa
  modified_base (640)..(642): a, c, t, g, unknown or other
tcgggagtagtaaatgactaaactacccttgctacaattaaagagttttcaatcagaaataggaggtccaattcaaggtataatgtttagcgttcttctttatggttttctttagctcaagataggttaattgcatgattttagtgatttgaggttctgtagtgtgcatctagtttgggtttgaattcttgggttaagataggtttgttttaattgattttgtgctaagatagctagttgtgctacagattactcaaacttgaaattagagagcttaagttggctctctaatggtgtttttaatttctaggctatttgatgtgttctgttgcttgaaatggatttagtatagtatatgcaagtgttctagagagtatggtagagtttgggctcgatttaagttgtggaggacatttttggggttccctgcactgaaccggtcgaccggttcaggggagcctgtaacaaccggtcgaccggttgatccccaggtaccggtcttccagttgggaaccagtctgctggttgggctttttcagaaccctaccttaaactaagttgaagaataagcatactatgaatgtatattatttactagttcacacatgattttataaataatgtaattgatgtaaataannnattttatatctaaattttttaaata

SEQ ID NO: 136682 - DNA, 1217 bp, Cannabis sativa
aaatttattaatgtcatttaatttcttttctaaccttttatattgagctatatactatatttttagttttcttttatttaataaaaaaataaaataaaataattggagaataatatcattgaaattttttgaggcaaatagccaaatatatcaacagttgatagaatgtatgtattttcaatgttgtgtttattaatttcaattttaaatatatgtatttttgttatatttgatctactaggcatcatcaatcatatttatatctcaatttttattattgacaatgtagttagtattaatagttaggtagtttcttcatctgtctttttaccttttattttttttaaaaacctaaatatgcctatttatataatgctgaaactaatgaagaaaaaaatatatgtattatgtatatgttataaatttatccttatttaatattgtcaatcaattatatttttgtaaacctttttttaattgagataaattgttaattgttatttagttaattactctttattagtacatttacttattgtaaaagtatcattgcataaatcaaaaaataaatttcaaatgagcattaggcgattggcgactgtaaattttctcaatttgaagttttaaacttttaaagtcagaattagcagcgaatatcaggttctttcgtcactttttgatcttccaaattaagagttattactatttgattcttctttgaaatattatattagttattgttgttgttgttgtttttttttactatgtctcttaaaattaaaaaatatgagtttgggtatgaaaagagtaaaaaaaagaaaaaaaaaattgaggaattaactcaatatcaaagaggagctcttgataaatttattataaaagaaccaccacaagttttgtttataatcataaacataatgttgttgatgttgaaatttatgaaaacatgctacttattattgagaatcatagtgaaaataatgatatgaaaaatagaggtgacatgtctattgaaaatgataatgtggcaaatagaagtgatgtgcttattgaaaatgatattatagaaaattaaaattttgattatgaaaattgtgatgttaattatttaaataattcaatcaaaaataaaattttagaggataataataatgacaatgcagaagaaacaaattcatttaaaaatttactttatatatttgatccaagaaattggg

SEQ ID NO: 136683 - DNA, 2354 bp, Cannabis sativa
gtggttttgcagttaaaattctgcgtagtccatgagtctatcttactagatttctctgatacaaaactagagtttttctcttaaggattttccgtccctttttcagtgtattctgcccctatttatagttacatagggaggtagttaattacaatcagattaatatttcacaacaatatttccctaaaattatgagatttgattacgtcccacgtaaaataaatccagttattatttgaaaatcacacagctgtgatttatccgcttttaccgggtcaatgttgacgtgaatttagatacgctacaaagtgtatctcactgggtcacctcgctgggatagcaataataactctgacagcgagctaaagcttttcccatgtctttctgaggttgataatgtaaatactgtcatttctgctattgaagacataacgctccatctgacaatcgcaattcttggtgaaaaggtgaacttcagtagccaacatcatttgaatgtcaacttctatctgagagagctgactcgacggagcagtggatctcattgaaagatgtttggggctgattagtgaaggtaccatgagtatgccttcctatagcgagatggatgccttgttatttgttgtttggattcattcaactgttacgcttactttgtataatgtatattatacgctaagtgttccaacagtttacatgtctcatcttcatctctttatacatagcgagattggtgcctcgctttgtattactgatgcagtccttatgattgtatcttcatatacgaaatggtttatcgtcaatatgtaaattaacagtttgtacattcgtgtctcgcttaagactttatagtcaacgagttatagatatactctatcagctctacatttaatgagttattctattttaatatcttctaatataattgtcattatattcgctgattcgtattctcccaggttgacacgtttcctcctctaaagtgccagccgaatttcgggtttaatagttgccccttaaaaattcttcttaatgaaaagtactctttaaatgattacagagggtatttttatcataatcccttttgaaaaaatacatgtcctctgattttgacagtttggggatttcgatgcacatcagcatttaataactatcttttccacttcctttttcaaattctacctgttggatcaattgtttccttgatttgacgggaattaacccaagagtataaaacggagaaaaggaaccacctttcaatacctttgcaatttcaaaagatcagaaaattctttgaacttttttgtaaaaaatcgtacccagattatctaaaaaccttgcatgccatctttttcattaacatttttcctgtgaatttcatccgatttaattttcaacttcaagcatttagagggatcttcacgtcgtttgttgtttagtcgattgcagaaccgctcatcgtcccgaaaaccaactccaaacagtaagtgatttctctctttattttcttacatgcttttaattttgcatttttgggtttgatcactaatttcttagttagcacctttattgtctcatctggtattagcaattttaggagtgaattgtatctaggtaaatattagggtttaggcagaacgtaggtttttgagtttctccaatttaccaacttatggtttgataaatttcatccaggaatcgggattgctttctccttacatcaatgtcccaatctagttcagaagtttatcgtccaaaatatttagaaatagagcgtcctattgaactttccatcccatacaaacccagaatttcagaacccaaatccaaattagagataaatgatgcaaaaatagggaacacttagtgaaaacccaccaagaagatattgctagttgccacagacgcttcttgaaagaaattacagaaggtagacgccgtttctttcgagacgctgcctggcctgtacctcccagtttgtcttctattcctctggctaagcctttgtttttatccaaagtcacgattacttttgaaccaggtgacctggactttgaaattatgtcttccaagccacgtaaatcaaagactccccaggaccctaacatcaccttcgaggctgagctaatagagtcaaaggtgcgagccatcagagactatgtaggtaataccctgaggacttgtggtattgaatataagcgagactgccgggtcagatcggtggttgctggtgagttcagttgttatccaacagtgcaacttactcgcgaaacatctgaaggggccagtggcgaaaccagcgcaagtggctcgaccgggataggcgcttggagcctcgaacacatcagggttgg

SEQ ID NO: 136684 - DNA, 569 bp, Cannabis sativa
tatatgggatctgttgaaactgagtataagtggtgtccataccttccacgaaatagtactcgtcaacaaaacccccaagcttgctatcgaccttgtccacagtgcctgtcaaccacttgaaatctagttgagagaagtaaaagtaccccgacctgcttttcttgggggtagacttcaggtcaaagaactaactaacctcatgcggagacagcacaccccattttttgaatggcgtagaggatgaacagggtagaaaaatacttaatgcccttgggagtaaactgtgttagacaaaggcaaaaataatctgccaccttcttgaagtacgagtgcaagggcaacattgccccttgcttagtatgagcacccgaccaagcacacatccctttctgtgggttcgtagctcggtgtcttgaagaaggaatgtaatactcaagtccgcccagataaccagcctggtccaaggccttcatgcgtgcctcattgatctttgacggagggctcacccatctggcacctaaggcaccctgcctcctatgaggaactgcttcagtgagctcctcagtgac

SEQ ID NO: 136685 - DNA, 540 bp, Cannabis sativa
tccaaatcgcttcccctgatttccaatcgcagttttctatttatatcttatttttagggttcgtcggataaaaataccctcaatcgtacggactgtcgccgtggccacaagattcctcaccgcggctagatgagcttctgaaaaccacggttctgtcttgactttatggccgcggcgaaggtgtatctcgccgcggcgactggggcttcaaaaatcattcattctgtcctcgagttataaccgcggccacaacgatctagccgcggctagaagtgcatcaagctgaaaatggcatttttctttgctctgcttgccttttattgcacttctgcatcctgaggcctctattactccgaagaacttgaaaacatagaaaacacgcataattctgtcctaaaacaacgaaaagcgaacgtaaaattgatccaaaatataggctaaaaatagcctaacaaatattatgaaaaatgttacattttattttgtggtatgggtggaatgtcatctccccaaaagtgaatttggcatgacaactataaa

SEQ ID NO: 136686 - DNA, 834 bp, Cannabis sativa
ttccaagattatatatgatgataatttgattaatcgtttttctgagatattatgaatttggatccaaattctggtgctcatcataatgatgctgttgatatttttgattctgtacatattttaatttgttgttcaaataataagccggttgggatcttctttctttgtcagtattttctaggtcagcctatttctaatcatcatttgttatttgttcaatgtcaaacatccttaccgtctgaaggaggttttacgaacagtctgattgcattatttgacgatgatagcaaatacggtatgacaattgtaatcgttgaagtgaagagagttgctgagcgttgtttgagtgcggtagtgcaagcaccattgacaggttgattggagagaagacaaaagttaggcattaaatgttgagatattaaatttcaatttcttattttattttttaatctacatttaaccttttattttcttaccatatttaattttattaattgtctaatttaacttttatttttttcaaaaattaaattatttgctcttatcttgtctaagtttattagttggctgatttattatttgtattttttatcattatagggtattatctataatttattgttgagatattctgttatttttttagaaaattaaaattttggattttagaacaatctctttaccataattttctctttttgacgtttgattattaattatatatatatatatatatgtgacggacccagaaattttactttgtgggggcttatttattattcaaaaatatttatacctatattataattattcttactagatttatttaatttt

SEQ ID NO: 136687 - DNA, 585 bp, Cannabis sativa
  modified_base (155)..(156): a, c, t, g, unknown or other
ccacctcgcttgttggagcagcgaggagctggtttaacaagtttactcaccattcaataacttcctgagagcagttgtccagggatttcaagaaacagttcaaggctactagggatagaccacccgaagcggcctcgctaacaaatataaagcannagcccggtgaaacacttaaggcatacttaagtcgttttagcacggctgtggctagggttaggaatttggatgacagcacacaactcacagccctttaagcggggatctctagtgatccatcaaccgcagggggcgagctgcgggacgacttacaaggtcgtctagtaagaaacatcattgtgttcaacaaaagggctcaggtattcgtcagaaggaagaagccagaaaggaaataaatttgttgagaaaaagctcgggaagcaaacctagcaatgtttcaacaagtatgatttccacaagaatcgataacttgggggcttctggttcgaagagaaaggactgttctaaggaaccttcgaaagataaaaagaaacagaagaaggacgataagtacgtgccagtgtatactatttacactgagcttaataa

SEQ ID NO: 136688 - DNA, 697 bp, Cannabis sativa
ttagttgatctttgatcttaggtcaatagatattaatattaattctgagatggttaggttctggcttactacaaattactctttttctgtcctttttttatgtataacaaaaaatgtgttggacatgaaacaaattgagaagatttttagtccaacattgatggactagaaaaaaaattatcatgtccataaatattggactagaaaaataagtggggatactaaacatggcccatgattcaagtccaatacggctacctggttgagcagctagttgaacatattgttcatccagacctcttcttctgttcagattagccctgaggtcatgggccacacccaacctgttgaatactgaagtaccaggtggtctcagtgtctgactgatttagccggtgggttggccagaactatccaaaatgaagttattaggtataactccacctaaagaacggtcaggtaggatctggccttctaccgcttggcccacaggttggacttgtgatcggggattggacggcagaccattatgagtttgggcggtatgcctagtagcaatttcttctgtactgcctagtgggatactagacgcggtggcgggttgctagtaagcaacttgataggctctccgcctagtgagatgtttccatctccctgtccctccactcaatgaactggcgtcgctgctcatcgaatg

SEQ ID NO: 136689 - DNA, 865 bp, Cannabis sativa
taacaaattcagtcccaataatttttacagatcgaagtgtgtatgtacgagtaatttctctgttattgataacattaagaatactttatctgtgaatttgttaacaatatttcaagacacccagtttgggcattttttagataatcctgactttgtttttcacccccaagtagtccacagcctttataactcacagactgcacagtttttagcgagacaaggacgtacgaactattgattcttgtattgatgagaaatcatttcgcgtcagaatgcataatctcaaagaagacataaacaatgcatagcgaggcatctacctcgcgatatgtaaagaggtgctgacgaggcaaattgtttattagaatacttagtgtaatatacattatattaactaagtgtaataacttgaaggacatgattgtccaatctacaaggccttatggtcaaagagcagctcttaagttcgctcagtacactggtgctcaagccattgctagaagacttatgaataaaccaagttgttcatgtaccaagcgagatgcctcaacgagatacgttttgtagcatgtcttaatccacgttagcattgaccctttgaaagtggtttaaatcacagttgtgtgatttttaaataataagtgcatttatttacatggagcataattaaagcccacaatttgggaaaatattgttgtgggattcaaatttgaatgtaattaactaccaacctatgttattataaataggggaagattatacaaaaaaggggacggaaaatccttagagagaaaaaagaatacactgattctaaagaaccctagtattgtatcaaaaaaatctgaataagattggctcgtggact

SEQ ID NO: 136690 - DNA, 517 bp, Cannabis sativa
aaaaggcaccatctgggtgagtgtagagggcaggggtgctttcagtgtggcatgccgggacactacaagagggattgcccttagagtagaacagaagcaccaaaggctccgacgagacccactccagctagggtgttcgccattactcaggctgatgcagaagccagcccttcagtggtgacagctcagctctcgatcaacaactctttttactctgtattgtttgactttggggccacatattcttatgtggcagcgagaatctttagtaaattggatagaccgcgtgatagttaggaatcagggtttggaacccttttacctggcggacagttagttatctccaaaaggtggattaggtctatgcggatcagaattgacaaaaagaagttaggtgctgacctaatagaaatgagttttgcagattttgatattattctgggaatggatttcctatctaaatattcagccagtattgactgtaagaggaaggtggtaatcttccaaccagaaggtg

SEQ ID NO: 136691 - DNA, 577 bp, Cannabis sativa
aaaggaaaccaagtagacaagctttatgaaacaattttgggaaaccaatgagaaacaaaaataaggaaacagatttgtgacacaaatagggaaactagaatccagcaataaccaattggagttttctttttaagcaaagacacaatgtttgacacaagaaaattctcagaatgtggttctaacaatttttggatttcacaaagaaaaatagaagagatgaaacacgaattgataggaaaatagaacacaagttaaacaagattatagaacatgaattgaaaaaaaaacataaaagatagataggccaaacccgatgatcctaagctctaataccaaatgatatgaaccacaccaatagttgtgatgaaacttgataccaattatggtagcctctaagaattcttgaaattcggatgtggaaccgcgacccaatgcttagttaaccatcaaccttagtatgacggaagatgccacaaatagtgatggaaattcgtttgataagtcaggttgatcgccacaaggaatactccttgataagtttgaatagttctctcaagaactcaagaagaaaacctct

SEQ ID NO: 136692 - DNA, 723 bp, Cannabis sativa
aaataatgaactttaaataaaaaaaaattactaaatacttaaaattacattattctgagatcccaattttgttttacaaacaaaactaaatatttcttatataaaagtgtctcttgacaactaacaacatcttagcctactatcctgaatacctgaacactccaggcctaaccatcctaatatgtacaatcatcatccgactctagattcactgctgcttagcatttgtcttatccttacctacacatgtaaacatatatgtgagtcgacagacttagtaagaaaagtatagtttataaacatataactagaatgtaatcaggcacccatacacctaatcatgatcatatatcctgcgtccaatgagtataagctttgaatgttcttcatgacagtatgatcgaccataatatcaacctatactatgtactttagtcgtaccgatgtgatagcatcaatccatacttaactatattaccaaatatatatttgtcgatattcagtgtaactctatatacactaataccactcttactgatatgttatctaataggaaatcataaacacatgtatgcatgtatatctattatactaatcttacctcaaatcttaaattttgatatgccgatcaacttgagtggaaactgctgcttgacgattaaaggtgtaacaccctaactagcataggcgtgttagcgtgattttaaacgtattgtgcagctc

SEQ ID NO: 136693 - DNA, 1144 bp, Cannabis sativa
  modified_base (26)..(27): a, c, t, g, unknown or other
gagttacagcaagaaggggcttccanncttcaagatttccagaagagagtccaaaaatatatcaacctagaaaaggctcaaatagtggcctatgggggatactattccaccgggctagcaggatatgtacccggagctcagctcccaggcacttttccagcagcagctccaccgatgagcggcatacaattttccgctactgtcggatatagtcaaggaaaggccttggcccccgcatcttcccactttggaaatccctcggggataaatggacaagcctcgtcgcactccgctccagccgcaagtttagccggtccttctcaaggctcttggagcaaaaggtcctctaaaggcagcaaccggacggaggataagcagcagaaaagggagtatactccccaatatacccaatacacggagttaacggactcccaagaacgtgtatattttgctaccaggccaactacgcactaccgaagaccgcctcctctgtacaaggacagctcccggagggaccccaataagagatgtgaataccacaacgacattgggcacaacaccaatgaatgcaagaatctcaaagatgagatcgaaaacttgatctgattgggacatctctacgagtggatcaaaaactggttgccccatctcaatccggttcaggcggctggagctttgcctcaaggagcgccagggggtgtagcaggagcattggccccagttgctccccccggagatgcccagcatattcccagcctgccaccaagacccaacgggagagtggccatgatctcgggaggaccccacatcggaggaaccacccgtaaggagctcaaacgatacgtaggggccgtaaaacacaatgaggtttgggaggttactcagctcccagctcaaaggccccggctaatggaccaacccattacattcacagaagaaaatgctaagacagtgcgttttcctcactatgaccccttagtcatagagactcccattgctaataagatcgtggcaagagtcttgatcgacaacggaagttctgtaaatttatattgaaagaggccttcactgcaataggcctaacggaccgagacctttcaccaagtggttcccaacccacggggtttaatggaacaacacttat

SEQ ID NO: 136694 - DNA, 890 bp, Cannabis sativa
  modified_base (27)..(40): a, c, t, g, unknown or other
aggatgttaatgaaacatacatggtannnnnnnnnnnnnntggtaaaatatttccaacagtctgatcgatcgaagaagacggtcacaatggttaatcttcagtttgctagggttagggtttgttgggcttgggccatggctagagtagaagagagatatctgctaaagtagtggaatgggattataattccaccaaataaaaaatggaatagcaattctattagtttgggggaatagcattactatggaattcttttccaaaattgttattttccaaccaaacaaaataatcaggcccattagtattctattcaattcctttctgacccattaccatcaaccaaacggacccttagaggagctttagggtcagaacataaatcaggaacatgggacctattcttccaaaatccaaggagatcaaaaaacaaagggagtaacacagaataagtcttcattgcattcctagcggaagaattcattttggcagtcctcaaggaattataaagaaacaaaatcccctcattcaagtcaagacaatcaaaaacccaatgattttccttcctaagattgatgatgaataagacatgatcgacttcataccaaggcttagaatacggaatttgcaaacctcggatgtaatgcgctattgggtggcagcatgtatgagcgacatcttagttttcattgccttggctttgttgaacttgtggtacaacgcttgaatggaatcatcgaaaagacaagcagttgttgcaaaattcactataacaacagtagaatatttaccttttttcctaaggtaatagaatatagtgttcataagctgaaacaaaacaatacaaaaacacaaaaacaaaaagttaaaaaaactatttaaaaacttgaat

SEQ ID NO: 136695 - DNA, 1406 bp, Cannabis sativa
  modified_base (33)..(36): a, c, t, g, unknown or other
  modified_base (162)..(177): a, c, t, g, unknown or other
  modified_base (739)..(741): a, c, t, g, unknown or other
  modified_base (1168)..(1170): a, c, t, g, unknown or other
taattactaccctagtaattaccctacctagtnnnnacacagttacttccaaacacacctaattaacaaataaatctcaaaacttcttttcttcacaattaagcccttgcttagtgtacattcataaataagacataattaaaattataattgattaattannnnnnnnnnnnnnnntctacaagcagtattatctcaactagtgtggggaccatggccctatgtaatcaagcttacaatatgtagttctagaatttaccaaataaattctttaacttattaattcttcctgactccactatagatttggaattaaactcttaattacatagaatgcactattactaaaaataaatgcgatttgaattacccattatttcaatttaaatagtcaaagatcttctatggatgatctacatcaaatagagacaaatttattgttctacccttcaatgtaatttatccttaaaatacttagctacctataaatgatatcctagtaaactaatataattaccgaaatgagacctcaatcatttatttctattaagccaagctcaaagaaaataatcatttcacttctatgcattcatagaagttatatattccatatttatgattagcgctcccacttaattatactaccatgttcccaagatgtaagtattgggccgatccattggtcagctttaacgaacaactctaagaacataaataacacagttgagatcgaacctannnatatcaggattaagatctattgacctaaggtcaactgatattgacttagatagatataactgtaagtttatgatatcttattcaaatttaatataagtccagtttgacgtatacaccatacatctaatactagcatactttgctaatgctctagaaaggacataacatttatccaaggtgtaagtaaactttatcgttgattatcatgttagtgtaaattcattatactgacaaatgatgggacataaactttaaaacatataattatgattatatttcactgtgttgacaacattataattatgaataactatatgtcttggatttaaaagaatttatacattaaacatataatcatgaaagcaatcatgtgaaccatgcaacataaaatgatttctaatctcttattaattagtaaatctgattnnnttgaaataggttttatttagggtatagaatctcaacaaagtcacacttgcactaatataaaactaaaagtgtattttaattaatctcaacacattgatgtccaaaatcaagtatagtacataatatctcatggacgctatattgcccaattcctgtgctatagcgtcgatttatcattttttaaaaaaaatcctaattttaagggaattcacctatctttttaagcattataaata

SEQ ID NO: 136696 - DNA, 988 bp, Cannabis sativa
  modified_base (534)..(539): a, c, t, g, unknown or other
aaaaaaaaaaatttaaattaaaccaatattctcgcaaatatttattatgcattcataatctatagaagataaaagacaaatttgtctaaaaagaagcataacctaataaataataaaaaataaatatgtctcaaagtagaaaacaaaaaaacaaaaaaatcatagtatcgtagtcttatactttccaagtctcccaacaaattaaaaagtaaacaaagatgaaactaagaatcgagaagaaaatatctttacacctgtaatccacaatgatcatcagtttactatcgttattagatcttcataatttaagcatatgagttataattttgattatggatgataatcaaaataattttgattatcaatgatatatatattatatatatgttaagaataaaaaggaaattatatatatctatatcggggtcggatatagtacggatagtattatccccgctcccgcaccccatgcccgcttcgggtattgaaattgtcccccaccagtgccccattaaccaccaagacaggaaatcnnnnnnccattaggggcgggtccccgcgatataaatttctatctctatatatatatctatatctataacatatagattaaatttcggcaaaactttctaaagttttactttatgtgcaaataacctcaacacccaattttttgatggaaaaacctcctacattcgtattctttgagaaattgaccatttccatttaatttttcgcgttaagtgtagcgatgcacacatggcgggaaattagcagggagtactctccccgtccccatctccgttaaaaattttaatctccatcaccgcttatttcccatcaggaatagggtagagagtcccctaatgggatcggagtcggggcgagaaatcccctaataaaaaattaaaatttacaataaaaatttaaatatataaaattattaaactacataaaaattaaaatattacacattaagatcggaaga

SEQ ID NO: 136697 - DNA, 923 bp, Cannabis sativa
cttttcttggacactccaaaaggattcacgcggaaagtattttcctttcataatatcacaccaaggccgattgatcccacaagccaacatccaggcaagtttggctagtaaggcatggttaatatcttcgaaacgccgaaacccgagtccccccaacattttgggttgacaaatagaattccacgacttcgcagcccacatatactgattgtcaagagagccattccaccaaaattttctaactatagcatccaattcacggcaggaggagaggggaattttgaatgtggacatggcatagttgggaagggccaaagctactgaatttatgtataccaatctaccggccttagacaaggacttgagtttccaaccttcgagtctctccaccaatttagatttaagaaagtgaaaatccttccttttgcttcggccaaagataaagggattacccaggtgcttctccgagtctgatatcacactcatatccagcttgttctcaatggcttccttgagcgaatttgaacaattgcccgagaaaagaattccagatttctgtttgctacacttctgcccagaccactcttcaaattgttgaatgcaatcattcaaagtctctatatcccggagattagctcgggaaaatataatggtatcgtccgcaaacataagatgagataaagctggaacattgcgagccaccttgataccatgtagcctacctctgtcttgttctaaagagaggagccgagagagtacttcattgcaaagaaggaatagatatggggacatgggatctccttgtcgaatgccccgttccggcttgaagcgtttcaagggcttcccattgagaagaatggaataggatactgttgtcacacaacacatcaccaagttgatgaagtgagtagagaaaccgaatc

SEQ ID NO: 136698 - DNA, 865 bp, Cannabis sativa
cccagaatattgagcctctggcccccacagaccaagctgatccgtacaaggagatcgggacccctgccgttgaaacattttttcttcttttttttatctgttcgacccatgggcctttattagagacaaaaatgactggccaagtgatttttaaacttggattatgttctttcactttgagacaactagctgaccgggcagcctttaatctcaggttcaccgtgtcttcttatctttttcaatgaatacttcccttattttgataattatctgtgcaaattgttatgtttttttagcttgttatttacttttaccaatgctttgtatgggtatagttgccctccaattgatcgagaagacttatgactcttggtcacttgtatttcacaagtatgattttcatctgttcagcgttttggactcgaggaaacctgtgtacgcgtttaatggtaaatttataacttgctaatgatatcaacacaatcagaatttaaatagacatcgttattcattcattgtcggaatagttttgttaccgtagtaacttacattcataaaagctattatatgatccaaattgatctttagctaaatttaaacataaaaaaattgcacttataaaaagaaattgtactttcaaaagttgtcatccgacctgagtacttaatcatttcatcaaaacctttgggcggggtctgcccagaaggccatctacttaaaagtaaatgttcttgctttttgtacttaaagtggtcatccgacctgatacattcactgataatactttctcaaatgttccccattccaataccttggtactagaacgagcttcatgttttcatcataccgcccaagcttgtatgcc

SEQ ID NO: 136699 - DNA, 1576 bp, Cannabis sativa
  modified_base (963)..(963): a, c, t, g, unknown or other
attttattaaaataaaaataaaataaatcttgtaaaattattctaatttatgttaatctaaaattaattaataaattaatgttcaacataaatataatttctcaattaattaaatttcatgaaaaatatctaatatttaagtatcttaaattaaatcaatttaaatatatctaaaaaaaaataaaaaatagtcttcaaaataactatctagatatttcataaactaattgtcgatttttataattaaaaggatattatattttagtctatttattttaataaatcattaatgataattacttgatttaagttgatctaaaattaattattaaatcagtttttaactttaatctaattttaaaattttaaaatttcgaaatatctacatttaaaataaatgtattttgaaattacaaaaaaataattattaaaataaaataaaatatacttgaaaaattattctaattcaagtttatctgaaattaataaatttataacttaaatataattttcctatttaactaaatgtatcaaaatagaaacaaataattaagtatcttgaataaaatcaactgaattattaattctagttaatatctaagaaaaatattctaatctaagttggtctaaaattaattttcagcttaaatatattcttctatttatataaaaattagaaaaatataaattagttttctaaaaattacttatctaaaatttatttcattaaactaagtgtgtttttttaaattaattttaaaataatctaatgaaacattaatttcatttacttcaaatttaattatgttgctaatcaatttttaatttggttaaactaatacaactattctaatgcaattatttaaataaggcaaatgagtcttcacagttggagtgggtcatgtgagggagggctcggttcaataagtcgtacacactactatgaccccctaactctcacanaaggcccaaaagagatgaatttaatctttaaataaataattgttattaattgactaaattcaatactaattgggcctaaataaaactatcaaaggtgatcattttatttagtaacctagtccatttaaatatctaaaaataagtaggctcttatatgcatctaaacccaatagtaaacatatagactcacataagcattgattttgatgggccctatcatgttaatttagcacaaatgaaaagaaattacaaaattacctgttacaaattacctatttaatttattgacaattaactatgattaatttggatcataggtttgtcaaaaaaattaaaatttaaattaaacaaataaacatgtaacaaataaagaaagttagtgttgcccctgattttgtccaaagtacgtggaccaaccggattgagacacgtagactgaagagacaagactttgggataattcagctaagtctctttaatcaaagagatcagcattcaacatgcctctcggagaaggcatgtaagtttcacatactcccggagagcaaggctacaacggagcacctccgggaggtatcaaatcctatctgaacagtctcctcgcatttaatgc

SEQ ID NO: 136700 - DNA, 892 bp, Cannabis sativa
  modified_base (54)..(55): a, c, t, g, unknown or other
ctggtggtaacacaactaaatgccaagttctgtttgactcaagagagtccattnnatcattaatagcttcattccataaattagcgtctagtgaagtcaagacttcttggaggttagaaggatcctcctctagagtatatgcacaaaaatcagaaccaaaatctttagtaattatagctcttttacttcttctaggtccagtttctatacccttttcatgctcattatccctaatagcagacaagttactagaggatgcacccccactatttctcaatttaaatggaaatctatgttcgtaaaaatcagcatcattagattccaaaatagtatgcacatttaaatcataaaatctatatgctttactattaacaacatatctaataaaaacacattcatatgctttactagccaatttaattctcttcggatcaaaaattctaacatatgccaaacaaccccaagttttaaaatatgagatattgggttttcttttagatttaggaactctattaaggacacaacacacagttaataaaatttctccccaccaatgtgaagcagcacccaaatttaataaaatagcaacaataaattcagtaagagttctattttttctttcatctttgtcattcatttcaggtgaataaagtggtgtcttgtcgtgtatgattccatgtgagttataaaattcaacaaaagcagtggaattatattcagtgcctctattgctacgaaacttcttgatctttctactaagttgattttcgatttcagtcacaaatatcttaaacatatcaagtgcttcacttttatttttcattaaatacacataggtaaagtcagaataatcatcaataaaagtgataaagtagcatttaccatttctagt

SEQ ID NO: 136701 - DNA, 680 bp, Cannabis sativa
  modified_base (139)..(150): a, c, t, g, unknown or other
attggaccgagatcctaacccagacaaaaactttgacactcactcgggaccacaagttgcacctggacccgaacatagacccatatcggggtccagacctagttacaaacccagacacaaactcggacctgaactcaannnnnnnnnnnnaatcagacccaaagctagaccccgacccagacccaaactcgaacccaaaccaggatcaaaaccaaggacgtagaccaagaactaaatcaagactcagattaggattggaacttgggactcagacacaacctagaccaagacccaggacgtgaacccacactcggagcttgatctggacctagactgaaatccggatctgaaccctaactcacacttggactccaacttcgacccgaactcaaacccatacttgaactcagaatcgtaaatggaactagaaccgaactaggactaggaccaggacctaaacaaacacccgaacccaaatcaaaacccaaacagagatccaaacccgaacctataccgggacccaaacccactcaataaccgggacctggacgagaatcaggaccgggacctgggaaatagaactaggaccgggaccaagtacttaacccacacccatacttgaacctaggacccagctcatgacccggcactggaaatggaaccagtctgggacccgagat

SEQ ID NO: 136702 - DNA, 2431 bp, Cannabis sativa
  modified_base (178)..(182): a, c, t, g, unknown or other
  modified_base (405)..(410): a, c, t, g, unknown or other
  modified_base (552)..(553): a, c, t, g, unknown or other
  modified_base (736)..(744): a, c, t, g, unknown or other
  modified_base (873)..(875): a, c, t, g, unknown or other
  modified_base (1282)..(1295): a, c, t, g, unknown or other
  modified_base (1448)..(1451): a, c, t, g, unknown or other
  modified_base (1951)..(1969): a, c, t, g, unknown or other
tttaagttgatccaaaattagttagaataactgattttcaacttaaatatatttttgtgaaaattcaaataattaagtatctagaaaaatctaattagttataacttctaaatttagttaattatagaaaaatacatataattaatttatcttgaatatatttcattaaactaagtgnnnnnttcttaaattaattttaaaataatatgatgaaaaattaatttcatgtattttgaaattaattatgttgttaatcaattttattaggttatattagtgtaattaacctactacagttattcaaacaaggcaaatgggccttcacaattagggttgttcatgtgagggagggttgggttcagtatgccgtacccactactaatggtcccctaactctcacacaannnnnnaaggagaggaatttaaccttaattaaccaactattattcattgaataagcccaatactaattggacctaaataaaatctatcaatagtgatcattttattttagcaacctagtccagtttaattacaaaaattaaatgggcnncctatatgcatctaagcccaaaacaaacatataggctcacacaggcacacactaatttgaatgtatcctatcatgttgctaggtttatacacagatgaaagaagattgcaaaatttacctattacaaattatttatttgacttattgataattgaactattagttaaaatcagatcattggannnnnnnnnaagttaaccatagcaatttagatcaaacaataataggttttataaaataagttttgataataaacaatatataaaacacacacatgcaacaaactggatagatggttataggatttatttaatttaaannnattaaataattaaattaattttttgaaaataaataaataaataattaatttcaaaaattaacaaaataaaattaaacaattaattttaaaaattaaacctataaatttaagaaattaggtttttaacaaacctaaagatctattcaaatatgccaactaacttttcaaaatttatgttatttaaaaaaaaattctaataaaataaaataataaataaatatcatttatctgattttataattgaatttaaataaaataacaaaattttgaaagtcgacaaaatatctcgttagagttttaaaattttctaaattaaaataatcttattttaaattttaaataaggtcattatataaaattaattaaataatataaaatatacaatatctaaccttaaatttaaaaannnnnnnnnnnnnntcaaattttttaaaaaaaaataaggtaaccaattaagcaaaatatctaattttatccatttttaggttcaaaatctactaatatctaaaattaattaattttattctgataattagatttaaattttgaaaaataaaaatctagatacaaaannnnacaaaaaattcgaaattaattccatgagaaaacatgaaaaaatcaaaaaacaaaaattttttgcattgggtgcgaatggtatgcagtgcataccatctactcgcacaagcaaggagggctggtcgagatttctcggtgatggaggctacttgcaaccactttgcgtgcggattgacccttcagacaggcacctgggcatgttcctttggacagccccatgtttgaatgggtgtgacacccgtgtgtcacgtggttttcgcgcgcatggggtgtcaccaccccttgatatttttttatttttcaaaagatcataactaattcaaataaacacattaaacatcaaacaatcatcaataaacacataaatcaatatgaatcgcatccaaatcatacatgcatcgttttaagtccaaatttcatgaaagtaaatcaattaccatggctctaataccagttgttggaatttattttaccatgacctagatttactaacaagtatnnnnnnnnnnnnnnnnnnntgaacttctaaaacgatataaaattaaacacataaaagatatgagaaaccttacaccagttgcaacaaaattaaatgactcattccgctcagtctctaacccttgtatcctttctatagcagagtatcaccaagatctgagcctgacacacctttagttgtttggattattcacggtcttacaaactatgattgaggactaacttgttacgggtgggcatgcactcaatcactaaggctcaaattttgatggtgaaaaagactaagaatttcgaaattagtagagagaaaagaagaagaatcaaaaacactagttgtctatcagaatgaaaactaggtttaaagcatataagcattagttggctagtgaaaccttactcttctttttatactaattctattagggttaggattgaattatttagaataaaactgataaaaatagagcaaaaataggacctag

SEQ ID NO: 136703 - DNA, 868 bp, Cannabis sativa
tcttcacttggtatttaccctttctctaagagttaacaaaataaaaccaaaacaacaacaagacacagggaacatcatgcgggctccaggatgagtatggtttggttcccaaagcgagacaacttgatcaaaggagagatttacaaagtggtaatcgtttgggtaggcttccatcgaagctttctttgtgttgtttaaagagcttttagctttacctatttgggatggaaattcaaattactttgttgatgaggccagctgtatgagtgtggttgccgaggttggagttgaaaagtctacaccaaaacttgatggaattagtattggactgatgaagttgttgggccacgtcaaatcatcaaaaaagattaaaaaaaaactgtcacaaaaagtgacataacacgtcaaatcatccctttgtaaagtattattttttaaaaaatgaaaaggctaaaccccatgaagacacctataagccacataatatataaaaacctataactaatggccatatttgaaccaaggcagtatactgccgaatgaaaaaaacagtaaaaaagtatattcattgtgtcatagtataattgaaagagaattggagaagttagtaaagcatgtaaatttctctttaaaaagggattttttaaatataaaaaaatttaatagagtttacttttatatggcataaacaaataatataaaaagatatgggattaaaaagtaattaaggattaaaatatgaaaaacaaaaaaaaacaatcaataaatttgataaaacttctaataataggtttcgctgaataagttactgttggaaatattttaccaggatctagattcactaccatgtatgtttcattaacatcct

SEQ ID NO: 136704 - DNA, 560 bp, Cannabis sativa
atacttatcataagcattgttgactcaggatttggttaattgacagcatttaattattgttgataatcaccacatgtaaataataataacaaataataaaagtgacacaagattaatagagatttgacctccttgtttagcagtagtgacctacttctcttttatttgtattgattattgagataataccacacagattacatgcttgaatcttgtaatttctagctatgactctcttcaatattacagtatcagagagacaggagagctatagggcttgaaagacttagagttcaggtctcttttcatcttacctaatgccctttatataatgtaatgtaagagtgttcatcaaaccgctcaaaccgcccacactgcaccgcaccacaccgtaaaaaaatgcggtttgaaattctttgtggtgcggtcgcgatttgaatttttcctaaatcctgcggtgaagtgcgctttgcgatattgaattgttaatatgcagttcaaaccgcactgcataatataaaaataccaatttttatatttatttaggtccaacatgtgaa

SEQ ID NO: 136705 - DNA, 776 bp, Cannabis sativa
acaacctctagcatccaatgcacactaaaaaattatattgagatataagtaagatagtataaaaataatttcaagttataatatagaaatgaccaattagcattaaaaaattaaagagtatttaccctatatttcagggaataaagaacattaggtggttgttattcatcgatgttaaccaagcagccaatcatttttccgaattgtcaaaagactgactcttctcttcatcgttgataccattcactgtgagaagctctagtttgtaaaacttgaaaaattttctcaaatcgtttatgctctcccagatgcccctgcattaaattgttaagtattagtgtcttataataatttcactagaatttggtatatacggttaattagattaaagaagagtatacataattccaaacagcattccttggttgccgatgaagtcacaaaataccacctgctgcaaatcctttccaaataacgtgatctggagacgcggtgctatgaatccttggggcaccataattgtgattctatcacgtatatctttgagtcttagaaattcagcaatcatcaattttagtaagttagggattaaagccatgacttttggtgagaataattcatcttcttcattagcaccgccttgtggagaaggcatgggacctttccccttcgatacatcccgtcttgatggtggttgagcgagtggaccctatacaaaatacaccattatatattaaatttgatcctaattctaccaaaatttcggcagcataatg

SEQ ID NO: 136706 - DNA, 1717 bp, Cannabis sativa
  modified_base (1273)..(1275): a, c, t, g, unknown or other
aaaataatgcagaaaaaggacctcgaggttcaagatcccccatgccaccgtgtttggatcaaatcttggaccacgagaacgaaacttgtcattgattacgacaagaaaattgctgaaaagatagtaagcatatataatcgttaattaagtactaataatgagttaatatataaaaatcatatattaattgcttgaatatgtgcattaggctcaactagaggagcaagttcaggtccatggccaaaatgacatcttgacacaggcgctcgggacactagagcattctggacgtgtcagggaagaaaagttatctaaactgttcggtagaaagaaaagggaagtttctgatgctgtggctcagaaacagagggagattgagaaattaaaagccgaaatcaaatcccttaaacagaaaaaaaaacattgctcatcaagagtagaatgaggatgaggatgaagaagaaggagaggtggctcatcaggcgtatgttccacaacagtacactcgtgaggagtttgtttccctcaatgagccacctctcctatacaatttgatgaaccgagggcccttaaccagctagtatatctctattctgacaatatagacaacgttgtggcctaagcgtatttgtacgaacatgaggatctaatcaaagttcactacgaggactacgatgattcacatgaccgggttcttattttagaaatgctacaagaggatgctaaaattccaatcagaattgacaggtgcaaatatgttaaggaagttgtaaacatgttctttccttggcctaaatacctaataggaacacttgaggtaacttttgttataaattgattattaatgattagtagagtttgaatatcttaaatattcaacaatagtaaagtaggttctgcgaatacatgtgttgcagtgggatggatgaataaacaattgttacatctgtgttatttgttattatataggcatgtttaaaattttggggggcattcagttacagtcgttatgctgccaaaaatttgatagaattagttataaatttgatatattatatggtgttttttgtatagggtctactcgctcaactaccatcaagacgtgatgtgtcgaaagggaaaggtcacacaccttctcgacaaggcggtgctgattaagaagatgaattattcacaccagaggtcatggttttaaaccctaagtcattaaaatggatggttgataaataaaagctatagaaaaataatacatgaacacagggttttttacgtnnntttgcagttaaaattctacatagtccacgagtcaatcttattcagatttctaattgtgttttttttagggcctcccctgcataagttttttcgtcccttttttgagcttgtctgccactatttataattacatagtggtctgtcaattacaaagttgattgtaatatatttacaacaactatccctaaaatcatgggattttattacatatcacgcagtgtaaatgcggtttatgatttgaaaatcatatagttgtgattttccacttttactgggtcaaaacaatcgtgtattaaacacgtctttaattgttgtatctggagatgtctcgccagaaacttggttacagtgatcctaatagcgagctggggccattcttccttccaagatcgacgatgtatgtctgatgtcgatcgttgttcttatcctcaaggaattcttt

SEQ ID NO: 136707 - DNA, 583 bp, Cannabis sativa
tttagtaatttttagggttgaactgtatttgggtcaacattagggttcatgcaatacgtaggttttttcagaaccttcaactcaccaccttcaggtttgctaaaattatttccagggattgggattgctttcttcttgcagtaatgtcccaatctggtttagaaatttatcgtccggaagatttagaacttgaatttcctacagaatcagcagtcacttataagcccaacccttcaaaacccacatccaaattagagttaaacgatgctagggttagggaacatttagtgagagcctatcaagaagataacgctagtcgccacaggcgcttcttggaagaaatcatcgaaggcaaacattgtttcttgcgagatgcagcttggccaaaacctcccagtgtgtcctttattcctttggttaagcctttatttttacccaaagtcatgattgcttttgaaccaggtaacttggattttaaaataatgtctctcaagccacgtacatcaaagactcctcaggatcctaacgtcacctttgagaccgagttaatagaatcgaaggtacgaactatctcaggctacac

SEQ ID NO: 136708 - DNA, 942 bp, Cannabis sativa
cgcaaggcgacacatcttaagggtactaggcaccactggtgcccaatagcaatgctcttttataatttgtgttttgcaaaagttattatatagactttttgtcgttaaatgataaaataaaccttatattttccaaaataataaaaataagactcgtttcatttttgataacttttttttttttaaataactaatttgaagacaaaacttaaatacagaaaatgtaataagttttgtcatcacacatttaaattaaattattattaaattttatttggacaaaaaataaattcaggatcttatttgtaccattttgaacaatacaagatgtattttgtcatttaacaaaactgatggtccaattgataacttttgcaaaatacagaattcaaaatggtatttacctcttttattttaaagtgctgtaatatttaagaggtttttaattttatttttaaaatatatttaacctaataagtaataggctataacaaataaataacaatataaaaaataaagtattactattgggttcttgatattttttggttggtaatattttaaattataatattaaattatatggaacataatacttaattgtaccaacgattatataatacataggagagtattaaatactagtggtatcttttagtatttatctatacaaatattctcaaaagtaaaaacacaacataatactaattatggttcatagctgtattttataaagtaattcaatcattgtggcaaagttaattattttgggtaattaatatgctaaatttcttttataaaataataaacatataaaataaataaattatatattgtaaacggtctgattcagtttaatcatttactaacttgttaattttatttttggcatatttaattgacaataatattttattatttcctattaatttcgactggtat

SEQ ID NO: 136709 - DNA, 1027 bp, Cannabis sativa
tctctctctctctctctttgtgacgatctctctttatctctccccctcgataatgttctctttctctctctctctctttgtcccttttctctgtagatcttcaacgacgaggcttgctttggggttcgtggagttggccgaagttcaggttacagaagcagttggaagggagatcgggatttactgggcttgagttttgtttcgatatttttgttaatgatgttggttgaggctgccttgttcattattttctctattttgattagttttttttttttattttctcaattagtctttagtttctaaatttgtgtttttgtttagttttcgatatagatctggaaaattattgtattttttttttttgtacattttgtcatgtaatttatttgtaacttattccacatttgatttacacttaataattttgtttaattttaccaatctaaaatgcatagattaacttgtaaaaatataaatgaaagtttttttgatttctttggtaccacactaagaatgaatcataagttgtttggataattggactagtatttcactctttagtatcaaaaaaaaattaatccaattccctgaatattattattaaaaatatataatcattaatttgattgaatgtattttttaaaaaataaattagaaaacagatacagtgacacactttgtttgtagctgttatctttaggtgggactgtaaaagggtatgatgacacgctttgagaaactcttaaaagttttagtgacacgtatgcagagtcactaaataatacttttacagtcacccacattagtgacgcgcattgaagtgtcactaaaaacatttagagtcactctaagtgtgtaactaaaacccatttttgtagtagtgatatagttattcacaatcacagtgttgttaacacagtagaagttaattatgattatatgcttcaaaagataatgtcctttgattcatcagtgcactggatttacactgatgtgatactcagcgataaaatatacttacacc

SEQ ID NO: 136710 - DNA, 614 bp, Cannabis sativa
  modified_base (205)..(206): a, c, t, g, unknown or other
agcctaaaaatcttaagaatcgaaacacaaagacctcccaccaacttctcaatgacagacctcgctttgcgtaacatatatatgatattaataaattgaaccaacaattaggataagtacgaaatggtctctctaccatgtgttctacctgtagctttggggggtatacacgtttggcatatgcctgctttgactgagatctttnnagatgattccgtactacaatttggtgtttaataaaaattaagatgacaaaatattattttacaataaaaattaatagaaaagttatatacatgtctgaaaatgagattgtaaaaattacagaaagatacatatcatattttttcaaagtatttattaaattggcatctgtaaacccaataattttaatacactaaggcacattaatattatattagtttattaataattaattaatacatatgaatgttacatacatgttgaaatttaacatcatgaatttcattttctgcaactcattggttatataattttttttttaatttttaaattaaatttgtaattcactaaataataaacttcttaatgtatttatattttaaattaatcaattaaaaaatagttacata

SEQ ID NO: 136711 - DNA, 1223 bp, Cannabis sativa
  modified_base (506)..(512): a, c, t, g, unknown or other
tgatcatggctaggatcagataaatatctcccaagaacatcgactatgaaagcaatgtcaggtctagtggaaacccaagcatacatcaagctccctaatacacttgcatatgggatattcttcattgcttctttttttaagtcgttcttaggacaatgttgcttagtaaatttgtccctttcagaataggaacgaaaccagctttacacaaatccatgttgaaccttttgagcacacaattaatgtaagcttcttgaggtaagccaagaaattttcaattcctgtcacgatggatctcaatccccaaaacataagatgcctctccagacagaaaacttttggtctcatttagtaatgacaaattactgctggcaagtaaaatatcgtctacataaagaacaagaaaaaatatgacgactctcactgatcttcatataaataacctagtcaaacttgttctcgatgaaacccaatagtggcaaaaccttatcaaacttcaagtaccnnnnnnnagatgcttgtttgagaccataaatggatcatttcaatttgtaaactaaattgtcatttctattttccttgaagccttcaggttgagacatatagacttgctcactcgattctccattcagatcaacaattttaccaaccatttgatgcaactctgaatcaaaatacgcaactaaatccataataattccgaatgaatctttagtgaaaataagtgagaaagttccaatgtaatcaatacactctttgagtaaagccttttgtcactaaacgtgatttacacctttcaatctatcccattttatccttttaggtcttaaaaatccatttgcaacctattggtttgaaaccatcaggtaaaagaactaacttccatacattatttttgtccatgaacttaatctcatcatccatagcttttatcaattttgaagaatgtggactattaagtgcttcactataagtgacagaatccataaaatgatcaatatcatattctctttctccaaggtaaacaaaattatcatgacactttgttgacttcttttttctttgagatctccatagaggaggtacttctggaataacctctatttgttgatgatcattttgaatgactacatattccacaattggatttctccgataacaggaccctcatcaacaacaaaaccttcttcaataataggttcctcatcaataataggaccctc

SEQ ID NO: 136712 - DNA, 694 bp, Cannabis sativa
tccgaaaggacaattcagatattggaagacatgttagaagcctgtgttatagattttccaggctcctagagcaagtacctgccactgatagaattctctttcaataatagttatcagagtacaatagggatggctccctatgagttattatatggccaaaaatacagatctcccattcattgggatgaaacgggagaaaagaaatacttaggtcctgaatcagtgcaacagactaatgaggctatagaaaatattaaggccagaatgcttgcctctcatagtaggcaaaagagttatgcagattcaaagtgcagaaatgtggagtttcaggtaggggatcatgtattcctatgggtgtctccaatgaaggggatcaaacattttgggaaaagaggcaagttatgcctaggtttagaggaccttttgagattctcgagaagcttggactagtggcatattgtttagctttgcctccagctctattcgcagttcataatgtgtttcatgtttccatgttacgaaaatacagtttagaccctactcatgtgctgagttatgagaatcttgagctgcaaccagacttatcttacaaagagcacccagtttagattttagacagaaaagataaagtcctttggaaaaagaccatagctttggtcaaggtactcttgagaaatagcaaggtggaggaagc

SEQ ID NO: 136713 - DNA, 914 bp, Cannabis sativa
tatactctactaactaagttagtttatacttttctagtactgcaatttctactggggcatcaaaataatatttgtagttaatattaaagttagtaataaatattatatgcttattatgaaaacactaattatcttttttttaatctttaagaagttgttcatataaatgtattttttaaataaatgtggtgattttatatttaaagtttgaattgtatattggattatactttttcttcattgttgtaagaaactgctcaatctttcattataaaatttatggcgctacttagaggtacaattttaaattgaatattgaataagcaaaaatgtactttagatgatatcaagagttatgaaagttaagagtaaccgttcctaatcacgcctatggaggatatccttatgtattgtaaatgcatatgtttactaagtgattatgaaggttgggtttgtatattaaaagtattgttagaaatatttattataaagacattttatataatattactcatgtaattgtcttaatttcaatttatcttctattaatcttaactttattattatttttttaatagtgaattttagttaataatgtatatgtttttatatggatatataatattagcttatgttttatatggacaaaacaatattagcttatttgtgattttattttttaatttgtaaaagggttttatcatgcacaatgttttcggtataagttttaccgaccactttttatatgtcctcattaaaaagttgtttgcaccgaggaagcgttatcgaggaccttctaacgagaacatattctcgttacatggttctaccgaggacattcgcgacggtcctaaaaataatttttttcggggaccgtcgctaaaaaaattaattaactatttaaaaccgtcgag

SEQ ID NO: 136714 - DNA, 637 bp, Cannabis sativa
atattcatctatcttatccatgtatgcattcaccttctccatgaatgttttcatcatttcgatctcttaataaatcatcttctcatggtccttgagtatcattatcgaaagttggctccatatggctagaggtattctcctaaacttggttagttgttgaagaattccaacaacactcatcatactccgccatgtcctccaacatccaatgggcttcatcgatatatagttggtaaaaattggtggtaccatctcctctgtctacctcttctcttgtgcttggatgcaacccatttaggaagacgtcaagtacacactcactagacaaactatggttaggaaaccacattagcaaatccttatatctccacaatgttctatgtaaaggctatgagtcatgttgaatgaaattagtaagtacttgttgacaagacatagaggaatgcattaataatcaaattttgtcaactgaaaatataaatgaacatatgatttttctaaacctatatgtaatgggctctcaagattatattaacatatttctatgcaaatctagacttagagaacacaaattaagcaccaatttcccatgggtcatacaaggtaaatagaatattcttataccatctacaaatca

SEQ ID NO: 136715 - DNA, 591 bp, Cannabis sativa
agagattaatataaataggtgtatattactttaagaaagccacatttctcttcatccactagcttgaatagactccttcaacaacacaaaaaaaaatggtgagtgaagcttcatcctctaatgatactttcaatcccatgcttaaacaaaataatagtattgatgatattattcttagagaggtatatacacccaaagttcattcccgacttcctgaagatgccctaaagtatctcaatggtcttgaggttaagtattttgacaatgatttagaactgttgagaaaatcaagtgagctccgagaagttaaagaagagatggatactttgaggaaaaaaatcattgagctggaaagaagagctatggataccgaagccaaatgttgcaaaattaatgaagaatggttgctaaaagagaaggcttgggacatggaacttgctgcactggatgttaagtttatcaccctcaaacgtgaagctgtgagccaatacacaaagcgtttggagatgcgacttgatgaagtatgttcgaaggggaagaaaaaaagaacttaaatttgatagttatttagttgtgatttctttatatcta

SEQ ID NO: 136716 - DNA, 649 bp, Cannabis sativa
gttagtcggtttattcagttatgtttgttatgttctttttttttagtcggtttgtaatgaggtccaggctatataaagctggcctctccactgtttcaattcaattgaatctcttttactttatgtttgaactttcaattcctttttctcaatcaattttattattattttaatatgtaagacaataaaaaaataatataaatgtttcataattaaatgtgatagttcaatatactaataaaataatagaaatgacataaatgtaaatgaaaaaatttgctacgtgccaaatttacatcactttttggtacacaattagaacacactttttgttaaatgagttatattttagcttttcaccacttatttacacctccattggagatgctctaagagcaaattgataattttactaaaattctcaaaattgacttgaagtgaactacaagactcaaggaactcaagacaagatttcataaagatttatttaaatttttcagtcttatgtattgttcaataaagttaatacgcaaacaaaacaagtaatataatgatgtaaagtcctttttcggcaagttagttgacaaaataatttttccatttatggtaagattgttgagcattcattttcggatccttaccttataaa

SEQ ID NO: 136717 - DNA, 888 bp, Cannabis sativa
aaagataaatgaatatctttttcggattttaaatgtaatttaaatgtattataacccttctctgcaggaggaagggacgcctcggttatctcgagagggagcgagtgacaagaagacaaggggaggttaatccggtaaagcaattttgtaaaagaattgcgacgtaagtagatattggcccactatggttgccatatcaagttaccacgtggaaagctgatcgtcaaccagtagcagtcaaagacaaataattaaaaccaggattgattcacctggaaccccgagatatgtcagggattgaccctggatattgaaacaatcgtgggaatatgttagggattgaccctgaacattaaaacctattttatcgaaattagatgctcctggaagattgataaaataaacaattgaactgggaaagttcttatgagattaatgattgtaaatcacatttctgatgtaatattgagaacttcagttgtgaataaaataatcatttctttcaacaagtaattataaagcgtaaaccctttaaaattatttgaggggcatatatgtatgatcaactggaatcaatctggaaaaacatagtacaatgcaaacccatcacttcaaaaataaaaagttttttgaatttttttttttttaaaaaaaaaggtcctcgacaaaaatttttttgacgaaagaggggtcgaactgttataactccctgaccaaacctttttgacgagagaggagtttaatcgtaatttttagtttaaaacctacctgacgagaaaggaaaatcaaaagttatgactagcacataaagctgaatactaacggctcgcgctaagggaaagtattaaacgagacatcaaagtgtcttgaaaaaatacttaaacctaa

SEQ ID NO: 136718 - DNA, 508 bp, Cannabis sativa
tccacttggtgttaagctattcataaagtcttcttgtactccttgttcatttttatctatagtttcaccaaaactataactttttacggagttaccaggaaatcgattaataagaattttattaatatggtaaacatactcatttttaggagttaatattacgcgattgagtattgtattcatattttctatggagttattaatatttgggaagacgaaatctattaagttgttaagcgaagtatcatcgtcctcataaggtaaaatcatagatgagagtagttgtatctttccatctatagttggttcggttccattgccaatatttaataaataattactaaataagggatcttgtctagcgcgcatgttttctgttaatgtaattttagtaaacttgcattaatcatctgttctcttgtacctttaggaacaacaggtaatacctgtcgaaaatcacttccaaaaactataactttactagcaaaaggaagagtggaattattta

SEQ ID NO: 136719 - DNA, 688 bp, Cannabis sativa
  modified_base (223)..(230): a, c, t, g, unknown or other
gtaatgggttttatttagggcacaaaacccaacagtcacatcatgaatcatgaaaaccatgtcccaccaaactaaagcgtcttcttgaaggtggaaagttgcacagaccactctatcatttccagtgacggccatgaaattcaatatcttggtgatcacagttagccattgctcgactttcataacatcggggcctcctaggaaaactggaggtgcctgcttnnnnnnnntttcatacaggggttccatccggttcgttgccacaaccggtttggcctgcaattaggggcaggtgccactggcatttctggaacaggcactgcaggagcaccttgctgtcttaactgctgaatcacttcctcttgttcattgattctagtttgcatttctgcaaacctgttttcccaattttgggcatcctgagcagcttgggcagcttgggcaacttgtggcgggttaaaaccaccccgaccacgtgccctgcccttgggacctctacctcggccccgaacatttgggggaatttgagctccctaaccttcatttgatccaaccgagttgccctggctcctggtatttcgcctgacaaccatactaatctgaacagcctgcgtaaccaagagctagtctggtcaggtcatgatcaaagagaacttactaatgacgctaatttggaaattaaaaacat

SEQ ID NO: 136720 - DNA, 575 bp, Cannabis sativa
ttagggcacaaaacccaacagtcgtcaaggtcgcgggtctacattcaaatcttacctagaatgtcctaaatgcaagaagcaccatcagggtgaggtgtcgcgctaaaacatgttttccagtgtggcatggtgggccattttatgagagactgcttgctggctaagaaagaagaaccaaagaagaacaacaatcagaatctggggtgcctgttcactatgacttaagcttacgctgatgctagtccatcagttgtgataggttagttgtccataaatggttgttcttattcaatactatttgattcgggagctactcattcttatgtatcaagtagagtaataaagagttttcataagtcgtgtgatgtgtgtgcttcaatgtttggtaccctgccaccttctggagacctaattgtatctaatcattggattaggtctgtctttttagattgacagttatgaattaaccgccaacctaattgagcaacaattgtctaatttttatataatcatgggttgtctaagtatggggcaacaattgactgcaagctgaagatggtggtgtttgaacctaa

SEQ ID NO: 136721 - DNA, 560 bp, Cannabis sativa
agaagattactttatttttgtccaatctaggcctttcatacattgtgtattcttccaagttttcactaggcttggaactgtacctaatttagtcacacttgcatcctggacaagtatcatagaagaaatatcagtagatgattggatcagatgtgcaagcacaatgtgttaggatcctaaatcttgatatgatagtacccatcatatttagagataattagagaatgagtaaagagcatttagatgaaagaatttcagaagtgaagataagtatttagttggaatggtgaaggtggtccaatccctaaagatactccaccataaacgcatagatgtgcttcagatttcattaaagcaaaaagaattttttgtaaaactcccatataaaactcccttggattcttaaaacactttaatagttgttcaaactccaccataagtgcacatagatatgcttcagttttcaacaaggcaaaaggaatttttggtaaaggtcccatataatccctccctcccgacctcccttcttccttttagaacaatttgttcaaacttctaat

SEQ ID NO: 136722 - DNA, 1102 bp, Cannabis sativa
  modified_base (296)..(297): a, c, t, g, unknown or other
ctactcaatgattgatatctttgattctcgcctaatacaaagcactgtatcaatttgttggaatccttagaaattatttaggattttttgtttttgtattttcacttgtcattcctacttgctaagtgcttaataatttctgaatgtgtatgattttgtattgaaccttatttgatttctatttattgatatttagagtacccaatataactatgaacaaccccatgatgtccctgttaactgacaacaagctctctgtagctaactttgtcaaatggaaagagaacattaatatnnctctcataggtgaaaatgcccagtttgtgttgactgaagaggctcctaagcagctaggtgagaatgcgaccaaggcagtcaaggaaaagtttgagcgttggcaaaatgctaacaacaaagctcgatactttatgttgtctagcatggtcgacaccttaaaaacaaggtttgccaatactctcacagctgtagatatcatgaaccagttgactgaactattcgggatggcattagatcaagctcgatttgaggcaactaagaattttatcaatgcacggatgaaacctcatcagaacgtccatgatcacctgctccagatggctagttatttccaagaagctgagaatcatggagctattatagattaggaaactcaagtgagtttgatcttgaatagtttgactccagcttttcttccctttacatcaaattatgtcatgaacaagttgacttttgacttccacaagttagtcaacaaccttcagaccttttaaaattttattggaggtccacagaaaggaggaaacaaagctcctagttctggcattgctaattgtacagccaaggctgtggcaaacattgcctctacttcgaaacccagcaaaaagaagaagtggaaaagtatccagaagcctcttaaagttgttaatacagctagtaagaaaaaggctgttaatcctaatgcaaagcaaaaaggaaagtgcttctattgcaacgaaaaggaccactggaaaccctagtgtgctaagtttttggtaaagaaacaaggtatttctatctatgctataaactcatgtgttttaga

SEQ ID NO: 136723 - DNA, 503 bp, Cannabis sativa
gttgtggaatgaatacatactcatctaattcaccatataatataatttaatttaattttgtgttattttgtcagtattgaatgaggcaaaagctcaagctttctccaaataatgcaattttattatatatatatataaataatatagggcatatattacaaaaaaaaaaaatttcagccggccaaataaacaaatttacagttcaaataaaataaattatacaaatacttcttacacacacattcaacccacgatccatgcttcctgggattaaaatcttcgtctgatgcgcaacctaagttcaagaaaaatgatttttactagcggaattattaggggttggacaaatctgccgctaataatctcaatattaccagcggatatatgattccgccgctattaagtagttttaatattaaattaataataataatatagtattagcagtggagaaatatttattatcggcggtgcaatctgccactaataataaaatattttaa

SEQ ID NO: 136724 - DNA, 886 bp, Cannabis sativa
ccaatttttgttatacatatgaatggatggagaatggaagaactctccttgagtcctttcctattttatcccattatggaacatggtctatgtgtgagagcatgcacgcatgcactgttgtctttattaccttgtcatctcaatatttcaatgcaattttgttaatcttttcaaaaggcaagtcttagttgatacagattttacaaatagtgggatatacacggtataatattgcattcaatacttacttttaatttacaatattattattgacattaattgaatataaattaaaaataatttcaaacaataactaataatatttttccttcaattatttattgtattattttttaaataaaatagaaagcatctaatataaaactaattatatgtgcctcgcacgtagctttcttctagtctatctatatatctatatatttatatataaaggagaagtatgaaacggtgatgtggcggtctaaaaatgttttaaagtcacctttcttttttctccttaattctgttttttctttaattttttattaatttcatatatattaatttatttttttattaattttatatatattaattaatataaaatatattttttccttaattcatttattataatataaaatatatttttccttaattcatttattatttttttaaaaaaataataactccaaaaaaatatatagttattagtttttttttgccatatatacaaagttattttctaaatattttattatttttttaaaaaaatcttctacatttattttctaattattttataattttttttttaaaaaatcttctaccaaactctaaaaaaatatagataataattatctatatatatacattaattctaaat

SEQ ID NO: 136725 - DNA, 746 bp, Cannabis sativa
gggtaaaatggaagagtgtggtggcagtgatggcaaggagtgtgagacttttggtggcaaggatgggagtttcgggaaagagtgtgaggatattggtggcagagatggaagttttggcagggatgacggtagcggtggtagtgatggcttaggtaatttgggtaaaatttttggtaataggaaacctttttgacctagtagtgaagatggattttgattatgaccttcatcatcgtaatgatcagcttcgactagcttggttaatccaatgaggcataacaataatgccacaacaataataagcttattgttttccattctcacaaactctcaatctttgttttatgtagttagttataacttaaataattttaaccaatgataagtgagatatgattgagttaatcaagtatatcattcactatatatataggaaatggtgatgttgattattgatcattgtagcaactaataataaaagtttggtatgataattattacgttgtttaattatgaatagttattattagtgtgcatagtaaatgtgttaatttatttcagtttacgtcatttgcatattcacgtttaattattactacctaacctgtttatagaatgctacgtgggaggctaagttttatactaaatgtgttttgttttatttaaaaataatacaataaataattaaaaaaatgtattattaattattgtttgagattattaatatgtatattataaataatatt

SEQ ID NO: 136726 - DNA, 1188 bp, Cannabis sativa
  modified_base (1146)..(1149): a, c, t, g, unknown or other
caacataattaatttttaaaatatcttaaatttatttttcatcaaattattttgaaattaatttaagaaaaacacacttaatttaatgaaattaattccaaataagctatatgtattttctgacatttaattaaataattaaagaagttataactaattagatttttctagacacttaattatttgaattttcatacaaaatacattaaaattgaaaattaatttttcaaattgattttgaatcaacttaaattagaatatatttttttaaaattaataattaagtagattttcttaagaaattagttattcatatattctttaaaaatatatttaagttaaatttttttaatttaagattaacttaaattgagatattttttttcaaattaaggtgattagttcaacatacttatttgttatttaattaaatttttgaaagttatttaagttaaagatttagttattttagaataacttaaattagatattttcatgtatttgttttattatattttaaataattttgaaattatatttttatataaatatttttgaaatttaaattgaaaattaaactgaagttggaaattaattttagccaacttaaataaagtagttttattattaaaatatatagattaaaatgaatgattaattagatttacataatttttagaataattagcatttttccccctaaactttcggcactacttaattttctcccctaaaatatacgacttgttaaaattttttccttaaaatataacacttacataattatgccccttctgttagattctgtttcttttactgttaaatattagcattattaccctttagactttgaccattacaaaattttgcccccttttattaaaattttttttttaaaaattagaatattctattttttaaagcaattacaatattctatttatttagtaaaatattaaattaattaaaaaatattttcaaactttattttacttatcaacacgtatctttaaaaattaaaccgaaattattgagaatctaataaataatttaaataaactacattttttaagaaaaaatcaaacttatttatatttataaattaatatctaaacaaataaaggaaaataattaaaaattcaatannnntataaaattattttgaaaaaatttataaattaaactaaa

SEQ ID NO: 136727 - DNA, 1651 bp, Cannabis sativa
gggacaaggatttcgattttgtggttcgtttcaaccatcgattgttagattttttgttggttttgggcagtagcttccatcgagaaagacagaagaatgaaagagagagtgagaaggttgaagatagaattaggtttttttttttaattttattttgttcttttattttattaatttttggtttattttatttgtttaaaataatttatttaatttttttaataattatttacgtggactaataaaattgtgcctcatgtaaaatttgtacacgtggatacaaccaatctgacagttgacagatgaaaatagatggaaattgctaattgttaacaaaacacgagttttgggggttttaccgccgaatttgagttttaggggttaaatgtaaacaaaataaaagtattagatgttttaccgcaattaaccctgtttaaatacatgttaatgtatacatattaatttatattttattatgaattattgtacttaatagattttataaagaacacaaatctaaaaaagacattaaataatttttagaaaataaattttaaaaacggttaatcctcaacaagcttactaattaaaagaatatgaaaaggtaaaaaattactaattaactaaagaagaagaagaagaagaagaagaagaagaagaagacaaaaaatgtgtaaaaatattactagctaggttccagttccactattattatcatattttctcaactttattactattggatcaacaatcaagggctaaaataatattcctaccatagagacaaaactaatatctccaccatagatattttctaaaataactaactaattactaagatgtatagaaataagttttaaagataattaaaatgtatattaaattatatgatataaaataatttttttatgtaaaggtaactaattatttttttttatcaatactattaattaaaaagttatttttaaaaatgttggaaaaaaaatgtcaaaaattattagataagccttacatgtcaataatagtagggcaattcatataaatcggaaaaccgcggtttaaatccggaccactacaatttgaaccattgtaaatcgtaaccggggaaaccgtttttggtggtttggtcaatccagaccgtttacggcgtaatggttcggttgtggtttaaaataaataattaatttatgtatattatatgactatatgtataatttagaatttttttgtgtgtcaagttttttattgcatgaattttgaatttttatgttatgtttgacttttgagaatgttttataccattatttatatgttatagatctattacttatcatgataaatatatattttgaaaaaaaaattaaaaatttagtaaaaatagtacaattacttaaaaaatataaataactataaattctacttaaaccgtagtttcgaaccaagtcaaaccgttcttaatggtttagtttgagaaattttttggtttgatttggtttctaatattcaaaaaaccattatactgatttggttcaaaaattatgaaaattcagaccaaactaatccgtgaacacccgtaataacatattattgtaaattaagataaaacaaatatattattggaaacttacaaaaatactggaatttaggttaa

SEQ ID NO: 136728 - DNA, 665 bp, Cannabis sativa
  modified_base (388)..(391): a, c, t, g, unknown or other
gattggattggatcgtgcgaattggattggatcgggtattttgtgaatacccttacttaactccaatagtgatgtacaatgcgtgcaaaatttgaccaaagctaaaaattgtaccaaatttagcacaaaagatagcatggaccaaattttagcctataataaataccatatttttttttaggaagaagttgaagaatacctattttttatacattaatcatatttacctctaaataaaattcaatacaaatatacctcttttttagcctataataaattttagcctataataaataccatagtgatgtactatcgtgaagtgatatgaataaaattggtagaatgattgaaaaaaaaaaggtaaaacataataaattttgaaaaaaannnnaaaaattaaaggcatcaagttaaaagcagtatgtagtgtaatttcctctattttttaattacttctttgatactcattaatactattcattaataaaaaaatatttttatatttataaagtattaaaataatataagtataattaattgttttgtatatttttaatgaatattagtggtagtattaacttttatagctaatttgcactttgtatattatagcacaaatataaaaattgggccaaatatagctttatgatatattttggatcaaa

SEQ ID NO: 136729 - DNA, 996 bp, Cannabis sativa
  modified_base (64)..(76): a, c, t, g, unknown or other
  modified_base (589)..(599): a, c, t, g, unknown or other
  modified_base (663)..(665): a, c, t, g, unknown or other
  modified_base (691)..(695): a, c, t, g, unknown or other
catagcaaacaaaaataaataatagtgataaaatatataaaaatgttcattttaattaataaannnnnnnnnnnnntttaatatttactaattaataaacatatttctttaataagtaattattttattttaatatataattaacattaaatagataaaataaaaaatatttttattttaatttttttaaaataatatataaagattcttgtactcaactaaacattgtaatttaattaacacgaatatgattacatattaccctacacagtcaaacacagtttacacatttctctataatcatattctcttttataatattttcgataatcaaattattttgaacacctcatgtcaaacgcccccttagagtatattttgatttcagtactacaatatatcaaatattattgtatataatataatatatttattcattgtacccaatatattaacaatatattaatatgtaatattaacgaatttatataatttaatttgagtttttttatttttacacttcaaaataattttttttgtattcttacaaaattctacatagattttcttattgcaactagcgctgcannnnnnnnnnnaacaaaaaatcgtataaaaacccctattgcaactagcgtggcaaccactttagaaactcaaacnnnaaatttgaaaaaaaaaaaagttaaannnnnagtatatggagtaattccccaatttaattttttatataattttttaaaaaatatagtttgtaataaaaatattttcataattttcattaactaatttattgcattttatcattttgctaaaatttttaaaatatgaacatttatttaaatttataagcttttctttctttttttatgtctttcttggctaatttcaaaagaaaaaaaggaaattatagtaaatggcccaaattataggattatgttaagggttgagatgcaaaatgaccttaaatttggtaactaagttagtaaatgtcca

SEQ ID NO: 136730 - DNA, 609 bp, Cannabis sativa
aggaatttttctcaagaagtgtgcaaaatgacttaaatggattgattgatactacctatgtcaacaaggtgcatcttattttttggtagcccatcacaaaagaatttcacagttatgtgtgttaacctggggtaattcaagatgggtgacctcctaggaatttttctcaagaagtgtgcgagtgaggacaaagtacgctagaaatactcgtgttggtttgtagggttagtcgtcattctatgaagcaactaaagtgacgtactcgtatataagaaccatcatttcatgggtgtaaaagtcaataaaggcttgaagtggggacgttacaaatggtatcagagccttgacttagtcggaagtgtggtcgacgaggacgtcgaacctcataagggggttattgtgacagtcagtagtcttaggatccgtaaggggaaatactgggtaaactatgcaatcccacatcgcatggggaaggtcaattactgtgattattctatgattatgtatgtatgggactacacagttgaaaagagcttaaatagattgattggtactacctatattaacaaggtgcatcttgtttttcagtagcccgtcatgaaataattt

SEQ ID NO: 136731 - DNA, 1151 bp, Cannabis sativa
tctgaacctgttcatggattctcttgcccttaacatgtctgaaattttaaatctaactgaccgtgaagctgtagttcatgatctggaagatgacactgggggggttagtcaacctagtagaactttctgtcttgtgtttagaatcctttccccaagaaccatcaagcttgagtggttcgaagtggctatgaggaatgcgtggattacccgtggccctctaactttctctgaatatgggtcgggtatgttcatggtggagtttcactatgagggtgacatgcgaagagtcctctagggccaaccatggcactttgaccattgtctggtcacatgtgccaatcctgcaggcctggacactcttcttcccaaccagcttcggtactcacccttctggatacaagtacactcgatcccatttggccaaaaatctctgaagctggccaagctaattggagatgaggtgggagatttcttggaggttgacaagattactcttttcaaagtctctgagctctttctttgagttcgcgttctcatcgatatttctaagcccatcactcgtggaatcatggtggatttcaagagtatccaccgtgagaaatggttaacttttaagtatgagaacctgcccaatatttgctttcactgtggcctatttgatcacactcttacaaaatgcgttacttaccttcaaaaatgcgacgatcgtgcctatccccctgaccttccttacaaaatacctctcaaagcccctccgaaatcaaattttaaaagaaacccgtttgatctctcaaactctcttcctttggatgaacctcctgcaccgcaggaaaatattgatcaatcccttgctgctgcagtgagccagtttcttactactgaagacattggcactggctcttctgatgcagcctctcgtggtaatgcagccactctggaatctatgggagttgatcctatccaaacttccactggtctaactcatgaaggttctcctttgagccatggaagcttccactctactgttatctgcgaccttccctacacaaccactcagcatgctacggttgtggctagtgaatgtgccagtgagggcactgctgtggaggatgctactccaagaattactgaaaaagctaaggggaaagcag

SEQ ID NO: 136732 - DNA, 627 bp, Cannabis sativa
  modified_base (254)..(256): a, c, t, g, unknown or other
aaggaatggcttaacactcaattcgaaataaaagatttgggtgaagctggttatgttcttggtattcaaataattagaaattggaataacagatcacttgttctattgcaagcaacttacattgataagatactagagttattctcaatgactaacaccagaggggcagttatgccatctagacctagtatccgtctatctaaggaatagtgtcccactgatccccaacagatagaagacatgagaaaggttcnnnatgcttcagcagttggaagtctaatgtatgctatgttatacactagaccagtcatttgctatgtagtaggaattgtgagcaagtatcagacaaacccaggataggaacattggactgaagttaagcatattctgacatatttgaaaagtacaaggcattatatgttagtctacaagggtggtgttttaaatcccgtaggctataccaactcagatttccaagcttgtcttgatgataggaagtatacatacggaatggtatttacggggtgaagaagttgtttggagaagtgctaagcaaaccgccacatcagactataccatggaggctgaatacatagttgccgttgtggctactaaggaactagtctg

SEQ ID NO: 136733 - DNA, 1181 bp, Cannabis sativa
  modified_base (970)..(977): a, c, t, g, unknown or other
cgtcactgaggagtatgccgaggcgtttccaccaagaggcaaggtgcctttggagctctgtgggtgtctcctccatccatagtaacccaggtcaagctgaggagtttggagaaggacggatacctgggcagtgtcgagtgcttttttctttctccaaatcaccgagcaaccagcccaagacagggatactgtgcctggtcgggtgcccagatttagcagggtgcaatgctgccccacttccgtacttcaagaggattgcggactactaccatctctgcccgacccagttcacaccaaagggcattaaatacttatctgtactattcatcctcaatgcttcccaaggacggggtgagccttccccgcacgacaccaactggctcttcgatccgaagtcaactcccaagcagagtaggtcggggtacttctacttctcccaactagacgagaaatggctgaagggtattgtggactccaatgtcagcaaaatagggtattttgtggacgagtactacttcatagagggcatggataccgtccacactcggttccagcagattccctcatattatcgtcctcccttcacattaggactcagggagaaggcacaaaaaattctccaactgccaaaggctgctcggaatatcgcttggttgaccactgaggccaactttttgaagtacaagctcttcccagaggattttgtgccaaagcccgtgaaggagaagaagaagtaatactatactcaatatattgtcttagtctaaaactaataagtttttactagactaggtcattaacatagcattctagtattaacagtaatgtaaaatacttgcttaagattaagtaattattagagataccataaaacatttcatgaggattaggtgttttgtctaagtcatttgaatgaacattgcaaaatttcctatcttatcctcgtaattctgataagttatttctatcnnnnnnnntggttagatttactttcttagttgaattctaaagttcctatcatgatcataacatagtaatttatcactagtgtcatctaaaaaaaatatttaacaacgtaaattgcaatttccatacaatcatcaaatatgcacataaaccaacatgaacacatccaattcaacataaacattattttaaatccatatttcctgaaagtaaat

SEQ ID NO: 136734 - DNA, 527 bp, Cannabis sativa
aaaatatagctaattagctactgaggttatttatacattataaatataaaaatttgctaaaaaatatttaaaaaaattgataaacaataaataatataataaatagtatttaattaaaatttttaattagaaattatcaaatattgtgttaaataaacttgtatatttaaatttaacgttctgaccaatttaacataatatatgtacggtagagaattaataatattttagaaaatgaataaaataataagaaaacaaaacaaactttttttttttttaaaaaaaaaatagcactttttgttattcaaaatatcaatagaatcaaataactttgttaaaaaaaatagattgaatagctattgaaaaaaaagaagatgtatatataccaaaaatactagctattattgaatcttattagtgttttgaattagtaattttttttaaaaaaaaaaatgaatacacaataaactaataaatatataaaaatcttactgcatgtatatataaatttcttaaaaaattgtatg

SEQ ID NO: 136735 - DNA, 569 bp, Cannabis sativa
agtgaaggaatttgaaattgggcaaagacaccaagtttggggtggaaacttatgttcagttgctatagcaagggcttagcaatgttgtttggcagcaaaaggagtttggttttgggctgatcaaaggatcagggttttgaaataaaaaaaaaaagggtacttggtctgatcaagatgcacatgtgaaaattatgttaatgatgcaatcattgggcataattttttttattcagtccaatcatttggagtgatgtacctttgtacttaaaaatgccaaataaagtatacatgtattattttgtggggctttatgtttttgaatttggtcaactgggcccactactaatcagagcccacttctctcagcccaatacccaaccctaccatttcatcatcttcttcctttcaccaatgtgacccagccgcctgcccactcgcaccagcagctcacaagtcgacccatcctcatcatcccattcacttctctcttctcagccgtgtgccttcactcaaccttcgaaccaccatttcacctgaacccgtagccacagaaatcgcaccagcagctc

SEQ ID NO: 136736 - DNA, 523 bp, Cannabis sativa
tagaagctggccagccagcctccttgaggtggctggttcgtcattcatcgtcttgcttgagtcttaagactcctcgttgtctaaaatgctgagtagataatttggccttcttgttggcaagttgtactaccacgtggcactgatgttggccacgtagacatgacatgttagataggccaaaatcgggataatattcgccccccaagtctctatgtagatgtctctatagataggggctttctaccttagccaggagatatgtagccttaactggataaatctttcagcatatattgcctttgaaataactactcctgactgtttgatctcacttgttgcagtaagttaactacattgctctttagttgaacacttgcatgataagtacaaaggtggtcccacaaaagctatataatcttatggagggaaacctctcttcactttctacttttcattctctctctaaaaaaatcaacttttaaatgttcctcctactctatagaggccaaagccccatattgct

SEQ ID NO: 136737 - DNA, 513 bp, Cannabis sativa
ctgaaatacttttatttttaacttattgcgtcaattataaaatgaagcataaatgtatgtaaggaaaatttgcaaattttcatgcatttttaaatttcagaaccattttatgtaatagtaaatacatgatacaaaaaaaaattaaaataacgttgataaaacttatataaaattagtaattgatgctattaactaattatataacaccaaaattgttaaaagaaacgatccttaaatttatattctatgtatcgtaaaaactaactataaactaatgacataacgcaaaagttaatagcaacaatcataaaatatactataataaaatgtagtaaccttgtacttaataaataatcaaaggcttctcaaattcggcccactgatcccgtactgtattgatctccttaatattgtagggagcctctgacataaactgtagaagaaagattaaaaaaaacattaattattacattaaaagtattcataatatcattcgaaataagattatttgtc

SEQ ID NO: 136738 - DNA, 678 bp, Cannabis sativa
ttttttttttttttttatggattatgaatgcataataaatattcgtgaaaatattggtttaatttaaatttaaattttttttcaatcattttaaattatttaattttttccctattttactttaacggatacctaatgggttctttataacctataaatatttctctaccccgaatctacttttttattagatgggaatggaacgaagatggggacataaatatatagcgagaatggagatggggatggggattgcattccccatatattaagggaaatttgaaattccatgcttataatactctaaatttcttttcctaaatccataattattaaaattggtcatatatgaccacattacctaattttccacaaatacccgtcccatttgaaaaactaaaatcaaaatgcttaaaagttctctctctccctctcgcacggtacacccacacccaccacatcggcttcacctccgacgacgacggacgaccacccaccgccaccgatagcaccgcacgatgacggacgaccacccaccgccaccaacaccgttatcggaccactccgatcgagaaccgcactatatcgcacaaaaacctttttttttttgggtttttaaggtcgggtccgatgggcccatcggacggggcatcaggcccatcggacggggcatcgggc

SEQ ID NO: 136739 - DNA, 750 bp, Cannabis sativa
accatttgaaagacttaaccaatattcccacaacagaataaaaccctaagttctaaacaacgggtaaaaatgataaagtctctaggaaaatctaaaggagatagatatgcgagtattcgacgtgttcatacgaatacccgcgagtattccagaaataaacaagtaaggaaggtgcgaatattcaaagtgttcttcctaaagttcacagttatacaaattttaggtctgtttttcttctaaaatcacccagttctaaacagaaaaatacaaccctatgtgtattccctatgaacctacattttcaaacctctcaaaatgtcaaaaaacccagaaagatagttttcatttttcaaaaaaccaaatacacaagtggattagaaactaacctttagcttttctgattgctccctgtaattggtttcgatctcttctgaatcttagagattcaggaagaaaaagtaaatctgggtgaaggatggatgaggatctctaaaatttcagagaaaaaggggaagaggaagttaagaatgagaaggaaatgagagaatcatttcgtattagagaacttaaataccaatatccctcataaattgggattgtgacacgtggcagcaggaatgcctaaggtcattccatccaacggtcaggcatgggcacgcctacacaaaaatcgaagagtttcgtgacgtggcaccataaataagataaaacaaaataattacagccctcatttttcgaaaccctcgatgg

SEQ ID NO: 136740 - DNA, 912 bp, Cannabis sativa
tggtaaaataaattccaatagaatgcccaatggagcaggagcattacaaatggtatcaaagccttaacccagccaaaagtgtggtcaaagaggacatcagaccccataagagggtgatcatgacagtcagtagtcccgtgatccataagggacagtactgggtaagttatgcaatcccacatcggctggagaaagtcaagtatgatgattctgagactgtataggtatgagattacacagttgaagaaggcttaaatagattgatgtgtactacatatatcaacaaggtgcatcttgttttcttgtgtagcccatcacttaagaactcaaaagttaaatgtgcttgacttggagtaatcttcatatgttgatgacctcttgggaagtttttccaggaagcgtgcgagtaagaatgaagcatgttggaaacactcgtgttagtttgcagggcaagtcatcaatacagaaagcatccaaagtgatgtactcgtatataagagccataattccgggaggaggcccaataaaaacttgaaacaggaacgttacacttatatgacctaccaaccgagccttaaatctattaaataagaaggaactttatacaaaattaatatagctaaaagtaatctttataacaatttatagttttatgtcttttatgggtatttttgtgcctttcacggcttttgtgccattttttatggcttgcccttaacagttaatggacaagagaagtaattcattttgtactcttggcttctacatcaacgacctttcagttttgacagataagtattttaagtctttatatttatgagttgttttatattataatatggattatttactatcttaattttcttttagctttttttttcattaaattatgtagtaatagagttttattta

SEQ ID NO: 136741 - DNA, 567 bp, Cannabis sativa
atatcaaaactttgtcgttatcttgttgacttatcgttctctatatgtagttttgtcaatctcgatcgatccatctattgttctagaacgtagaatatacatagaatggaatcatgactgcatgaaacgtatatatatatatatagctatatatatacctagcaataataataatatataaatagcataatataacacttaatagtgattgttcactattacaaagtacactaaaactgccattttgggctttcccacaacagtcataatcaaaaagcaaaaattaagacaacacacgtactaattattattactatacacactctactcttctactactgttgattagtaatatcaaactttatttattatttatttatttattttagtacctaattagtcaaaacgatgattaaacggtacactgatgactactgaagtgatgagtttgtataaatctccccatttttttttaagctttttctcataattgacagtgctaatttgtcagtgctcggtactaagtaggtatgtactacacatctttttttcttgttttattaaaaa

SEQ ID NO: 136742 - DNA, 649 bp, Cannabis sativa
tatgttcaacatgtgatcaatttaaaataacattatatccttatcagccctcaatttcgctaataccgtgatgcttaatgaataaggtagtgaaattaaccataaactacttaataaataagtaagtgtcactaaacatgcttaaaaattaagctaactaaatatcattgtcattatgtaattaattaaacttaaaagacaataatcacaacaagatatgaactacatgctttcaattcaattattctcgaaaatttaacaaaacataattgaaagcataaacatccaataatcaaaaaaagtattggcctacaaagtagttcaaaacatcaacaagtaaattacatataaatgtaatctcaagaaatagaataagaaactcccactaacccaaaggtgcaaaagattataaaataatcatatcaacatgttttataaacaatatggcacttaatcctttggttagaggatctgttaacatcgacttggtcttacaatattctatcacaatgtcccctttcttgaccaagtctctaacaaaactccatttcaatattctatgatactttatttctatatgtttagaagtgttgggttttatgccctaaaaaaactctattttaatgtaatccattttattcaacatcaa

SEQ ID NO: 136743 - DNA, 616 bp, Cannabis sativa
aggaacgttctcaacaaagtataactaactacgaatctagcctatactcagtactctagtcgtactgatgtggtagcagataactcatacaatctaatagcctagaatatatctgttggcatatcggtgcaactctatgtacacctcactgatgccctaatatgctaatgtaatggttatagatttgcctaacatatatctgttggtatctcggtgcaactctatgtacacctcactgatgccctgatatgttattctgatggcaactaacatgtacgctaaacatgtataaacatatgcatatcattatactaatcttacctcgtttctgaattcaggtgtgccggacaaccggagtggaacaacagctcggtgaattataggcccgtaaatcacatcgttcataacatggatcagtgacacgctaaatcacaaaagctctgaaactaacacgattcaaaaacacgaaaaaagtgcaggaaaccgatttttgatccagttcacaggttttacaccaactaacctaaattttttgaaaacctaaccaattcaactccaaaccttaccaaaccttccaggcctgcatataataccccaatagacatattccaagtaa

SEQ ID NO: 136744 - DNA, 805 bp, Cannabis sativa
  modified_base (342)..(342): a, c, t, g, unknown or other
  modified_base (410)..(424): a, c, t, g, unknown or other
aatcttttgccttgatcctctgatcaagtgtagtatatttgaatccactcatatatctggaaccaggttcataaaacttatgaaacctccttaactatatgcttcctcggtcatcagaggctgcacgcagcctcctgtctcggccattcctccccttacgctcgctcaggggtatgcaatgcataaccctgtgcaccaatcttgttttcttcatattttttgattcaaaaatcatttttccttgaaaaaaaattcaaagttcggtagaatgtgtagaatctaaatttttaattaaatatctaattatcataataaaattaattttattaattttttaattanttaaaattagttttagatgttagtatgctttgatttttaaccttatggttaattttgaaattttagannnnnnnnnnnnnnntaattataagatcagatattatatttttttattattaaatttgaatgatcttattttgatattaaaatatatattttaaaataatcttgtttaaattttaaaatttactaaccatttcatattttttcaaatttgttattttttgaaatatattttattaattaaaattataagatttaataaatgttagtttatgttagcaaaaataacatgaaattttaaaaaattggttagtttacgtttgaatagaaattttagggtttctaaccataaattttttcaaacttatttttattatttttataataaaattggtaatattctaaccataaaatatcttatttttcaaattgtttatttttgtaatatttaatttattaa

SEQ ID NO: 136745 - DNA, 919 bp, Cannabis sativa
ccctactgcacttacatatgggatgttcttcatggtttctctttctaagttgtatcttaggacattgttgtttagtaaatttgtccccttacagaataggaacaaaacccgtcttacataagttcatgttaaaccttttgagcacacgatcaatgtaagcttcttgatataagccaaaaactttttttttattcttatcacgatgaatctcaatccccaaaataatatcaaaattagtagaccgaaaaaatttggtttcatttagtaatgataaatcaatgctttatgtaaaatgtcatctacataaagaacaagaaaaatataacgactcccactaatcttcatataaatacattggtcaaacttgtcatagatgaaactaaatgatgtgaaaccttattaaacttcaagtaccattggtaagatgcctacttgagaccataaatagatcttttcaatttacataccaaattgtcatttccatttttttaaagcctccagtttgagacatataggcttgctcactcaatcttcatttagaaaagtagttttaacatccatttgatgcaactctaaatcaaagtgcgctactaaagccataataaatcttaatgaatctttagtggaaatagtcgagaaagtgtcagtgtaatcaataccttctctttaagtaaaatattttgccacttgaaaaaccgagtttttgcaaatgtcaataatatatatgaaaatataaaactgtatacgcctgcagaagcataatatgattatgttactgcagaaaccagttttgcagcaacaaaacagaacagacacaatataaaaataattgcataaatttaaataacttgacacaagagatttgtacgtggtatcagtgttctcccgaatactcctagtccacggggccacgcctaga

SEQ ID NO: 136746 - DNA, 529 bp, Cannabis sativa
atatggatttaaaatgatggatttaaaatgatgaatttaaaaatgatgaatttatttattgtgatgatttttattgtgatgatttggatgtgttcatgttggtttatgtgcatatttcatgattgtatagaaattatgattttacgatgataaatatttttatttttgctctaaaacattcttttttggaaagtagatgaaaaataataaatttacacttttacagaacttaatttggatttttattgaaatagttatgattgattgaagtttgaatgaaaatatctcaaagttgttgcacacgtgcgcgcgcggacaaggcatcactcggccttcacactgcttcagacaagcccatcactgagttttcttggacaagggctgtcctaagccctagctgactgagttttgcccgtcatgaaggctgcgtgcagcctcatttcatcccatttgctcccatgcgcgcgtagagggagtatgcattgcatacttcctgtaccaaatttgtttttgtgatattttgagtttc

SEQ ID NO: 136747 - DNA, 853 bp, Cannabis sativa
attatataaaatataaacttaccaagaaaaacatacaaatctatgtatattaatttataaaattaagaaaatgacatgtgacttctactcctaatctatagaagatactacttaaaaatacacaacatagtaaacttacattgctttaacaaataatctctaccaatatgcttcttacattaaaaaattataggtacaaaccaagtgaatgcattgccagaatgaaatatgcaaactacagtactaattatcgtgaaaactttttaaagactttaatgtatacatgagttgattaactgattttaaattcataagaaaaaaaaaacatgttttgacaatatcatagtctaaaagaacaaagacataacaaattaaaaacataaaaaatacaattaaacaaaataataaaaatctagaagcaagtgagatggtatacatgctggatagaaggttttaattgtccttgcggtgagtagaaacaaaattgctctcccctccattccaatgttgtcatactttgaggaagaccattcttcatgttccgactaaataaattacttaaagaatcaaaagagaagaaagacctcatttcttatcacactttaacacaacaattcacttttaagtttatgctaacatagacaactaaaaaaaaatgagattgaaagaaatgaatatatgattacaaatacataattcaaaacgtggttgaatatttatacatataaatatataggggtgtctgttgtcacgcatgggatttttgagtgactagtgctgcacacctttaatagccattagattgtattgattttgatctaaaggctgatattacacacttcatatatcattt

SEQ ID NO: 136748 - DNA, 757 bp, Cannabis sativa
  modified_base (691)..(692): a, c, t, g, unknown or other
caccgtctttggtatgtaacatgtcttcacaacgtgactgtaaaattatttatgtaaatattgcataatattttattatttaaatttaaaatactgatcctttttaaaagggttttagggcctctataccggattgaatcctctgtcccaattaaatgtcccattgcctgttctaagacacgtgtcttcctaattaattctctattaagatatttttttttcagaaaaaaatattcatctttttgtttgagaacttcatgcgtgccttttattttttctggggaagttggaagacataacttaataccaataaataaatcaaataataggatctcaatgcaatatatatacttagtattatttccacatctcatatatacatatatatataaaaatacatataattctgtaaattttcatattcaggtttggattctgcaatgttgtgaatgatgttcaattaaaattacctaaagcaacatgttttaatctatatgcctaaggaaatagatgcacttgtaaaagaaacccccaatatatatatttatatatatatatatatatgtgaaaaataactatgattcaagtgaatgaattccttatattaatttaatttatggctgattaaaaaaaaaatatgggcaagtatgattagttctatagattatcatcagatttatttcatccaccnncaaaaagagaaaaaacacttgtcttcatttttctattatcgctatatatatgtataaatatttta

SEQ ID NO: 136749 - DNA, 1225 bp, Cannabis sativa
aaaagggaaaatgtaaaaaaaaaaaaaaagatcgtcataatagcagtaatggttaacagtttggttaatcaatgcggggtggaaggcgaggccccctacctcctccagcagggaatccagtctcttcttcttctcccagaagcgggcaagaacctcctcaggctttggatagaagtcgagcttgaggttttggccattagtttgccaggccataaagacgccatcatcaaagcatttggtgcagtgcttgcagacaacaggggccaggagctcatccctcttcgccttcttcagggcctgatctttgaaatccctgagctccttcacctcaacggtcaagttggccgtcgtctgcaagtaatcctgatgcagctcctccattgtggcagtaaatcttcaacgcctccttggcctccctcagctcgcgccttgccttagccatggcctcatctcgagcctttaactcctctgccttggccttcagtgcctcttgatgactcctttctgcctaagcctccctctgttgggcttcctcctggaacgccttcctctcaggctcttcatggcctcctccatgtccccaaactcggacatgacgtactcaagatcaattaaagtctttgagagctgaccggtctctgcagcaatctggcaaaataagaaaaaagagttaagtatggaagatcaggtgccatagagtaaaaccccaaaaacagtaacagagactcaccgcgatcatagcagcgctgatatcctaaatctgatagatggatttcgtggaagcgtaggctgcatatcttttggccgggagttgggtcaagttggagacaaaatggctcgtcaactcagaggcgaagggagtaagagtaggcccgacaaagcgattgaaccactccatcaggggatccatattcaggtcctaggcgttcctgaaggactcctcgcgcaaggaattttgctgggcctcccgcaagacctttttcaaatcctctacctcgacgttccctcttgtatactcagccatagcataattgtgcttggctatccggagttgttgcctctcctcatccgcgggaacgtggccaagaatgatgctgggaggcacagtatagtccttcgcttctggtagaatccccgagtcagagctgacggccggagtgttcaccctcttagtctttttggaagactcagcctccaccattttgcccttgcgttttcagtccaa

SEQ ID NO: 136750 - DNA, 735 bp, Cannabis sativa
tcattcttcatcctcccaaggtcgttcttctagtgtgtataccaggtctggctctgtggaaacaccacgaggagggagatatcgtgttcacaggggtgatcttcgtgatcacctcaatgaagttttcagggcacgatctcagacgccccgaaatcgtaatgagcccgtgatccccaggtgggcgatcaaggcacaaacaactaaaatatcccagctaacgttgtcaacccacctaacgcaccacctgcaactaccgaggtagtgatctcgactaacatagttgcgattactgccacaccaacgacaactcaaaataacactgtcacactagggggtgttgatcagagtatcctgctacgagcgttaaaaataatcgagcagtagagaaagcccatttaaaagctccatatgacctctcctttcattgaagaagtgcgataagctcaactccccaagggattcaggttgtctgaatcgctaaaatataaaggtactaataatcccatagattatttagaaaaatttaataaaattatggaagaagatcaggtacctcaactagcgaaatgtcgcatccttgcggcaaccttggaggataatgctcatgattggttcaaccaattacctgaggcatctatatcaacttgggagaccttcgtggatctatgttgggctttgtgccctaaataaaactttatttcaatgtcatctttatcatttaattatcaataaaga

SEQ ID NO: 136751 - DNA, 628 bp, Cannabis sativa
aactaggaataggtaggggtgtgtaaagaccatttggctgaaccctcgatttagcttgcttacaagttacacatctaccacaaattcgctcaacatcacttttcatgtggcgcgaaaagaagtgttcttgtaatatgactaaggttttagcaactccaaaatgtcccataagccctcctccacgggattcttgaactaacaaatttcataaagaacaattaggcacacacaacctatgctccctaaacaagaaaccctcatgcctataaaacttaccttcaccagatttttcacaagaaccataaatctccccaaaatcatgatcatcaggataaagttccttaatatgttcaaaatcaggtaatttagcatcaacagtagagattaaggcatacttgcgagaaagggcatcagcaaccacattctccttaccttgtttataccgaatgacatatggaaatgtttcaatgtactcaacccatcgtgcatgtctcctgttgagcttgtattgccccttcgaatgattaagggattcatgatctgtgtgaatcacaaattctttgggccacaaatagtgttgccatgtttctaaagctcgcaccagggcatacaactctttatcataggt

SEQ ID NO: 136752 - DNA, 557 bp, Cannabis sativa
tccatgtgcatccctcttcacatggacgtagtaactaaagcattccatgtctatcccaatttgaaccatctcagtcatcgactctcgaccactgtcttgactaacaataatctgaaggcccctacaatacttccatacccatgacaacaagcttctttttcaacaaaagcgccttttatggcttaaaatgtcactcaggaaaactcggcctagtgtaccaagcatacagtatggactacccaatcaaaccttgtactatgccaacgagtttcaaatagtttgttgcgcctcgctacaatgggctaattttttgcgcgaccgtgtgcctcgtgcacacttctgtctctcgaagaactctcaccgagtcatgctcaaaagcatccatgagtgcatccatgcatcgaggctctctagtcaagatacttgcactgtccataggttcctgttcccactatgataaggcaaatccgaaaattgtcgctcacctagtcactcgtgactaaggtagcatgtgtggcaagatgccaacactaagctgacgtgccaacgcttctaat

SEQ ID NO: 136753 - DNA, 533 bp, Cannabis sativa
ggcaaattggtcatttttgccccaatgatattttgtcctttagtggactttgtaattagaaattatgtgattatgtggcatttgtttggctgaaataaaggtttagtaattgcatttcactctcatttattcaaagatttcaaaagttagaaaaattagaaagaaaagcaaaccattttcctctctagcctctctctctctttcggcctccttttgcagcaaggatacttgccatttttcttggatttcaagttaattttagcaagagttagtgatcacaagttgttggtatgtttcctttagctttctttttagttttatgaagttttgagaaagtttgatggttgcatgtttaggaaatggtggctgtggttaattgttgttgcattcagaggtttatatgtgtttaactgagtgaattcatgctaggtgtgttgttagttgatgggatttaaccttgtgtagagatattaactcaaaactatggtttttcaaagagaaatgtgaaattagttgctgtagagattgttggt

SEQ ID NO: 136754 - DNA, 4272 bp, Cannabis sativa
  modified_base (318)..(320): a, c, t, g, unknown or other
  modified_base (1201)..(1205): a, c, t, g, unknown or other
  modified_base (3431)..(3444): a, c, t, g, unknown or other
  modified_base (3656)..(3661): a, c, t, g, unknown or other
  modified_base (3983)..(4002): a, c, t, g, unknown or other
aaaatatagtatttttgaaaacttttctgtgtaacagtatttttgtaaaaattaattcaaattctagtatttttgtaaatttccctatatttaatggggagtattacactagacataggcggacctacatagagcccaaggaaggcttaagcccaccctcaaatttcagattagaatataaaaaatggataagttgaaaaatacctcttttttatttccattaatcaaaaataccttcatattgttttttttattaaaatatacccattttttttgagtggattgcctaatatacactcactctctacttaagtctannntataatttacataacctaaggggtctaatggggacatcattcataaaagtgggtatatctaaaaaaatatgaaaatagatgtaaaaattaaaacaagtaaaataaagtgggtatacaatgtaattttctctataaaaaaagggtaattccataaatatagaaaaaataaagttagtttagataaatatggtaagaaaacttaataggaaaaaatatggtatttaaaataaaaacttaacatatataagattgaatcaccataaaagatattaaaattcccttcatatttttttttttaaaaaaaaaacaaatgaaactatagtgatcgtcggaattgtcacaggtgcctggagtttgctgtcgacgctgggaaggtcgccagagttgctgtcggcgccgaaaaagtcatcagattggcattatcgccagaaaaatcaccagtttcttagtgattttttcggtaattttttcgacgtctgccaattccgacgaatttttcagagtttgctgttggtaccgaaaaagtcgcctgagtagctgccagtatcagaaaagtcgtcggagttgctgtcgatgccataaaagtcatcaaaattggcattgtcgatagaaaaattaccgaaaaaattactaagaaactggtgaagaaactagtttcttcatcaacaaattggtttcttcatcaagaaaatagtttcttaatgaaaaaactgatttcttggtaatttttgtggtgactatgccaattttgatgacttttacgaagtttgctgtccggtacaaaaaaaaatcgccagagtagctgccagtatcagaaaattcgtcagaattaacattgtcaccaaaaaaatcactgagaaagtagtttcttcatcaagaannnnntttcttggtaattttttcggcgacaatgccaattgcaattaattttccggcgtctacagcaactcttccggcaccgacagttactctagtgattttttcggcaccaacaacaaacttcagtaacttttccgacaccagtgacaaataaaactacctaaacaaataaaagcattaaatatgggatttgaaaacctaatttacatatatatgacatatcaaataccataaaaatacctaaatacaaaaaaataccatataaattgatcaaacttaaaagtatcatatttaacataagaacttttaaaatctcatagtaagtgtaatttcctcttataaaaaattagagatagaaacaatacataattgttaaacaacataattcatgtaggtatttgttcgttacttggtagacctggttttgaatttgattccttaagctttatcttctatttttatttattatatatatatagggacacgattttgttccgttagtgtactttcacggaatgtattctgtgatgtatggcagccgttagatggggtagttatttgatctaagggctgggattgatctaggggtaattagggttaaaaaatggtaacgtacctgggacatattattacgtaccctaggacacattactacgtacatgtcgtacaacaaaatacattccatatttgcatttctgggtacaaaatcggctgccttataaatctacccttttgaaagagaaaaaaaactacaaagtattaacatagagtattcaaactaaaaataacctattatgttaaaaaattaatatattaagaaattatatttaatttataattaacacaagttctcacattaaaaaaattaaaacaagaattataaaatctcatattattatttaaatgctaaaatttgttccaatctatataataactttatctgagatttaagtaaaaaatgtaataaatatttttaagaaattattattctaaattttagttagtccaccctaaaattatatcctgggtccgccactatcacacggtacctgaagccactcggatggttgtgcatggccagggaaaaattcctaagctcccatgcatgtggttttgacgtgcgtggtcgagtttcaagtttagaaactgagctcacatgcaatgaacattacataggtatattatttacatataaattaattttcataaaattaaaattacataaaaaaattcatatgccccaaattggtttatattattttttaaaaataataacaacaaaacctacactcaattataccatataattaataattcatcacctatcaaatatttataataatataaccatccattcatatacatatcacatatatataaacacataaaactcacacaacatttaatatatacatattcatggaactgctcttgataccaattattagttttctggtactaaatcagatacgtagcagaagggttttgtattgctgattatcattgtatcatatcccattaaatctccagatgtgtgtacattaaattaaaacataaattaacaagtttagaatataaacctcttgaagactatcagggtatcctcacaactttttgtatgttgtatcccttaatctaaatgatgaggataatacaatttgactcacactagtatctttcaaatcgacctaccacacacaaggaatagtataggctattaggatagagtgtataatgttattctcgagttcttaacacatgagaaagattaattgagagagaaaactatttcctttctcctctctatatttcaaaaattaaagtgtaaaagagtgttctaattctcaaattagacttctatttatagtagttaaaattctttaattaaataatatttaattatttaaataaatatctataactgaattcggttactgatatctatgagagaatctcttaactatttgagagaatatctcaacaactttaaaatatctataactatttttcaaattcaaatatttatctaattgaattaattaaatatttaattaacccaaaagagaaacatgcatagcgataggtgcctacccttctctatttagcacaaagattgtgtcttttgtcttgacaaaatttgtctcgacaaattttgttttgaaaaattttgtcttaacaatttttatcttttccctatttaatcaatttgaaaaattatttatttattacaannnnnnnnnnnnnntattttgccaattcaaaataaatttttttgaacgatattatactactctttatcccaacccttgatagtattttcaagtggtaattcatgaaccatggacttataattctaagctctaataaactaaattatttattgaggctcatcaattaaataatcattgtttattaatttcatgattactccactaaaaatatggaattgaactcttnnnnnntatagaattatatttactgagtttcactgtagtgtccattaatataattaatgctagtgattagcccttcatgtgttggttcgtaattagttttggtcaaattaccattctaattacttctttatcctttaataccattaatttactagtgaaagtataatttagatccaatctaaatttgtgcacaacattctagttctagaattaacacttaatgatgggaaccaacattcgatccgtcagaaaagtcaggattccataattgtaaattattttcccagccattcacattattagcttcccaaaatagaagttgtaagannnnnnnnnnnnnnnnnnnnttaacgagtgaatcaaagaaactagtaacatgaataggagttcatgattactcaagatttaggctgatctactattaattatcgttatgatatgaattaagtctttatagtaaacaacatgttaataaagaaaacttcattcatatagatcattatcatatataatccatattatatacaataccttcactttgatgtcatactacatcagtaatccaaattgagattacttgcaccgaagaacaggcatcactgaaccgtactagcaac

SEQ ID NO: 136755 - DNA, 1076 bp, Cannabis sativa
  modified_base (911)..(912): a, c, t, g, unknown or other
gttttatgtgttagagtgctttcatgcagggggagtattttctatactcttttatctttaaaaagctatttgctttggtttttatgttttgtcataataaaatattttgtcaatcaaagtgccaaagggggagattgctaattccatttttggcatatttagttgacaaaaatattttattatttattattattttcggctggtatgtttaatttggtttccttattgtgtgtatccaaacttagaaagaaagttgtctagctttcctatttttggaaaaaggtaaaaatagtaagtttggttactcatttcttttttatctaactagctggtatattctgatcttgtgtgagtttcccattttcttagattagattttttgaagaaaaaatcgaagcttaactttccttttctataaaaggaaagttgtacttactgcccacgattttgtaggtacaaaaatggaaattcctgtgctgattgaagaattattttagggaagtttgtagtgggctggggtgttgttaagaccacgtgtaagctgtcaataaggtgtatattaatcaactaggttttgtatctctttcatacacttagaattgtattcatatcttgaggaaagagtgtctttgttgtacctttcttggtacctctcttgtatctttgaatttctctcgtatctttagaaaagagagtctttgttttgtagagaagagatgtttgactcttactttgtttatttgtagtttgtattgccttgagattgtattcaagtctacaacaaataagaacatcagtgcaaccttcgggagaaggtgttacaaagctttcaggagatgcttttcaagtcttgcatcgggaggattcaagcactcaaccttcgggagaaggttttacaaagctttcgggannttgcttttcaagtcttgcatcgagaggattcaagcactcaaccttcgggagaaggttgtacaaagctttagggagattgcttttcaagtcttgcatggggaggattcaagcactcttcaagttgatcgaagggatttcgagctcttggagttttatcaagattc

SEQ ID NO: 136756 - DNA, 1183 bp, Cannabis sativa
atgggaataggaatgggaatagcaatgcaaatgcaaatgggaatgggattgggaatgggagtaagaatgggaatggggcaggaatgggaatggaaataagagtgggccggggaatgggaataggaatgggaatgcgaaggcaatgggaatgggaatgggaatggcaatgggaatggggatggggatggcgatgggaatcagaatgggaaagggaatgggaatgggaataagaatgggaattggaatgggaatgtgagtgggaatgggtcggagaatgggaattggtgttttgggtttagggtttgcggtttaggtttagggtttagggtttacagttactgttggggttgcggtttatgggttagaggtttgggtttggggtacggttggggctaggggtatgggtaagggcttggatcaggggtttaggggtcagggttcaaagttcacgattcagggtttagggtttaggggaatgggaatgagaattgaataaaataaaatttataacgcatataaaatttgataaaaatcattaaattttttttcctagttacatgataattgtcgttccttcaatttcaaaaaagaatattcattccacgaaaatggttaaaagggcattctattggaatgaaattctaatactttaaaagaaactaaacaaaagaatggaatgaaatttttttcttttccattccatttcattacctctaaccaaatgccacctaagggtctgtgttcaagggttagggttcagggtgttggggtttgttgtttgggttcttgcgtttaggatttagagtttagtgttttatggtttaagggtttgagggtttaggggtgttgggtttagggttcacggttcatggttcaggggaatgggaataggaatgaaaataatataaaatttaaaatgcataaaaaattgataaaaatcgttaatttttttctatgttacattggaatggtcattccttctgttatacccaaaatccagctggcaatttagaggatgacacgagttaaccttagagaatacgaatcaacgaatgttatggcagatactaatttctaccctaagaattgaatatgaagatttctttcgcgtgaaattttgttaaaatggccccttaattaaaaaattgaaaatatccttctttaaagggtaaattttaacaag

SEQ ID NO: 136757 - DNA, 810 bp, Cannabis sativa
agcagatttggtcaaaggaggctcgggttcgagttcagtttcctcactgtcagaggagactccaaaatcttctgggaggtctttttcagatgggataatcacggattttgtcattgaatcagcagaggacacctccataggttcttctttttcagaactcgaagaagccgaagggggattcattttcagcttcttggcagaatgaatgggtttgtcatggcttcgtttagagcgaagttccttctcgagagacgcctgctgggcacgagtgcaagtggaaggacctgttggagttgagggagcaactcccttacttgaagcagcaggaggagatgtagttggaagaggtagagaccccttcgacgaagaagatgatgaagtgcaaaatttgtggggatgcacagatttccttgcaacttgcttgggaattcatttaggcttgggcttcacaggctgagattcacgctgaggaagcgatgaatctcatgggtttgatgcagttgtagcagcaggcaacacgattggagcagcaggaggagcattcgagggagcttgatcggattctaccatcttgcttggctgccctaggttcttagtcttagccaagaatttctgaaagaagaatgaaaaacaaagaacaagaacacaaggaaatagggatcgggtaggtggtgagaataaatgacaagtaaaaattggtttaaataaacacgggagagttgaacactaaaggaaaccaatttcaaaaattgagtaactaccagcccacgaacaccgaagaaaaccgccccactctttttccaaaattat

SEQ ID NO: 136758 - DNA, 733 bp, Cannabis sativa
tttacgtttgactccaccaaattgcttgtgttttccaggcaaacgaaattgtaactgctcaagctgagctaaaatatcgtccccgacaattgtggaggaggtgatcttttctcaattttccatcgtattgtttacttctacgccttggatcatccatttcaagaaaccgtttgtgcccaacataacaaatcttgctacgtaatccaatggaaggagtgtgttcgttacaggtggggcacgccttgtaccatttggtgctccaaacagacatcattgcataagtcaagaagtcattaatggtccacaaaatagcagctcgcattgtgaacacagtcccgttgtaagcatctcgagcttggacacctgagtcccacaactctctcaattttatcaatcaatggtctcatgaaaacatccatgtcttttctaggggcagtgcgccctgacaccaaaagagacaacatcaatgactcaggtttcatgcacttccaagggggtaagttgtacgggactaaaataacaagccacacactgtaagagttactcatgttaccaaacgaattgagctcgtcagtggccgatcctaatctcacatttctaggttcaagtgcaaaggatggatgatgtctgtcaaactgcttccactcttctgcatttgcagggtgcctaagcacgccatcctctttaggtctcttagagtagttccactgcatgtcctctgccgagtgtcttg

SEQ ID NO: 136759 - DNA, 716 bp, Cannabis sativa
  modified_base (132)..(133): a, c, t, g, unknown or other
atgaagccacagtcgctaaacaacaacattgtaggatgtatctgaatcgatgacatgaaattaggctttagaatttaactcacctatttcaatttttagtgtgatacttccccttactttttctccagcttnnttaaaaccttgaattttcaatgatgacgaagacaattgacgtgggtgtaaactaacatctctcaaggattataaggagagtacattcacagccgatccacaatccaacataatacggcttacgcgaatatcagcaaccatacccgtcacgtagagaggccgattatgtaaagcagcccccaactgacgatccttatcatcaaaagttatgcatgctatacaagaggtatgcatttcaagtgatgtagatttcaatggctctattttctccgtataaaattctggacttgtcaatgcgacaacaaatgcatttctatgctcaggagacatttgcagtgcatcataaacgcttaaaagagtagggatgcgctttagataacccaatatatcatattttgctcgcgtcatttcatcttcaccggtgcttttgcctcttcgattgtcattataaaattcccggttggtcgaagatgaaggcttttgaaggtcatgtttagcttttcaagcttttttgcttctttttccttctttgcaaaaattttccaccgcatatcttgcagcgtaatttcatctacctctttttc

SEQ ID NO: 136760 - DNA, 574 bp, Cannabis sativa
  modified_base (37)..(47): a, c, t, g, unknown or other
gtatttccagtcaccctcattagtgacgcgcgttgannnnnnnnnnnatacttttagagttactcaatgtgtgtcactaaaacccatttttctagtagtgttaagagcgaaaatagtgccgaagaaaataatgaaacataacaagaaaaataataagaatttttaagaaagctcaattggtaatgtcggtcacacatattttttattttttaaacaatagaaaaaataaaataactttgattgcgaacaaaaagtacagaatatccgcttgtctttgtccctgatgaaaaaatcaaactcataagaatagtaagaaattgttttatcaagctaatgaactagtggaatgaggtcataccggttacgcaggaaaaaagttgactcagtcaccaagaatattaaaagcaaatcaaacagtatgtaacagctttataacactattttcgaagatatgaaaattttaccacaaactaggccaagcataagtgtgtgaaagtgtaaggagggaacattgcccaatttgtcaaaaacactttttctgatacattgtaaccataggagacgctgtcacact

SEQ ID NO: 136761 - DNA, 1607 bp, Cannabis sativa
tttttgcattttttcttggctcaacttgtcttttgttgcacttttgaagcccttcccgtccacaactacgggaaacctgaaaacatagaaaacaaagaaaacaagcataattctgtcataaaacatcgaaaaacgactctaattgtgacccgaaacatagattaaaaatagcctaacagctgggggcacatagatgacctagacgaatgcttcaaagtcctcaggaaatacaacatgaaactcaatcccttaaagtgctcctttggagtcagcttgggtaagtttctgggctttattgtcaacgcccaaggaattgaagccaatcaagagaagattcaagccctcctagacatgaaatcaccaacaagaaccaaggaagtacaaagtttgactggtcggatcgccgtactcagcagatttgtttcaaaatcaacagacaagtgtgttccgttcttcaacttcctgcaaggaaacaagaaatttgagtggacagaggaatgagaaaaagcttttcaagagctaaaaatgcaactcgcaaaacctcccatattctcgaaacctctggatggagaagaaatggggatatacttagctatcatggaggatgctgtaagtgccgtgctgattagagaggaaaacaacatacaacatccagtctattacattagtaaaagactcattgaggctgatggcccatacccattgatagagaaactcacttactacctgattctagaaacaaggaagtttagaccctgtttccaagctcatcctattcgggtgtacactgaccaaccgttacgccaaatattacaaaagtcggacacctctggacggttactcaagtggacagtagaacttggtaagtatgaaattactttccaaccccgaacaacaatcaaaggccagcccttagcagactttgtagtagaatgcacaagcaaggaagaaagcatattggaaggcaaccccgagccagtacaaatacctcaaccaagtaatagtgaagacaagttgacttggaaactacatgtggacgggtcggctacagatcaactatccggtgcaggaatcacccttgtcacaccttgggggcaacaattgcaagctgcagtcaagtttggatttaaagcatccaataacgaggacgaatatgaagctttgatcgctggtctaaaactagcccgggagatgaaagccgaatatattgaaatctatagtgattcacagcaggtggtaaatcacgtgtttggaaaatacgaggctcggggagaaaagatgatagaatatttgagaaaaatacacaatctgctcgcatagttcaaaagctacgctctaaaacaaattcgaagggatgaaaacacgactgctgaagtattagctcggcttgcgagtagtaatgtaagtgataaagtgaatttggttcctatccagttcctcgaagaacctatagcatcaatggcacggaagcgatcaaaatgattgatacttcccgaaaatggatgacaccaattgcgacgtacctcaacactgaggaactcctagataatcaaaatgaagctcgaaaaatgagaaggaaagctgcactgtgttgggttttatgccct

SEQ ID NO: 136762 - DNA, 927 bp, Cannabis sativa
tctgcaaaatttactccaaaagggaccataactcgaagcaatttttcaactttgtcaccaggaattggacaggaagatttcctgtggaaacttctacttatgattctgatatttatatggttacttttggctggcaggcgatcttctcagggtcctctccaaagagccctggcatttttagaaccaacacctggttctttgccctccaagtgttctacaaaatgcctctttagagtctttcactattactcccttttgggttcaggtttaccgattaccttttctaagtaaatcgaaaaatcttgctcaaaatattggtggattgattggtaattatattgatgttcatgaggattcacttaatgagggatggggtccattcttaaggattcgagttggggtcgatgtctcaaaaccgcttcttcgtggtcaaatggtagcatttccttggatcaaagatgaattatggctagagttccattatgaacgattacctgatttctgttatgagtgtggtatagttggtcatgtttttaacaaatgtcaagtgtacttggagaaaattgatgacagtaaagaacccgatcttccttatggaccttggattgaaggttcttctctacccaaatcaccttatgatcattatcggcaagacttctcaaaggcaggtccttggccttttgttactcgtcttgttagaaacacaataactcctatcatcaagcaatcaaggcagcctccggcactccctcctaatgttacggatcgcaaaaaaggaaaagcagtcatgttaccaaagtcgaccgattcggggtactcttctttaactccctctttcgcagcactctcttgtggcctaaacaatattcctagttcgtcctctgtgaagaaggtttctttgccacagtgttcacaaatgaattctat

SEQ ID NO: 136763 - DNA, 606 bp, Cannabis sativa
atagcagctatatttaccaacccaattctaaaaaattagaataaaaaaactactaaagtaacacaaaaacaaatgtaaaacaatgaagcagatgtaaccacttaaaaaaaaatgtaaaataaccacacccttcaaattttttttgccaatgagcttgtcaaatgtatttatagaagaattagaataaaaaaaatacaaaaatagttatagagaaggaagaagaaatatatttatagcctctatctaccacacacacgtataataccattacatcaacatgagaacacttggaaaacaaccattaattctggcgagatagagcaagaacaatgaaattgacgtcaaataaataaatcatggaaaaataaccgtaaaacaacactaaaacaaataaaaaaaacaaaacagaagaaaaaatgattaaaaaaaactaaccatcttctgcacagcttcaacaccaaatgcaacagtagctatatttgcaagaacagatctggaaaatcaaaataaaaaaaaaaaaaaaaaaaaacacacactcttatttttctccaaaagtgtgactgaaaattagaaaaactaaaaaatgagaagaatatgaagaagaag

SEQ ID NO: 136764 - DNA, 745 bp, Cannabis sativa
agggcataaaacccaacactacctcccctgctaaagcctgttgtaggaagggtaggagccccaccaacaaccggagtcccacgaaactctaaagtgcactccactgtgctctcagcccggagtgccttatccattatttcagcataggtggtactgtctaatcttcgcattgaacccatcgaggtacttctctttcttactaaaatgggttggcacaattcccgaggccaacctcgccaaacgatcaaattgagtcatgtattgagtaacactcatgtcttctttctgagttagttgggtgaattcttttcttttagcacttctgactgcttcgttgtaatacttagcattgaatcgttcctgaaacttttcccaggtcatagttgtcacatcatgaatcatggataccatgtcccaccagaccaaagcgtcttcttgaaattaaaaagtggcacaggccaccccatcattaccggtgatgcccataaaattcaagattctggtaagccattgctcgactttcatgacatcaggacctcccaggaaagttggaggtgcttgcttacggaacctttcatacaagggttccattcagtttactgcagctacatgtttggccagcacagcaggggtaggagccactagtatttctggagcaggaactgcaggagcaccctgctgtctcaactgccgaatttcctcatcttgttcattaattctagcttgcatcgctgcaaacctattt

SEQ ID NO: 136765 - DNA, 539 bp, Cannabis sativa
caatattactaactaaaatcattttgatatttttttcttccaattgggtctccaaggttgccgatcctaaaaatatttttatttcacaaataactcatattatattcatatttttaaaaacaaaactttgtgattaacaaattaaaattaaacttatttatctacttattgtaaaatttataatttatgctaaattaggttagctagatcataatccttctcattactacctaattaaaccataatatgtaataaatcctaattattcataattacgtttcagggatgttacagttaatacaatgaaattttaggcattctcttgaaaatgttaccgtagtttcaactaaagctacttttatttctattaccctacttgttgccattatttgatttatttccaccatggtttgagctgttgtgattttttgaattttggtcttgctggacagatgtattggctgcggtggtgtgttgttagttcttttagtccaactgtgtctacacgtcgaactacttcttcgagctttataaatcaa

SEQ ID NO: 136766 - DNA, 1868 bp, Cannabis sativa
  modified_base (179)..(184): a, c, t, g, unknown or other
  modified_base (1114)..(1115): a, c, t, g, unknown or other
aaaatacttcctggatgaataaaagggagcccataaagtgtccaaacaagacaatttataagtgtagccaagtatggcacagctgagtattgctccattgattttttttttcatatttgaataaatgttggcctgtaattaataataataataataattaattagctacattattaacnnnnnntttatttgttcatcattattgtgacataataatcagggccgacgataaaaaaatggaggcctaagatttagggccccttaataaataaattaaaaaattaacctaaaaaatgatatgctacatttcataacataaaagtaaaaaaatatattaaaaatctgaaataagttttaaagtattacaaaaattaatagatttgtattttttaatttgttctatcatccataataatatttttatcttttcaaaatttcaaccatataataaatcaaattcatgaagaaaaaaaaaagaaaaaactatcaagtttatatttatctataggtaaaataatttctaacaactacattaaattataggccataattataataagatatttaaaaagaaataaattaaattcacttcaagtaatatttatgaaaaaaattatttattattattatcgaaattaattattatatcttgattaatgatttttcttcataatattaaaaatataattttgattaaagcaagataaatatggaaataaaaacatgataagagaagtaggaaaatagacaaaaaaaaataaagaaaataaaaaaaaaaaaatagataaacttataaaatgttagatttagaaaaaaagtttaaataatatttatgtattaaaatttttttggctttagttattagttattaagtttatatgcatttatagttgtttcttagaaaaaaaaaattaataataaaaactaagtttggtggtttcaaactcaggtcccaagaaaacataatacctgccactatttaggctgccattatgttgggtccaacttaactatatttaatgttaattttaattaaatatagtaattaagtaattaggtcttaaaattttaaatgggcccctagaaagagtgggccctaggcacgggcctagcnngcctatgcctagggccggccttgctttctacgaatgtctcacactcatatctcaattctgaagatttcaattcaaaaaattgccccaagtcgaagtgcgattttgtccacgacaagcctaaaaacgattcgacgaacgcaagtcgagctctaaaatttgacgataatcatccggagtcattctaaccattagatcacatcaatggtcaagattagcttagaatgaattttcatatttttgtatttcgttattaatattttaatggacctccatacctataaaaggataactccactaactcaccttttacatttttctaagtctccttaaggttagagcatatttctctagtttttcgtgagcaataaaaactcgaagtagacgtagctctattgtcatcgcaacttgaggagtgaactactttaaattgtggcgtctcttttatttaatttctttcatctattacttttctcgccaatcaagcgagacaatggtgatcaattttcagcgtcaacagtaatcttattctcattaattgaattatattatttggttgaaaacaagaatcttatatattattttaaaaaattaaattaaatgaaaaataatttcttattatatctatttaatattaattatacataaatacaagataattattctaaaaatatatatttattaattaataaatataaaattttaggggaattaccacatatactattttttaacttttttttctttttcaaattt

SEQ ID NO: 136767 - DNA, 882 bp, Cannabis sativa
aaacgtatgattcgcactagatttaatttgtaccaaaaattttacaacaaaaacaatataccttattaattttttttgaatacactaaccattttttatcatatttttctccatttgacaactttcgtatataatgagaagtagaaaaacatctatcattttcatcttttgggaattcagttcacttacttttattggaccattttctactaataatttgtatataatctaaattatttttaagatttctagcttccatgctctcttcaatattttcttgacattcttcatcatccttcacatcatcacacgtttcattattaacctccaaatttctctatttaattaatgtttattagttttttcatttaaattactttcatcttttttattagtgacaacaaatttttctaaaactcatctctgagagttaattaaactttctgttttttttttttaagtttttcattacgagatggatattttctactagagatacttattttaggtaggaaaaataaacttaagaaaatccacaataattgcaatggaaaaaataaaataaaaacctaaactattgcatgtatatagaaattaacaacaattaatcaaaataataatgaacaaaatgtgtatgtatacctgttatatatatgtacatttcttattgacatcttctatgtaaattgcaaatcaattgatttaaaggagaaaaaataatgagatatgagagtaaatatatcatgagcagaaaaaatatatcatgagaaatattaaaattttttaaaatatattagaatatataaaaagtgtgtaaaaccaaaataatcctacaactatatataatagtttcatattcccaatttagaaaaaaaaaaaaaa

SEQ ID NO: 136768 - DNA, 2265 bp, Cannabis sativa
  modified_base (41)..(66): a, c, t, g, unknown or other
ttaatttgttgttgatattttgttatttgtatgttattttnnnnnnnnnnnnnnnnnnnnnnnnnntgttacttttatgttgttttcgtgtttttttatagaaagctgtaaaaatgttaaaaaaaattaacgtagaaatgtaattttttttacaaaaatagtgccttatgtaattatttattttctttattacattgcatttttgtggaaattgcattatactcactttactttatttatttcaatttttaccttcatttctatattcttttagatatactcacttttatagatgatgtccccattataccccttagattaatgtaaatcatgtgctacacttaagtggatggcaagggtatattaagcaacccactcataaaagttggtagattttagtgaaatataatacgagggtatttttgattaatggatacaagaaaggtatttctcaacttatcccttacattttttatatattacaaatttacctttttttgtgggatttttacaccacatactgaaatttttttcaacttttctaccttttaactgtggagcagaatttttttaaaaaatattgtgtaacttttatactgtgtattgtgttaaattttcacaattgttttttagttgttccactgttgttttaattattctgtttgttgttttacggttgttttataaaaagacaatatttttgtaaaaaattatctgtgacagtaaaattgtaaactttcatccaaaatccagtatttttgtaaaaaattcttttctttctctttcttgttcctatgagtagattataaagcctgcttttttattgaagcgtttatacataccttagattgcataatctgagatttaatccctagatctcacacacacaccctcccataccccttataccctcccataccccttataaccatttttttttaaaagaacgacaagttcattaaacaacggaaagatagtcgggaatcacaaggaggattccctccccttgcaccaagccagcgttttggctagacaatctagctctctatgctagctcatcaacaaaaccattacttgtgcgactaatatgaaagaaactacatgtcttaaataacttaattatgtctaaaataactaaagaaacattcagaaaactccaatccagtgggcatttttttgttgcaaaagcttcgaccaccaccttagcatccgaaaggacatgaattttctcccaaccactctgtgtagcatgttgtagggccatcaataaggtagaggcttctgcttccatggctgagcccgccttgctatgacaagaggactgaaaccagatgcctgactcagtgtcaataagaacagcacctagaccagcctctccttcacaccaggatgcatttgtcataatcacataacggcatgggctaataatacctcgttgcatgatgtaagttgaggctgtcttagtctctgtatcccagaattctttaaaacttgaagataacttatgcaccaaaacatttatgttttcagctttcccatgtattctaacaaagtttctctgctgccaaataagagagaatacacagccagcatagaccaacatatgatttcttgaattttctgaagctgagattagattttccaatacctgggccatgtttgctcccggcattgagtgtatcatccaaggctcaggacccgcaaaccagatcccacgggcaaaggtgcattctttgaacaagtggttgtttgtttcctcaaaatcatggcagaaaggacaagctttatcactaaggaaatggagattggatttgagaggaagggcatttattgagcactctccacaacatcggagcaattcttggatgtattttagaattccaaatccatttccataagtcagttttatctccgaacctatgttgttggtcctccacatacgctgctttcactgagaattctccactttttttttacttccaaatcaaagtatctccactcgaggctggcaacctatgaatagtcatgatttttctaccctctatctccccaaacatagagataatcgctccctcattccactcattaccgatggagatatcagccacagacttcaggtgttgattagtctctttgattctcgccattagattcttgaattgacttaaactaagccacgggatccatggttgacaccaaatatcaatagactctccactgctagcaagagtgcaagaaccattgtataaaatattctttgtttcc

SEQ ID NO: 136769 - DNA, 729 bp, Cannabis sativa
tgcaaaaagctatattcaactcaaatgaacctaaaaattcaaactacaactcaacctaaccctaacagccacaattttgcaaaatcactacttgaagctattaaaatcttgagaaaatacaactagaaaataactagggttaccttagcttgaaactccttgaattcccttgttgaattcaccaaagttcagcgacaaacccccttgttcttggctggttcgaagagagagaagagaaggagcgggttttccttcaattttggcttttccttatttcttctaattttcccaaaagaaaaggatttataattaatcctttgctgaaactatcatgccaactgtcactagcctaggcataaagatttagcaactaaaaatattacaattactgttaaagaccgtgttaagcatattttagttccctagtatatctattctatataaaatgtggttatataacagaattcttgatttatgaaaaattattgggtgatttttaaaaaaaaataaaaaaaaaataacaaattattagatgttgccacgtaaagggtcagcatgcatgtagttagttaaacctaaatataattaatccacctaaagtgttgcaattaataataaatttgttcatcttgttcatttttttattaaaaattattttcaaattttgatatttagaattagttaaattttaaatattattttaaattaaatttgaatgttttaatagtt

SEQ ID NO: 136770 - DNA, 867 bp, Cannabis sativa
tatgctaaaaatatagccactggttgccttggagtcatctgataaagtattccaatcagcatcactgtacccttcaagtacagctggaaacttctgataaggtaatccaatggtcaatgttcttttgaggtatctcatgaccctctcaatagcattccaatactctgcactaggtctactagtaaacttcaggtctagtacaatcagtggtataccgaagactgccaatgatgctcgcatattagattgtcttacactatcaccagtgttcttaaataattttacattaggatcatatggtgtacaagcaggtttactattaaagtaattatatttctttaagaccttctcaatgtagtgagattgatccaaagaaattctcttttcagatccattacgccacaatagaaacacttgccttttgcctttttgtccttagacttgggtctaactttgttcttcttggccttgggtgacttcttccctttgggccttccatcagtgttgtccttactgttccacttccttttcttatcaaaagaagaatgagagttggattttacttcagcgatgtttgattcaccttccttggacttatccttgttaagttcttaagcacggtcaactcgttcaacaattaaatcgtgttaaactctagcttgttcatcacgtagtttatggtgaaagccttgaagcaaggagatagagactcaaagatcatagtcacttgagtcctctcatcaatgatagccccgtgtgtctctgcctcatgtattagctcaatcatgtgcaatacatgagattgtacagggacacccttcttcattttacaattcatgtagctacgagtagcattatgtcttgttt

SEQ ID NO: 136771 - DNA, 542 bp, Cannabis sativa
atttctcatgagaaatacaagaaactagctaaggaaagaacttaaaattctagaaagagatactattattaaaatattaataaaataattcaaaaatatgaaaaaatcaatttgagttgatcttgaccattgatgatgatctaacaataaaaattgactcttgatgaaaatcgtcaatttttcagagcttgaatctcgttcgtcaaatcattttcaggtaatctgtgggaaaattgcaactatctttggcataaattttagacttgaaatattcagaattgcaatatatatgtgatacatgaattgaaatagcttcaaaatgcaagttgaatcgcatcaatcagatcaatattgagggagttatgatcgttttattgaaggttgttcagcacccaacgcccaggttgacatcctgacgtcaacctggatgttgggtaagtgaaaaacatactggacttgtatttttttgatgcctaagtaatatgttggcatcacttaattagattctttgttttagtgaagttgttcgccagttctcgaag

SEQ ID NO: 136772 - DNA, 1852 bp, Cannabis sativa
aaaaaaaaaaaaaactggttttttttttttgttttatatttttcatatatttttttttgaaatcaaagcgttatataaataagattagacctcgcggtcattacaaatgatagttctaggtatcgaggatagctccacgaaacctgtaatgttctaggtatcgcggtcatatttttttttaggtgttctatagttgtgttatagttgtttttatgtatttttttttattgtagaattattttttagttgtttttgttatggggtgtatatttttagtttatttttgatgtttttttttgttgcatgtatatatgtgcatttattttattatttttgtgttgtgttttagttatttttaagtggttttcaaaatattttcttgttgtacacttatttttttatgtgtatttgttatggtgtctatttttattttattcctatttttttgttgtatgcgtgttattttgtagatgtagatatatatttagttttttttaacacgttttttttattttaaaaaatacaatgataagttttttttttgggtaaattgacacaacgtgcactagtaaatattgacatattatctagttattttttttattatatattactcattaaattttatacccaattattttaaaattattataagattttattatttttattatgattgtaaccattcatttagtttctaaaaaataaattgttattttagttgtcaccaacttaaaaagaaagagaaaaaaaagagttgaaaatatgaagttataacaaaaaaaattaaaaaaaatatatagtagtacaaaaaaaaaaaaaataatcaagttaccaaagattaagtaaaaaaataacatcataatacaaaaataagttgaggagttgatattgttttacattttgtgtaaagaggtggtgttttgttatttttctattgctttataactctctttttattattttattgttatttatgtattttataggtatatttttattttactaaaacatagtatttttgtgattttaaaactttaaggtaatatttttgaaaactaaatacagtaaaaatataataaaaatgtataacaattaaaatataaaaataaaaaaaagataattttgtaaaaaaaatcctatatttttgtcagagtcatacttttatatcatatacattggttccaatttattataattattattattttatatcataaattcgtactatccaagttattttttaagtttcttttagtaaatatttatatttctttaatataatttataataactatataacatatataaaggaattattttataaatacatcaaaataacaaaaaaaaaacttacaaaaatacggttatacgaaattttaaatatttttacgatttttataattttatttacggaaaataattttattaggtaggcattcgatctaatctaacttttttctcatctgatccaatccaatcagtaattggatttgaaaaattaccattcgatccaatctaattagatccaaaatccaatcaaatccaatccaattactaaggattgaagcagtttttttaattggatatctaattacacacttaaattttaaaattaatttaaaaatatgaagaaaaatacataaaaactaagtcacacgttttattcaagtttaatacttcataaatacactatccttaaaagtgtaatgtaacaaaaagttttaaataattaaaacaacaacctttttaagtaataagatagaacaaaaatgcacactacaagaaatatcacttttgccagcacatttttgtgctggcaaaagttagtattgcgctggtaaaatagaat

SEQ ID NO: 136773 - DNA, 1324 bp, Cannabis sativa
  modified_base (919)..(933): a, c, t, g, unknown or other
cctaataaaattagtaggtttggttggaattgatatattttttttttaatttttacatttaatttttatattttaattaattataataatgagacaaatatatataacttaaatttaaacctcaaatcaactaccataaaaaaatatatatatatatattagtgttaattttatattttttaaatagtcatataacttgtatgatatataaatatatatataatcctcttaatcgggtggtccgtttatttcagattgattgggcaagttagtattattttcaactcgtgcaacataaaaattgggcaggttatattttcgttgggtttttcaatttatatttttcatcgagttatctcgattcgatttgagcagatcattcaagttgggcagtttacaaaagtttatatacaatattactattttatttttattttttgaaggaaaacaattatcactcaatgcatgcaagaataatgatacgtacacacagtttatatattaatgtgtgctaagtaatttcaagtatttatttaaaacgtgtctcacacttaccataaataagttgtgacataaatatgtatcatatttatgtaaaaattacatattactcctcaatgcaatgggacaaaactagagatgacaacggtaaaatatatagagtataattaatgtataaattatatctatatatctatataattctgttgttggggtatgtgacatgtcattctatcattttagtattgtcatttttctattttatggtttttctaagatttatttatttttatttttatctatatttttatttatgagtgtctattcatttttataactccaattctattattattatgtacatattcattctcataactcaccttatttataacacattttattattattattattnnnnnnnnnnnnnnnattattattattattcaaaaaaaatatatatatattaatattcaatctttttttattgagaaaattagccatttttctttttataactctcattcttataatattttattattataatatgacaattgaaaaatttatatctttttattctatattttttgttatcttattacccaaaaaaaaaaaatattatcaattagtatttttttttttttttgttagaaatgagttattagaaatggtacttgattatcttggtattttggcagtttatttttttttatattagattgtaactttagatgatttcttagatattcataaaaagtatctaatatatacgactaataattgattataacatttatgaattaattttattaaaaacaaa

SEQ ID NO: 136774 - DNA, 873 bp, Cannabis sativa
gtagagaaggcattgaagcatgtttaccatgcatccatgaacaaaacaaaaggaagagaattagagcttgtgttagctatcttgcctgacaacaatggctccctatatgttaaatcataattaatgtttgttagcgaagcttactcaattgacctttctttgtgattatttgagttcatatggaagttgcctacaactagatgttagaatcctataccaacagaagagaatgtttggatttgtgactttttttgtgcagtgacaatgagccttacttcattgcatatttgtgtttgtacgctatattatgtggaaaatctggtttagtttagtggaaagattgaggcttaatttaagatttctttttttgaaatatttttaagacgatgataccattgaattaaaacatttaaataacaatgtgtatattataagtttatatacacaattattatgacattcttaacaagtttattttcataaaacatatcgttaaataaataatttacaatttattactgaattcttaaacaaatttcactagaacttaaatgaaactaatatttacgtggctcgccacgtaactttcatctagtatatataatacatacacgtacatacagtatatatatttcatttttttttggtatatttacgtatatatatgtttatatacatattttatattatatatatattttatcgcataataatattcataatattcattttcatttatgtgatatatacatgcatatatatataacatataattatcgatgtaaagtttatttttttcgtttttcatttttttttggtatttatttcgaattctatatacattactatattcgtatagtattatagatcgat

SEQ ID NO: 136775 - DNA, 750 bp, Cannabis sativa
  modified_base (267)..(267): a, c, t, g, unknown or other
tcagtgggaggtgaacttggttggcctatcctagaagggatgtaggcatgtggaaggattctagaaagacaactaccatgtgcaattgtatagaggcgcaacaaaacgtttgaaactcgttggcatagtacaaggtttgattggatagtccatgttgtatgcctattacactaggctgagtttgcctgagtgacatcgtaagccgcaaacttgttggcatgggtgtggaagtattgcaggggccgtcagattcttgttagtcacganagtggtcgagagttgatgaccgagatggttcaaatttggatagacatggaatgcttcagttgctacgtgtgtgtgtgtgtgtgtgtgtgtgtcaagagggatgcacatggagaccaagggggcagatgccgcaatcgtcagaggatgatcgtacttggaggcgtttgcatgtgacttttatttgatccatatgggaagcgtcgagacaattgagtgggatttgttggcttgtaaaagtgccagtgggtgtaagtcacacaaagacattaatagagatgtggagttgtggaatgaatgcatcgaagaagcgaacagggctaagaagaccgagtgcaagcgctaagatgacgctagagtttgaggggaggccagagggttgtgcttgtgagacttagtagtcatgtgagcctgtagaggtcaaaaaaggtgcttgagtttgcatgaaggctagaggtttgcatcattggaacttagtacattgtg

SEQ ID NO: 136776 - DNA, 682 bp, Cannabis sativa
gagatcagggtcaggtcttgggtcccagtcctagtccttggtcccgattttggctctaattttgtgtttgggtcccaaatctaggtatggttactaattctagatttgagtctcctatcctggtctgggtccttggttcggatttgggtccaagtccgtctcggtgttcaggttcatgtcctgagtctgatcctagttttgattcgggtctgcgtcccagtccaggcctgggtctaggtcctagtcagattccagttcctggactcaaatccagactcggactcagacccaagtttggggtacgggtctacgatcaggtcaatttcccaaatggcaaaaggccaaggactttgtatgtgagttaactcgttgggcggagctcgaggtatctttgaaaatctctgttatttatcacattttttaacgtaggcctttgaatcttcgatcatttttggccagaaataaccttaccttagaattttcttggataaactctgcacggtggtgtggtttccacaaaatccatcgtgcacttcagacaaaattcgtgcagcttcttcttgggtaacacatctaaaaaatggcatggagaatcctcatttgtacataattccctctactatgatgtaccgtgcagccttccttctcatctttcgagattcatttcgattatctgggagtt

SEQ ID NO: 136777 - DNA, 532 bp, Cannabis sativa
ttcactaatcagctccagacatctttcaatgacatccactgctccgtcaagtaagctctcttgattcagctctctcagatagaagctgacagtcaaatgatggtgactgcaaaagttcaccttgtcaccaagaactgcgattctcagatggagcgttatgtcttcaaaagcaaaaacaacgagattcaaattatcaacctcaaaaagacatgggaaaagctccagctcgctgtcagggttattgttgttatcccagcgagatactctttgcagcgtatctaaatccaagtcaacattgacccattaaaagtagataaataacacctgtgtgatttaaaataataaccacatttattttacgtgggacgtaatcaaataattttagggaaatattgttgtgggatatgaatctgattgtaattaatcgactccctatataactataaatagggacaaaatgtactgaaaaagggacgaaaagtcctgaagagaaagaaccctagtttgtatcagagaaatctaataagataga

SEQ ID NO: 136778 - DNA, 1628 bp, Cannabis sativa
  modified_base (33)..(34): a, c, t, g, unknown or other
atatcgcatcgtctaatcagacgagctcgtacnnacgcccggtacttatcatatgtcactgatgcctgtacctacgcctgataggttgccaggaagaaacccaataaaggtttcgatctaggccataaccaggcattttcatatcactgacgcccgtacctacgctcgatatgtcgctagaaaaattgcatcacctaatcaggtgagcccgtacctacgcttggtactaatcatatgtcactgacacatatacctactcccagtacgtcgctaggaaaattgtatcagctaatcatgtgagctcctaccaatgctcggtacccatcatatatcactgatgcatgtacctacggccggtacgtcgccaggaaaatcacatcacctaatcaggtgagcccatatctacccttgatattgacacctgtacctatgcactgtacatttctaagaaaattgcatcacctaatcaggtgagcgcatatatcacatgcataatatcatcacattatcgatactcaagcaatcaatcttttcattatataacaatattaactatatcttaatataaatcaattcataacaatattaatggtattacatacaacgtgctatgcagtacaatataatttttttacctttaatccaggttgatacatgtcaaccaatccaattggagaactatacccgatgatcttggccctatgtcactacaacggtaaaccaataagtgtttatcccaaaatactacttaatactcacataagacaatttaaggttttctaccaaatcccgcgatataaatatactaaaataaaacttaaatttgggctctaaaacatacaccatattgtagagctcattgcaagctttgaaacggtatatagaacatccaaaacagacacccgagtaaaaagttatgaaaaaaatacgatttctgatctcctaggaatttctaaaaactatgatcgcactcatcgaaacaatacaaaaacttatccaaatcaatccaaacttcatagggcacatatataccataaatattaccatccttatgtaatagaaattaaaatcaagcccttaataaaaaatgccattaacgttcagactaagctttaaaaagttccaaactcgatttctaacctaaaatcatctcagtttcagcaagaaaacattgggactagtcccaagactactaagaacaattctacgaagtcaaaatttccataactattctaattcatgaaactcctatataaaacaaatcgtttttagcttaaaacgaaattaaaccatacctttacctttccctcttcaaggatttgctatcctactactactggagcttagatcgctaagttttgggttgaaaatcaaagaaaatggatatagagggagaaggttttgtcgaaggagggaaaacgagggttcgttcgttctttcgttgaactgtttactgatataacataatatatatataacttatataatatacatataaaaacttccagtggtgaaagttctaatattaataataatataataatataataataatataatactaataataatattaataaaatctttattattaatagttatcttattattttttagccactaagaaa

SEQ ID NO: 136779 - DNA, 514 bp, Cannabis sativa
  modified_base (361)..(367): a, c, t, g, unknown or other
aaccaccccaactgtgaaggctcatttgcgttatttgaataattgtactatgctaattatattagtttaacctaattaaaaatttattagcaacataattaattttaagataaatgaaattaatttctcattagattatttaaaaattttagataggtaatttctagtaagctaatttgtatttttctaatattattaataaaaaatatatatatattgaaatagaaaattaatgttaattaattttagtccaactcaaatttaaatattttcttagatattaaacaaaaattaataattaagttgattttattcaagatacttaattaattatttctattttaatacatttaattaaatnnnnnnntatatttaagttggaaatttttcattttcagattaacttgaattagaataattttcaaaatatattttattttattttaatttttgaaattcatttataataaatgttaaaattttgaaaattagattaaagttaaaaaattaattt

SEQ ID NO: 136780 - DNA, 525 bp, Cannabis sativa
tcagtttctctttttctcttcatcatcttcttttttttttcttattttatattattttataataagacctatattattaggtgttatcatatcattattctatttaattgtaatatgtgaccgtcatagtagttgtaatggtaatgaatatgttcattatattatttgttttcttattttaacttttctaatctattacaatataatagttattacattgagtattataataattgtgtttacatgccaaaaaaattattaatatattttttaattacaattacaatccattataaaaacaaaataatactttaataaaaaaatatagtacaaaaaattaaaattctatattacaattttttgtgaatatttataattataaaataaaaataataaacgtatgttagtctatacgcattttattttattacattctcatactaaaccaaacacaataatttagttttgattacagtgttcatttcaactacaaaccaaatattataaggaaaatttgattttcta

SEQ ID NO: 136781 - DNA, 658 bp, Cannabis sativa
atataataattaggtatgcgtacctaattgatccataacaattaccaacaattttcatgatatagccacatttaatataaaagagatatgtttgtgattcctgtctacttgagtgcattttttttattaatcaatttaagttttcttaaaatattatttttggtgtaatttgtataattttttttttagtttatgtgttccataattgtttatatttattgcaaaaaatttctaattttttttatatgttcatttagttgtttttttaacggtgttgttgtgttacgtataaatttaattgtgttaaaacaatatgttaatgtttaatatttttcttttaagtttggttgttgtcaagtcgtttttgtgttgctatttagttgtttttgcataactattgtattgagaaacaacagtccaacacgctcaagctcacttcgtcaaaactgccacatggcagcgatagagactgtcgcatttttgacgctacagttatgcgtgcgtcaaccaatgactttaccccccacttgtgtcccacttgcgtgtgagtctcacttgcctatattgtccatatgtgtatctcactctctccttttgcacatgagattcacatctttacagtatttttgtaataaaaaactttataaatagtattttt

SEQ ID NO: 136782 - DNA, 1305 bp, Cannabis sativa
ttaatcaagttctccctttcttaattttaataatgtaagtaaacaaatgtaagggaataattaccttaccattgattctcattacatattagtaaacatgccagataattgaaattaaaagtaatcttttattttctttttagtttaattaacaaaaagaaaaatagaatttaagattaaacaattatttctgcttaaaaatttaagttcagatatattttttcagaccaatattaaatagttaacattttagttactaaattatattgtcacatttttttatagagcagtttagtagatttttaaaagagatttttcaataataaactaaaaagggaacaaatttacatttgtaacgtaaaaagagaaaataaacataaatataaaccaaaagtttctatttacaaaaataccggccaaaaaaacggaggagagtctccttcttcgtgacccagccgacgaaccccaacaacccaatctcaaccattttttttttccaaaatcaagaaaatcagatctaaatagatgtagatctcaaggaaaaaccacttaaatcccaaaaaattctaatacaaaaagggaaaaaaatcattcaacctccattgctgtacaaaaaaactcaaaaacaacatacagtcaaaagcccaacgcgtttagaggagaagaatcgaagagatggagatctggaaatcattgaaactcacccatgattgaatcagagaaagaattgaaggtaatacaatttcttcatgaacatctttctatcttttattctacataattgagaatttgttataaattgaagaaaattggaataaattgaaataataatgaaattttggtaaatttgaacaaaaaaacaacaactgtttgcataaaaaaaatattaatgcatataattagatactagagggttttaatctgtaaatagttatttataagttattttccagtaaaacaattgttgtttgggatctgcaaacaagaaatgatgaatctattcttattaattactgaatgcttcaaaatagttgatttgacagataaaaatagtcgtccagatcgaaatgttatttgcaaatgttgttgctgaaaagagttgtttattagtttttttgtcagattgaaatagttgtttgcaacttctgaaactaaaacaaataattaatttacatgattttaggagacggaaccattacaaaatttggtacatagcaatgggtattgggatgacaacaaaaactatgttgaatatgaatcaagtggagaattaatttccagcaaatgcacttttgatgaactagt

SEQ ID NO: 136783 - DNA, 1485 bp, Cannabis sativa
cctcccttcttgtgaagaaaaaaacacctccttcatggctgaaaaatccagaaaatgttaacaccccacatgaggaaaccaatcatcgttctgggaaagagcccgtgggctttagaaggtctaccaactcgcagtccagacggaccacccgttccaggaggactcaacctgagtgtggccctagtacacggacgacacgttctcgaagagcccaacccgacgttggtcctagtacgcggacaacatgctcgaggagaactcaacgtgggagtggccagaacctcgggatgagggatgaagatctcaatcgtgggggagcccagactatgggaaaaggtatttatgaaacgaaaaactgctacctgagacgccatctggaagaggcatagcgtcgaaatgctgagttcgagcgtgttacagcagcctcctcggccagggcggcagcacaacaaggggacgaatgctcaaaatcaacctaaacctagagtgaggagaccacaaggcagaccttgtggctcacgaactaggagataggaaaacgcccgggaagaacaacccagggaaaacgagataccccttgaaaattaggatgaacagccagatgggagacaactggaaactgatgaacgacgaatccctcatgacgatgaggaggatcttgggactcaactaggagaacagaggttaccttttagaaatcaccagctttcttcccaaacccatagagcgaggactcgtacagaccctaatgggggaaatatgacaaacctctctcaagggcaaagaacagagcgtgacgaagcaagtgtgaccttaatgcggtcaagaacccacagtctatcactcgaagaggagaaagtactcaacgagctaataatcgaaaaagtatgggaaccagtaaatccacgagccactcaaagacaaagtttatgagtaggacgcgatctgtgagtaagataaggtctgccaacaattactcccaatcgtatctgcgagagcacttaaatcggaagaaacctgaccttcgccaacagcttggtccaaaacaagaggatcccatccaattgcggataaacgagctggaggacaagtttaggagatatcaagtgggggaattaggaagacaatctggatacaactttgacaaggaacttgagccgtatcatctagatataatgaataccccttttccttcaggattcaaaaacccgcatgtctcgtcatatgacagaaccattgttccagtttcgtatttgaataactttaacacaataatgcgagcgagtaatgtgaataacaatttacgctatattttattccccacctcgcttgttggagcagcgagagtagctggtttaacaagtttactcatcattcaataacctcttgcgagcagctgtccagggatttcaagaaacagttccaggctgctagggatagacgacccgaagcggcctcgctaaccaatataaagcaacagcccag

SEQ ID NO: 136784 - DNA, 541 bp, Cannabis sativa
aaccaataaattatctctttgcatctgattagtgaagactgaaataaattatatatatatatatatcaactatatatatgtatatatatatacaaaataatttaacagatgacagatgcgttcagaaatggatacattacctgacccagctgatgattgataatatacaatattttgatgccaaaattcaaccaaacccttttactaattaatttaattaacctatataatatagtatacttatatatatagactggcctacacttggtttaacgattcttggtttaacgattctttttttatttagccttacacaattaacttaacagactgttaacgttaaacgttaacaaataaataaacccaataattaaacctaaaaaaattaaacaatcttttcttaaattaaaaaaaaaaatatcttacccacatatctctctaacaaatccatttttgttcttgtttaacgattctttttttatttagccttacacgattaacttaacgttaaacgttaacaaataaataaacccaataatta

SEQ ID NO: 136785 - DNA, 689 bp, Cannabis sativa
attcacaatccaagattcattaaaacttctaactacaagaaaattagttcatgctgaagattataaagaacaatacccaaatgaaataaagaagtataaaaataaaatacaaaggattaaagcagtagaagaaacaatgtggatgactcctccttcttccttctttcttgtgcactcattttcttcttattcttcttttttttctttatttccttagtattctcaataatggtggctgctatgaaactgtgttcccccaaatggtgtaatggaggctaggtaatattatccctcttatccatagaaatacatttcataaaattaattccacataaaccttatgaattttctagaaatttcctcataaattagccacaattcatatgtattcatgctacctcagataatttttgccacatcaattaatgaattgtcacgtcatcattttttctatattaatttcaacattcagtcactgctacttttgctgcagcaaattccttgcaaaattttagcaaaatcttgtattttctctattaaactcttttctttaccaaaactcaaataaaacttataattatcactgacaactataaattacccaaaagaacacaaaaatacaaaataacactgaaaggaaagaaaagacctaaaaaataaacaaaatacacacaaattaagttaaaaaa

SEQ ID NO: 136786 - DNA, 898 bp, Cannabis sativa
agacccagacttaaagctagatagggatttggatacgaacctagactcgaacccagacccaaacctagaatgagatcgaaacttgggacctagatccggactgagaccctaaccctgacctagacctggaccaacacccgggacccaaactcagacctggacccgaaccaagacccagactaggatctgggcctagacccagacccgaacccaaactcaaaccaggactcagaccccgacccagacccagaccaaaacctaaacccaaacattgaatcaaaatcgaaattaggactaggacccaaacccgaacatggacccagattgagacctaggacccggacgtggacctacgcctcggaaaccagacccagatcagaactcgagactcaaacccgaacctggaccaagactcgaacccaaatcaggacccagaccgatatcggaacctgaacccagactctgacaaggagttttaccccgaccggctcttagactcagaccgggacctaggacctggacctagataagggacctgggctcgggtaacgggaatcagaactgggaccgagacccaagacccagtcccgaacccgaaccctggccttggactcagactgggacctgggacacaatgtggaactagactgggacccggcgcttggacctgactcatagtcagtgtttggatctgggagctatacccgaactcaaacccagacccagactcggacacagaaccaaacccaaacccagacccgcaccctagacctaggtccaagtctgagtctaggtttgacaccgggaactagaatttgaataggacccagacccaaacctggaccaggacacggactcgaataaaaactcaaatcgggactcgggacacaaacccgaa

SEQ ID NO: 136787 - DNA, 524 bp, Cannabis sativa
tacaaattgtttcccaactaaaattacaaaaagtatatattcagaaaattatatatcatatattctgcaataatattataacaaaacttaaatctgtcactaattatggcaaaaattaaataaataaaagaaaaataaaagtttatttaattgatatcatctcttcaaactgtatataaaactctttggtagctaacatattttcataaaactaaaacaaaaagagacagaaataattaataagaagaatggccaaagttcaaattgtttctgttcttcttcttgtggggattctcatttcttcttttggttggtctcaatatacacatattttttatattgtttcttttacattattgaaattatatctatcattattattagtactcatactatatattttgtttttgtaggctttaatggtactctaggacaaaattctcctatgctccttgcatgttgtaagagcacaaagcgtccagatttatgtcctcattcagactcaaatcccactaaatgtgacg

SEQ ID NO: 136788 - DNA, 594 bp, Cannabis sativa
  modified_base (36)..(57): a, c, t, g, unknown or other
tcaattataattctaaatttagactatgtctatttnnnnnnnnnnnnnnnnnnnnnngcaaaattgtaaagaaagagttcttcccttcagttgaatgagctccttctctgcacgagcattctgagtaggagaaggagcttattcaacttaagcgtgaggctaagttgaagggaagaactggggttgaacaacatgctcaagaatattctgagcaggaggatgaggctaaggaagagcatgaaagaccgctcaaaaggaagaagaaaattccgaccgggcataggcccatcaaacttacgatccaaattagggagcccggtctacctgctcggccgtccacccctgtggcaggaaaagggaaagctgtcctagaggagcaagaagactcgtcaggcagatgcccctgccaaagtgcagggtacttcatcttgtttttaactgtccttattatcatgccttcatatttcttatgcatttttttttctgattatgttacttttgctttatgcagacatgtctatagaagcttctggacttctagacatagattttatttatctaaggaaaagtcacaactattccagaaaagataaa

SEQ ID NO: 136789 - DNA, 849 bp, Cannabis sativa
  modified_base (765)..(768): a, c, t, g, unknown or other
ttatgcttatgtgatataatggtcctaggggcattttggtctttttgaccatttgttttactttcaataaaatgagatttttttttggcaaaaatagaaagaaattcaattttggtttccttgcacttggccgaaccccctccccctctcttttactcatctccttgaagcttttaatttgagaaaatttacttcaaattggaggtgatcttgaagtgattcttgttggcactttggaggcttgtatttggggtaacatcttgatattttctttattgagttctgaattcagtgaaacttgagatatgtatttttccatggtgtatattcttgaatgcatgtgggtaaaaattagctcagtatgtttactttcttaaatatttataaaaatgcgctaaaatattttaatatacattgaatgttgatttttttgttttaaaatttttacgtgcgtataccgaagccactattatattttttgctatctatcaagtgtcaatatatagtaatttaattaatatcaaaccatttcaataagtttttatatgaaaatgttacttttaaatttattttcatcaactcaaattggcatcattgattagtctaattttttattattttacattaaagttactaaataatatacttacaataaatttatttaatatgtatctataaataatcaaatagtatcttaaacattatattacatccactaattttattgaaaagctataaagtaagtacagtagaacctctatttannnntactctattcaagaataacctctagtttgttataaaaaaatcaagtcccgatttgggctagttataaataagaataacctc

SEQ ID NO: 136790 - DNA, 827 bp, Cannabis sativa
aaaaaaaaaaaaaaatcagattttggggtgttggctgcccaggctgcacgtgcagccctcgagaggctgcaaaatggctcgaacgcgcgcggaacaggggagtgtgcagcgtgcctatgcgggaaacgtgggcgcctgtagggtctacacgggcgggattgcagccttgcgtgtctgaaggagaaacacactcagtgtaacgtgcgtgctaagatggcacattacaaactaagtgatgtccacaagttggtcaagtggtggtcaagtagtggcgtatgttgtggtgcatgctggtggcatgctgatgcttagtttgtatcgaatggggcaggaggcacttttattgaaaaggaaacttgttggcatgggtgtgaaagtagtgcaggggccgtcaaatccttgttagtcacgacagaggtcgagagttgataaccgagatggttcaaattgggatagacatgggatgctttaattgctacattgtgtgtcaagagggacgcacatggagaccaaggtggcagatgccgcaatcgtcagaggatggtttttgtaatgatcgctttagtatttaggattagtcaaggcaattagcactaatttctgatatttttatgattatttatgaaattaattatttgtggaccccaatattaaaaatgagtattagagttataatttcttaattccagagattttattaaactctaggggcattatttgtcttatatgtgaaatatgcaatttttgtaatttttgcgcagcgacaacagaaaatgcgaggaatggctagtttgatcacatgggtaagtttagaaccttatttcata

SEQ ID NO: 136791 - DNA, 1152 bp, Cannabis sativa
  modified_base (1013)..(1013): a, c, t, g, unknown or other
  modified_base (1075)..(1081): a, c, t, g, unknown or other
tttagaggatcaaattccacaattatgtatttgatataaataaaagaataatatatcaattaaaactaacaatgtatcaaatttataatatttaatgaataaagcatatatatagttatttcacttacttgattttctttccacagttccttaagttggcttctccccaaattaccccttagtggcttttagtgattttagtgtttaaggggcacaatggtcaatttgctaagttatattttgtctttttgtgggatgtatttaatcaggttttttaattgatttctaagctgaattatttggataaaaccaatgtaatttcattattttgcaaaaaatagaaaatcatcaaaaaagtcacattttcactctcatctctctctcttttcgaacccaccttgaaccagctagggttcttgttttctcaccttcatttcagtgttttcagtagtccaaagagtaatccaagacaaggtataagttctagtaacctcctttttgttttcttgaattgtaagaaaaattaaattttgcattagttgttgttttggttgctggtcttgctgctagtgtttgttattgttttctatggattaattatgcttagatatgttgttttaggcttgtggtggtgcctgatttattgtttgagcaagcttttaattttagaactcaagcttggctcattaatggcaagttttgttctagtgcttgtagctgtgttttattgcttgggttgtgttctttatagtctaaatagcaagtctggaaggtttcatcaagtttggagttgatttgaatgagttatgaatttttgactcattcttacactgaaccggaattccagttcagatgggcctgtaggaactggaattccggttagctcccaagaaaccccacagaaccggaattccggttgggacagttttgggaaccctagttttcccatttttgagatatttggggtatttccatgttatttatcgatagagaaacttttagtttcaagtttnagtccctagaaagtgatttagcgtgtcactcacttattatgttatgattgatgtgatttagnnnnnnntaattcgccgagcagtttttccactcaggttggccggcacacctgagttcgaaatcaaggtaagattagta

SEQ ID NO: 136792 - DNA, 609 bp, Cannabis sativa
actatcgaggtagtgatccccagctaacatagctgcgattgcggccgcactagtgacaactcagaacaacactgtcatgccagagggtgttgatcagagcatcctgctacgagcgtttaaaataatcgagcagtagagaaatcccatttacaagctccatgggacttctcctttcaccgaagaagtgtgacaagctcgacttcccaagggattcaagttatttgaatcgctaaaatataaagacactactaatcccatagattatttagaaaaatttaatacaattatggaagtagaccaggtaccttaaagagcaaaatgtcgcatcttggcagggacctcggaggacaatgctcatgtaatgtttagtcagtttcctgaggcacccatatcgacttgggagacttttgcagatatattcttgatccacttccaagccacgatgacgtataaactgccttatacaaccctagctaacatcaagcaggaattcaatgagtccttacaagattattttaagcgttttaatgctgaagtaaccaaggtcaagaaggccccttagtctttgttagtttgtatgttaattacaggtgtcttgccaagaaccga

SEQ ID NO: 136793 - DNA, 661 bp, Cannabis sativa
  modified_base (315)..(320): a, c, t, g, unknown or other
tgatcaggacgaactacgcactgtagtaaatctcgcgttcgacgaacaaaggcgtatgtttgccgaatggagagatagagagatggaggcattaaggcctcaccttgtagagattgaaaatcatagtcggcaggctaccgtgctaatacgaaaagcctaccaaactgtaggtcagaaacccccgaacgtcattcccctgggtgaaacagacgaagatccagcgatgaatgcttctcagaccacaaatggtcagctgcccaatccccggacacgagttccgctcgtgggccaagcggtaggcgggcagaccttgtnnnnnnattcatcgggagaagtcatacctgatggttccaactagataaatggtgccattccacccgtcaaccaagcgaatcaatcggtgaggcagccaggcacttctgtgttcgaaaggttgggcgcaacccatgacctaagaaatgatctgaatagaagaaggggagtagacgatcagaatgttacgacaatctcgcagcctgaaacccgtactccaattaccgttcagaaagatgttgatgtaattcaagttgaccggaatgccgagcaagtcagcccagccgtacaggatcagctagacgaactgaaaaatatgtttcacggcatggcttgacaaagaaacaat

SEQ ID NO: 136794 - DNA, 788 bp, Cannabis sativa
acggagtccaagactccgttcagctccatgtcaggatgtcctaactgtgcaaggctcgagtctgttctccacgaacacgaaaaaattataaagaaggctcatttacgagccacggaggccaagcaagagtcatacaaactcgcggaacatctgtaccattcagcccacgccatgcaagaagccaacagttcaagagaaaaattagagggtatcatggatgacattctcgactacaccgaggtgtccattccccactacctacttcatgtgaaacaagaatcaccaagcactactccaagagaaagcccttcacgaccaaagtccccgttcagagacaatagccctccgtctcaaaggaagttccctcaagttatagaacttgattgaacatccgttcggtttcagtcgtggtatttttcatatatatatactgtacttttgttacaactcatctcatatggctgttgaatcaactttttgttaggccatttaatgagattgaagcacttctattatatatctacttgtttgtaactttactatattattttaagtttttttgctttctgtttgcagttgtgatttcacaatgattcacttcacttttacttccacaattaattaatgaggaaagtgacattaatactccaaaataaaccaaagtacatatttcataacaaatactgatcgtacaacattatagcttaaaatataaaataacataacttggacactaacacagtgcatcatttactgtttttgggagaagtatccactcctcctttgtc

SEQ ID NO: 136795 - DNA, 2351 bp, Cannabis sativa
  modified_base (135)..(143): a, c, t, g, unknown or other
  modified_base (1210)..(1225): a, c, t, g, unknown or other
  modified_base (2000)..(2000): a, c, t, g, unknown or other
  modified_base (2129)..(2154): a, c, t, g, unknown or other
  modified_base (2206)..(2218): a, c, t, g, unknown or other
tataattttataaatattaaattaaaatttatatttagagttatttaaattagtaatttaattaaataaatatatgttaaaatttataaattaaaataaatattaaatacaaatacaactctttaaaataatgannnnnnnnnataaggatattcgatcttcattgttagttctacacaattcttgttttagtgagtaatcatccctaatggatgaacattcattatcaaattaatgtcgtagaatcttaaaagatagtattattgtaagtgttttattttcagtaacgtccaccctaaagtgactgctaagagtaagacttacaaggtatgaaataatggtggaagttcataagatagaatggccttgactctcgcctaaacggaacatgccaaattctggtcttgatcgaataaaaggttgctagaatggtatctattttaaatgagttgactactctactcaatgaatgatacctttgactctctcctaaatgggacaatgtatgagtttattggaaaccttggaaattatttaagatgtgtttgttttgtattcttacatgtctttcttacttgctaaatgtatgataatttctgaatgtgtatgaatttatattgaatcatgttgttttctgttattaatgttgtagtataatttcgaatctttatcgttggtctaacttaattgttgttttaatggaacaaatcccaaaggattgtcatccgttagacaaacataatagtgttaggtctcaatagataaatatttgtaaatgtaacatctagttgtacatccaaagatgacaacttagactagtgtttaaaatatgaaacaatgaagaatttataaaatgagaataactttgactctcgcctactgggacatcgttggattcttattttcatcgaaattatcctttaatttttcctcttaactttttcttttagaatttacttagatagtatatcattggatgaatggtttataaatcatctgcatatgatgtcactctaatttctcttatgaaattgaatggcacagatgactatattcttgatattctatcccgatatgatataaatcctcgatcttagaaatcttctacttgtacatgcttactataggtaacttaaacttagagttagattagtagtgatggtccaagctggaataattactcaagatatatttggtataaatttaagtnnnnnnnnnnnnnnnntagattccaaatagaaattttaaatttagtttccagaatacgttgaacaatacaatataactttcacaagttgttaatatccattttctgtcaatggattcgaactgtaagtttatgtatggaatatgagttttgtattctgtgaccaagatccacttagactattttaagaactctttattgtaactagacctaagtcatcaaaagaccacaaccacattttaagatatctatggcatttgcatcttgttcatagtggttttgacgagatcattctctgcaaagagaaaatatgccaatatccacttgaaagtaggatcatctgtataaaaatatggatgtacattcagaggtggatatgagttatcgttaaatttctaacacgatcactctagattttaccttacaccaagaaatttgaaatgtttaagaaatttcatgaatttctagcaatgttggaaaaacattaaggtaagtgattaatgatcttgcgaactaataggggtggagaaatatttggatttgcagttccaagatcattaagttgaattttgaattgtattcaaacttacctccctaaaaatttagattgcatattgatgatagtataaggtctatgattagttactagaaattgcctaagtccttctagggatataccctagtaataggaaaatttcagaatgatggaatggttatgtacttagtgtatatcattatcgtgatcttcagaaaagctataactgttaactaagatttgcatgtttgatagctnttctaagtgattaggggtggacattatgatcattaagataagaaagtgtttgttacaaagtctatagtggcgcaagggagaattaataagttagagaatttacttgctaaattctagatctacttattnnnnnnnnnnnnnnnnnnnnnnnnnntcccctcactagttgagataacactgcctacagactcagttaattgattttnnnnnnnnnnnnntaattctaaaattaaactatgtcttatttatgaattttcactaagtaatgacttaattgtaaagaaaaaaggttatggggtctatttattaattaggagactttgtatatatggtctatttaataaataatat

SEQ ID NO: 136796 - DNA, 942 bp, Cannabis sativa
ttctccttgttcttgagttaatactaataacgaggattaggctattaccaaactgcttggggctgaacctctataaaattcctctgtctttatattgctttaatatatatcaatcgttataacctacttgttgcttactaaattagactcactgtcgttggctaaaagcgaggtcaacaggtttcatcacaactgtttgtgtggtttgtatcacccattatttctattgttgccattattggcgttgtcagccatgactatttctggttcagccctcaatgtagctctttctaacctctcgttccttttattttgtttatagttcttctcaatctgaggatcaacaagaactcttgaactagctccttgacgtcgcataaaccaaaagcacatgatataggataggaaaagttaagacaaaatagttagcaagaagtaatgaagaaaaaccaaagcaaaaattaatctaatttctgtaatatcaatttttaaacaatttcccggcaacgacgccaaaaacttgttacgaagattatgaacagctatacaagtccatgtaatcaagtattactcgcacaggtgaggtcgatcccacaggaaattgaactgaataccactaaattagatttgtatttctatttagtaaccaataattttgttgaagataaaaataaagaaaaccaaaaataaaattaagtaataaaggtgtttaatcaaggatgagaaattagggaaatgaaccttggttttctaattaccaaattgttattgttaattacaattcctctttcttaaggtgaatgacagattataaaaattaacctaactcttttcagatcttataggtcataaatcacatgttatctaattattttttaaatagactaacatgtgatccgcattaaataataatctaaatgttacaaaggctatgcaaatact

SEQ ID NO: 136797 - DNA, 929 bp, Cannabis sativa
gtgtgcatggtcccgtcgccatattacttatgggggggcactcccccttcataattttttcaaagatgtggctgattattttggcattagtctagggtagttctctcccttggccatgcgagtccttacctacgtatttgttttatataagttgatgagatggaagtggctgacaggccatgaggtacatttctcttcgatctgagactgaacagcagtttgcatcggtcgggatattacagatttcagcatgcacacaggaatgttaaattccttcatggtgtagagaattcattaaaggaacatgatttaaaaactctctttttttttggtgaacgacattaggactaaacacaccaaattccaaatggtggaccaattcgagaagccttcccccacccttgccatttaccagagggctcttgcgttagcccaactgcctgactataagaaggatctaaacattctaacatccccccgagagttagatgattttgggtttaactttgttgttaccccttctagcagagtacgagaaatcctgcgacccttgggacctccaatgctgggcactgacagccatagcgaaaagcactatgctcgggtcttctaagaaaatgccaattaaggagtgtgactctcttggtgatgatcgctatttgtctttcttattgcatttcttcattattttgcatgttattatatgttactaataatttttgtgtgttttgtagatatggccagcctgttgcgacaaacgacctactaggagcaagagggttccccctctaacgcccctcccatggctcctcctggtaaggttaggacgactaactctcgcttgaccattgatattcacacccctactgttggattgcatgtctctattggaaattattttaccaggatattagatctactcacaagta

SEQ ID NO: 136798 - DNA, 875 bp, Cannabis sativa
  modified_base (738)..(740): a, c, t, g, unknown or other
tttaataaaaatattatattaataggagtgaatctcactaaggctttaacacttaacacaaataataatgtattgtataatttatattatgcgagactctcatactgtaagcttgtgtagcacaagttatataaattttgggttcaatttaaggtggatttttttttgtaaaaaattagataattctctaaatcatttgttcaaaattaattaataaaatgaatacaaacttatgatttaaataaatataacaaaaacttatgtagaacaataaaagaaataaagagtgagtctaatagttaagttgctaaacataattgattttatatatatttataaagatgactacttaatagttatatctttattgtaaccttgatggttacatttttattgacctgtaatagcaagttaccaacatgtagaaatttctttttaagaattaaattaaggataattaactattttcttaaaataattaatttttaatttgaatatttaataagatctttttttttaaattaatattaataatttgattacaattttttaatagttaagccacttaattataatatttacaataaaattctattaatgtataaaacttaaatttccaccccttctaaaattaatttttgaattaattaattattatgttctaaaatagtgtgtactagaatatagaaattcgtggtttatacatcatatccaaactcccatttcatctgtatatcnnnaagttacatgttttagagacaacttgaaaataaccaacacgagtgttataaccagtaaatgatgtactaactttttgacgatacatagtcaaaataaaaaattaataataatccgtaacgtccccgcttcaagcc

SEQ ID NO: 136799 - DNA, 1390 bp, Cannabis sativa
  modified_base (886)..(889): a, c, t, g, unknown or other
cttgagcgcataatccctaaatctcattacatttaacatggcatggcatttacacacatatatcactagggtaataaccctaggccctcaatcgctcatattaggttaataaacctaatcccggttactaaacaatcatacatatcattttcaatataagtgccactgcgcatactctacgtgctaatcactgtcttacctgttatcctgcaattgacagagattctgaatccctgggtgctcctgatcaggtgctggtaatcctagtcacacaaatctgggattttcactcaaagggtgaaccattggttttcaactcataaaattaaatcatggcatttaaaattcagataatcatatagagctcgaaacaagctttccaacaatataaaaaactcccaaatcggagtttggaatcaaaagttatgaattttcgaaattcaactcaaaactgcccaaaaacatcagggtgggtcgtggcatgccgaagccatgtcgtggcacctgggacgaaacccaggttccaccaagaaggggcgggatgcggcatgcccagagcatgccgcggcatctgggttccaaacccagaaaccagcaagcaagaacacgaattttcagcttaacattcaaccaaactcatacaaattcataaccaaaacttccaaatcataaaccagagttgctagcaaacactagggatttaaaacatataatcatgcattaaaatccaacaataaaccctcaattcagattgcataaaaatcacaaaattcatgcataataatggcaacattaagctcttgaacaagagtttcatctccagcaactcaaatcattccagccatgaaaacatctcataaacacatgattcaatactagaaaatannnnataatcaaaatccatgctcaacaactcaaatcatgcaattctttaccaaaaatcaccaagattaaaacccaacaccaagaacatgcaactccacaaactccacaattcaaaacatgcttttcaacaaataaaaccagcaaggatttcaacaataatttctaaataacctcagctagaaaatacctcaatttcaagcttaaaatccttccaactccaagtttcaaagtcaagcaattcactccaaaactcaacaattacacttaaaattcaagaaagggttagagagggagagagggtcggttagagagagaggcaaatccagaattttaactttatttttctctcaaaatttcatttcacatccaatattcacataaaggtgaaattacaaaaacgcccttagggccaacacacacatattcactctcacaagggtgttttagtcatttcatattcaattatttccaaataaatttaagatttcatattatcaaataaaat

SEQ ID NO: 136800 - DNA, 798 bp, Cannabis sativa
gcctcatggcttgcagccgcaacctttgagattggttgctcgtcatttgtggtctaaaactcgtcatcttaatgagtccagggtttacttcttaaacccgagcttactcatcaatagaagatttgtggaattttaatgttacattatttaaaaaaatttataaataaatttaaaataaaaattacatcaaaacctataccataaatatggtgtacaacttttctagtaaaactataaaaattcctaacccaaatttatgatataattaacgtttcacattcatgcataaaaattaattccatccattcacaatatatcaatatatataaatacataattacccaacacaatatttaatctatgtcattatgaagattgctttgataccaattattggtttttatggtccatatcagagtcataaaagtggaagaaaatttttgataaaacagtttttttatctaatatgaattacaagcccaaggatctcaacataatatatatagattaaatctaatctactgaaagaaaatcaattacctcttgaagcctatcggggtattcttatttctttttgtataacaattggacatccaatctaagaacttcgttgaagaatccacatcttgatcttccaagctagcctcaatatttaggagtagactgggctattagatcttattgaatgcagatttaggtattacagtgtgcactcaactcataagacactgtaatgagattagagttttgatctcacacacactttgaatagtgtgtgtatgtgtgtgtgtgtgtgtg

SEQ ID NO: 136801 - DNA, 1347 bp, Cannabis sativa
  modified_base (1302)..(1321): a, c, t, g, unknown or other
tctcagctaaaagtaagaaaataactgaaaaataacgtgaaatcaaccacacgataactataattaactataaaataactaaaaatatattaaaaaaatttaccaaagaagtatatatttttgtaaataaaaaagttcaaaacgtaaaaataatttttttttcatattgacattttttttttttaatttttgatctattatgtaatttttttattaattaaatatgaatcttctaacactttcctattcatttcacatgtttatttttgtatgttcttttcgcaaaatgtcaccatttatactagaagaaagtaagtttactatgggattttaaaagttcttatgataaatatagcatatttaagtttgaccaatttatatggtatttttttatttttaagtctttttatggtatttgaaatgccatatatatgtaaattaggttttcaaatcctatatttgatgtttttaattgtttaagtaattttatttgtcactaatgtaggaaaagtcgccggagtttgctaccggtgccggaaaagtcatcggagttgctaccgacgccgaaaaatttgtcagaattgacattgtcgctggaaaaatcactgataaagaaaccactttcttggtgatttttttggtgacaatgccgattctgacgacttttcagacattaacagctactccgacgactttttcagcactgatagaaaacttcagaaaagtcatcggaattggcagtcaccagaaaaattaccaaaaaactggtttcttgatgaaaaaaccagtttcttgatgaagaaatcagttacttgatgaagaaaccagtttcatagtgatgtttctggtgatttttctaataacaatgccaattctgacgaattttctagcattggtagcaactatgacgacttttccgacaccgacaactacttcattgactttttcggtaccgacagcaaactttgggaaattttttgaaattggcattgtcgccaaaaattttactaaatcaccaagaagttggtttcttatcaagaaaccagtttcttagtatttttgttgtaatttttggcgataatgccaattccgatgacttttttggcgctggaagcaattccgctaaattttctagtgccgacaacaactccggctactatgccaattccgatgacttgtttcagttaactttattgtttaacatttatatttcgttatgatttttcatagtatcgaatctagtttcagagggtttataagtttgaaactggctttataggttttaagagttttgtaatgagnnnnnnnnnnnnnnnnnnnntattgtatattttttattttaagttt

SEQ ID NO: 136802 - DNA, 994 bp, Cannabis sativa
  modified_base (592)..(593): a, c, t, g, unknown or other
tagtaagtctagatcctggtaaaatatttccaacaacaggggcattaagttaatacttgctcccaaatcacataaagcttttgtttctatcaagccccctattgagcatggaatattgaaactacccggatctttaagcttaggtggtagtttcttttgtaggattacactacactcctcagtaagtgccaccatctcaaattcttccaacttccttttcttggatagaatgtctttcatgaacttcacgtaagttggcatttgttccaaagcctctatgaatggaatgttgatgtacagtttcttgaatatttcatgaaattttgaaaattgcttatccagcttattcttgtgaagtctttgaggatagagaatttttatatgatgatcaatgttgataggaggtgaagtttctttttgttgaagaccgtcagtagttttcttcttctcttatgttggtattggttgatcatcttcttcatcctctagctgtcttggtttggcccaacatagttcttaccacttctcaaggtaattaccttacagttctcttttggattgacttcagtagtgctaggcaagttaccttganncctattagtgttttgagaagccaactgccccacctgagtttccaagacctaaatgaaatatttaatctctatcatgaattgtagtagcatatctatctgaggattagaccctccactagagccttgttgttgttgattatgttgttgactctattgagactaatttcattattggtggaacccttgttgcatctgatttggaaaccgcccttgaacattctgtcaatgaccccctccttgggtgaaaccataattctttgatagtttccaatggcttgggtttgctccattggcaaactgtctatatctatagggcaggtgtcagtagtatgagatcccccaaacagctcgcagacaacttgagcttgtttggcttatgcagtcaccagctttgttaatgc

SEQ ID NO: 136803 - DNA, 553 bp, Cannabis sativa
atatatatatatcatgtcaattattattattgcatatattcttaaattatatatagttattaggtacaaacttaattttgattaagagaaatgctaagagtggtattagtactctcctttttaaaatttgtctttgaaattaaggtcggtaattattgtttgtaagtataaaagttagttcagaaaagcagtcataaatttaagttttcattttctgattatttgaagaaagattaattggcagaggttgaggtaggtgtggttgggcaatggaatgtatggcttcattgggtgaataccatatatgaggaggcgcactcatttggtggaagcaattaaagctactattgataagctagcaattaaagatagaagaggaagctagctaaaacacaatatcaggtggaataaatttcaccttttcataaaaaaaaaaaaatagtaatttgcggcaaaaatacttaagttttctcccgagtagcagataaatacctaagtcgtatttttggcggtaaaaataccttccgtcacacttcttgaacttccgtaggta

SEQ ID NO: 136804 - DNA, 645 bp, Cannabis sativa
  modified_base (221)..(223): a, c, t, g, unknown or other
  modified_base (485)..(498): a, c, t, g, unknown or other
tctagatcctggtaaaaaatattcaacatgctgctgcaaagagctccatttatcgagcttggatggcgaatccagaaatggatttaaggttcttaggggagggcatggatgaagttctagtgtactgcgagcaggccaagaaagctgaagaagaggccgaggtagaggaagaagaagaagacccgtccaagtctcctactgttatcccaatttttgcactnnnacgtggcatcacatgatggtgacacgtggaatcaacttcgagtatctgttcggagaatacattctgaacaggatgcctcatatgcatgcctgaagcaaagcgatcaacaacccgcacagagcgaccaacacttagcgaattcaactttcacatcgtaagtcatcaaaaaaatacctataacttggggatcagattacaaagatatggcaagatgtcaaaatcccacgatcaatgtattctgtatttattatgcaatctttcnnnnnnnnnnnnnngtaacgagaagggaaatacttctttcccaagctcataaccctataaacagtgattcatacactggcaaagggtcgaaaacattctggtagagagatattatctacgaattcatattcagagataccgctgtaagagctataagaaaa

SEQ ID NO: 136805 - DNA, 530 bp, Cannabis sativa
tcccatgcctcatacaaagactcatcttcaaattgttgaaaggaagttatttccttccggagcttggcattcttagtgggaggaaaatacttcatcaaaaaccgctccgctaattcttgccaagttgtaaccgacgcagaaggcaaggagttcaaccaagctcgggcttgatctctcaaagaataggggaacaactttaacctcaaggcatcctccgtaactccgggcaatttgaaagaatcactcacctccataaatagacgaaggtgaaggtgaggatcttcggtgggtatgccactaaactgtcccacagtttgaagcatctggaacataactggcttcaactcaaactgtggagcttgaatttctggcctaacaatgcccggattgagctcattgaaaagaggtgctgcgtattgtcggatgatttgatctctatcatccgccataatcactgcattttgaccattattaggggccatttccccttgagctcgtcgtccatttccttggtcatccatcatttctat

SEQ ID NO: 136806 - DNA, 658 bp, Cannabis sativa
  modified_base (616)..(620): a, c, t, g, unknown or other
aacgacctctagcatccaatgcacacttaaaaattatattagaatgtatgtaagatagtataaaaataatttcaagttataatatagaaacaaattagcactaaaatattaaatagtgtttacctgatattctagggaataaagaatatttggtggttattattcatcgatgataaccaaagggccaatcgttgtgacgcattctcgaaagatgcactcttctctttatcatttttaccattcactgcgagaagctctgggtcataatacttgaaaattcttctcaaatcgttcatgctcttccatatgtgcatgcattaaattgtttaatattagtattttataataattcactagaatttgatatataaggttaattagattaaagaagtgtatacatcatttgaatagcattctctcgtgtaggtatcaccctaggacactctactgctgggtctgaatctgagcctaaacctgggttagccatatctacaccattaacaaacaaaatataaagttacctataacagagtaattgcgtacatagaaaaagaacaacaagtaatctataacaaatattaactgttggatattattttaccaggatcttaaatcnnnnnacaagtatgttgattaacaccttaaatatgaacttcta

SEQ ID NO: 136807 - DNA, 624 bp, Cannabis sativa
gtcattagctatcgaatcttatataacttaaaaatagtttttacgaaatatcactaaccaatcgtggagcaccacttataaaaagtgatggccaccactaatacctaataacaatgctctctatatataatacacgtactttatattctgatagattaattaatctcaaatgctcgatgataaaaccctagacatcgctcttgagatttgtgatctcgagtattaattgttccatattcttatatggggcattattcgacgttgtaacatctttgttagttaggatgttagttattctgtttcccattctgttatgttagttatgtaacaacttttgttagctattctttatttgttacatttacttatcttgtataaaaacagagagctattgctcattctgtaattaatgagaaatatgttcaattctctctttctctttcgttctcttctttccaacatggtatcagagtgatttttttttctgcttccgcattgtttctctgcaattttctttgtttttcaagcatcatcaatggctgctacctttactcccgtggtattttctcacaaagtctctgttaaacttgatgataacaatttcctcctatggcgtcctcagat

SEQ ID NO: 136808 - DNA, 556 bp, Cannabis sativa
cgaaaagtgtatgcaacctctaaagttatgaataaagctgagtgccttaaaaacaatgttttcatgccactcaggggggtactaaggcataccactcagacaaatgtaaaacgggcgaaaagtaaaagcaaaatcaagcagaatatatatctaagcgaaacatatatttaaatgtaaacataagagatgtcccggcccgaaagcaggtcctaaaaaaatattaagggcctggggacaggccttagaaactgtctctccttagaagatagtaattaaattgtatgacataaaggaaaagagactgtaaatgtaaagaaaaagaaaaaaaaaagtatagtggtgaattggttgaactggtcggcctaatcaatgcagggaggaagacgagggccccgacgttcttcaagcaaagcgtcaagccttttcttcttctcccgaaagcgaacaagggcttcctctggtttgggataaaagtcaagcttgatgctctggccattcgactgccaggccatatagacgccatcgtcaaaatgcttgatgcagtgcttgcaggaga

SEQ ID NO: 136809 - DNA, 1238 bp, Cannabis sativa
tgatgtcgtcgcattctctcttgaataacttctctggtcgctcactgagattgttcacgttggtgagtggcttctctttggcttccttcgcatatctctcctgcgactttctggagtcacctgcgatatggggcccgcctatgatggtcaatatattgcgaggcgttcttgagccactcgcgttttggttttcctctttgtcatccgctcgaggatgactttcctcgttccttttgtatttgctgaattttccccttttgataagctcatcaatctcatactgcaaaacccaacactccaaagttgtgtgaccaatatctttatggtacttacagaatttcttgggatccctcttgtcgcggtttcccctgatcgggggtggcttcttaaagaccccattcttttccttgatggcgtagatatggtcttgtggtactgcgagctcagtataattcacgaagcgtggtccgccttttcttttcggcgaggactcattctttcgaggggacttggccaatttcgagattcgctgtctacgtggactgcgtcttcttgggcttcgacctctggaatttttccctcggggactgcgggatcgtgaccgcggtactgtgacttacgtttgtctttgcctttctccaattctgccagagaattttcaattctcttatgcagctcggtcatggcaaagaattcgactagcgattctggtctccgggcctgtaactccttccaaaaatcggttcttggcaggacacctgttattaacatgcaaacaagcgaagactcgggagccttctctacttttgttacttcggcattaaaacgtttaaaatagtcttgcaaagactcactgggttcttgcttgatgttagccagagtagtatagggcggcctataagtcatcgtggcctagaaatgcatgaggaatagattgacaaaggtctccattgtcgagattgaggcctcaggaaattggctgaaccaatcgtgggcattttcctctagcgttgccgcaagaatgcgacatttcacgagctgaggtacgtgatctacttccattatagtattgaacttttctaaataatctacgggattagaggtacctttgtattttagggattcgaataattggaatcccatgggaagctgagcttgtcgcacttccgtggtaaaaggagaggtcccaagcagcttgtatatgggctttctctgctgctcgagtattttcaaagctt

SEQ ID NO: 136810 - DNA, 1474 bp, Cannabis sativa
tttttatgtgtgtgtgtggtgggggggggttcttctttcatctgctaacctaatgaaattagtttcatttaactttattgtttagcatttatatttgttattacttttcatagtgttgaaattagttttgtagggttcacagtctcgaaactggtttcacaggttttaaggattctgtaatgagattgttctattttaagatgttattgtatatttttaattttaagtttctttgtattattttgtttctaggttaagaactagttttcacatttatatatattttttttattattgttgtgtattgtttgttgttttgattatatttgtgagtatttttttgtgcttttttccatttggttgattgatgaaactggtttaaattatttttattgtatatcattcttgttttgttttcataatctttattattattgtgtgacaaaactagtttttgtttaatttcataatgttcattattgttatatgatgaaactaattttgatttatttttcgtctttttcttgagatggaatataattcttccaataaaaatataatggaagatgttgctaaaaattttaagtgctgactctaagaagaaacttctcccatatcgtaaagaaaaaacagtaaattgatccaagttgtaagaattatcttttgtatatatatatatatatttatatatctttttttcttttttttttgttgaagtatgtttcttttttttttttcaatttatatttatatagttttatatgtttatttgtagttattgaaattaaatttttaagtgtcttatgcctgttcactttcttagtcggttgtgttaataactcatttttgtgttttaatattatgatttttttattattttaagaaactgatttcattgttcatattttttattagcagataaacgtaattggtttctgttagtcagattccaacgtttaaatccggtgacgattcgagcatcaaactccggagacagtgacaactttgacaaattttttggtgattttttcgatgacaatgccaactccggtaatttttccggcactgacagcaactttagcgacttttttggcaccgtcagcaattccggtgacttttctgatactatcagcgactttttcgatactgatagtaaagtccatcaacttttgtggtatcaatgacaattatagcgatcttttatttatttttttaaaaaaatataaaataattttaatattctttatgataatataaataacatatggaaatttgattttttatgcttacatttggttaaataatttcccctaaacacataataactaatatttgtaggatatgacagcttttatgatatccctaaaataccccccatttacatcacccccatttacacaattggactccccctcatcgaaccccacatcagacacaatcggacccatcagaccaccccattggactctatatc

SEQ ID NO: 136811 - DNA, 992 bp, Cannabis sativa
  modified_base (836)..(837): a, c, t, g, unknown or other
ttttaatttatattttggagttctgagttgtgagttctagaacgttcgagtaggagttgtgaatgtaacgattgttacaaggaattgaaatgaagtggccaattaagagtggttgggacttatggttagtgtactttgtatacattttatttgagcatgggttggacttggaggtttgtttcacatgtctccacttattaaatattttatatgccacgtacgttctaaatttactatatatgtatataggaacaaataaaataaaaattgtccaaaaaattggagatgaatatggtcccacccaaaatgcataattcaagtgtttgaatatgcttagctgtcttaaatacttaaaaaaaagaaaaaacatatccacttaatataacattgttaatttgtttaaaagaatgaattctatttctacatcaagacacgtgataccaaacaaaataacaaatttaggcttagaaaatatgtgtaaatatttggtatattcttaccaaatacgagattctacgcatatatacatgtggtataaccgtatatgtattatgtaataagtcaacagcccttgacgcttttttcgtcttccacgggatttccacgggatctcgggagacgaagacgatcacttccaggctctttattattggaagttccatattggaaaaaatttctagagtggagattgactacttaaattattggcttgatttgtaaagcattattaaaactggtattttttttatgggaaggagatacatatatcactaatgccataaataatgtaatgttgaatttaataaaagtacttgataacacttttgttttttaannttaaaaatagaaaacaaaagtgtattctataaaatttattttcattttcattttttgattttatttaagtcgagtctagatacgggatcaaattcgagatcgaatcagaagccgggttcagcgccaaggtcgtgggagggatttaggtccgggtc

SEQ ID NO: 136812 - DNA, 842 bp, Cannabis sativa
  modified_base (811)..(816): a, c, t, g, unknown or other
gaggagtccctcatggacatctcatcttccattggaaatctgagtacatgtgtcctctaaataggggtctggtctcgagtttctaggtgagagaaatctcactatatcagtagggacaactgtactggcttagggctatcctttgaattgtcttcctctttgcctgtacattccaccacaaactttgccaaagcctgcccttttactgctgtacagggttgaaagattatttcatactgtcccaactctatggcccacttgagtaaccgtctagaggcattaggattttgtaaaacttggcacaagggttggtaggtattaacccaaacatgatgtgcttgggaatagggccttaactctcttatggccaagatcagacagtaagtgagtttttcaattaaaggataccaaccttctgcttcaacaagtcgtttgctgatatagtagactagatgttggacattatttttttctcttatcagcacgacgctcatagcatattcagtgactgccaagtacatccctaattcttctccgtcgaagggttttgagagtacaagaggctttgtgagttgtattatctgaggattttgaagcattcatccagatcctctatgtgcccccagccttcttggatttgacgagcatgttatccacacatacttccatattctgttcgattggattttgaacatcttgtttactaacctttgataggtaacccttgcattctttagaccgaacgacatcactttatagcagtataaacccatatttgtttggaagcttgtatgtgttgggttttatgccnnnnnnaaaactctatttcaatgtaatccaga

SEQ ID NO: 136813 - DNA, 798 bp, Cannabis sativa
  modified_base (724)..(736): a, c, t, g, unknown or other
tgtgtataatatatatgtatatcttgagggttttcaactttttggctccaactttttatgtgttatatataattttatgtatataggcctaactgtcatatgattctctccttaggctattatatataatatcatagctagtgattgatatatgcaaatttgtaccatgcatcaactcattatgtcaagctaaaacacaaaaaatggcaaccattattaatgtatataatataatataattaattatttttttgtaatttaattagttaatccttaaataatataatatatttttacaatttatgaagagcaattactacacatgaagtaaaattttgtttgacatatagtttttccatttaaaatcatacacatattgattaggagatattcgaaatctcactataaaaaaaatatagtttgttgtaactaaatgtatttttagttacattatttatcgtgactaaaattaaattagtgacaaattatttttaaatactatattttagtcacaagtaacattttattgtaattaaaagtcacatttagtcaaaaaaaaattatattgtgattaaaaagttatcactaaaaataataattttttataatgcctctaaaaacaagtgcaccaatcattctattttaataattgatacactatcatatataaaaaaagttaaggtgagagaaataaacatatatgggttcgtttggaacgccgtannnnnnnnnnnnntattgtattgtattatattgtcttggattatatatcatatttttatataatactatgttaaa

SEQ ID NO: 136814 - DNA, 890 bp, Cannabis sativa
  modified_base (307)..(308): a, c, t, g, unknown or other
ctctctctctctctctctttcaagctctctctctttcgaaacccctaagaccagctagggttctattttcttttcaaattcgttcaatttccagcaagattatagtgtatccaagccaaggtaagctcctagcaactcctcttttagttttcttgagttttaagttatggattttgcatgttttgtggtttttgctactgttgttgttgtgggtgtttgatttgtgtttctgaagttaaaatatgtttagatatgttgaatcaagcttattttgtgggctgttattaggtttgagcaagctttgagnnttagaactcaagcttggctctttaatggtgaaaattgattctgagtttgtgtggttgtttagttacttggtatatgtctattggggtataatatacaggcctggaatgtttggtaagaattggaatccatttggttaggttttagagttgtttgggtttcctgctgtaaaccggctaaccgattttacaggtggaaaactggttaactcgatttgctcctaggtttcttgaaaaattcatgttgttgattcgtgttagtttccgagctttaattagttaattccctactggtttagggtattgccatgttaagttgcagtagatgggtttttggtttaaaacctaagtccccggttgtgatttagtgtgtcacttatccatgttatgatcgatgtgattcaggagtctgtaatttgccaagcatttgttccactcaggttggccgacacacctgaattttgaatgaaggtatgactagtataatgtcatgcatatgttattacatgtttagcaaacatgttgtttatgtctgttagagtacattgatagcagtaataatatacgtagagttatattgattac

SEQ ID NO: 136815 - DNA, 1308 bp, Cannabis sativa
tttttctgggaggtccggatgtaataaaggctgggggtcattagaaatgaccgggtgacttgtgctactttttcagttccagaaagatgcgctcgtgtggtggaaattagtatccctcacccgagacgtcattgttatgacctgggaacagtttgagacttgtttaatgccaagtattacaatgaggcagtccgcagtgctaagtgaaaagaatttaccgagttggttcagagtgagggtatgtcagtaacagagtacacaaaaaaatttaatcgtctggccaagttggcttcgggttttgtgcctacggacttcagtaagaaggagaaatatctgacaagtctaaatgcaaagattagacacgacctggtaattactacgaatgaagcgacatcatatgtagaaatggttgataaggctctgcgagccaaaggttcggtaaaatttcttcaggagccctgagagactctgagtgttggtggaacccccactcttcctactcttgcttatggtagggatagtggtgattccactgctgattagaagagaaaggctacccagcatctggtggttcgggacagagcaagctattctgggggaaccaaggtagaggtggatgttagggttattcttaccctaagtgcccacgttggaagaaacatcattcgggagagtgcaactggaagacatgcttttagtgtggcatgggtgggtatttcaagaaagattgcccacatgcaaagaaagaagagtagaagccaaaggcaaaacccgtacctgctcgggtgtttgctatcactcaagctgatgctacaaccagtccttctgtggtgacatgtcagctttttgttaacaactcctattttattgtgttatttgactatggggctacacactcatatgtggcaacatgggtaattaatcaattgggtagggcttgtgactttattgaaagagggtttggaaccctattgcctagcgggaaattggttatctccaaaaggcattttaggtctacgccagttagggttgaagatagggagttgagtgctaacctagtagagctggaattagcagaatttgatattatacttgttggaatatattttaccaggatctaaatttactaacaagtatgttttaacatcctaaacatgaaattttaaaacgatataaaataaatacataaaaggtatgagaagccttacagtggttacaccagaattaaatgactccttctgctcagatctctaaccgttgtatcctttctgtagcaaagtatcaccaagatctgagcctgattctcct

SEQ ID NO: 136816 - DNA, 563 bp, Cannabis sativa
tttggtttttccaaactaaatacataaaaatgactttttatcatgtagttttctagagatggaatgatttagcgtttggagcttctaaagttaaatacctatatatataagtatgtaatttttaggaattttatagtcttcacaaacaccaaaacataaatgttatatatagtaacgtgtaatcttttgaattttcaagagtaatgtacaattgttaatattgattataaataataattattatattagttaaataggaagatgaaagagtgtggactatgtaaatatttgatatcaaatatacatcattgcatttactaataatgaatgaattaatcataaattttattaataatacattacttttataactgaatatttttatgagtaaaatttattgaaaagaaaaatagatgatataaactaaaagaagattagaaatcaccttacatctccattgttttttcaattatatatacgtaaacattgagtatttatttaattatttttttacaaaataaatttaaaatttattattttttccacataatacatagaaatac

SEQ ID NO: 136817 - DNA, 568 bp, Cannabis sativa
agcctagtgtaatttgattagtttaacaactaagagattgagtgttcaaatcctataatagcctcacttttttagtgggctccaatttttatttttgtctaaggcccaaattaacatagggtcgaccgtgccctcaagggaagctatcttcatgtgatttaagaacacatcggtgggagttgtgtgcaaataaaaaaaaaaatcaaataaaacctcttgaggttgacactggtgatgaaagtgttttgtcccctattgtatactatctctcttttgcaaataaaaaaaattaaaaaaaataataataataaaagaagactcttgttgcgatcaacataaatagaaaaaaaaaatcaaaaaaaatattttcatggcattcaatagaagagttaagaaataaacattgattgtgcaggaactattgacgacggtattggcgaacggcagcgtgggtgatcggtgacggagaagattcctgcgatcgaaggtgaggagccgatgtttctgcctctgggttgatttttacgatgagaaaaaaaccctaagtaaaatgacaattttttaattt

SEQ ID NO: 136818 - DNA, 561 bp, Cannabis sativa
ccttagaggcgtgtgagagagagagagagacgaagtgaggaagagagagagtttatctgacacttagagtttaggatcaggtttctggcttagacgaaacttatgtttctagcttaaggttatctcctttatataggaagcctcaaacccaaggtttacaattcaattcccttaacttgtgcataatttgttagatatttaaaaaagaccaaagtgcccttaattctagatattattcagccatattatttggctttagggcccaatcgcatcccatagcatgttgtccacatgtagaagtgtccaagaaagcttgcagtgcactccttggctggctggccatggtgcagtcctaaggctggccggctagctccaaagcgggagctggtctgtcacttgatgcccgtttgagtgttggggtccttgttggttcaagtgctaacttggccttccttttggtgagttgtaccactacgtggcactacttttggccatgtaagaatgtcacatcatgaggaaaaaaaattgggataacagtataattttatccaataaaactat

SEQ ID NO: 136819 - DNA, 1140 bp, Cannabis sativa
cctcttgctgaccaccacttgtggcaccatattgagggtcggggtgtgtaccccgtgaatgggtgttacgtcgtgccttgagtttgtatgtggctcttggccgaggttagcttatggtgataccccaagtttagcgtttttagttggtaacccgagacaccatatagggggtcggggtgtgcaccccgtgattgggtgtaacgccctgatgattaggcgcgctacagtgattttccaattaattttccacatttgctaatcaaagagtttttttttttaaattgtgtcaaattaaattttttgatctaatagttaaacttcataaacttttatatatttatttacaaaagtcgagatcccgaacttaaacttttacaaacttaattaaaatacatttataatctggtcgttcagcgactacaaaatacaaccccagctgtcccgagaccaaacactccaggtcgcgtcgcctcgacatgtacaatcttcatccaagcccaaagctcattcctgtttagcctttgttgttcctttacctacatatgaaagtagcatatgtgagtccacaaactcagtaagtaaaacatacaacaaaccatataatcacgacttgtgtctaggcgcccatacacctatccacaaggcttaccagatgacttaagaacgttcttaaaaattggtgctactgaccatgatatcattcattatcaacactatgattgcactgcgggactgacactatgttcgtgccgctatgatagcatcaatagcacccaaaagtataataggccacgatatcactcttaaccagtacgatgcttgtactgctgaactgacacaatggttgtgtcgctatgatagcgccatttaattatttcaaaggtgaatatcattcttaaccagtacgatgcccgtactgctgaaccgacacaatagttgtgtcgctatgatatcacccaaacatatatatcataaacacaacatgcacatatatcacacatacatacattcacatatatacaatatgttttatgctattcttacctcgtttctgaattcaagtgagtatgtcgacatgaacgaaaaacttcgtgctggatggatgccctaatcacataacataatgttggaaattatttt

SEQ ID NO: 136820 - DNA, 674 bp, Cannabis sativa
cgtcttactcaccatgattgagtacttgacttgctatgtgtgggcatggaactcattcactcaagggcatattgtcggaaaagatggaattattgttgacccgggaaaaattgaatcagtgaagaatcggtcaaggccaaaatctgtgacggatgttcaaagttttctcggtttagcagggtattatcgatgttttgttgaaggattctctaagatctctatgccactaaccgagctaactaagaaaaatcaacggttcgtatggtcaggcaaatatgaagcaagttttcaggagttgaaacagcgattgataacagcagcagtgttaactttgccatcggatcgagaaaagtttgttgtttagtgtgatgcatccagatagggtctgggatgtgttctgatgcaagctgacaaagttatagcctatgcctcccgtcaactgaaagattatgagcaccacgcatgatttagagcttgctactgtagtatttgctccaaaaatatggggacatttatcttgatggtgaaaaatgcgagatttatactaatcataagagtctcaaatactttttcacccaaaaagatttaaatatgaggcaaagacggtggttggaattggttaaagattacaactacgaaattccatatcaccccgggaaagccaatgttgtggc

SEQ ID NO: 136821 - DNA, 1552 bp, Cannabis sativa
  modified_base (139)..(139): a, c, t, g, unknown or other
  modified_base (1274)..(1278): a, c, t, g, unknown or other
gaagtaactgacactacatatttctatctagacccaatgatctagaatttggattttatatgtgtcatgtttaagacaataacagagtatgtactgacaaacctagaaaaaaaaatagttttacaaacattgggtactnatgccgctaaaaataaatattggatttatgtcacttacaaactaaaaactttaggtacttatgccgctatttaccccttacttttaatattcagtttactttttccctccctcacaaaaaaaaatgtatcttcccctcaattttagttctgggtccgtctgtttaatatagtgttgattattattagtgcctaataacaatatttttaataaagatgtttagtaattgttgagaaaaaaaaacttatatgtgatttatctaatataaaattgtgattttgatacaaaatacataatagtcggattgatgaggtgttgttggattcatacttccaaaaaggatatgtgttactattagtttgtcattagggcatgttcaatggggtagttagggagggagcttgagagaatgtgaggtcaaggatgggtgaggtggaggagatgagaaatggtgagaaatttgtgagactgtagcttgtagaacttctttgtgcttgaaaagccatttacatcttaccagcttgtagaactctagtttcttcacaacaatctagattctattcttcctaagagattgcatcgcttcttgaatgacttggagccatgctacaacatttttacttctcatagattcttgaaagctagtgggttctaaactctcaacctcttctgcaatcataagtgcatatgcaatgaatttagcataaccaaaatgattaggggcttttatctgtcttctctttccatctctagctaattgatagctgctgagttcctgctgatcttcattgttttccctttctgttgcctcagtttcatctggaacagcattagttggtgctgtaggagcaacctgctccacctcaatctggaaattttcatctaaaccagcttcacggtctttacaagtgctcttggttttcatggccatttcatcttccttgaaaactacatctctagtaatcaagcacttcttgaattcaagctctaaacaccacactctatatcccttaacccctccagggtagcttagaaacatgcatctcaatgctctaagttgcaacttatcttgtctaacatgcacaaatgtcatacatccaaacactttcaagtgatctaagtttgggggtttaccnnnnnataactcttgtggggtcttgaagttgtttggcatagatggtgatctattgattaggtaacaagcaattttaagagcttctctccaaaaggttctatccaaactagctcctagtaacatgcacctaatcctctcaatcaatgttctatttcatcctctcagtaataccattttcctgaggggttttgatcacagttctatgtctcttgattcccattgtggcacacaatcccttgaactcatttgagcagtactcaagaccattttcagttctta

SEQ ID NO: 136822 - DNA, 766 bp, Cannabis sativa
ccctacacccaacaccccaacagtcaaaaaccaggggtaaaaatgtctttctccctttgtgaggatcacaagggaatattcccttttcaaaaaccaaatattccttttcaaagctctactgccttttatggcagtataaaagcctcccctttttttgttgatgaaaaccctagcaacaaaatcactcttcttcaaagctagtagccgaaaacacttcagcctccctctccatcttgttttcttctttcttaaaaaccctagcagccgcccctcatcttctcctccttcaagctttgtattgcagcagcctccttcttttcttcctcctttcttcttcaagctacagcagtagcttcaatggtcgacttcttgtttcccttcaaacctgcaacacatatacaaaaccgagagacaaaatagtagcaacaaagatctaaaatgatctttgttggttttagaagataaaagccaaaaaaaacacaacagaaaaataaagaagaacactacagatttgatttcggagttccgcttaaaatcaagggtacatctccgtcaagcttccctcaaagacgcttgaatctccactaagaatgtcaaagccggattactagttcatggagattccatgctataaaccagctagtaatctcaacatttttcctctcctttcttcactttatttctcttggtttatcttacaatatctctcactaactctctctatttttctctcttgtttctgagggtgattacaaaagaaaacact

SEQ ID NO: 136823 - DNA, 719 bp, Cannabis sativa
tagctagtatgattcagatttcaccttagttagtacaagacatggtcagatctagcattgagtttgttgtaggcaaacttcacaacttggcactgcaatctgatttgctagaacgaattaaagtcgctcagatgactagtccagagttagtaaagatcagagaagagatttcagctggtcatgccagagattttacagtatcagacagtgggatgttgttgtttaatgccagggtttgtgttccaaatagtgtggaacttagaatcgaaatttttaaggaggctcataccactccatattccctacatcccggcaccaccaagatatatcaagatcttaaaccttacttctagtggagcggaatgaagaagattgtggtagaattggtatcgagatgcttaacctgtcagcagatcaaggctgaacatcagggatcggaagggttgttacagcctttaactttacctgagtggaagtgggaggacatcacgatggaatttgtggttgggttacctagaatcacaagtttgtttgattctattttggttgtggtagatcaattcacgaagtctgctcattttctaccagttaaaacaacctcttcagttgatcagtaagcagatttgtatgttaaagagatagtgagactgcatggtgtaccaaagtctatagtttcggatagagatccaaagtttacctccaggttttggcagagtttg

SEQ ID NO: 136824 - DNA, 743 bp, Cannabis sativa
  modified_base (527)..(543): a, c, t, g, unknown or other
cgggttgtaactagccgagaaactatgcttgaatttgtacttgttcatcaacttgaccatttccttacatttgaaataaagggcattgccggagataatttttcaaggaaccccgtattggtaaattacgtgggtccttataaaatcagcgacattttctgcccgcacttcttttagtggtacggcttcgacccatttagagaagtaatttgtgatggccaaaatatatttatgggctttggaagagggtggggtaaaaggaccaatgacgtccattccccatatttcgaaaggccatgacagtgtagaaggatggagtggttgagggggttggtggatgaaatctccatgtaattggcaagacttacaacatttagcaaaattaattgcatcttgaaccatagtaggccaatagtaacccaaccactttaattgagccgacaattttgggccgccttgatgagcgccacatgtatcggcatgagtctcttgaagtgcatgtgccgcttcttctatcgagaggcatnnnnnnnnnnnnnnnnngaatgaacgcttgtacaatggtgtcgttaaagaccacaaatcaatggcactcttcttcttacatccactcttttcttcaagtcttctgacaagactcctttttaaatgtagtctttgattggctaacgccagtcattttcatttgcactatccaggaaagttatcaagttgactgtattttcttcttcaactctttccgt

SEQ ID NO: 136825 - DNA, 1129 bp, Cannabis sativa
  modified_base (1090)..(1099): a, c, t, g, unknown or other
aaaacaccttttcttgtagtgactttgcagcgtgtcttaatccacgtcagcgttgacccattaaaagcggtttaaatcacagttgtgtgatttttaaataataaaccgtatttatttacgtggagcgtaattaaggcccacaatttcggagaaatattattgtgggattcgtatctcaatgtagttaactgccaacctatgttattataaataggggcagagtgtacagaaggaacggaaaatccttgagagaaaaaagaatacactgttggtgaagaacccatttctgtatcaaaaaagtcctaataagattgactcgtggactatgcagaattaactgtaaaaccacgtaaaaaacttggtgttatttttgctttattattctttcttagatttcttataatttttgtgctgatcctatcaagcaaataggcttattatcgttaacgaaaatttgcgttaacaattttagatcaacttaaattagaatattttctttgatattaaactattaagttgattttattcaagatatttaattatttgtttctaattctaatacatttaattaaatagaaaattaatattttttattcaagactcttaatattagatattttttaagaaatttaattagatagaaaattatatttatgttagaaattttatttcagagcaacttaaattagaataattttaaaaatatattttattttattttattaattattttctttataaattttgaaatgcatttaattaaatgtagatattttgaaattttgaaaaataaattaaagttaaaaattaattattttcattaatgattaattagaataaatagactaaaatatattatattttaattagaaaataaatgattagttaataaaatatctagatggttattttctgagtagactttaggtattttttagatatatttaattaaacataaaattaatatttaagttgattctattcaagatacttaaatattggatattttcttaagaaatttaagtaaataggaaaattaaatttgtgttgaaaattgattttttgattaattttagatcaacataaattnnnnnnnnnnttcaagatttattttattttatataaattt

SEQ ID NO: 136826 - DNA, 511 bp, Cannabis sativa
ctgatgggtggtccgatggtgtaaatgggggtattttagggatatcataaaagttgtcatatcttacaaatattagttattatttgtttataaaaaaatttttaaccaaaatgtaagcataaaaaatcaaatttccctaggaatattgagaccaatgtcttttactttagtccatctcatctaaagcttaccctagtgtgtggttatataaggaaaaagatgagagttttgtcaaaaaaaaaaacatattctaagtgattctagactaaaaataacaagaaatagctctctctttctctctcttataagttttttaaatacacgagtacattctcctctcaatttcatggcttccaaatttgcccacaccagggccgtcttagatattttggaggcctagttctaattttaaaaagtaggaataattacagaaggcacaattttttgtaaaatatttacatttttacgttcaaagaatgtatttttacatttttacggttttccaaaaaat

SEQ ID NO: 136827 - DNA, 558 bp, Cannabis sativa
  modified_base (190)..(196): a, c, t, g, unknown or other
gtcttcccctgaagttgttcaaaacgatcgtcgatcctaggtaaaggatatttattcttgattgttagcttatttaattcccggtagtcaatgcacacccgcaaaagacccatctttcttcttaacaaacaatactggagctccccagggtgacacactaggtcgcgaaaaccctatgtcaagcaacccnnnnnnntgaattttcaattctttaagttttgctggagccattctgtaaggggccttagaaactgattctgctccaggtgtcaaatcaataacaaaatcaatttctctctgaggtggtaaacccagaagttcatcaggaaaaacatctagaaattcccgaaccaccttgatgtcctctggctgaacagagtcagaccgagtggtatccaataccatggccagaaaccctagacacccatctcgtaataattccttagctgttagtactgaaattgccgggatccgagatccctgaaccgatccgacaaaaacaaatgattctttgccttctggttggaagattatcatctttctcttacaatcaatact

SEQ ID NO: 136828 - DNA, 581 bp, Cannabis sativa
  modified_base (50)..(61): a, c, t, g, unknown or other
tgggtctgggtccgggtctagcttcgggtttgattctaggtgtgggtttnnnnnnnnnnnngagtctgtgtctgggtttttgtcaaggtgtagaccccaatctgggtcttgttctggttcacgtcccatttcccttttctgagtttgggttcgggatcgagactggggtgtagttctaggtcccaaccctgattttgtgtccctaatctggttccatgtttgggtctgagttcaggttcaacttcgggtccagagtctaggtttgggttggtatctgggtccgattcccaattcaggtctaggtctgattttgagtccgggtcctggtccggttacggttctggatctaaatccaatttcagttatgattcaaagtccaagtcctagttccagtcccgaccaacttccagtttttgttccaagtttgggtcacagggtacggattcaggtccacttttgggtttgggattgggttctggtcctgttgcgggtttgggtcctgggctaggtccaaaatccagacaccgactacaggttttgtccaagccctaggtccagattcggatcccaatatcgggtcc

SEQ ID NO: 136829 - DNA, 759 bp, Cannabis sativa
gggtttcgccagagcctttggtgcttcagttctgagttgagggcaatccctcttgtaatgtcctggcatgccacattggaagcacccttttcctctacgttcccccagatggtgccttttacaactggggcactctgggtaagtatatcgggtctcagaactaccttgacgactgcttcgaccctggttcccccgaaacctcttattctgacccgagccaccggttgcagtggatgccttccttttctgatccatggccgaaccgctaccttccctgctaaagcctgatgtaggaggggtaggagtcccgtcaaccattggagtcctagcagactcactcatgcacccaattgcgccctcaactcgcagtgccttttccaccatttcagcataggtggttttgtcgtaggtagaaatcattaggtcatgtctaatcttcacattcaatccatccagatacttttcctttttactaaaatcagttggcacaatacccgaggccaacctcgccaaccgatcaaaccgcattgtatactcagtaacgctcatattttctttttgggtcagatgggtaaattcttttctcttagcacttctgacagcctcattgtagtacttggcattgaaaagttcctggaacttttcccaagtcatcttaatgacatcgtgtatcatggacaccatgtcccaccacactaacgcgtcttcttggaactgaaaagtggcacaaaccaccctatcattcccggtgacgcccat

SEQ ID NO: 136830 - DNA, 725 bp, Cannabis sativa
  modified_base (304)..(319): a, c, t, g, unknown or other
atgggaatgccaaacctacagaaaatgttcttgataacaaagttgaggattttcttgcaggttatggaaatgagaggctcggcctctgtccattttgtgaataagtcgactgctactaccgcatacttagctcctcctcgctcagtgggtgatgcaccaactagatcaattctccatatagcaaatgggtagggcgaggtcatcattcttagttctgttggcagtacgtgagatatatgtgaaaacctctgacacgtatcatattttctgacaaactcatgggtgtccttattgatcgttggcnnnnnnnnnnnnnnnntaatgatctttttagatagacttttccaacctgcaaggtccccacaaaagccttcatgaatttctctgatgatttcgtttgcttctctagggagaacacaccgaagtacaggcataaagtaccctcttctatatagttggccttcaattattgtgtagcgaagcaccaaatacaatagttttcgcacctcgtttttgtcatttggaagttttccatcgagtaaataattgataataggagtcatccacgtcggagtgctgtctatcatctctaagtcttccattttacatatacttggctcgcctatcatctctactggaactaagttcaattcatccaagtcgctctgcgaggccagttttgttaaggcatcggcgttggagttttgttctctcaaaatttgttc

SEQ ID NO: 136831 - DNA, 955 bp, Cannabis sativa
  modified_base (911)..(930): a, c, t, g, unknown or other
ggcttgccccttaatcgcagttctcggtttgtatctgaggtcaaactggcttaactctatcgaccattttaacaatctccctgatgcctctggtttggctaagacttgccttgaagggtagtttgttaaaacttcaatgctatgggcctgaaaaataaggtcgcagctttcttgacgatattacaagggcgaatgctaatttttccatttgaggatagcgagtctcagcatctaacaatcgtttactgacatagtacaccgggtattgtcgtccttgatcttcgcagattagtaccgaactaatcgcttattctgacaccgctaggtaaatggataagacattgccgaatatgggttttgacaggattgggggctgccccaaatccgttttcaatggttgaaaagcttcttcgcatttctcggtccattggaacttcttgttgcctttgaaaatcttaaaaaactccttgcatttattagaggattgtgatataaaacgatttagagcgccgacttaacctatgagactttggacttcttttggcttggtcggtgattgcatttccagtaatgctttgatcttcgcgagatttgcctctattcctcgctgattgaccatgaacccgaggaatttccataaaccgactccaaagacgtactttaaaggatttagctgcattttatatcatcgcagtatttcgaacatcgcttgtaaatggttgacatggtaagttgcatgctgagattttacgaacatatcgtcaacatacacttccatggtgtccccaatcaaatctgcgaacatcatatttaccagcctctgatatgtcgcacctgtgtttatcaaatcgaagggcattacttcataacaatacagacctcgatctgtaatgaacgaggtatgttcctgnnnnnnnnnnnnnnnnnnnntttgattatatcccgagtatgcgtc

SEQ ID NO: 136832 - DNA, 622 bp, Cannabis sativa
caatcaacaaactggtatgaccacctttgatcctagcacctcaggaggcacatcaggtataatcctatctcataataccctgcccctttcaaatgaatcttggattatagattcgggtgcaactagacacatatgcaataacatcaggttgtttcaattcctatgccctttacctactactaagcttattttacccaataatgaaaccttgcttgtgcaccaaagtggttctattgctgtcactaaagaaatacttcttactgatgttctttttgtaccaaatttcaaatataacattatttcagtaagttgcttgactaataatttgcccatttcagtcaagtttttcactaatgacttctgtatacaggacaaactcagcaagagggtgattggcaaaggtaaattggaaaatggactctacacaatgaacctcgatactgctacagttaataccatcactgctgaactttggcataccagattgggacacccatctcggaaacgattagccttacttagtgataatctccactgtaatgtagattccttacataaacaatctccttgttatatttgtcctatggctaagcaaagaaaattgtcttttccaaagaacaat

SEQ ID NO: 136833 - DNA, 2679 bp, Cannabis sativa
  modified_base (73)..(77): a, c, t, g, unknown or other
gactatggaacaaaggattatcccagacctacgccgagggattgacgacaattctcaaatatcgcagaacagnnnnngatacgatgagatagaatgcaatagaaacaaagacacaaggaacgcgttacctaggttttggccctgttacggtccaatatctgggttctagtcccagtcctagtctgattccagcttcgggtccgagatcaggtcagagttgaacatgagacccgatcccagacccaaactcggacctagacatggatctggatacgaacctagacttgaacccagacccagacctagagctatacccattgtgatcgaaacttgggagttggattcggaccgagacctagacccaaacctggacctatacccaagccttggactcagaccaggacccaaacccagatccagaccgggatctggacttggaccaagacccaaccctggactcaaactaggactcaaaccccgaccaagacggagaccagacccaaacccgaacccagagacagaatcgaaatcgaaactgggactaggacctgatcccaaacatggacccggactaggacctaggacccggacctggatgggggaccttcacctgggcctcagaacacagacccggatcggaacccgagactcggacccggacctaaatcaagactgaaacccaggactcgaacctagatctagacccagaccgagatcggaaactcgcacccgaactcggactaggacttgaaccccaaccgggtcctagactcggactgggacctaggaaccagactaggatggcaattaggatctgggacccgggcttcagaaactagcaccgagacccaagacctgaccccggacccagatcctaaaccaagactaggaccaagacctaggacccgaagtggaactagactgggacctgagaccgggatcctaatttagacccggggcttaaacctaacccatagtcgatgtttggatctgggacccatacccggactaaaacctagacccacactcggacctaaacccggacccagaccaagactcagacctaaacctgaacccagacccggactcagacctaaacccgtaccccgtgacccaaaacttgatacggaactgtaagcgtactgggacctgggaacaagaccgagggactgggacccagtctctttcccaaaactagaatctgactaggaccaagacccagacccggaccaggacacggagctgaattaaaactcatatcgtgactcaagacacgaacccgaacccagacacggacttggacccaaacccagagcggattggagactcaaacttggacccaagttgcagacctagattggggaacataacttgaaattagaaccaaaatcgggacgcaggagtgggattgggacccaggacccaaccccggtttcagtcctcgacccggacccggacctagacccggacacggacacggacacacacagggactaggacccagtatccaaatcggaacgagaccgagacccaagattgggatccgaatcttgacccacgacccgaggcttggacccaacccgtagtcagtttctcgatcttggaatcgtacgaagacccaaacctggaaccatttctagaccaggacccaaatgaagattcggactcaggacccgaaatcggaacaagaatcggaatgaggaccttggaactggaattggacctggacccaaaatcagagttagatgcagaactgaacatgaacccggacccaaactaggatcgataccaagacccaaaccccaacctgaaccgacacttgcgcaaggacctgcgacccaaaacctggaaccctagacccgtgacccaagacctggaccagaacccagacccgtaccagaacctagacctaaactcagacccagacccagacaaggacccagacctaaactcagaccgaaaactggacccagacacagaaccagaccaagagctggactcgtaacagaactcggactcgaacctaagactcagacccggaccgagatcaggactgggacccagacacaaactaggaccgagccctgaacctcgactgggaccaaaaccttgattggggccgggacccgggaccgagacccgagacccaagactcaaaccttggacctaagaaccgaaccgtgacctagatgggggactttggccccaaaaccgaacctgaaccaagacttggacaaaggatccgaacctagatagcggacttggacccaatactgggccttagaaccggggtctgagacccaaaatttgaacctagactcgagacataggaccgaccttagacttggaacccaggacctcactaccaggacacaaccccaaactcggacccaaactaaaacataggactcggcccgagacccgggacccgaactagaacaagactgagatccaagaccgagatccgaatctgaacttgaggcttcaacttgacccataatcagtgtttgaatccaggacccagacccatacccgaaccgggatccaaacccaatcttggacccaaaattggaatcaaaccaggactggaacgagaacccagacctgggactgtaacaggacccaaacctaaacttaaactcaacctgaacccataccgagacttggacccagactggg

SEQ ID NO: 136834 - DNA, 726 bp, Cannabis sativa
ttagtagctccagaatcaacaatccagaaggatttgtcattctctaaaacacatgattcaaaaacaaaagcattaccttcattcgaattgtttagaactctgtgacattgtttttcctgatgtcccttctcattacaatttgaacattgaagtgtactaccatcaattgtttcactatttgtacttgaagaagcagcattgttagaagcttcatacttaattcttttcttctaacttaagtctacgaaataggagggtgcccccattgcaggtaagcgccgttcataagcacacaattctccttctagcttgtccatgtctgaagagttaaaattgttcaccatataagatacaacaaatccattatacttaggaggaagactattaagaatgaattaaacccattgttctctagataaataaattcccaacaaatttgatttctagagcttcagattcatcattaacaagtgtgaattaatgctcttactaggaagcattttcacactatagaattcatttgtaaaggcatttactaggagtgggccgggattctgggttgtccatttttgacactacaaatatcaataaagagaaataaatcatttggttttacaaattcctacagaagttcaaaaaataacaagtatagcaaatatgtttgtaaaaatacataaatataacatatttaatattttccaaggtttttaacaaactgatacagtg

SEQ ID NO: 136835 - DNA, 509 bp, Cannabis sativa
  modified_base (440)..(473): a, c, t, g, unknown or other
caaatatgaatttgaaaaaataaaaatcccacaaaattttattattttgacttaattattaaaaataataaagctattttattatttattaattaataattagggtagttagtatttaaatttagaattcaaataatgactatgatatttatttggaattcaaatccaaataaatatcccaaaataatctcaattatttacattaaataattaatagataacttatagcgtatatactatacatacactatatatattctatatacataatacatatattatatatacaaatatatagtcaggtatcaaagtaatggggtcggccaccaccattgaccaccgtgttcggtggcttgacaaccacctaggcccgcggtggccatgggagaagtcgcacggaggcgaagcatggaggaggttgtgttggaaattattttacnnnnnnnnnnnnnnnnnnnnnnnnnnnnnnnnnnaacaccctaaatatgaactttgtaaaacgatgaaat

SEQ ID NO: 136836 - DNA, 975 bp, Cannabis sativa
attcaagtgtgctggccgacctaaacagaaagtctcgcgctagatgggtgccctaatcacatagtgaaaccaggtaaatcacacgatcaaaaaccctaataagagaaacctgaacccacaaccctaggttctgttatactctctaggggttactctaacactagaaataatgaaacacccaactatgacactgaaatggacgagaatcgagaaaatgaagcatttggggaccctaccaaaatcggctagctgattttacagcaactggtaaaaccgactagctagtttgcactagttcaccccaaactttccatttcttgctcaatccttcaccaaatacaaccaaaccttctagagtacctaaaccatgcatagacaaaattttgccatccagtatttcacagaaaaactcagtataaacaaacatgccattaaagacctaagcttttagtttctaagctcaaacttgcataaattcaatcccatacaccaaaaccagctgcaaaaagctatattcaactcaaatgaaccctagaactcgaactacaactcaacctaacgctaacaaccaccaatttgcaaaatcactacttgaaactaataaaaatcttgagaaaatacaactagaaaataactaaggttaccttagcttgaacctcattgaatcccttgctgaaatcaccaaagttcagtagcaaacccccttgctcttggctagttcgaagagagagaagggaaggagagggtttccttcaattttggttatttcccctttgtttttctttaaataaactaagattaacttaataatcttggctgaaaatagcagctaggtgtcaccacctaaggcagccaccaaatgactaaaaggcaaattactaacatgccctccaagttacaacttaggtatttctcaaaactaggggtaaaatggtcaatttccataaccctgcacaacctcgatattttattttc

SEQ ID NO: 136837 - DNA, 836 bp, Cannabis sativa
  modified_base (297)..(300): a, c, t, g, unknown or other
tctctctctctctctccgtgcatgtgttctgattcttagtgtgcaatgtactgtaatttgttttgggtttttcgttttagtttttttggaatttgtcatttggtattttgatttagtttgttgcaataaagagttgcattgtttaaatggagttggttgcgttgtactgtaatttaggtatctttggaatctgttagttgatttggttggattttgattttttggggattggataaatggagatggtttgagcaatatttggttgaaaagtctgtgttgtcaatttgtatatttaannnntgtttgtcatctatatttgttgcttcatttgtggaaacgaaatgattagaatcatgtttttaaaaatagttaataattattaaggttaagtacttttcaaattgtttggtaaggaattagtaagcttttattcttgattggcctagttgtactttcatttaattttcgaataaacaaattcaccaaatctatcattctgaatacaaaattaaattaagtgaattggcgaagagcattggaattattggaattgtaggagtagtttttgttctgtttcatttttatatattggaattatttcaaaagtaaatgagtttctcatcattttaaagtacttgattgcgtaacgtgtaataagaattaaaaatgaatatatgatttggtactcttaaaagaaacatgttagtggttcagaatccttttttttaggcaaattgctttattgtatttaacaattacactatagtacatttaacaattagactatagtacatataatgaaatgatgttatataggaagagatgcttacctgtta

SEQ ID NO: 136838 - DNA, 698 bp, Cannabis sativa
aaaattcattaattaataattaaattaaattctagaacctaattattaaacaaagtaataatttaaaaagccaaaacttggagggacaattataccaataacattttaaattgtatcatttggtactattgaatctgaaaatcttttgtttatttattaaggatatattattagtcaagaagtagttataattttttaatttaaacaagaaaataaagatatatttgggagtcagagccagctaattattcctttattgtgaagttttgcttttataagaattattatcaagtatgtatattttatctttttcagcaaaatcttttttaatgttaaactaaataaagtttgacagtttcttatttgctggaattaggtggcttctcacttgttgtcattactcatttcattaattttgtttttacaaaacctttgtctttattaaaatgctaaaggttctaaacttctaatggtattaggtaggtttatagtttcggtaaaccttataccttcaatctctttccacattcagttgggtgggtattctagttagtcaattttttttattattattttttatcattgcatataattatttaaaattattggtaaatttttcaaaaatattaaataatttatagtgctacaaacaagattaaatattggaaaacttacaaaaatattgaaattttagttaa

SEQ ID NO: 136839 - DNA, 1569 bp, Cannabis sativa
aatacatgtcttttattctccctgtatcactcgagtacatctctagatttaggagatctatctgttagattcttaattgctctatgctttgtttcctatttaaactcagttctagatttaaggaagcttacccttttcgtccattatccttccctgctttattcgtgtgcccctttattactaaaaatggaagacttagctaaatctttttctgcagcccttcacctcactgatactgaaaatacaatccactctctcgctgagcatgtcgacccaaatgagggacttccaccagccccaccccagtttcatctcatggccaccctcttcacaacaaagaattttaaccacaatgccctcaaaaattacctggaaaaacattggaaaggtcgcttcccagtgagtgtcaaagaaagatcacccaactcaaacttgtaccttgcagcgtttcactgtgaaggtgacagacgcagaaccattctcaaccaaccatggacttttgataaatgccctatcctgctggaaattcctgacactgactccaccttatccccagaaactatgagaaaaattcccttttgggtacaagtccacaacattcctttttcacggaggtctatctctcttgccaaattgctgggccaaatcactggcaccctccttgaaattcatcagccctccttgcttgaaacttggggctcctatatgcgggtacgtatcatgtttgatgtaaccaagcctttacctcggggtatcccaatagttttccctggtttagcctccccaacctggctcgaattgaaatacaaggatatccctgatcattgctactattgtggccgtctaggacactcttatccctcctacactgagtatatgagagcctcggatgagtctacctaaccaccaccccttccttatgaaaacgtcttgagaggcacaactcgcccaaaccatggccccttcggaatacttcccaatccttttatccttaactcaccagccatagtgtcccttccaagtgccccaacaacctatcaaccaaccaatcttataccaatcaatcacccgcgtggacaagtcctgaatcaggacttctctttccacaacaacccaactaactatgctgatgccgcaggactgtttctgagctctagccaaaacctgggaaatcccccacttggggatcagggagcagggccttccaacttaggaccaacccactcttttgcaccccctggacagcttcactctctcgcacccccagggccaaattttgttgccttgttatcagtggctactggtggtaatttgtcatgttctgtctccccccagcagtcatccaatccaggatcccggggttcatcttccccatcttctagccagcttcaagcccccttaatgatatccacttccactgcccagctggacccgactcctgtgggtcacacggctgacattccctcaactctggcgtttgctattggcagcaatgatgcgccaccccgtcggccacaccagaagaagaaccaacccactccctcgagtggtttcaaaaggcagctggct

SEQ ID NO: 136840 - DNA, 616 bp, Cannabis sativa
catcaggagaagtcatacccaatagttccaaccaggctaacagtgccatcccacctatcaaccaattcaatcaatccttgagacagccaggcatttctgtatttgaaaggttggggatgactcatgatctcagaaacgatctgaacagaaggagaggagtagacgatcaacttggcacgacgatcatacagcctagaacccgtgctcaaattcctgctaaaaaagataccgacgtgactcaaattggccaaaatgccaaacaggttagtccagctgtgcaggcacagctagacgaacgaaagagtatgttccaagacatgaccgggcagagaaataatgatctcgagttggaccgagcatgtggaacccctttctctcccgagatcaatctcctagcattgccccacaagtttaaaatgccaacctggaaaatgtacacgggaagagaagatcctctttcccacctcaagtatttcgagatgcaaatggatctgtagggggtacgaggtgatgtattttgcagaatttttcctgctaccctatcggaagccgaccagcaatggtatttcaagctggcccttggaaagttcacctcatggaaagccttctcctcaga

SEQ ID NO: 136841 - DNA, 1261 bp, Cannabis sativa
aattttggaaaattatttaagttgaaaattttgttattttagaacaacttaaattagatatttttttaggaatttattttattatattttaataaaatttccaaattgtatatttatttataaatagatttttcgatttttttttttgaaagttaattaaagttaaaaattaatttttaattaattttggatcaacttaaactaagtaattttcattattaaaatatatagattaaaataagtgattagataaaaataaattttaaataataagctttaatcaaatagatatttgatctccattgttggttctacatagttcttattttagtgagattcattcctaatagatagaagttcattagcaatttaacgtcatagtatatcgaaagataaatattattataagtgttttattcttagtaacgaccatctggatagtggctgctaagaagaggagttacaaggtatgaaacaatggtagaagctcatgaaataagaatgaccttgactctcgactaaaatgaagcaatgttggattctttttttgatcgaataaaaggtttctagaatagttttcattttagatgagttgactactctgttcaatgaatgatatctctgactctcgactaaaacgaagcattgtatcagtttgttgaaaaccttggaaaataattgaataagttttattttggtatttttgcaaacatgtttacttacttattattttctgaacttgtgtatgaatttaagtgaaccaaatgatttattgatatttgtagtgtcaaagtgaactaccctcctcccaactctcaccttctacatgcctttgcaaatgaactttatagtgtgaaaatgtctcttagtaagagcattaagtcacatttaattatgatgaatttgaagtttcagaaagcaaatttgttgggaattactttatcaaaacaataatgggttcaattcattcttaatagtcttccacctgagtataatggatttgttgtatcttatatgatcaataatttttagtcatctgactgacgtacataagctagacgcagaattgcgtgcttacgaggggactttgcctgcaaggagacctccctccagttttgtagacatgcaaaagaggaaaaggtaattaagaatgatgcttctttaagttcaaggactgaaacaatggacagtcgtactcttttatgttcgtattgtgatgagaagggacatcaagaagaatgtaacaccctatctagcatag

SEQ ID NO: 136842 - DNA, 1416 bp, Cannabis sativa
actgcagttaaactcggtatatattattctataaatactaagagttaatttctgtatttatagtagagtaatcatggaattattaaacaaacattatttggttgatgagactcaataaataatctagtttattagagcttagaattataggcaccttgaaaaactgtctagagaagggataaagagttgtataatgttatttcaaaaaaatctattttaaattgtcaaaataataattatttacttttgtaataaataaataattttttaaattaactaaataggaaaaagacaaaaattgttaagacaatatttgttgagaaaaattgttaggataaaagacaccatccttgtcttaattcagacacggtaggtgcctatctttctatgggttttgactttttgggttaattatctaattaattaattaaatcagataaatatttgaatttaaaaagtggttaaagatatttcaaagtagttgaaatattctcttaagtacttgagagattccatcataaatatcactaaccgaattcggttacacatatttatttatttaaataattaaatatgatttaattaatagagatttaactactataaatagaagcctgatttggaaatcagaagatgctttttcaacatgtaatttttgaaattatcagagaaaagaaaattattttctctctcaaatagttcctgctcatgtgttgagaattaaataagaacaaattatacactttatcctaatagcccacactattccttgtgtttggtgggtcgatttggaagacactggtatgagttaaatttgcatcatcctcatcatctggattaaaggatacaacatacgagaagttttgacgataccctgatagtcattaaggggtgtatattcttatcttatattttattgtttagatttaatgtatacagatatggagattcattagactatggtaaaatgataatcagataatacgaattcttccgttgcatacttgatttagtacaataaaaaccaacaccatggtccccgaatttccaccttgaaacactgtcaaggggtagagtaaatattgtatatggaagttcagaaaaatttattttgaatcagtaaaatagtagtcatttatttttgtaataaattatttattttttaaattaattaaatagggaaaaagacaaaaattgtcgagacaaaaattgttaggacaaaaggcacattccttgtcttaaatgagacaaaggaggtgccacatgcactgtgtccaaacatagtgcatgcgccccacatggtcaggaatccctattggttttgtctttttggttaactaattaattaattaattcaatagataaatatttaaatttaaaaaatagttaagttattctctcaagtggttgagagat

SEQ ID NO: 136843 - DNA, 1004 bp, Cannabis sativa
tagatcctggtaaataatccccaccaccttttccttcgggtttcaaaaacctgcatgtctcgttatatgacggaaccactgatccagtctcacatttagttaacaaaagtctacgaattgggccctaaaaggccaacaaaatggctgaacaatatccagacttaagggcactttagtctattataattatctaagaaactatataaatatctaggatttaaacttgtaatatagggtttaggcctcctatataaaggtcttaaccgaagcctagagacctaagtcacttagtctctagatagctctaagtttgaaagccatattctctcttctctttctctctctctctctcttactcacgcccaatagggctctctctctcttctctcttcatctctcacacgcctctaaggttgttcatctttctcattagagatatgcctacttgattcatactttgtacccttatagagatctatataagatcccacctatagcgatctgaatagtattatctctaggcatcaatacatgccaaaagggaagtaggtcattacccactatcataagggggtcaaacctctataacaaagctctgtgtttattatttttcattcttatttgtgtaacttgtggcaagcattagatccatacgacaccgttgttggttgataattttttgaagtcaacatatatatgcatatatatactcatccgactaaaaaaaattttgaggtagctatttttttctttatttattttgttatgaatgaatatttatacaatatatatctatgcttatatatatttatatggatgccaatagatattatacatgtgtgttgatttatttttcatattatacattgtttaattttattttcttattctatattttagtatttcactctctatatgttatattttgttgtatttttattttctttccaagcttatattttgttgtacttttattttctttctaaatcttacactttatatgt

SEQ ID NO: 136844 - DNA, 661 bp, Cannabis sativa
atcgaaccccaagcagtgttttcagccaaaagcttggaaattttccaccggcgagataaaaacaataagctaggcgctcgagcatttttttggggcatacacagctaggtatactaccgcacaagtgagctaagaagttcggacgtctctaaattctcagtcacttgtttaaaacattacttgtgccggcaacaaaaggtttgaactctttgagttaactccttttgttttaatttctttgtattcgaagatttgcattaagagagacactttaccaagaattacacacaactttgagaaatgttatgatttagacacccccagcctgttgatagtaccagaaaaggtctgtattccaggtgtgagggatctctatttcgctcatcaccctgagctatgatactccatttcttgctttatgctttattttgtaggatctttccctcttaagtcctaagatccccattcccagttcttgcaaagctgggaagactctactttaaacaaaacttccaacttcaaatattcggctttcgactttagaactaaaatgtttgacaatattttgtgggtatatcttcagttggatttataactgttcccagaactctttaactaaatctaacgattcccagaatttctggggaatcgtagacaagtc

SEQ ID NO: 136845 - DNA, 877 bp, Cannabis sativa
aatagacaaacaattgattaagtgaaccaaaacatacatcttttttgtccatagatgatctgagtaaggagtcgtatgagactcattcaagatctctcttttaatatcatcatccataggaacacacactcgattcataaatcgtaccattcctgtgtcatccactgtaaagtcactagtctttccaaccaaaaccctatctcgggtttcactaactctggatcttgcaattgtgcatctttaattcactccaaaagagtagattgcatgataatattagccaattgccccacaagaaactcaattttagctcgggtcatttcatctgctaactgcttggagatctacttcactgtattcaattgactctgtccttttctacttagggcatcagctacaacgttggccttcccagggtgataaagaatctcacagacgtaatccttcactaattctagccaacgcttttatctcatgttcaggtctttctgggtgaagaagtatttcagactcttataatcagtgtatatctcacatttcttgccatataagtaatgccgccaaatctttagtgcaaatactactttcgcgagttctaagtcgtgagaagggtacttctgctcgtactcctttgactatcaaaaagcataagctattacctttccagcttgcataagaacatagaccagaccctgtctcgaggcaccataataaacaacaaacttttccttatctgaaggaagagttaacactagagcattaattaagcactgctttaattccagaaaacttttctcacacgatcagtccaaacaaactccaaattctttcgggtcagctccgttaagggtctaacaatctttgagaaacccttaac

SEQ ID NO: 136846 - DNA, 549 bp, Cannabis sativa
tgagggttctgaggaagaagaagggattcttgatgacgattacgaaggaaacctcgatgagtacgcctacaacgaaggcagctacttagaactggtgttcttaaggaaaaatgctgtcgatcatgaagctgaaatcgcagcccaaaaagcacaaaaccaaaagatgcaagaggtgatactggccatgcaaaaagccatggaggcagcaggaatccacgtgcatcctaaagccatccctgctggacttggaaatgagccagaggaatcctcgccaagtacccaaaagaaaaaatctagggaaccaagccctataaggtatcccgctgaagggaaccaaaagaaaaaccctacttctacccccgggaaaaagaaaaaggtgcaggattcgcgaaaggtccgctcagatttctcgaaagggaaaggttcgcagaggggcaaactccaacgagggagtcttggcccacaggatcaagaggaccaaaaaagtatttccgtgcaccaagagcccagggggagaggaagaaagggacagaaatgtcctcccattga

SEQ ID NO: 136847 - DNA, 1161 bp, Cannabis sativa
  modified_base (655)..(657): a, c, t, g, unknown or other
actttcaccctttctaaaatatatttttgaataattgatcacaaaatttgaaaatagtgcaaaatactagaatatgatcagaatttatgatttatacatcacatctaaacccccattttatctgtatatcgttttagacacaacttgaaaataaactaacaatttcatatatgtatattttatcaataacacatattcgagatcaataaccagtaaatgatgtactaactttgttgatgataaatagtcaaaatcaataattaataataatcagtaacatcggttgctaagtttataaagaacacatgttcaagatccaagaccaataacaattaatatttttttaaaaaaattcaataatacatattcaaaatcaataatcaataacaattattaactttaaaactttttcaataagacgtattcaaattcaataaccgctaacagttagtaactttcaaacctttcaataatatatatatattcaacatcaataatcaaaacgatcaataatttttaaacttttgtaattttttctttttttatgattcctctccaatcaaatgatacatatacaatatattaattattttgaactacgaagaaggaatgataaagtgacttcctctctcagaaagaagaattacatgacagnnngtggaatgaagtacagatgtgttgagtgcggaaaaaatttatctttaattttacaattgctattagattttaattttttttttctaaaaaaaaaattaaagcacttgaaccaattttggacttgcacacttattcaacacttaaagtattgataataagattgagtgtagaatattaaataggttattcttactattttttattaattaaggttatgtgtgtaatatttttaaattataagtggttttattataaatattttaataatttaagtccaaaaaagttaatttttaaaagattattatttagtaacaaattgtaaaaaaataattaatgattattagtaatttaattttaattaagattttataaggaaataaattttcaagttacaagttacttatttatttatttattttaatttctaaattaatcataaccattaaatagtgatctaatgactaaaaataaatgtaaccataatggttacatatttaatgtaac

SEQ ID NO: 136848 - DNA, 635 bp, Cannabis sativa
aatcattttcatacacaatctacaaactgaatttatcattaaaactcattcttttcgatggcaatatacaataaagtactaatacgagactctaatatgcaatttaaaagattcaaatacagtcattgcaatttgattaatcaaaatccaccacagacaatctttatacgccaagatcaaagaaaacacaagaaaacttatggtgagccatagaaggagaaactttggtgttttgggttttgtaattaagaaataactgaagttttagcggtaatcattaatcacaggaggaattgagtttggattagagcgctaatcaggagtttaagatatatatacgaagtgccacgtcatcatttaattattattaacagtgacagtgggtttttagttactagctaatgatgtcgtttcgaagataaaacaaatgttaatggtgtcttatcctgaaatgatgtcatttatgggaaattttgtcgttctaggccgttcaattattgtgccgttaaccaatacatacagggctcgtttagaacctcgtattaagtcgtattgtattgtattatattatattaaattggattatatatcatatttttatataatactatattaaactttaatttatactaaaa

SEQ ID NO: 136849 - DNA, 571 bp, Cannabis sativa
tttattcaactgttttcaaataaaacaatagatagacaaaataaaaaatataattaagctcatattaaaatcaatctcacatttcaatatagagaaaggtatttagatgatccattctcatttaatgacggccaccattcttatattatgtaatgatttaatgtcattacaaacgtagatattttatatacacatgatgatgagtgtatttccattaaatatatattatatacacattttgtgatccattcattccaaaagaaattatccaattattagggtatatatacacaactttcattcattaattttagcagaaaaagaaaatttcattcatatactgattcaaaatatataccgaactatatgtttggtatacattataatataaacaatgaattaattaattaagaatatatatgtagatataaatatatagtgccaccaactttcgtattgtagggaaatcagttatttgaaaagcttttaataaataatgttattatgggcaatgttgtaacattatatgtatcgtacaaatgcttcaatatatgttagttttaatatacaa

SEQ ID NO: 136850 - DNA, 567 bp, Cannabis sativa
  modified_base (45)..(53): a, c, t, g, unknown or other
  modified_base (178)..(180): a, c, t, g, unknown or other
  modified_base (208)..(215): a, c, t, g, unknown or other
  modified_base (345)..(352): a, c, t, g, unknown or other
  modified_base (438)..(442): a, c, t, g, unknown or other
gagctgacaactctattcagtgaatgattactttgactctcgccnnnnnnnnnactgtatcagtttgttggaaactttagaaatatttttaagatgtgcctgttttgtattttcacatgtctttgttacttgtataataatttctgaattgtgcatgaatttatattgaaccatgttnnnttctgttattaattgtagttgtaaattnnnnnnnnaataagaataattttgactctcacctaccaagacattgttggattcctattttaatcgaaataatcctttatttttcctcatagctttttcattttgaattttctatgataatatatcattggatgaatnnnnnnnnaatcatctgcttatgatgtcattctattttcttttaagaaattgaatggcatatatgattctattcccgacattctatcccgaaannnnntaaatcctcaatcttagaaatctcattgttgtatatgtttacttaaggcaaatcagacttagagttagattagtagtggtggtccacgctagaatataactcattgtacatttggtataaattta

SEQ ID NO: 136851 - DNA, 805 bp, Cannabis sativa
  modified_base (32)..(36): a, c, t, g, unknown or other
ataatcctgaacaaatacatatgttctggacnnnnnagaatttatacattaaataatcatgaaataaatcatgtgaaccatccaacataaaattagatttatgatctttattaattagtaaatctgattacattgaaaagggttttatttagggcacaaaacccaacagtccagtcttgcataagaccacctaccgtagaggccaacaactttgaaataaagccagccatactctagatggtgcagtcttcagtccagtttggtggactaccctctgaagaccccaatttgcacttgtctaatttcatggatttatgtcagactttcaaggttaatggagccagtgatgatgccatccgcttgagactatttccattctcgctaagagagcgagccaaaagttggttgatctctttgccattgaattctattgcaacatggacttatttggcaaccaagttcttgtccaagttttttcctccagtgatgtctgccaagctgcgaggagaaattaataatatttttcagctggacaatgaatctctccattaggcttgggagaggttcaaagatctgatcaggaaatgtccacatcatggattgaaaagtggatgttggttcataacttctacaacgggatgattggtaacatcataacgattatagatgttgtagcttgtggggaatttatgagaaaaagtgcaaacgaggcctatgattttcttgaagaaatagccatgaataatcaacaatggccaactgaaagaagtcaaacaaagaaggtagctggtatgcacgaggtaga

SEQ ID NO: 136852 - DNA, 776 bp, Cannabis sativa
  modified_base (312)..(312): a, c, t, g, unknown or other
  modified_base (449)..(451): a, c, t, g, unknown or other
aaatcaacatacttgtgagtagttttaagttcctggtaaaataacttccaacagaaaattcaaaggcgcgcctccgaaatcttggacggaggacttagccacctggcgcccaaggcaccctgcctcctatgaggaaccgccgaagtaagctcctcattgacatagtccacaccctcaactaggacgtctccgttagcatcgactggctgcccagcctcgttgtactccctgaagtttgggggctcaacctcttcctctccctccacctcggaaggactacccgaacgtgcatcgtccagctcctcaacctcntggacctcagcgtccccctcacgatcctcgtccatcgggacggccgaatcctgttcggcgctgggcagagtggcaagcggagccacttgaggatcagaagcgtcgaccagaggtgtggttttctttgtacgagccannnttctatggctgggtacaaggtcaggagaatgtccttcgctagaaggaggactagcacgaagacgagaataatcttcgtgcagaagttgaagctgatcttagtcgatctgatgccttcccaagactcacctgggttcatctacaacagacaacacacaagatgagtgttggacagagtatcaaacgaaaaacaagcaaatataccgaacatactcaacagattagaggacggctatgtctaaagaaaagtcaaaactcaagaagtcagaaagttttcttgagttagggcaaaaaagttcataaagcttagaataagcaagatgaaa

SEQ ID NO: 136853 - DNA, 745 bp, Cannabis sativa
aggtagtgttgtatgcactgttagccgagatgaacgagatgaagcacatcgtcttgtgttgcagaatgtaactgaaattgagccttacattgagtaagtttatattcataatctttatgattgcattatgaatccttgcaaaataagtttaattaattgatttaactttgaaggaaacattttaattggattaaggcaaagtacccatctaaagctaggaatcaaagatggctacaggatgaacattatcgaacatttagtagttggttagagaacaaggtaaaaatacatgatcttaaagtagttttgatgtttcttagtgttatatggattttaattaagtattttgtgaataggttgtgaatgaaatgagcaaaacatctactaatgtcaccgatattgtcaagtggatttccagaggtccttctttcagtgtgacaaagtttttaacatatatggtgaatggtactcagtttaatacagcagagtatgataatgataaaactacacaaaacagcggtgttagtcttgttgctagaactgttcaaatatctacttcgaaagatagaaatcctgttcaatgtgatatgtctttctacggagtaattaaagaaatttgggagttagattatatcgggacgcgagtacctgttttcctttgtgattgggtgaagagtgacactggagtgaaaaaagaaaactttggaatcacattagtaaatctaaatcaaattgggcacaaaaa

SEQ ID NO: 136854 - DNA, 1110 bp, Cannabis sativa
agagagagagagagagagattgtttggattttgtataaaaaaatcttctgtagatgaagaagattcttggataagagtgtgagagttgaaatactttaagggaatctaacagagaatcaatctcgagtgtattgtacccttgttcttactcaatcaataaagaggatttggtggtgttccagaactagagtggagctatagatcacatcggtctatagaacttgaaccagtatatatcttggtattggttttattgtttttatcgtttctggtttttagatactttgttcatccctgtttttcttcgatttctatttgtaaattgttaattttatcattgctaattgtttgttgatcaaatcttttagttgactttattcaaaacaatagtcctaattttctcacaaggtaatgaataatatatcattgaataaatataacattatttattataaacttttaaaatatttatcattctataaattaatatattaattaatttctttaatatttttttaaaaaacattaactaaatatttttttttattttttattttttgaaaacatttagtatgtcttttcatgaaaaatacattggtattttgtgttttcaataatatttatttggtactttatattttgaaattgtacatatttgataccctaaaataaaatataatcaatataattttattgatctgaccaaacaattctctgttatatataatcaaataattaattttgaattgaatatttataaaattgaagatagtttgagcttaggatactaaatatgtataattttaaaacgcatggtaccaaataagtattattgaaaatacaggatactaaacttttatttagataaaacataaggtaccaaatatgtatacatccttttcatttatattcttacatatatttattttcatttaaaaggtgtattgtaaaatcaccctatattttttttttttgctaacatttaaaatgtagttttgagtatcatttgaaaataaaaaaaaggctaattagtaattttttccctgaactttgacatgtagtaaatcgtgcccctgaaattttttggccgttaaaaattcccccgaacta

SEQ ID NO: 136855 - DNA, 570 bp, Cannabis sativa
ttttttttttttttttgcaatagagatggagaagatatatatatatatataaaaactgataaatgagacagatggaagaagaagatgatgaaggttacgttgtggctgtgaggtggtttttcgtgggttttgaacgtgggtttcaagagagtaatggctagaaggtggtttggacggacatgaatggatatatgtaagtgatattttggtaaataaaagctcattaaaaataaaattgttgctcacaccttatagaggtatttttgtaaattaagtatcaattcatataataattcctaaaataattagatttttatttgttaaaaaaatataaaaatgtatatttcaagcttaaaatccttaccatctgaattaaatttaaaaacttaaaaactaaaatcaacaactacttcaaaattcaaattaaacaggaaacaccataaactctaaaatcaaaaaaaaaaaaaaaagtattaaacataaaaatattagtatatctataactatataaaagtgagaatgttgttttgggctttttataataaattacaaaattatccttatttactt

SEQ ID NO: 136856 - DNA, 671 bp, Cannabis sativa
catgaccaagttttgtcattttcaggaagattatggccttgacaccaacaaatgcaacaatttgaagcgagaaattgaatttttgataagaaagaataactcgcacgtgcaaagatatgtcaaggccgataaaaatcaaagggctgctcagacagataataatcaagatttactaccaccaccagtagatgggcatttgcaagtcattatatggaggcccgcacatagttggagattcgggcaaaggccgggaaaggtatgcccgaacattacagcaggagcaagaagaggtggttctagccgtcgaagaaaggaagccaaaaataccatgggcaggggagcccaccataacgtttaatgatgaagatgttgtcaagattaatttctcacacaacgacccgttggtcgtggaagtctagatagccaacaaaattgtgccccgaactatgatagataatggagcctctacaaatattttgttcaaaacaccatatcaaaaaaaggggctccaactcaaatacttaaccccttcactgttggggtttttcggccagggtgttgcacctttatggcaaattcacctacccttcactgttgggcaagctccaaagagcataactgtaatggcacaatttttgatattggacgttccatcagcttttaatgtcatg

SEQ ID NO: 136857 - DNA, 1098 bp, Cannabis sativa
  modified_base (903)..(914): a, c, t, g, unknown or other
tgggccatctttttgccacatttttttttatttattttctttcttttacaactactattcttctcaataaaatacaaacaaaaataaatttaaacaaaatatttccaacataaaatatatcacatcaattttaatgaaaatatttatttgaaatttaattaatttgtaattcttttaataaaaataatatattttcttaactttttatttcttttactccattatgccataaatactaattactatttttaattataaaattaaatataaataaaatattttcaacataataatatattgcattaatttcttaaaaatattataaagaattaattttattttgtatttttacactataaaatatataatattttggcatttaatatatacatgttagcaatgatatgatgttgtagcatcttataattttcatattgagtgactaaaaattgaattttagtttctttcatagcactagttccttgatgagttacttttaaaatttttaacgtattatgagtcgaggagacttactcaatatttttaaatatatctctgtctaatcaacatattaaagcatacttagccttagcattcttaaacatcatcttttaatcattttcatcatatgcatcatatttctttataatttctacactatctacaacatgcataggaatgtaatatgccacaaatcataatcaatagattgaagataaatttccattctaattttccaataaggaaagtctaccccatcaaagaatgaagctctacttgtgcttaaaccttctagcatattattgtgtgaattacttggaaactcgatactcttagattgtgaaatctactcaaaaataagagcccttgctctgatactaattgttagcccaagatatgttnnnnnnnnnnnntgaattggaaatttaaactaatttaaaaattaaaagaccccaaagacaatttatgaaaatatttaaatttaatgcaatcaaatagatacacactagtataagcaaataataaacttgaaatgtaaagagtttacggatagaaattacaaactctcaatttttacaaggtttggtagaactaagc

SEQ ID NO: 136858 - DNA, 601 bp, Cannabis sativa
attcttgggagaccattcttggcaaatggtcaagcattgattgatgttcataagggtgaattgaagctacgagtgcaaggggaagaagtggtcttcaatgtactaaaggcgatgaattttccaagggtaagtgataactgtttctttgttgatatgattgatactattgtcgagaagaaaagttgatatagaaaatccttcagagttgagcttaactgaggatgagttaactgagcaagaagggatggaggcaatgaagtatgcaaaatggctcgattcttatggaccattgaataggaagtattatgaagaactaggggttgtgccaaaggagcttgtgccatcaacagtgaagccaccagagttagagctaaaagtgcttcctaatcatctacggtatgaattcttgggagaagacaagaagcttccagtgatagtgtcagcttcactttctgatgtggagaccgacaggttgcttagggtactccgggcacacaataaggccattgcatggacattgggtgacgttaagagaatcagtccctcaacagttatgcatcgaattttgatggaagaagatgctaaaccaactattgatgca

SEQ ID NO: 136859 - DNA, 553 bp, Cannabis sativa
ttggttaagcttttcttggcattttcattctttggctctgcctttatgctctgctttgttttctcttctttgtttttgttttctgccattaataagcttctacaagactcaatacaattaatacaaaaggacagaactataaatacaagtaaaaatcctaagttggccttcggcctctagaatccctaacagaaattagttagaatggatttggttaaatccacacctaactaatttctgtaactacctaactaacacatgcagaagcaaaaatagaaaccctagatctatatatacatgcatctaagcccagatctatacagttgagagtttacttcaagatacaggagttctaagcttgaaggagaagaaggaaataacctcgcatgtaccaggaaaacaaacagagagttagaaatcgttagggaaagggattaaacacttaaacttgtaaaataaaagagattaccagtcagaaaattacctgtgacttggaatctccattgatgtacttctgaacagcaagatttagtggaaatcgagctctcatctt

SEQ ID NO: 136860 - DNA, 752 bp, Cannabis sativa
acctgtgggccaagtgataggcgggcagaccttgtctagaaattcatcaagagaggttatacctaatacttccaaccaagttaatggtgtcggctagctgtttgtccaaaccaaccagtcattgagataactaggtgtttttgtatataatcgattaggtacagttcatgatctctgagatgatttgaatagaaggagaggagtggacaaccggcatgacacaccaatcattcagccaaaaactcgtgctcaaaatcccgctcaaagagatgctgacgtgactctaggctgccaagtggccgaaaaagttagaccagttgtgcaggcacagttggatgaacaatccaaggcctggctggtcagaggaacaatgacctcgagttggaccgagcacgtggatcccctttctccccagagattaatgtcttagaattgcctcacaaatttaagaggccaacctagaagatgtacactgggaaggaagatcccttatcccacatgaagtatttcgaaatgcaaatggacctgcaaggagcacgaggagatgtatgttgcagagtttttcttgccactctcttagaggccgcccaacaatggtatttcaagttcacgcccaaaaagttcaactcatggaaggctttctcctcggagttccatagacaattctcctcttcttgtcaacttctgttgcacttaggagatctggtcgaagtgaagtaaagacaaggagaacctctccgagcctacatcag

SEQ ID NO: 136861 - DNA, 907 bp, Cannabis sativa
  modified_base (48)..(55): a, c, t, g, unknown or other
aataagggtttttatgtagaattctgtaaaaaaacaaaaaaaaaaaannnnnnnnaaaactgttttaaagtgtaaaattgagataacccttaaaaaaattgtatgtataaagaaatgtttaattttgttttaaattgtatgtagaaaaaaaattatatataagaatggaatatacatttaatttattaaaatttgaaatataattgtattatatgtattaaactttaaaattactattttttttatattaaaatattaattgtgtatataattttttattttttttttttacaaatatgtgtgaattggattggatcagttacttttacatgttaatcaatatccaatccgcataagtgcggatttaaaaattttcaattcaatctaatctgtacaagtgcagatattcacactttgcggattggattgtgcggattgtattgaatcagttattttatgaacaatcctataaagaaaatagtaatttttgagtacctttggacaggatttagtgccgatttactcttcttttgatattttactctaattctgtgggattttgtgtcagaaacacgccacattagacatatccgagaaggttggtttctgcaacaacccttggaggttggcttccacgacacccattggactacccttacccatggagtttttgtttgtctcttttctttccaatggtataatattttaatattttgtcagataatatgtccttctcactaagcatgctctaaagttttactattaaggtggtgtttgattcgatgtaatgtaatgtaataggaatggtaattgtaatagggaaatttgattttttatcctttgtttaacgcccaaatgtgacttccactagcggtggttgtagtatagatcgggcggtcgattccac

SEQ ID NO: 136862 - DNA, 577 bp, Cannabis sativa
ctaataaaaaattaacacatgacaactttatttgggtttaacgggtcagttagaaaacggaccaacaaacttacaaaaaatgtaatcttggggactattaccgtcaatttttgaggttgggactaatctgcatcaatcctaagttttcggagactaatctacatggtccaaaatggtatttaaatttttttaattaaaattattattttgactaataaaaaattaacacatgacactttatttgggttttaacggatcagttagaaaacggaccaacaaacttacaaaaaatataatcttggggactaataccgtcaatttttgaggttgggactaatctgcatcaatcctaagtttttggagacttttgccgcaattatccctttaaaatattatattctaatcttaaataaataaattaaaaaaaatatatatcttacataaagttttggctaattaggattcgtacccccggaacttttaaggtcgttaaaaatgctccctaaactattgagattgttggatttaaggactttttttccaattttagtaagaaagtctaacatggatgaaaatt

SEQ ID NO: 136863 - DNA, 650 bp, Cannabis sativa
  modified_base (147)..(151): a, c, t, g, unknown or other
ttgtatgattatgatacagagtgccttggtatagtgagtgttgtttgtgagtataacacggtgataccaacacgagtacgggaaagtgctgaggttagtggtatatccctcggtggtactcagggtacgaaacaaaccctaccaacnnnnntacagtgaggtacgttgtgtatgtggtatagtggttgtaccctattatttaacatttatgctcatctgttaagccctgtaaataggtgtatgggcgcttaactacaggtcggaaattatgtgatatgttatatgcatttcttacttagtctgtggactcacagttctgcttccatgtgtaggtaaaggcgaaggctgaacaggagtgaacctgagctagggtgagattgtacatgtcgaagcggcgcgacctggagtgttcgttctcgggacatctgggagttatatttgtagtcgctgagcgacctgtaaattgtgtattttggaatataaagtttgaaaacgagatcccggcattgtaaatatttttaatatattataaagtttagaaactaatataaaagttaaaatttcacacgtttttcaagaaaactcttcgattagcgaagattacactgtaattgaaaaagcactgttgcgtgccttagcattagggcgtt

SEQ ID NO: 136864 - DNA, 1174 bp, Cannabis sativa
  modified_base (1083)..(1109): a, c, t, g, unknown or other
tagactccctcttattatatgccgcaagcttgatgtattctaccttctaaccaaacattgttgaaacttcaagagctcgaactcccttcaatctccttgaagagtccttgctttctcccgatgtaagacttgaaaagcaatctcccgaaaactttgtaaaaccttctctcgaaggtagcactgttgttcttcttctttgtagacttaaatacagactcaagacaataaaaaatacaaataaatagagtaagagtcgaacaagctcttctctacaaaacaaagactctcttttctaaagatatgagtgaaaatcaaagatccaaaagaggtacaagacctagatgctataaggtgtatttataatcaatatacaccttattgacagctcatacacggtctgaacaaaaccacaacccactagacaatttcctaaaatatatcttcaatcagcccaaatttttttatttctgtacctatagaatcgtgagcagtaagtgggactttccttttatagaaaaagaaaatttagctccagtttctcctcaagaaatctaatcaatcaagataagaaactcacacaagatcagaatatttggttagatagaaaagaaatgagtaaacaaacataccattttcacctaattttccataaataagaaagctagacaactttccttccaaaaataaattgattaatataaaagttaaatacacaaaatataaaaactaatttatatactccagctgaaattaataataaataataaaatatttttgtcacattaaaaatgtcaaaaatagaattaacaaattatgttaatcttgcccaactagttaattgtttttttttttttttttgaaatgaaggaaaaataatttttacatttttcagtttttgtaaagttgaaaataattataaaaaattctttactattttttttttttatatatatctagtattttctttaattctttaggaaatattacatatatttaaagaaatttatatttttatgataaattttatatattttttttaaataaatacataaggttacaatctcttattattattattattannnnnnnnnnnnnnnnnnnnnnnnnnnttattattattatttaaaataattttaattttatgtttaaatttaggaaaattatcccatatact

SEQ ID NO: 136865 - DNA, 1677 bp, Cannabis sativa
tccttggtagtggaaagcaatcctttggacacgccttatttaagtctgagaagtcgatacaagttttccaagttccattttgttttgggatgagaatagggttggatatccataagggataaaacggcttgcgtatgaattcattgactaataacttatccacttcctgcttgagtgccacttgtctctcagaatccaaggatcgtctcttctgtctcttagctgggtagtttgggttcacattcaagtggtgacagataatcttagggtcaatccctatcatataagaatggctccaggaaaactgatcctggttttccctcaaaaaacttattagttgctattttagtttttcatccaggtttttcccaaagaatacacactttgtgggatttgctggatctaaaataacttcttttaattcctcaattggttttaataaattttgttcatattgaatccgaggatcaagatcttcatcttgcttctcgccttcttcagtcgtgactgccattagctggtgaccggcctttctattctacagctctatgcggtagcattcacgagccagaagttggtcacctcgcaccactcctacacctatcgatgtctgaaacttcagggatatgtgtttaattaaactaattgcaactagtccaattaacgttggtcgacccagcaatatgttgtaagctgatggcaggtcaacactaaaaagtcttgcattatagtggtgcttcaaggcacttcgcccaaagttaatgggagctcaattattccttgactggcaacactgtcgcctgtaaatccgtaaaaatttaccttgcaaggtattaattttgcttttttatcccaatttgcttcagtgtatccttataaaggatattcactgaactttcgttatccaccagcacccattttatccttctgttggcgagctggatggtaatcactagtgggtcgacatgagggtatctcacatgctttgcatcctcctccaagaatacaattggaggttcctcagtcttagctttcttaaaagattctggagcaaaaacaaactgctccttcttaacttcctttacatatctcttttgggcattgttactttctccagcgagatgtggccctcctgagataacagaatatgctctccttcaagaggaggaggttgtagtccctgtttgcctgggttattgggcggatttggcttggtatgtccatcgccttgtcgattcacatattgccagaagtaaactcgcgtgataaggctttctatctcgtctttcagttgacgacattcttctgacgtatgcccaatgtccttgtgatacttaaaaaattttgttgcatctattttatgtctcgcatgcctcacgggcttaggttcacgaaatgcgaccctgtgctcatgtacgagatagaaattttcccgagtttcattaagctcggtataaattgtgcagattagcacgtacttgtcgtgcttcttttgttttttcttttccttggcttattccttggagtcatctttcatcttcgaaccttctggattgtcaacctttctctagacggtacttgtagagacaatgataggtttacttcccgagccagtctttaacaacttcatctcttttcttgcttcctactttcgaacaaacacctaagccctctcat

SEQ ID NO: 136866 - DNA, 603 bp, Cannabis sativa
atgtactctatttatcccgagatgaatttattgtctcgtcagtcttacctgttcatagttgttattcttatctcgcatttgcttatatggcagcgagtttgaatatttctatcatttataattcttgaaacgagtaatttaaattgcatttaataatgtaatttaataatacaattattgatctgattcatattcttttatggtacatgtgtcagcttcttgttgttagctgaaatttaggtataacacttattaattatcgataaataaagataaactaaattaattttttattaattactaataaaaaatagatttttaaaattttaaattaatttttatttaaattatatatgtggcatttatgtagcaattgttagactttttatttgggcttacattgaattttattggttttattaaaacttgaattgattagatagttctttgctgtgttagcctatattgttggtgatcaatagctaatggacttagcatctgtgcgtgtaaagtctaggtgaagtagaagtgtgggtttttctaattaactgaagcctttgatgagtaggcccagtccaactagagttatgtagctaagtcccc

SEQ ID NO: 136867 - DNA, 673 bp, Cannabis sativa
acaacctcaatacccaatgcaataccagtcatatttacaagcctaatctttaaaaaacagaacaaaaaaatactaaaacaacacaaaaacaaatataaaacaataagcagatataaccacttataaaaatataaaagaaccacacacctcaaaacttttttttttctaatgagctcatcaaatgtatttttaggagaaccaaaataaaaaaataaccacaaaataaccatagagaaggaagaagatatgtattttatagcctccatatttcacacacacggataaaaccaccacaacaccatgagaacatccagaaaactatcattaattccaacaagatagagcaagaacagtgaaatcgacgttaaaaaaataaattatgaaaaacaaccatgaaacaacactaaaacaaaacaaaacaaaaaaaaaacaaaaaaaatgaacacagtatactgtaatatgaaatttataaaaatacacagtaaaaaataaaaaatactgtctggcaatatttttataaaataaaaatagtaaaagtcaacatactatgtaaatttcccttaaaattagaggacagacactggtgtttgctttgatgtaatataatgtaatgagaatggtaattgtaatatgaatggtaatgtaatggaattagaagggaaatttgaatttc

SEQ ID NO: 136868 - DNA, 1002 bp, Cannabis sativa
actcgaatggcgcttagtaattggagcaggaactagtttgggaaattagatgctcgcattactcagctagaacggcatctaaacctaattcaaggtcgtccggcaagaactagggcttgggctgaagagatgaaagctcaagaatctcttaacgaggctttgagacaaagagctgtgtactggcagcaaagatcccgggtgtcttggatcaaggatggtgataagtgttcgaaattcttcttcactacggccaccataaggaataggagaaatgcaattgagaaaatcttaaataatgatgggatgtggttgactggcaggtcggatattggaaaagaattctcgatttatttggggggcatttttaaaaactcagtgtttggtcctttagagagcctgaatgacctggtcccggaacccctttctctcgaggagcaaaaggacctggtaatcgtacctgatgctgaggagattagacagacccttttctctatgggtagtttgaaagctccgggccctgattgtatgtcggtgctgttctttaagcactattggaacacggttaaaagtgacttctgtgacgctgttggggaattctttgcctccagccacatgcacaggggaatcaatgctacaaatgtgatcctaatccctaaagtggataaccctaagaaggtctctcaatttagacctatctctctctgcaatgtgatgtacaaggtcatctccaaaatcttggctaatagaatccggccggtgcttcccaagctaatttgccccactcaagcggcttttgttccgggccggggtatcaatgacaataatgttttggtccaggaaatcattcactctttcaaatgaaagaagggtaaagacgacctactcgcaattaaagtagatttggtgaaagcttatgacaaacttagctggagttttattgatcatgtcctctctactttcaaggttcctgatttatttcggcagtgggtttcgcagtgtatc

SEQ ID NO: 136869 - DNA, 712 bp, Cannabis sativa
tacttacattagttgttgattgttgaatgtccttgtctgaattgtcttgtttatggagtgttttatacacacttgatagtcagaatatgaacaatttgaataggtgatatagtttgtattgttatttttatttaatacacaattcaaatatatggttatggttttggttccttaacatttaattcttgcagcaaaatgattagcggttttgatatggcacctcctgcatctgcaatgttagttactgcagtagcttgtttgggatgattattattatgtcaagaatccaaacataaacatgtgactcaccatgacacatgtaaatccatttaataaatgcttaagtgtgctttttaatcgctatttaaaatgtttaaagtgagttatgcttgtattgtgctgacatgacactacctttttacttaaatgtatcatgtgtcactttcgagttaaatgtatgtctcatcattatttatgttcatgttgcatatgtcgaatgttggtttgtcatttgaatgtgttctatctaaaaaaattgtatgacataatttcaaatagtgaaagtgtttggtaaagatcaaacatagaatgtgtaaatggatgcttattcctgtggttgagaaactaacaaattattatccataaatatgacacaattatgatgatgactttagaatcagaaccgggtgttgtcattttttatgaagatggg

SEQ ID NO: 136870 - DNA, 1403 bp, Cannabis sativa
ttacttgaaaaaatgattaactttattcataactgaagttcaaaatgttacatcaaaaatatgagttacaacatcaatttactggtactagggtcactgatgttccacattccagtagtttttaattagcgagccattcagttgagctaatttgtaaacctcggttcctactatcgcttcaatcacataagggccctcccagtctggattgaacactcctgcagatacgtctctcgtatatgcaaatactcaccttagtgccaagtctccaacattgaagagccttttcttcacccttttcttgaagtatctcgttactcggtgttggtacactgtattagtaatttgcgagtcagtacatttcaagagttcttggttttcttcttgattataaaaatctcatctgtgggtcgcaatattgacttctactggcagcattgtttctgagccaaatgccaatgagaatagagtatgctctgttgctattttctcagcctgtgagcccaaagcacttgtggtagttcatcgacacatataccctttgcagcgtccaactcctttttgatcgtatccttcaaggttttgttaacaacttctacttgtccatttgcctgaggccttgagactgacgagaagctcttaataattttgttctttttgcataactcagtgaatgactcaccatcaaactaagttctattatcagatactatcttaatggttattccaaatctgcaaattatgttcttgacgacaaagtcgagaactttcttgcaggttatggaaactagaggttcagcctctgtccactttgtaaagaagttgacagccaaactgcgtactttgctcttcctcgccctgtggggagtgccccaatcagatcaatccccatatcgcaaatgggtatggcaaggtcatcattcttagttctgttggtggtacgcgaggtatatgtgagaacctctgacatttatcacattttttgacaaactcgtgtgtgtccttatttatagttggccaataatatccctgtcgaatcattttctttgacaagctttgccaacatgcatgatctccacaaaagcccttgtgaatttctctgataatcttgtttgcgtctacggggagaacacaccgtaggagaggcattgaataacccctccgatataattttccctctactaacgtgtagcgagacactgaatacaagagtttttgtgccttgtttttatcggctggaagttgtccgttgagtagatagttaattatgggtgtcatccaagtagacgagctatcaatcatctcaacttcttccttttcacatatacttggttcatttaacatttccactggtaccaaattcaattcatcaagtttgctctacgaggccagttttgccaagg

SEQ ID NO: 136871 - DNA, 680 bp, Cannabis sativa
ttgagcggggttatggaatttgaccattttacccctagttttggaaaatacctaagttgtaagattaggggcattttagtaatttacaacatgggtgtttggtggctgccttaggtgttgacacctagcattaaattacttcagccaaggttaaggtattaacctttattcacttagagaaattaaagaaaaataagaggaataagccaaaattgggaaaactctctctttccttcctctctcttcgaaccagcctagaacaaaggagatcgttgctgattttagggtgttttcagcaatgattcagtgggaatcaagccaagataaaccctagaatccatgaatatgtattttgaatctttttctatagtttgagtttgtgattttatgaattggtggctgttaggattataaatgtttagggtttgaatatttaggttcatttgagttgattatagcttcttgtagctggtttcgatgtttgggattggttttgttcaagtttgacctttgagctcaaagctttgatatttaatggcatgttgagtttcagtgagtgtttctgtgaattagtggttgaaaaatattgtgtataccctaattaggtactctagaaggtttggttgcatttggtggaggattgagcaagaaatggaattttttaggtgaactggtgcaaa

SEQ ID NO: 136872 - DNA, 528 bp, Cannabis sativa
aattagtgacaacttgtatccaaatactagggatataaacgaggcagggcgggcgcgtagattgctctctcagccccatacccgcttcctaaattcacccacgtacccgccccaatacccgtttaaattaaagtgagcacggagcgggaattacccgacgggggaaggattctcattgggtatccattacaatatttatatatatattttaaaaagatgtcccaaataaaattaaaaaaataaaaaataccatgaaaactcattaaaaaataaacataagtggaataatgtgtataataaatagaattagtaaatataaaaatggcaataaaaaataagtagttaagtgtcattttttttaagtgatcaagtatgattattaatattcatcaccgtacgtattttcatgaaaactgaaatgtctcggtaatgtaagcaataaaaaacctaaagcataaaattattttaattgtaatagttaaaattttaaaacttaaatatatacatatatcgtatttgggtgggttc

SEQ ID NO: 136873 - DNA, 1147 bp, Cannabis sativa
  modified_base (824)..(827): a, c, t, g, unknown or other
tctaataaatagagaaaaaaagagtctaaatagtctcttaaaaataactacatcatcaatcacaagcccattttattaaatttagaaatgttactctttttctcatttattttattaaaaaaatacctgtaatttcctttttagttccacttttaatagttacaacaaaattaccatctttctatatatatcataaaaatagaaaattatgtgtctaatttcaatactattactttgtttgtaatacatatatcaaaatattatattttagattacatcacttaataaatataaaaaatatataaataaaagattagaaaagttggataacactgcgcgaagcgcgactttgaaatattatattactaacatttttgtataaatctctcatttttctgtttcaaaaacaaataatattgtgaagccttattttatagctgtcatgccaaattcacttttaggaagatgacattccatcgataccacaaaataaaatgtaaattttttcataatattagttaaattgtttctttctaataaagaaaaaagagtctaaaaatagtctcttaaaaataactacatcatcaatcacaagcacgttttattaaatttagaaatgttattctttttttcatttattttattaaaaaacacatgtacgtaatttcttttttagttccacaatttttaatatttgccacaaaattgccatctttctatatatatgataaaaatagaaaattatgtgtctaatttcaatactattactttctttgtaatacatacattaaaatgttatattttagattatatcacttaataannnnaaaaaatatataaataaaagattagaaaagttggataacacagcgcgaagcgcgacttagtttcctagtattaatatagatgaaacttttttaactagaattaattttcagaatatgcaatttggatatgtaatttgggaaaattggtaaattaataaatactaaccatatttaaaatgttgagtgaattaacaaactattaactaagaatacaaatcaattataattaattaatatatttatttattataaaattcttacacaaaccccgtaacaaacattgaaatatgcaataaagaaactatataaagcttataagg

SEQ ID NO: 136874 - DNA, 513 bp, Cannabis sativa
  modified_base (200)..(204): a, c, t, g, unknown or other
aacatcaatcacttcaaatttcttttattgataactaatcagattgtaaagggttttatttagggcataaaacccaacaaatacaacacagcacagtaagactaaattaaaaattcatttttaacctcggtaggtgcaagtgcttctgttgtgccctttggcaccgcaccgcacttgccacaatttcgtggtatgataannnnntcaccattacaagtagttcggttttacttaattcttcaaaccttttgcttcttgggtcgctctactggttgcttctcaacaggctttccaattctcatgttctttatgtcatcaggcaatttccaatcatcctcttcaccacctgacataattgtaccttcgtatgtgctcctccaatattttattgtgtaatatggcgagcatagtgcgtgtatgctaatacttcattgctgagctgcagcacatgcatgaggacaaggaaacttcatgcactggaacaagccgcaagtgcaagcttgttcctgcaag

SEQ ID NO: 136875 - DNA, 599 bp, Cannabis sativa
aaaaaaaaaaaaacctcttatttcagtcgggttaagattttttttttaattgggtaggttgtatgcagaattttacaaaccgatctttacgttgtgttagaaaatatgtactataaatcgactaaaccgaccgatgtacagccctagaaaataggggtgttcacggattgatttggtaccgatttttatagtttttgaactaaaccaaaataacagttttttgaatattaaaaactaaacgagaccaataaatttctcaaaccaaaccaaaccattaagacggtttggtttggttcagttcgaaactacgatttaagtagaatttataattattcatagtttaagtaaatatattatttttattaagtaatttgcggcaaaaccaccaaactatcaatttacttgcaaaaaattattcaaaaaactttaaggttagatttttttgcaagtaaattgatatttgaggaggtttgccgcaaattactcttaaagttttaaattttcattttaattactcattttaatttttattttgtaaaatatggccatgtaggataatttttttgtgacttgtcattgccacgagggcaaaattagga

SEQ ID NO: 136876 - DNA, 521 bp, Cannabis sativa
gatcagcaacgagctgcacaatacgttaaaaatcacgctaacatgcctaaattagttagggtgttacagagaagatgactgtccgagttagagcatggagtaccaggaattcatcattcgtaggacgagctgtcttgatcaactcggtcttaatggcaatacacacctactggagccaaattatgatactaccaaagaagactattacaaaattgagagtatttgttgtgcttacttatggaaaggtcaggctgatgcctttggaccaagagcaatgacctaaaacacactatgtcaaaccaaattcactgaggggattggattcaaggacatctcaacatggaatacatcagcgatgatgaaatatgtttgggctatagctaccaaaaaagatagcttatggctaaaatgagtaagtcatgtatatatacaagatggtgactggtcgcaatatatacaaaaaaactctcaatgcaatttcgaaaataaaaaaaaattaataaataaaataaaatatattt

SEQ ID NO: 136877 - DNA, 623 bp, Cannabis sativa
  modified_base (297)..(299): a, c, t, g, unknown or other
ggtgaacctggttggcctatcataaagggggtgtaggcatgtgaaaggatgctagaaagacaactaccacgtgtaattgtagagatgcgcaacaaaatgtttgaaactcattggcatagtacaaggttgattgggtagtccatactgtatgcttcgtacactaggtcgtgttttcctgagtgacattgtaagccacaggaggcgcttttgttgaaaaggaagcttgttggcatgggtgtggaagtaatgcaggggccgtcaaattcttgttagtcacgacagtggtcgagagttgannnctaagatggttcaaattgggatagacatgaaatgtttcagttgctacatgggtgtgttaaaagggacgcacatggagactgaggaggtagatgccgcaatcatcagaggatggttgtacttggaggtgttcgtgtgtgagttttatttgatctagatggaagcaatgagatagttgagtgggatgtgttggcttgtaaaatcaccagtggacgtaagtcacacaaagacatcgataaagatgcagagttatggaatgaatgcatcgaagaagccagtagggctaagaagaccgagcgcaggcattgagatggcgctagagtttg

SEQ ID NO: 136878 - DNA, 640 bp, Cannabis sativa
acaattcgagtcacatgactggttagaattatgcattcatattttcaattaaaattcgaaccacgtgattggttgaaactctggaaaaggtataaacaacatactttttgcagagtctcgattaaccgtacaatttttgtggctcggatgataagtcttaattgggcatatttattagatttattaagataattagcagtgaaattttgttagaatttgatttcatacacttaatttcttcattttttttttctttaattgtagcaataatatttaactttgcttctatttgtaaatttgagacatctgctaaatctcaatgttaaatttctatactagtggtaattctagtagttatttaacgataagatttaacgagcgccttaaatttacaaacaaaagtaaagttaaagggatattaccacaaaaaataaaagagtgttttacaactaaatcctctcaattatcagtacacttgcacttaatcctctaacctcaaattttaacaataaaattcttcaaactactaaactgttagcaaatttagagtatcatctactttttacaattaattactaatatagacaatttatgtgcacactttttgtatatgtattaaatttatattggtatatctaat

SEQ ID NO: 136879 - DNA, 638 bp, Cannabis sativa
  modified_base (218)..(222): a, c, t, g, unknown or other
  modified_base (388)..(391): a, c, t, g, unknown or other
gaatcatataatcacaattaccttccactatgttgacatcattataaatgtgaataactctatgttctggacttaacagaaattgtacacattaaaccatgaatatgaaagctacatgtaaatataaatgacttctaatcttctattgaaaataaatcagattacattgaaatgagttttaattagggcataaaatctcaacaaactcccacttgcannnnnataaaacaagtagtgcatttcaattaatctattatcttgatatccagatcaagtgtagtgtatttgactaaacccaaattagaggaactgtaagtctatggtaagcaacttatttctccaccattactttctttgtgttcataaaacattatgcaacatcattatnnnnatgcattactcctctagggatactgaattctatactgtttattaagtgcatctgaatagatagtagacatgtttctaattctatccaaaatggaatagagataaaaccagttaagaagtttcttcagtttgaataagtttcttgtgctttcgaaaacaactaagtaatttagcttcactgatggagcttcaattattagagatgggtttttacatccttctagaataattccaccacccccagagta

SEQ ID NO: 136880 - DNA, 1471 bp, Cannabis sativa
  modified_base (1374)..(1375): a, c, t, g, unknown or other
cacgaggatcatcctcgtctttgctctagtccgccctcttcaagcgatggacattttgatttaactttctcgttcaaccaaagaattatggctcgtattaaacaaacaatgcgtaaagccaatacatctgaccctcacgtggcccagcacgccaccttgcccagcgccgaacaggatatacccgtgcaggaggagggggatcatgaaggggatgctgaggtctaggagatagaggagttgggcgatgtccgtcctaatagtccttccgaggaggaggaagaggaggaggttgcacccccaaattttgggggatataatgaggctggggagctagttgatgctgacggcgatgtcctggtcgagggcatggattacgctactaaggaacttactgttgcggttcctcagaggaggcagagtgcattgggtgccaggtgggtgagtcctccgtccaaggtcattgaggcacgcttacgggatcttgattagggcggctacctgggcgagttagaccgttacattcctgcctataataatcgagccacaaaccctgaaaggggaatgtgtgcttggtcgggtgctcatgctaagcaaggggcattgttgcctttgcacccatactttaggaaggtggtagacttcttccgcctctgtccgacccaattcactcccaagggcatcaagtatctgtctgccctgttcattctatacacctcccaaaagtgggatatgccctctccccatgaggttagctggtttttttgacttgaaatcaacccccaagcaaggcaggtcaaggtacttctatttctctcggccagactataagtgattaacggggaccggggataatgtcgttagcaaaattgggcattttgttgatgagtatttcatggtggaaggcatgggcaccacctacactcagttctagcagatccctgtatatcactgccgacccttcacactcgctcttagggatagagctcaaaggcttgctcagctgccgggtgctgcccaaaatatcactttgttgacctccgaggacaactttttggagtacgggctctacccgaaggatttcatcccttagcatgtgaaggagaaaaagaggaaatccagtgctggtcgggctgagggagctcatcaggagaatgaacccattcaacttaagcgtgaggctaagttgaagggaggtgcaagggcaaaactgtaacaccctggaatttagaaatggattagcaaaaccctaattaaatagttatgaataattgaggaattatattattatataattcaatatatgtgagattatatgaattttaatatgttaagaccccgttggtgagcccggggcattttagtaattatgacccnngaagggtaaaatgatgaaattaatcaaattatgtgcttaataaaactatattattatatagtatgcatgtgttgtcttttcaggtgtgttctgaca

SEQ ID NO: 136881 - DNA, 647 bp, Cannabis sativa
gcctcagagccatggtaataatttactttcatgaaatatgaattaaaatgatgttatgtgttgatttggatggcatcatgtggtttatctgttatttgatgaatgtatatgttgtatagattttttttccatggaaaataatttttctatttttgaaaatatttttttggattccttgaaaaaattaagcaatttttgtttttacaaaactcgattccgataaaagttgagaaagatatgaattttggaagtttcgggttgaaagggtgtcgagggaggtgctcatgtgcaccaaaccctcagacaaggaggcccagtgcgcgcctgtgctcagacaacttcctgtctgaatgcgcccaggacgatgcacgactcgctccaggatgctgcacctgaccgaggtttctcggtcagggatgctgcatctgccgagaatcctcggctgtcacctctcctccgcgcgcgtgataggctgcgtgcagcctgttgcacgcatactcgtgggcagcaacgattttgcacccaaaacaccaattttgagggattttttcccaaaatctgattttttcaattttcaaacctcaaatttaaaataaaatattatttttaaatatatttaaacttaaatatcatattttaaattaata

SEQ ID NO: 136882 - DNA, 1451 bp, Cannabis sativa
  modified_base (265)..(265): a, c, t, g, unknown or other
gattagtaagtattgtaatttttttagatacaatttactttattttttttctttttacttattattaaattctgttaatttttatgtatagttcgatcacattaaaaataactttatggggaaaattgggtgagatgttcaatccaaatttatataagaaagatggtggtccatttattgtgatagtaacttttactacggttaaaaatttttgaggtaattatttatttagattccaccattcaatatttgaatacaataatanatgtttgtgtatattaatttatattttttctaaatagataaaattaacttctcttatacaagtgtatccaaattctatattaatctttaaatagattatgtagcatcaagaatccaaattttttccaccaactccaagagtgtggaagttattgagagttataatgttaagaagacaaaaaaagacatgtttctcaacatgatgtctattcaaaaattattagaggctaactggagtgatattcaagtgaagatttttgttttttaatattattattactattatttaaaagtttcaatacctataattttactttatgataattgttttattgtaggaatatattgttactgtgagagcaaaaattataagcatagataatatatttggatggtattatatttcatgtaaatcttgcttgaaaaaagttgtacctaaaaatgatattaattggtgtgacccttgcaaaaagattcggaatatcctattgtgaagtaagaaatttatatttaatttctcaaaatactaatttattatgttatttatgttttctctattttttgtttcatatttaattttttctctctacttttttcaccctattatatatgttcaaaatacatatcaaagtcaatgacaaaactactgaaacaactttgatcttatttaatgaagtagctgaaatattactggacaaatcagtaaataaattggttaacaagttgtctctaaacaatgatgttcctatatagaaggctttgtggaaaagattttgtttacaagcttaacttaaatgagtacaatttgaaagaagggcttgagaattttactgtgtaaaaattttttgtgacctggatgaaaaattagaacaagaatatgaatgaaagaatgaaaaaacaacaaaaatgatcaagaaagtgcattttgaaaataacatatcaaatcatttagaagactctgatgaagattattgtgatactcacaacaaaaaaagatgaacaaaccaaataattctcatgaaaattattgtgatactcacaacaaaccaaagattattaatttttccatattcttccaactatattatctttacatattaacaataaactttgattttcgattcaaatgctacttttcaattttattttcatatattcaaaagtctcatttcataaactttctacta

SEQ ID NO: 136883 - DNA, 509 bp, Cannabis sativa
aaaaaactactacacatacaaacttagagtcccacatggtttaaaagtacttaaggtgttatccatgtaggttataaataatacttttattatgctactttctatatccaataaatatttttcttctaggggcattgatttatgtcttactgaataagttttaaatttttatttaatatataaaattaaataatttatcattcatctgataaataattatatatctttaataataaagtaatttgtaaaaacaaaacacacatatatataataaaaactataactaattcaatactttttttacatataaatatgttactatttttaatatattatttacataattttttaaatttatatatatatatttaaatttgtaaataaaaatattcttagttaccaaaaaaaaaaagtatcacattgtttaattactcttttaggtgttgtacatgtaaagtataaataatttttttttatatttttttataatattttttaatatgtaggtg

SEQ ID NO: 136884 - DNA, 772 bp, Cannabis sativa
ttgagttgaatatagcttcttgtatcaggttttggtgtatgagattggatttatgcaagtttcaatttaaaaacctaagtttaggtctttaatgacataatttgattcactgagtttttctaagattttctagttagaatatgttgtatatgcattgtttagttgttctggaaagtatggatgcacttggatgtgttttgagcaagttggaacttgtttggggaaacctggtgcaaacaggttagccggtttgccaggcctgtaaaatcagctcgccagttttggcaagatccccgaacaagccattttccaaattctcgtccattttagtgtcgtagctgggtgcctgtttactgagttagtgtgatccctagagagtgtaacagaacctggagtggtgggttcgggtttcccagattacggttttgatcatgtcattaacccgatttcattatgtgattagggcatccatttagcgcaagactttccgttaaggtcgaccaacacacttgaatctggaaagaaggtaagaactgtatataatgtgtaatatgaatatctgagtgtatatatttgttaagtgtatatgcatgcttatatgttagttgcactaccaacacttgtacgggtatggcacagagtgcattggtatagtgaatattatttaaaagtacattacagtggtacttggggtacgaaacaaaccctaccaatactcgtatagcaaggtacgtagtgtatgtggtatagtggttgtaccctattatggaac

SEQ ID NO: 136885 - DNA, 610 bp, Cannabis sativa
  modified_base (553)..(553): a, c, t, g, unknown or other
aagaatagaacttggattctggtgccaagaccaaaagacaagaaagttgtctcctgcagatggttgttcaaagaaaaagagggaatgtcagagggtgaacaacctagatataaagagagattggtagctaagggattcacacaggttgagggagttgattacacagatatcttctcacctgttgtgaagtacaaaaccattagaatgatgttagccattgctgcacacaatgacttggaagttgagcagttggatgtcaaaacaactttcttaaatggttttctggatgaagagatattcatggaacaaccacctggttttcaggtggaaaatggcaaaactgatctagtttgcctccttaaaaggtcattgtatgggttgaaacagtcacctagacaatggaatcaaaggtttaaccagtttattcagagtataagtttttcaaggtcaaaatttgactcttgcctctactacaaggaactagggacacctaaggttgtgtaccttttacaatatgttgatgatatgatgatcattagcaaagacaaagctnaaatacaagccattaagaacaaactcaactctgaatttgaaatgaaggacttgggag

SEQ ID NO: 136886 - DNA, 808 bp, Cannabis sativa
  modified_base (48)..(49): a, c, t, g, unknown or other
ttcatatttaggatgttaaataacttacatggtagtaaatctagatcnnggtaaaacatattccaacaaaggctacatcagttccaattaagctgcaaagtctctttctgcataaacgtccacacaaggactttggggaaaaatgttatcccaaattttgcccacctgacgtggcatgtctatgtggccaacatcagtgtcacgtggcagtacaactcgctaacaagaaggccaagtcatttactcaacacttcaaccaacaagaagtctgaatactcaagcgggatgactaagtgacaaaccaaccacccccagggtgctggttgaccacccctagccggccgtaataggctggccaggttttagacattttatggccaggcagcatgcatcctgcagatgcatgactagccagcttttggcctggcaggattttagcgcacagcttcaaacgtagacatcaagcaagactacagatcgggccttgacaacccacaaaaatagagggaaaatatttatttttgaggggcattttaatcatttgtattttattaatttaatatgtaaaataatagcttattttacatatttctaaaggatttgaagggtttaagctctcatatataaaggctttctaaaaccctaaaaccctaagtgcaagtcaaaagctctaagttctaagtgactaaaaccctagctctaagtttgataactcatatctcttaggggtgagcaacggttggtttggtcggttttttacacaaaaaaaaatcaaaaattcggttttcagttttcatggttataatcc

SEQ ID NO: 136887 - DNA, 662 bp, Cannabis sativa
  modified_base (608)..(632): a, c, t, g, unknown or other
ttaatatacaatccaagttttttttttattttattttctgaatggtataccatagtatagaaaatatatataccataatacaaaatgtatataccaccgataaaaaaatttgattgagacttcggtcgttgtttgggggtaatcattgtaatttggagatgtgagaaaattagaaggaaaaaaaaaaaaagagcagagcttcgtcgcttttgattgtgaggctttgtcatttagattttggagtagagttttcatttctatttgagaattaatataatgttttttttttttttgaaaggtttaatataatgttaataatacccttatataactaagatattttaggtactaaaaaaaataataaaagccatttgctatattatttttaaaaaaagacattaagtttcagtaaaaaaagataaaaagtcatttactactatttcccttgaaagggcatgtaaatgatcaatataaatatgctaatccgaaaaagggaagaggataatgccgatttttctaaatttttcaaaattttacaaaattttacaaaattttttaaataactataatatgcacgactatataaaaaagggaaatttacatggtannnnnnnnnnnnnnnnnnnnnnnnnaaaatactgccaggcggtattttttacttt

SEQ ID NO: 136888 - DNA, 840 bp, Cannabis sativa
ttaataatttttataaaatacagtgtccaaaatgatatttaccctttcttaaattactattttaagactataatatatttattgtttctaggttctttttgaataagtttaagttggattatgactttttatttttatttatttatgtctttctcttttaataatttaaaacgtcaaatatacgtatatataatacatatactaaataaagatgaaagtgaatttcaaaaaataaataagtaattaaataaagataaaagttttgaagtttgagaagttacttctttttagctaaaaattatttgtattcaaacttctagttttcttatttcttagttatatattgtcaattatgtataattgtatactttttttttataattttctttttataattatgatcatccaattactatttattattatattaattttaatattaatactaatattcatattttattaaattaaattaattaatattaacaatatagacaattaaaattttaattattttttggttaaaattatttacgtttatgacgataattcaatttcttatgatttacctcttttttttttaaaaaaaaaaaaacatatttttcataggtctaatgattaataaatacataaatatcctaaattattttttatttattaccattaattgtaattaatattcacttttcttagttttctaatctttgactctcgtatatatataaataggagatgaccgattagaataagatactaagaaaattctcctcttctctattttttttctctaaattataatattttataatacgttagcagtacgagtctctaaccaaggta

SEQ ID NO: 136889 - DNA, 600 bp, Cannabis sativa
atacaacgtcggctgccaatgtttcaggttcaaacggactgtatgcaagcggttcgtcttcttcatggtgaggatatgggttgtcgagaggaggaatgtcttattctggagattcaaaggttgcttcaacatcattctattagtggtttacagtttgtatttcgggaagctaatgtggtagctcatgtattacccaattatgctttgacaaacaaagttagtgctatgtggatcggggtttttccccctcttgtgctcgtcacgcaattgagcgcatgacttgccatttccttgtaatcggtagtgttgtttaatgaaatccttattctcaaaaaaaaaaaaaattaatttgattcagatttttatattaaagaagaaactcaaagacattattttttttttcgttaaaaggaaactcaaaatcatgtgcaaacaagaacatgtgcaaacaaggaaactcttctctggctctgttcgaacctcttcttcttcatcttctctggttcgaacctcttcttcttcctcttttctggttcgcttctcttcaattttattatagatgcatataggttgttgttactaaaataaattatcatagtt

SEQ ID NO: 136890 - DNA, 1061 bp, Cannabis sativa
  modified_base (998)..(1002): a, c, t, g, unknown or other
tctgggactccccttgtttagatcccgtcagaaggatgccgatttcaacttcatcctggataatttataaaatttaataaacataaacatgacaagcttatattgtttttaataaataaaaatggaaaaaaaaaatcatattttccatcattattctctaaaatatatatacaagtgaaattaacttatcataaaaatcttatttaatatgatgtaattattgatgtgctaaaaaaatatttttatatggtaaagataatttaagcagctaactctttgaatttagtcacttaaattttttaaaaataaataaataaaaaattaatagttaaaatattactttagtaatttattaattagttgaatttcttttgccatgtgaaaatttaagagtccaaacacttatttagagcctagtgtaatggacgttacaaaacttcatatatttatgggttattattatttattttttaaataataataataataatgaccattggatgattattaatcattgaatccaatggccaagaaaaatataattattttattttttcaattttatgctttgctatataatttctcataactatccttttgattcttctctctttctttctctctcataaatttgtatacattcttttctctaaaatatatttcaagtttcaaactttaacacataaaaagaaatagtaaattggtgtataaatacttaactttaactcccaatttcaaataaatacataactttaatttttgacaataataatacctatgttataattctaaaacttttgtatgtatatggctgttaagtgttaagtaaattgccacgtggcaatttcttattggtcaaaatcattatatttttttttcaaaaaaaatttaatttaaatataccaataggaaaataacatgtggataatgatttaatatttaacagccgggtactaacagagtttcaaaaatataacttaggtattattaccgctaannnnnaaacttaagtatttatttatagctcgaagttaaacttaaatatttatgtcgtaaattac

SEQ ID NO: 136891 - DNA, 569 bp, Cannabis sativa
ttaaaaagtaatttttttaattatcaaataaaattaatatttgaaataataaaatatgtttttgaactaaaaattataatataaaaaatataagaaatattcacaaattaagtataaaaaatatagttaaatatttaataatatagtaatttatataaaaataagttattaatattaaaattaataatgttatttttgtaataataaaatttaaaatgttatttttctaataataaaatcaataatgttatttttgtaataattaaatttaatagaaaaatttatagataataattacttgacaaatatatatgaaataaatgtaattaattaaaaatataataatttataaaaaatttagtagtaataattaattgaaagattaatataagaaaaataattaattaattaataatataacaacttataaataattaaataattaaaattaaatttaatattgtagtgtttctaataataaaaatttaataaaaaaactagtaagtaatatttacttgaaatataaatttacaaaataaattcaattaattattgatatgattttattt

SEQ ID NO: 136892 - DNA, 536 bp, Cannabis sativa
gatgtgaattgttgagtatcgattagttctttgagttgatcttttgcagcaacaatttgcttccaataccagctcccttagtttggagctttgtagctccaccattcttcctctttgagataaacattgtgaatccatacgaaaggttgtcttctttgttggcgatggcccatacgtatttaaacaaggcagccacattccattcagatgtttttgtaaaaccagcccctccttctgatttgggttggaaaaccttgctccaagcaatattcccagccccctgcatgatatgttggcctttccacaagaatgccctacatatagcttctaattcttggataactttctttggcaatttgagtatttggcaccaatatgagtgaatcgcaaagaggactgaattaataaggacaaccctacccgcaaatgatagattccttgtgctccatgttcgaattcgggttgtcattttttcagcaagtatgttacattcatgtcttgagatccttttgaagcaaatgggcatgcccaagtat

SEQ ID NO: 136893 - DNA, 788 bp, Cannabis sativa
tgcctccggttgctttattagcttcctggcacgtgctccgggctcgtggggatgcatttatgaccatcattactgcagttattcgctttttgcagacaacgattcgtttcctatccatttaatgatacagcgcattaaatgggtgtcagtcgagtactcaagcgttttctaccgccttgatgaacgcttgtcccaaccattggatctgtagaatgcgaatcgatttctatcctgtccgtacgatgatggtcgatcacagctgtctcacaccctttctagcctataaaagccagccttctcatttcatttggttactttcaccatttctccaaactttttcaaagctttcacagagaggaaaactttcaggcaccatagatcacttgcttctcttccttcgccgttgccattcttccctttaccgacgatcaacaccaacccccagccttcaatcttcacgtaagttctcagtacactttacacttgcttactgtttgtttatatcgcatgtttatgatttctaggttgaatgtcaaacttctaggaaatggttttgcctgagtttgctgtgtaatgcataaaatttcctcttctttgtgccttggttgtttcttcttactacgttttcttttgggactcgcctttttctattgtaatcacgcctttagggcttagagtggctctgtcttctttccctttttctctttctttttacaatgtcactgcctttgggatttttgcacccaatgtttgccaaggaaagtctcttagggtttccttatttggca

SEQ ID NO: 136894 - DNA, 516 bp, Cannabis sativa
catattactattaagttacaagtaattatcgatcagtgacaaaaaatattgacgaatagtttcttacagatacacattcacattaaacattttttgttgcaattaagttgcacgttggttgaataatggttttgctactacaatatcttaatattataaaaacagggcccgaaattatcgaatacgtgacctaaacagataaaacatgattgttgtaatattcgtttgttttaaatatgtagaattattagttattttataatttcatgttagttggctcgcaatagatataacagttgcattataatttcattacagttgccttgaagttgatttcttcttttccttctggccgtcggaattgaatttttttttttcaagcaaagacactttcgactttttcttcactggacgacgaccacctttagccacgggggactaaaatcggagtcatcatcgttgatgactgggtgtttcctttagccttgttaacaactgatttatgacctatttttg

SEQ ID NO: 136895 - DNA, 557 bp, Cannabis sativa
attagcaacgagctgcagagtacgttaaaaatcacgctaacatgcctatgctagttagggtgttacatttattttcacttaaagtacaattaagttctattttattagtttttattttttataaaatatatacttttttactaagttattatatcaacagttcaacataataaaagcaataaatattaataaaaataaaataaaattaatatataaaattttatgtaaatatattttaaaattttaaattaatttggatagtatatatatatatattttcaagagttaaagcatattttgctatttgaagtataaaaattaataatgaaaacattagataaaatgacatcataactaatcaaaattagacaagttttttttttcaattttctttttttatattcttaaaaattgtgtatatattttactttttagaatttttttcctttcatatatttaataatataatatgaactgccatagtgtttaatgattttttttttatttttgaaggaaaagaataaatggaattgatttcagaattgatcaaagatttt

SEQ ID NO: 136896 - DNA, 508 bp, Cannabis sativa
gaccttagggattattaccgccaatttttgaggttggggactaatcggcatcaacctcaaatttttggggacttttgccgcaattatcccttatattaaatataactgtacctcgtaatatttatctatacaaaagagcttctataatattatttcttatatagaattaacatttgaattattgttacatttaggagaccaaaaagtatgactttatcaaatttgtcctcactttgggtgtacttaaagttagacacaattcaatgaacttgtaaatgaaaccaaaaagaggaaaagaaaggataaggtaaaagtaaacataaaacagcttcggatttgaatgcatattagaaattaatcatattataataataattattgttatttattaatgtttcttttttcttttcttttcatgttactataactacttaagtatatatttagactatgtagtgtaatattagaatatttctacttaaggaaataaaataatattattgattct

SEQ ID NO: 136897 - DNA, 545 bp, Cannabis sativa
  modified_base (482)..(482): a, c, t, g, unknown or other
cagccaccaaaacctccatttttctttgaaaacccaagctttttacataaaaatctatccaactagaacaaggaattcaagcatgcaattcaatctaattacacctacgtaactcagcattttaatcaaggaaacaacaacaacaattaacagcagcaacatcacccaaaatcatcatgcattactcaactttttcattaaaattatcaagaaaaaaaagtaagaaactaaaccaagaaatacctcaattagaatcacttagatcttgttaaaaaccactagaatcaccaagaaaaatctccttttccttgctgcacaatgaagccgaaaatagagaggaaaagagagagagagagagagagctttttccaattttctattttttaaactttgtatttttttttaaaaaatgaaaagaatgaaataaagccacctataacatttcatttcagcaaacaaacatataaaataaacatttattntcaaataataaaatcactaaaagacaaaataccaatggggcaaaaagaccattttgccccacc

SEQ ID NO: 136898 - DNA, 653 bp, Cannabis sativa
  modified_base (410)..(412): a, c, t, g, unknown or other
ttttataaaatgtccgaaaattagttttttttcgtttcaaaaatgacgctaataaaaaactatttgcgactacgatatatatgtcagttttataaactgacgtgaattctttaaatgacactttaaaaccgacgtgaattatactttttgtagtagtgaacaaactatggaacaactagtgttgaaaaacataagaagaagttcttaaaaagaatctaaaaacagtttgtccaaacaattccttctgatcgggggttaaaatagcaatgattttaaacgagcaagtagaagtcacccgtcactactacaagaaaaggcattttatcccggttttttatactttttatcccggttttcgctaaaataaaaactgggatgtatgctagtgggataaaaggtatttaaaaaannngggataaaaggggtattttttatcccagttttttcatgaaaaccgggataaaaagtaccccttttatctcgattttttgagaaaagtgggattaaattgtactttttatcccactttttataaaaaaaactgggataaaatgtaaaaattgggatcaaaagtcttattttttaatacatacatattctgcctatattatatatattaatactatctatataatatatatatattgttggaa

SEQ ID NO: 136899 - DNA, 1052 bp, Cannabis sativa
ttgtaaaagttaacccaaattttagtatttttgtaagttttccttatttaattatgccataagaaagtatacccttaaatttttcccataattcatgtaatttttacttaaaaataaggtgtcaagtgtaaacttctccatattttatgttaagtgagctatattttcactttgcatctccattggtaacttttaggtttatgaaaattttattttatgttgataaatattaaataaactgagtaatctaaaagaaaatatcactattcaaatcacaaggaaaaactaaatttattgcgattatgtgctaaactactaaatattccaatataatcactactaaatattattgaaaatttaagtagtacacttattaatgggtgttctgatagattttcttatctattttgatatctaaaaaagttttttagtcaattttttgttttgtaatcatgtacgttgtagctatttaaaattacctgtaaatttttagaaaattccgaataacttacaatgtcgaaataaagtttaaacaattacttgtcacacgcataagaaaaatagtcgtatgtgtaacaaaatatttaaatcttattttcagcattgtaaactatatattcaaaattttttgaaaatttacaagtggttctaaataactatatgtacacaatcatgaaaaaaaaaattagactaaaaaatctcttaatgctaaaacagataagaggctaccgggatagccttttaaaggctttaaacatacccaatattatttatttattgttttgattaaatttttttatttttttttatttttgatataataataaaaatatattaaaataaatatagtatattagttattagcatcagttaagctttattttcaaaaaaaaaaaaataaataaaaaaatagtgaagctagctttgtttgaaaaatcgtcaatgaacccagtaattatatatatttcataatacataaaagtattgggtgactattcaatagttacatttttattgtaactatatggttacatttttctttaacctgtaat

SEQ ID NO: 136900 - DNA, 544 bp, Cannabis sativa
gattgttagtatcttttttttttattttaacttaatttcaataacatcatatatttttttgtaatatatcgtggtgtaggaaattctgggcctaattggttactgaaggcatttttgtgtgatgaagtttgagaaattctgaaggctattttaatactatataatgtgtcatatgcttatatatttaattaagtatatatattttaatttaataattattataaaaaattattaactccacacgttatttggtggtaatgttaaaattggtgtctaataacaatacacatatatactaaattagtatatatataggccatcgataccttttttttagattggtcatacaaaatatataatgaatatattaatatgccacgtgagtctttcagaactatttaagaaaaataattttatattgaattaaaataagtgttaaaatgtctatagattgtaggggtatttattggatcacatccaatggatttggacccatccgatccaatctaattatttattggatattggattttgccatccgatc

SEQ ID NO: 136901 - DNA, 649 bp, Cannabis sativa
  modified_base (620)..(623): a, c, t, g, unknown or other
agtattaaactagtttataaaatcacacacgtggcgtccctaagagatagggcgtcacaacttggtatcagagcaactgtagttttaaaggtacatttgttgtgaagaaaggtcgactcatggtatagtaagtgtttatgttatttgctattacatttcgtgcctagattattataaagtatgttaagaaaagtagcatagtgatgataatgataagaatatttgtatggtatatgcatattgatattgatatctgtctgaattctaaatggctagaagatgtggattaaatgtgtgataagttatacaacaagggcaatcaaatagtctgattagcgagctgtctaggatcgaggaaaacggtaaggaagagaatcttctattgccgtaacactgagaacatgtaaattctactatgcaggatatgattagacaactagaggaacagatccgagatctgagagaataataagctagtcttgtgtctattcttgtaccaccgacacttcctcttatgcaactagatgtggtgaaactcatgaaaccaacttatgagcatatcaaaaagcaaaaactaaatgaaccaccaatcatgggatagtgttgggttttatgccctnnnnaaaactctatttcaatgtaatccaga

SEQ ID NO: 136902 - DNA, 1547 bp, Cannabis sativa
tttagagagactatttcaggcaagatattcttaagtctagaacaaatcaacttagtagccaccttatatagcacattacaacaagatatgggccgaaaatcacttaccttattcgggcattttatcttaggaattaaagtaatgacagttgaattaatttcttttagcaaattacctgacttcaagaaggaggcaatagcttcatagatttcatccccaacaagctcccaattgtcttggaaaaaataacttccataaccatctggccccggactcttcacaccaggaatgctaaacatggcagcttttatttcatcttttgaaaaatctatcatcaacacttcagcatgtatatttgttatcaaaggtccctcattcattactgatgccttgaccctctgccttcctatcattcttgtccccaatagctccttataataatcaagaaaagcctcagtgatcttctcttgatcatcaactctatcaccctgagcattgattatagaaaggattctattctgccttgttctgtccttaatacttgaatgaaagactgatgtgttggaatccccatttttaatccaattaactttggatttttgttgcagaaaggaaattagcaccttatgcttctcagcatactgctcacgtgcctctttctcttgctgcattagagtagcatttaatgggtcctggaccagcctttgttgacactcattcatatgctccttcaccctcatttcttctccttggacatctacaaaaccttgcttgttgattgctgtcaaaaccggtttgagcctcttcaacttggtaactatttgatacattttagttcccaccactgatacattccaactttcagcaactagcttctgatattgaggggaacttgaccacattcgaaaatatttgaacagtttcctaccacttggaagtgaaggataaatcgtcaatattgcgggggtgtgatcaaagaggccctcctgcgagaaaattgcttcagcaacaggaaactgattcaaccaactagcatttgccataactctatctatcttggaatatatcctatcatctccttgttgtctattattccaagtaaaaaaactccctccatatttaacatcctctaattggcaccttattgtacattcacggaatgttgtcggattaaaatgagctctcttcccaattctctcccattctcaagaatatcattaaaatcatcaagcactacccatggttcatttgttctcaatccctctaattctttccaaagaattctcctatcctcttccttgttaaaaccataaataaaagaaacaaggaacttattcctattatccatggttgtaaccgaaagatgaacaatttggcttgagcaaaatagtatgtctactatgtaactcaaaggattccatgctactaaaattcttccccctttatgccaagcattatttgctgtaaacaccaattggaaaacattctaacgtataaggctccaagatttgaagcctttactctcgtctcgaggagaccaaccaaac

SEQ ID NO: 136903 - DNA, 553 bp, Cannabis sativa
  modified_base (345)..(356): a, c, t, g, unknown or other
aactcccacttgcactaacatagacacgtggaacacattatgaacatgtctcaactgtcctagtaagtttgatcagttcgcgacctccccaattctctcgacaaccttgaacggtccaatatacctcagggataaatctcgttatgccacggacatgagtaactttcaagaagacataatcactaacatcgaactcaacttcccatcgacggagatcgacatagattttctgatgactctgaacaaccttaagtatttcttaaattcccttaatctttttagtggtactagtgataatttggagtccaatactgacatggtcatctggttctgcccaacacaatnnnnnnnnnnnnggtcttccatataaagcctcataaggagccatgcctatacttgcttggtagctattgttgtatgtgaattccaccagtgataagtgttctccccagctacctccaaaatctaaaacacaagaccgaagcatatcttccaaagtctgtatggtcctatcagattgtccatctgtctgtggatgatgggcagtactcaa

SEQ ID NO: 136904 - DNA, 1250 bp, Cannabis sativa
cttggacccaaacccaaaccgagattgaaacttgggaccaagatctggtctgagatcttgacccaaacccaaacctagacccgcacctggggcccaaactcggacccgcacctgagacccaaactcgaaccttgacccgaacctagatccagactgggatccagacctagacccaaacccagacctagactcggaccaaaactcataccccgacccagacccaaaatagatccgtaaccaagacacaaaatccgagtgtgggtcagtgttttagttcgggtccgagtccctatatagttttgggtctgggtccaagtccttgtcttggccttgttctaaagtcccgatccgcttctggtttcagttccagtttcaactcatggggtacgggtcgagtccaagcatctagtcccggatcccaagtcttgaggtgggtcttaggttcaggtttgggtctgggtccgatcccaaatctcgatccaagttcttgtcacagtttgggggcccaattcctgggtctgggtcccccatctatgttcgggtcctaggtcccgatcgaggtctaagtttatgtttcggttcaggttcaggtctcgggtccccattcgagtccaggtctcggtttgggttcaagttcgagttcgggtcccagtactagtctgagtctgggttttgggtcccatgtaagagtttggttcttcggtcctgggtctgatctcgatttttaggtctaggtttgggtccgggtcccgatcttggtctaggtagaagtcttggtttatgtcccaggtcacaggtctaggtccaagtcctagtatggattttggtttgagtttgggtcctgttacagtcccaggtctgggttcctgtcccagtgctggttagattctgtgtctggaatcaggtctggatcccggttttggtccgggtttgggtacggatctgggtttgggtcctggattcaaacactgactatgtgtatggtcaaagcctcaggtcaagattaggatccctatcgtgtttcagtttgggtcccgggtcccgggccgagtcctaagtttgggtttgggttcaggtttggggttgggtcccgatagttaggtcatatgttctgggtccaagggcatgttctgtgtcatgagtctagggtcaagtttcgcgtctcggtcgcagttctggggcctagtttcgggtccaagtcccccatctaggtcgagatccttggtttaggtctgggtctaggttcgggt

SEQ ID NO: 136905 - DNA, 1868 bp, Cannabis sativa
gtcattatagaattatatttacttgagttttactgcagtgttcattgatataattaattccaatagtttttcctcctagtgttggttcgtaattagttttggtcaagttactatattacccttctaattacttctttattctttagtattgttaattcactagtggaagtattatttagatcccatctaaattaatgcccaatttctagtttcagaataaacacataaagggaactaacattcaatctgttagaaaagtcaaaattccactattgtagatcatgttcccagccatcctcgttattagatttccaaaacaaaagttgtaagaatcatcttctctgagaaactttaacaagtaaatcaaagaaactaataacataaacaggagttcatgattacttaggatttagactgatctactattgatcatctttatgatataaattaggtttttttttggaaaatcaaaatctgtatgttatcctaattttgcactatgacgtggcacttgactgggtgacacgtgtattatatttcataataacatgggcagatggttttactcctagcagccaaaaagattgatatgaagctcaaagtcataaatgaatggcaggatgttaaacaaggttactggtggacatccgaccagcttgaccacgtaggtaacttgcatgcaccgactagggggtacgagttagaaattttagagatggacatcgttatttccaagcttgcatgtcacgaagacaatccctatatttgtgagattaatgcaaagaatcaaggcaattagcttagatttctcaatctctttatttgtaattatggaaatatactaactagtttctttttttatttgttacagattaagggaaaccatttttcatgtaattagcccctataaatagccgtctcatcttactattcagtgacacgaattaattcaaagagaaaacactcaagagtgaaatctcaaactaaaagtgaattactcaaatatcattgtaagaactttcgagaaaggatagttcattctttctcacaagttaatacagcaaaaaagaaagtaggctattaccaactataaggggccaaacctttataaatctggtgttttctttactttatgctctttgctttcgattatttattctcatcgctttaattaagactccctattgttggctaaaaatgaggttaatattttggtgctttcattgagagcaaagacacccaaattttttgtcttaagtcttttacaagaaacaagatggttgtgcaaactcaaaaggcgaatcaaactgatatagtcgatccaatggtgataaatcttagcgtgcagacacctggaaacccaagagtgttggttttatggtactaaattaggtacttagtagaagagtttcgtattatctaattatcatcgtaaccatatcccattggatctctagatttttgtacattaaatcaaaacaataaaaataataagtttagagtgtacctcttcaaatctatagggtatcctcgaaacttctcgtatgttgccgttgtatcccttaattcagatgatgagaaaattgcaattgaactcacatcagtgtgttccaaatcaatctaccacacacaaagaataatgtaggttattagaattaagtatataacatttgttcttgttgagttctcaacacatgagaaagaacgatttgagagagaaaataattttttcagctctctatatttcaaaaaatagcaatgttctgggagtgagaagtgttttttgattcctcaaatcagacttgtatttatagtagttaaatccctttaattaaatcatatttattaattatttaaataaataaata

SEQ ID NO: 136906 - DNA, 763 bp, Cannabis sativa
gtctgttatcgtagtaacttacattgaagctattatgttgatctaatgtaatctttagcttagcataaacaaaacaaattgcagaaaataaaaattgtacattcatgattggtcatttgacctgagaattttttaattttatctgaacctttgggcgtgttctgcccagaaggccattcacttaagagtaaatgttcttttgtttcgtacttgacgtggtcatctgacctggtactcttactggtagaattttattaagtgttccccattccagtaacttggtactagaaaaagttttgttttttcatcatacttaacaagtttgtaagcttttaattcttggacttcgaccacctgatatggcccttcctagtttggtccgagcacacctgtcgtacagtctctggtgttcaaaaatactattcttaggaccatgtctcccacaaagaaatttcgttctcttacttattttttgaaataccgagctacgttttgctgatgagctatcaatttcaagtttgctgcagttcgtttttcttcaacttcatctagtgattctggaaggagtgcatgattaacctcttggttgtgtgtcaatcttttgtgggacagtggttcgagttctacgggcagcatagcttcataaccatatgccatggcaaatggggtctgtctggttgctattttctcagttgtgtggtatgatcatagtactttaggaagttcttctagctagtttcctttagcatcttcaagtcgtttc

SEQ ID NO: 136907 - DNA, 753 bp, Cannabis sativa
ccaagcattttgcaaccttgcaacctcaaccttaaaaccactcacacacccaatagcacatgatgcacaaacaacacatatctaaaaaatgaatcaaactctagaaaccggtttttgacatgttttaatttaggtatgatcaagttggtttttaaaggtataatcaagttgaaaaaactgatttttaatatgtgcattattttgtaacctcaacattaaaaccactcacacacccaatatcccaagctcccaaacaacccatgtatcatccttaacccatttttaaagtatgatcaagatctagaagctggtttttcatatgtgttttattttgcaacctcaaacctcaaatccactcacacacccaaaaggccatgatgcccaaacaacccctgcatcatccctgatcacaccaccataaccaacaaaaactcgacaatgacaaccattaaaactaatttgaaaaacaaccaaaaaaaatgaaaacactaaatatgtgctaaaaagggaaactaataataaagtacatatgaaacttgaataacaatttttttttaaaaaaaaaaataacacagattgtaaatacccaataataaaccaacaatgaacacacgaaaaccctaaaaaccgaaactactaaaatcaacaaataaaacacacaaaaaaatcagattctagaaattaaagaaagtttataaccaaaaccaacataaatcatacccaaaaacaacaaaagttaaaaaaaaaaaaaaa

SEQ ID NO: 136908 - DNA, 685 bp, Cannabis sativa
taatggtaaaggtgaggaaattattccatgttttcttgttctttggaaatctgatgagtacctaaattttgtaattcaagtgtgcgtttgttattgtctgatttccattgtcaacgaacaattccaccatcattttggttttgtaattgtactttccctgttatgaaaattgattatctaaataaatgcaaaaccaaacttcatttggctctcaatcatttcattgtctcacttattcaatctcaggtaattacaacacaactccgtccataaatgagaaggagccttccagcaatggaggatccgatcacattgcagcacagacgtttacattccgtgagttggcagctgcaactagaaattttagggcagaatgtctcttgggtgagggaggttttggtcgagtatacaaagggcgtttagaaagcactaaccaggttagtccagtgcaataatacggttaccattttatgaaaaaaactaagacgctaatttaccttcttaatttgtcaatatatgtttttttttcatgcttttcatcttctgagttttggtccaatttatttacagaggccaccagttatggccaccagttatggcatagttatctcagtttaccttaatttgagtcatttttgggcggtgtttgtattgcaagctgactgtggattctgttattttgtgt

SEQ ID NO: 136909 - DNA, 534 bp, Cannabis sativa
agtataggcatggctccttatgaggccttatatgggagaccatgcagatcgccattgtgttgggcagaaccagatgagcatgtcactagtggaccctatattatcactagtaccactgaaaagattaagggaatccaagaaagacttattaaggttgttcagagtcgtcaaaaaagctatgccaatctccatcgacgagaagttgagtttgatgttggtgattatgtcttcttgaaagttactcctatttgtggcgtaacgagatttggggtgaaaggtaagctagccctgaggttgaccttttgaggttattgagaggattggggaggtcgcttaccgattaaaattaccaggacagttgggacatgtttataatgtgttccatgtgtctatgttgaggaagtatactccagatccgtcacatgtcattgagtatgcagatatccctcttcaggaagatgtaacttatgaagaacaacctgtcaaaatcttgacaagagagctaaaagtgttaaggaacagagagattccagt

SEQ ID NO: 136910 - DNA, 1212 bp, Cannabis sativa
tcacactggatctgaagttccagaaagcaaatttgctaggaattgatttacctagagaacaatgggttcaattcattcttaatagtcttcctcttgagtgtataatagatttttgttgtatcttaaatgatcaacaattttaactcatccgaaatggacaagctagaagctgaattgcgtgcttatgaatggagcttacctgtaaagaggccaccctccagttttgcaaacttaggtaagaggaaaagatttaagtatgaagcttctaataatgctgcttcttcaagtacaaatggtgaaacaattgatagtagtactcttcaatgttcaaattgtaatgagaagggacatcaggaagaacgatgtcctagacttctaaacaattcgaatgaaggtaatgcttttgtttttgaatcatgtgttttagagaatcacaaatccttctggattgttgattctagatctactaaccatgtttgttcttcattgcagctgcttaaaacttggggttatttaaatctaggggagttaaaggtcaaagttggaaatggggaattagtatcagtccaagctaaaggaaaagcccgcctcaagtttcataagaaatttttagttttagacaatgttgtttattttgaattttagtagaaacttgattagtgtttcatatttacaaacacaattttatcaattgaatttttcaagttctatttgcactatttctcataatggatttcaattatgcaatttttacatggaacaagggctttatgttttgagaccgaaaatacaaatcgcacttaacaacgaacttttcaatgttgctaaacctagaagccataaaaggaaaagagatcgatgaaaatgatgaaacatatctatgacatttacgattaggtcatataggctatgatagacttcacaggttaaccaaaagcggtccattgaaaaatgtcgtcttgggtgaattaccagtttgtgaatctttcctagaaggaaaaattactaaatgttctttctctacaaagggagagcgtgccaaacaatctcttgggctagtacattcaaatgtctgtggacctttaaatgtcaatgtcagaggaggttatgagtattttgtcactttcattgacgatttttctagatatagttttatttacctaatgcaaaagaaatctgaaatgtttgaaaagtttcaggaatttcatgctt

SEQ ID NO: 136911 - DNA, 640 bp, Cannabis sativa
aaaagaatttggtggagtcaaacgtaaacgttctgtagctgagttaaattggtcaaagaagagtatatttttttagctagagtattggaagggcgtgtctctcctacataatcttgacgtaatgcatatcgagaaaaatgtgtgtgaaagtatacttggaacttcgttaagtatcgaggggaagtctaaggacacagaccaggcaagactggatttggaggaccttaaaatacgtcgtgatttgtggttatttgaagaacgtaatgggaatttgaggaaaccgcatgctagttacacacttactcttcctgaacgacgtttttgcggatttattatgtctgtgtagttcccagacggattcacttcaaatttagagaaaaatgtcaatgagactgaagataaaattttcggtctgaagtctcacgattttcatgtgttgctacaatgcttgatgcctggtggcattagaaagttcttcaagaaagaagttagggataccataactgagttctgtgtatttttccagaaatggtgctgtaagacattgaatgttacagacttgcagatcatgcaaaaaagtattctagacattctttgcaaattggaaaccattttcccaccagcattttttgacataatg

SEQ ID NO: 136912 - DNA, 1239 bp, Cannabis sativa
  modified_base (364)..(364): a, c, t, g, unknown or other
  modified_base (734)..(736): a, c, t, g, unknown or other
taatgtagcgctagaaattgtaaatgaagacaaggatcttgaacctgaatctatcaaagaatgtcaaaatagaaaatattggccaaaatggaaagaagcagttcaagcataattgaattcacttgctaaacgtaaaatatttggacctgtagtctaaacacctgaaggtgtaaaactcattagatacaaatgggtatgtgtacgtaaaagaaatgacaaaaacaaaatcgagagatacaaagcaagacttgtagcacaaggtttttctcaaagatcaggtattgattatgaagagacatattctcttatggtagatgctataacattaagatatttggttagcctgactgtgagtgaaaaactngatatgtgattaatggatgtagtcactaacaagccttaatttataggaatcaactagatagtgatatttacatgaagatcccttaaggatttaagatgccttatgcatataattcaagcaatcgataaatgtgctcaattaaattaaaaagatcattgtatggattaaaacaatcagtacgcaattggtacaatcgacttagtggatatttattgaaggaaggatatacaaataatcctatttgtccgtgtgttttttataaaaaattcaagttctgagtttgttatcttagttgtttatgttgatgatttgaatattattgaaactcctaaaagactttcagaagctgtgaaatatctaaagaaagagnnngaaataaaagatttaggaaaaataaaattttgtcatggtttacaaattgagcattgaaaatgtagaattttcattcatcattcaacttatactgaaaagattttgagacgattttatatggataaatcacacccattgagtagcacaatggtagttagatcacttgatgtgaaaaaagatcttgttcgacctagagaagaacatgaagagctacttggtctagaagtaccatatcttagtgcaataggagcattgatgtatcttgctaactgtacaagacctaatatagctttctctgtcaatttgttagcaatatttaattttgctccaacatatagacattgaaaagggatgaagcacatacttcgctatctctaggatactattaataaaggattgttttattctaattattttgggcacaacttattggctacgcaaatgtaagatatatatatatatatacatatatatatatatgatccacataaagctagatctca

SEQ ID NO: 136913 - DNA, 659 bp, Cannabis sativa
  modified_base (610)..(633): a, c, t, g, unknown or other
agtgaatgtcataaaaattagaaaactaattaggacttttgtccccgaattttgacatgtaccaaattatgctttcataactttttaggccgttcgaaatttcttctaaactatgattgttggattaaaggacttctttccaattttactaatagaattctaacgtaaataaaagttcagaggacacaatttgatagatgtcaaagtttaaggaatatttcgtagatttcaaagtttggaagaacgatttaatacataaataattgttgtgttagtaaaattagacagaattggatataagtctttaaatctaacaatatcaatatttcagagagaatttataatcatatttaatacatagatataatttaatacatatcaaagtttaggggaaaaaaaatccttagacaaattaaaatatatattcatgattaattaatactgaatgtgacaatgcatgatttgctatgctattattgagtaaaaaaaatttagtttaatgtatacacatatatattaattaaaatttaaaataattaataaaatgtagaacatgaataattttttttgggattatcccatatactaatttttttaatttttttttttnnnnnnnnnnnnnnnnnnnnnnnntaaagtggttgcagcgctaattgcaa

SEQ ID NO: 136914 - DNA, 674 bp, Cannabis sativa
atatatatagccaaaatccatgtacttatcctcatttctcattaattctctccgactttatttatataaatatatatatatcctacaaatttttaaagttttatttttaaaccgtagatacatataaatatatattagactgaaattatataccctaatcaattaagggccatctagcggttttacctgacaaggcttaattattaattattttcaagaaattgaggtacgtgtgtgtgttgatctttaaggtgtttttttttttttggtaatatgatataaatacattattgtaattggaggtaatacgtgtgtggtcacaatagttacatgaatatgtaacgaaaggtggaaaaaatagaataagcttggaaaaaacgaaaagaccaaaagatatatactttaaagttaaaagagcctcataattattatcctaaccttaatattttattgatgtatagtgatggttgacgtctgaaacctacattttcttgattgacataatgacggatggtaagattgtacagataccatacttaaaaatttaaattcaaatctacataagattaaaccataaatttctaaaaacatttatgtattgcattttgattttctgaagatcaaaacacacgagcttctaaaagaatctcatatagagatttgccagaagagaa

SEQ ID NO: 136915 - DNA, 786 bp, Cannabis sativa
tatttttaaattatataatttaatatacaatttggttacctctaaaaccttatttgtaaacatcttaataattagctaattctaagttaaattgtgatcttattatttaaaatatagttgggtaatcttaatgtttatttttgaaactaatgagttcttatataatataataagctactatttttgtttaccaattattttatatacctttttgtgactttgaaacttatgtgtttgtttttagattatattaaattaatttattattttaaatacttttatgttacttattttttattttacttttgtaaaaaatatttatgttactttcaaatctatttaataaaataataagttacaataaattttttttaaaaaaaacacaaattagttttgatatagtataacaaataaggatagatatgaaataattttatttagtatactccataataatatttaaattaattataatttggataatataccaattagttacttttcataaaaggattcattttaaataaaaatatctcatgtagataaacgttaaattttaaattagttattttaaactatatcatcatctttgctttaaattatgttcatttgtgttatattacagtatcttattatttaaaaaataagagagaaagaatttttttttttgaagttgaagagaagagagaaagaaatatttattttattttattctttttatgtatagttatttaatttttttaattttgcaagtctgtctcttaaataaaaaacaaaagagaaaat

SEQ ID NO: 136916 - DNA, 801 bp, Cannabis sativa
  modified_base (117)..(118): a, c, t, g, unknown or other
ggtagaccggatgctgcaggcttcactgaatcgaaattccggttcagtgcatgaaacaaccaaaacttcaaaactcattcaaatcaaccccaattcacaccaaaacttccagacctnntctaaataccccaataaacatttccaaagcatcaaaaaaaccaagaaatcacagatatgaaaaatgccatgtgagctctaagctttgagttcaaaactcaaacttggctaaagctcacctacatgcattaaaacctgatttaaactactcaaatatgcatataaaaacttctgcaaacaatggaaatcaaccccaacaaacacaacaacaaaactcatcaatttaccttgaaaatcatagttttagagccaaaattctaaactagcttaaaaccaaccaaacatgcatcaacatcagtttcatttcactcaataaagcatgcttaaacttctgaaaacaacataaaatcacagcagcaataactagtggcggaactatgttgatggatgctggggccatggccccccctaacttcaactttgtggtttatatataattaaatatataatattcttttcaataaaaaatatatgtgacattaattattatacacatatttaaaagttaattattttgaagttcttattttattctttctaaaaatttactacttggcggatctaaatgagtcagcaggtatttaaattaccttagactagtccatttcgttttgtaatatgaccttaaatacaattttttaagtactattgtttgttttgtttttttaaataataaaaataaaa

SEQ ID NO: 136917 - DNA, 588 bp, Cannabis sativa
aacatattcttaatttttatgtacaaactatatatggtaaaaataaataataaacatacatgttttatttaaaaatttgtatttaaattttgatagacacattatattaacatatcatcacatacctagtaaaaaaatatatatcatcacaaacattatcataacaaatatattatattaataattaataaacattatcaataataatataaacataatgtttatacataagaccacatttaattacaatttcttttattttcttaaatacattttttaataactaataaacataagtgttatttaaagtgtttatttaaataaataaataaataaacttaaaatgttcaattttaaaattattatgatattttaataaacaaattatatttattatcataataaacatactagattaataataacattataaacattaataatattaatcaaatatttaataaacatatgtatatggattgtttatagaatataaataaaatttataaatatgtttgtatattctttttttaattttatattaaattttagtaaacatattattttagtaatatatcaaaatataaa

SEQ ID NO: 136918 - DNA, 929 bp, Cannabis sativa
ctaagttctctcttatgttcaatggaaccttacatggtttttttgaatctaggagaggtcttaggcaaggggaccctatgtctcctctcctatttgttctgggtatggaatatttctctagattaatggggaagataggggagaaagaagatttccatttccatgatagatgctcggatcttaagatgaatcatttggctttttctgatgatgtgttacttttcagccatggagatttcacaagtgttttatacatgttacaggcactcaagctattctctcttacctcgggactacaggccaatgctagtaaaacaactatatattgcagtaacatgcaacaggggagtgtgaatgagctgctgcaactatctggatttatgagacaagagcttccatttacatatcttgggattccaatttgtgcaaggaaaatttcagggaaagaatgtgagattctggttgaaagaatgacagctagaataagaacgtggagttcaaggaacttatcttttgctggaagaattgcactaattaactctgtgcttattgcaatacaagcatactggagtcagattttgattatgccaaaaagaattctgaaatccattgaagatatttgcagagcttttttatggaaagggcaggctattttccatggagcaggggctgtttcttcggacaatatttgtcaatctaaatcttcaggtggattggggatcaaaaagctagaactttggaacaagactgcaatgtccaagtacatttgggccattacaaataatcaagaaagcttatggctcagatgggtgaatagtgtagacataagagatcaagattggtggggttacaacgcttctatacactctagttggtactggaagaagctgttgggttttatgccgtaaataaaactcatttcatataat

SEQ ID NO: 136919 - DNA, 680 bp, Cannabis sativa
attatattgtaacaaaaatgaataaatatattagatcattaaatatatacagcagtatttgatatatcgtagtactgaaaactaatataccgtagtgtaggattttaccactttaacctgcaccaacaaaacacataatatcagtgtccaaggtcaattttgacctttccttagtctaatgaattttagacaacaaacggtagcgttttaaccctacgacactaatccctgtgtcgttttatccctgagcttaaagactcctcaagaaaagtctagaagccctaatactcgaacacaactcacacttagcctctcagagcacgaaacccaaaatcacacccacacacacacaaaattagttttagcaattgaaaaacaagagtaagggagagaaaacaccagaatttgtttcagagttcacccaaaatctgggctacatctctgtcaagctcatctcagagatctagcttgatatccactacaaaaatgtctatttataagttttggagcttcctgtcacataagaacgaccaggtaaactcgattttatcttttgtacaatttctgcttttgttttctttttgatttgttctcgatctaactcagtttctgtttgttgtgcatgtacttccttccctctgattcctcaccacgagaactccattctcgtctctggatct

SEQ ID NO: 136920 - DNA, 782 bp, Cannabis sativa
ggcacaaaacccaacaacaacaacaacaacaaacaaggcaatgggaaaaaggaaaagttcgctggcaaagccgaacagagccctagagaaaatccttcaaaattcacttctttctctttcttgactgacgatttggagaccatctacatggctactcagttagtagctccgtacaagaagcctgctcccacaaaaaagaacataaagagggacatgtccaagttttgcctccttcatggagactatggtaatgacaccaatgaatgctacaatttgaagcgagaaattgaatttttgataagaaagaataacccacacgtgcaaaaatatttcaaggccggtcaaaattagagggccgcccatgcaggaaataaccaatatttactccaccgccagttgatgggcatttgcaaatcatcattgggggcccacacatagctggagattcaggcaatgcccaggaaaggtatgcccgaaccttatagcatgaggaaaaagaagtggtcctcgccgtcgaagaaaggaaatcgaaaatgccacgggtaggggaacccaccataatatttgatgcagatgatgctgtcaaggttaacttcttgcacaacgatccgtttgtcatggaagtacagatagccagcaaaacagtgggccaaactatgatagataatggagcctcagcaaatatcttgtttaaaacaccatatgaaaaaatggggctccaactcaaagatttaaccccctgtcttcagcccgtatacagtttctccagccagagtgttgca

SEQ ID NO: 136921 - DNA, 647 bp, Cannabis sativa
atcttcgatcattgtaggccaaagttacacttttctgagtattttctttacaggctctgccccctaacgtgattgccaaaaaaaccttcgtgaacttcaagcattagccgtgtagtttcttctttggtgacacaccttaagagtgacattgaaaaactttgacgttacatgacttcgtttggtatgatatacacggtagctttcctcataatcttccttgcttcatttatgtcttctagcagaaccttggacaagatttatgctgctattagtgtcattcaagttgggctatcatctagcatatctatttgttttggtatagagatacttggatctattaggtactagatagggaccaagttggtcttgtttgttattgtgctactggctagccgggcaagaacatctgctattgaattttcttctataagaatttctctgattgtgtactccttgagttgacttattaagtcatgtatcttacgtaggtaggccatcatcttttttcctcgagcagtgtattcacctagcacaaaattttccatgagttgggagttgttgaatatgtttaggtactttgaccggacctcgtgttcaaattttatttcgaaaataagagcttcatactctgcttcattgtttgaggc

SEQ ID NO: 136922 - DNA, 663 bp, Cannabis sativa
ccactttgtaaaataatcaactgcaaccactgcataatgtaccccgcccttacctttgggcaattgtccgattaggtctattccccaaatagcaaaaggccaagtactcttcatctaagttagctcattgggcggtgcacgaggtatttttgaaaatctctggcatttgtcacatttctttacataggcctttgaatcttccatcgtgattggctagaaatatccttgccttagtattttcttttatatgctttgccctgctgcgtggttaccacaaaatccgtcatgtacttcagacaagagttgtgcaacttcatctgttgttacacatctaagtgatggcatggagaatcctcttttatacattacaccatccacaatgatgtacagtacaactttcctcatcatctctcgagctttgtttctatcatttggaacttctccaatattgaggtaggctcctataggtgtcatccagtttggagttgtgactatcgtttcgatttctttctcacaattgatactgggttcttctaagaattgaataggaactagatgttgggctttgtgccctcaataaaactctatttcaatgtaatcttttctattcaattatcaataaagaaaaagatttcattttcattacttatttagtatgttatt

SEQ ID NO: 136923 - DNA, 618 bp, Cannabis sativa
  modified_base (425)..(430): a, c, t, g, unknown or other
  modified_base (569)..(569): a, c, t, g, unknown or other
tacttgattgcgtacacttgtgtaataaccataaaattcgtaacagggttaccttagcttgatcctccttgaatcccttgctgaaatcaccaaatttcagcaacaaaacccccttgttctaggctggttcgaagagagagggaaggaaagagagctcttcgatctttctttgacttttcctttagcttttcttattttctctaactgaaaagggatttctacattaatcctaggctaaaattaagtgtccatgtgtcactcacctagccagccaccaaaccaccatttaaaattactaaattaccctttaggttataacttagacatttctcaaaactaggggtaaaatggtcaaattccataaccccccttaaccctggtatttccttttttccaatatatatcccactaagaaataaggttcnnnnnntacccatgtgatcaaactagtcatccatcgcattttccgttgtcgccaagcaaaaattttaaaaattgcataattcacatataaatcaaacaatactccaagagtaataaaatctccagaattgagaaattataactcnaatgcccatttctaacaatggggctcacaaataattaaattcataaata

SEQ ID NO: 136924 - DNA, 1148 bp, Cannabis sativa
acgagattgttgtgaatacctttatataatagtaaaatttgagctcataataaggttatacatttataaggtaacatatgttgcccatgggagattgttagattaaaaattctattgtggcacatatatataatatatatatatgctatttataaagagtgattcaaatttaagaggctaattatgttatgggtatcaaaatggtattaaattattatagaaataacgtgtagttagcataagttaatttataatttgttgaaaactcattataagatgagtctataaataggtagtggtcgacaagaaacactagggttttctgtattctcttcttcctcatcggagaaaatattcagaggaatagtgtattcttggaagatcataaccttctgtccaatctccaacaatgacttcaggttagtactttcgctcatcttattaccatcttcttctttttttgatttagcaaagattttataaaatatgatttaagattttttatattaaacaacttttagaaatatgattaaatctgtgattatttgtatttcttgagtattttataaattttgacataaagatttaaattattgcattcttgattgaggaggatatgtagagagggagaaaaaccatcaaacttaaggaagagaagaccttgatgagttcacctcttcttcacttgtagcgtaccaaggaagtgaagagggaaagaaagatcaagttttactctttgtttggtaaggatggattgtgtttgtacctaaaactggaaagaaattctaaaatgctgcaaattatccttattttaatgaatatgttacttttactataattttctttttacccataaaagtaaaccataaaaataaaagcactttggacaatataacccttattcaaaattctaaaatgctgcaaattacccttattcacatccttattagatttaatcacaattctaacataatcattagaataagcgtaatttgcggcataacctccttaagtaaacacaatcatccttaccaaacaaagagtaatttgtacctaaacccaagttctgttagcacttagccttttccatccatttttggctgttaagtgccatgtttggaatgtctacgtgtacacagtgtacacgt

SEQ ID NO: 136925 - DNA, 501 bp, Cannabis sativa
  modified_base (390)..(390): a, c, t, g, unknown or other
attacgtggaccactaaaaatttgacacgtgtacaagagtgtacacgtggacagtccatcgtggcacttaactgtgatttttggacgaaggtgttcagagtaaaacggaattagaatttaggtagtttagccgccaaaccgtacaagtggtttagtcgccaatatcccaaaaattaataacatacaattgacatttaaagagtacaaattcaagttatacttatatgtatatactaggtggtcaaaaaccattaaaattaatagattaatcatattttttatttttattaattatatttaaaaaaacagataaaatatctaattaaattagtagattagatgtaaaataaaataaaattctaatcgaagttactaaagataagtacatantaatattagtgctaactaattattgggtaccaaatcaatatggtattaaacacctcacatagcaataatagtacaaaaatcatttaccaaaaaaatagtacaaagattatt

SEQ ID NO: 136926 - DNA, 1083 bp, Cannabis sativa
caatctaggtcaaaattctcacctaggtcagccccttgcatttttttaggatatcctccaggtgtcaaaggttacaagttgcttgacttaaacaaaaatctcacttttatttctcgagatgtttatttttatgagcatatttttccatttgtttccactggaggtatcccccctgcctatgagaattttttttctcattcaccacacaatgcacaaaatctggcagaattttcatctgttcttacaccagaatttacaccagctgctgcagaacactcgaattcttctgttccagcctcaggtgagttgtctcaacctgaatttgttgagccaactgtaatttctgatctaaatgctacaccagatttttctcctaatgatatttcgcataccagatcaggaagagcagtcaacaaaccatcttacttgaatgaatatcattgttatcttgcttctaacaatttatctaagattgctaaagtctcttttgtcaccactcaccctttatctcaggttattggttacaacaagctgtcttcagcatttcgagctgctgttctggccattttgagtcactctgaacctgaattcttccaccaagctcatggaatcccggtttgggataatgctatggacactgagatagaggctctagagaagaatcatacatggattattgtctctctacccgaaggacaccatgtcattggttctaaatgggtttataaaatcaaactcaatgcaaatgggagtgtagaaaggtttaaagctcggttggtagctaagggctacaaccaacaagaagggattgactagatacttttgccccggtgactaagcttgttactgtgaagttagttctctctcttgctgccattcatggatggcatttacatcaattagatgtaaacaatgcctttctacatggtgacctccatgaagatttgtataggtctatacctcaagcgtatagaccaaagggggagttgccaccaaatgatgtctgcaagttgcaaaaatcattgtatggattgaagcaagcttcaagacaatggtttgcctattgggttttatgccctaaat

SEQ ID NO: 136927 - DNA, 1411 bp, Cannabis sativa
  modified_base (45)..(53): a, c, t, g, unknown or other
atatagttcctcttcttattcttattgtcttccaatgttcctctnnnnnnnnnatctgatacctactcattactcccttcaacagcaggtgtctggtctatggcatactaaatctatgtctttgttctcggtcccaatttttttgtccgtgtcccgggtccaagtcccccatccaattccgagtcctgggtttcggtccgagtctatgacatggtcggagttcaactcctggtccaagtttggatttgggttttgatctcggtatgggtcctaatctaggttcgagtcttggccatgtttcgggtccgagtcttgagttccgatatgcgtctgggtttgaggcccaagtctaggtccctaattcggttctggctcctaggtcccgatctgggtctatgtccgtgtttgggtcctattcccaattttgattttgattcaatgtctgggtttgggtttaggtccgggtcttgtttggggtctgtgtcctggtccgagtttgtgtttggctctgggtccaagtctatattccagattgggtctaggtttaggttaggtccgagtgcaggtccaggtctcggttagggtcagggtctcggtatggatctaggtcccgagtttcgatccaggtctgggtccaggggctaggtctgagttcggttctaggtgggtctaggtccttgtcatggtcttagtcttttttgaggatcctcgtctggcggttcttgttcaggttccaattttgggtcacgggtctaggtcaggggccaggtttgggtcctggcctgggttcgagtccttgtttgagttccagatctggatccctgtcacgtgtcccgatcttgttctagttcaagtcttggttcccaagtccaagtttggtttcgcgactgagattggggtgcggttctcgatcccgacccaagttttgtgtcccgagtttggttcaatgtttgggtcagatttcgggtccaggtttgggtcttgagtccaggtctgggtggggagccggggctggttcccagttcgagtctaggtcaaggttggagtcttggtcatggtccgactaaggttccgtgtcatggtctaggtctggttacggttccaagtccagatccaagtcttggttctagtcccattcccaggtcctggcctacttacagtttcggttccaattttaggtcacaaggtacaggtttgggtccagattttaatatggtggtgggtttcggtccgcgtctgggttcgggtccgaggcttgtcccagatctagacaccaactacgggttcggtccaagccaagccccggttccagatccgtatcccgatcacggatccccacctgattccattttgggtgccgggtcacgagctgggtcctaggttcaagtcaaggtctagggtcgggtattgg

SEQ ID NO: 136928 - DNA, 502 bp, Cannabis sativa
ttttggtttaaagtatgtaatcatttcgtatttcgtgtgtatatagtatacaataaggtgtgttgtctataaggatttttgtttgtgtgtgtattgtataaatgtatattgtgcatatttttgtatactaaatgtgtgtatattgtataaattaatgtatattatgctctctaatttgggatgtatacttagattaggtgtatgggtgtatgtttgtaaaattgtatacgtaatattttagaatatatgtatattgcaagtgttatttggtttgttatttattaggttagttttttgagtgtttgtttgcattatgaggctgactcgaatttaaatatgtatagtatacagtaaggtatattatttataccgatttaatttttgtgtaaatcttattagataatgtatattgtataattcgattttatgatgtatacttagatggattgaggaataataatgtatttgttgaatatgtatacaagatagtttataatatttt

SEQ ID NO: 136929 - DNA, 2119 bp, Cannabis sativa
  modified_base (729)..(729): a, c, t, g, unknown or other
  modified_base (1835)..(1835): a, c, t, g, unknown or other
atccaggtctgggtcccagttcgtatttaggtttgagttggagtctggtcctggtctggttacggttttgagtctaggtctaggtccggttacggttatagatcccattctcgggtcccagtctacttccggtttcggttctaattttgggtcagaggttacgagttcgggtctaggttagggtctgggactgggttcaggttcgggtctagttagtgtcctggtctaggttcaggtcctgggttggtcaccagatgcagacagcggctatgggttcggtccaagcattgggtccagatctgaatcacgatcttgggtcccaatttggttccatttcgggtgccaagtcacgagctgggtcctaggttcaagtccgagtcgggggtcaggtactaggtcttggtccttgttccggttcctaggtccctatcccaattctatgtcacagtcccagttctggtttgggtttttatcctagtctaggttcgggtttgagtcctagtcttggttcagatttgggtctcggtctgggtttttatctgggttcgggttcgggtttaggtcctggtcttagtccgagtcctagtccaattctagttctagttgtgattcggagtttgagtttggattcaagttcgggtccgggttcaatccctggtctgagtttgggttcgggtctggatattggtctaggtctggatcaggctccgggtgtgggttcgggtcctnggtgtgggtccaggtccaggttcaagtcccaagttttgaactggatctgtgtctgggaattctaggtgtaagtcctgggttgcgatctcgatttgtgttcgagttcaggttcaggtccagatctatttttgggtcttattctaggtcaaggtctgagttggggtcccgagttcaggtctgattttgagttcaagtctgggttcaggttttgtcctggtctgtgtctaggttcctgtcctggtttttgttcggggcaggttttgggtccgacttcggattcccgggtccaggtcaggtccttgtttgggtttgggtccctggtctagatcccccatctaagtccggttcctaagtcctggtctgggtccaggttttggtttgggtcccgagtcttagtttgagtccaggtcccagtctgggtttgggtccaggtctcggtcacagtcttggtctaggttcgggttctggtccctatcagaatccagaacctgatctaggtcctggtgagtgtataggaccaggtcaggtccaggtcgcggtacaagtttgggtcccaggtctcaggtcccagtcctagtcaaggtctcggtctaggtctcgtctgggtttgggttatcgtttgggttcggttctggtctcaggtccgggttctagtcacagttttagttctaattttgggaccgggtttggttttgagtcagggtctaggtccaggttggggtcggggtccgagtcttaatctgagtttaggtacgggtttttgggatcccatgctggatccaggtttgagttttgggtcccaagttcgggtctgggtctacattttggtcccaatctgggtctgggtcggtattctgttctaggtctaagttcgtgtccatgtctagctccaaatcccagtctcgatcaagggcttggtctgggtccgagatcaagtcccgagttcaagtttgggttcgggttcgagtctcagtcctagtctaggttcgggaccatgtccgggattgagtctaagctcgagttttagggcttggtcatggtctagtttgggtccgagtcttgtgttccgatctaggtctgggttccaaggcctaggtccaagtccnccatccaggtccgggtcctaggtcccggtctgggtccatgtttgggtttgggtcctaaacccagttttgattttgattcagtttctcagttcgggtttgggtctgggtttgggtcggggtctaactcctagtccgagtctgggattgggtttgggtccaggttcagatcccggtctgggtctagggtcatttcaggtttgattttgagtcccgggtgcgggtccaggtctgggtctgggtcaaggttcatatcaggatccctatctacgtccgagttagggtct

SEQ ID NO: 136930 - DNA, 704 bp, Cannabis sativa
cagaaataatcgtagtaaaagaaggagaaacaacacaaatctttttacgtggttttgcaattaaaattctgcatagtccacaagtctatcttattagatttctctaatacaaactaacgttctttctcctaaggatttttcgtccctttttcagtgtattctgcccctatttatagttacatagggaggtaattaattattaagattaatatcccacaacaatattcccctaaaattatgggatttgattacgtcccacgtaaaataaatgtggttattatttaaaaatcacatagctatgattcatccgcttttaccgggtcaatgctaacatggatttagatacgctgcaaagtgtatcttgctgggtcacctccctaggatagcaacaataactctgacagtgagttggagcttttcccatgtctttcgaggttgataatgtaaataccgtcgtttctgctattgaaggcataacgctccatctggcaatcgcaattcttggtgacaaggtgaacttcagtagtcaacatcacttgaatgtcagcttctatctaagagagctgactcaacggagttgtggatatcatttaaagatttctgaagctcattaatgaaggtaccatgagtataccttcctatagcgagatggatgtctcgctatccgatgtttggattctttcaactgttatgcttagtttgta

SEQ ID NO: 136931 - DNA, 1128 bp, Cannabis sativa
  modified_base (466)..(467): a, c, t, g, unknown or other
ttgcatcagacgaaagtttcaatcagacgatgattgcatggtggttgctaggtggttggccaaaggttgcatcagacgaaggtttagggtttagggtttaagacaaaagtttctgggtagttgttgggtggttggccgaaggttgcatcaaacaaaggtttcaatcagacgaaataactgttagcaaaatgtttatgtaactgtaatgcaactgttgtgaaacattaaaaatcagaacagtattttcatgtacataactctatctacatgtctttttataatttaatatgaacaaattcaccattagaaatttagaaaacaacaaaatataccaggataaaacattttactatagtattgatgtatttttttgggattatacttgagttggattgtttgggaactccaattcaactttttaagatctgccttttatggatttaaaaattgaagtcaggacattagnnttatgcaaattaaactggatttccagttgaattttagtttcgtaataatttttctacactttttttatgaatttgaaacagtctctcttttgattgattctggtcgtcttctcaggtgaagtcgccagaattaatgatggttctctttctgattgaattttcgtttcagttgcgttgggttgctgcgtagttacacgatagttgcgcgatgattgtgtgatagttgctcaggaagcatagatcctgggttaaaggtatgtgttagtggtaattgtgtaattttttagttgggatgtatatttgtttatttggccagctgaaagtatttttgtaatattgttattttttttttttggttaaaacttaaaaaattcctataatatatatatatatatatactagattgaagttacgtgcaaatgcacgtacatttagtttttattaatttcttttatttagtatattatactttttttttttatttgaagtatataataaattttaattattataataaactattatatatattttaattaaataaataatatcattttagaaagtaattaagtgtttaatataatgtatgaaagggaaataaaagagtaaaagtggtcaagagtataatagatcattcttattcttctatggtaataagaca

SEQ ID NO: 136932 - DNA, 738 bp, Cannabis sativa
  modified_base (392)..(396): a, c, t, g, unknown or other
  modified_base (604)..(604): a, c, t, g, unknown or other
ggtcacggtcctcttctttttctaaggtcctggtttggcgattcttgtttaggttctaattttgtgtcccaggtctaggtctgggttcgggtttagttctttgtttgggttcttgtccgagtctaactcccagatctagacaccgactactggactgttccaggccccgttacccaaatcctgagtcaagatctgggccactgtcacgggtttcggtatggttctggttaaggtcccaagtcccatttttgagtttgggtacgggatcgagactggggtgctattctaggtcccaacactggttttgtgtccatagtctggtgccatgtttgggtctgagttcaagttcgggtttgggtcccgagttcaggtttgggttgggatctgggtcnnnnncccaattcgggtctaggtctgattgggagtcagggtcctggtccggttacggttcaggatctaggtcaaatttcaattatgattcaaagtccaagtcctagttccagtcccggtcaactttcagttttggttccaattttgggtcatagggtacgggcttgggtccactttttgtatgaggactaggttcaggtccgagtgtgggttngggtccttgtcaaggttcgggtcaaggcctagatcccaaatgcaaacaccgactacgtgttttgtccaagccctgggtccagatctggatccaaatctcaagtcctagtccggttccatttctggtgccgggtc

SEQ ID NO: 136933 - DNA, 549 bp, Cannabis sativa
atatattgattgatatattgatattgattaattattattaattcacattaattattttagaaaatgtaaaaaggatataatatgtaaagttggaacgtttggattttatgatatattaatatattaattaatattaactaaaaaaatagagtaaaatatgaataaagatggaatatgtttgagtgattattgataagtatgtagattaaaatgctatcatcaaaagccatctcattaaagtcaattaatgagtttaaacaaataaataaaaaaaataagaataaatcaaaaaattaggagataagagattgccaaaataatcacaattaggctgccacatcaactcttaaaaacattcctttatatatatactaggcaactaagccgcgcttcgcgcggtcttataaattttaatttttgttattattgtgattacaaaatattagtactgaatgagtggtatattatacaatatactattattattttctcaaaatcatgtattttttgaatgaaacaatttataataatgaagacattatacaatat

SEQ ID NO: 136934 - DNA, 510 bp, Cannabis sativa
gttcttgttgtgccatttcgcgtgatgcgaatggtgtggcccacgcactagctaagtgtgttactagttttaatgggagtcatatgtggacagatgcttgtcctggatttattagtgctcctgtaacagttgatttgatttgagttaataacatactttctttaaaaaaaaaaaaaaaatgcagcacatcccttaatatgctttgccacaatgccactagtatacatatatatatatataaaaaaaatagcattaaacatgtgtatcgatcaagtcataattcttttggtgaatattcttaaggaaatttacctagtatgctaacttttgccattttatttaaatttaaagattaattatttatttgttaaaaaaatataaaaaaaaaaactaaaatattacatttgatcttggaaatcttctttgtgacagtgaaagatatatacttctcacataattatgtgtgtagtaaaatataattttttttaaaatttgcaaaaaaaaaaaaaa

SEQ ID NO: 136935 - DNA, 602 bp, Cannabis sativa
aaggggcgctgatgcctttgcataagtacttcagggatgtggcggacttctttggcctctgcccggcccagattactccaaagagcattaagtatttgtccgttctcttcatcctctacgcttcccaaggatgggatgctccttccccccacaaagtcgcctggttcttcgacctgaagtctacccccaaacaaggtaggtcggggtatttttacttctctcagccaggcttcaagtggttgagcggcacggatgacgaggccatcagcaaaatagggtattttgttgatgagtatttcatggtgaaggatccgagcatcacccggactcggttttagcagattccgacatatcaccgtcctcccctcacccttgctcttagggatagaggtcaaaaacttgcccggttgcgggaggaagacaggaatatcatccggttgtcctccgatgataatctggtgaagtatgggctttacctagaggacttttctcctaagtccgtggcagggaagaaggagaggtctgatgctggccggcctgaatgagctcataaggaggatgagctcattcaacttaagcgtgaagccaagttgaagggaggt

SEQ ID NO: 136936 - DNA, 522 bp, Cannabis sativa
accaatatgcatcattaacataaatcagttttcaaaattacaattaagaacgagcatgtgtatatgatgaagtaccttgacgcaatttcggaagttgtcttcgtaaaacagtgttgaccgttctcgttcttttgcaatcctcttcacattaaacgaacccagagttttttgctgcaaatgcattgttcattttgttaagtaacagaaattacaaccaaactcaattagtacaaaatttaaattaagttttataacaaaacaattactgagatgcgagtgggcatgtatcaaacacgaggttggtcaagtagtcggctatcatgttcgtacttgttcattagtatagaaaaacagtcaatgatctgcaacaacatgaaatatgatttagacatgtacaataaatgatacatatttagtaaccaatttcacacttacggacccctcaactcctcgcaagggtcgcaacgatgccatgcacctcctatccacttcaaactttcgaaattttgcaagcacatatct

SEQ ID NO: 136937 - DNA, 1118 bp, Cannabis sativa
tatgttgaaatgggttttatttagggcacaaaacccaacagataatttcatcaagaatattatacacataacaatgattactatcaaagctaactgtagtccatcaaccaacatgacattcttcagtctaggaagcccttcaaaattaagagttcctatccctatgacttttccaacaagaccgttaccgaaattaacttctccacactgcattggtctaatgttgtcaagataatctttttcatctgtcatgtgtctagaacaacactgtcaaagtaccacaggttagaagcaatagttttaaaacatgaagagcctacaaataatttattttagacaacccatttttgtttttgaaaaacatatttatttccacgaaaattagatttaaacatgttttgcatagtgacacatttaggtcgaatgtgaccttttatcccacaaaaatagcaaataggaatgaattgtcttctattccctttgaaattatcaaacttgccttgccgcttcttttctatattagcagagtgttttgctgaaataatagaaccctgcaaggtagagagagtacctccaaaaccaaaaatatcaaatttaacaaatttggtgttggaatcagattgagtagaaacataacctagaccagcatgactagtttgaccagaattttggatcttttcaaaaatgttagaacctggatttaacatttttacattccttttaaggttttcaagttccttagtcaaagaaataatttcagactcttttaagattaattcatattcacaacatttattttttcttccagatctttgatattgttacaaatctttattaactttaaccaaggaacgattttcagcacaaatttccaaccacttaccaaacattaccttgtaagattcagtcatagagttctcataaatttttgactcattcaatagaggtggtcaagtgacagagcttccttctgcaaataaagacatctcacatagaacaaattcaacggaataatctcaagatctcaataagaatttagtgacccgcgttgataccaattgaaattctgtattttaatatttctagttttattgtttaattaaatgcggaataatgaa

SEQ ID NO: 136938 - DNA, 1518 bp, Cannabis sativa
  modified_base (1466)..(1475): a, c, t, g, unknown or other
tttttgattattaaataaagagttaaatatttgatatatgtatggatgttaagttattaatattattattgaataatttatattaaatatcagaaaactccttattcagatacacgattgtggcttgtagctgtacagagaactaaaacaacttagctatgaaaaaaacagtcagcaccatattaaagttttggaatctttaatcaattgttgctagtagggttcactgatgcctattcttcggtgaaagtaatctcaattcagattacagctgtagtatgacatcaaagtgaatgtgctatatataatagagattttatatcacaagaaccgatatgaatgaagttgactttattaacatgccaattatcataaagacaaaattcatgtcataatgatgattaatagtatatcgatctaaatcttgagtaatcatgaactcttgttcatgttatcagttttttattcaatcattaaagtttcttagagaagataaatcttaagacttctattttgggaatctaataatgtggatggctgggaacatgatttataattattatatcttgacattcttaacagatcgaatgctggtttcccttaagtgttaattctagagctagaatgttgtgcacaaatttagatgggatctaaattataattctgctactgaattaatggtactaaaggataaagaagtaattagaagggtaaaattataatttaactaaaagtaatgacgaacttacacaaggagggctaatcactaaaattcattatatcaatggacactgcagtaaaactcagtaaatataattctataattactaagagtttaattccatatatatagtggagtaattatggaattaataaaaaaatattatttatttgatgagactcaataaataatctagtttagagcttagagttatagacccatggtccccaaatcaccacccttgaaaaactatcaagggtaggaataaatagtactataatgatgttcgaaaaaatctattttgaattggtaaaatagtaaaataaataatttttcaaattaattaaataggaaaaaggtaaaaattaataagataaaatttttcgagacaagatttgttaagacaaaagttgtcaagacaaaaaacatcatcttatcctaaaaagacaatgttaggcacctacatagtagttgtccccatggaatttgtctttttgagttaattaataagttaattaattcaattatgtaaatatctaatttaaaaagttgttatagatgtttcaaaatttttgagatattctctcaagtcgttgagagagtccctcataaatattagtaactgaatttggttataggtatttattgatttaaataattaaataaaatttaattaagggatttaactaatataaatagaagcttgctttgagaaattagaactgttagaaatattttaccaggnnnnnnnnnnactaacaagtatgtttcattaaaatcctaatatgaattctaaa

SEQ ID NO: 136939 - DNA, 708 bp, Cannabis sativa
acattaaataagtgatgaaaatataaatctgtttctttattgatatttgaatagagaagattacattgaaatagagtttcatttagggcacatagcccaacattagtatgaccttgcatgagcccaagagcattacggaggttctggatctcagtgtcatatccaatggttgtctgaacatttgttgctgaagggattccagtgctgggagtacccagtttggctgctgaattggtgtttccagtctcttgcacaccgggtgtgatcccagccagaggagacgtcacaccttgacccgcagtaggtggttgcatgtttggttgctcaggattagtgactggtgggacccttgcattccctggggtctacagcgtaggatctgccactagtggatccacctgatcgaccacgcctctgcgagtttgcaccaccatcatatgtgtttgattaaacttaaagcaaagagcaaacttggattattgctctaaatgaaagcaccaaaatgttgagctcgcttttagccaacgacaatgagtcaaatagtaagcaatagaaaatataattaaagtatgaactaataagcagtaagaacataggattttaaagagattcggccccgttagttcggtaatagcctactccccttggattgtattaactcaagaacaaagaatacagtgtttcctctcttgaagctctcacaatgaa

SEQ ID NO: 136940 - DNA, 626 bp, Cannabis sativa
cactagagtaattaaatcaccagaaataccacaagccataggtttaggtaattccaaacctttaataccaggaacatgaagttttgttaagtccattcaatagacttattttcaaaatgttctttcttgtccttgtaatagaaaacttttggttactccattgaaatgttttaaccatagttctcttgacttagcttcttagtttcttattctgacaatccattacaagtttaaactaacaattgattttgtcaccggtgtcttccaagtcataatacggtgggttccttaaaattctcccactacgataaggtaccgtgacctttgtctaagaacataagcggtattgtcctcatctgttgtgtcaagacaacagagacagtgggaccatcttaaacagaataagatgatagaacactttggaatcaagaaaaaaatatctcctctactttgctttcagatttagtcatattcttagaaagtagtatttgttgaaacaaacactttttatcttaatcaacaaaggatggtccacccctaatcacttagaatagctatcaaacgtacaaatcttagttaacagttctagcttttcttaatttcacgatcaggacatccatgaatct

SEQ ID NO: 136941 - DNA, 721 bp, Cannabis sativa
atctatattaataagtaaatttgattacattgaaataagttttatttagggcataaaacccaacaccctcttcatttcaaaatatttatgcactctctctttccctctcgttccttctctctcgtgctcttgcctcgctcgaactgaaccgaattgccccaacccaaaaaaccaccacgaacatcactccaaccccaaaaaaccaccatctcggactctcgccaacccacaactccaagttaagtcaatttttatctaatactagagctcctcaacttactgcaacatataaaatattaaaatatcttaatggcacttccaatcaaggactacttttacattcaacatcttttactaacttgtgtcactactacaaaattggcttttcccaacagtttataactgtcttttatgctatttcccaacagttcctaaaaccgttggctatgtgggtgttataaaaatacggaactttaaatgacggtttataactatggtaaaaagttactttaaatgacggttaagaaatattggaaaatgtcactttaaatgatggtttataaccattgggaaagacttccatcaggtagtaactgatggaaaacatctctttagatgacagtttataaccattgaaaaaagccactttaaatgacagtttatagctggtggaaaagactttagtcagactataactaacaaaatacattacttaaaatga

SEQ ID NO: 136942 - DNA, 1528 bp, Cannabis sativa
  modified_base (26)..(33): a, c, t, g, unknown or other
atattaggatgttaaaaacatacttnnnnnnnnatctagatccttgtaaaataattcaaacaaacaccacctatcctgatatggtggggaaggcactgcgagttgcgggcacaatttttggtggggcccctactcttcctacctctggttatggtaggggtgataatggctcgaccactaattagaaaagaaaggcaccaactgcatccgatggctcaagtcagaataagaggttatgagggaaccagggtcgaggcaaccatcagggtaattctgaaacccgatacacttactcggaatgccccaattttaaaaagcatcatttcggaaagtgtagagggcaagggtgtttccagtgtggtttgctagggcactataaaagagactgtccactgcttaagaaagaagaacagaagactgcagcaaaacctgctccagcaagggtgtttgctctaactcgggcagatgcacaggttagcccctcagttgtaacaagtcaactctcggtcaacaattcttacctctctgggttatttgactctgaggccactcaatcttatatgatagccaaaaattttagtaagttggatagatcgcatgatagttatgataaagggtttagaaccctactgcctggcagagaattagtcatctccaaaatgtggattaggtctatgccgatcaaaattgaggatagggagttgagtgttgatttaatagaaatgggtttagcagatttcgatattatacttggaatggatttcttatccaagtactcagccagtattgactgtaaacggaagatggtaatcttccaacccgagggcgaggaaccgtttgtctttgtgggattagttcaaggatctaggattccagtgattttagtattaacagctagagaattgttacaagacggatgtttagggtttctggccgtggtatttgataccacacgacctgagacaattcggccagaagacatcagggtggttcaggaatttttagatgtttttcctgatgaaattcgggtttaccaccgcagagaaaaattgattttattattgagttggcacctggagcagaaccgatttctaaggcatcctatagaatggctccagcaaaacttaacgaattaaaaatccagcttcatgggttacttgacctaaggttttcacgaactagtgtgtcaccctggggagctcccgtattatttgtcaagaagagagatggatctttgcgtatgtgcattgattacctggaattaaataaactgactattaagaagaagtatcctttacctaggatcgatcatcttttcgatcagcttcaagggaagacggtcttctcaaagattgatctccaatcgggctatcatcagttgagaatctaagaggaggatattctaaagatggaggccgatagagtcatcacctatgcctcctgtcaattgaaagagtatgaaaagcggtacccgactcgtgatttagaacttgccacggtggtatttgctttgaagatttggcggcat

SEQ ID NO: 136943 - DNA, 684 bp, Cannabis sativa
caattcaagtaatttctcagcaaattttagtgatttcaagttgttggtaagcttccatcaatcctctctttagtttttgaagtttatggaagtgaatttgtgcatgttgtgattctgagttatgtagttgctgatagggtttgaggatattttctggatgttagatatgttgtttaatgttgatttaagattgtagtggtggctatttgttgtgttagctaagctttgagctttgaagctcaaacttggagcttccatggtggtttttgtttcttagcatgttgtgatgttttattgcttttaaaatgttctttgggatgtgtggagcaggtttggagagtttcatgtggattgggtttgatttggttgagttatagaatttttaacctttcctgcactgaatcggaattccggttcagatggacctgtaggaaccagaattccggttggggaaccggtctaccggttagggcagttttgggaaccctagtttttcccatttttgagatatttagggtatttcaatgttatttatcgataaggaaacttttagcttcaagtttaagccccagaaagtgatttcgcgtatcactcacctatgtatgattgatgtgatttaggagcctgtaattcaccgagcagttgttccactcaggttggcctgcacacctgaattcggaattg

SEQ ID NO: 136944 - DNA, 767 bp, Cannabis sativa
tccgatctaacatacttgtgtgtagatctaagatcctggtaaaataattcctaacaaatacttctgtctgtttattgatatttaaaaaatagagattacattgaataaagtttgatttaaggcataaagcccaacagtttcatgcatcgaaaatatgtacagcaaagactttaaaatcacaaaaaaaaaaaattggttcgaactgtattttctagaaaattttaagatttctttattttcaaaatgatttttcatgctaagaacgatatataatactatatgaatgtattaatgcatatagaaattgaaataaacatcgaaaagtgaaaactctaatcagagcaaatacggaccgaaaattaaactttcctgtttatatatatactcgtatataatgattatgctatataaaatatcataaatatatacaataaattataataatcgtaattctatgaaataaaatcagcgaatgaattagtataatatatatagagaaaatacatatacatgaataacatgaatgtgtatatataatatatatgaatatatatgcgcaaatataaaagtatatatataaatgggattatatgaatatgaatttatatattatatataaactttaaatcataaattaaaatccaacgaatgtatatatataaacgaaactcaaaaaatataaataaagcagaaataataaccattttgataccaactgttagactataattgttgggttttatgccctaaataaacctcatttcaat

SEQ ID NO: 136945 - DNA, 688 bp, Cannabis sativa
tgcccttacctgcaccatatagcacacatgagccacaaggactcagcaagaaaagcaaaaataataatcatatagtttattatttgaatattatcatttatacacgatcggaatcaaaccattacgtattgttcataagatgaaatacaaatcactactggtatttgccataaataagcactagtatacagatatctggtaatacaaaactataacattcaaccttagataatataaccagccatatgcataaaaatagatatgctcatatatttgcattgcctaatcaggcaagctcgtatcataatgcaatatcataaccataacattcgactgtagataatataactagtcatatgcatagaaatagatatgcttatatatttgtattgcctaattaagtaagcctgtatcataatacaaaattatatacaatatcataactataacattcgactcgactgtagataatataaccagccatatgcatagaaatagatatgctcatatatttgcattgcctaatcaggcaagcccgtgtcataatgtaatatcatatacaatatcattgcaccacctaattaggtgagcccgtgccataacttggcaccagtatattgcatcgtttaatcagacgagcccgtacctacacaaggtacttatcatatatcactgacgcccataccta

SEQ ID NO: 136946 - DNA, 895 bp, Cannabis sativa
ttttaagtaaggtatttcatatatatttgaaaacaataatttaatattaaaaagtaaatataagaaaggaaaaaaaatattatttatatattatgattattctttaattatattatattaatgatatctatccaaaaaaatattgttaatgatttttgaattatggttattcttcggtatttttatattaatatcgttaatgaacaatatgttgtccatttaattggaagtttttttaacttcatttttctattctttgaatgttggatacagtgttgttaatatttccaatcttattatatttgtctaaactaacatgtgttaattgattacattgtcaataaaatttttattaaataatttcaaaacttaaaatattgaaataataattatttaattataaaaaactaaatatataaataaaaaacatatttctattgttttgtagcatagttatttaggtttagattttcatataaataatattttattgtataaaatatatatagtttaaaaacatatgtatcatttatcttaaactaaatttaaatttataatattaaactttttttattatattaaatttttataatattaattaattaaaaaaaatcttgatgtataattctgaaattaatatatataccgtgtatataactaactaatatttatattttgaaaatatacattttttatgtttcaatttgatagttgattgttgaaattacatttttttatatacatttatcttaaactgaatttaaatttataatattaaacttttttattttttattatattaaatttttatcaatattaattagggtaaatactattttggaccctgtattttgtaaaagttgcagattggaccctgtgttttgttaaatgacaa

SEQ ID NO: 136947 - DNA, 2368 bp, Cannabis sativa
  modified_base (964)..(964): a, c, t, g, unknown or other
  modified_base (1098)..(1104): a, c, t, g, unknown or other
  modified_base (1397)..(1397): a, c, t, g, unknown or other
  modified_base (1591)..(1610): a, c, t, g, unknown or other
  modified_base (1800)..(1806): a, c, t, g, unknown or other
aagttagtcctcaatcatagtatgtaagactatgaagaatccaaacaactgaaggagtgtcgggctcatatcttgattatactaagtgacagaaaggagacaagggttagagatctgagcaaaaagagtcatttaattttgctacaaccaatgtaaggttttccaatctttatatgtgtttaattttcatcattttagagattcatatttaggatgttaaaaatatacttgttagtaaatctaggtcctggtaaaatataatctaacaattggcctcagagccatgataatgatttactttcaagaaatatagatttaaaacgatgtatgtgtgattcggatgtgattcatgttgatatgtgtgtttattgaagattggttgatgtttgcaaaatttttacgtaaaataattggaatttcgtattcaaattatttttcttggatagtttggaaaaaattaagcaattcacattcttacagaatttgatttcgattttatttgaattagttatgagtttttgaaaattggtaaaaatcaggaggtgcgacaccccatacgcgcgcggatacttcgtgtcactcgggatgcaggcggttttcaataggcatctgtccgaggttcctcacccgtttgggcattttttttttctgaactagggccttgcgcgtgcgaagaggctgcatgcgcaaatccacgcatgcggatggtatgcaatgcatattattcgcaccaaatccaaaatattccaatttttttttcatttttttcatggaattagttttgaattttttgtgtaattttgtatttagatttttaattttcaaatcttaaatttaattattagaataaaattaattaattttgttttaattaattttagatattagtaaattttaaacttgtaaattgataaaatctaatttttttcttaattggttatcttatttttaaaatttaattatnttatcttatttttaaatataatgtgagatatattatatttggcattatttaactatttttataaaatggccttaattaaaatttaaaataagatatattttaatttaaaataatctagaaaattttaaaaatcnnnnnnnatattttgtcaactttcaaattatttttattttatttaagttaaattatataatcaaataaatgatacttatttatcattttattttattagacatttaattttattttcttttaaaaataacttcaattttgaaaagttagttggtatttttgaatagatatttaggtttgttaacaaaatataattttttcaaatttataggtttaatttaaaatttaatgatttaatttaattttattatttttcaaaaataattctttatttattttcaaaaataatttaattatttanttaatttaaattaaataaatcttatatccatctatccagtttgtttcatgtgtgtgttttacgtaaggtttattatcaaaacttgttttataaaatctattattgtttaatctaaattactatggttatcttgttgacagatctaatgatctaaatttaaccaatagtttaattgtcaataggtcaaataaatnnnnnnnnnnnnnnnnnnnntgtaatcttctttcatctgtgtacaaacctagtaacatgataggttccatctaaatcattgtgtgcctgtgcctatatgttttctttgggcctaaatgcatatagggagcccatttaaattttgaaaataaaaatagactaggttgctaaaataaaattatcacttttgataaattttatttaggtccannnnnnnttgggcttattcaatgaataatagttgtttaattaaggttaaattcttctcctttgggctttatgtgagagttagggggtcatagtagggggtacgacatactgaacccaaccctccctcacattgtgaaggtccatttgccttatttgaataactgtagtaggttaattacacgagtataacctaataaaattgattagcaacataagtaatttcaaaatacatgaaatttattttcatcagattgttttgaaattaatttaagaaaaacacaattactttaatgaaatatattcaagataaactaattaaataaagaagttataactaattagatttttctagatacttaattatttgaactttcatagaaattatatttatgttgaaaattagtttttcaaactaatttggatcaacttaaattagaatattttaaaattaataattaagtggaattttctaggaaattagttatttaaatatcctttaaaaatatttttaagttgaaaatttgttaattttagatcaacttaaatagggatattttatcaaattaagg

SEQ ID NO: 136948 - DNA, 656 bp, Cannabis sativa
ttttttttttttttttttacagaccagcgttatagcgcaggaattgggcgttatagcgcccatcacaatttttgtttctgcacttgattagtattttggccataacttcttcaatacaattcaaaattggacgattcaagatgttccgaaaagctaagaacgagatctacaaattttatgtggagctccaagtccagttctgcttctaagtcatcaaaatttataattaagttttgccttgtaaaacgagctccccgacttccactattttcatcaaaatatgttaacatccctttaaatgactctaaatacatgattagtctttaaaatggcctaataaattataatcatactaatcaataattaaaaaattaatttaagaatattaatacataaattgactatatttataagacaaatataaactcactgcaatgaataactagattataagaactaagtattctaaggagatctaaaaagaagttttctatcacataggattttctccctcttctcttctaaaagtctcttttagggtttcttatgctcccttgggcgccacatgccagatctaggtcggtggcgcccgagagtcttgcttccggcgtgcttcatgcagtggaggaaggccccttatggtgggttttggtatt

SEQ ID NO: 136949 - DNA, 1280 bp, Cannabis sativa
  modified_base (889)..(900): a, c, t, g, unknown or other
aataaattggccaaaccaactagtcactgaggcagccaggcgtttccgtatttgatagactgggaacgactcatgatcccagaaactgatgtgattcagatcggccaagaagtcgaacaagttagtccagccgtgcaggcacagttggacgaactaaaaaatatgttccaaggcctggccagtcaaaggaaaaacgatctcgagtttgaccgagcacgtggaacccctttctcccccgagatcaatatcctggagttgccctcacaagtttaagatgccaacctggaagatgtatactgagaaggaagatcccttatcccacctcaaatatttcgagatgcaaatggatttgtaaggagtacgaggagatgtatgttacagagtttttcctgtcaccatctcggaagccgcccaataatggtatttcaagttggcgtccggaaagttcaactcatggaaggttttctcctcagagttccatgcacaattctcctcttcttgccaacttccgttgcacctaggagatctggtcgaagtaaagcaaagactaggagagcctctctgagcctacatcagcagattcatgacggaggcgactaaggtttcacgggtaaccgaggacggaaagttgtccgcgatactgggaggcattgaagtccttggtgagctttggaaggagataaggaagaacagaccagtggactcgataagtgattttcttgaccgttcagaaggttttatcaaacttgaatagcatactcagcgagcagaaggtgaaaaaaacctggcaagtcaaaagctctttctactgggacatccgtccagctccccgattacccaagcaattcaagctcaaatggtaagcggtccagcaacaataataggcaannnnnnnnnnnnaagggaaagttcactggcaaaatcgaacaagctcctcgggaaaatcctgccaagtatactgcatttaccgtcctgacggaggacataaaaagtgtttatatggccactcagtcattagccccgtacaagaagcccgcacccatgaaaaaagatgtcagcaagagagacatgaccaagttttgtcgatttcatggggactacaaccacgacaccaatgaatgcaacaatctgaagcaagaaattgaattcctgataaggaaaaataatccgcacgcatagaagtatgtaaagaccgatcaaaatcagaggggtgataacaaccaagacttgctaccaccaccagtaaatggacatgtgcaagtcattattggaggcccgca

SEQ ID NO: 136950 - DNA, 591 bp, Cannabis sativa
tataataaatatatagtataagcatcatagatttttttgagagactatgatagtttgatatctctttggtggttttacgagaatggcagtttttattttttttcctcattaatagaagctatatgaatagaagatatatgaatagaagttacagagtagttacaatccactaaatattaatttgattctaatttgaattacttttttattttttttattaattgtaattatatctagcaacacttatttaaaaggtgtttttttttttttatttacatataggtattaacaacacttatttagaagtgatgctattgcttattttttatttacttaaaaaaaataaatttaaaaatctgagagttattagcaacaattatttatcaagtgtgtcaaaatataaaaataaataaattaacaacattttttaattgagtgttgttgaataagtgttggtaattgcaatttttgtagtagtggcgctcaacccaaaatattcgcttataaagtaagtgatatttgttacgctcaacccaactattcacttacaaagtaagtaataggagctacgctcaacccaactattcactt

SEQ ID NO: 136951 - DNA, 505 bp, Cannabis sativa
tgctctgctaattgtccaccgtttccaagtgtgatttctatgttatgtatggccatgcctaagggcatattggttggattagattcttctttttctttgcagtcccccgccttaccacttcgccatgccgctaaaatgctacaaaatagatgacaatttttttttgtacttgtattttgaatctcgttttctttaatccctttcctaaaagaaatccttccttttctttgttgtttggattggatcaacccattcaattgatggtatcttaaaataccgaatctgaatatctaaaaaatttattttcattttatattaaaaaatcacatctggattttcgatcataaaagaaaaaattcaggataaattggaactgttaactgttgattgtgaattcataaacgattcgtgaatttgaatctaaaattgtgtttccctaatgatataagaaaattcaaatggatacataactaatttttttctgtcaataaaaaaatatttctca

SEQ ID NO: 136952 - DNA, 1552 bp, Cannabis sativa
  modified_base (58)..(62): a, c, t, g, unknown or other
taagagaattgtaacattaggtattttttgcctcaaaaaataaacattaggtatttannnnnataaaatctgaaacattaggtatttatgcgacaatttactctattttttttttttatataaaactatatgtggtattaatttttatgggcacataattatataatgttttagtataaatttaaagtttaacatagtattatatagaaatatgatatataatcaaattcaatataatacaatacaatacaatacgacttaatacgatgttcaaaatgaacccttaaattcattaataatataataattacaagattaacttatttttatttttttttatctttttttttttttttaaacggacttatttttatttgtataatgacaagaatacataattgtcacgtaagtacttaaaatggggatgattttttttagcaatataagtatctaatgtttgtaaaattataatttttcatctcgtttcgtcagtatggagaggcttgggcattcgatcaaatctaacattatttttcctcatccaatctaatctaattagtaattgaatttaaaaaattatcgtccattctaatccaattagaactcaaaattcaattcaatcaaattcaattactaattgtattggattgatttttaaattagatatccaattacacacttaaatttcaatattaacttaaaaatatgtaaaaattaaatatcaccatttatttaagtttaatacttcataaaaataccattgttacaagtgtaatacaactaaaaattttaaataactaaaacaaaagcattattaagtaataaatagaacaaaatatcatgtaaatatatacacaaaacaacaagtatttcaaattcaataaaaaaatctattaaaaacataattaatatatatcagtttttaatattatttttattgtataaataaatataaataatttttaatatacataaatgtaatttgattggatcggtttaacagatccaatccaattagaactcaacttttaatatccaattcaatccaattataattggatatccattttttttgcaattggagtgtttggatcggttcggtttaatttgattggaatggatgttacccacccttatgtacggattttattttcaatttattaaagaaagaatttgaagtaattcatactatatattttcgtcctgacttgatgatttagaatctggatcatatatgtgccttgtttacttacaaaatttaacgaaaatgacagtttacaaatattatgtacgtatgccactaaaaaataatcattgagtttatatcacttacaaatttaaaattttaggtacttatgaaaccatttacccattacaagaatatggtttttaaatttcttatgtatttgttctgtaatattctttttgggattatttcataaatatacaaaattagtaaaaaatttatatttttacggtccattagtagattttctagcactaacgcaagtctagaaacctgatttggtgtagtctaagaatattaaaatac

SEQ ID NO: 136953 - DNA, 1153 bp, Cannabis sativa
aaccacgtaaaaatcttcatctcactttcttacagctctttaaattctaatagttgccgaaaatctcggtcaacactttgaatttcaagcttaaattggtgaaattgcttggtttagagcttagtatttggggattgatttgagcttagccttgatttgaagtgatgtaaccttcttttactatgtttgattgaaatccttgctaattttaacggttgtgaaagcatgttttggttgtgatgttttaattgcatgtaagaggaagttagtgttgatcatcctaggtttgggtttaatcctatgattttgtggtgattttgttgttgagctaaggaagtaattcttgggtgcctcttatgcttgaaatctagttgtacttgattattatattgctgcaatctgtggttgtatatgcttgagaatttagggatttgattgtggatttttggtgaattaggcttaagctttgagctcttttgggttctgaattttcagggtaaaaagtgggttttgatgcatgaaatcggtattttaattccctaatggttgttagtagccttactctgtgatctgaaagtttggttgtgatttgcgatggtttagttgttttgggggctaatttttcgtgttcttgctgttggtttctaggttttgaacccaggtgtcgcggtatggtatttggcatgccgcggcgcgcctcctttccggacctgggagttggtcccaggtgtcgcggcatggcttttgcatgccgcggcccgcccttgagttactgggcagattcatgggtgaactttgaaaatgcataactttttattccaaactccgatttgggagttctttataccgttggaaagctcgttccaagctctatgtgattatttgaattttaaatgtcatgtgaatactttatgaatgtgaaatcaggggttaaccctatttgtgaaaattccagaattgtgactaggattaccgacatctggtcaggagcacccaggggatttggaatctctattattacgggacatcaggtaagatagtagttagcacgtagagttatgtgcggtggttcttatattagaaatgatatatgtgagtaaatagtaaccgagattaaggttattaccctaacatgagcggtttaatagcctag

SEQ ID NO: 136954 - DNA, 581 bp, Cannabis sativa
tctctctctctctctctcggttttcttaggctgttagctagggttggattttaataaataaattcaatctttcttagctacttgtgtagtaaatccaagccaaagtatagctcttgcacctcctttttagtttcttgtggtttaaggaagtaaatatttgcacgcttggtgtttttgatgttgtagctgttgtttgtgtttattgttgttttcttaagcttaattatgttcagatgattggattagaaccggttgtggtggttgttagttgattttattcaaatttggatttttaaactcaaactttggttttaatggtgaaatgttgtttagcttgctgttcttgctgctgtgattaaatgatgttttctctagttatattatgtttatttaaggtgatttaagcaggttttaggggctaattagttggatggtaggcttggattttttgaactcaagcttggctcatcaatggttgttttgtatttatgcatgaagctttgttttgttgctttagaaatgttcattagggtctaattagcaggtctggaatgtttgaattggtttggggttgatttggt

SEQ ID NO: 136955 - DNA, 968 bp, Cannabis sativa
aagaggaaaggtaaaaatgatgatgtaagcgtgtaggagtttttttttgtaataaattgagtaaattagatttttgatgtaaaaatttcttaaaattacgaggtagaacatacatacaaaaaaataataataataataataacataaaaataaataccataattgttccactaactaactaaaataagttaagccaaaaaggaaaaactaattagaatacaagtgaacagttaacccccgtgcaagaatccatgatgattccattaattaagcattaactaccaacttcccttccaactgcctcaacttaattatatttaattaaagctaattaacaatagtttggtttagtaagtctatttgtgggctagctagctaggctcttcctccttctactcactcactcctatcacacgatacatcgctacaagttgctacttctcagtcaacggtcaactgagctattcagtcggaccgactatagtactttaacaaataccttttcctgatttaattgatttaattaaataaatacatgatttaaataaatggggagtcgtgcaaaagcccacgtgagatgcggaatcgcagatttatacatatggtggggggctggcatggcagtcacgcacgtaacacgtgcgcctcataaagtcttatcaaattaaattattataattttgataaggtcagtcacgacgtaacgtctttgggatattattaaaatataataataagataatatatctgtcagcttcaatggagggaagagtcactgccagcttattatccacatcagataaagctcaaagaagctgttgtcatttttatatattttcattttttttaatgaaagaggagatatagggcactaatataggaaattttaaaatattatttattattattattattttgttaggctaattagaatttttgcctccgaactatgacatgtaccaaatcat

SEQ ID NO: 136956 - DNA, 512 bp, Cannabis sativa
aatgaatttgtggagctcttgaaacaaaaaacattagaaaagcgtgtggctcaaatgaaattcgaagagatggttgagtcgggatcttattacactaagactagtgctcccgtgtctgctagaggtgtaagaggaccaattgataggtttgtgtgtgatggtattgataggacagccgctgaaaatatccatataactcccaaaaatgagaaagaaatgcgtgataatgtttgcatggacattgggaggtgtttctatgagaatgctttgccttttcatttggctaagagtccttcctttatcaatatgtgtcgctcgattggaaattatggtaggggatcgaaacctcctagtatgtatgagcttaggacttggatattgaaggaggagataaaagactaccgacactataattgaggatattaaaaagacatggccatcaacgggagtttcaataatgtctgatggatggtccgacagtagaaatcgaagcatacttaacatcttgatca

SEQ ID NO: 136957 - DNA, 1534 bp, Cannabis sativa
  modified_base (933)..(935): a, c, t, g, unknown or other
attttaatctatttattttgatatgtatttatttaactaaaattactaatttcgataactctaaatataaattttaatttcatatttataaaattaaactcaaggaagatctgaaaaataaaatttattttccaataaatattatgaaaattacttacttttagttagtccaaaattaattaagattaattttcaactcaaatttaattttctattaatatatgtataactgaattcaaaattcaatgtatttaaaattatacattttcgtaattcattaaaataaaataaaatgaaaatggaaaaattagtctaatttatgttggtctaaaatcaaataaattaattttcaacataaatataattttcctaaaaaaaatatcaaatatttaagtgtctagaataaaatatacttaaatattaattttctagtttaattaaatatatctagaaaaataccaaaaaatctacctagaaaatatctatctagatatttaataaactaattactaattttctaattaaaatataatatattttaatctacttattttaaataaattattaatgaaaattacttgatttaagttgatctaaagttaattaaattaatttttaactttaatctaattttcaaaaagaataatttagaaatatcaacattaaaaaaatgtcgaaattttatgatagaaattattattaaaataaaataaaatatattctaaaaattattctgatttaagttgatttgaaattgaatttttttccaatttaaatataattttctatttaattaaattcaataaaaatagaaataattaagtatccagaatagaatcaacttaattattaattctaatttaatatttaaaaaaatattctaatttaagttggtttaaaattaattgacaaattaattttcaacttaaatannntttctaatttaattaaatttcatgaaatagaaataaataattaagtatgttgaataaaatcaacttaattattaattctaacttaagttctaagaaaaatatcctaatctaagttggtctaaaattaattaacaaagtaattttcaacttaaatatatttttctacataaacaaatattagaaaatataaattagttactggaaatcactatctagaatctttcctttaaactaagggtgtttttttttaaattaattttaaaataattcaatgaaaaattatttattttaaaattaattatgttgctatttcaattttaattacgttaaattagtatagcctaatacaattatttaattaaggcaaatggaccttcacaattagagttattcatgtgagggagggctgggtttagtatgtcttacccgctactaatggtccctaactctcacacaaggcccaaaagagagaaatttaatcttaaatttaataattattattcattttataagcccaatactaattgggcctaaataaaactatcatgggtgatatttcattttagcaacctagtccatttatctatctagaaataaat

SEQ ID NO: 136958 - DNA, 574 bp, Cannabis sativa
tcatgagaattatttaattcaatttttttataatcgtttatgattattaaaatatcatgtataatttttagaaacatgaaataattactatatagaaaataatgtttaaacaatttattttatacccatatgaaataaaagagttacgcatgcaacaaactaattgaaccttattttcagcgtgttaatttttttttttaaattttacaaaatatctcaaataactataatctatgtgattatgaaaaaaaattcgactaaaaattatcatagatgtcgaaatagacaaaaagtaagtaaaattttccgacattgagattagagcatctccaatggaatgttatttttttttagtccatgttcataaaattaaattccaatagtggtatataatatgatttaaagctgtgtaaatttaatataaaatatatcataagctaaattttgaaaaatgctaaaaggtactagtggtgccaagcaccctctacgtgtcaatatagctattggtctaatttagtatcgagtctcgtatagtttaatataatagcttttagggagtatcgttagccaatcg

SEQ ID NO: 136959 - DNA, 1084 bp, Cannabis sativa
taaaaataaaatatatttttcatcttaattagtatacttttaaattataaataaagtattcttacaatcattttgatttgtctaaatatacatggttgatttatcacttgatattgcgcaattagatgtaatctttttttttttattattattattttgagttctcaaatcaactctatatatttatctaatatatttatatactcatttaataaaaaattacttaatatataaaaaaatacaaaaaaataatcataaatttaatttaatttttcaatgatttataatgattgtacgagggacgattaaattataacgattacgcaattgcacaaccaacttcatacagtatttaccattttaattattacaaaacagtatgacaaataaatatttctatataaaagcaattagtcatatgaatcgtgacctccctttttatcattataatttaaggcatatatttcaccatataattttttaaaattaattcttttattaaacatttcatatagaccaattttattactagcctttttatataaatccctcatttttttagtttttaaaaatagataatattgtgacgcctttttttttttagagttattatcttatgaaacaaaatataaaaactttcatactattaaagaaataatatgtctaaatagtttttttaaaaagaactacatcatcagtccaatttattaaatctaaaaatagttttttttttcatttattcttttataataatacatacaatttctttattaattctactatttttaacatctatcaccaatctttttacatattttaaaaaataatatgtttctaatttcaatactattatttacacatatcaaaatactatattttaaattaatcactcaataagtacaatatatgtatatataataaaaattataaaagttcaacaacacccttagttccctagttaaaaatatagtagtttgaaaatataattggatattttttcttactaaaatgttaaatgtagtatctcacaaaataaattaggtattttttttttaaaaaaaaaaaaatagttatattttgaata

SEQ ID NO: 136960 - DNA, 551 bp, Cannabis sativa
caattcaagtaatttctcagcaaagtttagtgatttcaagttgttggtaagcttccatcaaccctctctttagtttttgaagtttatggaagtgaatttatgcatgttatgattttgagctatgtagttcctgatagggtttgaagatgttttctggatgttagatatgttgtttaatgttgatttaagatggtagtagtggttgtttgttgtgttagccaagctttgagctttgaagttcaaacttggagcttccatggtggtttttgtttcttagcatgttgtgatgttttattgcttttgaaatgttctttgggatgtttggaggaggtctggagagttccatgtggattggggttgatttggttgaattatagaatttttagcctttcctgcactgaaccagaattccggttcagatgggcctgtaggaaccagaactccgattggctccccggaaaccccacagaatcagaattctggttggggaaccggtctacggattggggcaattttgggaaccctagtttttcccatttttgtgttattta

SEQ ID NO: 136961 - DNA, 1060 bp, Cannabis sativa
ttctgcgaatacatatacggtcgagtgggtggtaaatttttatatagctatatgttgtcgtgattgttttatattatgttagattgtattttgttataatatctttaaatttttgggaagagtttaattatagtcgttatgctgttgaaatttcagtagaattaggactagttactagttagtaatttattatactatacttagttactagttattaattttgtaagtctcgaggtgtttggcacgtaagtctcacaaataatattgaaagaatgttttagaatattgaataatgaataatgtcacataaaattcaaacatagcaaagatgtatcataaaacttaaactaaagtaaagaattatgtttctagtagaactagaatcttaaattctattatcctagaacacacttgactcataaaacatgaattgaaatattaatgggaaatgcattaacgatgcttagaaatcatctaagtcatcatcacttcacttgttttagattattttttttcgttgttattaataactttaaattttttcagaatgttcgattatagttgttatgttgccaaaattttagtagaattatgataaattatttgatattagtttctcttaaacttggttgtaggatttttgttaattttcgttatggataaatcatggatgcgtgaggagagtcagttattatatagttagtaacttagagtgaaattagttactagttagtttcaaattatatttagaatactatagttagttacaaactagtaagtttgtaggttctgcgatatattgtaccacggtcggatcgatgggtgaaataatatgcatgttagatgagtttgaatatcttaaatattcatccgtagtgaataaggttttgcgaatacatataccgcggttggatggatggtaagtttttgtattgcaaaatattattgtaattattttatattattttgaattatgttttgttgttattaatagctttaaattttttgaaaacgttcaattatagccgttatactgctgaaatttcaataatattaggta

SEQ ID NO: 136962 - DNA, 890 bp, Cannabis sativa
  modified_base (237)..(250): a, c, t, g, unknown or other
  modified_base (326)..(332): a, c, t, g, unknown or other
atacaatcaagcttccaataagtagatctagaatgtacaaagtaaattatctaatttattaattcctcttaactccactatagatttggaattattctcctacttatataaaatgctctatatgttccaagatatagatacgctattaattatccattgtaataatccaaatatttaaagatcctctatagatgatctacatcaagtagggacaaatttaccattctacccttcaannnnnnnnnnnnnnaaaacacttagttacctataaatgttatttcagtaaactaatataattacggaaatgagatctcaatcatttatcnnnnnnnagccaagctcgaaggaaattattgttttacttctaaatacttatagaagctatagatttcatatttatgattagcgctccccctcaattgtactaccatgttcccaagatgtaagtatctgaaagatccattggtcaactttaacgaataactctaagaacctaaataacacggttgaaatcgaacctaaccatatcaggattaagatctattgacctaagatcaactaggtgatattgacttagatagatataatgataagtttatgatatcttatccaatgtcaatttctgtctggtccgatgtatactccatacatccgatactcgcatattttaccaataccctggaaaggacataacacttatttaaggtgtaagtaaactttatcgctgattattatgtcagtgtaaatctagtatactgagaaatcatgagacataaattttgaaacatataattttgattatatgccactctattgaaaacactttaatcatgaataactatatgttctggatttaatagaatttatacattgaacatataatcatgaaa

SEQ ID NO: 136963 - DNA, 1006 bp, Cannabis sativa
tgaagattgttgattatagcaagttagacgctccctctagtaatatgacaaaacgttactgtttcttatatgtcacattggaaatgtaagtgcttgcatttaccttggtaatttcaccctcctataattatcatgatgtattggattgtgtttacgggttattgtaatttgttagtctaattagcttaaaaaaaatactgtatattgacaactttgaggctgtttggcaaacacttgtgtttctttttcctctttccttgaattaaaaaaatctgaacattttttcaaaaacattcatggtagaaggttttttgttatgtcttttcattttgttgttttaatttgtaatcatttttgtttttaagtttgaaatgtaatgtcaaatgagtttgatttgtcatctccttgtctcattctctttttccctacttctgctttccatacttctccttccttcctttcagtattctatcttccactttctctctactacctctcttatccctcgttcttaccatttcctttcttcgtttctttcttgatataatactatgttttaatatgtcaatatgtagttgggttttccaatgttacattcttataataacaattttaagaagtagtagttgccaagtgtattctgttttgtataaaaaacgaaaataagaaaagaaatatagttaaaaagcactctttttatttatttatttataatttactcataaatgaataagaaaatacctctaattttctgttttaaaaattacaaaataaatgtagtatttttagtttaatattagcataattttactgtacttttgttccttgttttaattaaaggtggtgcccatcataccttatatttttgtacattatagctaaaagaaaaggaccaagctttttaatttctgtttttttccttgttaataaaattctgaaagtcaaggtttgcaatttcaatgtgcaaatagattgcttgtcgagtattgttaacctgtatgctctt

SEQ ID NO: 136964 - DNA, 514 bp, Cannabis sativa
aaaaccttttcttaaaactattggtatttatcttaaaaagtaattaattctttatattcccttttgtccattagttataatctcagcccattagttaaatatattaataataggttagataacttttctttcttttgctgaaaatgcctaaaaaatcctagaacttcaccattcttctcaacctttctctccttctttcctttctttcgaaccaccaagggaccagctggggtgtgggtttcttctcagcttaattttgtgaattcagaggaatttgagtgcttcaatctaaggtagcatctcttgctttccctccttgtgttttattttgtgaatatagggtttttaggtttgaatttatgaagtttggaactgtggtgatgtttgttgtatgaggttatattctgaaagttgtgtggtgattatctaagttgctctaagctgaattggttgattattttagtgtttggatagaatttgagtttaagagcttaagttggagctctaatggtgg

SEQ ID NO: 136965 - DNA, 550 bp, Cannabis sativa
cattggtgcatattaggtatatgctgaaaattgtgaatccccaagcaatgtatccaacacactgctttgcatatcacgaggtccttcgtgtgatgtactcaagtaccaatcgtactatataaatagtactaaattttgtaccaaagatcgtgataaatctagaaaaacacaaaatagcggtgtcatgatagttgctagagctttccaaatatctagttcaaaagataaaaacccaattgaatgtaatatgtctttttacggtgtaattcaagaaatttgggaattagattacagtagttttcaaattcctgtttttctttgtgattgggttaggagtgataatggggttaaagacgatgaacttggattcaaattagtggacttgaatcgaataggccacaagtctgataggtttgtaatggcgtctcaagccactcaggtgttttacatgagtgacccattagatgcacgctggtcagttgtcatgacaacgcaagcaaaagactatgctaaccaagagcataatggcgatgatcttatgataagtgag

SEQ ID NO: 136966 - DNA, 634 bp, Cannabis sativa
ggtaaaataaataatttccaacaggggacggaggtgaccatcgaggaggagaaggaggaggtagaggtgaaggcagatgttgttgcgaattagcgcaataagtttggctattcgcaaaccaataataaggcaatggatcaagagcgcaattagttggggctgcatttgtgattacggaataacaagatgaactcattggacatttcaaaatattgaaattagatatttcgaatgcacatggtgctacatttgcaaattgtttaaagcaaaatctataatcatcccaaaaacggaatccctcactcaagctagtacaaattaatgaaatggaaaacaagaaggaataaatataagtaattttcttcatctttgccatggaaacgatatttgaaatattacaaaaatagttattagcttttaaaaataatttttagtgttattttatcataattttttttagtgttagttggttgagttgcatcatattatctataataattatttattttcaattatcatataagtctttaattttttttttatttttcattttcaaaacaataatgattaaagttggaactaagagatgatattttcttaagttaaaaataaatttaattgtttggttacataa

SEQ ID NO: 136967 - DNA, 1648 bp, Cannabis sativa
taattccgtcttttccaacaatattccccagaaaagatacctgtgacagccaaaactcacacttttggaactttgcatagattttatgatctctgagtcgttgcgaaaccatacgaagatgttgctcatgttctgcttctgaccgagagtacataagaatatcatcgataaatacaattacaaaattattgagaaaatccttgaataccctgttcatgagatccataaaggctgccgaagcatttgtcaacccgaatgacaaccaagaactcgtaatgaccacacctggttcggaaggctgtcttcgggatatcctcttctcggattctcaattgatgatatccagatctcaagtcaatcttagagaatgccgtcttgccttggttgatcaaacagatcgtcaattctaggcaaaggatatttgtttttaatagttaacttgttcagctcccgataatcgatacacatccgaagggcccatccttcttctttacaaacagaaccggagctccccaaggtgacacactaggccgggtgaaccctagatccaacatcccttggagttgtatcttcagttcttttaattctgcaggtgccattcggtagggtgcttttgaaacaggttctgccccaggaattagatcaatgataaaatctatctccagctgaggggtaacctaggtaattcctcaggaaacacatccaggaattctttaacctctttgacctcttcaggtccaagtatcacaggtttactagaatcaactacaaccgctacgaatcctacacccccactgcataataaatccctagctttcaatgctgagattcttgggacacgagaaccttgaactgaaccaaccaaaacaaatggttcctcattctccaatcaaaaagttattgttttccgtttgcagtcaatactagcagagtacttagacaaaaagtacattccgagtataatatctaactcggccaacggtaactccacaagatcaacgctcaattctctgtcttcaattctaatcaacaccgatctaacccattttcttgaaataatgaattccccattaggcaaaagggtcctaaatcccatttcaaaaacatcactaggcctacctagcttattaagaactcttaatgctacatatgatcgtgtagcacctgaatcaaataaaacagtaaaagcaaaatcgttgataagaagctgacctgtgactactgaagggctggcggcaccatctgcctgagtaatagcaaatacacgcgtaggtgcaagcttaacttcaggcttaggttcctctttcttcaattggggacaatatttctagaggtgccccattgatccacattgaaaacaagctctctggttacaagtcccgggatgatatttcttccagtgcgggcactcaggagaggagtaagtctgacgtccccctttaccttggtttcctcaaaaccttttaccttgccctaaactccccgaagatgggaaagttctcttctttactcaaaagtggaatcaccactctcttttccagggtcggaaatagggagagtagtggtcccaccaacaccaggagtctctcaggtttcttgcaagaacttgactgctccttcagctcgaagagccttttcaaccatctcc

SEQ ID NO: 136968 - DNA, 623 bp, Cannabis sativa
  modified_base (560)..(569): a, c, t, g, unknown or other
attaaatataaataaaaagtcactcataaatttctcataaaccaagaattcagttatatagacacactttatatagaatagatatataatttgctagtgctacaacgaatttgactaaacaaggtcttatcagtaaaattattatagccaggcttaggggtgttcattggatcacatccaatatttttagacctatccttattcgatctaattatatattggacgttagattttaccatccgatccgatccaatcaaagtcatccaatcgatccaacatccattggttattggattggatcggttctatccgttggatgtatttcatatatatttattggtttaatttggatttatttaatatttaagacctagtattttcgatcggatcagatccatccaatattttacgtccagtatgtattggattggattggatccatccaatccaaaaaaaaagagtaaaattttaatgttaatttttatatatacatgtatattttacgtatgacaatataaaatgtatttactcatccaaactaaatgaaaatactaattagnnnnnnnnnntgttggatgtattggatttttggacaccccatccaacatccgatccgatctaat

SEQ ID NO: 136969 - DNA, 902 bp, Cannabis sativa
ccttctgcttttcctcctccaccatcaccggcgatacacgtcgaagatcgggctccaatctacgtcgatgccgccacctcgatgcctgaggaatccaatccctacgtggcccctcctgcaccgccgcctgcctcctccgccaaaagtgagtataccttttatctttatgcccttcatttcatttattaatcatcaagtataagttgtttgtgatccgagggtttagaaatatttgataacaagtttggggtttcatatttttgtgatcacataagatggattcagtgaaagatattcttgggcaggtgcgatgcgactgtaactattttctattctattttattttttgggttttgaagattgtatagatttctcttttgggtatggttattttgtgttcgtgataactctatgtatgtgttttcttttagattttctattagtaataatggttttttgattttttttttttttttatgttttcaggtcctaagaacatccaaattcgaaggcttggaagctccagattatagatatgcatattctcacgagcattatgtttaagatctggtttataacttaagatttgtattgaggtttttgttctattaacttttgtattttttttctttaaagattagagattttagatgtttatgtcctttataaatttttgatttatgatttaagtattttttaattcggtatatatattgttatatttttattatataggtttttatatagtgttttttttatttatgatttatatatagtcaaattaaaacatattaagtttgatatatagtaattaaattacatcattaattatctaagaataaaagtataaaattaaataaaaaaatattaaaatatgatattacttttctaattaaaaaaat

SEQ ID NO: 136970 - DNA, 816 bp, Cannabis sativa
  modified_base (63)..(64): a, c, t, g, unknown or other
aaagagcacaaatgacatgattttgttataacatgcatttaatggttattgctcttgtttctnnttcagctttaagcattccaagaacctctgttatgttgacactgaatggaaacaaccacaaatagtgggtagaatctctcatgttaattttgactcttatgagagtggatttggccttgagaatggatgcaccgcctaaacctgctgatgatacttgaaaaggataagaaatcctatgaggattgggagcattccaatctttcttgtttgatgcttatgaggtatcacatggatgaatccattcgtgatagtattcctcagattgaaaatgtaaagaatttcttgctaccatcaaggaaaagtacaagaagttctcaaagaatgagaaaaatgagtgcttaactttgttccattgcactaattatgttgatacgggtgatattagagcccacatcgacaagctcatgggttgttacaaaaagcttaagggcatgggattggatcttggtgaggattacacggtgtggtttgtaatggaaatcattccttctcaattggatttgatcagatcaatctacaatgctcaacaggagcagtggaccattaaggagatggctcatattcttgccaaagaagaagaggacatgaaaaaaggaagagcaagaactatctccatggtgacaaatctaaacaattctcacaagagaaagttcactctcaacaacactagtgaccaaagatttcataagaagaaagccaccaatcctaagggaaatggacaagcaagctcatcttcaaatggtcacaagaatg

SEQ ID NO: 136971 - DNA, 1348 bp, Cannabis sativa
attaattgcattaaacacaaatttttcaaataaatacaaattaatacaataatgtatgataattaattaaacgcgaattccttaatatgaaattaatggctattttttcaaaataaatttagacaataaattgaataaatttggtaatacataattaaatgcacaattatacaaattagcacaattattatatgcctaaataaatcatgtaataaattaccaaattaatcaaattttcattttcaatttatactagatatatgtattaaacaaaaatggaaaattgactaaatgcgatttattgactaaattaacacaaaaataggaaaataatttatattccaaataaataaaaaatttataaaaaattcggatttttttttttttgaaaaatacactgcctaaacgacatgtcgtttttgcaaaaagcaaaacgacacgtcgttttccattctgacaggcgctgagaatgcatgtataaaacgacacgtcatcttccacaaagggaaaaacgacacgtcgttttttaccctgaagggctgcccaaaactacgaaaaacgacatgtcgttttccacaaggaaaaacgacacgtcgtttgggcaaacgacaacagccaaatataacatgaaaaacgacatgtcatttttccactttgtggaaaacgacacgtcgtttgggccgtcttcctcacccaaacttggtcattttaacccgtttttcagtcacgcgggtccgacggacccgacccaaacccgatcagaaattgcatttttgatgaccaaaagactccaaatcaattccaaatggatctaaatgcaaaaattaagacattcatatagatttcatgcatcgaaaatacgtaaaacaaagactttaaaatcaacaaaatttttcaggtacgaaaaacttttcaagaaaactttgagattctttgttttttcaaagtggattttcatgcttagaacaatctatattaatatatgaatgtattgatacatatacaatgcatatataaacatatatacatatatatactaaaaaatatatattataccgtacataatatatataaatgaaatgtatatatgtatatatatgtatttagcatttatatatgtaaacaataatattaaatgatgaatatgaatataaacaaatgtatgaaaatgtatatatgtataacgatatatataaaactatatataaccgaaaatctgatcgaaaacgcatatatataaatacatgaataaatatatatatatatgtataaaatatatatatcatcgtgaatgaactgaatgtatataagtatataagcatgaaaaatgcatatatataatatgaat

SEQ ID NO: 136972 - DNA, 1142 bp, Cannabis sativa
  modified_base (585)..(585): a, c, t, g, unknown or other
aaggcaggggtcgagaattttgggtttcataagaactagagaggaaaaccaccaagaacattctctgtaataaatactctcataaatacatagacacgtgtactatggctcattaatgccccaaccacatacaaatctctcgcattaattccttatagctttcttaaatattattattgtattggttgccgaaaaccttggtcaacattttggtgctttcattgagagctgaaggaagcgtctgtaagtagacagtaacattacaaaacaacaatggtggagactcgaaacacacgtcaacctcgtcctcctcaagacgcttaagatccagacgatgaggatgtggcctcaagagcaaatgtgggctctgaggagggagaaggaacccacgatgacgaatacgaaggaaacttcaatgagtacgacgcctacgatgaaggcagctacacaaagctggtactcttgagacaaaagcctgctgaaatcgcatcccaaaaagaacaaaaccaaaagatgcaagaggtgatgctggccatgcaaaaagccatggaggtagcaggaatccacgtgcatcataaagccatncctgctggacttggagagactccaggagaatcctcgccaagtgcccaaaagaagaaatctagggaacctagccctataaggtatccctctgaagggaacccgcagaaaaatcctacttccactcctgggaaaaagaaaagggcacaggatctgcgaaaggtccgctctgatttcccgaaagggaaaggtccgcagaggggaaaactccaaaaagggagtcttggccctcaggattgataggaccgaaagagcgtttctgtgcaccaggaacccggagggagagggagaaagggccaaaaatgccctcccattgatctgaggcatcaaattaacgggaaacacggtgacctctgggatcacctggaccaaaagaaacacgtgcccgcaatctccacgggaacactaaacgaaggaatcatggctgagcttgccatactccgaaaagacattgcccgactctccctcagataaaaaggtgatgactctgactctgactgtgaagaccgggagccatgtgccaggcacatcctggaagcggagctccccaaaaatttcaa

SEQ ID NO: 136973 - DNA, 1664 bp, Cannabis sativa
ttttttgaaaaaccgtaaaaatataaaaaaaaatatattctttgaacgcgaaaatgtaattattttacaaaaaatggtgccttatgttattattccttaattaattgtattagtgatatcaaataacattattatagaattaatgttacacaattcgtaggtttggataaattcgtaggattaaaaactattttactaaaacgatcatatctagagttttagagctcagatagagggggttctagtagcgttggaaaaataattcaaaaatctagaaattttgtagaaatagttatatcataattcagaagtttcctaggtcaaaactgagtctaaagttatgaggtagggggcttatttttaaaatttaaaaattagatatttgttgatttaataatattttagcatgttattattattagttaagataaacctattacaatagaatatctcataatctatatttttatcaaatcctaaactattatagttttatttttcctctccaaaccaattagtcaaagactcattcttcttcatggttgctcttctcaacccttcaatacttcttatttttctaccttcattcttaaacttttgaatttttaatcaaggcttgtgggcttgagacatcacattgaaatttctgaagaggtatgaaatatttttttgctcaataatgttaaatgttatctagggttcagatttctaatatttttcgttttcagaaaaatacgtttcagtaaagttatgatatctctctcgatattagtctgtttccagcaattttatatcgttggaaagcttattcgatgatctacaatttttatgaagaaactatttaccaatttggtgacattctatgtcgaaaattattatctttctgatgttattgtaattcatttttttttttcatattcctagaaaaactacgttcacttaaaatacaagaactctctcaattctcatccaattttaatgatctatgtatggttttaaagcttattctatttctcataagttttgtgaagaaaccttttgttaatttgaagtcatactatgtcaaatgttagttttttcctgtatcatgtgattcgtttcttaaatcttgttccagcaaaattgttttggtaaaattacagtatctctttgaatataattccaatttcaaataaaaagtatcattggaaaggaaatttaatttcctaaaactttcatgaagatattatcttctagttgtgaacctttcaatgccaaaagtttgtatttttgctaagtcatgtaattcgttactccatattccttctcaaaaatagtttcagtaagaaaatcataactccctcagttttaatccatttttaattatctttgtatcattagaaagataattgaatttcctataatttttatgaagataatgttcactaaattcgtgtagttgttggtcaaaaatagtgttctttctgctgtactggaagagtacgaatttttatgttagggccttgacccatgtcttattataggtagtagtgatgagataacaagccttaaacaacgagatttgaggtaaggatattagatagttttgtatgtgtttatctgcataaatttaaactctttatgtattggaatataatttatgatttgttattatgaatatgtat

SEQ ID NO: 136974 - DNA, 823 bp, Cannabis sativa
aagcagctacccgcggaaacgctgaagaatttcataaagaggtttaaggaagaagcctcaaagactaagaaatttgatgacggacaacagcttgcccttctccaggcaggcatccgtacagggactccattttggaacgaactacaacaggaaggagctgcaaacctttaggatttccacaagagagtccaaaaatacatcaatcttgaagaggcccaaatagtggcctatggaggatattatcccaccgggatagcaggatatgtgcccggagcccagccgtcgggtactatcccgacagtaactccaccaatgagcggcatacaattttccactactcccggatatagccagggccaggtcttggcccccgcgtcgtcccattttggaaatccctcgggataaatggacaagccccctcgcactccgctccgactgccagcttggccggtccttcccaaggttcaaggagtaaaaggtgctctaagagtagcacccggacggaggaaaaacgacaaaaaagggggtacactccccaatatacccagtacacggagttgacggactcccaagaacgtgtgtactttgctactaggaaaaatacacactatcggagaccacctcctctgtgcaaggatagttcctggagggaccccaataagagatgcgagtaccataacgacattgggcacagcaccaatgaatgcaaaaatctcaaagacgatatcgaaaacttaatccgactaggacacctctacgagttgatcaagaatcggttgcctcatctcaacctgggtcaggtgactggggctttgccacaggg

SEQ ID NO: 136975 - DNA, 526 bp, Cannabis sativa
taaacctcgttttggtgagataaaggttaattgtgatgttgttgtctttgaggatgacaatagtcttggtttgggttggattgctcgggatcataatgatttattcattaatgccttggcgattaacttatggtcaacccgacctgtttatggctgaagctatggcgttgaaggaggcgctcagttgggtgaaggggaggtgggtagaggggtgtgtgtctgttggtgtggttatggagtcggactcgctgttgctggtgctagttgtgcaatagaagaagcggttgttgtctccggtgggacttttaatcacggactgtgttgctcttattcaatcctctcatttgtttcctatttcaattaattttgttaaacggtttaggaaccaggcgactaactttttagctcgttcttctggttctattcctaactgtgtttcctgcgggggttatgtccctactggtttggaagctactttagtagctgatttgatttaataaaggttaattttttggttaaaaaaaaa

SEQ ID NO: 136976 - DNA, 959 bp, Cannabis sativa
ctctctctctacattaacatataagttttttattttatttcttgtttagttcttcttctttttttcatttttttagtttttctaattttcagtcacgcttttggggaaaaataaaagtgtattttttttattctgattttccagatttcttcttgcaaatatagccgctgttgcatttggtgttgaggctgtgcagaagatggttagtttttttagtccttttttcttttatttttatttgttttagtgttgttttacggttgttttgtcatgatttatttatttgacgtcgatttcactgttcttgctccatctcgctagaattattggttattttccaagtgcactcgtgttgctatggtggttctatccgtgagtgtggaagatgatagctataaatacatttcttcatccttctctatgactgtttttgtgtttttttatttttattctcctataaatacatttgacgagctcatggcaaaaaattttgaggggtgtggttcttttatattcttttaagtagttatgtctgcttcattgttttacatttgtttttgtgttgttttagtagttttttttattctgattttcatgactggagttgcaaatatagcagctattgtatctagtattaaagctgtgtagaagatggttagttttttttaatcccctttttcttttgttttttttttaatttgttttagtattgttttacagttgttttgccatgattatttatttgacgttgatttctctatttttgttccatcttacggaaattaaaggttgttttcaagtgttttagtattgctggggtggttctgtccgtgggtgtggaagatagagtcttggtatgtgattttcggcgtctatactataaaagaaaaaaaaggcaaatacaatataaatgtaatttttaccgtgtaacagtataaattaggggtgttcatccgatc

SEQ ID NO: 136977 - DNA, 525 bp, Cannabis sativa
atcactagttgaggattcgggaagaggatattcccaagatagcttttcggacccggtatggacactatgaatttctagtaatgtccttcggattaacaattctccagtgacatttatggatttgatgaaccgagtattcaaagacttcctggatgattttgttatcgtctttattgatgatattctaatttatcttgacacagaagagactcaagaaagacatcttcagatggtgttacaacgtctaagggagcataagatgtatgcaaaattcaagaaagaattcttgttgtctcaggtgagtttcttggggcatgtggtatgtaaagatggtattttagtggatccggtgaagattgaagcgatacgagattggcctcaaccttagtcagcaactgaagttagaagtttcccgggatgggcagggtattatagaaggtttgtttagggctttgcaaagatttctacgcccttaacagagttgactcgaaagaattgcaagttcgtttggactgataagtgtga

SEQ ID NO: 136978 - DNA, 563 bp, Cannabis sativa
atacatgatataatgcaaacccataactttaaattttttaaaagtttttgatcaaacctttctgacgagaaagggatcaaaccaccataactttttagtttaaacctatttgacgagaaaggaaaattaaaaagttataacttacgtacaaagctgaatattaacggttcgcgcaagataggaaagtactaaacgagatattgagacgtcttgataagagtacttaaacctagtaaagggatagataatctaactattcacacgagcaatcaaaaatatacaaagtgataaaatcattaaaagtatattgaagtttgcttaaggtagattgtaactatcattgcgaggcagaattgacaactgctcgtaactcaagaatctggtagattattaactacttaaacatggaaattacgagcaatggaaaaatccaaaagtactctgcatttgatcaggatatagttgtttacattgtgaataaaaactcaagcaaacgcaattatattaagttcgaatgaaaaagtacaaggcatttaagataagagaaaacccaagttggttta

SEQ ID NO: 136979 - DNA, 807 bp, Cannabis sativa
ttttattagcatgatatatatatattttcaatattaatatattagttttagtattgttataatcattttatgatatataattttattactacggtatattaattttcagtgatacgatatatcaaataatataacatatatttattgatttaatatatttataattagtttttttataatatattaatatgcaataataaaaaaatttgtataacttaatttatctattatatatctttttttttaaaaaaaaaataatatgtattaaatgtatttttatgagttttatcaactaatttattatactttgctgttttgctaaatttctaaaaaaatatatttactcacttaatttctaaatttaaagttattctatatcttagccctaacccaactaaacttctgtctagaagattggaaagaaataagaatttgttgaaagtgatttttgggatggaatttagttaattaattaaatatgtccctgtttatttacttattacgtgtaaaaggaaaagtgttgtcttttttgttaggattcaatgtaggtaatctttaattgatttaattaggcttagtaacttctaaagtcagagaattacgaactcgtcaattgggaaaaagaaaagacatcatcaattgacaaaaataaaaaccacttgaggttagctcaagtggccataggaaggtgcgtatgtgttggaggtcctaagttcgaatcccaagttatgcaatgtaatatataaacacttgaataaaaaaaaaaaaaaaaaacaaaaacaggaggaatagttaaacttgggactt

SEQ ID NO: 136980 - DNA, 1514 bp, Cannabis sativa
  modified_base (193)..(194): a, c, t, g, unknown or other
gaccatggacctatataactgagcttccaataagtaaatctagaatttatcaagtaaatttcttaacttattaattcctcctcgcaccaataggaattgcactctcaattatatagagcgatttataagttccacgatatagatacactgtgaattatccattgttatattctaataatcaatgatcctctanngatgatttacattgagtagggacagatttaccattacaccattcaatatattttatccttaaaatacttagctacctataaataatatttcagtgaattaatataattactgaaataagtactcaaccatttatctctattaagccaagctcgaaagaaatcaccgtttcacttttatgtccagatagaagttatagattctgtatctataatagcggtcccactcaattgaactaccatgtccttaatctatatgtcacaaaaaataatgtattcttaaattagaaagttgtgaaaatttcatactaatttagtgaaatagtgtatttagagatttttgaaaatgataaaactcacagtgtgggtgagtcaacaagggaagtggtcccacatggaattgaattattttaatttttaatacacaaattatatattattaatattttgaagcatatatgtagcaggaaattaattaattgattaattgtttttacatataaaaaaaattaattaataactaacttgagatatggacttgaatgtaatattaaaaaagagaatgaaagtaatgcctttaattaattatgttgtttggtaaagggatattaaataaatgatatttgtttgtattaattatgcagagattaggaatgcaaggatatcttatacttttcaattgactatacgttataactattttattttggattttatataagttaaatttatatccaaagtttatctatttagttttccctgccatgttgtcttgttgaagcaatatttataatgttcctttctacaattattttctttgcaatcattaatatgtttattaatttatcttaactgctactcaatatgcgttcgaaagaaatcatattagttaatcatacaatttgctctttaaccaaacaacacattacattaccatcctaaaaacaagataacaaaatacccaataacttaataaacttcaattaattaaatttatgatatatattggaggattactatatgataatcaaatagttttggtcctcatttgttaaaaaattaaaattaattggtcctcatataaaaataggccgtgagattattgaacgttaaaattttttacttaaaaaatataaattgaaactttatttataaaaatactttcataagatatggacaataattttatctttaatgagcttttatttaccaaaatacacttacatatagggcattttacaaaaatactggatttggggtaatagttttcaattttactgccacacggcagaattaacatttatactgtcctccctttttttt

SEQ ID NO: 136981 - DNA, 833 bp, Cannabis sativa
  modified_base (723)..(729): a, c, t, g, unknown or other
ataataataataaaaaaaattactgtattgtgtataatttgggtcggtaacaattttaactctttataaagtttcccaaacagctccatttcaagttccacggtcaattttaactcgacggggtatattgaaaaatacctattttatttataagttaactaaatttatctctaatttatatttaattgaaacatacctcattttatatgtaatatacctaaaataccctgacataagagaatcacatggagagtatcttgaactgacaggggcaaaattggtataatgtttaagaaaataggtaaaaatgatagacattaaaaaagaaggtaaaaacaaaaaagaacagtataaaaacagtatagagtgtaattttctctatatttatttgagctgagatgcaaaatgcccataaatttgaaaactaagttagtttatgtctctttttaaaaaaaaaattaagaaaattgtcaaatataataaattagctaataaaattataaaaattcatttattatatattattatttttaaaaaatatataataattaaattaagttaaataattttttagtattgcatatgattatattgtaacaaaaatgaataaatatattagatcattaaatatatacagcagtatttgatatatcgtctcaaaaaaatactaaatgatataataaaatatatctattatatgaacaaaattatatataccactannnnnnnatgtatacataccaaaaaatttatatataataaaataaaaaccaaatattataaatgatatactatagacaacaaaaaccatataccatacaacataatatata

SEQ ID NO: 136982 - DNA, 527 bp, Cannabis sativa
  modified_base (491)..(492): a, c, t, g, unknown or other
aggttcatacattttggccaactcaagtggagaactatccctgataatctcggccctatgtcacaacaacggtaaactaataactgtttatcccaaatcactgcttaatattaatataagataatctagggttttctaccaaatcccacggtataaatacactaaaataaaacttatattgtggctcaaaaacatacatcatattgtagagctcgtttcaagcttcaaaacggtatatagaacgtccaaaacaaacacccgagtcaaaagttatgacaaaaatatgatttctgatctcctgaaaatttctaaaaactatgaaatacgaaaatctcaattttcgcgctcaccgaaacactgccaaaacttatccaaatcactccaaacttcacagggcacatatatgccataaatattaccatccttattttatagaaattaaaaattgagcccttaaatgaaaaacaccattaacgttcggactaagcttnnaaaagttccaaactcgatttttaactcaaaatcac

SEQ ID NO: 136983 - DNA, 1355 bp, Cannabis sativa
  modified_base (844)..(858): a, c, t, g, unknown or other
tttggttttttagggtaaatcgagcttaggggtggtggttatggtaattgtagctccggccgccgctttttgtggagatatcattgaatctcaatatccattaaggtataaatctactctctaatattattattattataaattgcttttattttttattttgtaattttttttagggtttttccatattgttaagattatgttcttgtggttgggcatggtggccgaattttagtcggtataggtggcgagatttccataataatgtaaaaatctaaactttaatagtatatatttatgtatttcatattttattgaatgtgtattgtatatgaatgtatgtatataaatattgtaattatattgtatcttttttatgtattgaagtgtaaatattgaatattttaaacaaatagttttgttaaatattgttaatgagattatgagaatgacataggagagaattaaaataaaaagtttaaaaactaatttctaaaaattggtttagaaattaattctattttttatcattttttttttctattttcaaatttttcatgtgtttttatttttttagctgctaataaatagttagttacaactacttaacaagttactaattttcattcctatcaatgtattcttattagtaaatagttactcattcgtaactagttagtaataaattaactagttagtaactagttattagttaaataaagaattttttaattttctagtattttatacattgtaggttgtgaagtcaatttacaaggatccaacttatttggtattgattggtttctagctagctcgaggtacacatttactaacttttatnnnnnnnnnnnnnnnaattcttagtagagtttgaatatcttaagtatttattcgtagtgaagtaggttctgcaatatattgtattgcagtcaaatgggtgagataatatgcatgttagatgagtttgaatatcttacatattcatccgtagtgaagtaggttctgcggacatatactgtggtcggatgggtggtaaatttttgtactgctaaatgttttgtcattgttttatattattttaaattgtgttttgttgttattaatagctttaaatttttgggaaacgttcaattatagtcgttatgctgttgaaatttcggtagaattaggactagtaactagttagtaatttagtataatatacttagttgctagttattaatttcgtaagtcttgaggcgtttgactcgtaaatctcacaaattatattgaataatattttagaatacctaaggatgaataaaatgtcacataaaatttaaacataccaatgatgtatcataaaacttaaa

SEQ ID NO: 136984 - DNA, 778 bp, Cannabis sativa
acgtgccctaggcgcgtgggttgcatttatgaccgtcatcattgatatttatttctttttgcaggcaacgattcgcttcccgtccattgatagacttatgcgtttaatgctggtgtcagagaggcactcagacggtaaagataccagtatttggaaggatccttgggtggcccatgggaaggattttctcccaaaatctaatggatcctcaacttctggttttactaaagttgttgaactattagcaaaagatggggattgggacacccaaaagttaaactgcctgtttgaaaaagataatatctctaccatcatgacctgcaggtcatggagaggataaatgggtctagactaaagagagtagtgggcgtttgtcttgtaagctttgcatagggcccctcagtgtgaagttgctccgttcctttggaataagctttggaatagtaacattatggaacaccataaggttctttggtggaccattctgtctaatgccctcccaattcgatctattattcataaaaagtttcatattgatgatgcgagttgccctatttgtggggttgaggaagaatctatggaacatttgttcctcaagtgtgatttggctttccatctgtggccatcctcgccgtggggtatttttcctgttttaggtacaggtgtccgcatgtgggactgggtcaaattcatctggaatctaaattctaaaggagtaaatgctgatgaggtctttttgtatgcttcaattgtcgttgatactatttggagggtccgc

SEQ ID NO: 136985 - DNA, 775 bp, Cannabis sativa
agggcataaaacccaacaattgtatggtatatatatttgttgtgaatgagaatgaggtagtagagatttaatttgtttagaattaaagctcttaaaattatgttagtatgatatataattgattatatgtatatgtatatgttatttttaataaaaattaactatagaatttagtaactagtaacttgttacattttttaataattaggaagtaatttaataattaaaatttcaactttattgtatattgcattatattataggttgtgagctaatatttgaggttcaacatatttcggtgttgatcgaattttaacgtgcaattggtatatccattcactaactttttgttattataattaagtatcaatgcatgcttagtggagttttaatatcttaaatattcatctgtagtgaagtaggttctgcgaatacatgtactgtagtctgatgggtggataaattttgtattgtttatgttattttgtttgttttgtatttttatatttgttttgtttgttactttaggcaccttttaaaaatttttgggaacgtccaattacagtcgttatgttgtcaaaatttcggtagaactagaataaattttaataaaaaaatgtaactattaaaggaaaagtacataacataaataactaattaattactcactagctggaagaaattaggtgacataacacatttatataaactttacaattataaatgacaaactaaacaaatgaatggattcactttaggaaaagttattccaatt

SEQ ID NO: 136986 - DNA, 561 bp, Cannabis sativa
tttgatataatcttgggaatggattttctgtctaagtatggggcaacgattgactgcaagcggaagatggtggtgtttgagcccattagtgctaacccagctgtgtttgtgggtaaagttcagggggtgcgcataccacgaataacacttttaaaagctaaggacctgatgagcagaggttgtttgggattcatagtcattgtagtggataccagccaacctgtgacatctggacctgaaaatacaagattggtgtgcgagttcctcgacatttttccagaagatttaccgggattgccacctacccgggagattgaatttgttattgagtgtgttccgggaccggacctagtatcaaaagcactgtatcgaatggctccatcggaattgaaagaattaaagatacaactgcaagagttattgaatttgggattcattagaccgagctacttaccatggggtggttcggtattatttgtgaagaagaaagatgggtctttacgaatgtgtattgattatcgggagttgaacaagcttaccattaaaaacaagtatccttta

SEQ ID NO: 136987 - DNA, 517 bp, Cannabis sativa
aggattgttgctgcggttgggaggaaccgggttcgctattcaggtcccacggctgaagagttagcgcctacctctgttctagaggctcgggagcgtgaggaggagttggtttccaatggggctgctgcccaaaagttgcccgttgaacctgagagtaatatgccgatgatggttgatgagttgggcaagcagaagttgatacctttagtagagaaggaagtggaggggtcgacggtagcttcagatttgggtgggccgattgtagtggagagtgtgatacctacggatgtgcatgggatgcatgtgccgaatggtgatgggtctaagggtgaggatattaatttatcacgtgtgagtaagggtgtgggtgccgaagaagtgttagttgatcatagtaaataaaaattgacaaaagaacaaaaaaggcaaaggggtcatcattcattcatcgcaagaagagatttcttttagccatgcccttcaacaaacgtttgaccctcttattaaagcgcacaaa

SEQ ID NO: 136988 - DNA, 622 bp, Cannabis sativa
ttgactgttgttcggggttgaaagattatttcgtactgacccaactctactacccatttgagtaactgtccagaagcgtcgggttttgcaatacttggcgtaatggttggtcagtgtacacccaaataggatgagcctgaaaataaggccttagctttcttgttgctaagattaggcaataagtgagcttctctatcaatgcctcagcttcaatgattcttttgttgatgtagtggaccggatgttggatattgttctcttctctgatcaatacggcacttacaacatgttttgtgagagctaggtatactcctaattcttctccatctagaggtttcgagagtacagggggttttgcgagttgcatttttagctcttgaaaggcattttcccatttcttcatccattcaaattgtttgtttccttgtaggatgttgaagaatggaacacacttgtccgttgactttgaaacaaatctactgagtttggtaatccgactagttaaactttggacttccttaggtttttgtaggctatttcattccaagagggcttgaattttttctggattggcttcaatacctcggacattaacgataaagcccagaaacttacccgagct

SEQ ID NO: 136989 - DNA, 618 bp, Cannabis sativa
  modified_base (344)..(359): a, c, t, g, unknown or other
tagagttatcattctttaatatatgattttttaaaaaaaaaaaatgaaagaaaaatgtgagttatcatatttgaaaaaaatagttaataagaaaaaaattatttggtttcagaaaataaaaaaactaattttagagatattttttaaattacgtgatatttgcgtttataaaaaccttaaaaaaataatatacaacatatataactaataaattgaaaaaaaaaattaaaaaaatggtgatagatttggagttattattttttaaaaaataaaataaaaattaagaaattacgaaaaaaaataaatagagatatatatatatatttataaaactaataaaaaannnnnnnnnnnnnnnnaattaaggagagaacaaataatactaattaaaaaaaaattagagtgtcatgtcatgtctcatatctctcctttatatatagatatataaatatagataaatgtataggtttaaatatttttaaatataattaaaaattaaaaaaattgagagaataaaggagaagagagaaataattttgttacgattttacagcttcatgtcaccgtctcatatagatatatagatatattgatgagattaataataataataataat

SEQ ID NO: 136990 - DNA, 740 bp, Cannabis sativa
ttcctccaactctcttcttcaaagcatcgagcatcttctgagacatgattgcacggaataaaagcaacatggttagaagaaaagtggcatcaaaagtataaaagcatgataatctagaagctttaaaaacaagacggagtatcctgtgcttcgtgagaagcatttgtccgagcaagattcgagagttcatcatcaccttacaagtctcttatctccgccatgacgctcttcccttttcctagtacgggaggaggtggccgagcaggtgaactgggctccctaatttaaatggcatgttcaatgggcctgggattggccagaagtttcttcttccttttgagcggagtcacctgctcctcctcagcctcatcttcaggattcaaaggctcatgagcatactgtttggcgcttgcacctcccttcaacttagcttcacgcttaagttggatgagttcattctccttatgagctcccttagccaggccgacactagatttcctctttttctccctcacaggattaagaatgaaatccttcgggtaaagcccgtactccacaaagttatcttcggaggtcaacagagtgatattctggacagcacccggcagcagggcaagcttctgagctctatccccaagggcaagtgtgaaaggagggcggtgatacgtgggaatctgctgaaaccgaatgtgattgtgatcagttgaatcaaaagacttggtccctgtttcatcagtgtt

SEQ ID NO: 136991 - DNA, 625 bp, Cannabis sativa
tccttttttgtatttttttgtttttttccctattatatattacctttgaagcaacggtatgtagctcggcgtgcaaattcttggttatggttaacacgtttttgtttaattattatttatatatatttatatttataaacacttcacaaagtttgacataaataatcattcaagtacacggacacgtgcgcatatttatatatatataatgtgtttagtcagaactttttttcttatgggattaatacaataaatagttttaggaaccaaccgacaatattgaattaaaagcttatccctgtgttgaaaaacaatatttgtatagatatatttttaatttgtaaataaatgatatttaattaattttaaccatacaattattcaattatatttaatacaatctttatttaaaatatctataattgaaataaattacacataatatctttcgtttgtattatatataatatgtcggagaatttaaaaaatatctcatttgtaaggtatttaataatttattttaactgggtagtcttgaatgcaacatatttaaactaggattgattaaaatcttttgtcttattcaaaaaaaaaaaaaaataagagtgctaattacaacctctta

SEQ ID NO: 136992 - DNA, 1193 bp, Cannabis sativa
aactacatttgaggacttggcagaggtaaaaatgctagcaggccaattatttctcgatattgttgggagcactgtcaatcatgatgaaggggtagttgtaaagatacttgaaacttttaatgtttaattgtcgaacattgagaaagtaatgtatccgttgaatgaaaaaagatgattatagttttgattcagcaaaaagatttgtccaacaatatatatatgatttgttagattgtcagtatatatgaatgcagttactcttttaaaatacttttacatcttccagtctggcaagttttttcttgatacaatgcttaccagacttttaagcaaaacaattggcatatcataactaataatattttttctttaatttttaattatatcactttaaataaagtataaaaaaactagcataaaatttagtgtacgtgcctcgcacgtaattttttgctagtacatacaatatattactataatatacgtacactactataataataataataataataataataatattttgcccatattattatataaaaaattaataattaatgataaatatcaacattattatatcacgcatatcactattattatacccacataaataataatatttatcaaagttaaatatataataattaacacaatcgattaatatctatatatacttattaagcattaagcacatgccaagaaaagtcattatattttcacaaaacaaaaaaatttcatacaaatttaaatccataaatatgtaaaatgacaaaaataccctcagtagtaaaatttacagaaatactcttcgagttagcagatattacaaccaccattgccatatacactacattgcgtttcccatgaaatatccattacaatttttaatcggaatttcagttcacctgcctcaaagttcaacgaaaaataaataataagactcacaaataactacaataatttgaactccaccatataagctcaactctatctaaacaaatccacaaactaatttttcaatatgcttgcatcatttaaccttctctattaatatcaacaacaaatgttttaaaatcaaaaggactttaatcaggttataacgttagacttaagtaagggaagatgaaaaaattatttaggctcaactatgttataagtttttttttttacattccaagaaccttagt

SEQ ID NO: 136993 - DNA, 695 bp, Cannabis sativa
ctaaatattatgattttggttatgatgtctagttctgagtagttttcttttagttaaaggttatttcaaaacctgaaacatgaattcttagtttcattattaaatgctaatttctaatttccattatatcaaattgcttctattctctatattcaatgttatgattattgttttaatcttgtttagacggtcgctaaattaagttttactttaatctaccatcttaggattactattcacctaatagtctaggattctaaatgtttaagaccaattacaatttttatttatgatgaagaatagaacataggttaaataaattatatgcttcatctatttgttgcctagatcagtctatctccataaaactcaaagctttatctaagttaaataaattataaattttgctataagtggataaatatacataatttatcaattacggagatctatttagattatgtgggattaatgtgagttatttgtgaaataaaaatatttttcaggttcggcgaccctaaagactcgatcgggggccaaaaatatcacaacgaatttagttagtaatgttaatgaggttattgagataagacagatatagaattactgagatattttggggtactcggggttgaccaaatacttgaggtttagaaattttttaatagctaagaaatgataaaataattcgtttt

SEQ ID NO: 136994 - DNA, 1322 bp, Cannabis sativa
  modified_base (270)..(271): a, c, t, g, unknown or other
ttttttttttttaaaattagaagtatattacttaaagattatgatatatctatattagttttgttaaattcttttttatttaaaagttatgtcaacttttctaatttttttatgagttattgtggattgttggtatataaattttgttgtacaatatatttatattttgttgtatagtatattattattctttgatgacatttatttttttatttttctatgtataatagtagtatataattttgttagtataatacaaatattttaatnnatgtatataattttattggcatactatatatatttaatttttatttttatacattttaattgtataatatatttttattttaaataatatttaattagtttctattttattatatacacttgtggtatataattttgttgtcatagtatatatattataattgtagtatataatttagttagcatagtatacacatatatatcagttaatatacatatatatattttttttattattgttgttaatatatattttagtgaatgataaatgtatgttttgttatacggtatattattttttttaaataatatttaagttctattttctattgtacttttattgacataatatataattttattagtattttatatattttaatttttattattgttattatatatatttcgattgtaaggtattttttgttatatgatatatatatataagtgtattgtatagtatattattttattttagatcatgcacatttaatttttattttaatatatataaatgtaatatataattttattagtatggtataattatttaatgactatattattttgttaatatggtatatataatttttttttaataatattacattattttatttattttttattgtaagtatatatattttattgtatggtatattgtttttattgtttatagtatatcatttatttaagatgatatttagtttttatttaattatatataaattttttagtatgtatacatattttaatagcagtatatataattttgttagcatgatatatattttttgaatattaatttaatattttttgtggtatataattttattactacaatatattaatttttattgatacgatgtattaaatactgatatatattttatgatataatatatttattcgtttttgttacaataataatatgcaatacttgggatgataatttaaaacgtcgtaataagtcgtattgtattgtattatattgaattgaattatatatcatatttttatataacactatgttaaactttaatttatac

SEQ ID NO: 136995 - DNA, 816 bp, Cannabis sativa
  modified_base (136)..(141): a, c, t, g, unknown or other
agtgataggaaaatttcagaatgatgaaatggttgtgtacttggtgtaaaccattcctagattcataaatgtcctgatcgtgaactttagaaaggctagaattattaaccttggtttgcatgtttgatagctattnnnnnngattaggggtggaccatcctatagtcattaagataagatagtgtttgtttgaacaaatactactttctaagaaaatgactaaatctgaaagtagcaaagtagaggagatattttttttttattccaaagtgttctatcatcttattcataagatgattccacggcctctgttgtattgatgaggacacaataccacttaggtgttcttttagacaaaaagttacggtaccttgtcgtagtgggagggttctaagtaactcaaactgtcgggacttagaagaaacttgtgattaaaaatccattgttagtttaaacatgtaacggattgtcagaatgaagaactaagaagcaaaggcaagagaactatggttaaaactattcatatggaataaccaaaaggttttctcttacaaggacaagaaaggaaattttgaaaataaatcgatttaatggaattaacagaacttcgtgttcgtagtattataggttcaaaattatttaaacctatgacttgtggtatacctggtgattaaaatactctagtgcaagcaacttactttagtaagatgctgaatcattttttttctaatggctagctctatcgaaagtccttgaatcctagacatagattttatttatctaaagaaaagtttcaactattccagaaaagataaa

SEQ ID NO: 136996 - DNA, 763 bp, Cannabis sativa
  modified_base (729)..(731): a, c, t, g, unknown or other
gttgtaccttatatgatcaacaatgttaacccatctgaagtagataagctggatgcaaaattgcatgcttacgagtggacttttcctgcaaggaggcctccctccaattttgtagacaagagaaaaaggaagttagtaattgagtatgatgcttctaacaatgctgcttcttcaagttcaaatattgaaataatggaatgtcgtactcttcaatgttcatattgtgatgagaagggacatcaggaacaaaaatgtcctagacttctagataattcaaacgaaggtaacacttttgtttttgaatctgtgttttagagaatgaaaaaatcattgattgtttattctcgatctactaaccatgtttgttcttcgttgcagctgcttgaaacttgggattatttaaatccaagggagtttaagctcaaagttgtaaatggcgaattagtattggtccaagctaaaggaaaagctcgcctcaagtttcaaaagaaacttttagttttaaacaatgttttgtttattttgaatttaagtaaaaacttgattagtgtttcatgttttcaaatcggatatacaaattgctcttaataacgaactttccaatagctaaatctagaaaccataaaaagaaaagcgattgataataatgatgaaatatgtctatggcattaacgactaggtcatataggctatgacagacttcacaggttaaccaaagatggtccattnnnaaatgtcatcttaggtgaattaccagtttgtg

SEQ ID NO: 136997 - DNA, 604 bp, Cannabis sativa
agtgtaaaaataaaaaatttcctataaataattatacattgtgtatttttttaataatcaagttatatatgccaacaaacgatatttagtttttttttgttggtaaaccactttcatatatcattttaattgtttttgttaattccatttttaatataatgagacaaaaatattttataatttattatttaatttcagctgaggtatttaaattagtttttatattttgtgtatttaatttttatatcaattaatttatttttagaaagacagttgtgtagcttttttatttatggaaaataacgtaaaaatggtaagtttggttactgaattcttttttacttatccagttgtgattttatgatcttgtgtggattttctagtttggctgatcagatttattgaggagaaaaccggagtaaaactttcattttttataaaaagaaagctacacttgctgctcacgattctgtaggtacagaaataaaaattactgggctgagtgaagatcaattttagggaattttctaatgagttgtggtcttgttcagaccgtgtctgagctgtcaataaggtgtacattgattaaaaatacaccttatag

SEQ ID NO: 136998 - DNA, 660 bp, Cannabis sativa
  modified_base (533)..(534): a, c, t, g, unknown or other
  modified_base (632)..(634): a, c, t, g, unknown or other
ataaaatgatttctgatctttattaattaataaatttgattatattgaaatgggttttactcagggcacaaaacccaaccttttatccttaaaatacttagcttcctataaatgatatttcaataaactaatataattactaaaataagagctcttccatttatctttactaagccaagctcaaaggaatgcatcatttcacttctatgtctaaatagaagctatagatttcgtatttatgattagtgctcccactcaattgtactatcatatctccaagatgtatgtctgggctcgaaccaattggtaagcttcaacgaataactctaagaacataaataacactcttgagatcgaacataaccatataaggattaagatcttttgatttaagatcaacttggtgatattgacttagaaagatacaacagtaaatttataatatctttaccatgttcaatatcggtccagttcaatatatactccatacattcgatattagcatactttaccaataccttggaaaggacatnncacttatccatggtgtaagtaaactttatcactaatataactaccacatcgatgtaaatttagtgcattgatgaatcatgtgttgggttttatgcccnnnataaaactctttacaatctgattagt

SEQ ID NO: 136999 - DNA, 1054 bp, Cannabis sativa
atctcaaagcataatgaaacttaaatcttctggtgaaattaatattacccctgcaccagagccttgctcgttggatgcaccatccacatataacttccaattgtccacgtctcgatggacaagtggaatttcttctggagttataccttctattaggaagtctgccaaggctcggcccttgatggatgttcaagggtggtatgttatgtcgaactgccccagttcgattgaccattttatcaatctttcagaagcatctggttttgataaaacttgtctcaagggctgaactgttaacacttttatagggtgtgtctggaagtaaggtcgtagcttgcgagatgtgtggactaggcacaaagcaagtttctcgagagggggatatctatattctacccctaataaccttttacttacatagtaaatgggttgctggtgcttaccctcttctcgcactatagtcgcactaatcgcatcttctgagatagccagatagaggagtaacatttctccagttattggtttcaccaaaaatggaggcatcgctagattaatttaaatgttctgaaaggcctcttcacactcttctgtccactcgaatttcttgttgcctcataatacattaaagaatggcaaacacttatcaaatgacttcgaaataaatctgttgagttcagctatccttcctgttagggcttgtacttccttaggctttgttggtgatggcatgtctatcaatgccttgattttttttagggtttgctttgatacccctcgcgttgactatgaatcccaaaaattttcctgaggatactcaaaagaacatttttttgggtttgacttcatattatacttctttaatattttgaagaattccacaaggtctgtggtatggttcccactttttactgactttactaacatatcatcaacgtaaacctccatgttctttctgatctaatttgcaaacatctcgttcaccaatcgctgatatgttgccctagcgttctttagcccaaacagcatgaccttgtagcaatagagtctcatgttg

SEQ ID NO: 137000 - DNA, 665 bp, Cannabis sativa
tgtagcaactacagaggcaataaaggaagcaatatggactaaagggcttatgaaggatctaaacttatcggacaaaaatcctatagtctatccacacagtcaaagctacatacatctttgtaaaaaccctatgcttcatgatagaacgaaacatatagagatcaagtaccacttcatcagagacaaagtgacacaagaataaatcaaaatcgagaaagtaccaaccgagaaaaacccagctgacattggcactaaaatcctaaacctaggcaaattcgagcactgcatggatttgctaggtatgagcaatggtgattaaccatttccacatgagttaggaccctcagaaaagacacaaaagacattcacctatggttagaaaagctctagttggattgaggttgaatttgttggaattaaatccaactaaatctttcctaaccataagtcgattacaaagacaagcaacttgcacaactacaacaacctcaatacagttacaatcaaaagatcctaactgaaataacagaacaacaaaagtctacctgctagctcatcacccgaagctacttacccttctcctatcccagcagtataaatgactgctcatggtttcattttttgcctagatctgaagacatagagagagagtgcaacctgtaatt

SEQ ID NO: 137001 - DNA, 1104 bp, Cannabis sativa
  modified_base (971)..(972): a, c, t, g, unknown or other
aataggacaaaacccgaacccgaaattggacccaagcccgggactcaaactcacacctagacccagaatcaaacccaaacctagacctgcacccggacccatcctcgaactcagactgggatcaaaacccaggacttacacccgaaactaaacccagactcaaatcgagatcgaaacctgggagtcagacccgaaccttgaaccagacttaggaccctaacccacacccagagcccgatttagacctagaccgagatccgaacccgaaccaaaactcggacaaggactcgaaccctaacccaaactcgaacttggaatcacaactagaactagaaccggactaggtttaggaccaggaccaggaccaggaccaagacttgaacccaaacccaaataaaaacccaaactgagacccaaacccaaactgggactaggacccaatccgaacctagaccgggacccaaatccagaccagaaccaggacctgtacccagaatcaggatagggacctgggaacgaaactatgaccgtcacctaagacccgaccctagacacggacttgaatctagggtcgggctcgtgacctggcacccgaaatggaactagactgggacccgagatcgggatccaaatatggatccagggcttggacctaacctgtagtcagtgtctggatctgggaaccagccccggacccctagatcaagacccgaacccagtcccagatccaaacctggaccttaacctgtaccctatgactcgaaattggaaccaaaatcggaagtagaccgggacccaagaacgggaccggaaccaagacatcgacctggacctagaatcgttaccagacttggacctaaacccggaaccataaccggaccaggacccagactccaacccagacctagaccttaaccgggaaccagacttagatctcaaccaagatctggactcggtgccgaccctggacnngaactcagaaccaaacatggaacgagactcgggacacagaaatggggtcaggacctagaaccgcagcacagtctcggtcccgaagccaaactcagaactgcgtcccatgacctgaaccagaaccagaccggg

SEQ ID NO: 137002 - DNA, 547 bp, Cannabis sativa
  modified_base (240)..(243): a, c, t, g, unknown or other
agcttactccgaaagaacactttagaggattgagcttcattcggtattgtcttaggatctcaaagcattctttcaagtcttcaatgttcccttgggctttcttagacttgaccagcatgtcatcgacgtagacctccatgtttttgcctatttgctctttaaacatccggttgaccaacctcttataggtggctccagcatttttcaagccaaatggcatcactttgtagcaatacaagnnnncctccgttcgaaagcttgtatgttcttggtcagctgggtgcatgcttatctgattataccctgagtacgcatccatgaaagttagaatttcatggccggctgttgcatctaccaaatgatcgatcctcagtaaaggaaaaaaatcttttgggcacgccttgtttaagtctgtaaagtcaatgcacaccctccaggtgccgtttggctttggaactagtacggggttcgagacccaaactgggtagtaggcctctttgatgaaattgttgttccatagtttttccacctcttcttttagtgcctt

SEQ ID NO: 137003 - DNA, 585 bp, Cannabis sativa
ttccagtctcagtttgggtttgaggctaggtctgtgctcggttctaggtctcggtccgggtcctggtcacagtcctagtattgtgcaagggtcctggtttgacaattcttgttcacgttctaattttgggtcccaggtctagatctgggttcgggttttgttcttcatttgggttctgctcctagtttgagtcccaaatctagacacccactactggtctgttccaggccgtgttacccgaatctcgagtcaagatctggatgaccgtcacgggtctcgatcttgttctggttcaggtcccaggtcccatatgtgaatttcagttccagatcgagattggggtgcggttctaggtcccgaccctagttctgtgtccgtagtttggttccatgtttgggtctgagttcaggttcgggtttgggtcccgagtccaggtttgggttgcgatccgggccagctcccaattcgggtctaggtcttatatggagttcgggtccttgtccggttacggttctggatctaggtcaaacttcagttgtgattccaagtcaaagtcctagttccagtcccggtcaacttccggtt

SEQ ID NO: 137004 - DNA, 736 bp, Cannabis sativa
gccaagattaaatcactagatttcttatcttttaattttggaatcagaagataagaatgtttacactataaaatatggatatgatacatgatatgaggcacaccaaaaatatatacaatttaactttgaaaaaaatatgaattcttatcctggtagttcatcgtatttatcatcatcgtcttcttcagatgatgaatattatgatgatatagaaatgcaagtggtaggtcaaatcactgctaacaataatttttgtatcgctcaacaccaacaaaatcaaagctcacgtcgaggctcgattcctggtcatatagttattaaccgtgaccgggaaaatgctgatcgtaatcttttcaacgactattttgcagagaatcctcgatttaccgatttgatgtttcgccgaagatttcgaatgggtcgtgctttattccttcgtattttggatgctatacaaagacatgacaattactttgtccagcgaagggatagaatgggaaaactcgggttatcaggcttgcaaaaagttacagctgtatttcgtatgctagcatatggtatgccggcagatgctaccgatgaatacatcaaaataggagaatctacaactttagaaagcttgaagcgattttgtcgtgctgttgttgaggtgtttggagcccactatctccgatcacccaacgctcatgatgttgcaagactactccacattggtgaacgtcgaggttttccagga

SEQ ID NO: 137005 - DNA, 1281 bp, Cannabis sativa
aagcgaagtcaacattttggtgctttcattgagtgaaggatcacaaattgctctttattcgacatccaaccaccaatacgatggtgcaaactctgagaggtctgtctgatccaaaaaattcacagacgctggatcctacatcacagaacccagggagttcaaggtttctgcctgttgttaatcccggatagacgggaagcgtggggaatggtgaaacagttcctatagatggaattgtgcctagtgtgcaagagactgggaataactgttgctcacccaaccagagcgtccataatacaagtgttttgccaagaaccaacgcctagactactatcggagatgccacagaattacaaaatctctgtgacgcgctcggactcatatagggtcataacaacaccctgcataatgatcaggacgaactgcgtgctacagtaaatctcgtgttcgacaaacaaaggcgtatattcgccgaatggagagataaagagatggaggcattaagggctcatcatgcagagattgaagatcgtagtcggcaagccaccgtgttgatacgaaaagcctaccaaactgtaggtcagcaatcgccgaacgtcattccgctgggagaaacggaagaggatccaacaatgaacacttcccattctactaatggtcagccgtccaatccccagtcacgatttcctcttgtgggcccagcggtaggcgagcagaccttgtctggtaattcatcaggaggagtcatacctaatggctccaaccagatgaatggtgccattacacccatcaaccaagcgaatcaatcgctaagacaaccaggcatttctgtgtttgaaaggttagaaaaaacccatgacctaaggaacgatctaaacaacaggaggggaacagatgatcagatcattacagcaaccgtaccgcccggagcccgtactcaaatacccgctcaaaaagatgctcacgtaatccaagttgcccagaatgtcgagcatgtcagcccagccgtacagactccgctagacgaactgaaaaatatgtttcatgacatggctggacaaacaaataatgatcttgagttagatcgagcacgcggaactcctttctcaccggagatcaatcttctgccactaccccacaagttgaaaatgccaacgtggaaaatgtacacggggagagaagatcccctttcgcatctcaagtactttgaaatataaatggatttgcaaggggtacgaggagatgtatgctgcagaatctttcctgccactctgtcggaag

SEQ ID NO: 137006 - DNA, 602 bp, Cannabis sativa
ttatacattttaattatcttattatgttgtctttatgtatatgtgtggaattatagctccgaaatcttgatttgggtctcgagagtcaaattaaaaacaagccagctaattttagcttcgctagctttattattgtgcgtgctgattatgtccccaaacaacctaatttgtttgactgcggggtatttactatattatttatgattacggcttgtaaagttgatgtgcgatcctttcaggttagacatttttaagctcttttgttttttatttttatttataacattatttttttcaatcttgtgtgattaatttgtatttcttttatgtttctgttatccagtttgattccaatgaagaaagatgtttcatagcttgttggttggcatattcaaattacaacttaaatagagagaaacttgtgaaggatgtgacagacttctacttgagtagaaaatcataaaatgtcatttaatgatagactaaactcaaatgttatcatagaatgtcatttaccttatttatccttgcattttcatatagctaaattgttcttacacagtaagatggttatatgtcaataatggcatataacttcactt

SEQ ID NO: 137007 - DNA, 961 bp, Cannabis sativa
  modified_base (644)..(648): a, c, t, g, unknown or other
tctggtctggtgctggtccatgggtctgaaggtagcaggagatgagggagactatggaatattaggttagggtgttcgagacgagagtgtgctacaattagcgatttttacaaaaaaaaaaataaataaataaaataatagattttcggtaaaaatttacaattttactgttacagaggattttgtacaaaaataatgtctttttataaaataaccataaaataataaaacagaataattacaggaacaactaaaaaataaatgtagaacaatagtaaaaacttaacacaatacacagtataaacttacacagtatttttgaaaaaaattctgactcacagtaaaaaagtaaaaaaattagaaattttagtatatggtgtaaaaacttctagaattaggtaataaaaagcctatataaaaatatgtttttttacatgtttttacaactttatcgtacaagaaagtatttgaaaatacaaggctacatgagttgcgtttgaggtgtgctctttcagaaattgattggcaaaatactcaacaattatgtgataacttatagttgtttcatgaagtgacacaattattttttggaacaaagtaccctaccgccaatattttttcccaaaaatatgtgaaattaagannnnnattgaatcatggatgtcatcagatgtgggacatgaaaatttaaataatatctaagttccagaaatattggggaaagattcacgggcttatgtgtgtggcagttgttttaaacctgaggtacaagtttatgttgcttgaatattattttcttgtaatctatggagatgagcaatatgtaactgaaattgcaaatgttcgtgagttttgttgcgagctagtagaggagtacgggtataagtttcctcatttgagagaaagaagggtttaggtggaaaatgtatcaacatcttcttcaacacggcgattggatgcc

SEQ ID NO: 137008 - DNA, 1012 bp, Cannabis sativa
ataaaaatatctatcttaaattaattattttttaaaaaatacataataattaaattaaataattattcaattatttatatatatatatgtattcataattcataactatatatatgtgtaaaactttgtagaatataacaaaaatgttttttttatatagaaaaaatttattatgaattgaacaaaaataaagtaggtgtgagattatgtagaagaagaaacaggtgtgagattatgaatcaaactttttcataatgcattattttatattccaatcatataaagttgatgtcatcattgtagttcctattgatattctcaaatttctaaacttaacactcatgttctaaaataattaattatttaagaacaagattcctaaaacacaaaaaaaaatcgccaaaaataaaggaaacataatataaagaatgcaataaaaacatgtttccataaatgaaaaaataaaagaaaaaaattgccaaagaatcgaaaattatgcccctctttttctttaattttttcaaaatatgcccccaaattaatttgcaaaaaacgaacacgacaacacataatgacacataaaacaccaatcaatacttaagagcaaaagtagtgtctaagaaaataataaaacataacaagaaaaataacaagaatttttaagaaagctcaattgataaaattggttatagaatttatttttttttaatttgtattattttttttataaaaaacagaaaaataatataaccttgatatttttgcaacaaaaagtacacaatgtctgcttgtctttgtccctgataaaaaaatcaaactcataagaatagtcagaaattattttatcaagctaatgaagtagtagaatgaggtcatactggttatgcatgaataaaattgactcagtcaccaagaatattaaagaaaatcaaacaatatgtaacaactttataacaccattttcgaggatatgaaaattttaccacaaactgtgtcaagcataagtgtgtga

SEQ ID NO: 137009 - DNA, 1019 bp, Cannabis sativa
  modified_base (936)..(936): a, c, t, g, unknown or other
ctatcttatgaatcttatctctgggcgtggccccgtggactagtaacaatatgaaaagattgttgaaaccaagtaccaaaatcttgtgtgtttttatttttctacactgtttgtctttcaaggtttcttctagagttacagagttattttctgtaattacaaaaaaactgtttcaatacgaattttattatttcgcatttaattaagcatttaattaaataataaaacttgaaatactaaaatacgatatttcataattaatcacccacataaaaaataaataatactaattttgatacaaaccaaattaaaaaatagtgatctatataacctatacgtatattactcacaatggtgtctaaaccatgtgagactttttcacaaaaactcttatattactaaaagtatcaaaaaataaataaaaaatgagaaaaaagatacactacaatgaaaaatttatagcatgctaccccattttttgtgtggactttcctttatatatattgatattgattattttattttattaattaaaaatgagaaaaatagataaaataatatcaactaaaattcatatagaatgccacataatttattttaaaattcatatttttgtttttaatttatatataaatctacaaaaagtatttttaggtaaaaaaaatatcaatttttatctctaatgaagtataaaaaatatcaatttttatctctaatgaagtataaaaaataaattaaaaaatgagagaaaagatacactacaataaaaaattcgcagcatgccacctcacctttgtttggcctttcctttatatatattgatattaattgttttattttattaattaacaatgagaaaaatagataaaagaatatcaattaaaattcatatagtatgaattttaattgatatttgttggaattttatgccctaantaaaatctatttcaatataatcttattttttatcaatagaagattaaaagtcatttatgtttatgtaatgaccgctttagtaa

SEQ ID NO: 137010 - DNA, 879 bp, Cannabis sativa
cttcaaaaaactataactaattcataaaaaatccaaattgagttttaaaagcctaaattcattaattttttgtctactttcgagtaaaaatatttcgagaacgaatcgaaaaatattttataacatacattgtgatttccatacaatcatcaaatttacacataaaccatcatcaaaccatccatgtcaacacaaacatcgttttaaatacgtattcatgaaagtaaattattaccatggctctgaggccagttgttggattatgttttactagaatctagatgtactaccatgtatgttatttaacatccgaaatatgaatttctaaaacaatttattttaaacacatataaagtttgagaaaccttacattggttgcaacagaattaaaggactccttccgctcagacctctaacccttgtatcctttatgtatcagagtatcaccaggacctgagcctgattctccttctcttgaattggattcttcacagtcttatacactatgattgagtaccaacttgatatgtgtgggcgcgtactctatcactatagggttcgaaaattgaagagagaaagatagagagagaaggatttgaaaatagaaagaagagaagtctcaaaatttgactgaaggcaagtgaattcttctccttcaaattttgagaccatcactatctatttataggaatccaactaggtttaggtttaaattatttggcattaaaaaattaataaataaatggtaaaatacaccacaagtggcgtccatggatgtgggctcaaccactttgcaattttgccatttttcaactatttatcttattttctcaaatatgccatattttccaattgaaccacttaaatgccaaaactatt

SEQ ID NO: 137011 - DNA, 644 bp, Cannabis sativa
atctgcaaaatcaaaagataaaaagcgtgaaaatgctccaaacatgatttaaactaaataaaaaatatactaaaattaatctaaatttaatactaaaaataacctaacatttagatgagaaggtttgtttgtatttatttttttatttttttaattaattttaaccagttccaagtactttttatattgttttattttttttccagctaacatatttgaatattgacccaatcatgagtttgctaataaattgcaaagatcgtgttgtatttattttgtaatctttctcagttggttcttcatttagttaaagatcgtgttgcattttattggtgttatttcttagctaatttcaaagggatctcctaaaaacgcactagttttttgatgtggttgatttatattattattttttttaaaaaaaaaaattataattagtttttgagtagttgtttgttgtatttttttgctcattttttgtagaaccggttctatttaatttatgcctcaatgttgttggaaacaattcttttttttttttttttcattatagcctatttgagttattctatgttatttgtttgtattcattatgttatagaaccagttctgtaacgccctaatctatagggacgccacgtgtg

SEQ ID NO: 137012 - DNA, 655 bp, Cannabis sativa
tgagaaaataaaagcaaaaaaaaaaaaggagaagaataagaaaaagacaaaaaattgaaaatgtgaaaataagaaatgatagaaatgacttatatttatccctataaacattctactcactcttatttaaaaaaaaaaaaaaaaaaaattctgtataaaccattgcacacaaaaataactaactacaaatttgaaaaaaaagctaacaaaatccgtggagagcttttaatatttttttttggaggttggttgacgtcctggaaggatggatatgatgggtcgacgtcatcaaaatgaaaaccaatttatttaaaaactttatgtttaaaaggtatagtttagaattataatggacctactatatttttgaaattaaattacaattaatgtactgagatgttaattttccaatattttttaaacatacaagtagaataaaattataggacgtaactatagtaaaacactttttcaaaaagaaaaaaaaactatagtaagacagtacttttctttctctcagtaggaatatttttgtttttggcatgtggagaaattataataaaaataagagaaattcctgtttcaaataaataaataaataagagaaattatcccatatactacttttttaacctttttgtttttcaaatttacg

SEQ ID NO: 137013 - DNA, 968 bp, Cannabis sativa
aatatacaatttttgataaattcagaacatatagtaattcacaattacagtgatgtcatcacaatggaaagtaattatgattatatgcttcaaagtatagtcctataatttatcaatgtagtgaatttacattgacatgataatcaacgagtttacttacacttggataagtagtatgtcctttcagggcattggtaaagtatactagtatcgaatgtatggagtatacatcagactggaacgatattgaactgtgacaagatatcttaaacttactgttatatctttctaagtcaatatcacttagttgatctcagattaatagatcttaatcatgagatggttaggttcgagcttaactgtattatttatgttctttgacttgttcgttaaagctgaccaaatagattgatccaatacttacatcttggaaacttggtagtacaattgagtgggagcgctaacaatagatacagaatctatagcttccataatgacatagaagtgaaatgatgatttccttcgagcttgagttaataaagataaatagaagagctcttatttcagtaattatattagtttactgaaatattatttataagaagctaagtgttttaaggataaaatacattaaatggtagaatggtaaattttgccctactcgatgtaaatcatctacagaggatctttgattatttagattataacaatagataattaatagcgtatctatatttagaacatatagagtgttctatgtaatcaggagtgcaatttcgaatctatagtggagtcaggaagaattaataagttagggaattcactcggtaaattctagaactacgtattggcagcttgattatataggcccatggtccccatagtagttgagataatattttcttgtagactcagatattggttttaattaactaattagaattttaaattagactatatcttattta

SEQ ID NO: 137014 - DNA, 506 bp, Cannabis sativa
attgctgcagttgacagttctgaacaggggcacgtatgatggggctgaatcaaaatacagggtacataattttcacttcaaagtgaaggaaaattgtgtagagtatttcattcctgggagcagaacttaagcaatgcatttggttatattcatttggttttggttacacactggattttggtacttttacatttcagtagtgtaacttttaaccaaaatggactggtctatgtttacgttttggtactttcatcaccaaagagattttttttctagtcataagtaaacacaaggtttgatggttttatctattagcgcatattatcctataggagacgaaattatgttttaagatttaatttctctatattgtaattttcaaaaaaaaaaaaagatattaattttaattaatatgtttagaatctcttgtagaatttcaaaaaggatattagatttttttttttcaaatggggaaaagatattagatttaagagtcactgtattat

SEQ ID NO: 137015 - DNA, 836 bp, Cannabis sativa
aaaagaaacttcaaacaccatagatttcctgctcttattccttcgccgttgtcagtctacattttaccggcgatcaacaccaatatccagtctccacacttcatgtaagttcttcatgtctagtactcttgcttactgtttgtttatatagcacattttatgatttctgggttggatgtttgaacttctgggaatatttttgtttgagttcctgtatgatgtgttagattcctcctcttttgcgtttagattacttcttttcactatgcttttgtcgaggaaccatcttcgtcccatgtaatgacactttagggtttagagcagacctcgtcttttcgattttacccttttttccttttctctctttacttttttgcaatgtcactatccgtgggattcttgcacctgactcttgtcaaggaaaaccttttgaggctctcttttttggaaagtgtccggaatgggcctctttccagcggttagaggacccccattccctttttgaattagggtttggtttggggcctaactgctggattttttcaatctttttcaagaccaaaaatatctacttctgcctccggttctaagtcttcaaagaaaggagaaaagcgtttggccaccctggaggaggtcatgcagggtcctatggcccaagaaggatacaagtcccgcgccaacgggtgggaagcggctgagcttcgctctaccttgacctgcactcaccagctggagaagatcgtggtggtgtcaggcatcaaaccctctacctccaagacctaccaccagctgcctcgggacgaggagacgcccaaccataactatgggggcttcgg

SEQ ID NO: 137016 - DNA, 770 bp, Cannabis sativa
  modified_base (458)..(460): a, c, t, g, unknown or other
ttccttttttacagctttcattaaattgacacaatcttttatgtcattattcttttttctttgtttttctattaatttcttcacatttggagttcgtgtttatgggttgtgtttgtgtcgtattgagacttaaatattataagtaaatgcgaaataattattatttaaatagaataaataagattcaatattaaattgcaccaacaacaacaacataataccttgtaattattattaaagtaaatagtggcataagtacttaaaagttttaagtttataagtagtataaacctaatgtttatttttagcagcataagtacccaatatttataaaactgtaatttttctctaattattatgttattgccttaaacatgacacatataaagcccaaattttaaatcattgggtgtagacaaaaacatgcaatattagttacttccaaatgttcttttaannnattcaaaacggagtctgtactgacaaaattaaagaaaaattacaattttacaatggatacttaataccgctaaaaataaacattgaatttatgacgtttacgaacttaaaactttagatacttatgccgtattattagaactctttttgagaaagagcttcctcataaactaaattaaaagtagttgcaaaataaaccttagagattgaacatccaaactagttagttaccaaataacattaccaatcatttagctcaataaaattgctaatagaaaaaagaaacttatccattactataattagaccat

SEQ ID NO: 137017 - DNA, 780 bp, Cannabis sativa
agttcttgccgatcgcaccacttcgtaaactgtagttgttttgttgctccacaagatgtcattgcgagccaaccaaatttgccatgctatcatagccctttcctccactacagttgttgtatccttcagcaaagcttccccaaaccagttagcaaaatctggtgtcccccctccccctttaaagtcaattgctgaaatattccaacaagatttagcaaagtcacattgcataaggacatgggaaattgtttcaatatcaacatggcataaagggcatgttaaatcgacattacatgttttgtagtgagctgaaccttggttggaagacaacccgacaacactcgccatagcatatgcttaactttagcaggtatgtccaaaagccacagctgctgccattttttgtctgcaccagcagtcgaccaagagccattttgctgctgcatcagcttatatgcactttgaacagagtacccacctgaagcttctttagaccagtaccagcaatcatcacaaggagtttcacttaattgaattgaaaaaatcaagtttctgtcatgagcattgaatatgtcattaactaactcctcatcccagcccctcccttccatcttcataaggcaatccacgttcctcccaactagacttggatggacagtcgtgatacattgatcttcattcccaggaagccaaggaacaccaataaccgcagtcaacttaccatctccaatagcccttcttgcacccatcttgaccaaacttttagcctcccatatacta

SEQ ID NO: 137018 - DNA, 766 bp, Cannabis sativa
ggtggaaattagggcgggatgagtcttcggttaccaagtataaacaagctaagaaggagttggctaaagcttatgtacaacgagaagtcttttggcgtcaaagatcgaagcaattatggctccaagaaggtgataataatagtaaatattttcatgctaatgctactaatcgacgtcataataactttattactaaattcaaagataataatggtaactgggttgattggaattcgggtctgcctcaagttatggttgattatttttctacatttttttcttcttcaattaattcttggctggaagttacgagtgttgtggacagtcgagtttcagctgaccaaaatgtcgacttattacagccgattactgatgaagaggtttgcaaggctttgttttaaatgcaccctgccaaggctccgggacctgacggaatgacaccagtattttttcaaaaatgttggtcggttgtgagtagtgttgtaattactttggttcggaatttctttcaaacaggacatcttcctagaggtgtaaataatactaatttagtgttaattcctaagaagaaacaaccaatggacatgggagacttaagacctattgccctttgtaacgttctttataagattattttaaaggtcattgctaatcgactcaaagctattatgccttcaattatatcggatactcaaagtgtgtttctccaaggtcgtttaatatcgaataatattatgatttcttatgagataatgcattatttgaa

SEQ ID NO: 137019 - DNA, 567 bp, Cannabis sativa
agttgacttcgaaatgaatctgttgaatgcagccatccttcccgttaaggcttgtacttccttaggctttgttggtgatggcatatctatcaattccttaattttattagggttagcttcgatgcccctcgcgttgactatgaatcccacaaatttccctgaggataccccaaaggagcattttttttggatttaacttcatattgtacttctttaatattttgaagcatttcgcgaggtttgtggtatgactcccattttttactaactttactaacatatcattgacgtaaacttccatgttccgtccgatctgatttgcaaacatctcgttcaccaatcgttgatatgttgccccaaagttcttcagcccaaacgacatgactttgtagcagtagagtcccatgttagttacgaaactcgtatgttcctgatctgggacatacatttttatctggttatatccagagtctgcatccataaatgacatagctcgtgcccagcagttgcatccaccaactggtcgatcatgggtagtgggaaacagtcttttgggcacgccttatt

SEQ ID NO: 137020 - DNA, 609 bp, Cannabis sativa
agcgagatgcggaaacctggaagttatatgtggatggtgcatccaacgagcagggtttgggtgcagggctgttattaatatcgacggaaggctttaagtttcactatgctcttagattccaattcgacacatctaataatgaggctgactatgaagccttgatcgccgtcttaaagatagcaaaggccttgaaagttaaaaacctcatttgtcatagtgattcgcagctgatcgtaaaccaggtcctcgaggaataccaggccaaaggcttgaaaatggtgcggtatttagagaaagtctgaaagaacttggaaagatttgattactttaaaatcgaaaaaattctaagagaaaagaactccaacgccgatgccttagcaaaactggcctcgcagaatgatctggacgaactaaatctggtactggtagaaatgctgagcgaggcaagtatatgtgaaacagaatacgtcgagatgatagataactctccaacatggatgatgcctactattaattatttactcgacaagcaacttccaaatgacaaaaacgaggcgcgaaaacttttgtatacagtgcctcgctacacaatgatcgaaggcaaactat

SEQ ID NO: 137021 - DNA, 1100 bp, Cannabis sativa
  modified_base (296)..(303): a, c, t, g, unknown or other
agattgttcaggatagattttgaggacgaaatcctcttaacggggggataattgtaatgatcgcttttgtaatatggattagtaaagccaattagcactaattattattatttttataataaattgtggatttaaattaattgtgggacccattgttagaaatgggcattagagttataatttttcaattttggatattttattaaactctagtagtattatttgaattatatgcgaattatgcaatttttacaatttttgctcggcgacaatggaaaatgcgatggatggctagnnnnnnnncatgggtaggtctagaaccttatttcttagtgggatgtatgttggagaaaatagaataacaagtttgagcagggttatggattttaaccattttacccctagtcttgaaaatgcctaagttataagaagaagggcaatttattaattaaccaagggagtgatttggtggctgccttaggtgttgacacctagcttatttattttaagcaaggattaattagacaatcctttttcatttagagaaaaatcaacaaaagaccgaaaatagagcaacctctcttcctctctcttcgaaccagccaaaagcaagagggtttgctgctgatcattagtgttttcagcaaggaattcaaggggaattcaagttgaggtaatccctagatcaattgttcttagtttttcaagctttgttgttggtttgaatttgtgattttgagttataggtgctataagcgtttgatttgtgtttggttcgaattgtgagctttatttatgttgattttaagctctagatgctagtttagatgtatggtgatggaattatacaagtttgatctttgaaactcaaacttaggtatttaatggcatgttttgattcagtgagtttttttgagttttaatggttggaatatgttccgtttaggtactctggaaagtttgtggcaattggataagttttgagcaagttggacgttgtttggggaaaccagtgcaaaccggttaatcgactggccatgacctgtaaaaccggttaaccggttttggcaaattccccgaactactcattttctcaattc

SEQ ID NO: 137022 - DNA, 772 bp, Cannabis sativa
ctcaaatacgctatcatcttctcccctcgagcgtcgtattctccagatacatgatttaccacaagttgtgaagtactgcagatctcaatgtgctcggccttcatttcctgggctagttttagaccggcgattagagcttcatattcagcctcattatttgatgccctaaatccaaatttgactacagcgtgcaggtgttatcccccaggtgtgacaagggcgattcctgcaccggatagttgacttgtagccaacccgtccacatgtagtttccaagtcagtttgtcttcactgttacttggctggggtatttgtacttgctcggggttgttttttgatacgctttcttccttgcccgtgcatttagctacaaaatccgctaaggcctgacctttaatcattgtttggagttgaaagataatctcatactgacccaactttactgcccacttgagtaactatccaaaggcgtctggtttttgcaatatttgacgcaacggttggtcagtgtatacccgaacaggatgagcttgaaaatggggcctcaactttcttattgctagaattaggcaataagtgaattttctatcaatggatatcggccttcagcctcaatgagtctttactgatgtaatagactgggtgttgtatgctgttttcctctctgatcagtacggcacttacagcatgctccatgacaggcaggtatatcccaagttattctacgtccagaggctttgagagtacaagaggttttgcgagttgcattttt

SEQ ID NO: 137023 - DNA, 1423 bp, Cannabis sativa
  modified_base (218)..(224): a, c, t, g, unknown or other
  modified_base (366)..(369): a, c, t, g, unknown or other
aggaagaggaagagagagtgaggaagagaaagagacagagagagaaggaaataaaagggagggtattttgggtagaaattgaaaacaatagcatttaattgtatataataattaggagtctaaattttgttagagagtatttttttgagcattaaaaatgaaattttccaaatcatattgcattattaaattaacacctattattattattattattnnnnnnnttattattattattattaaggttaaataaaataatacactcatataaatatactaggttgatgttatgtacaatgcacgtataattagtttttttaattaggttcaattaggtaatttaagtgcaatacatgtatgtttaannnntttttaattaggtaatgtatttttcttaattgttaaataggtttgagatttcgatctttaagaaaaaaaaaattagctattctaacattagtgtgtcatttggatatgaaaatattggcagcaaaatcatctgaactttacaatttttaacacttaaccacaaaaattaaaattttggtggcaaaactaactgtactccctttctgttagctatttacctcttccatccaaaacaatatgttaagtaccgcgttggacatgccacggtatacacacaagtttacacatggcaaatttttagtggtccacgtaattttaattattaaaatattataaaaaataatgtaaaaattataaaaaaaaaattacaaaaaatatttattgtatttttttcttttctttttttttttcctgaacaaaataaaccctaatttattatttatttttaatatttaatttattttgttttcatgttttgtaataattttgaaaatatttttataaaagataaaaaagggaaaaaaaatttgtaataaaaaagaaaagaaaaaagaaaaaaaatatttttttttatcattattttttaaaataatttttttctattttctaaatttttaaatatttaaaattcttttttaataattaatatttcattgaccactaaaaatttactgtgtatatacttttgtaaactgtggcatatccaccgtggcaactaacagagtcttttgaacggaaggggtaagtagataacagaaaaggagtttggatagttttaccaccaaaattttagtttttgtggttaagtattaaaaaaaaaaataagttgttttaccgccaatatccctttggatatgattataataaacgtatttttaaaatttttaaaattttcttgattaggtaacgtatctgataatgcatatattgtaatttactatattattaaccaaaactcacaaaattaaatttgagtgtgtctatatataggctaaattcgtaaatttgatataaagattttcattcccatacttaacaaaaagatcggaagagc

SEQ ID NO: 137024 - DNA, 711 bp, Cannabis sativa
ataaactcaaaaagttttcttaataaagatagatagatatagagtttattaattatatcacctaattaatagtgtacgtataaatgtaatcattagcattttcaactatttattcatagatcagcaaaaagatctacaagttatatataaaaatatatgtgataaatttatatatatttctatatatggttcgtacaacgttttgctagagagaattatatttaaatatacacaaattatataccagattgatcaactacaaaatatttgaagtgataacgtatcatttaaagtataattataattattatatgtataacttgtctatttggagatgatataattctaattaacaatttaaaaatcacaaatatgttattaatatttttattaagactttatccatgtccttattattatttcactaaaatcttgatagagatcagagagagatagtgctatatagagattatacttaatacataattatctattattacaaaaaataatatatgtatttaatttgttgtacgtacgtataaaaaatgtacatattatatcattaattttagatatgttaagccatgttataataattcattaaatatttttaataaatcaatataggcaactataacaatggatgacaaattattgaacatatttagtgatcttttttctaatgtatccactacaatattaatgtcatta

SEQ ID NO: 137025 - DNA, 532 bp, Cannabis sativa
  modified_base (455)..(460): a, c, t, g, unknown or other
taatttattctaattctgaatactatacagtaaacgtgccattaatggcattccttacaaaattggtggggaaagtttttcctttcctttctcccttatttaatcaagttcaccctttcctaattttaataatgtaagtaaacaaatgtaagggaattattaccttaccattgattcccattacttattagtttacatgccattagggttttgtgattttggcgtttggggttttagggtttggggaatgagaatgggaacggactgggaatggaatgagaataggaatgggcatgggggttgggaatgggaatgtgctaaggaatgggaatgggaatgggaatgagctggggaatgggaatgggaatgggaatgagctggggaatgggaatgggaatgggaatgggaatggtaatgagtatgggaatgggtgagagaatgggaatgggaatggnnnnnngaatgggaatgagaatgggaatggctcacggaatgggaattggaatgcgaatgggaatgggaatgggccagg

SEQ ID NO: 137026 - DNA, 910 bp, Cannabis sativa
aacatacttgtgagtagatcgaagatcctggtaaaataatttctaacagttgtatggagtaaaaagatcactacaataccaattgtaattttgcgaattgagaaagtggttaagttacgaattgaagcagtttttccatggaagtttaatgttttaaataaagattggttggttcatttgtaaatataagatgtgtacgttgtgtagttttacacatgaatcttttgtttctaaaagtgttctttaggctgtaaaaatgatttgatgcaatacacattttttgattttctcaatatatataaaataaaaataaaattgttataatgagaatttttcacctagaaactcgagaccaggctcccataaaagtgacacgcgaactcactctactcgaggagtgctgagatattagcaggagacctcttgagtgtaaatctcacctgaaccagacttagcaggatgatgtgaccttaacagagtgtagttacattcttatagctcgcacgaagtaggacggaagatcaggtttaagacacacatataccgagatatatgcaaggactataaaggtcttcctacgaagtagtaaagatcgattctttacttagcgagctggtctagatgacctaaacaacctcgataacccgataaggactcgcgtgtcctaaattatcaacctattacaggatgtccgtatttgtgactcaaacaggacgcagacatcttaaacttaattagtgttctatgcatcttgagcctgtaagctcatgcgagaatgtgaatagacagctcgtaccatgaaggtcgcatacattgatgcatttactgaattaggccgaaactgttcttcatttattatatttacatttttattaatttcaatgttatattcaatgtacaaacggattga

SEQ ID NO: 137027 - DNA, 867 bp, Cannabis sativa
  modified_base (220)..(222): a, c, t, g, unknown or other
aaattgggccctttaaaaaaaaaaaaaaaaaccatgtacattaaaactacaattttgttagtagctttttttttagaaaaaattgcttcataaattttcaattaattttttttttaatttatgtataaataataggaaaaaaaaaaagaaaaaaaaataggcccttttaaaaaaaaaaaaaaataggccttaaaaaaatgggggccttgtgcaatggccnnngctgcccaatgcttgggccggccctgcccaatggtgctatgagtttttaatatttatactcgcaagtgcacgaatcggatatgaaatacagtgttcatgaaagtacgaggtcgaacccaaaggagttgatttatatctaagagagactttttaaactcaaaattaatcaaactctaacctagctccaaataattgataagatttgtttcataaaatataagaaaataaataagatttaaaataaacaagttaaaagggatttgttgaataaatggtagagaaaagattattaagactttagaatccacaatatatattaataatatttaatagtgtattgactcccaagttcccttgataattgaactcaatcaaattatcattttcaaaatatattttccattcaagcacaaagtattttcataaaatacgaattttcttcacttataaaagtataatttcaaagcattagttgtgaaataagttaatgaaactacaacaaatcaaagatattatttataggtaaaaataagtaaagaccgcctagtttaatttgaaaaattagcagttaattaagatttaattatgaaaattatttatagatatttaaataattatttttgtggttatatttgaattctgaat

SEQ ID NO: 137028 - DNA, 602 bp, Cannabis sativa
atatagttttacataaaaatattgcacaaaatacaattcaatataatacaatacaatacattacgacctaatacggcgttccaaacgagccctaaaaaaccataaaaatatatgggccaacccgaatatcaattgaagataaatgagccacgttatttttgttaaataaatcaattaaaaagtgctttgtgcttgggattatggaagactcgaaatgatttagtttggaactaaaagtatgctacgctggatgatgttcttatctcatctatgaattattttgttcaatggaagtcgatccaaaatagaggttcacaagctttttattttttttttttagtttttgaaattggtgatgaagttgagttttaggttaagccgcaggagaatacgatcaaggtaattgttgatgccaccaattgtcatgatcgagttgtgtttaattatagcatagtcgctcgagactcttaaggggaattagtgatggctaaatcggacagttttactggtataggcactctgaattaggctaagctggattgaaactcatgttgaaaatattttacgaggatcttagatttactaacaagtatgttatttaa

SEQ ID NO: 137029 - DNA, 628 bp, Cannabis sativa
cttgtatggtgacacctagcatgtagtttcagccaaggatttatgtgggaaatccatcttatttcatttagaaagaaattaagtaaaataaggtaattaagccaaaaatcaacataacctctcttccttcttctctttttcgaactaaccctcaaccaaggaatttgttgttgattcttggtgtttttagcaaggagtttcaagggaaatcagcccaaggtaagccttagcaaccttatcttctagttcttgaattttagtgttggttgagtagtgattttgctaagtaggggctgttaaggttagagatgcttagggttctgattttatgttaattttaagttgattttaagttctggttattgaatttgagctatggaggtggagttgagcaagcttgagctttgaaactcaagtttaggtctttaatggcataatttgcttcattgagtttttctgtgaaatactggctggaatatgttgaatataccctaattaggtactctgaaaagtttggtagcatttggtggaaaatttagccaagaatgaaaggtttggggtggactggtgcaaaccgactagccggttttaccagacccccaatgtaggatccccaaacacttcattt

SEQ ID NO: 137030 - DNA, 1714 bp, Cannabis sativa
taaaattgtaataaagaataaataaaagattgtaagaatgaatatttctttttataaaccttttttaatgaacattatagcccatcaagaaaaaataaatgttttgttaaaaaataattaaaaacgaatgtgttgttcctcccaacaaaaaaatcctccatatttaatacattttcatatttagtgtaaagataatagagtaatttaagcaaagtaaatttatttctaaaaataatttctaattggttagaatcatcataattaagaaaataaatataatttttttattctaaaaaagaatcttgttggtgacctactatagcaagtcaccaaattgccacctcatcaatttttttattacccgtgaatgggtgttacccattaaaaaatcatccatatatatattcaatctcttgaaaaaaaacaaaaataaaaaatagtttacattaataaaagtagacttccaaattccaaaatgagatgaaattcaaaacattgaagaaataaagaaaaaataaataatggtaaagtaagaacgtattagttagggtgaagtttagaaaattcaaagtattttctagtcaaattaagaataaatagttttaaaaaaatttagccttattgtttttatatggttttaagagtgattttttttgtaaaaatttagaaaaaaatagaaaattagggtaattgtatacgtatataaatattttatattaaaaaaatataaaaaattaagagaattaaggaaagaatacatagtcttatttaaagtatttttagaccgtcatgtcaccgatttatacttctcctttatatatatagatagatagataggtctcttttagtaatttggtctcaaaactttaatttttaataaaataattctcaaactatataaattttgataaattggtccccaaattttattttttagtaaattagtctctaaatttttatttcattagtaaaattaagtctctactattagatatcaacatttttattgactttcatttattttatatactttaatttattttttgtgttaaatttaaataacttttattaattttaatattttgataaaaaataattatattaatattttttaggggaattacctcatatagtgtttttttaactttttttttcaaatttacgatttgtgtttctaaagtggttgcagcgctagttgcagtaggggtttctatacgattttttgttgcaatttaggttgcattgctagttgcaataggagtttctatgtagaattctgtaaaaaaatacaaaaaaaaaaaataacaaaaaaaactgttttgaagtataaaaatgaaaaagctcatatttttcatttttattctttaaatacttatataaaatatattgtataattataatatttaattttttaaaaaaaatatttaaaatatattttattcatatatattattaataagaaaaaagtataaacattaagagactcatataatgactagaaagaattctaacctcctcgtatttttatattttagcatctatagtatattttatgattgattatgaatatgcagtattataattttaataattttttaatgggtaaattttgacataaatacttaatgttttagattttatacacttgaatatcttatctttatttttggaggcaaaaatacccaatgtgacaattctcttacatctgttacta

SEQ ID NO: 137031 - DNA, 1123 bp, Cannabis sativa
  modified_base (167)..(175): a, c, t, g, unknown or other
aactaatataattactgaaatgtggcctcaatcatttatctctatttagccaagctcagaggaaatcatcgtttcacttttaaatacttatagaagttataggttccagatctattatactcgaaattcggctggaggacacatgtcaagataaagggaatgtgaannnnnnnnntatatttttatggaataactcattaattgtgtaagtactagagtatattcgcaacccgctgacagtaaagtcttaggcgaggaatcaatatacgaactagtacttagaccattaatgagaaaccatatgttgctaagggataatagtgaggcaccagagaagagtaacacatacctcaacttccaataagcaaactaagtataaaagtcaaaccgactcgtaatacaagaatgtgagacgaccatctcgctatgaggaaacttcctatagtttcatccaactaacgcaagcaagactcacaaccctggcaagttagcagatttccttatatcctcgatcgacgcaagacacatcttgtcgatctcgaaaagaagagtggttccagctcgccattgggatcactactatcaagtttctgtcgagacatctccagaatcaataattaaagacgtgtttaatacacgatatttctgacccagtaaaagtgggaaaatcatagctgtatgactttcaaaatcatgcaccgcgtttatattttgtaatatgtaatcagatcccatgatttaagggataataactataattacatttttttcagccttgtaattaattgccactatgcaattagaaatagtggcagacaatctcaaaaaagggaggaaaagaactcttatacaagaggccctaaaaaatatactcagaaatctaaataagattgactcgtggactatgcataattttaactgcaaaaccacgtaaaaatccaatgtccatatttttattttctctatagtttttatcatttctgtgtttaatcataatcgtgaggctcaaatttggttaatgaaaaatctacgttaacaatatttatgataagcgctcacactcaattgacctaccatgttcccaagatgtaattatccgtaagaaccatttgttagcttccac

SEQ ID NO: 137032 - DNA, 634 bp, Cannabis sativa
  modified_base (232)..(236): a, c, t, g, unknown or other
aatgggataaaaacgttggacaagagagttggaaacatgctcaattaatttatatacgtttatgaacgttttcgaatatctgtgttttcaaaaatctggttccagatgttcgaaaacaaccataaaataacataaaaacaactgtttccagagaactcaaaatgtaattcctctccaatttaaatattttcccaacgtctcaatactcatttaaatgatataattgagtatnnnnncagtttctaacagctagaaacttatcccattaattccataactcttatatgtaataactcacataattacatatttatcaattgtgatttttagattacaatctattttcagatttgtaactcctcatatgttataacttttatgtgtattattatactatatatacgatataatacaacctccaacacataatatatattaatctcatattaatatataatatgccatttttaatcttcattatatatttattaaataacaaatatataacctgatgagctatcttagatcaaagaaaagttctgcactaattacggatatttacatcgtaaattcatgagtggttctaatcacaatatcaaaaaaaaaaaaaaacactaacttttttttttttttt

SEQ ID NO: 137033 - DNA, 2447 bp, Cannabis sativa
tctcttcccttccctctctcttcgaaccagcctagaacaaggggaaattgttgctgattcttgatgtttttcagcaagaaattcagagagaatcaagccaaggtaggccctagcatcactatttcttagttcttgaattttaaggtttggttgagtttatcattttcgaaactaggggttgttagggtttagtttttgtgtagttcgaattaaagggtttatttgagttgaatttagcttttagcaactggttttggtgtatggaattggttttgtgcaagttttagcttagaaacctaaaccttggtctctaatggcatatttcaattctatgagtttttctgtgaattaatggttggattgtgttgtatatgcattatttaggttctctggaaggtttggtggcatttggatgagttttgagcaagaactgaattcttggaggaaacctggtgcaaaccggctaaccggtttgccagggcctgtaaaattggttagccgattttggaagattccccaaacaactcattttctcaattctcgatcattttagtgctttagttgagtgtttccctatttcctgacttagtgtaatccctagtgagtataacaaagcctagagttataggttggggttttcccaaattagggtttcgatcttgttatttacccagttttaatatgtgattagggcatccatccagcaggagactttctattcaggttggccagttttaataatgtgtaatatgaatatgtataggtatagtgtgtattgctaaagagtacattacagtgataccaacacaagtacgaaaaagtacagggtgtctgtggtatatcactcagtggtactcagggtacaaaacaaacccttccaacactcgtacattgaggtacgtagtgtatgtggtatagtggttgtaccctagtatagaacgttcttactcatctattaagcgttataaataggtgtatgggcgcctagatacaagtcagtattatatgatatgctatatgcttttcttactaagtctgtcgactcacagttaggaaaggcaaaagctgaacaggagtgagccttgctgacatgaggttttacatgtcgtggcagtgcgacctagttatgtattttggtatattttttataaaaatttaaaaacaggatcccaataattgtaaatagttttataaatcataaagttaggtatttaatataaaacttttaatttgacacgtttttcgagagaattctttgataatcaaagatagcactgtaattcaaaaaagtacagtagcgtgccttagcattagggcgttacaattttggtatcaaagccaggtttgtttaccgaagttgccaagacatgtacaatcttcatcatggaaagctcagctcacggttcagtaagcccgtacttgtttagtatttatttgaatattaaagtatgataggaagcatattagattatgattatttagtttaagtgtgttgcctttaaatccataagagcagtattaagttttatgatcgcttctaacctgcctggcttatgggttcgcaggctaagtcctattaaatggacacctcgcaaaatacaagaagtcagggtgatatggttgagaccagaggtggtcagggaaatcaaattccccagaatcctcgaggtcgcagtcgtggcagagttcagggtggtcgtctcgtaaatccaccacaagctcattcggattaggagcagaggtttacggagatgcaagatcgaatccgccattaatatgaagaaatattgagattaaggtagcagggtcttcctgtcgtgcctctacaacaaactcaggccattgtagctccaacggtgcaagtagaacaacctgtcgctggcaaccgtatggagccgttatacaaaaggttccgtaagcaagcgcctccagtgtttctaggaggtccagatgtgatgaaggctgagcactggctcactgtgattgagtgaattttgaattttatgggtgtagttggtaatgatcgggtgacctgtgccacatttcagttccaggaggacaccctagtattgtgggaattggtctccctcacccgggatgtcactgtaatgacttgggaacagtttcgagagctattcaatgccaagtattataatgaagccgtccgcagtgctaagcggaaagagttcactgagctagtgcaaactgaggggatgacaattactgagtataccacaaagtttgaccgtttggccaagttcaccttgagtatcgtgcctactgatttcagtaagaaagaaaagtacctggttggttagaatgtgaagattagacatgatctggtgatcactaccaatgaagcaactgttaggctattttatgtgcgtttttcactgtgttgggacggaattacgcttgttttctatgttttcaggttctttggaata

SEQ ID NO: 137034 - DNA, 1008 bp, Cannabis sativa
  modified_base (413)..(414): a, c, t, g, unknown or other
agacgcgtcggccatacgcgttgttttcttggtagtagccatcattctatggctagataaaagatttgagggagaatgtccttcattggaagaaggtgggctagagtagagacgaggatggtcgtcctgcaaaagttgaagcaagtcctggtcgattcgatgttcgctgtcccaaaactcacttgggttcatctacaaaagacaacagagaagatgagtgtttgtacggaatatcaagcgataaacaagatatgccgaccaagagtactcaacggattgaagagtgagaatgttcaaagaaaaaccaaaactcaggaagtttgaacttttctcaagttagggtaaaaatttcatgaagcttagaataagcaagatagaagacaggcattatgcagtttagaaagcaagcattnnggactgtaaaatcgcatgaaaccatgacaaagaagaatcgtagagtttctaaacctagggtttcctgtgaatgttctacggcaaagtctaaggtgcattcaaaaaaataaacatgcaaaaataagcataaagaaaatcgagaacttactcaagagtcagatgtctggattcaggcaacgtcaaaccaacgagcagtttcgatgaatgcagttcagcaaacttgaagccaaaaaaacctctcttttcactctgaactcacttagcaaagaaaggtggtgaaaatgagtttatgtgccaatgctctttggtatttatgggaaagtcacaaaaagaggtaataatttcaaaaggatatcagatgcctcgtttccctctaaaaggcgaacatgggaaataaaaaataatcaagtgcagccgttaaccgtggtgagagaaattagattttgcaatattaattgtagagcattaattagccaaaaatcgaagggacgcccagtcagcctcacatcgattctcggacagaagcgctcgacatgtgtccccatccaaaggtagaagcagctcggatgaagtctacacgcaattttggaagtc

SEQ ID NO: 137035 - DNA, 871 bp, Cannabis sativa
ttctggtagaggaaaaaggtcgaacaccacccgatcgtcctgagccaaaagcaagattggcttgcattttcattgacagattctgcatttgatgatgatgctccaatcggctttcatgagacagcaataacgcttgaacttcatcaatggaaagatcgtcactccgagctgttatttcggaaactacagaatcaaagtccggacctaatccatttagcacttgaagaacaagatcttgatcttgaaccggagctccagcaacagtgagagcatcagcaatcgtttgaactttttcgacatattcggagatggagagacttcctttgtgtacatgagagaattggcccttgagttgcagcaatcgggctttggtttggctagaaaacttttgctctaacgcacgccagagagagtgagccgaggtatggtttgcgacagatgcaagaataacttcagacatagatgaccgaagccatgaaagaagcaattgatccttctttttccagttggtgtattcgggattgacagctccagtaacaagattttgaggtgggggtgtgccggtgaagagaatttcatcaagatcatgcccgattaccgtgggtgtgacttgagacttccatgaaaggaagttgtgacgatctagcttgatggtgagattggaggtgagggagtgagaaaatgggttccaaggaggaaccggaggaggatttgtgggagtggccatggcagcagtagcagtagttccaggattcgttgaagaagatgacatatcgaacgtcagtaggcgattgataccatgttaaatctcagagagagaaaggtgcagagcaccatgaacaagaacagaaacagagtttcttgaagaaga

SEQ ID NO: 137036 - DNA, 627 bp, Cannabis sativa
  modified_base (332)..(336): a, c, t, g, unknown or other
tttaactcgcgaataaactttttttatatataaaagttaaaatacaacattgcttcacaaatataagtggctatagtacttaatatcttagagcatctctaatggagagttataaatgttgtgtattgccatttttttaaaacattttgttaaaacttaactctaatgataatgtacaatgtgtgtcaaatttgtcacaaaagatagcataactcaaattttagcccacaataaatataatattttttttaattacctctttgtcacttattaatacaattaattgactttaaataagatatatatgcaagatattaaaataatataaatannnnnaattattttgtatatttttaataagcattaatagtaatattaacggagaaaaaagtgtgtatgtttctgtttcattctaatttaagtaattcacattctcttcagatcacggttagaattagagatattatattctagttttaaaaatttaatcataaaatctgaacctttcttccccaactaaaaaatccaccacaagtgatgaaatgacctaaagtataatttgtaagtcatggtgtcttgtcttttgacatgcaaagttcgtattggttttgagtgctctgttttttt

SEQ ID NO: 137037 - DNA, 572 bp, Cannabis sativa
acaccactaaacaataacaacaaccacaacagcgaaaatcatcatattattttgaaaatcaaagttttgggttcaaaaaaatccaaacttgaataaacacaactaaggatcaccacaaccttctctaatccattcatctaaacataatcaagcccaagaaaacaataacaaacatacacagctgctataacaccaaactcatccagcatgcaaaagttctacttccttaaacttcaagaaactaagagaaaggttgatagaagcttaccaacaacaagaaatcactaaactttgagaaaatagcttgaaataacaaagaaaacaccaaggtttctgctgctcaaggagggccgaaagagagagggctagagagaaaatagaattttgctttttctttcattttttccaattttgaaacgtaaaagatgaaatggtttttcactaagaaaatcagccaaaataacatagcatacatcacataatcaccaaattttaagtccactaaaagacaaaggcctatggggcaaaatgactattttgcccctcccatactaaaagggttaaaaagcact

SEQ ID NO: 137038 - DNA, 748 bp, Cannabis sativa
  modified_base (527)..(528): a, c, t, g, unknown or other
gctgacttaatagagctagaattaatagattttgacatcatacttgggatggattttctgtccaaatattcggccagtattgattgcaagcggaaaatggtaacttttcagccagagggtgaggatcaattactttatgttggatcagttcaggggtctcggatcctgactatttcagtgttaagggctagagatttactacgcagtggatgtgtaggatttttagcggttgtgattgactccagcagacccgaaacatttgggtctgaggtagtcagggttgttagagaatttcttgacgtatttcccgaggagttgccgagattaccgccacaatgagaaatagattttgtgattgacttggcacctagagttgaacctatttcaaaggcaccttataagatggctccaacggaattcaaggagctaaaaatacaacttcaggggatgcttgatttatggtttatccgacccagtgtatcgccctggggagcttcagttgtgtttgtgaaaaagaaggatggttnnctcagaatgtgtattgattatcgggaactgaacaagctgacgattaagaacaagtatcaattgcccagaattcacgttttattcgatcagcttaaggggaacactatgttttcaaagattgacttacgatctagttatcaccagctcagaattcaggaagatgacataccaaacactgcatttcaaactagatatgggcactatgagtttctagtaatgt

SEQ ID NO: 137039 - DNA, 1430 bp, Cannabis sativa
  modified_base (44)..(46): a, c, t, g, unknown or other
  modified_base (539)..(541): a, c, t, g, unknown or other
atcttttgtactttctttaacagtgttccatatgcaacatactnnnttttatctttatccttatcctttatttaaacaaggtagctaaagaaggatgtttgtctcttttctttagtaaaaaatttatctcatttagcaagagaattaactttatgttggtagatataactaaaacatgagctaaaaagagaacaaaataaacaaaggttcacaaaagaatccattcaacaaaataatttcaaataatgataaatcccatctcaagatatcaaacacactattaatatcaagtctttggacaataatattaactgtaagtggtactcttgttgtagcaatcaaatattgacaataaaccatgtcaaacaatttgtcaatcttcggactgtacatattgttcacatgtaaaccttataattgtcacttaatcaccacagctatatgtgcactcaaaataagtataaccttcctttgggccgatcaatacttacatgagaaacacacacacaaacatctaacattcctcatgagcaatctannnaagagaggttgttttggcgacatcattttttaatcaactcatttagaatgaaagataaattttaatattttaattagtatgccaaatttgaacttaaaataatacaaatatatatatttaatttggacttgaatttttatcatgaacctcatatatacacatatattatatctgattatatctttccagtgcaactcatatataataataatagcctatatttaattatatatatcaaaactatataatatatatgtgcctataaaccaaaatcttaaaattattaataaatacctcatatacataactatgaatatttaactaaaatatgaattgaaaagttttaataaaaagatcacacccatagtcatggtgcacttaatccaaaagcccaaaaaacccaatatatgagtgaaaacttagaatcacatcacatatgaatacatatgtcaaatataaagtatatatgcataaaaaggaggcataaactttaactttgatagtggctttatgctaaataagatgagctcgattacatatattatatgatatattagtagtcgatctaaagaaaacatcatgtcaccaaaaaaaaaatggaactgaaaccttattagacataatgaataaataagattcaaacaaacactatctcatcacttcataaaattaattccagaaagaaaaaacaaataacagaccccatcgcatgcatataactagttctctttcccaaaaaaattaaatggttaatagattcatatcaataaattataacaattttagaagataaataccaaataaataatcacaaaattacaaccccaaatcataaatggaagaacaaaatctaattttttagatttttagaaatccccaaatttttaaa

SEQ ID NO: 137040 - DNA, 712 bp, Cannabis sativa
  modified_base (56)..(67): a, c, t, g, unknown or other
ttaaagtttgacatagtattatataaaaatataatgtataatccaattcaatatannnnnnnnnnnnacaatacgacctaatacgacattctaaacgagcccgaagtgtatagtttttacctacctctttttttgttatttttttatatatgatttcccttcctcctctatttttttttttttttttatggtttttcttgcgtttttctctctttaattttctttattttcttttttctctctaattttagttttgattctctttgttacttttgctccacattgtacttaaatcaactctcggttttaagcaagcaaagaaataattaaatgccaaaataaggaattaagttagaaatttcgttattagatattgatataaaatttatatgttcgaaactagtttttaaagttagtatcatttaaaaaatttggttattaggcattatatatttttcattatgttgttgatgaaactggtttttttctgtctcttttaatgaaataatattttttaatgtcgatgaaacttgtttttaaagttattatcgtttttagattataattttttttcattatcttgttgatgaaattattttttcttttattgttgatgaaactggtttttaaaatttgtattatttttagattataattttttgtattgtattttttcagtatgatgttgatgaacctgttttttttttttttt

SEQ ID NO: 137041 - DNA, 515 bp, Cannabis sativa
  modified_base (427)..(436): a, c, t, g, unknown or other
atacacatgcatgaatgattaaataattaaaagaaaaatattgatagttttggaacccctcacccataatttagaatctacacatactctaaaagagttatagaaaatatatgatcatagataatatacagtgatattttaaaagtgataacaataatattatgagatatattatcaccaaaataattatagatcatatgtgcatgagggggagacatattcatgttgaactcttttttcttagctcgggttttgtcgcactaagtttttctggtaaggtttttaacgaggaaacttgaaaataattatgaatatgaaatatatattgcacttttttttttccttagctcaaattttgttccactggattttcctgataatgtttttaacaagacaactttaaaggccagtttggcacagctgtgcnnnnnnnnnnagcagctgtagctgtgctgtgagaaaaagcagctgtagctgtgctatgagaaaaggctactgagtgtttggtaaatata

SEQ ID NO: 137042 - DNA, 693 bp, Cannabis sativa
  modified_base (495)..(504): a, c, t, g, unknown or other
catagatttttattttgtttttttttttttcaaatgtgaacaattttattgatgaataagttaattttaaagctcaaatatataaggttaaagaacatacatgtagtattattaatggcgcaatatgcatactcttaatctcgtagaagtttcttaaatttaacatttgttacataaataaataggacgctaaaatatagtgacatgaactaattgtgacacagagacaattattacactatcaaagattgatgataaacacttcagacaataaaatggattaaccaaactaataataataagactcttattaaaaacataaagaaacaaataaacaacaaaataataaaaaatttagcggatatgtgacccaaattccaatcacattgttaacgcggattttcgttaactaaaattgagcctcacaatattgatctcacacacaaaaacaaaataaaaggtataaaaaaaataatatatgaacacagggttttnnnnnnnnnnttgcagttaaaattctgcatagtctacgagtcaatcttattcagatttcttattatttttttaggaactctcttgtatgagtttttcgttcctttttttagtcttgtttgtcactatttatatttacatagtggacacttaattacaaagttgaccagaatatgtttacagtaattatccctaaaatcg

SEQ ID NO: 137043 - DNA, 1168 bp, Cannabis sativa
ggctgacgcaaagatctcccagcacaggatagggtcttacgttgactggtttctttgatagaaaccacgccaacttcctccctaaatttacctgaaaccataccaatcttcctctagaattcttcatcagcgtaaggaggatctttgagattgctcacaagatcaataccctctaggaacacttgtgaggatcgaccatggcaggtcacggggttcccctagtttggattggtcgaaagctcctcagccctggaatccatcgttttcggcttcagatgaggcttcaagtctgtaggaacgaataaaaatttgttggtgcatctgggtattatgagtctgggaggataaacttctgaactcaaaagagacgttttggcaagaaggaagtaatccattctaaaaatggatttcacaaaagaaccggaggacttatgaaaaatgacaagcatgagtcgtccttttatacatgaagttcagtgacaagaaagccaaagattgaaaaatctaacggctaatcgtgcagaatatgaataggcgactcaaaatgatcttcgaaaccatacaaccgccagaatcaaaggaggcatcctttccaagaaaggattttggcaaaaatgcccttcgtaattattaaaaagctctttttactaaaaaataactttttaaggggcaattgttatacctaaaatttagatggaggacacgtgtcaagataaagggaatgtgaatcgatgccatatctttttatggaataactcattgattgtgtaagtactagagtatatttccaacccgctgactgtaaagtcttaggcgaggaattaatgtacaaactggtacttagaacattaacgagaaaccatatgtggctaaagagaatagcgaggcaccatagaagagtaacacatacctcagcttgcaataagcagactaaatataaaagttaaatcggctcggaatataagaatgcgagacgaccatctcgctacgaggaaacttcctatagtttcatccaactaacggaagcgagactcacaaccctggcaaaagatttccttatatccgcgatcaacgcaagacacaacttctctatatcggaaagaagagtggttccagctcgccattgggatcactacaatcaagtttctgtcgagacatctccagaatc

SEQ ID NO: 137044 - DNA, 1132 bp, Cannabis sativa
taggatgagaaggctgctgaatgacaggttcatggtgtgctgcaatatcttgcagttcgggttgagacacacaacctgtgttatgagttaaagaaacaccagtactttgctctatatcagcagagttatattcatgagaattagatacctgttgctgatctttattgctagaatcaggtgagttggtgtctaaggttgctgcttcagggacttcagatgaagatgctggtgtgttgttgttgagatgatttttggaagactgaaacaagacagactaggaaggaacactcacacagatggattgttcaggttgataattattgagaaaaccagtttgaaaaggaaagttatcttcattgaaaataacatttcgagaaatatagattctccctgttgaacttaggcatttgtaacctttgtaagagtcactaaagcctagattaacacacttaactgaattaaattgaaacttgtgagtttggtagggtctaatgcaaggatagcaagctactccaaaggttttaatgaatttataatctggtttcttgctgtatacaacctgaaatggtgatttatttttcaaaattggtgttggaagtctattaattaaatagacatcagtttgaaaggagtcccaccaatatttgagaggcatatgagcttgggcaagaagagtcaatcaagcccatctcaacaatatgccgatgttttctctcagctctaccattttgggcagaggtgtgaggacaagaatgttgaaaatcaatgccattttcaatgacacattttgaaaaagcttgaaattctccaaagctttgattttcctgtcaaattgattttctactaaggttttgaattgaacaaaggctgaaagtgcttcatccttggttttgagtgggtaaatccaagtgtatctactatgatcatccacaaaatgaatgtaaaacttatagttgtaacttgaggtgatgggggctggcccccaaacatctgtgtggattaaatctagcatatgattagcacaattggaattgatattaaaaggtaaggcatgggatttcccaaactgacatgcttcacagaaactattcttttcattcatattgactgttacatttgcaagacttaacac

SEQ ID NO: 137045 - DNA, 505 bp, Cannabis sativa
gacatcctcacaaggtcaagatgatttggatccttgcattagctccaaaactgcattgtggcggacattcatgaagttgaaatttgtgatcaagacccaaccaaggttatctgcttaggaaagggttgaaatccagacgagcgaagaaaaattatcaccaccattaaagaattagcggatgtatttgcatggtgtcatggagacatgactggaataagcccacatgtcattactcaagttctcaacgtcaacccaaacatgccttcggtgaaacaaaagagacatccactagattcggtaaagtcagacgctctagagaaggaggtggataaaatgctctcaaacatctttattcgagacgtatattatcaagagtgattgaataatcctgtcctggtacccaagccaaatggaacatggaagatatgtatcgacttcacatatttgaacaaagcttgtctgaaagattgcttcccattgcctaggatttaacagatggtggatg

SEQ ID NO: 137046 - DNA, 847 bp, Cannabis sativa
cctacccgaccttcttgagtatctcaaatggccttataaacctagggctcaacttgcccctctttccaaagcgcctgatacctttcattggtgaaactctcaggaaaacatgttctcctgcctgaaatgcaatgtctctatgcttcggatcagcataacttttctgcctgctttgcgaagcaagcatccgagccttgatcttgtctattgcttcattggtcctttgaactaactcaggacctaaatacttcttttccccgatttcgtcccaatgaattggagaatgacacttcctagtgtacatcatttcatagggagccattcctatgtactttggtagctgttgttgtagggaaattctatcaaaggtaagtatttactccacgaaccctcaaagtccatgacacaagcttgcagtaagtcttctaatatttgaattgttctctctgatttcccatcagtctgagggtgaaaagctataccgaacttcagttttgtacccataactcttcgaagacttacccagaatttcgatgtaaactttagattcctatctaacataatgaattctggaactccatggagatgaactatctccttcacgtacaactctgcaaattgatccaccgtataggttgtttttaccggctaaaaatgtgttgacttcgtgaagcggtccactatgacccatactaagtcatacattcttgtggttttgggaaaaccaaccacgaagtccattataatatccttccacttccatttaggaaatgctaatggtttcggtaaccctaccggcctctggtgttcagctttaatttattgacatgttagacatttagacacg

SEQ ID NO: 137047 - DNA, 783 bp, Cannabis sativa
cggaattccggttctggtctgggaaccaaaattccaacccccacaattcaaattaaccccaaactttccaattctttccagaacacctgaatgcattattctaaaccaaacccaagccacaaatcacaacaattcattcaaattccaaaaacaccattagagagctaagtttgagttctcaaactctaactttgctcaaacctcaattcaatccataactttagttcaaaataactcaaacaacatcaaacaatctgcagaatactaaattaaaccgccataggctatacagcaacatatcactcaaatttcttcaaaataactaacttaggttatggaaaacttaaggaaaaagaataggggaagttaccttgaattggaaccttagaattcaattaaaattcttgatattcagcagaaaactcacagccccttgctgcctagaaaaatcgagagagagagaggaagaagaaggttgagggaaaaatggtgacttttctagtattttctagttttagtttttaaaaaatataaagattaaagactcttctatatacatgcaatgttttaaaatcagaataaatataataatgtaaaataaaagaataaagattaataactatcctttaattaattaccaataatttagcaaaaagggtttctaaagcattttaatcatcaaaatatcccaactaataaccaataccattaaacctactataatgccccggaataaaacaatgctataacatacaacacacaactctctaaaggcccaacgcc

SEQ ID NO: 137048 - DNA, 504 bp, Cannabis sativa
  modified_base (418)..(423): a, c, t, g, unknown or other
gacgcatgcatgcactttatatatgtagttatatactttaaaaaatacaggatgatattgtctgaaaataactaaatataaaattagagaaagataaagaataatcaatgttaaggggcaccttaaggtgtctaataacaaaaggagatatattgttattggtttatgttgtgtacattgttccacatagaataaatggtagataattgagccatatataagaacatgggctactccactcattagcaattggttttgagatggaatctcatgattctaaacatagtatcagagccatattatgataaagtgatagatttgtgggtaaaaatagccaccatcttgaggggatattggagaatattatcctacatggactaaatgtgaaagtattaatattgagccatatataagaacnnnnnntactccactcattgccaattggttttgagatgaaaccccatgataagtgatcctatccgatccgcacctatacagatagtg

SEQ ID NO: 137049 - DNA, 1225 bp, Cannabis sativa
  modified_base (876)..(880): a, c, t, g, unknown or other
atcctcatttatggtttaatttttattctgatgtgtgtgttaagttctggattcgaattttattgtgtgtgttttttaagtttgagttttagtgttttactggagttctaatgcttgagtttgtgtttatgagatctgtttttatttatttatttatttgtttttatagattttgagaacttaaaatttgatgttgtttctattgattattgagattgaattttaatttttcataggagaactaatgtttgccttttcgtttcattgattgaaaaatattagtagaaactttatggaatgagaattttgaatatatgaaaaatagaattaaaaaatagcatttgaatcgagaatcaaagtttattgttaatctccttacaaaaaaaaaaattattgttaatctgtaaagattatatggctggaagaagataaaaaaaaattaatttttatttcatttaatatgtatataatatatttttttaaattatatgaatttattttaattaattttaattttttaaattattttttctaaaagaattattagtttgactaatactatatttacatgtggcactttattgatcaactaacaaaacgataaattaagtgttaagtttagaaatgtaaggatatcaataggaactacaatgatgacatcaactttatatgattggaatataaaaataatacattatgagaaaatttaattcataatctcacacatgtttcttcttctacacaatctcacacctcctttttattttattcaattcataataatttttttctataatttttttttttttttaaattctgtaaagtaaaaaaaacttcacatatatatagttatgaatacatatatataaataattnnnnnattatttaatttaatattattaatttcattttatttattattacgtgttttttaaaaaataattaatttaaaatagatatttttatagaaatattattaaactaatagtaaaatattaatttgtaaatttgtaatttaataaaatattaaaaaattaagagaattgaggagaaaaaagaaaaatagctttagagagatattagaccgctacgtcaccatctcatacttctcctttatatatatttactagttaacgataccgcgcctcgcgcggttgtttaaaaactttttatttatgttgtaaaaataaaatttatattatatatattaaaaaaattattagtt

SEQ ID NO: 137050 - DNA, 1243 bp, Cannabis sativa
ttaagtttactggttctgttacatgtatatagtccttattatgttctgtatactgtccctagtgttttattggtgtctatagatctttactcattttatgttaattcagttaatcagttatggttgttacttgtgtcagcataggagttggtttattcagttaaatttgttgagtcctattttcttgggtctgatatgtaatgaggtccaagctataaaaggcttgcctctcccctgttttttttcaattgaatttcatttctttctgtttcaacattcaattcctctttctcaacacacttctagatgtggtatcgctattggtgcaattaagtatcaagtcacatataatttaatatatcttttagagaatatcgctaatcaatcacagggcgctacctttaggtgatactgttacccaataaaaaaaaaggagaacttacaaaaatactaaaaaatgggggaaactttacaaaaatactatgacacgaagttttttacatttttattgtatcaactttacaaaaatattgtgtttaaagtttcaaaattttaaaaatactatgttcctgtaaaataaaaaaacaactcaaaaacaatcctagaacaacttaacaaacaacatgaaaataactatacaataacaaaaatataactacaaagcaacaaaaagtaacaaaacattgacctaattgcaataaacaaaataatatcaagtcatcaatatgtttttgtattataatttttttttttacttagttttgacaacttgatttattttttgtactactatattatttttttttcatggaacatattgttgcaactttattttttttaactttttttcttttttcctttttgagttagtgatagttaaaaaataacaaaataaatgtacatatatacaacaaaaatattatctgtaataaactaaaaatatacacgattaaaaatgcacataaactaaacatcaacagtataaaaaaaatacataaaaacaactataaaacacctaaacaacaatataaaaacaactataaaataaaaaaaagacagctataaatcaacagaaaaataacaggacatcaatcttgttaaaatatgtaaatcattcataaattaactctgaataaactacaaaatatccaaaaaaaaaaatatactacttttattaatcatgtaaaagatagaaaactatagaaagaatgctcttattttttttgaaagagagagagagaga

SEQ ID NO: 137051 - DNA, 1106 bp, Cannabis sativa
  modified_base (86)..(93): a, c, t, g, unknown or other
  modified_base (693)..(708): a, c, t, g, unknown or other
tggtaaaataatttccatcaacaatttgccccccgagtctgtatgggactttcgaatttgcgtgtagacttcatccgagctgtttnnnnnnnnggatggggacacgtgttgagcgcgaccgtctgagacttgatgtgaggctgactgggcgtcccttcggttttcgcctaataaatgctctgacaattaatatttcgaaatccaattttctctctccacggctgacggctacacttgattacttttgatttcccatattcgtttttaagtagggaaactgaggcgtctgaggttcctttaaaccaattacctcttttcgtgacttgcctataaataccaacaacattggcacataaacttattttcgtcacccttctttattaagtaaacttcagagcgaaaagaaaatttctcggcttcaaagttgccgaagtgccttcgtacaaactgcatgttggatagacgttgctcgaacccagacatttgaatcttgagtaagtttctgatttccattatgcttatccttgcatgtttacattttgaatgcaccttctactgtgctgtagaaaaatgtttaggaaaccctaggtttaggaacctatgtgattcttctttatcatgtcttcgtgcggttttacagtcataatgcttgtttctgaactacataacgtccgtctttcatcttgcttattnnnnnnnnnnnnnnnntttttgccctaactcaagaaaatttttgacttcttgaatcctgacttttctttgaacataatcgttctttaatctgttgagtactcctggtcgacatatttgcttgtttattgtttgatattccgaccaaacattcatctcgtgtgttgtcttttgtagatgaactcaggtgagtcttgggaacttggacatcggatcgaccaggatctgcttcaacttctgcacgaggatcatccttgtctttgttctaacccaccttcctctagcgaagggcatactcaaatccttgtgcccaaccataagatgatggctcgtacaaagaaaaccacgcgtctggctgacgcatctgatcctcaagttgctcggcacgccactttgcctagcgccaaacaggatcc

SEQ ID NO: 137052 - DNA, 504 bp, Cannabis sativa
taatagtaggacacaaatatacatgtatagttttctttccagcaaattacaaatacatataggactagtttggcacagttatactgtgggaaaaagcagttgtagctgtgctgtgagaaaaagcagttgttgcagcaaaactgtagaaaaaagctgaactgagcgttcggtaaattataaatttcaaagtattgtgagttgttaatatctattataattataatgataatgttataatttagtttattataattacaaaatgtaaaaatttattttatataatattttattttctatatattttaaattttttttgcaaatataaatttatatgcatttgataaaaataatttatattacttttatgtcatattttatcaaatataaaagaaaaatagaaactcaagtatataagaaaaatgctaggttgatggtgtttcttaatattaaaataaaaatataaattatttaaaaaaaataatagatttaataattatttatttt

SEQ ID NO: 137053 - DNA, 1213 bp, Cannabis sativa
  modified_base (467)..(468): a, c, t, g, unknown or other
tttcttctagagttataccttctatcaagaagtcagccaaagcctggcccttgatggatgttcgaggatggtatgttatgtcaaactgccccaattcaattgatcatttatcaatcttctagaagcatctggttttgataaaacttgtctcaaggggtgatcggttaacacttttatggggtgcgcctaaaagtatggccgtagtttatgagacacatggactaggtacaactcgagtttttctagaggggatatctggattctacccctaataaccttttacttacatagtaaataggttgatggtgcttgccctcttctcgcactatagctgcactaatcgcatcttctgagatggctaaatagagaaacaacgtttctccagttatgggtttcgccaaaactagaggcgtcgccagatgcctttttatgttctgaaaggcctcttcacactcttttgtccactnnaactttttgttgcctcgcaatacattgaagaacgggatacacttatcagctgacttcgaaatgaatctgttaagtgcagccattcttcctgtcagggcttgtacttccttaggctttgttgatgatggcatgtctattaatgccttgatttttttgggatttgctttttgggtttagcttcatgttatacttctttaatatcttaaagcattccacaaggtctgaggtatgatccctactctttattgactttaccaacatatcatcgacgtaaacttccatgttctgccctatttggtttgcgaacatttcgttcaccaattgctgatacattgccctagcactatttagtccgaacgacatgactttataacaatagagtcccatgttggtaatgaagattgtatgatcttgatctgggacatacatttttatctggttatatccagaatatgcgtccataaatgacataagctcgttcccagcagttgcattcactaactggtcgatcctgggaagtggaaaaaaatcttttgggcatcccttattcagatcagagaaatcaatacaagttctccaagtttcattaggcttcgggacgagaacatgattggctatccacgagggataaaacacctcgcgtataaagtcgttgactaacttcttgtcaacttcttgttttagtgccccttgcctcttgaaatccaagggtctccttttctgtctcttcgttgggtagtttgga

SEQ ID NO: 137054 - DNA, 552 bp, Cannabis sativa
aagacattaaagcaacctttgcagcatcactttcagcgtctttcgaagtgttgaaggatctagagctctcaaaaatttgatcaccaactgtaactgttgccttaaactgagtgtcctcaggaccctgaccacattcacaaaagtacactggcaaaccgaaattaatctgtctagcatatttctgtagttgcttcggacaatagttttatatatatacatgagtaaaattcattgtcttaaaaaatttaagggttcaacagaacatttctaacaaagattattgtgctttagttcaattttgtgtaacttatagaagttgccaccatgaactttgatagtttaaaataaaaaacacatgaatactatggatgattgcagataatgaaaaatctaatatattaggactagaacaagctacaagagaacccaattgggaacaaagcattatataacacaagaaagaaggaaagaaagagaaccaggaggtggagaattgaagtgaagaaaagcaagcatggcagcatggttatggcagcatggttatgatctggc

SEQ ID NO: 137055 - DNA, 663 bp, Cannabis sativa
  modified_base (283)..(309): a, c, t, g, unknown or other
taaaagttagattttagccactgcaaatgtatgctagtaaaattttgacgtctttgccagcgcagtttgcgaaatgcgctggtaaaagttactttcaccagcgcagtagcgaactgtgctggttaaagtgatatttcttgtagtgttagtagttacatttatgtgcactacaaaaaatcttatttttagtcacaataaaacttgtgactgaaaaagtgaaaaagttgtgactaattataaatcatcattcctatgttgtactaaaaggtccgtggctaaaggnnnnnnnnnnnnnnnnnnnnnnnnnnngtgactaaatatatttttagtcatcacaatacttgttgtgactaaagctaaatttgtaagaaacttgtagctaaatactatgttttattcacaagtaacattttgtagtgactaaaagtcacatttagtcacaaaaaaaattatgttgtcactaaaaatttgtcaccaaaagtaacagttttttgtagtggtggtatgtgtgtgcacatacgcactactacaaaataggcttttcacaacggttaataagagagtcaattataaaaattgttggaaaaggtcagcaaaattttttcccaacagtttagaactaaagcaaataaaccgttgggaaaaactaatgccaacggtgga

SEQ ID NO: 137056 - DNA, 517 bp, Cannabis sativa
aacttaagtaacgttaaaaattaacattaagtatttatgtgatagtcagtagtcccgtgatccgtaagaaaaaatattaggtaagttgtgcaatcccacattacttgggaaatgtcaaatgtgatgattctgcaattttgtaggtatgagactacacagttgaagaggacttaaatggattgattggtactacctatatcaacaatgtgcatcttgttttctggtagcccatcacgaaagaactccacagttaaacgtgtttgacatggagtaatttcagaatagaagcgtgcgagtgaggataaagcacactgaaaatattcgtgctgatttgtaggatcagtcgttaatccaggaagcatccaagagtgacgtacttgtgtataagagccataaatctgtgggagaagacccaatggaggcttgaagcgaggacattactatttatctacagccgagagctaaatttatactgcaaattacttacgagttttatttagagtttttggcggctaaa

SEQ ID NO: 137057 - DNA, 767 bp, Cannabis sativa
  modified_base (505)..(507): a, c, t, g, unknown or other
tattattattaattaataatagtgtaacttataactacatttaattactaatctatgatatattaatataaaaataatttattactttatgatatatatgaaagtaagtattataagttggaaagtattatttaccttatttaaaaaatgtacattattatatatgcaaagtattatctaaattggaaagcattattataaatcgggtatgtggtatattacatttttaaaattaaatactttttgatcatgttttgactaaatctacaaaatgtactcttatatatgcaaagtgaaaaaaagaacaagcaaaaaaaaaaattaggtaatatattatactttttttattctatttaactcccatttaaaaaaaaaaataataataattaaaaaaataaaagaaagaaaaaaaatcatgtaactcaactctaggatcttttcaacattctatgtatttttttttttttttttttgtaatttttctaattttttattattatattcnnntctacttaattacttatataatatcaatatgaatatatatatatatatatatatatgagaatttcaaaagaatgatgtggtgctctcaaattagtttatagctatttaatttaactatgttcttaaaaaatggtatcattttcttttaatatcttattttctctattaaaatataaaggatgataacaactaattaataataacttttaataagtaagttacaacacataataagttacctaataatttaataacaatta

SEQ ID NO: 137058 - DNA, 622 bp, Cannabis sativa
tggccacaatcttgttggcaatgggagtccctatgaccagggggtcatgatgagggaaacgcactgtcttagcatcctcttctgtgaatgtaaggggctgatccattagtgggggcctttgagctgggtgttgagtaacctcccaaacctcattgtgctttacggcccctgcgtaacgtttcagttcctttcgggtagttcctccaatgtgaggtcctcctgagatcatggcttctcttccgttgggtctcggcggcaggccaggaatttgctgggtttctcctgggggagcgattggggctaatgctccggctacaccccctggtgctccttggggcaaaggccctcctgcctgaaccggattgagtgaggcaaccggttcttgatccattcgtaaagatgccccagttggatcaagttttcaatctcgtccttgaggtttttgctttcattagtgttatgcccaatgtcgttgtgatactcgcatcttttgttgggatccctcagggtgttgtccatgtacagaggaggcggtctctggtagtgcgtattttgcctggtagcaaaatacacacgctcttgggagtccgttagctctatgtactgggtatactggggagtg

SEQ ID NO: 137059 - DNA, 610 bp, Cannabis sativa
tataatactaattcattttgtagggaacatcgtaatattattgcacaacaaaattctcgtcaaagagcaatgactatagatcggattcatagtcagtcatttccatcatggtttgcaaaaaaggtaagctttttttcaatattatcataatttttttaacttaataaattcatttacgcattaagtgtcgcattaagtgtagctattactttttgttaaatcaggtagaagaattatatgataacggagataatcgaatttctgacgatttacattgtttagctaaaggaccaaacaatgttttcattaaattcaaaaaatatgtaataaatggtttcaaattccacacaaaagcagttgagaagaagttaaaaactcaaaatagtggagttattatgactgccaagactcaaagttttgcaagtagtagtgatccaaatcctgtttttggagatgttacattttatggggtattaactgatattatagagctagattattcttcgggaaatcgcgttgtgttatttaagtgtgattggatttcgagaagtggaattaaaaaagaaaaagattgcacaagagtcaacctttcaaaattgatgcgtgaaga

SEQ ID NO: 137060 - DNA, 536 bp, Cannabis sativa
ccacctcatctcatattaatattaattcttttgtgattttttttatataaatatatagatattagtggatacaaaaacataaaatattttatttattgcatgtgcaactcttagtttaaaatttatatattagatataatgacatgatttttttttacataatgttgtttactaaaatattttttaattagtatatcctattaaaagtgtatattatataaagtgtttatatttttcaaataacaataatttttctttctaaaaaaaatactaataattttattttaaatcctgtttatattgaattttctgtttagttcttatgagaattaatacaattttttatacattgattatcttcttttatttcatatcaagttctatatttgtaaaaattaaaataatacaaatacaacgtaaataggagataaaatatgtaagaaaataacttacattttagtcatattttcatgtaaaatctataattagtatatatacacccagtaatttttataaataattaggatgtcatatat

SEQ ID NO: 137061 - DNA, 1369 bp, Cannabis sativa
  modified_base (628)..(651): a, c, t, g, unknown or other
  modified_base (710)..(712): a, c, t, g, unknown or other
  modified_base (762)..(764): a, c, t, g, unknown or other
  modified_base (1018)..(1030): a, c, t, g, unknown or other
atatgatttgattgtttttaacacatttaattgagaaaaatcttaagttaaaaacttttattttttgtgagaagtgagaattgagaaaatgactttttgaagatatattgatcttctgaatttttaaaatcaaaattttcgaaatttaaaaatatgacaactactagagggatattttttgtaaggatagagtctaattgtaaatttattatctttatatttccttatcacacatgttccctcttgtaaaaaaaataaaatatatatattatgtacatgttgggctttgtgtcctaaataaaactctatttcattgtaatcttttctattcaattatcaataaagaaacagatttattttcattacttatttaatgtgtttttttggttcatgtgatcatttattgtttatttgatttataaattcatccaaatctttatcacattgataatcttgttaattgtgttgtcaacacagtagaaagtaatcaagattgtgtgatgaaatatattcctatgatttatcagtacacaggatttaactgataggataatgtacaatgtagtttacttgcaccttggataagtgatatgtcctctccaaggcattagttaaagtaagcttgggnnnnnnnnnnnnnnnnnnnnnnnnaagggaccgatattgaacttgaatcagatataataaacctactgtaatatctattcaannnaatatcacctagttgatctttgatcaagtgatctcaatcctgagatggtnnngttctagttcagttgcattatttatgttcttcaatttgttcgttaaagtcgaccaaattgttctactcatgacatatagattaaggacatgatacttcaattgagtgggagcactaatcatagatacaaaatccatagcttctatcctttcatagaagtgaaacgataatttccttcgagcgtggcttaatagagataaatgattgagtacttatttcagtgattatattagttcactggaatatcatttatannnnnnnnnnnnntttaaggataaaatacgttgaagggtgtaacggtggattagtccctactcaatgtagatcatctatataggatcattgattattaggattataacaaatggataatctcatagcgtatatatatcgtggaacatatagagtgttctatataattagagtccaatttcaaatctatagtggtgcaaggaggaagtaataagttagaaaatttacttggtaaattttagatctaatgattcgaagctcggctatataggcccatggtgcccatactagttgagacaaattgcttgtaagactcagttaattgattttcattaatcaattataattttaaaa

SEQ ID NO: 137062 - DNA, 871 bp, Cannabis sativa
  modified_base (35)..(50): a, c, t, g, unknown or other
aggatgagaccggctccggaacctataagctaaannnnnnnnnnnnnnnnattgtgccaagggcttggaacgccgatcatctccgaaagtattaccattagtccaaaatgtaaacttagttcttgttaaaagagtttgtaccgtaaaagtgtatgtaacctctaagtttcaaataaaatctgagtgccttaaaaacaaaattttcatgccactcaggggggtactaagacataccgcacggacaaacataaatcaggctaaaagtaaaaagcaaagtcaaaaagaatatgtatcaaagtgaacatacatatatatttataatatcctgacccaaagggcaggtccaaaaagaaaaaatatataaagggtctggggacgggctgtaataactgtctccccttagaaaataaacagctaaattaaaattgtcttgaaggaaagaaaaatggctgtatataaaaaaaaagagagatatgattataatgctgaaatgggttggactccgtggcctagtcgatgcgaggaggaagatgagggccccgacgcgcttcaagcaaagcatcaagccttttcttcttctcccggaatttagtaagagcctttcaggcttgggatagaagtcaagcttaatactttggccatttgactgccaggtcatgtagacgtcgtcatcaaagcacttggcgcaatgcttgcaggagacgggggtcagaagctcatctcttttagccttcttcaaggcctggtctctgaagtccctcagctccacagccaggttggccttagactgcaagtctgcctggtgcaactcctctagggacttccccttggcagccatttcgtccacggcttccctggcctcctgaagctc

SEQ ID NO: 137063 - DNA, 783 bp, Cannabis sativa
aatttcatatattttgaaaattaattatgttaccaatcaaatttattaggttaaactagtatacttaacctatacaattgttcaaataaggcaagtgggccttcacaattgggattattcatgtgagagagggttgggttcagtatgtcgtacccactactatgaccccctaactctcacacaaggcccaaaaggatgggaatttaacctttaattaaacaattgttattcattgataagcccaatactaattgttcctaaataaaaactatcaaatgtgatatttttattttagcaacctagtccattttaattatcaaaattaaatgggctccctatatgcatctaggcccaaaaaaaacatatatgcacaggcacacactgatttggatggatcctatcatgttactatgtttatacatagatgaaagaaaattacaaaatttacctatcacaaattatttatttgacttattgacaattgaactattggttaaaattagatcattgaatctgtcaacaagttaaccataacaatttaaatcaaacaataataagttttataaaacaagtttgaataataaacaatatataaaacacacatgtaacaaattggataattggttatataattaatctaatttaaattaaataattaattaaattaatttcgaaatatctgaataataaaatattatttttgaaaattaattaaattaaattaaataattaatttaaaattgaacctataaatttgagaaattaggtttttaacaaacctaa

SEQ ID NO: 137064 - DNA, 826 bp, Cannabis sativa
agataaaaggttaacttttgatcccggttcttttgaaaaaataggataaaaggtacacattttatccttttaaaaaaaatggaataaaaggtatttccactttaaagttgtatttttaatattgtatttgtattccccaatcactctcctcaataattcaacattgtatcttttttttaacataaaatttattattttttcacacttaaattgttgcaagtacattcatttatttttcgacgtatttcttgtaattttttttaattttttttaatgaaatacttacaacttacaaatatttattataagaaaatagtaattattttcttcatcatcacataaccatgaatatatatctctcaacaaaactctcacacctttacaaatacataaaacatcaatatactatggtatgaaaaaagatgaataaggatatttttaggctcaaatgttagtgtatagggttaagaaaataagatgtgaacaaacatttaggcttaaattggctaaaattatggatttaacaaatagggtagactttaaattgcctatatcatatctcaaaatcatgtgtaattcatcaattttgcctcaaataattatcaaacaagttctagagtggttgagattttaaattaaaagtcaagcatgcacttacctttttaaaccttagcaaatatgatatttcaaatgatgtgcaaaagttttaaaaatcaagcttgaaaagtaattaatcatgagttgagcacacaaatcatgagaatctatcattttttcttagaattataactatcacacaattaagaatttcatcatcaataaaatt

SEQ ID NO: 137065 - DNA, 893 bp, Cannabis sativa
ccccggcaccgccagtgcatcgcccgtccaccgccagtgcaccgcccgtcaaccgccagtgcaccggtaatgcttttcgtttttcttttttatcttttcacatgttgttatttttttttcttaatatctaattttttctccatctttaaagtttgagataaatagtcagtggggaggagaaatctgagtaaaatgccgggtcggtcggtggtctaaatatttggaggttagttcttacaatatttgtgtatatatctcataaaaataatattttttctgcaaaaatatgacatatatatatgtgttatatttaaaaaatttatatatacacttatgtattatatattgatagagatttaggatttatagtttagtataattttaactgttattttgtatatactgtatattgtataatatatattttgtatatactgtatattgtatactatatatacattatatacattatatacattatatataatgtgtatacagtatatatactgtgtatactatatatacaatatatacaatatattgtgatatatatatatattatgtaatagtaaatgtaatttatagagtttattatttaattttttcaagaaattttatgtcattaatattttaaaataataaacaacttgtaaatatgtacaaaattataaaattaatatataattgattatttttaaaaaatataataagaaaatcacgataaatttatattattgaaaaaatgcttatgtaaaatattttttaacattaattatataaatgttaataaacataattaatttttatgaatataaaacatacaaaaaaataaactttttcatgtaaattattaaataagattttaaaatctaaattataatttttttaataat

SEQ ID NO: 137066 - DNA, 743 bp, Cannabis sativa
gcccaactaagctaagtgcaacgtttggatttgaagtccaaaatcaattcatccccatctaaacaagcttttcaaattttagcccaaattctactagtgctacttccatgtcctggattgaaaagattaatattgggaaacttataataatactgacttttgatccaatctttataaaaatactaccatgcacacggtagaaattacttttatattatcttggccattttttttttctcttttatactgtaaacaaaaaaaaaaaaaaaaatgaggcccccatcttccacacccacggacataaccactataggaacaccagaacaatcggaaaacaaccattaattccggtgagattgagaaaaaaacagtgaaattgaattcaaataaataatcatggcaaaacaactataaaacaacactaaaacaaatcaaataaaagaaattaaaaaaactaaaaaaaagttctgcacaacctcaatacccaatataatagcagttatatttgcaagcccaatctttaaaaatcagaacaaaaaaaatactaaaacaacacaaaaataaatgtaaaacaataagcagatttaactacgtagaaaaacataaaagaaccacaatcaataattccaggaagatgggacaagaacagtgaaatcgacgttaaaaaaataaattatggaaaacaaccgtaaaacaacactaaaacaaataaaaaaaagtaaagaataaacacagtatactgc

SEQ ID NO: 137067 - DNA, 617 bp, Cannabis sativa
  modified_base (191)..(191): a, c, t, g, unknown or other
aagcatataacatatcatataatttctgacttgtatttaggggcccatacacataattacaaggcttaacagatgaggaagaacgttccatgctagggtatagctgctacaccacatacactacgtacctcactgtactctcaaataatattcactatactaatgcactctataccttaactgtacaagtnttggtagtgcaactaacattttaagcatgcatatacacataacatatacatacacttagatattgatatcacacattatatacagttcttaccttctttctaggttcaagtgtgctggccgacctgaacggaaagtctcgcgctagatggatgcccaaatcacaaaatgaaactgggtaaatcacacgatcaaaaaccctaatccgggaaacccaaacccacaaccctaggttctgttatactctctaggggttactcaaactctggaaatagggaaactcccaactacggcactgaagtggacgaacatcgagaaaatgaagcgtttgggggaggtattggtaaaaaccggctagccggtttgcacaagttcaccccaaactttccatttcttgctcaattctccaccaaatgcaaccaaacctt

SEQ ID NO: 137068 - DNA, 516 bp, Cannabis sativa
tttgtccaagtgggagagatattgaaatcttgtatggactaatataatcacaaacataattccatattcacaactatgttagatagttttctaaagagaccatatgagattagtttttcacagcaactctcaagatactgagattcaatggatcatatcgttttattctgaatagtctcatgaatgttgtgactgaataagggtttacatctaagactatttaaggagttttaatattatgaggcaatataagacattgcatttgacaatcttaaattttaatcatataagagaagacgaatatctcaaaagttttattaatgtctctcctagctattattgttgataagcatataaagctacatatgttggagttttaaattggcattagacatgtttttttaaacttttctttatgggataattgggtttatccctcattttgttgcctccgctgttataattaatgaccttctattggccagaatatgataagaaactccatatgtggacaaa

SEQ ID NO: 137069 - DNA, 525 bp, Cannabis sativa
atcaatgtggttttgacagatgatcaatgcatatcatatgaatcttatcttgatgattacttgtggaacagaatgacttctttggatttgaagatgaatgagttgatagtgcaagcgttttcggtggaaaattatgaatctaatttcatgtggaaaattattaaacaccataattattgaaatactatagcaagctgtaatgttaagagaaaaacataatatatgtcaatatatataaacctatacgtacatatatatggaagaaaaagaaattaattaaaagaaataaaaaagaaaacctgtaaattaattgttgagaataatgagctgaaagactttggtgtggactgaatttggaagctaattttggaaattaggtttatgttgagaagctgagacactcgtgtatgtatatatatctatataatatattatataaattaaaatgataactttttaaataaaagataatatttgatatattattacgtttaaaataatatttttaactaacattttatcaag

SEQ ID NO: 137070 - DNA, 958 bp, Cannabis sativa
tcacgcatatccgactagtggtatatctcaagaaacagctgaggaatctcctatatctcaaggggcatgcctttctcgcataaaccttgggctaacgtaaatacctcactgtttcaagcaaacctactagtcgaaatacacggtcatatgggaacagggaacgctggcgtatgtcgcaaatggctaggtgtatcgcagtacctcaataaacatgaaatcgcacgcatgagcattggaatacggcgacacacttaccatttgaaagaattaactagtatccccacaacaaaatatacatagaatatagagaaaatcctaagttctaaacaacgggtaaaaatgataaagtcactagaaatcctaaaggaagcatatatgcaagtattcgagatgctcatccgaatacccgcgagtattccagagataagcaatcaaaaagatgcgaatattcaaagtattcttcctagattgacggttatgccaattacaggttcgttttctcctggggattatccagttctaacaagggagtaaaactctatgtgtatttcctacaactaagcatgcattttcaaccttttttccaaaatcaaaacattcagaaaatgcaaggcttctactcaaacccagaaacaaaattcaaaagaagattcgaaagaccagccttgggatttgatgctcctctctgtaaataatctcgatcgtttcgagaagtcttgacgattcaaaaggggcaaaaccaaaatctgtttgaacaagggggttttgcctttgagagcttcaggtgaatgaaaaaataaaaatgagagggaaagtaagaaatcgtttcgtatcaggaggcttaaataccaatacccctcataaattaggattgtgacacgtgacaacaggaatgcctaaggtcatcccatccaacgaccagccatgggcacgcctacacgaaaaccgaaagataaaa

SEQ ID NO: 137071 - DNA, 1079 bp, Cannabis sativa
aattattttcattgtatattatttttgttttgttttcataatctttattattattgtgtgaagaaaccactttcttggtgaagaaactagttttgtgatgaagaaaccattttttttggtgatttttccagtaattttgatggcaacaatgctaattctgacaacttttttaacgccaacaataactctgacgacttttctgacaccgacagctactccggtgacttttccgggaccgatagcaaactccgaaatagtcgtcggaattggcattgtcgctagtaaaatcactggaaaaatcaccaaggaactggtttcttggtgatttttctgacgacaattctaatttcaatgactttttcggcgctagtggcaactctagcgactttttcggcaccgacagctactccgatgactttttcagtgccgacagcaaactccgatgacttttctggcatgagtgacaactctggcgatcactggagtttcatttttttttaaaaaaaataaatatgaagggaattttaatattttttatggtaatttaattaagtttttattttttatgaatcttaaattcagatttttttaaatgttttatatggttttttttttttgaaactcgttggcatgatacaaggttgattgggtagtccatactgtacgcttggtacactaggccgagtttgcctaagtgacatcgtaagccgcaggaggcgcttttgttgaaaatgaagcttgttggcagggttgtggaagtactgcagggaccgtcagatctttgttagtcactgcagtggtcgagagttaatgactgggatggttcaaagtgggatagacacggaatgcttcagttgctacattgtgtatcaagaggggcgcacatggagaccaagggggggcatatgtcgcaattgtcagaggatgattgtacttggaggtgttcgcatgtgactcttatttgatccatatggtagcgctgagacagttgagtgggatgtgtcggcttgtaaaagcgccagtgggcgtaagtcacacaaaggcatcgatagagatgcgcagttgtggaatgaatgcat

SEQ ID NO: 137072 - DNA, 1589 bp, Cannabis sativa
cacaaagcatgctgtgagtgccgtattgatcagagaggaaaacaacattcaacatccggtctattacatcagtaaaagactcgttgaggccgaaagccaatatccattaatagagaaactcacttactgcctaattctagctacaagaaagttaaggccctactttcaagctcaccctatttgggtatgcactgaagccagatattacaaaaactggatgcctctggacagttactcaaatgggcaatggagttgggccaatatgagattatcttccaaccccgaacagcaactaagggccaggccttagcagactttgtagtagaatgcacaggcaaggaagaaagcgtatcagaaaacaaccccgagccagaacaaatacctcagtcaagtaatagtgaagacaagccaacttggaaactacatgtggatgggtcggctatagatcaactatctggtgtaggaatcgcccttgtcacgcctggggtgcaacaccagcacgctacagtcaaatttggttttaaggcatccaataatgaagccgaatatgatgctttgatcgccggtctaaaactagctcgagaaatgaaggctgagcatattgagatctgcagcgattcacaactggtggtaaatcatgtatctggggaatacaaagctcagggagaaaagatgatagcgtatctgagaaaaatacacaatctgcttgcacagttcaaaagctatgcactcaggaaaattccaagagaagaaaacacgactgctgacgcattagctcagcttgtaagtagtaatgtaaggatagagcaaatctgattcctattcaatttctcgaagaacctagcatcattggcatgtaagagattgaaatgattgatacaccccaaactggaggacaccaatagcaacctaccttaacactagggaactcccaaataatcaaaatgaggctcgaaagatgagaaggaaggatgcacggtacatcatagtagagggaattatgtatagacgaggattcttcatgccattgctcagatgtgttacctaagaagaagctggacgacttttgtctgaggtacatgatggattttgtggaaaccatgctgccgggcagagtttatctaagaaaattctaaggcaaggatatttctggccaacgaggattgaagattctaaggcctatgttaaaaaaatgtgataaataccagagatttttaaagatacctcgagcaccgcccaacgagttaactcagatgcaaagtccttggcctttcgccatatggggaattgacctgatcggacaattacccaagggcaaaggtgacgtgcagtatgcagttgatgacttcaccatatggacagaagtcgaaccattaacaaccattacgtccaaaaaagggcaagactttgtttgaagaacataatctgctggttcaaattgccatacaaaatagtttcggacaatggcaaacagtttgatagccagtcctttactgatttttatacgaaccatggtacatcaaaagtttctctgcagtggcgcatccccaagaaaacggtcaagttgaagcagtcaacaagacattgaa

SEQ ID NO: 137073 - DNA, 696 bp, Cannabis sativa
  modified_base (178)..(178): a, c, t, g, unknown or other
catgaaattgtcgaggggcggaagaagttagaatgaccgaggcattagttcaacatcttcatcaaagtgatatttggaatggagggactgtatgtgagtatgcgattagcttgcaagctataccttgaggggtattcctctaagagagaagtccttcccaagttgaagtgggggagcncactaattcatatgtttgaagaattagggtacttgttcacttttgatgtgtgaatccagagggaaacactacaacagatgggttgttcagtgcgaagacttgcatgattgctgcaagttgcagatagacaatatgtaggggcataggctaagatcaagactaagctagtttgcggcatgttatgggcatgctttgtgtttatggggacactggtgttgtatgggataatgtaagccgaatggttcagagagcatatgccgatgggagatagttgattaagatgaattcaagtcttaagagtaagactttgtgttatcaagtttatcaaaagttagcgagtcatcagaagatgaagggttgattttgggagatggacttgtaacacagtgttagtgagccgacaaaagcaggagccatagggaaaattcgtagttttgggtgattgttagatcattgacaacgtgaaagaagcttagaggagcacgtatgcagtgggtcagaggggccttttgcatgaa

SEQ ID NO: 137074 - DNA, 529 bp, Cannabis sativa
  modified_base (45)..(72): a, c, t, g, unknown or other
  modified_base (308)..(320): a, c, t, g, unknown or other
agttatttctaactaattttattttatcaacttaaatttgaatannnnnnnnnnnnnnnnnnnnnnnnnnnnattctaggaattggttattgaagaatcttaagctatattttttaagttgatttttttaaaaaaaattcttaaaaatcaacttaaaatggaatatttttttttttaaattaggtggttacaacttaattttgatatttaattacattttatttgaaaaatatttaagttggatattttaaattttttctttaacaacttaaattttttttttcaaatttttagaaaaacacttagtnnnnnnnnnnnnnttctagatagttatttctaatactagctattttttctaatattataatagaaaaatatttttcgattgaaaaattaattgtttagtaattaattttttgatcaataaagtattttttcctagcattaaactagaattaataattaagtctcctctatacttaattatttatttcttgaatataatacattaacattgctctcataggtg

SEQ ID NO: 137075 - DNA, 1006 bp, Cannabis sativa
agcggaggccctccaggcccaagcatgtggccccggttcccaatactggtgctcccgatgccagtacttcaggttctggtaagtctcctttagtaattcattatatccctcccgtccgagagtatacccagcgtagacccatagggttcgatgagcgcctctgtaggtttagaatgccttccacccggtgggggagttacgccaaggaatattacttttcctacttgggccatttcttgggtcggtcccggatgggctctggacctccagcacctattcccttggaccactcaacccatttatctaccagctggtttctcccctcggacagctttctcggggatgatgaagccagcattgtagtccaagactttgctagggctgagttagagagtcagggtaggactagttttattgctttcttgttgggcgcatgcctttctcatgattgttctaacactttgtttatttctttgttgcagcagccaggcctatggaaaatcttctagctactcttgtcgaggcatatagccctgacgcttctctgcatctggctccagccgaggcacgatcgtcttgatagacgaggagggggaagtcgaggaagatgaagtcgaggccgcggccgccctcgcgcacaagtggaagggcaagatggttgaaactgagccttctaagcggacccggaggggggacactccggctgtgagcaatgactctgagattcctccggaagtggaggtgtatactgtgccgcacgacattgtgctgaccccggtccctgtggatgaggagaggcaaatgctccgcgttgccaaacacaactacgccctagacgagttcagtcgggggcatgctgaggtggaggccctgaagaaggttctgcgggaggagcaacataacattttgcacgaggacgccttccggaatccttaggacctgaacatggaccctttgacggattggtttaaccgctttgtcaggcctaccctagcttccttcgcct

SEQ ID NO: 137076 - DNA, 656 bp, Cannabis sativa
ctatcgttgctaaaatttacccaatggagttgcgaaaataagctttaggtaacagcgggacctactagacgtaaaaaatcagccatcattatcataaactaatttagaaaaagatattgacaaagagaaaaagagaaagagaatacagtgtcccatcaattttatcatatataatacatttgtataattaaaaaaccaaattaacatataaattataagtattatggacatatgtattattgagagaaaaaaaaaatatagctacaaattagtgattgaagaatagttgaggaacaaactgtctacatctaagagaaaaagaatcaaattataatatcttaatattggtcactcttcatcaatgtgatgaccttatagttaaagaccaaaacataattacttactcgatcagaattcttttttttttttttcttagggtttgaataagaattgcgtaatatggagaggtaataggcatatataaaatttttctcattggaaattgttgaaaagaatgtgatattgtatattgtacatgtagcatacttttaattaagaaaaaattgcatctaacaactaaaatttgaaatttattgccataatattgttattcaattaatttgcacatataccgtttcttcaattaattttattgt

SEQ ID NO: 137077 - DNA, 683 bp, Cannabis sativa
ttatccttttcgatggttaatgctgatttggataattgtatctcccttaattcgagttatcttttttgttcatcttgatttcgatggttcacctcgttaaattttattagttaaaatagcgagataactgtctcgctatacataacctgaggttgccatatctgattgtatttattctacttcaaatagatgaatatcttctttaactatgtactctaaggcaaacgcgtgtctcgtcaatgcaagtcttaataaccttttatccttatctcgcctaagactatatagctagcgagttatgaatgttttctattaaatctttgttaacttgttgttctatcttgcatttaatgatttaattttattatatcaagtggttcatattctaccacaagacacatgtcagtttttgtagtgtagtcgaatttcgggtataacaattgccccttaaattcttttttaattaaaaagagctttttaaatgattacaagggtatttttgttttagtcccaatttgaaaaattgcatgctttgagttttggcggttcatgatttcgagacacatcattagcattaaatgcccatcttttccgattctttcgtgttcccatccgtttagaattttttttcttttaatctaacgatgatcactcttaaagtataaaactcaagagaagacatt

SEQ ID NO: 137078 - DNA, 900 bp, Cannabis sativa
tcctagtttgagttcgagtttgggtttgggttctggtctaagtcatagatccaaacaccgactacgggttggttcccagcatcgagtcccaaatctcaggtcccgaggtgggtcctaagtccatgtttgggtctacggtcgagtcccagatcccgatccaagatctgaggcccaagttctggtcctagttcgtgggcttgatttccagctctgggtcccccatctatatttggatcctaggtcccggtctgggtcaaagttcgtgttccggttcaagttcgggttcggtctgagtcttggtcccgattcgggttcgggttcgagtttgtgtccccgtcccagtctgggtccaggtttcgggtcccaggtctgagtctggttcttgggtcctgggttcggccccagttttcgggtcttattttggcttcgtgtctaggtccaggtctcggtcttctttaggtcccaggacacaggtcccggtctgggtccaagtctcggtatgggttctagtctgagtttgagtttaggtttgggtcctgctacagtcccatgtccgggttctagtcccaatgttactccgattccggttccgggtccgggatcgggtcagacccaaagctaggacccgattttagacccagactcagaccttgacatggatctagatacgaacctggactcgaacccatacacgaacccatacctagactgtgatcggacaaggactgggattagaactcagacatgggactgtaacaggacccaaacctaaacccaaactcaaaccacaaccaatacccagacttggacccagaccgggacctgtgtcctgggacctaaaccaagaccaggacctggacccagaccgggacctggacccagaccgggacctggacctga

SEQ ID NO: 137079 - DNA, 514 bp, Cannabis sativa
  modified_base (477)..(487): a, c, t, g, unknown or other
tatgaatttggaaagcaattatgttgatgagattcagtgtaatcatgtttaaaatctaaattttatataaatatattatatttatagcatgttgtatatatttcgagtgttttaaatataaaatctcatgtgacttttgtaaagttgctagatatatggatctgcaattaatgtggaatacttgccttttttatattgatccatgcaatatatttgtttgtttgatatatttatacattaaattttcagatttgtgagataaaaaaagaaaaattatgttaaaatagtgtgttcggttaaatttttataacattgaaatacaatttgctcttaattttttgttttgacaaatccagctatattagtaaattaatttatttgatgggattttgcactacttaaaattaaataaccaaatcaatcctttcaaaaagataactaaataaaaaaatgatcttgtgacagtcagtagtcccnnnnnnnnnnngggaaaatactgggtaagctgtgcaat

SEQ ID NO: 137080 - DNA, 603 bp, Cannabis sativa
agctgtgaatcactgcagatttcgatgtgctcggctttcatctcttgggctaagcttagcccagcgattagagcttcgtactcggcttcgttgttagattctttgaatccaaacttgactgcagcgtgtaggttttgcccctaagcgtgacaagggcaattcctgcacctgatagttgatctgtagctgacccatctacatgtagtttccaggtcagtttgtcctcattgtgacttggctgaggtgtttgtaccggctcagggttactttctggtatgctttcttttttgcctatgcattctaccacaaactcttccaagacttggcctttgattgctgtttggggttggaaagtgatttcgtactggcccaactctaccacccacttgagtagctgtccagaagcatctagtttttgcagtatttggcatagtggttggtcggtgtatacccgaacaagatgagcttgaaaataacccctcaacttccttgttgctagaaagggacagtaggcgagtttttctattaacgggtatcggccctcagcctcaatgagtcttttactaatgtaatagactaggtgttgtacgttattctcttctc

SEQ ID NO: 137081 - DNA, 508 bp, Cannabis sativa
  modified_base (255)..(256): a, c, t, g, unknown or other
tcttccttattgtcatcgatcaaggtataattcatgcaaatgatttttcctttttcctgcaaatttcttaacaaaacacttgctagagcagccttctctttttcatcttcactattttcagaatccctttttatttttcttcaaggtattggcacattcagattgagtatgtccatacccttcacactctctgcattgaataccttttttgatgttagatgaaaaaggtttagagggattgttacctgaaatgtnnccttttgaggtttttgaaaaattctttttatttccaacagatttcatatatctttgaaatttttttgccaacaaggtcatttcatcatcattttcatcatcataaacaatattttcagaattattaaacgcaatacctttgcttttcacattcaagaaactttgcttatctttttcttgatctgttgatttaactcaaaagttcttaaagaacccatgagttcctcaaccttcattttgccaaagtcttttg

SEQ ID NO: 137082 - DNA, 611 bp, Cannabis sativa
tcctctgtaataataaaaaagaacttgttaaggggcaattgttatacctgaaatttggctaccatttcagtagaggacacgtgtcaagttaaggggaatatagatcgatgcgtgaaaccataatcacatttaatggaataactcattaaatgtagaagtgacagagtatatttgtaactagctgactatatagtcttatgcgagataaaagatatacaaactgttatctcatgcattaacgagaaaccatacaacattggatgcacaaggcgagacatcaacttcgttacacctgggaagacgaaagtgaggcataacgactgtgaagacacttagcgtataatttacaaactaagtataatagtggagcaaacccaaacagctaatagtgaggcgtcaatctcgctataggaaggcatgctcctgttagtttcatcaatcattctcagacatctttcagtgagacttatagtttagacaagtcaaaagctaacattcgaatgatgactgctgaaatactctttttttcattaagaactgcgagtgtcaaaatgaagcattatgccttcaaataaagaagcaacgaggcgtacatcgtcaacctcggaaag

SEQ ID NO: 137083 - DNA, 1248 bp, Cannabis sativa
  modified_base (447)..(453): a, c, t, g, unknown or other
  modified_base (747)..(753): a, c, t, g, unknown or other
tcctcactggcgtagtccacgccctcaaccaggacgtcgccatcagcatcaattggctccccgacctcattgtatcccccatagttggaggtccaacctcctcctcttccttcgcctcggagggattgctaggacagacatcgtcctgctcctcaatctcttggacctcagcgtccccttcttgatcctcctcctcctggatggctggatcttgttcggcgctgggtatggtggcgtgctgggccacttgagtgttgatgcgtcaatactacgcattgtctttttggtacaagccatcatcctatggctggacagaagacttaaggaagaatgactgtcactcgaagaagttggactagaacaaagacgaggatgatcctcgtgcaagagttgaagcagatcctggtcgatttggtgtatgtttccccaaaactcaccagggttcannnnnnnaagacaacacacaagatgagtgtttggtcggaatatcaaacgttaaaacaggcaaatatgccgaccaggagtactcaacagattaaagagtaagaatactcaacgaaaggtcaaatctcaggaagtttggaattttggcgagttagggaaaaagattgtcatgaagattagaataagcaagatgaaagacaagcattatgcagttcaaaaagcaagcattatggacgatgaaatcgcatgaaccgtaacaaaggaaaatcgcaaagtttctaaacttagggtttcctacatatnnnnnnnagcgaaatcgaaagtgcattcagaaagcaaatgtgaaaagtacacataaaggaaatcgagaacttactcaaggaatcaagcgtctgggttcaagttacgtcaagccaaacgagcagttttgatgaaagcacttcagcaaacttgaagctaaaaacctctcttttcgctctgaacttacttagcaaggaaagttggtgaatatgagtttgtggacaaatgctcactggtatttataggcagacaacgaaaaggggtaatcatttcaaaagaacctcaaacacctcggttcccccctaaaagcgaatatgggaaatcaaaagtaatcaagtgtagccgtcaaccgtggtgagagaaaatcggatatcgaaatattaattgtcagagcatttactagtaaaaaactgaagggaggcccagtcagcctcacatcgagtcgcgaagaggcgcacctgacacgtgtcacctatttaaacgcaaagacagctcggatgaagt

SEQ ID NO: 137084 - DNA, 523 bp, Cannabis sativa
aaaaaaaaaaaaaaagaatatcattggagttggagccatagttcgtggctcacatggtattgcggttacagccttttccaagccaattataggtaactttgcctctcataaaatgaaagcgaaagctcttctccatagtttgaattgggttcttcagatgggcttgctaatcacacaaatagagatggatgctttaatagtttctactgctttaaatgaccatttcaatgcaaattatacttttaaagatttaatcgttgacatttttagtcttttgtcatttctcgaaagctacaattgtacatgttaaaaattatgagacttgtttgttgaagtaaacctccacttacactgataatggactaattacaaggacaaaacagtaaatacatgcaaatccctatttcggccttcggactctaaaattcctaacagaaattagttagaatggattaggttataatccacacctaactaattcctgtaactaactattacaggtacaaatcagaaaccctagatc

SEQ ID NO: 137085 - DNA, 912 bp, Cannabis sativa
atgtcaaattgtgtaattaccactaattatacacaaatctaattacaccatcattttccaaacgcaccctaaagatagctacataaacataaaagtaaaacttgtaaaatgttaaatattgaatataatttttattttttttaaaaaaaaataataaaatatactcatatttgtggtattaaaataagataatttatataaatagaaatatgtatctttttttggcagaaaaaataaaaatatgtgtcttaggaaaatgcttaattaggtagagtcacgaaaaaaatctgtgtattcaatttttttttcattatgtgtcactatattgtggacctttaagccttatttactaaaaaatgacattttttaaaaagaaatactaattttttcatttgatatatatagtgaaacttgaagattgaaaattataaacacattagacatataaaactaaggtttaaatatatttggctatataattaattaatcaaataatactatttttttttaccacagttcatattactttgttagtataattttcgataaatattatttacttgaaggtcacttatgttatatcagcatacatataatttattcaccaatcaagatgcaattaagaaatcctaataatatatgactcatcttttttgtcatctacatataaaagagagaaagtgacatacatacatatcacattgatcaaacaaataatattgcaaaagtatttcttttaaaaaaaaaatctcgtgtaagacacattatttgaatatgttttagtaaatgaaactcaatgctctacaatattaaatattagtaattttccttattaggtgtcatcaaattattcaaaaaaaaaaagaaataattaattattagtataaaataatggctaattagcaatttttt

SEQ ID NO: 137086 - DNA, 633 bp, Cannabis sativa
gataattcttcttgaaaaaaaaaagaaagaaaaaaaaagagaaaaagaagaacaagaaaaaaaaattattattatatacatacttatataattacatatataactttcaatttcctacagttactaatgatttttttgtggtgtggtgatctttattgctggtccaaagcagggaatgaaagaaaaataggctgctgcaatatggtgtgaagcagatttgtgtgctgaagcagtaagtcccagttgttacagcattgcatcagcatcgcttcagcattttgaagcagggactctagtggggaagagtccgaatcttgagggagtacctctttttccttagttagttaatctagtttaaatgttattgtgcttgtgtgtgctgaaataagtgtgttagtttaagtgttgctactgcttgtgtttgttactctatgagtctacttttgttgttgactttagtattatgtgtaataaacattgtgtggattagatgtgtattaatctgttattttgtcatgtttgttatgttctgttttagcttgcaaatgaggaaaatagtgcttgtatttttagcttggtttagggtagcgctcgatgatgaaaaatatccattttcctccatttgtggagtgc

SEQ ID NO: 137087 - DNA, 1019 bp, Cannabis sativa
tgagatatggtgtcacatgcaattcacttggagtgaattttagctgttttttcagttaagattagagaacacatacacattggagaaatgatattctctggctatttcatttcaaatcataactaataaatttaggtcattacagtacacaatattaactaatgtttgtcactattatttactatttaatatcatttggtaactggttaattcctcttgatgatctttaccaattttatttgatgcagcaaagtgtactatgaatggcaagtttttatgagcctttactcctggaagtgaaaggtgtcagcaaggtttcactatgaacaacaacgttttaaactgagtcatacattgcaatgtaaaatgtaataaaagaaaaagaaaatgtgggtgaatataatccaatctcacatctgagatgtgttgaatttagggcaatctactcctctttctaggcatagttgttttagcaaagggacactcttttgattgtttcccatagacaaagttcatttacaatctagaagaacaattgacactcttgacaaataccaaatgaccatagtttgagaataattaacttctataattctcaatctcaagatgctacaagtttgtatgggatttaagtgcatcaagtacatcttttcttgttactaacaatgagcctcgacagcattactgacacaacttttcataaccatgaagtataaatatggtagctcctctatttcagtaaaagataagtccaaatatcttaatatgtccctatcatcattaaaattgccacttttacttgagatatgagttgagaaggatgttatataactactggcaagattatgatttatgatgatgtatatatagctcttaaatggttagtcttaatactcccacatgggatacaagctgcaatagcagcacataaatgacttataaaggtctaggcctttgaccatgcaaatcatacctttctcggccttttggctaagatcaagtgtagtatctgttcttat

SEQ ID NO: 137088 - DNA, 549 bp, Cannabis sativa
gaagcggggacgttacaaaaggtgtagcacagttattcttcttcttttgtagaattgattatagactcaagacaatacaaaatatataattatagaggaagagacgagcacccacttctttacacaataaagacactcttttttacaagatatgaataaaatacaaatatgtgaaaaagatacaagatttagctgttatatatttataattaatatacaccttattgaaagctcatacacggtttgaacaagaccacaactcactagacacttccttaaaatagatcttcaattagccaaggaatttttgcttttgtacctacagaatcgtgagcagtaagtgcgacttttttttatagaaaagaaaagtcttgctttggttttcttcacaaggaatctgatcaaatattttagaaaacttacaaatgatcaaatatacacagttggatagatagatattggttgatcatcatcatataagaatattttttatttaaggaaatatatttctatttaaagaaataaatttctatttaaggaaataaataa

SEQ ID NO: 137089 - DNA, 625 bp, Cannabis sativa
ggagccatctcggctgcatacgaactcagctcactcgctcaggaccctctcgaacgactcctgggacaacatctccttcgttggttgaagagcttggttggtttgaacttttctcccaggctgtattttctatgatattcttgatgctttgtttccaaactccaatatcaatagctattggatttctagttgtgcctccctaacagtactctcttcctcgaaaataaccttgtcctcaaggttaggaatgttatagagctggacaaaagactcataatcttcccacgtggtgtcctctggagtacttaaagaccactgcaccagaatttgtcgaactactttgtcattgaccatctgaagtgttgtagctaagattgccataggaaccatcaacggtttgttggctatgcttaattccgataatggatagcatataggtgaattgctaccataaaacggcttcaagagagacacatgaaaagtaggatgtatgcggttgcctggaggaagttcaagagtataagctgctggtccccgacgagcaaggatagggaaaggaccaaagtaacgcctgcaaagcttgctatttaggggtgctcattggatcacatccaatggatttgga

SEQ ID NO: 137090 - DNA, 617 bp, Cannabis sativa
catataataagccttatctcatggggatgtggcgctaggaatggacccgagttacctttgatgacgagctggtgctcgtcatacgacttcctgagattgatattgctttaattctgataactacattttttggtgtcgagatgatttttctcgtatgcatgccatcttacaacaagatagacgtctcgctgtctgtcatctcgagtcaccgaactatttatacttagtttgtataccgtgtaatatacgctaagtgtttttatcgttatcctcttttccacgcgatgaggttgaagcctcgtcatgcacacttggtctctcatggtttctcgtcaacacataagttagcagtttctacccttctgtctcgcagaagactgtttagccaaccgagttataagcatactctgcaaattgtgtctctaacgagttgttccatgccaagtgtgattgcgtgtttgagttcttcgttcttcctagctcgacacgtgtccacttccaacgtgctttccgaattttgggtataaaaatttccccttaaaaagtttttttttaataaaaagagctttttaatgattacaaagggtatttttgtcatgttcctctttttgaaaaga

SEQ ID NO: 137091 - DNA, 898 bp, Cannabis sativa
atatatttggcacttggtgccccaaaacagtccagaataatatacagattaagttttcaatttttcaaacattatataaatcataaaaattggaatatgtctaatgttattcaatacatgtaaaatcaagttcaataatcaagttgagtccctacctccttaggatcgttaatttttctccaaaagagatgcttgtaagcccctgattcttaagttcaaatagcttagtcactccaaaagtcaatttgtcctacattctcaaataaaataaataattatcataattgtaatgtactcttcaaatcgagtccaacgacatataacatgaccatatttgaaatttaaagttccaaaacctcacctaagtggtgcttattaactattgatggcagtaaaaattggtgtaccagaaatatcaccaaaaataggagtagtatatatcaaaacaatcctcttgacaagtagatcacgaatgtataacccattagcctaaacaaacaccggaagcgcctaaaaatacttccaaatggttggagataactaaatctcattgagacaaagtaacaagttgagaaaaatgatttagttggggatgtttccctcgcaacgctaatttcaacgataccaaccatttttcaaatggtggctggagttgatcacaatgttgccttaaaggtttgatggcaaattttgaagctttcgtatacttacgtccctgctccgattgtcaccaaacttgaggtgtgagatcattattagtcagtggccgtgcaactccagtgcgtgtgattggatggtgatcagaggtggatcgttggtgctccacatgtggtggttatcgggggtttgtctctggtatttggaagagagagagagagagagagagagagagagagag

SEQ ID NO: 137092 - DNA, 1911 bp, Cannabis sativa
ctggaattggttaaagattacgacggtgagattctgtatcaccacgggaaagccaatgtggtggctgatgcactgagtagaagaggtcccgggcaggttttcactactattgtgatatctcctcaactagcttcggagatggttaatgcaggaattgagtttgtagttggaaaattgcataacttaacactccaatctgatttgctagagagaatcagaaaggcgcagttagaagatcccgagctagtcaagattcaagataaggtgatggttggtcggcctagagacttttcaatctggaataatgaattgttattgttcaaagctcgagtttgtgttcctaacgttgatgaacttaagaaagaaatccttgatgaagcccacaccacaccttattcactgtatccgggaaccaccaaaatgcatcaggattgaaagccccactattggttgtatggaatgaaaagagatgtggtagattatgtgtccaagtgtttaacctgctagaaaatcaaagctgaacatcaaaggtcggcagggttattgcaaccattagcccttcctaagtggaagtaggaggacattgcaatggatttcgtggttggtttgcccagaaccacaggaatgtatgattcggtatgcgtcatagtggacagattcacaaaatcagctcattttctaccagtgaaagttacttatatagtggatcaatacgctaaattgtatgtaaaggagatagttcatctccacgaagctcctaaatccattgtttcagacagagatccaaagtttacatcgaaattttgggtgagtcttcagagggctatgggtacaaagctgaagtttagcacagctttcaaccctcagattgatgggtaatcagagagaacaattcagatactagaagatttactacgagcctatgtcatggactttgagggttcatggagtaagtacttgcctctaattgaattctcctacaacaatagttaccagagtacaatagagatggctccctatgagatgttgtatcgtaggaaatgtcgctcccctattcattgggacaaaactggagaaaggaagtacttaggtctggaattaatttagaggaccaatgaagctatagaaaagattaaggctcagatgcttgcttcccaaagcaggcagaaaagttatgcttatccaaagtgcagagatgttacaattcaggcaggggaacatgttttccggcgggtttcaccagtaaagggtattagacgcttttggaagaggggtaagctaagccgtaggttcattggcccattttacatactcgagaaggtagggccagtagcaaatcaactagccttaccaccagcattatcggttgtccataatatatttcatatcttaaagttgaggaaatatgtttcagacccgactcatatcttgagttatgaagcccttaaactacaatcagacttatcctacgaagaagaaccagttcaaatccttgatataggaaggagaaatttcttcgaaacaagaccatcgctttggtcaaagtgctctagagaaacgcaaggtggaggaagtcacctgggagttagagtctaacatgaggactcaatatccagagttgttcaggttagattttgaggaagaaatccttttaacgacaggataattgtaatgaccgcatttcataatatggattagtaaaggcaatgagcactaattactgatatttttatattatttgtgaatttaaattatttgtgggtcccgttgtaagaaatgggcattagagttataatttctcaatttcgaagattttaataaactgtaggtgtattatttatgttatatgtgtttggttttatgccctaaataaaactctaattgaatgtaatccattttattcaacatcaa

SEQ ID NO: 137093 - DNA, 847 bp, Cannabis sativa
  modified_base (557)..(567): a, c, t, g, unknown or other
caccccattgaaataaacaactcaaaaattctcattcactttctctttctctcttcatcttctacttctttcttctcatctactttatattattttataacaccaaataaaattatatgggataaaaagaaaaaatcataaatttcatgagaataaaataaaaatgtgtaggggtataaataaaaactattatttttataggggcaataataaaaatatttaaaaatgtacacgcacaaaaattagtttgtaagaagttgaggggagcaaatgatcccattaaacccccattttcccttactacaacatacacaatcataaaaaaaataaaaaaaaaaaataataataattacataaggcactattttttgtaaaaaaaatacttttacatttaaagatttttttttttttttacatttttacagttttctatagaaacaacacgaaaacaacaagaaaactacatgaaagtaacatgaaaataacaacaaaaaataacatactgataacaaaagatcaacaacaaattaacaagagtacaacataaaaagaccgtnnnnnnnnnnnataaaatcaaaaaaatcataaaaaatatttaaaattttgtaaaaccatatttttataatttttttttgttgtttttatgtatttgtgaaataattcttaaaaaaataaattaattttttttttatatatgccaaaataaaaaaaacacctcttaaaagggtgtactatatattgtttgaatagcttatataacacaaatgatttattttacttttaaaaaatagggtaaacaaatattattttggaccctgtgttttgcaaaagttacagattggaccct

SEQ ID NO: 137094 - DNA, 660 bp, Cannabis sativa
ttttctgggacattacaactattcactccttatagaaattttgtccttgaaatttacctgaatagctcagtatactgctcccaaatttgtgactctaactcccaagtcacttcgtcaaccttgttattctgcaatatcattttaacttgcagaatagtcttgtttcgcaacaccttttcccttttgtcaagaacctgtactgattgttcttcaggtcgtttgaagctcgatatcttcataacataaaacatgagtcataccagacacatactttcaaagcatcgagacgttgaatacgttgtgaactccagatagagcaggaggtaaagctagccgataagctacttgacctactctttcaagaatcttgaacaggccaataaatctgggaatcaacttccttttttccaaaccttcaaattccttttattggggacacccaaaggaagacaaaatctccaaccttgaattcaatatctctatgctttggatcagcgtagctcttttgtcaactctgtgaggcaagcgtatgagctcgaatcttttcaatggcctcatttgttctttggacagcctcacgtccaagatacctacgttgaccggcttcatctcagtgaatgggtgaacgacccttccttccataaagcatctcatatggag

SEQ ID NO: 137095 - DNA, 2304 bp, Cannabis sativa
  modified_base (475)..(477): a, c, t, g, unknown or other
tttatggcatcttattttacgtaagtaagggcgttacaaaaaggaacatgatactctcattctcatccaactcaaccaatctcaatcaaactaaacctagttttcaactctatcagacaactagtagatgagagactcctttcatagtgatttttaactcctctagttgttcttccatcaaattcaatcatttagtgatagactaccatgcccacacatagcaagtcaagtactcaatcatagtgcggagtatgttggttaaccgatccgaaggagagaatgagatctaggctcagatctttttattactctgcgacagaaaggaacaagggttagatatctgagtggaaggagtcatattattctgcttccatcatgtaaggtttctaaacattatatgtgtttattttattattttagagaattcatatttagggtatcaatcaaatattaatgttagtaaatctagatcctnnnaaaataaattccaacaactggcttcagagccatggtaatgatttactttcatgacaaaaagatttaaagtgatgattgtgatgatttggatgtgttcatgttagtttatgtgcttaattgatgattgtatgttcattataaattttcgacaaaaaatatttttagtttcatactgtaagtattttttctggaaagtagatgaaaaatgaatcaatttaggcttatatgcatctccaattcgattaaaattgactgagatatgattttttttaaaaaattagttgcaaggctggccgagataccctacttgcacatgcggattagacaagttttttttgaaaaactcggccaggacacgctcggacaaccccttgcgcatgcgcacacccctttttggccccattctctcggttaggtccaaacttccatccaaacatgattttatcatatctcgagttttaaaaatcattttttaatgattcaaaagacaaaatttattaattttttttatgtagaattcaaatttcaatttaaaaattgaaatatcataagaaaaattatttttatttattttttaaataataaaagttattattagatattaggaggtttacaaatttgaaaattttcacataaattattatagttatttttgaaatttgattattttatttagatttattaattttaattataagatcaaatatttacataatttattaataaattatgaaatgatcttgttttgacattaaaatattaataaaactttaagataatctagagaaattttaaattgctaactatatcatattttcaaaaatttatcttttttaaaatatattttattaatttaaatgataagattagagaaatgttaattatttgacattttatcttatactgacatttatcctaataaaatttaaatttttttgttaaaatgacatgcaatgttttgaataattcattaattttgtttgaatagatattttaggattttctaaccataaattattttttaaatttaggatattttattttatttatttttcaaataaaatttgtaataacataacgataaaaaatatcctattttcaaatttgtttattttgttaattttaatatattaaattataaaatttgaaatataacattagaattatctctatttttaaattaagatattatgttacattctcttattagttatttaattaatttatattaattaaataagttatatttaaaaattagttggatatttaaatttcaaatttgaatttaagatattttaggatttgttagattttaatatttttcattatttttcataacctaattttaattaaaattaagatatttcctaataatattttattatttattaaaataaaatatcttaaccaacttttcagatctttattttattgtctaattcaaaacttttttaaacaaacttattatttatttgatctaaattactatgattaacttattgacagatccaatgatctaattttaataatagtccaattgtttatatataaaataaataatttataactggtaaattttgtaatttctttcatctgtgataaacctaataacatgatagggctcatccaaatcagtttgtctgtgtgagcctatatgtttgctattaggcttagatgcatataagaagcccatttatttctagatatataaatatactaggtccctaaaataaagtatcacatgtaatagttttatttaggcctaattagtattggacttattcaattaataataattatttaatgaaaggttaaattcctctcttt

SEQ ID NO: 137096 - DNA, 531 bp, Cannabis sativa
actttcagcataatccaatcttgtccagtccagtccaatccttttcaatccaatccagtccaatcttgcgtaccaaacaggccctaagtaagagtatattaataatctcggtcttgataattagatttaggagttttcatcaaacaaaaaaatatacaatttaaaaattttttatggcataattatatattgtattttttcctcaaaaaaaaaatattgtatttattcaaaaaaaaatatatataatctttattataatttcaattaagatcaaaataaaactatatattaatttacaaatatacagattgaaatgatgcatccacattattcaataaaacttgatttgaagactaattatccataatttttaaagatgatagttattgtcggctctattttcttacatttttaaagttatttttttaaatatggtattttttaagtttgaccaatttatatgatatttttttatttttgggtatttttatagtatttgatatatcatatatatgtaaattaggttttcaa

SEQ ID NO: 137097 - DNA, 621 bp, Cannabis sativa
  modified_base (175)..(180): a, c, t, g, unknown or other
  modified_base (479)..(479): a, c, t, g, unknown or other
ttaattctttctgactccactatatattcggaattgcactcttaattatatagaatactctatatgtttcaagatatagatatgttattaattatccattgttataactaaataaacaataatcctctatagatgatctacatcgagtagggacaaatttattgttctacccttnnnnnnattttattcttaaaatacttaactaagtgtaaatgtattttactgaaatgaggtctcaatcatttatcgcgttaagccaagctcaaaggaaatcgtcgtttcacttctaaaatttataaaagctatagattctatatttatgattaacgctcccattcaattgtactaccatgttcttaagatgtaagtattgtgctgatccaattggttagctttagcaaaaaaactcaaagaacacaaataacacatttaagcaataacctaaccatttcaaaattaagatctattgacctaagatnaactaagtgatattgacttagatagatataacagtaagtttatgatatcttatcaaatgtaaatataggtccagttcgatgtatactccatacatccgatcctagcatactttactaataccctagaaaggacataacactt

SEQ ID NO: 137098 - DNA, 1543 bp, Cannabis sativa
cgatgaataatcatgtaaatatgagtgtgcatacaactataccatttacttgattttcccccctaaaatctccttccgaattacgctaattttttagtatatatataatatatattctttattcataagcaaaattggtaggttttcaacttttcatattcacctaaactaaaccccaaaactatcgtatacctatctaatgagtctagaagaatttttacacgttaccttagataaaaattggtgacagatatcttcttctcagcaccggaggtaaggtttattctagcatttttttatcttgttaattgagttgaagcataaatttatttctttaaagtttgttaaacggtctgcaaacaatggagctcactttctagcaagatctacttgctttatagatgatcgtattttacgcgagagtaatgctcccgcggagttcatttctgtattgatgaacgatttgaattaatgaaattttctcaatttgtcaaaaaaaaaaaaagattaaagttaagttctctttagtctttttgtcattttttcatcaatgaaatcgtgtaggtttgttctgttctaatcaatgtcaaaatataatgtcaaaatatatgaagaaaacctttaaagttatacatggtgttgttttcttataagatctaccatcaatttttttcttttgcattttaaattttgtatattctgtttttatttttatttttttcttgtataatcttcttttgatagttgtaagagaaaagagtacggaggtgtaaacagccacggtagttaataccgttatgtgtgtctgttaagtttagttttctgttatgttgtaacaactttgagtgcctatataataaagactttgtcatattgagagggtgtggttttactacatttttactctctttctctcaaaatctctgttctggttcttggtgctctgcaccagtaaggaactcttctggttttgttctggttcttggtgctctgcactagcaaagtgttcttactcattacatggtatcaatcgctgctgtgacatttctcaatgtcgtcctctacctctgatcctggtgccaccattggtgctagcgctgctactccaacaactccatggaatccgttctcgcactcacttacatccactctcacgatcaagctcgaccgaaacaactatctttcatggatatctcaagtcataccaattgtgattggtcatgaacttgatggaatcttgttcactggtcaaccaccacccaagaatcttgtcaatggtgatccaaatcctcagtactctcaatggaaaaagaaggaccagttacttctttcttggttaagatcgtcgatgactgaagtcattcttgcttcggttgctacctacacttcctcctcctctgtttggcgtgctctaagcagaaattttcgagccaaaccaaagcaagattgcttcaactaaaaggtcaattctctcgggttcataaaggtaatctttccatttctgaatacattgaaaaggtgcaatctatttcagatgctctaa

SEQ ID NO: 137099 - DNA, 732 bp, Cannabis sativa
tcctggtttgagtcccagatctagatccctatcacgtgtctcggtccggttctggttctggttcaggtcttgggtcccatgtctaagtttgggttcgggagtgtgactagggtgcacctctaggtctctgccaaaaattctgtgtcccaagtctggttccatgtttgggtcaaggttcggcaccgagtctaggtcttgattaggattcaggtccgggtcccagttcggatctaggtctgggtgcgaaactgggtcctggtccggttacaatttcgggtttaggtctaggtccaagtcctggttccggtcccgttcccagtctcggtctacttccgatttttgttccagtttcaggtcacagggtatggctttggatcaaggtttgggtttggtaatgagttcgggtctgggttcaggtttgcatcttggtctgggttcgggtttggggcttggtcccaaatctagagacacacctacgggggttcggtccaagccccgggtccagatctggaccctgatctcgcgtgctggtctaggtccatttttggtgtcgggacatgagctgggtcctaggttcaagtccgggtctggcgtcaagtcttgggtcccagacctagttacgttgcccaggacccaatcccgattctggttccaggtcccaattctagtcaaggtttgtgtccaggtgtaagttcgggtttgggtcctagtcgcggttcgagtttggatctc

SEQ ID NO: 137100 - DNA, 842 bp, Cannabis sativa
ctcctcgtcccaagcacagtcgtctgtcttaaaaaagctgctaacatactagttttgcagagcaggatgagttaaagagacaaaactattggtgcggtgaggaagccaaggatcccttaatattgagatttgatcacctgtacaaatggtttgagtgacacctgcttgtaacagccccttagcttcaaaaatactcctccatatgaagcttgggttatctcccaactcagctggaaagaaagaaccatgagcataatatcttgctttaaaaactttactcaccaaggagtgatcattgactagcaaacaccaacattgctttccaagaagagccaagttaaaatcccacaagcttcggaagccaaggcctgcaacatgtttatgatggctcaaccggtcccaactcatccaactaacacctattttccgaatagaatcagtttgccaccaaaatcttgccataaagcgctccaattctttgcaagtatccaaaggtaacaaaaaaacactcatagcatagctgggaattgattgcacaaccaatttcagcaatacttcctttcctgctcgagacaaaattcgtccttcccagtcctgaattctctttcttattttgtcttttagaaaaccaagaatagcgtttttgttcctaccaactgaataagggagccccaaataagtgtgattctcattcgcctcatatatatcaagcatttggcagaatatatcttggtgataagtgttggtgttgttgctgtagaaaacagatgacttgttgaaattaatcttttaccccgaagccatctcataagtgtacaataattctttcacattatgtgctt

SEQ ID NO: 137101 - DNA, 551 bp, Cannabis sativa
agcaacaaggaagctaaggccttacttttaggctcatcctgtgcgggtgtacactgaccaaccattacgtcaagtattacaaaaactggacgcctccgaacgattactcaaatgggtagtggagttgggctagtatgaaatcatcttttagccccgaacagcgatcaagggtcaggccttagtagattttgtggttgaatgtacgggtaaagaagaaagcacttcaaaaagtaacccagagccggtacaagtacctcagctgtgcaatagtgaagacaagtaaacttagaagttgcatgtagacaggtcggctacggatcagctgtctggcgcagtaatttcccttgtcacacatgcacgctgtggtaaaattcaggtttaaggcatccaataatgaagctgaatatgaagctcttatcgcaggcctcagacttgctcgggagatgcaagccgaacacattgagatttttagtgactcacagttagtggtatatcatgtacttggggagtatgaggctcggggagagaagatgatagcatatctaagaaaa

SEQ ID NO: 137102 - DNA, 581 bp, Cannabis sativa
attaaaatatgacatttgtgaaaagaaagatgaatctaaataaaatagaaaaattgaaacctaataggcccactatagggtctgactaaggggtttaataaagctattatttttatcttttttttaattatattttaattctaaacctaaccctaaaagctaagctataaatagaaaagtatagctttgatattcatataatgatcccactccttttgtgaaaaaaatagaaagtaaagagagctattatttttgaaattcttcttcttctataaagaatagttcgaagcctatagtaatttacaggatgcccacacatgtcaaagctatacctagcttagtgagaaagactgtgtcgaaccaaatcgaaagagagaagatctaggttcagatcttgataatgctctgctacaaacaagaatcaagggctagagatttgaatagcaagtgtcattattattctgctaccatcaatgtaaagatttcttaatctcttatgtgtttatttattattttagtaaattcatatttcgaatgttatattgaagaattataatcaacatacatgttagtaaatgtag

SEQ ID NO: 137103 - DNA, 649 bp, Cannabis sativa
tgcgagcaaattgtgtattttgctcagatacgctatcatcttttccccttgacccttgtattctctagatacatgatttaccactagttgtgaatcactgcagatctcaatatgctcgaccttcatttcctagacttattttagatcggagatcactactaaggcctgacctttaatccctgtttggtgttgaaagataatttcatattgacccaattctaccgcccacttgaataaccgtccagaggcatccaatttttgcaatatttggcgtaacggttggtcagtgtatacccgaacaggatgagcttgaaaatagggcctgagctttcttgttgctagaatcaggcagtaagtgattttttctatcaattgatatcggccttcagcctcaatgagtcttttactgatgtaatagatttgatgttgaatgttgttttcctctctgatcagtacggcacttacagcatgctccgtgacagctaagtatatcccaagttcttctacgtgcaaaggttttgagagtatgggaagttttgcgggttgcgtttttagctcatgaaaagctttttcacattcctccgtccactcaaattgtttagttcctcgcagaatgttgaagaacggaacacacttgtctgttgatttt

SEQ ID NO: 137104 - DNA, 623 bp, Cannabis sativa
ccaatgtattattttacttacaacaataaaattggttattatgttaaaaaaaattaaataaaatatttttgagagggttaaaacacaataataatactttatttcaaaaagtttctaaaaaaaaattgaagactaagataattaagtacttaaatgttatcaataattcaatatatgtatttatatatactgatcttatatataattcatgtataattaatattttttaattaggttaaattagatatgttattttttttaacttttgaaataaaaatttaaaattttgatctttgagtttttaactattgctgctacattaatatgtgattatatatataagtattttataggtacaatatatattttgtatataatatgctcaattaaattataaatttaattaatctgtctagaaaatatcggtgatggcgctgagttatggactaaacccgtagaaaatactatcaagattaatgtagatgcagcactctttgatagcgataataaatatgctttcgaaattgttgtccgaaaccatcttggttaccttgttgcagcacgggccggttgccatggtggaagatatgcagctgaaatcatcgaagccatggggattaaag

SEQ ID NO: 137105 - DNA, 516 bp, Cannabis sativa
taatattttattttgaaatttgggtttgaaaattgaaaaaattcaaaattgggaaaaaatcccaaaaaaatcgggttaggggtgttggctgcccacgttgtgcacacagaggctacatgcagcctcatccgcgcgcgcaggaggctactggcagcctcgtccgcgcgcgcaggaggctgcttgcagccttcatgtgcgcgtgcaatgggcgtgcatctgtctgaacgtgtgctgtcagaacacctgcgcgcattggatctccttgtccgaatgcttggtgcgagcgtcgtgcaccaattcgacacagtttcaaccaaaaatttcaaacaaccataactttctcaatttttatcggaatcgagttttgtaaaacctaaaattgcttaattttttacaaggaatccaaataaaatattttcatggaaaaattttgtaaatcatattcaatcatcaaattaacatataaaccaacataaacacatccaaatcaacatgcaaacaatattcatcgtttta

SEQ ID NO: 137106 - DNA, 912 bp, Cannabis sativa
tgagttgagagtggaaaaagaaattggagggaggggtgcggttcccatgagacacaatcgcacacaccactctttcctagtaagaaggctacctaatttgtggttgaattactccttaagcgactacctttggtataatggtttctatgattaggatatattacaaggggaataggttggaaaattcgattggtttatgtgtctaatagcttgtggtcaggtttcttcttattcatatatgtttcacttttttagtcatttttttgtcaactttgtgttttgtttagtcatgacatttcttatcatttgtgatctttattctttagtgcatgtgctctttgattatttcgatgtactctttcctcgtgagtttgaagtttcatcttttcggccttgcttgttaacctatattgtgtgtaatcctcatagcaacactgttaagtggtttcaatggatttgtataagttggaaaaggacttcgcacattaagtcgcctccaaagctttactagtgcctcgggaaacaactataaataccgatgaagttcactacttaggttataatcttggacaaaaattagagagcaagctatgtatctgaggtttggagagtaagatcacttattacagattcgaggtttcgaaagtaagaatactttggtactaattcgagtttagacagtaagattacttagttagatttggtttagaaaataagaatactaatgggcctaattcttttgtttggttggaaaataataattttggaaaagaattccatagtaatgctattccccaaactaaaggaattgtttttccatttttcatttggtggaattataattccattccactactttggatatcaataaattatctcttttctcctccagccataggcgaagccccacaa

SEQ ID NO: 137107 - DNA, 572 bp, Cannabis sativa
aggcgctatttgtggatatggaagaattggttattggcgatgatggccagcctactcaggatagtttgcgcagccaagcttcaaagcttgcactcacgctagaacagcgagcggaggaagctggaatcttcagagatgatacaccaccacattctccaccatcaggggcccgttctgttccaccgtctgcctcaatgcccgattctgcatctatgccgcagtcagcatctattcccagcacctcacagcctcaggtgccaatatcttctgccatattggcaagattggagcgtgttgaaaaggaacagcttgctttgaagcaaggccagactgatattttgaaagggcagaatgagataatgggttacttgaagaccctattggctcttatgggagatcagagaaggcccagcgcagaggcagagccacagccagacgccgtgtctccaggagatgagttcattcttctcaatgattacacacctaatgatgtggaagatgtactccagacacctcagaacatgtcgatcacgtccattggagatacccaagattcagaggtacaggtttta

SEQ ID NO: 137108 - DNA, 638 bp, Cannabis sativa
ggtctagataatctcactcaaacaaacctttattacactaggatcgatcgagaagttttgttaagtccattgattagactcattgtcaaaatttcccttcttgttgttgtaatagaaagctttttggttactcaatgtgaatggttttaaccatagttctcttagctttgcttcttagttccttattctaactatccattacttgtttaaactaacaatgactttttatcaccagtgtcacccaagtcataatagggtgagttccttgaaaccctcccactacaacaaggtaccgtgactttctatctaggaacattaatggtattgacctcatcggttgagtcaagacaacagaggcagtgggaccatcctatattgaataagattatagaatactttggaatcaagaaaaaaaaatatctcctctactttgctactttcttttcagaattagccatatttttagaaaagtagtatttgttgaaaacaaacactttcttatcttaatgaccatgggattgtccacccctaatcactttagaatagctatcaaacatgtaaacctctgttaacagttttagcttttattaagttcatgatcaagacatccatgaatctagtaatggtttaaactaagt

SEQ ID NO: 137109 - DNA, 1407 bp, Cannabis sativa
aattttcttgttgttttcgtgttgtttctatggaaaaccgtaaaaatgtaaaaaaattctgtaaacgtaaaaatataatttttttacaaaaattggtaccttatataattatcccttttaaagaactattttctttttaaattattaattgtatatataagtttttattttatttttataaatacgtgtaaattgaatttgatcggttactttgacaagtcaatcaacatccaatccgtacaagtgcggatttttgaatttttcaatccaatccacttcgcacaagtgcggatattcacactttgtggattggattggatcgtgcggattgaattggatcaggtattttatgaagggataagttgaaaactacctttttttattacacattaaccaaatataactctaaactaattttaattgataaataccctcttttataatcaaagtaccaaatataaccttacaaaatttattaaaattagacttcttaatggacataatgggaatataacttataaaagtgggtataaattaaagaatattaaaatgaaggtaaaaattaaaatatgaaacaaaaaatgagtatagagtgtaatttctctttttttttttttatgaatacccctagttacaacaatatgttatgaaaatttacactaaggctgtatgttatgaaagtttactctaggctattataggttatgatgagaaaaattcccacctagtactaaagtagtgaatgtgttttgtccctttgtaatgtattggcccttgaagtagaagcaaaaaaattcaaatccaatattacacgactatggcttttaactttattttgcatgaacaattaaatgggcaatcattccaaatccaatccaatctgattgtcaggcttatgtaatggccacaaaaaaggaacatattctatagcttgccgttgtcgagcaattatcaagggacccaactggtactgtcaaatttcaggaatttggtcatataacagcgaccattcaatttcgtgcaccaaaccaaaccattttatttttcacgagccaattacaaccatgacagcattgatatgacttcatacggtaataacaattagatttgattgatttaatattttaaatctatccatttataatatttgaaaaaatatggctaagtagtgtatatgaaagatgtaatgacatttataggtcactaacatcattcctataactaagataaaagagagtagaaaatgctgtcttaaaatgaagcttttagagttttaggcgtttgcttttgattgtgttgtattgccaaatacatcaaataacaatttaacaaacacgtggggcgttttgctgctggtctcctaaaatactcacacacatacacaatgggtgagagagagagagagag

SEQ ID NO: 137110 - DNA, 1030 bp, Cannabis sativa
ataccttttgataatcagataaataaactgcttctgatttagagatttagggaagaagacttagttattagtattgcactatcgaattaaagtaatttctatggatcgaattgaggtaattactatggatcaatcaggtacgcatacctaattattatgtattattgttgtgttctatgttatatacaaattgatcttggctctattattaatttatctaacacccactagttaaaatacgtggctggatctaccactgtagctttctatggccagatgaggttgtcgccacaaaccttgtgtgctctagatgagaggagttgtttattggtattctttctgtacttcttgcattataggtctggtgtggaggtgaatttgttctatgagactactcgactgtattagtgcttaatttttaatatccattttcttgtaagggttaccgtttgtaattttattatttttcatatttatgagttttgatattattgtccataatctcaagcaaaacaagtacgtgtcaccacccaatgaaattgggaggtacaagcacaaatttatttgagcctttggtgaaaggccgaagttgaatgctatgcccccaataacagatggatataaatgagctcagaacgacatgatcaagggatcctaaccaaggtaagcccacaaggtcatgatgatctatatggaagactagcttccaggagatgagttggttcggaagactacgtgcgtctcaaaagagtgttacataggtcaactacatttatgaaattccaaattgcattgaggtaaaatcagtatgcaacatgacatgaaaagttttaaaccggcttttaatgaacatccctgagttatattttgacaaaacagtgtcaaattattgtgtatagttttcagatgcattcatcaagtgcatacattacaaaaaatcttacttttagtcataacaaaactcgtgactaaaagtaaaaaagttgtgactaattataaattagtattcatatattgtgactaaaaggtc

SEQ ID NO: 137111 - DNA, 829 bp, Cannabis sativa
atttagggcataaaatcccaacgaactcctacttgtactaatataaaactaaaagtgcatttcaattaatctcaactccttgatcactagatcaagtgtagtatatagtattttcattgtattagtatttgacaagttgtattcaatatcaaccttctccacaattacatctccttagtcataaaatccttgatattataaaattcttttttatatgtttgctcctcttagggtattggattctttactatttggtaactatatatgtgttatcaggaagtaacactagtagtcaatccatgactagaataatgctaaaaactgtatagaactttccataggttgaatgattatttaaaagccttttgggccactttaacattcagtctcactggtagagttagagactccggattggtttttacacttctctaaaattcaattctccacccccagagtaatcaccatcccaaatttagagtttttagcattaatgcaaatctagaaacctgatttggtgtagcctaagagtagtaaaatacgacccttattgactaacatatagttcatcttttgatcttaagatttatttgtttgtcttccaatgttcctttcttggattaaattaatacttactcgtaactcccactcaatagtgcctaccagagcatacatgagacctctcactgttgatgcttaaggaattcttttcatgacttttatcttttctggaatagttaaagttgttccttagacaaactctatgtctaggagtcaaaaggcttcctttagaattagccattagaaaaatgcttcaacatcttactaa

SEQ ID NO: 137112 - DNA, 722 bp, Cannabis sativa
tatgataataagaagaggacagggcggagtagtaggggataccactaggacccaacctgtctcaataaagacagatctcttgatccttttatacgtatctaaagactttcttttttttttttgaataaagcgtttttagattaaaactacaaattagacttcatggtcattacataaaatattatttagcagtacgacatgatcgatcatcccagttacattcttggcgaaagctcatttagtcacattatgagctgcaaaattacattgtctagaaataaaagtaaaattacaacttaacaaaagattcgagagttatttacactgaattacatagctaccaatacccaataggagcaagttccttttagcgcattgataaccttctgagagtcactcttaatcataacaaaattatgcttcttaaagactattgattccacagctaacagacatgtcacagcttctccaattagagggtcagagaagttaaacactttggaagccgcccacaaaactgtctccttgtgatccctaactaaagcaaccacgcacatcgaatcacaatcaattttaacatcacaattgattttgacccaatctttcggaagaggagaccaagcaggagactcaattgtcatcgggaaagaaaacaaacaagaatcataatctgcgtaatagatatatatatagagtcaatatattgtttaatattacacata

SEQ ID NO: 137113 - DNA, 973 bp, Cannabis sativa
aatgctcaacaatcttaccataaatgaaaaaattattttgtcaactaacttgccaaaaaaggactttacaccttcacttatcaactccagacatcttccaatggggttcatagctctggcgagatagctctttcaaatagggtctgacgtacaaatgatgttgactgctgaatttcaccttgttgccaaaaaactgcgaccttcagatggagcattatgtcttcaagcgcagcagcgatgaggtctatattaccaacctcggaaaggcatgggaaaagttccagctcgctatcaaggctattgttgctacgttcccagcgaggtgtctcagaacgatacagttacaatgcatttaatgcatgtttacattgacccagtaaaagtggaccaatcacagctgtgggatttttaaatattaaccgcatttattttacgtgggatgtaatccaatcccacgattttaggagattattgttcagtcaaatctgtaattaacacctatgtaattataaataggagcatgttacactgaaaaaagagacggaaaaatcactagagaaaaggcttgagagctgtatcagaaatctaataagattgacttgtggactatgctgaattttaactgcaaaaccacgtaaaaacttttgtgttcctgtcttttctttaacatctttttattttctgtgaaagtttatcgtaaactcaggttcaaatatagttaacgaaaatatgcattaacaaatacctaataagtgaatatcaaaatatcaatagatcttttatttaaataattatccaataatatatttaattaataattaaaagataattaatttaatttaatttaatttattttaacttaataaaataattaaaccaaattaatcacgaccctttatatgtcaccctacacgcgtagaatagccctgcacgtgtgggccatattttaaagtccaaaattgatttctcaatt

SEQ ID NO: 137114 - DNA, 660 bp, Cannabis sativa
taatatttcaaattaaaaagatattgctatctttaatttaaaatatatataatattaaaaaatctaaccttaaaaataaataatataaatattaaataaattaccaaatttttaaatctaaccataatttaaaaaataaaataatcaatttttaaatttaaacctcaaaatatcaaaaattaaaaataatctattaaaaaataaatattatcaatttaaaattgatatttaagtttaaatatatgaaaaataatatttatttaaattttagggtttgaaaattacaaaaatcgaaatttgggaaaaaaatcccacaaaaatcgaattttggtgttgctggctgcccaggctgcacgtgcagccataggaggctgcaaatgggctcggacgcgtgcggaacaggggcattgcagggtcctgtgtgcggcacatctcgacgcctgcagcatgtgacacgggcgagcgagttgtctgaagacagcgtgcgtgcgaggaaacccagcttcagactggattttgtctgagctccgcgcgcggaagtgtgccttgtctgaagctcctcgtgcgtgcgacaccaagcttcggcagccatggcacccgattttcaaaccaccataacttcctcaatttttatcggaatcgagttccgtaaaaaccaaa

SEQ ID NO: 137115 - DNA, 1600 bp, Cannabis sativa
tattaattttacactataaatgttgttttttaattgtgtagtgtagttttgtccatttgttatactatggtgtcatgcaatacataaattacttttttttttttttgaaagcacaataattaccttaaaacacacaatacttcctaaaagattcacattattttattggtttttataaaaatttaatgcccttttttttcttaaaaatatttgatgcctttgttgtgtagttaaaatatatttttttttagtgaatgtaaatacttaaaagaaagaaacaattacattaacattaatatttatttctatatttaaattggtaggcactaataattattaattgtgcttacgatgtcgctgagagtgaggagttcaaactctctctttttagatttcaatctcctattctaaacacttgtgcggtgttgtgaaattacatttctcagtctcatatgtgtaaccgtaaaattctttattaattatatatttatattttgttaaaattattgtaaaataatataaatattgacaataatcaagaatattataaaatgagtgagattatcatacttacatataaaattagaaggtttatacaggttttattttttaaaaatatttttctaaataaaaaaataataatttctcaataaaaataaatatagatccatttaaaatgatatgtcttgcattgcatgaagtatgtcgtaaacatgttgagtaaattttatgactattatattagtttttctttaagaatataaaattaaattttgtgagtgaatttcattatttcaaaaattaatgttaatgatttcattacaaaaattacgacctcttagttaatttttacttctaaaatcacttttaaatatttttttaaaatttctttatatagaagtattcactataattctcaatcaattttatatataatttataatattgaaaataaaattttcatattacgtgtgttcaaaaaaaatatcaaacttattttcaatatggtaaattattcgacaatttttaaaaatttacaataataatattgtaaatataatataccgatattaaaaaattgaaaaaaaaaatattttaacatgtatttttagtcacatattgactaaaagattgtattttatatatacaggaaattaattataatgttaaatttgggtttcaataatatttgtgcattaataagatatttttgacatttattggaatggtttatctcatctagccatgtacagtaatgagtttttttttgttttttgttttttgaaaaaatgcatttataattgattagctatataaggagttgaacatttgaaataaaatatagattaaaagaaattgtagaaaccaatattttaagaagttgatgtttcattatttaaaaataaaataatgttacattatttaaaaacaaaaaagttattgttagctgcccttatcttattatttgttgggaataggtgctttattatttccatacattttcttaaccacaagattatggatgtatataatggatggctcagatttgtgggcaggacaacttccgcttccgtactgggcgtgaccaaatcggtgccct

SEQ ID NO: 137116 - DNA, 566 bp, Cannabis sativa
tcaaaattttcaggtggtttgatttcatccaaagcaagcatactcattttttccaatacatttgtaaattgtctactaacagtttcacctgaatgttgaaaatgctcttgaatcattctattacctgctccatgtcctaaaatcatcataaacataccaaccgactcttctagtctcaaccctttactggactttaacccataacttctcaatctatcacatagtttacaaaaaacatgtttttccattcgaaacatctcatgacaacgtcgatcatttccattaagtatttccatcataaatttccaaccagtgtgaggtgaatttctacatggctccttaaccaaaaagttattatggtaatatactgatgttcttgtaacgataatgactagctcatcaatttccatttcttcagttatagcttgttgtatacattcttcatttatctcctctgtatctgaatcactatccattctgctatagaataaatatgtaaatatataattcaaatatttttgaaataaaacaaataatattattcaagaaatcaaataaaccaagtt

SEQ ID NO: 137117 - DNA, 723 bp, Cannabis sativa
taacataaaactatcagtacatttgaagtaatcctaaattcagtatgtacttttcaaatgtagttatactcaaaactttggtgaatggatccgctaagttgtcttcaatatctattttctccaccagtacatccactcttgccacatattcctgatgatatgatatttcctctctatgtgtttgcgtctcttatggtttcaaggctctttactattggctatagctccagtattctcataatgtaaaaccaatggtttttccattccaggaacaacaccaagtcttgagaaaaactttctaagtcagacaagttccttagcagcctcagtgacagctatgtatttcccctccatggtagagtttgatgttgcgatttgcttagcacttctccaaacaactgctccacccacaagagtaaatattatcccaaatgtagacttcctgtcattaagacaagcttagaaatctgagtcggtatggcctacgagatttaaagcaccacccttgtagactaacacataatgccttgtacttttcaagtactttagaatatgtttaactgtcgtccaatgttcctctcctggatttgtctgatacctgctcacaattcctactgcatagtaaatgtcgagtctaatggataacattgcatacattagacttccatctgctgaagcataagaaacccttctcatgtcctctatctcttaaggattagtggg

SEQ ID NO: 137118 - DNA, 698 bp, Cannabis sativa
tgcaatggattaaaatcttaactgtgtgcttgatttgcaactgtttgaattaaggtggatgtgcgttagaaggttgttcatgtagatataaaacagttgttttttacgcatatcacttctgttctatttggtttgtggaatgattgactgaacataaaatagaatttgtttgacatactctcttgaagcgaaatccttggtgatttttgtttggaatatgatttaggcaagttttctttagatcgattgagcctttcgagcctacccgaaaattttaccctagtatacccaaagttgagccttaacctatcctaaaaattttctcaccacttaactaagctaaactcgttatccttaactcttttcactctaataccttattatgccatgagcctttaagcaagtttggggggataaattgttgtaagaggggaaataaagtgtattagtaagagattgaaaaaaaatatatgataaagtattgtgtgttgtgcctctagtgaaaaaaaaatatagaaaaaacaaagagaaaatatgtgataatttcttcttgaaaaaaaatatgaaaaatatgaggtaggcacgtagaaaaaaataggtaatctcttactattgtctttgggatatatgaaagaaaaaaaaaagaataaatgtgggtgcttacttggttaatagtgcttatggtataatgtagctta

SEQ ID NO: 137119 - DNA, 558 bp, Cannabis sativa
catttctcaacttgtcaccaacctaaacagtgagttttctctcaaggatcttggagaacttaactactttttgggcattgaggttaaacataccacagatggtctacatctctctcaaggaaaatatataagagatttgttggccaaaactcaaatgcaaggagctaaatctgcctcagctcccatgacaagtggactgaaactatcagcttatgggagtgatcctgtcgagaatgcacaactgtacaggtcagttgttggggcactttagtatctcacaataaccaggccagaaatctctttcagtgtgagtaaagtctgtcaattcatgcataaccctttgcaagctcattgggtgactgttaagagaatcttgaggtatttgagtggcactatgaactatggtttgcatcttacaaaagctccaaacagggaaattgttgccttctgtgatgcagattgggctgcagacattgatgacaggaggtccacttctgggtatgccatttactttggctctaacctggtagcatggtcttcaaagaaacagcatactgt

SEQ ID NO: 137120 - DNA, 663 bp, Cannabis sativa
atttaaggtggtccaaaattaattaaaataaattttcaactttaatttaatttcaaaaatataaatatatataatttcaaaaatacataaaatataataaaataaattcctgaaaaatatctaatttaagttgttctaaataactaaattttaaacttaaataatttttcaaaatttaattaaataacaaattaagttatcttgaactaatcaccttaatttgaaaaaatatccctatttaagttgatctaaaattaacaaattttcaacttaaaaatatttttaaagaatatctaaataactaatttcctagaaaattctacttagatattaattttaaaatattccaatttaagttgatcaaaaatcaatttgaaaaaaaaaatttcaacttaaatatataaatattctatgaaatttcaaataattaagtatctagaaatatctaattagttataacttcttctatttaattaaatatagaaaaatacatctagtttatcgttaatatgttacattaaactaagtgtgtttttcttaaattaatttcaaaatagtctgataaaaaaaatcatgtatttcaaaattaattatgttgctaatcaattttattatgttaaactagtgtaattaacctattataattatttaaataagacaaat

SEQ ID NO: 137121 - DNA, 1194 bp, Cannabis sativa
tagttgacaaagaagatactcaagtaaaaatatggaaaaagcttgaagatcagtttcaaaagaaatctttgattaacaagatctttcttaaagaaagaatctttggtaacaagatgagcactagccagactcttgatgaaaacctagatgaatttctaaggttacatattgaattggctaattctggtgaaaatgaggcattaggtgatgagaatcaagccatcatcatcttaaactcactacccgaatcctacaaagaagtgaagaatgccattaaatatggtaggacagagattactctagaagaagtaatttcagccttgaagttaaaggacttagagatcaagaatgagaaacatggaggttctaatggagaagtaaacttcattagaggaagaccaaatcaaaggaaacctgaacacttcaaaagtaaaagtcacagcagagatcaccacaaaggaaagagtcacaacaagggaagatcaaactcaaaagagccacctgatcctatgagatgctacaattgtggcaagccaggacatttcaagagagattgatattttctaaacaaaggaaaaccaaataaatataaaggacagggagaaaattctaactttagacctaattttttaaaaaaataactaagccaattatggtgatggttatgaaagtgctgatagtggtgaagtatatgttgctgcatcatcttttaaagatgattggattttagattcaggttgtacttttcatatgactaatgacaaaaattgtatgtttgattacatggaatcaaaaggaggaaaagtggtcctagggaaaaaatcaaacttgtgagattaaagggtcggaatctatcagattcaaaatgtatgataggatagtaagaaccctaacagcagtgaggtatgtgcctaatctctctagaaacctaatttctattagtgtgcttaatgatttgggtgtgcttttgatgagtaaggtagaggcaggtcatatgaagcttagtagaggaacgctaacaatcatgaaaggcataaaaaatggtggactttactacctacaaggctctcctatttcaagttgtgacattacaactcacaatgacaaagaagatgaaatagccactctatggcacataagattttgttgggttttatgccctaaataaatttctttacaatctgattagttatc

SEQ ID NO: 137122 - DNA, 701 bp, Cannabis sativa
gaagagttatgtgtttaatttttatgtgtgtagtaagagaggagacaatgtagtaagttagtagtaaaagacttgatttggcttactcaagcttgattacaatttggaacccttgatggatatttatagttgctagccttcaagcatttgaggctagaattgttttctctagatctttctagttcaagaattttatccatatatctctacatatttcttaagcatgcataactaaaaacctctagactaaatttttttagaaatgcctatatatgttctattgtatttttacatatgtttagaaaattctaaattattctacaattatctaaaagtttagagtatgtttttctacaaatgtgtagaaaattctagacttaattgagtatcgtagaaatgtatatcaatttctaataattggtgatgttaattagagtagcagactagcaggtgcaggtgcgtgcagttcaaactaaactaatatacataacttttattttgaaagggatgaggggtaaatatctcaatgcaatacatttaacaatgatgactagccaatatattatcggttccttcctttggcaagcattaattgttgctaatctatacatagttaattggggtaagttgaaaaatgcttcttttattaatcaattaaccaaatttgcctctaattttatatttatttgaaacatacctct

SEQ ID NO: 137123 - DNA, 528 bp, Cannabis sativa
tttgactacttttatgctctcagtaccattagataataaatatagagaacaaaatgtatggtgtggtaatgaggaatgggtttaaatggtatattttgaaaagaattggtattgattaatgtgttgtggctaatgattattgagctttcttagatttgagttagagattagtttgatttgaaaataaagaagaatggggatgagtgattttgaagaacatgaaatcaatttttttaatctgggttctaattcatgtttttatttttagggttctaagtaaattgaagatggagaatgagatattgttcaaaaaaaaagatggagaagaagataaggatgtgatagtgtaattttagtgccaaaatataatatggtgtgatgaggtttagtggcaaaatatttttcaaatttgtgcatagatttttttttaggctcattccaattttctgaatttgttttatggttgtgttcactgtttatacttattttttgggtttttgttggctgttcaagagagagtgtaaaaga

SEQ ID NO: 137124 - DNA, 705 bp, Cannabis sativa
tggtctattgaagatgataaactcagtttgaagaaacatctgatgttaagcgttctagatttattatgcttcaacccaaatttgatgagcttaggatgtctgaaattgaaatgctaactgaattttatgaaaggttatctgatatagctaatgaatattttgctcttgttgaaaagctcgatgattctgttcttgttagaaaaattgttagagttcttccaaagaggttcgatactaaacttttggccatggaggaagccaaagattttagcacaatgaaggtggaagaattgatgggttccttgcgtacatttgagttgaatcaacaaatcaaacaaaaggacaaacccaaatccattgctgataaaggtaaaagtatcgctttaaaagttgctgaacatgaaaattctgataatgaatgtgatgatgaaattgctttattaaccaagaattttcaaaaatatatgaaaaagatgggtaataaaaagaataactcagaattttcaaaaggtaatgcttcttttaaaccctctgtgtctaataaaaagggaattctgtgcagggaatgtgatggatttcggcacattcaattcgagtgtgcaaacatttgaaaaagaataaaaaaagtttcaatgtcacttagagtgatgacgaaaattctgagaatattgctctaacttgtgttatgaataatgtgttgtgtga

SEQ ID NO: 137125 - DNA, 1523 bp, Cannabis sativa
cgtgaataatagaaaagtgatgcacaatattcttggtgttgtcattgtgaaatttcacgatattttgagatgtgtgcggtgaaattttaatagaacaataaccagtgtaagaataaggaaaaagttattaaaaaatttccctgaaaagaagaatattttcaatttttgaattagggggcattttaaccaaatttaacgtgaaaccaatcttcatattcacgtcttagtagtacgaatttattgtgactagtgttaaaaaatattacaagatgggtccgggccacatttcccaaaggggtacaactatcagaaatgtgagattttaactatttcaattaaaacgattgttcgtgcatgaaaacaacatttgctctcaacatgcccattagaaaagtgatgcataacggtcttggcttcgttcctataaaatttcattatttttcgagatgtgtagggtgagattttaatagaaaactaatgagtgtaagagtaagaaaaaaaattgttaaaatttaccctaaaaagaagaaaatttaaatttttgaaatagtgggccattttaaccaaatttaaagcgaatcgaatcttcatattcacatcttagaagtatgaatttactgtgactagtggcaaaaaatattcccagatgggttcgggccacatttcaaaaaagtgtaccactatcagaaatgtgagatttttactatttccattaaaataattgttagggcatgaaaactactttttctctcaacgtgtcaaacagaaaagtgatgcacaatagtcttgattttgtagggtgagatttttacataaaaaacttgttaaaatttacctagaaatgaagaatatttgaatattttcatattttgttttgaattagggaattaggggactaggggaccattttaaccaaatttaatgcaaaataaatcttcatattcacgtcttagtagtacaaattctttgtgactagtaacaaaagaattttgagatgggtctggcacacatttcacaaaggggtaccactatcagaatgtgagattttcattattttgattaaaacgattgttagtgcatgaaaactacgttttctctcaacgtgtccaattaaaaattgatgcacaacggtccttgctttgtctatgtgaaatttcatgatttttcgagatgtgtagggtgacattttaatagaacattaacgagtgtaagagtaaagaaaaaaacttgttaaaatttaacctaaaatgaagaatattttcaatttttgaattagggggattttaaccaaatttaacgtgaaaccaaccttcatattcacaaagggtccgagccacatttcacagaggggtaccactataagaaatgggatatttttcagtatttcgatttaaatgattgttggtgcatgaaaactatgttttctgtcaacgtgtccaatagaaaattgatggacaacggtcttggcttcgttcttgtaaaatttcacaatttttttctagatgtgtagggtgagattttaa

SEQ ID NO: 137126 - DNA, 819 bp, Cannabis sativa
  modified_base (696)..(725): a, c, t, g, unknown or other
tctctctctctctctctcacttgatatttgcctacttgattcatacattgtaatcttaagagagccacttcggattccacaacccttgttatctcagtggtatatctctagtattaatacaactaaaaggagagtaggtcattacctgctaactacgggggtcaaacctctataaaatctcttgtcttatttacttttctattctatttttattatataacatgtggcgtggcaagcatcaataataaatatgacttcgctgtcagttcatatctaatggagtgctaaataggtggtgtattgatattttttttttagtatttttcaattaaaagtttttctcatagtgtgctataacttgtgctaaatttagcccatgttaaaaattagacgaaatttagcacataatataatattttaccgaatttgacatataagaaatattactttttaaattacacttttgtcattaattattaattacatattttaatacatatattttattataatattgccattaataatttttgaaatatttaatttattaatagtcatgatattttattttttagactaatttgcttataatattattgcactttggattacaaatataaatattgtgcaaaatataacattcatttatttttttattaaatttaatacaattgttaatgttgggttttgtgcccnnnnnnnnnnnnnnnnnnnnnnnnnnnnnnttactaattaataaaagatcagaaattattctatgttccatggttcacatgatttatttcatgattatgcttaatgtataaattctattatatc

SEQ ID NO: 137127 - DNA, 671 bp, Cannabis sativa
agagagagagagagagagaacttaggtagcgcttggttggaggtaataaaatggaatggaaaggaaataatttttattctattcctttgtttggttgcatttaaaaccattagaataccattccaatgcaagatttgaaaaaaatttaataattttttttatcaattttttttatgtattttaaattttattccagtccattcctattccaatttctattctcattcctattcctataatttcattcctcccaaccaaataccaccttaagaaaaaagagggtaaaaaaaacaaaaaagataattacctatggattttgaaacacaaaaaaactcacaaaaaagaagataaacaagagagagaggtttcaattacaataaaaaataaaagaaaaaaagccataaaaaaatgaacaaatgagataaaatatgaaatgagatgaaaatacaataaagaatgtatgagaagatttctcaattattaataatcaattttaattaaaaaaaaaaaaaaaactgtcacaaaagtgacatagcaaatcacattaaaatttttacaaaatttaaaaataataaaataaagttataataaaccttgattgacacatattaattattaaatgaaataaattttttagggtctttttgattttacacttcaaaacaattttt

SEQ ID NO: 137128 - DNA, 1063 bp, Cannabis sativa
  modified_base (205)..(210): a, c, t, g, unknown or other
attatgtcagttggtgacgaggatgattgggaattagctatgacataaagaacatgacagttggagtgcctattgagaagcaaccagtaggacaacccaagaagcaaaatgttggaggaagtaagtcaaacctaattgcttgtaatggtgaaaagattgtgataaaatgaaattgtggcaagtgtggtgccaaggggcacaacannnnnncttgcacctaccaaggttaaaaatgaatgttcaatttagtcgtattgtgacgtgttgtactattatgtattgttattgaattcatgttggactttgttaaacttgaaaatttgtggtattttattttttttttgataattattataatttgtggaatgaacaggttattttactaactgcaaaaacccctttataaaaaacaactagtccgatgcaggtccaatactagtccgatgggtgtccgatgctggtataaatataacggaacaaaatagtgatggatcaatggagcccgataggttctgttgttgttcgataccaccatcggacccctatcagaccctatcagactccattgtcccatagctggaaggcctaaatttgttataaactaatacgccaccatcaaacactatcaacctatgtatcgtccactatcgtccttttacagaaacatatgtttaaacaaaaaatttaatttaaattgttatgaacataatcataccaataaaaaaaactagttacattattatctcaataaatacatatgtgtagataaatatatatataacaaaaaaaatatagaagttcatgctaaattttgggagaacaaatctacacaccaccgctctctaaatttcttcatattttcatcgtttacattatcaaacgaaagttccagcattttatgctcgatgtgctctattacatacatctcacaattatccttgtatgagacaataaaaaataattaaatataagtatgcaaattaaatcaagttaattattaaaaaatcaattgtaattaagttaccttgatttcatctgccatacaatcttctcgttgatgact

SEQ ID NO: 137129 - DNA, 1449 bp, Cannabis sativa
gttgtttttgttatagtaaatagcacaaaaatgcaatattgcaatgattaacacaaaatattcccaggccaattggaaaggttgccaaggtaccgtttcgtcccaaccttgcctatacagaaccgagattcccaggtaaggtagagggtacactaacacaaaccttatttaaaaactattttttctagatagaacaatattggtttgtgtcatatacaatattacaccgttgtaccaaatactaagcgttttatgaaagaatttttagaacttacttttttttttttttgtattttatgattttttttagaggacttaaattctaagagtactaacaaaaagacaaataaaactctaatgaaaaaaaaataataactaaaagataatgtaaacaatcacactaaataaaaattaaagtaagaaaaattaaagggaaagggaatagaggaatagacttttttttttttcaaaaaaaaaaatatatacttttgaaactaaatacaagaagatgtcaattattatatattttttgtatattttttttttcaagaaatcatttctgataaggaagatcggataaaaccgcaaccttagagcatactttgaattcttgctaatttttttacaaatatttacacaacataagacaacattcacaacaaataaaacatttaacaaaaaaattactaatctctagatcgtagatttcactaagctttcaaaaattacctccccggtaatggcgccaaaatttttttaacgcctaaatgtgacttccactagcgatggttgtagtatagatcgggcggccgattcctcagggaggtgattatggacaaaagcgttagtagaaaaataaacacaaaaggttaataaaaagtaaaaaaataagtaaccaaaagagtttgaggatttttgttttggtaataaatattaaaagaaagcgaataaaagtgtaatcaatagtcaaagagagaaaggcttcaagaatcatccatatgtttgtttagctattttgtacctttgattcacaaagttgacacaaataatataacattaacgttcattatattttgagtatacaagttcttgaaaataaaagaaataatttaatcttatgtagaacctaaaaataacattatacattaagcaataatgcaataaaagattaaatataaaactaaacatcaatattatttttaccaaatagtaacatatagaaagagcatgactaatcctatatatttttagtaaaaataatgacaaagagatagagatggagatggtggtgatattgaaggaaatgaacattaatattacttttattaatttttagactcatagagagaacataactaaacctatatatcatttaacaaaaagtaaataaaaatgaacataaaagataacaatgagcaatactaccattactataattactaaataaaa

SEQ ID NO: 137130 - DNA, 1270 bp, Cannabis sativa
ctagcatactttgccaatgttctttaaagaacataacacttatacaaggtgtaagtaagctttatcgctgactattacattactgtaaatccagtgtactgatgactcatgggacgttatcttttgaagcatataatcacaattaccttccactgtgttgatatcactataattgtgaataactatatgttttggatttaataaaaattgtagattaaaccataaacatgaaaaatatatgtaaacataaataacttctaatcttctattgataacaaataagattatattgaaatgagttttatttagggcataaaatcctaatttttgattctcacgaaatcattctctcgagctcccactctctcattctaaaaactcacatgaggattgaactcttggagaactcttctcaagcattgaggttaataatacttcaagtggactagcctattacccattgaaaggggtgaaccactataaagacctttcgtctttgttaattttttttttcataaattgatttactttgattgacaaatatctgcattcatcttgctcgtgtacaatcttcttagatttgttgacgaaaaaccacgtcaacaatacaaggtccaatttgtcatttaacaaaatagaggatctaattaataattttttcaaaacatagggtctaaaatgacatatatttattattggtatatgaaactactctctatatatatctagggttaactacggtaaaactcccaaaactttcacttccctaacaatcaacctcaaaaacctaaattttgacggcaaaactctcaaaactcgtattctgttagtatttcatctaattttacctgttaactgccatgttagattatccacatgtacacagtgtacacgtggcacaatcttattaattcaaatagataataatttttaaaacataatattaaaatactaataaaataaaataaataatctaaaaatcattttaattaaaaagttaagaaaaataaaaacaaaaatatcgaataaaaaaataattgtttctttcttttataaacttttctatctatgtatcttacttttttttttcttttttcttttccagatgcttcctccttctttcatcatcttcatcatcttcttcctcttctaactcaacactatcaccaccaccactagccactacccactgccatcaaaattaaacccccaccaaaattaccactactactagggctgttcatccgatccaatctgcacttttttggtc

SEQ ID NO: 137131 - DNA, 535 bp, Cannabis sativa
gatcgaatccatccaatattttagatccagtatatattggattggattagatccatccaatccaaaaagaaaagttttaatgttaatttttatatagacatatatttttattacgcataataacataaaattaaattactcattcaaaataaatgaaaatattaagtagtttgattggatgttagatgtattagatttttggacaccatatccaacattcgatccgatctaattggatattcaaagaaaaaaaaacttccaatctgatcacaattggacatccaatatttgattggttataattggaccgatcggttgttattggattagattaattttatacacaccccttgtaacgtctccgctttaagcttccattgggcccttacacccatagaatgatgtctattatacacgagcacgccattctaactgcttcatggaatgatgactgactttacaaaccaacacgagtgtttctagcatgctttgtcctcacttgcacgcttcttaggaaaacttcccaagaggtcac

SEQ ID NO: 137132 - DNA, 504 bp, Cannabis sativa
aatttgagacctgaatataagtaaaaaaacaccctataatcaaaatccaagctcaacaacataaatcatacaatttcttaccaaaaatcaccaagaacaaacaccaaacttaacaacatgcatgagcaagaacatatcaactaattcatgcactttcacaatatttttcagcaaataaaattcaattagaaactcaattaaaactgaaggaattacctcaaaaccaagcaagaacaatccccacaatcaagctccaaaatttggttccaattcactccaattttcttcaaaatcaacttgaatacaaagagggttttcagtgagagagagaggtcggttgagagggagagaataaaccaaaaaaaaaattctcttttacttactcaataatgcaacttttattaaatgtaagataaggatcaaaaggtccttcttgcccttaaggccaattaacacatcaaacttcatataagggcatacaagtcaaaacagacatatttaaat

SEQ ID NO: 137133 - DNA, 629 bp, Cannabis sativa
tttaggctttttattgattacactaatgagatatttcagttttcatgaaaatatctgcagtgatacatattaataatcacacttaactactttgaaaaaaaaaacttaaccatttattttcgattaccaattttgtatttactaacttcatttattatacacactattctacttatgtttgttggtttaacgagtttttatggattttttaattctctttgaaacatcaattattttcaaaaatatatatgtaatgggtaactgatgggaatcattctcccgtcgggtaattctcacccagctcatccccgctttaatttaaacgggtatcgaggtgggtatgaggtgaatttaaaaaataggtatgaggataggggagcaattcccgcaccgtctcacacgttaacatccctaaataacaatgctctttttaaaaagtattaaattatttaacttaatatttccactaattatttaattgcacttgtaactttttaatggctattcaattcaatctaattaatcaagttcgaggttattgttttttttttgagcaatttgcggcgaaacccccttatgttttgatttttatacacttaacccccttatctttatttttggtggcaaaa

SEQ ID NO: 137134 - DNA, 647 bp, Cannabis sativa
catggagttatatacgttcaacatcctctccttgatatcaaaatggaccaatatccaatgtttttgcttttgaatattgacatatacaagaacatggtcagtaagcacgcaaggattattgcaaaacaaatactcaccaacaacagttgcaacacctttaagatatcctaaagatgactctggatagaactctaaaaagaattcaataaaaaatttgtttaatagaaagactaatgattgagacaattttttttttttgaaagcaatgaataaattcaataaaaatataataacgttatacaaactagttatatgatcatgttcatcaaataaatactatacatgtcatgattatcacaatatttctatacatccaacaaaaacttagattatcatatctagccaaacaagttgtactcatccatccgaagagtatgcacaattaatccatgagcaacacagattagagacactattgaaaatctgaatgacaaacttgtaaaaacttctaacaatgatctaaaaatattagggaattagggaaacttcattgaaaaagaaatcacggttgtaaaatcttagaaacagattgcaatccaatgtcatcagcgtcacacaatttgttttaaaagcttgttatcctttct

SEQ ID NO: 137135 - DNA, 664 bp, Cannabis sativa
  modified_base (257)..(263): a, c, t, g, unknown or other
ttctcccactcaattaaggtactgtgatactattccaagaaatttattggtatcaatttctattacaactgtaattggaacaaaatataggatcatgaataagttcttagaatttgctagtttattcattatattacatccatgtctaatcaaaatatgtgtaacatagagatattgtggtgtattgtgtatagtctagagttcgaaatgaactacatatgtcaatagccttatccacccctaagtgttatagagannnnnnngagttatgaatataatctagagttcaatagatgtaaaagatcgttgaactacatatattatttcttaactttttctaccgtatcagatcaagagatcgttttattaaaccaaatcataataattgcttaaggaataacaattattcataaacattgaattttaaattctaagtgtttatgtggtatgatctctttgcagagatgaatataccattgatgttgtatcattaaaaaaacacaaacacatacaaacattgtaaacatataaatataattgctattttggcatacacaagaacagaaaaacatgaagctcaattcataaatgcaattcataactaaaagagaaaactttattaatattctaaaaaaaaaattgaattgtctgcataaatatgaaa

SEQ ID NO: 137136 - DNA, 796 bp, Cannabis sativa
  modified_base (735)..(746): a, c, t, g, unknown or other
gaagaggaacttggcttagaggagccacgttcaaaactagagaagaatgtagagtcacaagatactcaagttctaggttcttcccttgtgcgactatgggtttcttgttaaccaaagacttgaaaattcttgtcacctgaaattatatataccataaacttcaaaataaagaacaatgtttggtttattagaaaaattaaataaaataaattaagtggctaaacctaaacaaaaagtgatttagaaagaaaagtgtaaattaggattatatactttatttaagatataccattaaagagaaggtgatgtgtgattttatattttttttaactaattattattaataatattttaaaaaattttgaattgtatatgaatattttttaaattaattaatcaattaatatttataaagttaataaaaatattaaaaataaaagaattaaagaagaaatatgtagaagtatttcaaaagattataaagtaacatgtcaccgatctttagatagatataaatagatatataaatttttgtgataggtatcaaatttgtattttaagtagctcatttactttatagaaactactcataataataatagacttgaaaaatgaatttgttgttcctttatttatgttaaaagataataaaagttagagtagaattataatttctattaaaatgggattatttcaaaaaacataaaaagaacaaaaaaaattacaaaaatacgnnnnnnnnnnnntttaaatatttttacgattttttcggttttatttacaaaaaatacggtct

SEQ ID NO: 137137 - DNA, 681 bp, Cannabis sativa
aacctcctggattcgtctgaacttgaaacatagttgcatttgctcttgacactccacaccgtttagcaacttctgtttcctttgcaataatcttgatgatgttgttgtgtatagtatgtctccatctaggcaaactctctctttttttggtaaaacgacacattaaccagtgcctgcaaaaatagcatgactaagtgagaatgcaaaaattaaaacaattaattactaactgccagtacttagaaatcactgaaaatgttacctgatagattctagcagagtaattattggtttgtcccttgcatcaatgattgctttgttgaagctttcacaaatattgttcagcaacatatcacatttaaccccctctttgaagtgtgcttttgtccattctgatgggttctttgctgccagccaattgtatgcacttgtgttgattttctttatctcatccatcctcctatcaaactctgcaggaatagtggctcttgcagcattccacacaagttgttttagcagtagcccaggaaacagctttttgaaattttcatgcatatgtctgacacaaaacctactgtcaggactattgaaaactgtgtccactgcattttgaagccccttctgcctgtcactcataaaagtgaatgactgtggctgaatgggatccaagtcatccttcag

SEQ ID NO: 137138 - DNA, 1519 bp, Cannabis sativa
  modified_base (328)..(328): a, c, t, g, unknown or other
cactgagtagtggtcgggtccaagaattgatcccggatcccaggtcccgacgtgggtcctatgtctaggtttgggtctagggttgggtcctcgatcccgatcaaagttctgagatcaatttctagtcctagttctggtgcccaattcccaggtctgtgtcccccatctatgttcatgtcctaggtcccgttccgggtccaagttcgtgttcgggttcgaaccgaatttaggtcgtggttttggttagggtccgagttcgcatcccaatcctagtcttggtctgggcttcgggtcccaggtctgagtctggttcttgagtcttgggttnggccccggtgtccaggttcgggtcggagtgtcgtgttctgatttgggtctgggtttgggtttaggtatgattcctggtctgagtctgggtccaggtccagatcctggtctcggtctgggtttaggtccaggttcgagttcgggtcccaggtgcggttccaggtctgggtctaggtcagggtctcgttatagatctagcttccgagtttcgatcttggtctgggtctaggttttggtccgggtgtcagtcttggtctgggtacacgacgtgtcaaggcccgactccaggtcacggtttgggtttggggctaggtctgagttcggttctaggtttgggtccacgtcctagtcacggtcctagtccttttagatggtcctggtcttacggttcttgttcaggctctattttcgggtcctaggtttgggtcaggggccgggtttgggtcctggtcggagtcccaaatctagttcgggaccgagattggggtgcggttctaggtcccagccccaattttgtgtcccgagtctggttccatgtttgggtcttagttcgggtccaggttcggcatcgagtgtaggtttgggttgggatctaggtacgggttccggttcgggtctaggtctgggttggagtttgggtcctagttcggttacggttccaagtctaggtccaggtctgattacggttccaggtccaagtccaagtcctggttccaaacctgttcttgggtcccagtctacttccagtttcggttctaattttggctcacaaggtacgggttcatgtccaggttgcgatttggggctaggttgaggcttgcgtctagtttcgggtcccagtctaggttcgagttcgaggctgggtcccagatccaaacaccgactacgggttcgtttcaagccccaggtctagatctggatcctgatctcgggtctcggtcgggttccatttcgtgtgtcgagtcacgagttggttcctagatttaagtctgagtttggggtcgggtcttgggtccctgtcctagttccgttgcccaagttcgtatctcgattcttggtctaagtccccgtttgggtcccattctagattcaagcatgggtcctagtcgaggttcaggtttgagtctcggtctgggtttttatttgggtttgggttcgggtctgtgtcttagtccttgtcctggtcctagtc

SEQ ID NO: 137139 - DNA, 633 bp, Cannabis sativa
taagagggaggagagttttgtcacaccgaaggagaaaattttgtacaaattatgtttttaaaaatataatatatattaaattgataagagtaacgttattattattattaataatataatataatattaatagtaattagtgtactatttcttaactattaagaaatctttaaccttagggtatttggtcaactctgagtaccccaaaatacccgatatttctaaaatcaactcttctcaataatcccatcaatatttttaattaagaccgttgtgaaatttttggcctccaatcgggtctctagggtcaccaaacttgaaaatatttttattgcaaaaataatatatattatatctacatgtttcatataaatatctgtaattaacaaattacacttatttatttcaaatagtaaaatttatattttatgctaaattaggttagcaggatcataatcttactaattactacttatataaactataatatataataaatcttaataattcattgggatatatagctagtatcagatgtatggagtatacattggactggaatgatattaatagtggaaaagatatcataaacttaccgttatatctttttatgtcaatatcacttagttgatc

SEQ ID NO: 137140 - DNA, 1618 bp, Cannabis sativa
ttgaacgctaaaccccttatcccccccccccattcgtcacagcttttttaaaagtttaaagttatttttttaaaaaaatatatatattatgataaaattatgtttagtaagcagttaaaattaaaagctaaaagctactataaaagttattttaattaaaagactataataaatttatttatttttaaattatatttacttatctattatactagttaaatattacgtgcaagacatgtatacttaattatattttagatttttttaagtgttttaatttttaaaggttagaataaaaatatcatatataatttaattaaataaataatattattttagtagaaaaatatttattttaaagctttataaaaggaaatataatagtatatttttgaagaaaaaaaataaattaatttttatgtatcaatatcatattactatcatcaattttatgtatgggaactatatattaatttttatattaatatatgcgttatatagtatgataataatattatttattactattgatgtggaaattattatcatctatattatgaataaaaggaatttggaatctattttctaatagtgattttgagaaaacacaattcactctctctgttcccctcacccccatattatataggatgcaggtgatagtactccattgctcatctttgattatatcagtacctcccagaaacgttggaggctgcagcttcacaaagcgctcaaataccgaatctctatgcggcaatataaatccctggttacacaccactggcacaggagctggtgataacacttattctacaagggctgccggtgttggttgcctcaaccgacataattcttcttcttgacgaagtatgacacctcgtatttcttgaaacatctactgccaatcagcaggtggattcgcattgccaacccccgcattatccccggattttgcggaggcacaagcattttcggtggattggtttggtctacattaggctctacttgctcaccctgtggtctagatgattgctgagggtccattctcataaataaccctgtaatcaacaaccccagcaagtcaggcaccaataccacacttacgcacttattaattttaaacactaactcgaccattcaatttcataaaaataaacatttattaatttaatatactaaacatggctttcatatcacataaatactaaatgctcacatactgcctaaattggaaagcagtaaataagtaatcacataagcagttaagcatttactctcaacacttactacaccacgagtcgagcttatctttgacgatgattgtacatgttcagccggtctataggaagtttaaaaacattggcgctctaataccatactgtaacgccctaacaattaggcacgctacgacattcgatatagaaaccctaatctcgctaatctaggatttctagaatgaaaagcgcgggtaaatttaaactttattaacgatggaatgaaaatataacttgtaatgatttttttaagtttacaataaacccaaaagatacaagttttgggatcccataaatattttcacaaaatattacaagtttacttcacgtgccgacctaag

SEQ ID NO: 137141 - DNA, 614 bp, Cannabis sativa
tttaggaaggtcattctagagacccgtatttttgaaaaaaaaaactttgagttttccttttttgtttaattttttatgtgagagtaaaaaagtaaaattttaccaaaataaatctatatgataaaacatcccctaattaatagagtttgcaatgatggaattggacgaaaattataattttattatttattatttatgctaataaaagaaaatttttgagtttatactgcttaaaactcaaaattttaagtaattatgccacaaatatttttaaaactcaaataacaaatatttgatatcaaaatgtgtaaataaataatatccattactcacatatttgatgaaatatataacttaaaaagtttaacattcacaatagtctcatatcatatattaataaattaatataattttaattatttaaataaaatttaaataaagaattataagaaaataattttttatataaaaaaaaaataattaaatgattttttttatatatacttattttaaacttgacaaaaattaaaaaatataaaaatatattttgcattcactttaagaaaaattacaattaattgggcaagttcatcaatcacccacatagaaaataa

SEQ ID NO: 137142 - DNA, 840 bp, Cannabis sativa
atcacaggcaacctataatacaagctatgaggacatatgttagtttttggttactctctttcaattatttcttaaattattttctttcattttggattttttttttcagacatttaatggtatttaagtataaaattttatcaaccaaataggcatttttttttaaagaaatgagcataaaattcaaatggagatcccttgattgaaaactttattaaaatattataaatttataagactttatctcatagtaatatttcaatgacatggttttttatggtatggtgccttataacaccaccatacttctatcttttggagtattgctaagacacatggtgcctattgtccaatattttaggggacataatatatattgtttgaaataatgtattctttatttgtctaagaattttttaattttttttatatataatcatatatattgtacttatttaagaccatttttatttttttttttcaaaaaattaaaataatttatagtaatgaaaataatatttaaacaattattcataaaaaatacagtaaaacaagatatttaaattttattttcgaaactataaataatttatagttttttaaaaatttacaaataataatattataaaagaaaaaacaataaatttctttctaagatatcgaaacaaataacaatgttgtaccaaaataaccttttgggagataactatagatatgtaaatggttcaatataatttaaatacaaatatgatgtcataatctaaataataaatatgtgaaaattggcatgaagaagaatttggtagaattcgtatcgagatgcctcacctgtcagcagat

SEQ ID NO: 137143 - DNA, 2260 bp, Cannabis sativa
  modified_base (30)..(41): a, c, t, g, unknown or other
  modified_base (479)..(479): a, c, t, g, unknown or other
  modified_base (1569)..(1574): a, c, t, g, unknown or other
  modified_base (2092)..(2095): a, c, t, g, unknown or other
cgtttgttgtatcgggcaacgatagtgacnnnnnnnnnnnntggttaacgagtggtaagggtactctataaagtaccaagattgtgtgattacgaagttggtaaatgaattaagtatgttataatgtgactgaatgaattttatatgtcttaagaaattagtttcttttcttgcagagtctcagtgactcacgggatgtaagaatacgtgtttatagggatgtaaaattagagtactttacaagtcactgaaaatatgtgattgtgtattgaatgaataattgattagtgtaatgataaagctattcccaacaagatgctatgatatattacattgtgtaatatacggtttgtatagacgttatactatatatgcaggctgaatagataatgaatcacgagtatgtatgttatgttatgataagaatacttgcgtttttattgcttttgatttaatagcttttcttgctgagtcattgngactcacgggtgcttcatggtgtaggtaaaaaggtttaaagttgtgtttggccatgagtcagaggtcttctagcagtgtacatatcagccgtggtgtcttggctttcgggaagcaggattgaccccttttatatgattggaaatgtaacctacttttgtaataacggttttgtaattaattgtaaaagaattttattagcaagggatccccatattatgatagaattttgaatgaaagttttattttaaacttaaccaaatgttttaattaaatcacacttttccctaaattgatagattagtgataataagattgtaaaagcacgcacgtggcgtccctgagtgtcagggtgttacatctatgatagtgttataatgaataaaaataaataatacgaaataactcaaactgattataactaaaatagaaccaattatataacataatgaatacaaataagtaacacttaataactcaaactgattacaattaaaaaaataaagaggaaaccagttcctaaaatactgaaacataaattaaaaataaaactagttctgtaacaaaatatctcataccacatagtacattataaaatcgattatatttttaaaaaaaaaatgggaatcaattccaaaaaaatattgaggcataaatataaaatgaacgggttccataacaaaataaataaacataaataataacacacatttactcaaacataatataaagaaactagttatatttatcaactagttaaaaatttgagacaagaaaattagttccataaagcaactaagacaaaaactcactcacaaaaataagttaaataaaataactcaaacaaaaatatccattcaacatgctccaacccactaaataattacactcataccatatctaccctaaaaatactcattcattatattatataaccgattctattttagttataaccggtttgagttatttcgtattatttgttttttattcattataacactattatagaaccgattttaattaattataactcatttgagttattttgtgtcatttgtttttattcattatgttacagaaccggttatnnnnnnattataaccggtttgagttatttggtattatttatttttgttcattatgttatagaacctgttttatttttgtttatatttgagacatctacttctggtgacttttttagtgaattttccagtgacttttttcggcgacggtgactttttagtaacttttccggcaccaatgactttttcggcgcctctgactctttcagcgaaaatgtattattgttttaaaaatatgagatttctattttttttacaaaaataggacataaaaaatcccaaataaatgtaaaaaaaataaaaaaaaaaactcataacctcatggtattatttatttatgcctaaaaaaagtaaactcttataattttcccatatattgtgtaatttcaacttaaaaaaaggaattattacatagaaaatataaattgacactttatttacaaaaatatctccataaggtgtggacaatatttataccttttgtgtgattttaattaccaaaataccacttacactatcacttacannnncagacgatggttgcagggtggttgatgcgtggttgtgtgatggttgcatcagatgtaggtttcaaccagacaatggttgtagggtggttggccgaaggttgcatcagacgaaggtttcaatcagacgaaaatttctgggtggttggccgaagtttgcatcagacg

SEQ ID NO: 137144 - DNA, 961 bp, Cannabis sativa
ataagtatcaaatgaaaatacgacctttaaaataataaactttagttataaggatattcgatctccattgttggttctacacagttcttattttagtgagatttatccccaatagatagacgttcattagtaatttaacaccgtagaatctcgaaagataagtatcattataagtgttttattcttagtaatgtccatccgaatagtggctgctaagagtaagacttacaaggtatgaagcaatggtggaagctcatgaaatatgaatgaccttgactcttgactaaaatgcagcaaagtccgattctctttttgatcgaataaaaggttgctagaatggttttcattttagatgagttgactagtctattcaatgaatgatgtctttgactctcgctcaatacgaatcactatatcagtttgttaaaaatcttaaaaattatttaaaatgtgtttattttgtatttttacatgtctttattacgtgttaaatgtttgattatttctgaatgtgtaagaatttatattgaaaaatgttgtattttgttattaatgttgtagtataatttcgaatcttcattttttgtctaacttagcttgttgttttaatgggacaaatcccaaaggattttcgtccattaaacaaacataataatgttagatctcgacaaataagtatttgtaaatgaaacatctagttgtacatccaaagacgacaacttagactagtgtttgcaatatgaaacaatgaagagtttcataaaataagaatgactttgactcttgcctaaacgggacattgttggaatcttattttaatcgaaattgtcctttaattattcctcttaacttttccatttataatttgcttaaatagtatatcattgtgttatacccaaaatttggctggcacttcggaggaggacacgtgtcaactttggagaatacaaatcaacgaata

SEQ ID NO: 137145 - DNA, 1110 bp, Cannabis sativa
cgaacctttggcacgaatcacatttctgtacgtagtctatccaatcttttttcatggttggccagaaataccattgtctcagtatcttctttgagagacttgggcctcctctatgatctctgcagaacccctcatggacctctagcataattttcttagcttcagggtctgatacacaccttaggtacgacatgcagagtcctcttcgatagagaatgatatccatcatcacataacggtgcgcttgatactgtatccttctggatagtgccttttcttagggaaactcgcccttggttatgtattcgatgatggggatcatccagttgagctcttgttcaactgctcccacaatacttttggctttaattcttggttccaagaggcgttcagtgggcaccaccccccagtttctcaatttcgctgtctgatgctaacttagccaaacaatctgcgtgagcattcttttctctggggattctttccactttgtagttcgtgaactcatggagcagctcctggacaattgctacatacgcgaccattttttctccacgtgtttgatattctcccgatacttggtttactaccagttgtgaatcactgaagacttctactcttgtggcccccacggcttttgctaacctcagccctgcaatcaaggcttcgtattcggcctcattgttagaagctgtgaattcaaaatgtagggccgcctagagtcgaagtctgtttggggatatcattgctacccccactctggatccgttttcgttggaggcaccgtccacaaagactttccatgctggggtttgtggtgtgggcacgcttgcactagcttctgcttcatggcactccgttatgaagtctgctagtacttgtccttttatgaaagtgcgcggtatgtaatgtagatcaaacttgcttaattccatggcccatttgagaagtctcccggatccctccggcttctgcaggagttgccggagcggatggttagttaacaccttaattgggtgagcgtgaaagtagggtcttaactttcttgaggctattaggaggcaaaaaactagtttttcgatcaccggatatcgtgtctccgcccctatc

SEQ ID NO: 137146 - DNA, 941 bp, Cannabis sativa
catggccccgtggactaggagcaattcgaaagagttgctgataccacgtataaaatattgcgtgtcattttaattttctacattttactttctggagtatatttctgttctgtcagatactgtgtctgatagaagagagacaaattctgttcaaacaattttactacagttacgcattatttaaattgtttgataatttcacttggtaattatcaaaaatagaatttcacaacataaaatgatttctaatcttttattaattaataaatctgattatatttaaatgggttttatttagggcataaaatcctaacaagtacaatatattgtagaacttacttcactacggatgtataattaagatattcaaactctactaagcattcatgattaattaaaagtaaaagttagtaaatgtatacctcgagctagctaaaaaactagtcaacaccaaataagacggatccttggaaattgacctcactaactatttactagctactaaaaaaataaaaagacatgattaaaattgaaaatagaaaataaaatgataaaaaaaaatagaattaatttctagactaatttttagaaattaatttctaaacttattttaatactctcctatctcattctcgttcacaatatttaacaaaactattagtttaaaatattcaaatatacatatacaatacataaaaaatatacaatataattacaatagtagtatatatatacttatacaatacaatacatatacatacactacatatacaattacaaaatatgtatctttatatattaaaagtgtctatctaacgatatttcttggtttaacagaatatactttaaaaataatagaatcttctgttaaatttaacgatgttagtaggtttgatcctcccgttaactttcaaaaatatataaataattaaacccaaaaa

SEQ ID NO: 137147 - DNA, 1370 bp, Cannabis sativa
  modified_base (250)..(258): a, c, t, g, unknown or other
gaatagctataaatattctttattatgtattaagtgtgcttacataaacgttatgttatttctgtatatgtagattgacatatgtaagacctaccggcatgtatataatattactatgaaatttgcctgcactttccataatgtctaattagtagcttttctttctgagtcattgtgacgcacgggtccttcgtggtgcaggtaaggaggttgtgttcggccatgagttagaggtctcccagcaatgtannnnnnnnncgtggggtcttggcttctgggaagaaggatcgaattcctttctatgtttggaaatgtaatctattgtaaaagaatattttcattttataaacaagggacccctatattatgacagtatttaaaatgaaagtttttattttgaatatatatcgagatttaaattaaaccacgctttttcaaaatttatagattaatgataataagtttttttttttaaaacgcacacacgtggcgtccctgatggtcagggcgttacaatcaattattatctattgatcatactaagaacctctttctgtatacttgcaaacagccataataatagaagaccataatttatgattcattgatgattgatccttctctaaatttctcttcttatttcatagatctcaaataaagaattggaggggccgtgtcaatctcttaaaatgataaacatgaattctttttgtaactattattttctattattaaataataataataataataataataaattttaaaactgggtactttgggaatattgaaattttacataaattgagggtactaaaatagtagtttttgtaaataaagggtactaattgttcattatctaaaacagagagtaccaagtatgtattttaataaaacaaagggtaccatatgagtatttacccttttttatgccatatttttgtaaaaaaaaaaaaagtagaatcccatatttgtaaaacaacaataagttttgccgaaaaagttgctgaaaaagtcaccggcaccggaaaagtcgccagaaaaatcacggtcaccggaaaagtcaatgtggctggaaagtcaacggaaaagtcaatgtcgctgaaaaagtcaccaaagtaaatatctcatatataactaaaaatataaccggttatatgaataaaaactaataactcgaaccagttataattgaaatataacaagttctgtaacataataaataaataaatataaataacataaaatacctcaaaccagttctataatagtgttataatgaataaaaataaataacactaaagagctaaaactggttatcactaaaatagaaccagttatataacataatgaatacaaacaagtaacac

SEQ ID NO: 137148 - DNA, 600 bp, Cannabis sativa
ctagtgcttgggttccccgaaccagggtaatagcatccactaatttaaaagattcgtattataatctctagttcacaattaggaatttaatacaatctttacaataattagtaatgtattaccaacaacaaccaagattcctggttgtacacacaagattccatgtgtagcagctaagttcttcttcgacacttttcttcaatctaaaatcccttcatatctgatgacgaagatgacactgaactctcttcagtctaaactcagcaccaccaagctctgatctttctgctatggatatccatcacaaagctatacaatcagacctgaaaacaacaacaaactatacaagataccacacacaatacaaaacgataaatctgaactaaccaagattatcaattagctagctgacccgtttacagaatgaaactaactatttatagacaatagttcaaccgactttagaacaatttataccaaccattaaaacataacagacccacgtggactttaatggaatactggtatgtgttggaaatattttaccaggatatagatttactaacaagtatgtttctttaacatcctaatatgaattct

SEQ ID NO: 137149 - DNA, 589 bp, Cannabis sativa
aaaataccctttagtacccctttttgttattttagtgtggactaagtgtaatttgattatatgtttttaaatgttaattgttggctaaatatagagtggatttattcattttatcctttatttaaaaattagaaaattagaaaagttaaaagaaaaaccaatttcctctcaaagctctctctttctctctttttcggcctccttgagcagcaaggatcattggaatttttcttgtgaattcatctctttttggtattctaatcaatctaggttagctcctaatcctttcctctttaagtttgttgaaaaattatgaaatgaaaatagtttgcatgcttagtttgggttgatgttgttgctgtgattttatgttgtttctgaggtttaaagcatgttaatttgagtagattagagctggttatgatgcatgtttgttactttgattcaagcttggaaatttttagtcaaaattatagttttcaaagaaaagtgaagaatcttgttactgtggttgttgttgctatgaaaatgcattttctggtgttatattatgttgaaataggtagagatatgcatgatttagtggatg

SEQ ID NO: 137150 - DNA, 642 bp, Cannabis sativa
atattaatttcataataaataaacgataaaatttttgttattgaatcttaaaactttaggagttttattcatcgttaaattctctttctgttgatatattatatgtatgaaatcattgagtatattatgagaattttaagtttaaagttgtagggtttttataattatactataaaactgtattttgtgttttatgattttattgtttttgatttaaaattgattatgaatatctcattatcaattgtttatcaatgttcttacacgatttattttgtgtttcgaacgagattagtatcacaattttttttatgttcttcaattttcggatagtcttttacattagatcaactattttagccattaatacccgaaattaatagcgtacatcaactagaatccaatcacgaataaaacccctaagtttcccatttttttctgttggtttttggccggatcaatcagtcagacccaactagcgtgaaccgggtcgcgtgaccctcctccaacccgactggaggaaaaagatgaccagctagccgcgaagcccactctcggcctcggcgcgtgagggcgcgtgtggcactttcgggagtcattttttgacgttttttttttcagcgtgcttagaatttaatttct

SEQ ID NO: 137151 - DNA, 1191 bp, Cannabis sativa
aatatcaaattaaggagtccttaggagagcaaagggttattattgtaaaattatacgtgaaataatgggcgagaaaagtcatctgagagcttgtgcagcaaacaacatcacttgaatgttatacaataaataagatgcacactcaacgatccaaattttacataaagtgtatgtaagcaaagaataaactcatataaaactgtgcaagaactcttatacaaaccaatacataaaattacttttagtgttgtatcttctaatttaagtagatatctttataattatgtataattaaatcatgaaacactaatataattagtaacttgaatcaataaaagaattacttaacttgtacaataatacaggctaacttaataatattatcgatttactttttatagtaagaaaagcaattgcacaacttaattggctgctctatcaaccacaagaaataactaatgaactcctaatcgtaaaatatatatagtaagtttattgtaaaatcaataaataatttaatttaaacaatgcgttagcatacacaatgcaacacatatagccagtaaatgtattgtgccatactagctactataaaataaccctttaaaaagcgtttttttaaaagaggaagctaaaacgtttaaatattcccgctcattgaaaattgacatttaaaaacagttattttataaaaatagtagttataaaatgtacctaaattctatagctataatcgacgatataggaacactttttttctcgcacgtgtaccctagtccctatgccatcagttatttcctaataactgtcggcataaggtgttaaacgagcaatgtaagtaaatgacttatttctaattttatagatagttaatgttctttttttaaaataataaagaaaatgtctttttttactttttaatacctaaaataccctttattatataaaaggtattatattttattcctttaataaaaattatgaaaaacaatatatcaaaaccactctactgaatttttttcaactattttttcattatataaaaggtattatatattttatttttttagattttgctgctgttgctgtctaatatgttatttgaccatataattagttttcttattaatatatcgtatgatatacaaataatataccttaaaccaatatacatatatcacaaacttaaac

SEQ ID NO: 137152 - DNA, 632 bp, Cannabis sativa
tagttatttactttttaataaaatgtaaaagaaactaaaaaattattttttggtgatggtaaaagaaaaaaaatatattttctacatatccaccttaaaaaataaatcataatgatacagttcttaagtaaaattgattaatttgatctaaaagtttttgaaaataataaaattgagtgagaaagagatagagaagaaaaattaataaaataatatgtatatattgttttgttcaaagtttagtcgatagcattatcaacaaaaagaaaagataaaaatagaatgataagctaacaaagataagagtagacaaataattattttcattactttcggtagaagcatacatattagtacatattaaaattgtggtcgttattttcataattagttttaatattacgtatattactgaaaattttcatttatttaatggttaaattcctctcctttgggccttatgtgagagttaggggccaatagcagtgggtacgacatactgaacccagccctcctcacatgaatcaccccaattgtgaaaatccatttgcctcatttaaataattatattaggttaattacattagtctaacctaatttaaaattgagttagcaacataattaacttttaa

SEQ ID NO: 137153 - DNA, 745 bp, Cannabis sativa
actacgtgagcacgtatacttaattttatgttaggtgatactttttattttatttaaaaaagatacaataaataattaaagaaaaaaattgttaattataatttaaaattatttttacatatattctattaatgtaaatagtggtgttgcaaattaaaattaaatattgaatgcattatattagtgattttgatttaatgaatttgtaaacacttgaagaaagtttaataatctaactacaaatcattcttaaattaattcaaaaataaaacaaaaattaatggtcaaataattcaaataataaagaataataaagcaaacataaagcaaacacaacttaaacacaacttaacaacttaaaattgtaaattgtgtaaaataaaaaaaaaattaaaaaataattactaaattgttgataattaaagatagcatctgtctaataactatagaaaaaataaggatactcttaatggttgggttttaatcttattttacttcggcagagacaatagtgtaatgtttatatttttcgcttttcatctatcggtccatatataattgaattatctattttttcataaataattcgtacatggaacaaatttaaagttcaaatgtagcaaattaaatatgactataatcatactaatcgaccaaaatagagtagtactaatttattttgtacactaacggctaagttaaagccaaaatgaataatacttgaatagagcaagcaatggacaac

SEQ ID NO: 137154 - DNA, 532 bp, Cannabis sativa
ttttttttttgactaactctttgtgttttaattttttttttattgcttagttattttatctgtttaattttttacgtaattggtttctctgtttaattttttaattggttgtttagtgtaactgatttttttgtgttagatttttaattatttgttcaatgtaactggtttttttttagtcgatattcaattggttgtataatgtgtaaaaaagtggttgtttaatgtaactagcttctctgtgtcaaaaattttatttggttagttaatgcaagtcatttaaataatttaaggttacttatatcttaagaattctcttatggtggtgtgctttttttttttctttctaattatctagtttttcttcttcaatatatcattttattgttttagatttcttatatttttgttttaatgattagttaattttattaagtaactggtttctatatttaattttgattttagttatttaggtaattggtttatgtgaattaatttttaatttaattattttacgtaactggtttct

SEQ ID NO: 137155 - DNA, 578 bp, Cannabis sativa
  modified_base (527)..(534): a, c, t, g, unknown or other
ccaccacctctaagctcgatttaccctaaaaaccaactaaaaaatgatcaaactctggggatatgtttttgggtatgaaaaatgcaagatttaaaaaaaataggtaaaacagatcaaaaatgaagaaatgagggaaagaaaggggcgattgggcaagggtttcgtgggtttgagagaaagaagggctgctggttattttgggatttgagaaagacgatagctgaagagagttatataaaaacatatggcatcggttattacaaaataactgacgtcatgcgtgtttttctattaaaattaaaaaatcacctacggagtcggttattacaaaataactgacttcgtattgttttttcattaaaattaaaaaataatcacttatagagtcggttattaaaaaataactaactccgtaggtatttttattaaaatttcattcagccacactctatcgcgttcgttgatgcttaatttatgaaaaaagtatctctaaaggcttgtttttgttagaaatattttaccaggannnnnnnntactaccaagtatgtttcattaaaatcctaatatgaattctaaa

SEQ ID NO: 137156 - DNA, 1678 bp, Cannabis sativa
gtatttttgacaagtgtttctcaaactttgtcgtatttgtgatagtttaattattggcaatagtccaaactgcataaactgcaccgcactgtaccattttttacgatgcgatttctatagttttttagtttcgcgatgcgggtgcggtttgggaaattggaaaaactacatgtgcgggttggtttgaaaaaatagtcaaatatcacaccacccgcatcgtgaacacccctagtttgaagtttaatgtatgctatgttatgcactaaaccagacatttgctatgtaacgggaattgtgaacaggtatcagtcaaacttaggaaaggaacattggacaacagttaagcatatatttaaatacttaaagaggacaagggattatgtgttagtctacaagggtggtgctttaaatcccttaggctatattgactcaaatttctaggcttgtctcgatgacaggaagtctacatttgggatggtattcactcttgggggtagagcagttgtttggagaaatgtcaagcaatccacaatatctaactctaccacggaggctgaatacatagcttccgctgaggctgctaaggaactagtctggctaagaaagttcttcacagaacttggtgttgttccaggtatgaaaaaaccactattgttattttgtggcaacactagtgctatagccaatagtaaagagccttaaagtcacaagaggagtaaacgcattgaaacaaaatactacatcatcagagaatatgtggcaagaggagacgtgctagtaggaaaagttgatactgaagataacctagccgaccgattcactaagactttgacagagactgcatttgaaaatcatagagagaatctaggattaactgaaatgtactgattgttttatgctagtacaagtgagagtttgttgagttttgtgccgtaactaaaactctatttcaatattatcttgaatattcatttatcaataaaggaacataattattttattacttgtttaatacattgcttagttcacatgtttgcttcatgatcatttatttaatttataaattcatttaaatccttatcacattattattcatgattactgcattttctacacagtggaaagtaatcaaaattatgtgattaaactttagtcccatgatttatcaatacacatgatttccactgatatgataatcaacaatgtggtttacttacacttagatagtggtatatcttttccaatgcattagtaaagtaagcttgtattggatatattgttatacatcggacttgaccgatactcacatagaaaagatatcttaaacttaccatattatcttctaagtgaatatcacttagttaatcttagatcaatgatcttaatcttgagatggttaggttatgattcaattgtattatttatgttctttgacttgtttattcaagttgaccaattggatctttccaatactaacaccttgggaacatggtagtacaactaagtgaaaacgctaatcatagatacagaatttatagcttttacgaatgcatagaagtgaaacgatgatttcgagcatggctaagtgagattaaatggtggagtactcatttcaataattatattagttactgaaatatcatttacaaagagctaagtattttaaagataaaataca

SEQ ID NO: 137157 - DNA, 593 bp, Cannabis sativa
agtttgtaaaatctagtgttctgatgaatcttcttgatgctacaaagtctgctgcaacagtttcacaacatgttcttgcagaagctatttctgctggcgcaaaatccccaggatttacaaaaagagtaagatctgatgtaaagagatttattcctacttgtcatttctgtagtagaaaaggtcatatcagacctaaatgtttcactttgcaaaatatgtttaaaacaaattattttggtaatttggaaaaatctcaaaagaaacataaaggtttaaaacaaaaatgggttaagaaaaagtgtctagctggtttttttgataaaagtgctgcatctcaaatatggaattttgatagtggttgttctagacatatgacaagtgacaaggatattttgactaacattcggccaatgcaatgtggagaagtcacttttggcaatggcttagttggaaaagtcattggtataggacctctcaattttgaagggttacctagattgaaaaatttgatcttagctgaaggactaagggctaatttacttagcattagtcaaatttgtgaccaagggtattctgtctcatttgacagtgat

SEQ ID NO: 137158 - DNA, 1315 bp, Cannabis sativa
  modified_base (633)..(636): a, c, t, g, unknown or other
  modified_base (765)..(779): a, c, t, g, unknown or other
  modified_base (834)..(858): a, c, t, g, unknown or other
  modified_base (1030)..(1034): a, c, t, g, unknown or other
tatttgagacttttatggtcagtataaatttcacatctctctccatagagataatgccgccaaatcttcaaagcaaacactactgcggaaagttcgaaatcattcatcgggtaccgatgttcataatctttcaattcacgggaggcataagcaataacccgatcagcctgcatcagtacacacccctgaccctgtctggatgcatcacaataaactacaaacttctctttgtcagaaggtagggctaacactggagctgtgattaatctctgtttcgtctcttgaaaaattgattcacacttatccgtccatacaaaacgctgactctttttggtgagctcagttaaggttattgaaattttagaaaacctttctacgaaccgacgataataaccagccagacccaagaagcttctgacttctgtcactatttttggtcttggccaatccctgacagattctatctttcctggatccaccttgatgccatctttgctaacaatgtgctcaaggaaggacacctgagatagccaaaatctacacttcttaaactttgcatataacttgtgttctcaaagtcgttgaagaacaattcagagatggttttcctgctcctcttctgattgagagtannnnaggatgtcgtcgataaatacaataacacaaatatcgagaaaatgaataccctattcatcagatccatgaaagctgcgggagcattggtcagtccaaaagacataacaagaaattcataatgtccatacnnnnnnnnnnnnnnngtctttggaatgtcctcctctcgaattctaaactgatgatagcccgatcggagannnnnnnnnnnnnnnnnnnnnnnnncctgaagttgatcaaaaagatcgtcgaacctaggtaaaggatatttattcttcattgttagcttattcagttcccagtaatcaatgcacatccacaaagacccatccttcttcttaacaaaaaatactggagctccccagggtgacacactaggccgagaaaaccctatgtnnnnnaacccctggagttgaattttcagttccttatcaatttctcgctaaggtggtaaacccggaagttcataaggaaaaatatttaaaaattcctgaaccaccttgttgtcttctggccgaatagagtcagaccgagtggtatccaataccacgaccagaaaccctagacatccttctcgtaacaattctctagcttttagtaccgaaattattgggatccgagatccctgaaccgatgcgacaaaaacaaacggttcctcaccttcaggttggaagattaccat

SEQ ID NO: 137159 - DNA, 795 bp, Cannabis sativa
tttaatttttatttatgcttattatataatttatacttaatttaattatattaataataaaataatatatatatatattatgctaaaacacgaaatggtaaagctagaaaataccaagaccctatggcgtcagtttttatgaaccctataacatcacctggaacagcgtcggcagcgaattttaccaaaactgacgctaaaagcccttaaaaactgcctctaaagcccaattttatagtactgtttaaataaatttaaattaattaaataaccaataagataatacaatataatatcttaatttaaaaaattcagatatttttaatattatatttcaaatcttataatttaacaaaaataaataaatttgaaaataggatatttctatgtttaggatattatcattttatttaaaataaataaatagaataaattatcctaattttgaaaattttatggttaaaaaatactaaaatatctattcaaataaaaattaaccaactattcaaaaatttcatgttattttaacaaaaatataaattttaattaagataaaatatcaaataataaaaaacgcctcctgaccacggttttctctcgttccaatggcgaaacggaaaaaactaggttgaaggccgggattgaaggcgccgactgaagcagcaggttcggaacagtgtgtcgaccaggagagggggagtgatgctggtacgttcgcagtgcagaagcagcaggttggggttcaaccggtttcagatctgaacagtagggaagagcttgaatctcttcagtctg

SEQ ID NO: 137160 - DNA, 519 bp, Cannabis sativa
gacaacagcttgctctgcttcaagcagggatccgtactaggactccattctggaacgagttacagcaagaaggagcctccaaccttcaagatttccataaacgagtccgaaaattcatcaacctagaagaggcccaaatagtggcttatggggcatactaccctaccgagatagcagggtatgtacccggagctcagctcctgagaactttaccagcagctgctccaccgatgagcggcatacaattttccgctaccccagggtatcatcagaatcaggcattagcccctgcatcttctcattatggtaatccttctgggatgagcgcacaagtcccgtctcactccgctctgaccgcaagcttaacaggtccctctcaaggctctcggagcaagaagtcctcaaaaggcagcaaccaaacggaagacaaccactagaaaagagcactccccagtacacccagtacacggagctaacggactcccaagagcgtgtgtattttgctactaggcaaaatac

SEQ ID NO: 137161 - DNA, 642 bp, Cannabis sativa
  modified_base (257)..(272): a, c, t, g, unknown or other
atattttaggttgtttttaacaaccctaaattttcaaaatagttggttagataaaataataatttaattatattaataacttatttcacacttgttacatggacattctttgttatttctttaattgtttattcaaaactttttttttttaacaaacctataatttatttgatctaaattgttatgattaacttgttgaaagatccaataatctgattttaataatagtccaattgtcaatagatcctataaataannnnnnnnnnnnnnnntttgtaatttctttcatctgtgtaaatctagtaacatgatagagcccatccaaatcattttgaccggtatgagcctatatgctcccttttgtgcttagatgcatataggaagcccatttatttctagatattaaaatggattaggttgctaaaataaaatgtcacctatgatagttttatttaggcccaattagtattgagcttattcaatgaataacagttatttaatgaaaggttaaattcctctcctttgggccttgagagttagggggccattattagtaggtacgacatactaaactcagccctccctcacatgaacaaccccaattgtgaaggtccattagccttatttaaataattgtattag

SEQ ID NO: 137162 - DNA, 1044 bp, Cannabis sativa
gtctgaaactataagttccttctagactaagtcatcaacatatcattcaagtataaatagtaatataaaatacttgcttcagaataagtaatcattaaagataccataaaacacttcatgaggattagggattttgcctaagtccttcgaatagactttgcaaaattttctatcttatcctcataattctgataagttgtttctatccatatggatggttagatttactttctcagttttatttaaagttcctatcatgatcataacatagtaatttatcacaagtgtcatccaaataaagatgggcttggaattttaaaattctcccacttagataaggtactatgatactatgtccaagaacttaatggtatcaatttaactacagtaacatattaattggaataattacaagatcaagaataagttctaatagtctgctaatttgttcattattttacatccatctctaatcaaaatatgcgtgccatagagatactgtagtgtattgagtatagtctagagttcaaaattaaaaaaaaaaaattgaactgcatatatcaatagcttcttccacccctaagtgttatagagatcttggggagttatgaatatagtctagaatttaatagatataaaagatcgttgaactgcatatattacttcttaacttcttccacccctatcagatcaaaagatctttttattaaacaaaatcttaataattacttaagaaataacaattattcataaacattgaatttaaattctaagtgtttatgtgctattatctctttgcagagaataaaataccaagattttgtatcaataatgaaacagaaacacatacaaacatgataaacataaattataattggtattggcatacacaagttaaagtaaatatgaagctcaatttcataaaagcaattcataatgaaaatttcttaaagagaaaattttatcaacaatctcaaaaatgtcaaaatgaattgtctgcataaatatgaaatagggaataaaatcccgaactaataattaaaa

SEQ ID NO: 137163 - DNA, 638 bp, Cannabis sativa
tgaatcttgaagatgaggctgaggaagagcaggtgactccactcaagaggaggaagaaccttccggccccgcccaggcctattgaacatgcgatttccataagggagcccaactcacctgctcggccgtcccctcccgtgtttggaaaagggaaagctgttaagtctgaaataagagcgatgtcaggtgatgataaatttttgatccttacttgggcaataactttgcatgcaactatgtcttgtttttaagcttcttgactattatgcctcatgtttctgatatttgttttctctaaccatgttgtcttttgttccgtacagacgtgtctcgacagatgcttgacgctctgaagaagagaatgagcggaagctctagtgcctctcctccagccaagaagtctaaaggcgaggaggggtcctcttctaaggaaaagatgtctgctggggaggtcattgatcttttcgaggagctaacggctgcaaacccctctaccccaaaaggtgcttagtccaagggtctcagggaggaagctcagataggtctgaactaccgaagggtgggtctgagctggtcagaagtgaacccgaaaaggtgcgggcccctactccacctttgtcggtgcttccagaggccaa

SEQ ID NO: 137164 - DNA, 685 bp, Cannabis sativa
acccaaaccttgacctaggacccaccccgagacttaggatccaggactcgatgcttggactcgacccgtaccccatgacttgaaagtagaacaaaaactagaagcgaatcgggacccaagaacaggaccaggaccaggacctggacccaaacccaaaactgtaactggaccagggcgcggactcggacatagacccacactcggattctgtgtttgggtttgggtttgggtctgggtcttggtcggggtttgagtccttgttgagtctaggtccaggtctgggtccaagtgtggatcccaatctgggtctgggttcggtccaggtatgagttcaggtccctggtgcggtccaggtttgggtttgggtctggatctaggtcccaggtttcgatcttggtctgggtctaggtctgagtccaggttaataccttgatccctatctaggtctgagtctgtgtttgggattaggtccttgatttaggtctaatccaattctcggttctgatctgggtacacgaccatgtctaagcctgagtttcggtctcagtttgggtcttgggcttggttcgagttcggttccaggtctatgtctgtgatgaggacatcaaggaccaagtatcaagtccaattccagtgggtccagtgactagggcacgagctaagagattcaaggaagagcttaaca

SEQ ID NO: 137165 - DNA, 1274 bp, Cannabis sativa
  modified_base (49)..(60): a, c, t, g, unknown or other
  modified_base (516)..(526): a, c, t, g, unknown or other
ggtgactacttagagataaatttgtgaagtatgaaacaatggtggaagnnnnnnnnnnnngaataaccttgactctcgcctacctggacaatattagattcttaatttgatcaaataaaaggttgctattatggtgtccattttagatgagttgactattctattcaatgaataattactataactctcgcctactgggacactataacagtttgttggaaaccttggaaattatttaagatgtgcttattttgtattttcacatgtctttgttacttgctgaatgcatgataatttctgaattgtatatcaatttatactgaaccgtgttgttttctgttattaactgtagtataattttgaatctttattgttggtctaacttagtttgttgttttaagggacaaatcgcaaaggattgtcatccattagacaaatataatagtgttagatctcaatagataaatatttataaatgcaacatctagttttacatccaaagatgacaacttagannnnnnnnnnnaatatgaaacaatgaagaatttataaaataagaataactttgactctcctatcgggacatcgttggattcttattttattcgaaattatcctttaatttttctcttagctttttcttttagaattttcttaaataatatatcattggatgaatggtttacaaatcatctacttatgatgtcattctattttcttctatgaaattgaatggcgtagatgactgtattcccaacattctatcacgaaatgatatatatatatcctcgatcttagaaatctactacttatatatgtttactttaagaaaattagacttagagttagattagtagtggtggtcaaagaaagaataataactcaaatatatttgctataaatttaagtctttgactttaaattctagattccaaatagaaattttattttagtttcctagaatacattggacaatacagtatgactttcacaagttattaatatccattttttgtcaatggattcaaactatatgtttatgtgtggaatatgagttttgtattctatgacgaggatccacatggactattctagaaactctttatgttaactagacctaggaatcatcaagattcatcaataaccacaataatatatatatatggcatttgtatcttgttcatagtggtttttacaagatccttatctacaaagagaaattatgcctatatccacttgaaagtaagataatctatattcgaatatggatgtac

SEQ ID NO: 137166 - DNA, 792 bp, Cannabis sativa
tctttggtcttattgttaaagatttgtcagtttttacttttctctttaaaaaatgttagtctttgttttgtaaaacgatcaacaaatcgagttgtccactatgttgttaggcaatctcaatttttttctgattgtagcattcttgattataatgttccagctaatttagaagctcttatgtactctgaatgctaaattttaatgaaattgatatttcatttaaaaaaaaaaaaattaggtaaattttttcataattagataaagccactccaacattggctcttgatcaagttgtcaaaaagtctctacattaattatgatgggatgcttcttttatacctcattctacatcaattaaagggctaagtaagcactttacaaaaccataacgtaaaggctgaatcattctgtccgtttaatattcccttaatgtagtttaaaacttcaacaaaataacaaagttgacaaattaaaacagtactgtctagactttatagaaccgtatatgaattcgcatctcttaattattttaattaattgtcttggatgcaatgttaaaacactcatatacaatgaaattaaagtaatgaattaaacgtttttttttaaaaaaaaaagaagtaattgaactaatgataatgatattgctcaatcaaacgagaacgattgctttcaaaattgaaagaaaaaacatttattatacaactttaaaaaatttagagcttatttgtttgtgtttttagttttcagtttttaaaactgtatttttaaaagtgagaatagaaaacagtt

SEQ ID NO: 137167 - DNA, 982 bp, Cannabis sativa
gcgcctgcaaagagtttttaacttcccgtacgcgccccaactcccgtctgcacggatttttccagacgcgcaattgtggacgctggaggacgcgcgaaaattcgtctacaatacttttgcaggcgctgtattggacttttgcagatgctaaattgcgcctgcgaaagtgctaatccttgtagtgagccaccgtgccacaataattctacaaatatctcttccactcactctctgttgaccccattaaattcttgccctaaggaccagtatcttcgaactacccttggagactactccttcagtaattggagaagactgcttcgcccccacctaaaataaatgtgaaagcctgccctttgcccaataacaaatgattattgaattcatttctcacataacatgtgtaaaacaaattgtagagtacgtagtgtttttatgtatacatagtcaaatcacttttattttttaaaaaagaaagagttttttttattaactaaaaaaatagtacttggttgaaatagcaactttttttttcttaaaaaaaggtagatgacgaaccttgatccaatccaaatcctgaaaaatgtggtcaaaataaattattcattagtacaacgttacaattattgcatatttgtcttgttatgaatatatattagccaaaactttattaaatgtgcatgcacacatgttacatccatattacttttggactttcagcttcagagtctggacccaccttacagctgagctgagctgagctgatgagctgtatgagactgaaaatatcaagaagaaattttcaatatgaagccccttcttttcccatacattgaaacacaaaatggtctttgagaaaattaaggaaaaaaaaaaaaaaaaactctaaaatgtatgcatatagcttttgtaccatatttactctacatatataaatgtagggatatgattttttcccgtgatatattttcacgaaatgtat

SEQ ID NO: 137168 - DNA, 802 bp, Cannabis sativa
  modified_base (327)..(333): a, c, t, g, unknown or other
cacaagagaggcaagcacattgagtggaagtaccatctactaagaaatatagtatagagagatgatgtgacggtcttgaagattgcatcgaaacataacctgaaaaatccatttacaaaaatgctaccagtgaattcttttctgggtcatattactaatatgggactaaaggagatgcccaatttgcttttagggaaagtgaaagattgttagggtttatgcccttaaaagcatttaaagacatttctaattattaataaagagttgaacattttgatatatgcttgaatgttaaattactcatatttattattgaataatttatannnnnnnatcaaaaaatttcttattcatatatgagattatggcttgtagctatacaaagaactaagatcacttagctatgaataaaactgtcaacaacatataaagtttgagaatctttaatcaataatttctagtacggttcattgatgcttattctttggtgcaagtaatctcggttcagattacggatgtagtatgacatcaaagtgaatgtgatgtatataataaagattatatatgacaaagaccgatatgaataaagttttctttattaacatgtcatttactataaggacctaatttatatcataacgatgatcaatagtagatcgacctaaatcctgattgattatgaactcatattcatgttattagtttctttgattcactcgttaaaatattttagagaagatgattcttacaacttttgttttggacagctaaaaatgtggatgactgggaacatgatttacaa

SEQ ID NO: 137169 - DNA, 529 bp, Cannabis sativa
attggtgctgtgcccaatgtcgttgtggtactcgcatcttttgttgggatcccttcgggagctatccctgtacagaggaggtggtctatggttgtgcgtattttgcctggtagcgaaagacaaacgctcttgggagtccgttagctccgtatactgggtatacttgggagtgtacccccttttctgccgcttatcctccgtccggttgctgccttttgaggaccctaactccgagagccttgagagggacctgctaagcttgtggccggagcggagtgcgacaggacttgtccactcatcccaaacgggttcccgaaatgagaagatgcaggggctaaggcctgaccctgactatatcccggggtagcagaaaattgtatgccgctcatcggtggagcggctgttggtaaggttcctgggagctcagctccaggtacatatcccgctatcccggtagggtagtatcccccataggccactatctgggcctcttctaagttgatgtatttttggactcttttctagaagt

SEQ ID NO: 137170 - DNA, 611 bp, Cannabis sativa
  modified_base (520)..(525): a, c, t, g, unknown or other
ttaatttaagaaaagagaagaaaattgagaagaaaagaatgttgaaaaccctctgaagaatgcctccagtattgcagttgatctctgaaatttgtactccgtatccggttgaagtgataaagatggtggtggaaaagatttattgatagaaacttaatatcaaccaattaatgataatttcttttctctttctatgttattgtaatatattgatgaatatagtaaattaaagttgtactcatacatgtatattcttattataatagtcatcaattgatatattgatatatattatttattgaattgttgttgtgttatgtttttgttattggaattaccatgtctctaaatttttccttcgtatatattatgcatgtaaactttataaactttatctaatatttcatgaaaaaaaaatattttatttataaatttgatagttagggtttcacattctaatattaagtttataatattagggtgtctaattattattattaattaaggtgtcgtttggtannnnnnttgtttttaaattttttaatcacaaaaaacaaaaattttgtttttgaaagacaaaaatgtgttctataactacttttattttttaa

SEQ ID NO: 137171 - DNA, 1770 bp, Cannabis sativa
  modified_base (1464)..(1473): a, c, t, g, unknown or other
taccctaaacaacacaaaaacaggaaaaactaggattctggaagcttggttcatgggtaccaactggtcgaccggttctaatggtcacccagaaccggttgatcggttttgtgctgggaacccaaaaatcaacccccttgattcaaataaaccccaaactttctaaaaacttccagtatacctgcttataccccaaataacacatatcaagcatcaaaccacagcaaacaactcaatttatgaaaacaccattagagacccaacttaggttatctaactttaacttgaaaaattctcaacacaaacctcaatctcagctcaaaatatcatgaataattaactcctaactccaaaattaaacaacatattaacccaatacattcagccatctagaatcataatctcacatcaaaaatctaacctaaattacaaaaactcaagaaggaaggaagtagaaaggattattttgaccaaaactctctattatcactaacattccttgattcaactccaattacaccaatcccagctgttgcccaagagaatcgaaagagagagaaagagttgaagaaagggtaaaatgttttttctctaagttttctttgattccttcgaacctaaataaatgaatttctttaaatcaataaaattatattcagcactagaaacaaacctaaataagacaaataaagtctttgcctaaagacctttttgcccttctaactaacataaatggttacaaactcccaagggtaagttagtcatttgcaaaccccgaaaattccaacacctcccatactcaactgatatcatgctaataatattctaaaacatataaaatgcgactctctaaaggcccaacgtcgctttttacagctttcgaacacaaccacagaaattgagaaatttacataaatagcataataaatagatatagacaacttaaataaattttcacaatatgcattttataaataataattaaatctcatacataaaccctaattatttaataatccaaagtgttaaccatatgcagtcataacaattatccccataggatttcgtcctcgaatctaacctgaacaactttggatattgagtcctcatctcagactctaattcccaagtggcttcttccacgttactattcctctagagtactttaaccaatgctatggtcttgcttcgaaggaccttctcttttctatccagaatttgtactggttgtttgtcataagacaggtccggttgtaactccaatgccttaaactcagaatatgcattggataagacacgtacttcctcaacatagacacatggaatacattatgcacagctgacaatgatggaggtaaagctaaccggtaagcaacttgtcccaccttctcaagtatttcaaaaggtcctataaatctaggacttagctcacctttctttccaaagcgtctgattcctttcatnnnnnnnnnncgcaggaagacatgatctcccggctggaatgtaacatcccgctgcttggggtctgcataacttttctgtctgctctgagaagctagcattcgagctttaatcttgtctattgcctcatttgtcttttggaccaattcagggcctagatatttccgttcacctatttcatcccaatggattggtgaacaacatttcctgccatagagaagctcataaggagccattcctatggtactttgatagctattattgtaggagaactcaatcagaggcaaatatttgctccatgaccctcca

SEQ ID NO: 137172 - DNA, 1139 bp, Cannabis sativa
gaatagcggaaatggtctcatggttgaagagacccttcagcttatccatgtcccacccacctctaggtgacaaaagatcagcaacacaattgttatccatgaccacacctgcctttggtttcgggacgaaacctttcaaatgagggatccaaggatccctccagatactagtatctcttccatctgccacccttttacacgcccctttacggagaatggtgctagctttgactacattcttccaaaaccaggagtcagaatctttataactgctattgagaaactctctccctttaaggtacttagcctccagaatcttagagcaaagcgactgcttgcccgtcaataagttccaaccccacttggccaaaaaagcaaggttcatttccttcattttccgaaagcccaggccccccattgacttgggaagacaaagcttatcccaagctttaaggtggagaccatggtttcctttttcaaaaccccaccagaagtctcgaactagtccatcaatccgattcacaagacggttcgacagtttggtcgtttgcatggcataaataggcatagacaaaccgaccgacttgataagagtagcccgtccagcttttgataatgttttggccttccagccttgtaacttagacgtgagattatcaaggatgaagttgaaatcagcatccttttgtctagatctgaagaggggtaaccccagatactttaaaaccccttcaggagaatctatacccaaagcttccttgattcctctcctcatgccatcaggggtgtttttgctaaagaaaatagaagtcttgagcttgttgaccttctgccctgaccactcgcaaaacttctcaagacaattccaaaagcatttggcctcatttaagttggcacgacccaccaaaatgaggtcatcagcgaagaaaatatgggaaagcaccagtccccctctactcagcttgataccacgaataattccctttccaagttcctcctccaacagtctggatagcacttccgctgcacaaatgaaaagatagggagataaagggtccccctgtcgaaggccacaagaaggtaaaatcttaccaacagggcccccattaagtcatatattgagggaggaagttgaaata

SEQ ID NO: 137173 - DNA, 1270 bp, Cannabis sativa
  modified_base (566)..(570): a, c, t, g, unknown or other
  modified_base (748)..(749): a, c, t, g, unknown or other
ggtgcctagggcctggaacgctgatcatctccgaaagtattaccaatagtcaaaagatgtaaacttaggctttgttaagagaatttgtaccgacaagtgtacgcaacctctaaagttatgaataaatctcagtgccttaaaaacaatgttttcatgtcactcaggggggtactaaggcataccacgcggacaaatgtaaaacgggccaaaagtaaaagcaaaatcaagctgaatgtatgtatctaagcgaaatatatatatatttaaatgtaaacataagatgtctcgacccaaaagcaggtccaaaaaaaatattaagggcctggggacgggccttagaaattgtctccccttagaagataataaagaaattgtctgaaagaaaggaaaagagactgtaaatgtaaaggaaaagaaaaaattatagtggtgaattggttgaactggtcggcctaatcaatgcggggaggaagacgaggaccccagctttcttcaagcaaagcgtcaagcctttcttcttctcccggaagcgagcgagggcttcctcaggtttgggataaaagtcnnnnntgatgctctggccattcgactgccaggccatgtagacgccatcgtcaaaatgcttgaggcagtgcttgcaggagactggggtcaggagctcatctcttttggcctttttcaaggcttggtccttaaaatcccttagctccttcaccttcatagtcaggttggccgtcgactgcaagtnngcctgatgcagctcctccaaggactttaacttggcggccatttcattaatagcctccctggcttcccgcagctcgcgtttggccttggctgtagcctcaccctccgccttcagctcctcccgatgcctcgcctctgcctgagcgtccctctgctgggcctccacccggcgcttggcctctgcctgagcttccctttgctgggcctcctcctggaatgccctcctctcagccgacaggtcccgcaaaatcctcacggcctcgtccatgcccctaaatttggacataacgaacccgtgatcgatcagggtcatggaaaggcgtccggtctcggcagtaatttgaaaaaaggaaacaagaataaaagaagggaataaatcacaagaactcaccgcggccagagcagcgctgatgtcctgaacttagtaaaccaagttcactgaggcgcaagcagcgtatctcttggctgggaattgagtcagatgggagacaaactggctggtcatctccgaggcgaagggagc

SEQ ID NO: 137174 - DNA, 690 bp, Cannabis sativa
tgttacattgatattttttttttaatttttttttctagtgtatccatttagttataacctcacaattagaatataatttacttggtgtcaagtgtattcttggatagaggttctactgtatatatataaaacgagcttcttaaagatataaaattagttacatgcaatagttgtgtgttcatcgtgacatttgttgttcttgtagtggaacttttgaaaactgttcacggcactaaaaagttctcccttctcaggattagcctactttttatacataagaaaatagaaatatattattcaaaaattattaatttttaggcaataatatttataacatcataccctgcccaaaatgtggccggctataaatcttcatctggtctcagttgttcgtattttattcaagtcttgcctgtaatttaaagtaaatttactgttaacaaaatacaaaaaagcataagttaatggagattcaactatacaattttaactttctacctgttgttttaggtctttctagtatacaatgattctgccaacagtaccttcggtgtgaccctctctcttgatgtgatctcctatttcactaccacaaaattcactattcacgtcggtcaacgcgactgttcatcgcgttgaccgacgtgaatagtactatattcaatatattcgtcacttttaaaatgtcac

SEQ ID NO: 137175 - DNA, 749 bp, Cannabis sativa
  modified_base (287)..(302): a, c, t, g, unknown or other
  modified_base (693)..(706): a, c, t, g, unknown or other
ttgagccaaaatttgtatttattcctctaagtgtgcttgctaatcactcaagatttttcattgtttcatcatgcttcttgagtgagtttgcttataattctaaaattgtaatttttcatttttcagcgttttctcaatatttaggttttagtgatgctattttttgataggaaaacttttactttcaagtctaagtccccaaaagtgatttagtgtatcacttatcagttatgcgtatgttgtgacgtagggacttgtaaacagtcgagcagcagttccactcaggnnnnnnnnnnnnnnnnaatttggaatcgatgtaagattagtataatgatatgcatatatggttacatatttaatgtatttttatgaatgcctgttagataacaaattaataatagcggcattagtgtacatagagatgcattgaatattgacagttaaatatttggtagagtactgattgacgctatcacatcaaagagtaccgagtataggatgatattatggttaacaatactgtcgtacgaacgttctagactcagtgagtgtgggatgcaggatagggttatgattgggtgtatgtgcgcctagttatgatttgattaagttatgatatgattatgcttttcttactgagtctgtcgactcacaattattagttacatgtgtaggtaagggcaatgctaaggnnnnnnnnnnnnnngaccgagcatatgagattgtacatatcggggcagttagacctg

SEQ ID NO: 137176 - DNA, 701 bp, Cannabis sativa
  modified_base (32)..(69): a, c, t, g, unknown or other
  modified_base (233)..(236): a, c, t, g, unknown or other
  modified_base (656)..(660): a, c, t, g, unknown or other
atcatgtcactaggtttatacacagatgaaannnnnnnnnnnnnnnnnnnnnnnnnnnnnnnnnnnnnngacctattgacaattgaaccattggttaacattagatcattggatctgtcctcaagttaaccatgtcaatttagatcaaataataatagattttgtaaaacaagttttaataataaacaatataaaagatacacattcaacaaattggatagttggatataggnnnnatttaatttaaattaaataaataactaaataatttttgaaaagtctaaataataaaatattattttcgacaatattaaatttaaattaaataattaagttcaaaattaaacctatgaatttaaaaaattagattttcaaaaatatgctaacaacttttcaaattttatgttattttaaaataaaattaaagtaaattaaatatccaataaaataaaataataaataaataacatttatcttattttataatttaatttaaataatataacaatatttgaaagttagcaaaatatctggttgtattttaaaatttctagatttaaataatcttactttaaatttcaaataaggtcattttataaaattaattaaataatctaataaataaaacatctgatcttaaatttaaaaataagatnnnnnaatcaaattttaaaataagataaccaactaagcaaaaagat

SEQ ID NO: 137177 - DNA, 686 bp, Cannabis sativa
atcagggtacgtacaagtcctcgctctatgggtttgggaagaacgttggtgattcctagcgggtgatctccgttctcctggctgagttccgagatcctcctcattttcatgatagatttctcattcatcagtttctggttgtctcatttctagctgttcatcctgattctcagggggtgtctcagtttccctaggttgttctttccaggccttttcctgtctcctggtttgtgagccacgaggtctgcctcgtggtcttctcactctaggttcaggttgattttgagcgttcatcccctgcgccgccttggccgaggctgcctctcgttctaactcagcatattgacgttgcgcctcttctagacggcctatcaggtggcgactttccgtttcataagttctttttcccacagattgggcacctccacggttgagctcttcatccctcgtcccgagattctgaccattcccatgccgagttctcctcgagcgtgttgttcgcgtactaggaccaatgtcgggttgagttctctgaggacgtgtggtctgagcactgggaccatcttcaggttgggccatcctggaacgggtgatccttttggactgcggattagttgatcttttggagcccatgggtttttttccaggacgatggttagtttcctcatgtcgggtgttaatattct

SEQ ID NO: 137178 - DNA, 539 bp, Cannabis sativa
tttcttaacttttgtcatcaaaccataaaagcagaaaacactaaaatatttttagagtaatttgaggttaaattttaatacattgttatttttacacaaattttatttatttatttattttttgcttaaagttcttacacagctaattctttgggtttatttttttttttattgctatactcttgtaaggaaacgttatcaaatataaggtctctcttattatttaccattacatgtacacgtgatatatactcttgtgaattattagttagttgtgtgtgatttttttttaaatgaccgattttcattgaaaaatttataaaaatattgaaattttagttaatttttacaaaaatattgtcatacgaaattttttaaaaaaagtcctgtatttttataaaacaacaatgaaacacaaaacagaacaactataaataacatttaaacgactaaaaaacaaccgtagaataacagtaaaaatttaacacaatacacagtatttttgaaaaaaatttcgccccgcataaaaaaaaaaataa

SEQ ID NO: 137179 - DNA, 722 bp, Cannabis sativa
taacatatttttcatatagtgaaaaataataaaaaatatataataatgatagaataaaacaaatatataatatatgtttctaaataatttgaaatcgataaataataataaaataggttataaaaactcataattcaaagtattctaaacttacttatctatttatctttatatatatatattcaataataatatatattgacaataattaattaatttaaatttcttcaaattatgttagataatgaaaatatttttagaaaattaattaacttaagagagatatggactgttcagtcaattacatatttatgacattaattaagtacaaaaaatgagttgaaggctcataagagtatatatacggatttagagatctagattgtatgattaaaggataatcatagttctttttgaaaatgaggtgatcaaccttagtagaaactttaaaattttataaacaaccgcacacgaagcgcggtttgtttcccagttatatatataaagaattaaaccctagagctaattgtacatctctttttctcacaaccctcttgcgcctcctatctctctctctaaaatctcaacattttttttgcttaacactcaaagactctgctttaggaatagatgatctgaactacattggccatgatcggtgtttctcgataccagtagccaaacaaaggcctagaacagcctctctgctactcaaagcattg

SEQ ID NO: 137180 - DNA, 1757 bp, Cannabis sativa
  modified_base (189)..(199): a, c, t, g, unknown or other
agccttgatcttgtctatggcttcattggtcttttgaactaatttcgcacccaagtacttcctttctccagttttgtcccaatggattggggactgctcctaccatacaacatctcataaggagccatccttattgcactttggtagctgttgttgtaggaaaatcaatcaaaggcaagtacttactcnnnnnnnnnnnaaagtccataacacaggctcgtaataagtcctctagtatctcaatggttctctctaactgcccatccgtctgagggtgaaaagttgtactgaactttagctttgtgcccatagctctctgaagacttacctagaattttgatgtaaactttggatctctgtctgaaacaatggatttaggagctccatggagacgaactatctccttcacatacatttcagcgtactgatccactgtataggtaatctttactggtagaaaatgagctgacttcatgaaacggtccactatgacccatactgaatcatacattcccgtggttctaggcaaaccaaccacaaagtccattgcaatatcttctcacttccattcaagaagggctaatggttgcaataaccctgccggcctctgatgttcagatttgatttgcggacaggttaaacactttgatacgtattataccatatctcttttcatcccataccgccaaaaatacggttttaaatcatgatacattttggtagttcccggatgcaacgaataaggtgttgtcgtgggcttcatcgaggatctccttcttaagtcaccattatcaggaacacaaactcgagctctatataataacattctgttattcgagattgaaaagtccttaggccaaccggccaatacctcatcttgaattttgactagttcagaatcttccaactgcacccttttgattctttctaacaaatctgattgaagtgtcaagttgtgtaactttcaaactacaaactcaattttagccttaaccatttctgaagctagttgaggagctatcatcacggtgttaaaaacctacccgggacctcttctacttagagcatctgccataacattggctttcccagggtgagacagaatctcgcagtcgtaatctttgatcaattccagccacctctctacctcatatttgaatctttttgagtgaagaagtatttgagactctgatgatcagtgtaaatctcgcatttttcaccataaaggtaatgttgccatatttttagagcaaatactatagcagcaagctctaaatcatgcgttggagagcgctgctcataatccttcagttgacgggaggcatagactataactttgttagcttgcatcagaacacatcccagatcctgtctggatgcagcacagtaaacaataaacttttcttgatctgatggcaaagctagcactggtgctgttatcaatcgttgttttaactcctgaaaacttacttcacatttatctgaccatacgaaccgttgattcttcttagttaaatcagttagtggcatagaaatcttagaggatcctttgaaaaagcgtcgatgataccctgctaaatcgagaaaacttcgcacttctgtcacagattttgacctcggccaatttttcactgattcaatatttcctgggtcaaccatgatttcgtcttttctgacaatgtgccctagaaaagacacatctgacaaccaaaattcacactttttgaattttgcatacaactgatgatctctgagtc

SEQ ID NO: 137181 - DNA, 552 bp, Cannabis sativa
aagtgactgagatcaaagattcacggggaccttctggtctgaactatttaagcttcttgggtcacaaatgaacatctcctcgagctaccatccacacaaatgggcagccagaatgattcaatgggatgttggaggagtatttacggcactttgtcaatgccaaccagaagaattggccgcaactactagatgtagctcaattcggtttcaactctcaaaagagttcttcatcgaacaagagcccttttgaagttatgaatggacaacaaccactgttacccaacacagtggatgagtaccacggacggaatccacgggccttcaattttacaaaagattagaagaagaacacagagattgcccaagcataattagagaaagcatcgcaaaaaatgaagaagtgggcagatcaaaaacgtcgaccgcttgagttcaaagcagttgacttagtgttgatcaaactatggtcagaataattgagattctgaggggacagggacatcaaactcgtgcgcaaatatgagggccctgttccagtcatctccaaaattg

SEQ ID NO: 137182 - DNA, 594 bp, Cannabis sativa
  modified_base (536)..(540): a, c, t, g, unknown or other
atggatgcactataaacaaaatacggattagattggatgaacactcttagtaattctccttgactttctgataattcaaaccaatatctccaatagtatttctattaaatttcattaaacaatgttttagcctagatacatacattttaaacccttggaaaataaaggtttattccaactctccagagccacctccttgaaaacccttacatatttttacttaaatattacatttttttttattagcaaatattagcacggtgattaaaaatacataacatgccttagatattaataattataaactgaaggaaaaaatcattataatacaaggtaatgttataaaataatatagaataatataaaatagatatgaagaaaagaagaagaagaagaagaagatgatgaatagagaaagagaaactgaataagaatttctcagttgtttattccaatacggtgaacgcctatttatacaaaagtattgactaaaggaacggaaaactaaatcaatatgtaataaaggaaaatacaannnnncattaatggtgataattaatttggtgatttagacatccataaataatatttcat

SEQ ID NO: 137183 - DNA, 904 bp, Cannabis sativa
tcatggtctcgggtccgagtctagctcctcgtctctggggtcggattctgggtctcagtcccagttctgatgcccgtgtcctaggtccaagtccccaatccaggttcaagtcctaggtcccgatctaagcccaggaccctatcggggttcaagtcctagtccaagtctggttcagatttccgatcttggcttgggtgaagatctcggtttgagtctagctctaggtatgggtctgagtcctgagtttcgatctaggtcgaggttccaaggcctgggtcaaggtccgagtcctaggtctcggtctaggtccatgttcgggtttggatcctagtcctagtttcgattttgatttagtgtctgggttcgggtttgggtctgagtctaggtcggggtttgagtcctggtccgagtctagatttaggtccagatctcagtttgggtctgggttcaggtccaggtccgagttcgggtcccaggtgcgggtccaggactgggtctgggtcacggtttgggtctggatctaggtcccgagttttgatcccggtctgggtgtgggtcacggttcgagtctaggttcgtatccaaatccctatctaggtctgagtcttggtctgggatcaggtcctaggtctaggtctgggtcaaggtctcagtcccgatctgggtacacgaccgtgtctaggttagggtccaagtccgagtgcaggtttcggtgcgtgtttggtactggtccttgtctccagtcttggcctagtctgggtctgggtcacagttaggttctcaggtcccatgtctcagtatcgggtcccgatcccagtcccagtctgagttttagtcctagtctaggttcaggcctcgatcctagtctgggtctaggtcctagtcctgatctaggtccgtgtcc

SEQ ID NO: 137184 - DNA, 1234 bp, Cannabis sativa
tgggaataccagttcagcagccaatcaaagcactcccaacactagaatcccatccacaaccaatgctcagatgatggtagtggttgacactgagattcagaacctctgtaatgcccttggactcatgcaaggtcacactagaaccttgcatcatgatcaagaggagcttcgtgctgcaatgaaccttgcattcgaagagcatagacatcaattcattgcgtggagggatagggagatggaaacattgaaggctcagcaggcagccattgatgaccgaacaagaccggccaccgtactaatatggaaagcctatcaagttgctcattagtaaccagttcctacgtctagtatcccactcggcggcacagaagagattcctactgggcatactgcccaaactcataatggtcagccgtccaatccatggtcataggttccacctgtgggccaagtggtagcggccagaccctatataaccattctttaggtggagttatacctaataactccatccaaactgatagttctggtcaacaaactggccaaaccggtcaatcagtgaggcctcctggtgctttagtattcaatagattgggtacgacccatgatctcaggaacgatttgaataagagaagaggtctggatgaacaatacgttcaaccggccactcagccaggtatccgcatccaagatccagctctaagagaacctgacgtgacacaggtcaatcaagaggctgaaccggttcatccatctgtgcaagcacaattggatgaattaaaaaatatgttccaaggcatggctgaccaaaaactcactgatctcgagctgaaccgagcacacgggtcaccctttacacttgagatcaacgtcctagaactaccccttaagttcaaaatgccgacctggaagatgtaacagggaaggaggatcccttgtcacatcttaaatattttgaaatgcaaatagatttgcaaggggtaagaggtgatgcacggtgtagggtattccctgccacacttttagaagccacacaacaatggtattttaagttaccaccaagaaagttcaattcatggaaagctttctcctcagtgttccatgcgcagttctcttcttctcgccaactcccattacatttaaaagacctgctcgaggtgaaacaaagaccaggagagcctcttagagcctacataagcaggttcatgatagaagctacgaaagtagcaaggtt

SEQ ID NO: 137185 - DNA, 1799 bp, Cannabis sativa
agccgtcactagactttattgatcatagcatagtaggtacatattggaggttgtgccgtcagactttattgcgtatggcagtttcaatacgcctcctcccatgcaacattaaatgcgagatgactgttcagataaaatctgacacctgccggaggtgctttgttgccatcttgctctccaggagcgtacgagacttacatgccttctccgggaggtatgtctaaggtaatcctgcgctttaagaagacttagctattttattcaaatgctaaaccctttccatccacgtgtcatcatccggttggtccacgtatattggacaaaattaggggcaacacttactaatgaataaatcataaataattcgaaattatggacaacggtgaagtcatcgattatatttctccaacttatcgagaaatattttcatgagtgaaagaaagattgagaatctatatatataaatatatatattatagaaaaagaaaaagtagagagaatattgacaataatttataatatacaaagaaatatattataaaatatagagaaaagaaataccaatagaaaatcgatgttttgatgttgctcattgatatcactactactgctcattattcgtcaagaattaaaagttggttaaactctttagcacaaaaaaaaaaaaaaaagaaagaaagattgtaatatatcaaaaaatatattataaaatatgaataaaataaataccaatagaaaatcaatatctttatgttgttcattgatgttactgctattgctcattatttgtatagaattaatagttagttaaaactctttaacacacatacaaaaaaaatgaaatttgagaaagatggagaattggcattaaaaacaaaactaaagaaaaaaaaatacactaagaaaaagaaaaagaaatatgaaattaattttaggttcagggttatatatttacaattatataaggagaaaaaaaagagttaggaaaatacattaaaaagaaaaaaaaaaaagatatgttttggttatttatttttaatgtagtttcgttagtttttttcttctttttttaactaaaaaattaaattaaaattccacgtagaatggtttttttttaaataatataggaaaaaatataaataaattacttaattgtttttagagatttttattataattattttagataattaatatttataaacctattaaaaaattaaaaaatgagagaattaaggagagaatagaaaaaactatttagagtgatttgagagtaccacatcaccgcattataattttctttatatatatataaatatatagattgggatacttctatttcattccatctttatgttatatttatttcaatcttagtcatcagtaatttatattgatgtaaaaatcataaatctctaatacataaatctggttgagtttttgtgattgaaaagctctgtttacatatgaatttgtgattaatctaattgttaagttatcatttggatttgaaatttttacaccaaaaatctaatttacacaattttttataaatatacccctacacgcttacctcatcatttttacctttcctctttcttttattacaattataccacttacacatcatttccatgcacagacacgtgtgccttccctatcatccatcaatcaacttccaatatcttccctatctttttttcttttcttttcatttgatttttgatttactttcagtttttttttttggaagatcaataacctccattgttgaagcataactacccactattcatcac

SEQ ID NO: 137186 - DNA, 936 bp, Cannabis sativa
tgtaaagagtttagggtttagggtttaaggtttagggtttagggtttaatggtccgcttccagttccggttctaatttcgggtcacaaggtacgatttaagatttgggtgtggatcatggtccgagtccttgtttgggtctaggcccgtcttttggttcagatctgagtcttggtccccaatccaaacaccaaccacatgtctagtctagttcgagttctgatatgggttctggttttagtctgggtctaggtctaggtcaagatcgaattccctaatttagacaccgactatgggtcgggtccaagcctcgggtcttgggtcttgtacggaatcaaaatctagatcctggtctagttctagctcatgtcttgggtcctggttcggttcttaggtccaagtcatgggtcttggtccccgattcaagtcaaagtggtagttcccagtcttggttagggtcccagtccgcgtgtaggtcctggtatgtgttcagtaatggtccttgtctcgggtcttggcctggtctaagtctaggtcacggttcggttctcaggtcccaagtttgagtattgggtcctaggtcccagttccggtcccagtctgagttctagtcctagtccaggttcaggtctcggtcctagtccgggtttgggtcccagtcttgatctcagcccgggtccaagtcctgggttcgagtacgagttatagtactactccagatttgggtccgggtctaggtctgggtttgggtctgagtccgggtttcagtctgtgtcttggtctgggtcttggtctaggtttgggtctgggtctgatttcttgtacgggtctaggttctgttccaggtctcgagtcacgggtcctaagtcacaagtcttggcgcaaatctgggttcgggtttgggactgggtcctggtatcgatcccggtctgggtct

SEQ ID NO: 137187 - DNA, 750 bp, Cannabis sativa
ttttgtattgtgttgtattgcttaagtttaaaggtgtattgtttatgttgaatgctgccaattaaatgttgttgtattatttcatattataattatatatgatagaccgcacacactatatgttatggtgcgacaccgtttgaaaaatggctcaaaccgaacaaatggtggtgcggtctagtaaaaaaaatttatactaagtacttaaaataatattttattcatatatacatctatatttacatattatattttatatttttatagaattttttcaattatatttgtatgagaatctcatcgaagcaacatgaaaataataagtaaataaaatagtacaaatataaaacaacatcaaaataacgttcaaacaatatagtataatgttgtcaacaaataatataatattgttgtaaaaataaagtaagtaaacaaatctatctatctttttttaaaaaaataataaatctataaaatgttaaaaaagtaatattgtagaaaaaattcctagtgaaaaactataccacaaacatttctattttgttttttgaagtcgagccaatattcttcaaaaaaaaaatgcctaagaaagttttatttgcactcacaaaatagtacaccttggaatttaaataaaaaaattacgcttaaaataatttttaaaatcacttttattattttttattaatttttttttcaaattattttatggtaattttaatacttatttttatgggaaaaaaacaaaaa

SEQ ID NO: 137188 - DNA, 596 bp, Cannabis sativa
cgaaattcactcgacaacattttatttataatactatataatatatagtgttataaataaagtcttttaatcttttattaaaataaaaataaatatctaattttagattcaaatataataaataaatcacttgcaatttgaactagttcaatcaacaggctggaatagctagtttctgataactcgtttattaattattccacatgcagtgtgtgttccctcattaattaaactactactttaataatattttgactttaattaagatttttcatgtaactttaattgaagtaatatctaaatcaaataataacagctcctatcctagggggcctcctcgggatccacacacacgagactaatgtctaatgtcaagtgaaagactcttgctgcaataacacaaaattctaataaatcaactaaaattcacatatcatcaacaattcattcgactattcttaaatattgtttttttttctataaatatttatatttaatattattagtaaaggtgtttattggatcacatccaatatttttggacctatcgagctacgattcaatcatatattggatattagattttaccatccgat

SEQ ID NO: 137189 - DNA, 1087 bp, Cannabis sativa
ataaaacaagttgtgcattccaatcaatctgttgtcttgatcttcagatcaagtgtagtatatttgactcaacccaaatttttggtatcatgttcataaaacatcctttactatatgcattactcatcaagggatacatgaaatctttactgcttattaaggacatctgtaaaaacagaagatataactctcattctattaaaaatgaacaagagataatacagtgtagaattttcttcagctgaataactttctggtatttcaaattttcaaagttatgtattttaactgatgaagcttgaattattatagatgggtttttgcactcttctagaataatttctctacccccagagtaaccaccatctcgaattttatgagttgatgtagatataaggactactaatatatgcatccttagtatataacaaataggtcacattcataaatctttcttgactgtcccttaatgctccttgttttgattacatctcagatggctcccactcaacagtaggagtcttgttaaattcatacataaaagtacatttaacctcttactattgattcaagggaaatcttgttgtgacatattatcttagtctgaaactgtaagttccttctatactaagtcatcaacatagcaatctagtattttaaattgagtgtaaaatacttgtaaaaaattaagtaatcaaatagagataccattatattttatgaggattaagaattcttgcccaagtcattcgaatagactatgcaagaattctactattttattctcataattttgataaattattgctatctatatgaatggttagatttactttttcagtgatgttcaaaagttcctgtcacaagtgtcaaccaaatgaagatgggaaaagaattttaaaattctcccacactcaaataataaagtagatacaatgtcaaagaactttactggcaccaatttctattacaacagtaatagaacattaatctagatcaagaatttatactgataatttgctaattcattatattacatccatgtttcaaatatgtgtgtcatagagtactgtggtatattgaatat

SEQ ID NO: 137190 - DNA, 715 bp, Cannabis sativa
tggatcttgcccttatagtgaagcacttcaaagtccacaatctttacatggatagaagctatagatgatgagattgagtttatgaagaaaaattatatatgggagttagttctattatatgaaggttttaaaccaataggttgcaagtggattttaataactaaaaaggattaagggacatattgaaaggtataaagcacatttagtggtaaaaggctttactcaaagagaatgtattgattatactaacactttctaacctatttctactaaagattcatttagaattattatcgctttagtagcgcattgtgataaagagatgcagagtgagcaagtctatatgtctcaacttgaaggctactggtttgtaaattgaaatgatccatttatggtctcaaataggtatctcaccagcggtacttgaagtttgataaggttctgacatcatttgatttcatagagaacacgtttgactaatgtatttatatgaagatcagtgggagtcgctatattttttttgttctttatgtggaagacattttacttgtgagcagtgatttgtcattactaaatgagatcaaaaattttctatctattaactttgatatgaaggatcttggagaggcatcttttgttttggggattaagattcatcgtgacaggaatggaaaagttcttagcttatctcaagaagcttacattaatcgtgtgc

SEQ ID NO: 137191 - DNA, 576 bp, Cannabis sativa
cttatttatcattaaaaaatatttatacttatattataatcactcttactatatttacttaattctatgggggcttttttattattttggtttataattatcaaattaaaaaaaatacatttaatttttttgaaaggcaatatttttgttcgtgggggctatagcccccacattgataagagtaggtccgtctctggctctaaattactctaaatacatctatttgttttctcctcaattctctgattattttaattttttattaggtttgtaaatattttaccaaaatataaattaatttttttttctattttatctaaaacatatatttttttattttctaatttattataataataatactaataataatagtaaattaaaaaaaaaaatccctaaacgtatatatagaatgttgttatttttcttatattctaataatttttctataaaaaaaatacaaatctaaaaatcaatattttactattattttaataattttctatgaaaatataaatatttaaaaaaaatagaaaataaaaaataaataccaaaaaaaaaatattaaaacttaaa

SEQ ID NO: 137192 - DNA, 528 bp, Cannabis sativa
taactacataaattgcaattatattttaaaaatatggtggatctattataaatcaaaaatatgacgttgtatcttaccgtttttaaaataattatttttttccttttgatagtgtcagcccatcacattcaccttccaccaggtctaataattttgcaaaaagatcatgatccacaattttcttagctatttttaaaactagaatgtgttatttttgtgtgtataataatatataatcaaatgattattaataaacttatccaagaaaaataattattaataaactatgtgacttattttattttattgtgataaagtaaaataaatatatatatttatattttctatgaaagtaatgtaaaattatcttaaaaacataatataatataaaaatgaacatatagttttaaaaatgactactcaaaatatagaaggttacatatatgagatatttttatttatcgacatcataactaactacatccctactcattaattttgaaaataaacttaaaagttattcaaatg

SEQ ID NO: 137193 - DNA, 513 bp, Cannabis sativa
tccccatggagaagtactatgtctgatgtaacccttatccattaactcccctaattgtttcttccattcagccaactctgtaggtgccatgcggtaaggcgtaatagagactggttgagatctgggaatcaaatcaatgcaaaactcgatctccctatcaagttgtaaccctggtaaatcctttggaaacacatctagaaaaccactaaccactgatatccaagggaactagtctaaatccctagactcatcctcaatcgcaaatagattcccataacactctaagtttctctttccacctaagcatgtccttaagataggattttgtctcaaggcactcatgttggctcgataaacaatgaaatcaccactaggggttaaaagagtcacccttttgcgtgaataatccacaatagcttggcatttagacaaccaatccatacaaagaattatatcaaattgccccataggcaacactagtaagtttccagacaacttgtgtccctcaaacac

SEQ ID NO: 137194 - DNA, 560 bp, Cannabis sativa
gaaagtcaccggagtagatgccgatgtattagtcgttagagttgctaccaacgccataaaatttgttagatttaccattgtcgtcaaaataccgaaaaaatcaccaagaaaaaactggtttcttcatcaagtaactggtttcttcatcaagaaaccactttcttggttatttttccggcgactatgccaattctgatgacttttttgaagtttgctgtcgatgctgaaaaagtcgtcggagaagctgctagcgtcaaaaaagtcgtcaggattggcattatcaacggaaaaatcaccaagaaagtagtttcttcatcaagaaaaagaaactggttttttgatgattttttcagtaatttttttagcgacaatgccaatttcaacgaattttctggcgcccacagcaactctaatgacttttccggcaccgactgctactcctacgacttttccgacaccagcagcaaactccgatgattttttcggcatcagtgacaaataaaacttcctgaacaaataaaaatattaaatatggaatttgaaaacctaattatatatat

SEQ ID NO: 137195 - DNA, 559 bp, Cannabis sativa
atatatatatgaaaaaaaaaattgattttttatgtggtaaaagacaatataaataataaatagtgtaaatgatcattactctacaaattttgaaatgagaacatttacttatatagatttgggtcatttgctacaatttttctaaaaggttacaaatcaaaataccataaaagaagtggaaaaaaaaaacaagaaatcaagtgtatgtttggcatcgtaacaaaaaaatattttttgtatttaaaaacaaaaaattatttttttaaaaacagttaagcatgtttgacattgtttttgaaaatagtttttaaaaaaaaaagttaaagaaaatgaaaattttgataacaataaatgttgttttctgttttaaaaaacaattcattttttgtcaatattttttcttcactttatctcacatcattatacatatcattttgtcatcatatcattttctcttctatcactttctctctcactattttctcaccttattttctctctcatcactttctctctccttattttctcactcatcaagtgttgcgttttgtgccctaaa

SEQ ID NO: 137196 - DNA, 518 bp, Cannabis sativa
ttccaattcaatccatttaatattgtcgtgacatctcttaccaaattgtctagttacccacggtcgccagaccccaaaatattttaatttaaagatggtatccatgatacccacatattctgatataatctccgtaattaataaattacgctttattggatcatttaataaatccacaacaattaccctaagtaagatcataatcttacttcatacctaaataattacatatataataaaatatgtctaattaaataatatattaatttccgggatattacaactatctcctccttatagaaatttcgtcctcgaaatttattcaaacaactcgagacacagctcccgcaactgcgacttcatctttcaaattgcctttcaatcttattgttctttcacagcactagaagtagtgatatagtcttggttctgcaacactttctcttttctgttcaaaaatctataccgattgttcctcatgtaacaagtctgtttgaaattcaatattctcccaactc

SEQ ID NO: 137197 - DNA, 674 bp, Cannabis sativa
ggtatccatgggagaggtcttgttcatcccctggtgtcgaagcagcagaagaggtcttcttagtgagagataatgaagcattatagcactcgtgggcagttccttgattggcaaagagaaaatcgataccagccgtcatttggaacttgacggacaagtggtatattgatgagataacttgaaggtcatataggtctggcctttcgagcatcagattatatgaagacttcacatccaccactatgaacgtgaccatgatggtggtctaccttggggtagtgttgattgtgagtggtagtctgattttatcacatggggcaataccagcttcgttgaaaccatacattagctatttgcacgactataggtcttcaagtgaaaagcccatccaggttaagatttgtttgaataagatgtttgaggatgctctgtcatcaatcattacccttgacaccatcatgttggctatctacacctcaacaaccaagggattgttgtaagggtagttgacatgataggagtccatacataatattgaagagtagcatgtttctgtctgatgagaaatttaatctcatcctgcaactgattacactcatttgtattatgaccgcaattattgtgatagcaacagaattttttcatgtccatcttccttaactctttgaagggaa

SEQ ID NO: 137198 - DNA, 589 bp, Cannabis sativa
  modified_base (544)..(547): a, c, t, g, unknown or other
ggccaaggccaccctaaacatactactacatccgcccctggaggtgcccgtggcaactccatattaatatatatatatatatatatatatattttacaaataaaaaaggttaaatgattataattaataaatatcatttttaagtgtaaaatgatgtagttaattcagccaactatgaataatgtaattgtttgtatgtaaaattttttgctaataatcaaatacgtaaaatttcactatatatttatattttatattctaatgtattataatgcatttttacaatagtactttttttgagaaacaaatgttaattaatgtattctttcgtatttacagtagtaattgtataattatattattatatgtatgatagtgtatattatagctatagtaaattatttgttaattttagaatttttaaataagagtttaaaacgtttgtttcactcttgaactaaaatacactttattgctgacatagcaaataattcaaataaaaaaaggtgttaaaatagctactatgggctcgtttggaacgccnnnntaggtcgtattgtattatattgaattggattatatatcatat

SEQ ID NO: 137199 - DNA, 1100 bp, Cannabis sativa
aataaaaaagccctttaaatttattatgaccgtataaatgaaaaaaaaaaacaaaaaaaactaacaataaatgtataaatggaaaaagtcctttttaagataagtaaactaaaattatgcaaaaaataaaaagttgaacaaccatatcaagcatttcaataatattaagattctcaaaatacttattccatatagtcaatattttgatattcttcaaggctaaaataattattaaattattttgatattttgatagtcaatattttgattattaaattattattttacataatgtttatttttatttatattatatatttatttttttaattttatatacttagtgttatgctttttttattttatttaatattactatttttattttatatttttaaatatgttagtgttttaaatcaattattatttgtgtgataaattataattttaagactaaaatgtaagattattttttaaaataaaatgatataaaggttaaaccaaaaaaaaaaagttttacacttaattggtgtatattgaaaattcaacactactaatggtatatcctgataagcttaatggtaaataattagggtttatattaatattttgagttaatcaagtaataagtgagattaggatcctactaatttagttcaacataaattttaaatctgctataagtgagtaatttgcactatagccttactttaaaacataatagcaaaatactctttttcactactacaaaaatgattttcctgacatttttaaaacagtcgtttaaagtattcttgttggtttttataaccgtcgcctatacgaccgttgcaaaatgggttaaataggtgacggttaacaaccgtcgctaatgtggacttcccgacggtttaaaaccgttgtcataaccatcgggaatgttaatgaaaagagaaaaaaaaatacagatttttctgtcattaatggcaaaaaaatctgtattttcccctatatttttcctgtattagatttataattttacctaaattaaaataaaacaactaattaattttattacaattacaactaactttaaaacacattaaatttatataataaca

SEQ ID NO: 137200 - DNA, 932 bp, Cannabis sativa
ccttaccggtttttatggagaaccacaaagaagcttaagaccgaacacttggggaagaattcgtcaactttctagggagtctacgttgccttggtgtatcatgggggatcttaataatgtcttgtctcaaggtgataaacgtgggggacgtccttatccagggtggcttgtggatggttttcaagaagttgttgatgagtgtgagttgctggatatggagttaattggccatccttttacttgggagaaggggaaaggtacgccaaactggattgaagttagacttgatcgtgctcttatttctaatgcttggaattctctttttccggatgcaaagctttttaatatggagatctccgcttcagatcattctccactttggcttgatcttgcttttcaaaaaccggtggtgtttcttaaaaggttccggtttgagaatgcttggagtagggagcctatgtgtagacagattgttagtgacaattgggaaatgcataatgaagatcctctgcatcagaaaatcaagtgttgtagcacttcccttgctgaatgggggaaagatataacaggcaacttcaaggatcgtatctctcgatgtaataagcagctgaaacaattgaaggggcgcagagatgatacttcggttcagaaatataaggaaacacatgcacaactgtttgagattctgacacagaaggaggtcttttggagacaacgatcaaagcaactttggctacaagcaggagatcagaatacgaaatatttccatgcctgtgcaaatacaaggaagaaaaacaaccagattgcttctctaatgacaatggtgtgtgggttgattgggatagtggcttggctacagtgatggttgactattacaaagagcttttttctgcttctgctacaaattgggaccgagtaactgattgtgttca

SEQ ID NO: 137201 - DNA, 505 bp, Cannabis sativa
acctttcgcggatcctgcacctttttctttttccccaggatggaagtaggattttttcgttggtttccttcagagggatatcgtatgggactaggctcccttgacttatgcttctgagtgcttggggaggactcttctggtgtttcctcaagttctgcagggatggctttttgcatggcgaccatcacctcttgcatccttttgttttgttctttttgggtagtgatctcagcttcatgatcagcagccttttgtcttaagcgtagtaattctgtgtaactgccttcgttgtaggcgtcgtactcgtcaactttttcctcgtactcatcatcattggcctcctctcgctcctcggatgccacgttgactcttgaggccacttcctcatctttagggttttgggcgtcttgaggaggacggggctgacgtgtcttgggactttccaccattgatatttagcttacaaggttgttgtctacttgcagatgcttccttcagctctcaa

SEQ ID NO: 137202 - DNA, 928 bp, Cannabis sativa
tttaagagatattcatatttaggatgtttattcaacatacttgttagtaaatatagatcctggaaaatttttcacaacaactggccttagagccatggtcatgatctactttcatgaaatatggatgtaaaatgatgaatattatttttgtgttgatttaaatgtgttcatgttggtttatgtgttttttcatgattgaatgtgttctatgaagtttttccacgaaaataaatttattttcgtaataaaaatattttatttggattcgttgtgaaaaattaagcaattttagtttttatgtaactcgattcctataaaaattgaaaaagttatgaaagtttgaaattcgggtgcccatgcgtgtcgagcatggtgctcacacgcagtagatgcttcggataaggcccatacgcgcccgcatgtctgggatgcattgtgtctgaagacacggaatgaacgccttcaaacacgcttgaggctgcattcatgccaggaggaccctgcatcgcccaacgtttcccacacaagggaccttactgcagccccagtctgcacgaggatatggctgcttgcagactattttggctgcacgtgcagccttgctggcagccacacccctaatgcgaattttgaaggattttttcaatttttccaaactttcccaatttgaaaccctaaaattcaaaataaaatataattttaatatatttaaacttaaatatcaatttttaattaataatatttaatttttaatagattattattaattttttttttcatattttgaggtttaaatttaaaaattaattattctatttttttaattatcgtcagatttcaaaaatttattaatttctttactatttatatattatttaattataagattggatattttaatatcagccatattttaaattaaaagata

SEQ ID NO: 137203 - DNA, 502 bp, Cannabis sativa
  modified_base (65)..(73): a, c, t, g, unknown or other
atctataataaattatttaaatagctataaataattccataattaaacataaacaactgctaatnnnnnnnnnaactaagcgggctttacatattaattctgtttttttttgtggccttagttctgtttgttagtcattaacctgtcaagggggagaatgttagtgtcgttattttgtgacagtttttgttctgttcaatgtctagtcgtatctgggtttttagtctgttatatctgcactagcttcctgttacgtgagtttcagtgaagtattagttagtgcttggtggacttattttgtggatatataaatagtcggtttctgttagtaatttctttatccattaaatcgtttagacagttatttcggttgtatgtggagatagagtcgtatcttgtttcttgttgttgtgattacaggtcagatcgtggagcttgaggatgttcaacaatggcgtaatgatttgaatctggaattgctgagttcaaactgaagggagtt

SEQ ID NO: 137204 - DNA, 885 bp, Cannabis sativa
tattgaacattataattttatttaagttgtttatatattttagtaccgtgaaaaacaattattattgtatttttaatttatacattaagtatttatataattatgtttgtcttcttttttagagaaaaaagataataattgttagtagttttttttagctattaacaatatttagttacaatatcaattgatgaacaaataattatagatttttcaatattcaacatcttcggggatttgcttttggttattttcttgttgctttatggttgtttctgctgtcaaagtcatagtatcaaccaaaataacatcttttaaaacaaatcccccccttaaaccagataaaagttttttaattgttgttgttgtgttgttgtcaggttgctgcactgtgagtatactggtgattgtcactttttgtcattatcacattgttgcactccattgtttgggtagcttccaaaaaagattgtataaaacaacagacttttgtcatttttaatttagagtggttgcctaagaagaaactaagattttgaagtatggtaaataaaatatgttcatgttaaaataattttttttgaaactgattccctccttggagcagataaaagttatttagttgttgttgttgtgttgttgtcgggctgttgcacatctgagtgtactgagtgattgtcactttttgtcattatcacattgttgcacaccattgtttgggtagttgccaaaaaggattgtgtttctgtgttgttgaatgtgttcacacacaacgaatactgtgtgaaatcagtttcattggttaataactttatgtaaaacaacagacttttgtcatccttgatttggagtggttggcagccttccttcagttggtatttcagt

SEQ ID NO: 137205 - DNA, 1204 bp, Cannabis sativa
  modified_base (247)..(263): a, c, t, g, unknown or other
  modified_base (857)..(866): a, c, t, g, unknown or other
ttccctttatcttgacacgtgtcctccactgagatggcaaccgaattttgggtataacacttactaaatagcaggaaataatcaaatactaaccctaattcgaacaacaccataatccaaaattacatgcccaaagcgatggaacaactaacaaaacttaaaagagtaagttctagggttcttacatttgaattactccacttgattccagttaggttttatggaaagtgttaggttttatgccctnnnnnnnnnnnnnnnnnaatgtaatcttttatattcatttatcaataaagaattatatttattttattacttatttaatatgttatttagttcatgtgatcatttatttgatttataaatttaggggtgttcattggatcacatccaatggatttggacccaaccgatccaatgcaattatttattggatattgaattttgtcatacgatccaatccaatcgaattgagtcatccgatctgatccaatggatgtattggattggatcagttccaaccattggatgcattgattggttttctattggattggattggatccatccactctattttagctacaatttaagttgatttcattaaaaagaaaaaacaatataaaaaaacataatttaaaactgaattatccaatatacataataaacattagtttaacctaattctcatgatctcataataaaaccactaaaaaataaaatttattcaatagtcattgacaattgtattagtgtttaggaagatgagaattaatattttagatataagagttttttttctttaatctcatgtgttaaatgtatattaaataaattaatatatatttttaaataannnnnnnnnnatatataaaattataaatgtatttaaaaatatataaatataattgagtgaaaattggatgataattggatcagtttggtcggttatccattggagcagatgtcccatccaacaaccgacccgatctcacaggatttttaaaatttacatccaatctgatccaattattattggatatccaattctattggatcggttgagattggatcggtcggttgtaatttgattggatgcctttttgcacacccctatataaattcatccaaacccttatcacattgatattcttgtttattttgttgtcaacacaatgggaagtaatcaagattgtgtgattaa

SEQ ID NO: 137206 - DNA, 838 bp, Cannabis sativa
gcaaaaacacggtttttcaaagtagttttgaatgtgtttatatgtatgaattaaaatgctttgtgtattagattataatttatgctttattattatgaatgtgtatatgatactgagagtgtatgattttggagacaatatgaattatgtgaattgatatatattacggttgttatgacttgtatatgttgtatgatgtatttgtatgttgcatgttttatgttgtatgctgtatgctaacgtctcaggtaaagtgagggactatggtggggtatgatacgtagatacggggtaagacggttgaatgtagagataccctaccctgtatttttttaagtcgtgtatgagattgttatggtggggtatgatacagggtaaggccgttgaatgtagagataccctacctgtattatactgagtcgtgtatgagattgttatagtgggatatgatatagtgatgttactgttaaaatatagagataccctatcctataataatggtatggttgtataggcctaggttattatatggacagatcaggcccaagatattgtagggccaggttaggcctgagttatataagtaatggttatgatatgtcaatgttatggtaatgatatttttattttataatattgatatggttatgttatgagtatgatgttaaagttataatctttgtaaatgtgtacggtgtgaacaaatagtatggacctatatgataaaaatttacatgtgtagcgttatttggttatggttataaaataatgtgtatgatattgctaaaacttggttagtacattaatgatatgtgtgatatgttggaaattattttac

SEQ ID NO: 137207 - DNA, 1221 bp, Cannabis sativa
  modified_base (1031)..(1031): a, c, t, g, unknown or other
aattaataattaagttaattttttggaagatacttaattatttatttctatttcaagaaatttaattaaatagaaaatatatataaattgacaattaattttttaattaattttggaccaacataaattaaaatattttcttaaatataaaattagaattaataattaagttgattttattcaagatacttaattatttttattttaatgaatttaattaaatggaaaattatatttcagtttgaaatttttcaatttcagataaacttaaattataataatattcagagtatattttattttattttaataatcattttcccactaatttcaaatttcatttatttattttatatggagatattttgaaattttacaattttgaaaattagattaaagttaaaaattaatttttttattaattttagatcaacttaaatcaagtaatttttatgaatgatttaattaaaataaattgacaaaaatatattattttaattagaaaataagtaattaatttatgaattatccagatagattatttttctaggtaaactttgtggtattttgcgagatatttttaattaaataagaaaataaatatttaagttgattatgttctagacacttaaatatttgatatttttcttaaaagatttaattaaataggaaaattatattaatgttgaaaattaatttatttaattttagaccaacataaattacaataatttttccagttttgttttattttattttatatgaatttcaaaaatgtattatccgtatacattggatttcgaattcaattgtatatttatagaaaattaaatttgagttgaaaattattttttttaattaattttggaccaacttatattaagtaattttcataatagttattggaaaattagtactaaggatggaaaataaattattttttatttttcagatcttcctaaagtataattttacaaatattaaattaaaatttaaatttagatttatctaaattagtaattttaattaantaaatatatgttaaaataaatagactaaaataagtatcaagtgaaaatacaagtctttaaaataatgagctttagttataaggatattcgatccccgttgttggttctacatggttaatttgttttcaatataacctcgagacgctagacttcgtttccctaatggatggttattcgttgaagcatttaa

SEQ ID NO: 137208 - DNA, 1142 bp, Cannabis sativa
  modified_base (1116)..(1117): a, c, t, g, unknown or other
ttctggtcaatttgaattacgtcagcatctttttgagcgggaatttgagtacgggtttcgggctgcatgattgtcgcgacattctgttcgtctactcccgtccttctgtatagatcattccttaggtcatgggttgtccccaacctttcgaacatagaagtggttggctgcctcatcgatttattcgcttggttgacaggtggaatggcaccattgatctggttggaaccatcaggtttgacttctcctaatgaattaccaaacaaggtctgctcgcctaccgctaggcccacgagtggaactcctgatcggggattgggcggctgaccatttgcagtctggaaagtattcattgttggatcttcatccgtctcacccagaggaatgacattcggaggttgctgacctacagtttggtaggctttttgtatcagcacggtagcttaacgactacgattttttgatctctgcatggtgagcccttaacgcctccatctctctatccctccattcggcgaacatacgcctttgttcgtcgaacatgagatttactacagtacgtaattcatcatgatcatgatgtagggtgttgttatgattctgcatgagtccaagagtgtcgcggatattttgtaactcagtggcatctccgatggtcgtctgggcattggttccaggcagaatagttgtgttatgaacgcccttgttgggtgcagaactattattcccagtctcttgcacaccagtcgcgatttcatctataggaggtgttacaccattctccacgttcgccgactgtccaggattaacagctgacgaaacccttgtgttttttgggtttttcaatgcaggatccaccatctgtgaatttgctggatcagtcaggcctctacgagtttgcaccatcgtttttgtggttaagattttgaatagagagcgattcttgattcttctctcaatgaaagcaccaaaatgttgacctcacttttagccaacgacaacgagtctattttaataagcaataagtgatttgtagcaatagatatatgataaagcaatgtaaagacacatgaattttatagaggttcagccctgagcagttcggtaatagcctanncctcgttatttgtattgacttaaga

SEQ ID NO: 137209 - DNA, 785 bp, Cannabis sativa
  modified_base (62)..(72): a, c, t, g, unknown or other
catgcaacataaaaatgttatttctgatctttattaatatataaatctgattatattgaaannnnnnnnnnntagggcacaaaacccaacaggagaggcatagagaaactccatgtatacattatcttgtataggatcaggtacctagcagcttttcttcttagtttgctagcttcatttttgtcttctggcaaggctccggtttggaggtaaggtgcgataggtgtcatccatgttggagtgtcatccaacatgttgacttctttgggacaacaatgttgggttcttctaggaactatatgggtaccaagtttgctttgtcagcaacggtgctgcttgccagacaggcaagtgcatctgctgtggcattctattctctagggatctgcttgatcatgtagcctttgagctgacttaacaagtctttgattttgctcaagtagacaaccattctttcaccttgacttgtgtattcaccctggaattgattcacaactaattgagaattgttaaatatgtccaagtggttagcccgtacttcatgcaccagcttgcgaccaacaatcaagggttcgtatttaacgtcattgtttgaggctttgaagccgaatttgattgcttcgtgtagttgtttccccccaggtgttgtaagggcaatgattgcattggataattagttagtgtagcttccgtcaacatggagtttccatgttagttctttgagattttgttgctgctcttgctctcacttcttctctggctattcttgttgggttttgtgccct

SEQ ID NO: 137210 - DNA, 543 bp, Cannabis sativa
  modified_base (50)..(66): a, c, t, g, unknown or other
tattgacatgctacatatatttaactattatttttatatattttaattgnnnnnnnnnnnnnnnnntttaaataatatttaattagtttcgatcttattacatacaatggtaatatataattttgttgtcgtggtatatatattttattgtatggtatatatttttgttatgtatagtatatcatttatttaagatgatatttagtttctattttattatatataatgattatatttaaattttttggtatggtatacatattataatagtgatatatataactttattagtataatatatattttaagtattaatttagtattattataatttctttgtggtatataattttaggagaattacgtaccctatgtactatttttttaactttttattattttaaatttacggtttgagtttctaaagtggtttctccggtagtttctatgtgggttgctatacgatttttggttgcgatttaggttgctccgctagttgcaatattcgatgtagaattctgtaaaatgcaaaaaaaaaaaaaa

SEQ ID NO: 137211 - DNA, 1591 bp, Cannabis sativa
cctcaatttatgtattctaaatatttaatatatgttcttaccaattatagacattgtaagaaaaagagaaaccttccctcatgcatttagccctataaatagtgatccattctcactataaaaggggtcaaaagaattgatgcagagagatctaagagaaaacacttagagatttcattgtgagagctttgagagaggaaacgctgtattctttgttctcaagtcaatacaatccaatgggagtaggctattactgaactaaaggggtcaaacctcttttaaatcttgtgttctttattgtatactgattcttactctatcttaattacattccttatcgcttattaattaagtcataatcgttggttaaaagcgaggtcaacattttggtgttttcattgagagcaaaacttcaagtttgctctttgccttaagttttattagacacacaaaatggtggctcaaactcgcagaggcgtggttggtcagagtgacccactatgaatagatcttgcattgcagactcctaggaatgcaagggtcccaccaggtaccaatcttgaacaactaaacacacagccacctactgtgagccaaggtgtgacatcccctctggttgggatcacacccggtgtgcaagagactggaaacaccagttcggcagtcgattagagcactcccagcactgaaatcccattcacaactaatgctcagacgaaaataggagatgatactgagattcaaaacctccttagtgctcttgaactcatgcaaggtcacactaataccttgcatcacgatcaggaagagctttgtgctccaatgaaccttgcgttcgaagagtagaggcgtcaattcattgaatgaagagatagggagatggaaacattgaaggctcagcaggcagccatcgatgaccaaacaagacaggccaccatgctgatatggaaatccaatcaagttgctaaccagcaaccagctgctacatccagtatcccactggacggcactgaagaaattcatgttgggcataccgcccaaactcaaaatggtcagccatcctatccccgatcacaggttccacctgtgggccaagtggtaggtggccagaccttatctcaaaattctttaggtggagttatacctaataactccatccaaactaacagttctgaccaacagaccggccaaaccaacaaatcattgagacaacctggtgtttcaatattcaatagactgggtacagcccacgatctcagggatgatttgactagaaggaggggtatggatgaacaatatgttcaaccggccactcagcccagtatccgcatccaagacccaactctaagagatcctgacgtgacacaagttggccaagaggctgaactagttcacccatctgtgcaagcacagttgcatgaattaaaaattatgttccaaggtctggacgaccaaaaaatcactgatctcgagttggaccgagcacacagatcacccttcactctcgagattaatgtcctagaactacccttcaagttcaaaatgccaacttgaaagatgtacacaaggaaagaggatcccttgtcacatc

SEQ ID NO: 137212 - DNA, 566 bp, Cannabis sativa
tcttcacattcagtccatccaggtatttttccttcttactgaaatcggtgggcacaattcccgaggccaacctcgccaaccgatcaaactgcgttgtgtactcaataacgctcatgttctctgtctgggtcaggtgagtaaattcctttctcttggcacttctaacggcctcattataatatttggcattgaaaagttcctgaaacttttcctaggtcagtgtggtgacatcatgtatcatggacaccatgtcccaccagaccaacacatcctcgtaattattgttagccactactcggctttcacgacgttcagacctccaagaaaaaccggaggtgcctgcttgcggaacctttcatacagggtttccattctattcaccgctactaccggttcggcctggacaataggggcaggtgccactcaaacttctggaacagacactgcaggagcatcctgctatctcaatctctggatctcattatcttgctcctcaattctggcttgcatttctgaaaacctattttcctagttctgggcttcctgagtggcttgggcagcctggg

SEQ ID NO: 137213 - DNA, 898 bp, Cannabis sativa
ttaaagacctaagcttgagtttcaaagctacaacctgtgaaatttcaacacaacacactcaaatcagtaaccagaacctagaatcagcttaaaatgaacataaaaactgatctataacctattcaaaccctaacaaccccaatttcctaaaatcacaagttaaaaccaattcaaaccttgagaaaaacataaccaaagagtgtctagggcttaccttgattaaacctcctccaatccttgctgaaaacacaaaacttagcaacaaatcccctagtttttggctggttcgaagagagagaaaggaaagagagtgttcttcaattttttggcttttctttcttaattttctttattttcactcaaatgaaaaataagactaattacattaatcttggctaaaagtagaagctatgtgtcaacatctagggcagccaccaaatcacccatgtggcaaattactaaaatgccctttcttttataacttaggcatcttcaagactaggagtaaaatggtcaaaatccataatcccgctcaaccccggcactctatttcctccaacatacatcccactaagaaataaggttctagacctactcatgtgatcaaactagccatccatcgcattttttgttgtcgccgagctaaattataaaatttcataattcacatataacacaaataatacagctagagtttaataaaatctctggaattgagaaattataactctaatgcctatttctaacaatgggacacacaattaaataaattcacaaataattttaaaaataccaataattagtgataattgccttttctaatccatattatgaaatgcagttattacaattatccccccattaaaaggattttggcctcgaaatctaacctgaataa

SEQ ID NO: 137214 - DNA, 990 bp, Cannabis sativa
attaattttaatatcaagtactactatattgatgaaaaataaattaataagtaacataaataaattaacaaagaaaaaataatattaaatattcaaaaataggcttttatattataagaatacaacttaaaataagtgcaacaaaaatatttacttttgcatgtcttaagcatttttgataggttaataaaatttttaatgtactataacattatgtgatgtactacaatacactaaaccacgttctacgtatgccagattttgtactatgaaattatttcacaaagtccgccaaaaattaagtttgagaagacaattttaccctttgatttgacaaaaagaggaccatcaatttgttgtacttctgtccttgctcctgtcaactttaccaaaaaattataccttaaataaataaattattattataaaaatataataaaataaaaaaaaaatttaattattagtcggtcttataaacatagaacaaccggttactaacttaatataatattaataaagtacataagtactattgctacagtaccgcgggaccaatccgtgattcacaaaaaaggacacaaaatcgactgcctatgtatatatatttggaatacttcttaatgggtataacccattgataggtactaaataaattaaactaaaaatattaattttaaaaatatttaaccattaaattatgatctgatgacgaataaaaaaaaaatttatatgtttaattaagctacttaattaaaaaaaaatgtacgtctttttatactatataaaaatatatttatatagaaaatatttaagttaaattcatctttttctatcttttttgttaaataatttattttattattatgttttttagccgatacaacaacctcagtctatatgatataataataagagatttttctaattaaatacaaaaattaagtataaaaacttaaattttcttaataatattacccattcatgtgtaat

SEQ ID NO: 137215 - DNA, 630 bp, Cannabis sativa
cctttattattgagggtttttacatatattatctttttatatatttattacttttatattgtaacacgcattttttaatatttttattattactttatatactgttttgttgtgtaagtagtataaaatttgtaatatcttatattgacacttgtctcatatttaataggccctatttaagatctgttatttttttaaaataaaaaaattagtaaaagtttgatgtaatgtttgtttgtcacatttgtgattgtatttttttttcttcttttaatttaatttgaagatgaaatatataagacccattatgtacactacttcccattattctactttccattgcttctcattattctctttctctgctcatcttcttctttgtgagtttttttttcttttttattttaaaatctttaggttattatgtttttttttcactctcttattcttcaagttctttctctccataacacatatatattttttattttatttcttgtttagttcttccatcttctttttattttttttagtttttaaaattttcagtcacatttttggaaaagataggagtgtagtttttttattctaattttttgaaactgggcttgtaaatatagcctctattgc

SEQ ID NO: 137216 - DNA, 823 bp, Cannabis sativa
cttgtaaatccatttgcatttcgaaatacttgaggtgggaaagaggatcttctcttcctgtgtacattttccatgttggcattttaaacttgtggggcaacgcaagaagattgattttgggagagaaaagagttacgcgtgctcggtccagctcgagattattatttctctatccagccatgccttggaacatattttttagttcgtctagctgtgcctgtacggctgggctaacctgctcggcattctggtcggtttgaatcacatcagtatccttctgagcgggaatttgagcacgggcttcgggctgcatgatcgtcgtgacaatctgatcgtctattcctctccttttgttcaggtcactccttaggtcatgaataatccccaacctttcgaatacagaagcgcctggctgtcttagcgattgattcgcttggttgacaggcagaatggcaccgttaacctagttagaattatcaggtatgacctctcctgatgaattactagacaaggtctgcccgcctaccgctaggcccacatgtggaactcatcaccggggatttggcggctgaccatttgcagtctgggatgtattcatcgttggatcttcgtctgtctcgcccatggagatgacacttagaggttgctgacctacagtttggtaggcttttcgtattagcacaatagcttgccgactacaattttcactttctgtatgacaagcccttaacacttccatctctttgtgtctccactcggtaaacatacgtctttgttgctcgaacgcgaggtttaccgcagtgtagagatcttcctgatcatg

SEQ ID NO: 137217 - DNA, 770 bp, Cannabis sativa
ttaaaatagaaatagtatttttttttgtaaagtaaggcaaaatatcgagacgttacaaaaatattaaataatagacagatggatttttatgtgattcaagcgttaattaatttttttttaattaattttagatattagtaatttttgaacctgaaaatagataaaatctgttattttgcttaattgggtatcttatttttttttttttaattttgattattttatcttatttttaaattcaaggtcagatattatatattttgtaatatttaattaatttttataaaatgaccttatttaaaatttaaaaaaagattattttaatctagaaattttaaaaatctaaccagatattttattaactttcaaaattttgttatttcatttaaattaaattataaaatcagataaatggtattagtttatcattttattttattggatatttaattttatttttaaataacataaattttgaaaagttgttagcatttttttagtagatatttaggtttgttaaaacttaattttttaaatttaataggtttagttttaaaattaattatttaattttatttattaatttcgaaattatttatttatttatttaatttttcgaaaattaatttaattatttaattaatttaaattaaatagatcctatatccatctatccaggttgttacatgtatgtgtattttatatattgtttattatcaaaacttgttttataaaacctattattgtttgatctaaattgttatggttaa

SEQ ID NO: 137218 - DNA, 602 bp, Cannabis sativa
aaacaagtcaacctcgagaacatgagtaatttcaaatagactcaataacatgattatgaaaattttcacttatgtataacatccagagtttcagttcaattacgcccttgacacacttcaatttaattttatttagctcatgaaatcatcgaatgcaattaactagcacttgaaccactttatgcatgccaattacaatcatcaatccactaactcaaaattctatatgctttcaatacttactattctccactattataaaccaatgcacaaccaagaatcaaaaggtctttttaggcttgtaatgttaggcttagggtaaatgtagttaaaatggtcatttaggatttcttataccataagtttctccaatcatgtcatccagaatatttttcatacaatctcaatattgtaaaaaacttgtgacgaaaagtaaaaaaattattactaattataaattatcattttaatattgtgactaaaaggtctgagagccacaattaaattaatagcaacttgtatttaaatactatatttaaattttattatttttctattttattataagatagagtagctatagctaatgtatatataagaga

SEQ ID NO: 137219 - DNA, 1017 bp, Cannabis sativa
cttcttggtcggaggagatgcgctagagcttctgcaaatcctcttcttcagagcattaagcatcttctgagacatgtctgcacggaacaaaaacaatatggttagagaaggtagacatcagaaacataaagcacaatattcaagaagcttaaaaacaagacacagtagtatgcaagatgattgcccgagcaagcctcgaaggtccatcattacctggcatgcctcttatttcagacataataggtttcccttttctgagcacgggagaaggcggccaagctggcgagctgggatccctaatgcggattgcatgttcaatgggcctgggttgggccgaaagtttcttcctccttttgagcggagtcacctgctcttcctcagcctcatcttcaaaattcaagggctcctgagcatattgcttgtcccttgcacctcctttcaacttagcctcacgcttaagttggatgagttcattctccttatgagctcgttcagcccgtccagcactagatttcctcttcctctccctcactggcttaggaatgaaatccttcgaatagagcccgaacttcacaaagttatccttggaggtcaactggatgatatttcgatcttcccccggcagtcgagtaagattttgagctctatccctaagagtaagagtgaggggagggcggtggtacgttggaatctgctggaaccgagtatgggtgatgcccgcgccatctaccatgaagtactcctcaataaaatggccaattttgttgatggtcgaatccccagtgcccgtcaaccacttgaagtctggttgatagaaatagaagtaccccgacctgccttgcttaggggtggagttcaaatcaaagaaccaactaaccttgtcgggagaaggcatatcccacttctagaggcataaatcgcgaagagggcagatagatacttaatgcccttgagagtgaactgggccgggcagaggccgaagaagtctgccatattcttaaagtattggtgcaaagg

SEQ ID NO: 137220 - DNA, 1188 bp, Cannabis sativa
  modified_base (363)..(365): a, c, t, g, unknown or other
  modified_base (1078)..(1079): a, c, t, g, unknown or other
ttaacaaaacagaaggtccaattgataacttttgcaaaacacaggtccaaaatggtatttacccattagtatatgatatttattacaataataagacaccttaaataaatattttttatatatacttcttttatatgagactattgtggattttagacttttaagtattatatagttcatcaaatgtgtgaacgacagatattttttatttacacatttttgtatttttcaatttttgcaaaatatttaaaattaaaaaaaaaatcaatttttaacaaataaattatatataaatataaaagaaaacactaaagaaaaggagagcacaagaagcgtttatgtgtcattttataaatttttctnnntatttttcctaatttctaacacattttcttattttaattgaaaatcaaaccacacaaacaaactaaaagtcccacattgttgaaaaactgttaaagtaaagttttatctatgtaggttataaataatattcttattacattactttcttttgtctaaaaaatattatttttttatgggtgattgattaatttcttactcaagtttttattttatttaatttgtttcaatttttttattgaaaagaatacaaaatatattttttttgtacttttcaatatttgtcaagtttaaaataattataaaaaaagccctttaattattttttcatataaaatgtgttgtatttattttctatgtgggtgattggtgaatttaatcttgcccattgtaattttttttaaaagtgaatgcagaatagatttttacatttttcaatctttgttaatttttttatttttatttttttctgaagagaatacaaaatatatttttgtactttttaatatttgtcaagtttaaaataattataaaaaagccctttattttttttttcatacaaaaagtattgtatttattttctatgtaggtgattggtgaacttaatcttgcttgttgaaattttttttaaagtgaatgtaggatacattttcgcatttttcaatctttgttaagtttaaaataattataaaaaaaatcatttaattattttttnntataaaaattattttcttataattatttagttcaattttatttaaataattaaaactataatgatttattaatatatgatatttattagaataataagacaccttaaat

SEQ ID NO: 137221 - DNA, 562 bp, Cannabis sativa
gcgcaatcaaatgcaggaaatcctgctgttactgctgcaatctccacaaatgctggagccggttccagcaatacccagctccatgtcccacaccatttcagcactctaaaccagccataatctttaaagcttgacatgaacaactacagtttgtggaagacaatggtctccaccatagtaaggggttatcgtcttgacggatttctaaatggttctaatgtttgtccttctgaatatgtctctacgggtctcactgaagatggtgctgaagttatcaccacactcaatcctgagtatgagaactggattgttaatgaccagttactcatgggctggttgtacagctctatgactgaaacaatagcctctgaggtgatgggatcaacaagtgcagcggcgtgccctggaacaactctatgctgcacattcgaaatccaaaatggatgatacgcgaactctcatacagacaacaaagaagggaaacacctccatgatcgattacctcaggcaaaagaagagttgggcagattctctggctcttgcaggagagccatatcctgaa

SEQ ID NO: 137222 - DNA, 668 bp, Cannabis sativa
tttgatttaattttttgggtaaccattagggtttaggcagagtaagaatttaggtttatcgtatttataagcctctggtttgatgaatttcatccaagaattgagattgctctttttgtaaaaatgtcccaatatggtttagaagtttattctccagagtccttaaaaatagaatatcctaatgaattagccctcctgtacaatcccagaatttttaaacctcagtccaaactggacataaatgatgcaaaaattagagaccatttaataaaaaccaactaggatgaagtttctagtcgctataggcgtttccttcaagaaataaccgacggtaaacgtcgttacttgcgagacgcagcttggcctgaacccccatatttatcttctattcctttcgctaaacccttgtttttacccagagtcacaattactttttcaccaggtgacctagactttgaaattatgtcttccaagccccgtaagtcaaagactccccaagatcccaatgtcactttcgaggccgagctcattgagttaaggataaaggccatagaggactatgttcgtggtgttttctcattcacacttaacttttgttaactttgtcagatgaaaagttgagcctcctattcttttctctatagccgaaaccacttcccttctctttt

SEQ ID NO: 137223 - DNA, 526 bp, Cannabis sativa
ttttgcacatcaatcaaggttctctcggtagcgaggaatagcttccccaaaataatgtgaacttctttctcggcctcataatcaaggataatgaaatcggttggaaaaataaacttatcaacttgtaccaaaacatcttcaatttttccatccagatgggccatggaacgatctgctaattgcaaagtgatggtggttggccttgcttctccaattcccaacttcttgaaaatagacatgggcattaaattaatacaaactcctaaatcgcaaagaggtcttctgacacttcgaaccccaatggaaattcgaatggtgaaactacgtggatccttcattttaggtggaattttgttttgcaacatggcgctgcaaccctccatcaaagcaacagtttcaaactcgccaagcttccttttctttgttaaaatatccttcaaaaactttgcataggttggaatttgctccaaagcttccactaatggtatgttaagaaatctctagaattgaccatcttcttgctgct

SEQ ID NO: 137224 - DNA, 1211 bp, Cannabis sativa
  modified_base (771)..(785): a, c, t, g, unknown or other
agacacttaaatatttgatacttttcttaagagatttaattaaatacgaaaattatatttatgttgaaaattaaataattaattttagatcaacgtaaattataaaaacttttcaggatttattttattttattttaatggaattcaaaaatatatttttatatacattggatttcaaatttaattagagatatatatttatagaaaattaaatttgagttgataattaattttaattaattttggagtaaattaaattaagtaatttttattattatttattgaaaattaatattaagaatggaaaataaattttcattttcaaatctatacaagtatttataatttgatccataataaattaaaatttatatttagagttatctaaattagtaattttaattaaacaaatatatgaatattaaaataaatagattaaaatatatatcaaatgaaaatatatttcttttaaaataatgagttttagcttaaggatattcgatctccattgttggttctacataattcatgttttaatgagattcatccctaatagatgtttattcattagcaatttaacgccgtagaattttgaaagataagtactattgtaagtcttttattcttaataacgatcacctcaatagtgaaggctaagagtagggcttacaaagtatgaaacaatagtggaagctcataggatagaatgacattgactcttaccttaacgggacacaacaaattcttgtcttgatcgaataaaaggttgcnnnnnnnnnnnnnnntttagatgagttgactactctattaaatgaatgatatatttgactcttgcctaaacgggatattgtatcagtttgttagaaaccttggaaattatttaagatatgattgttttgtattttaagttgtctttgttgcttgataaatgtttcataatttctgaattgtgtatgaatttatattgaaaattcaatatttgttgatattaattattgtagtataaatttcgaagttcattgttggtttaacttggttggttgattttaatgggacatcccaaaggattttcatccattagacaaaataatagtgttagatctggatagataaatatttgtaaatgcaaaatctagttgactcaaccaaaaatgacaacttagaccagtgcttacaatatgaaacaatgaagaagtttataaaataagaat

SEQ ID NO: 137225 - DNA, 558 bp, Cannabis sativa
ttttttgtttttattatttattttatgaaattttcttccttaagttgatgactgaatacttatataaagaggactcatacatcaaaattgagaaattaacttgtcattactttagagtaatattattgtaaaattgtgttccttatttattattgagctattaagttgtgttatggaattattgatactatcaattcatgtcctttaaattaattgtaataatttagaagaatttaaaatgatatgaaaaatttaaaaggcacaattagagagcactacttgatatgttgtgttcttaatttttttttcatattatttaaaatttttcttaaactattactatattaaattgtacatctatatccaaaaaaattgatgtgatgtaaaattaacacataattattttacactttcgaagtattatcattactaattcgtgttctttgaattgtttagttttgagcaatggctttcattaccaagttgattagtaaagcaataattgtgtaattatgttaaaagggtttttttttcctttgtatgtttttacagttggga

SEQ ID NO: 137226 - DNA, 707 bp, Cannabis sativa
  modified_base (474)..(474): a, c, t, g, unknown or other
ctttcaacttagcttatagtaatgcaattgtatttaatttgatgagaaaaagcgttaagtaaagtttcttttttttttttttgtacttcatttaaactaatcaattatagctcacagacctgatgacgctctctaagcactaagtaaagcatgtgagttggtcttgagataactttaattatttcttaagtgagcttaatactaccacccacgaatcctcggataagtggagagtgctcacacatgtaatgccactcaagagtcatgatcaagaaggcccatggggatttggtatggcaaatgaccaatgaaggcacttatttgatcacatgggggcacataggttatgttatggtatacaagagtcatatattacacgagcattcaaattttgtttttgcatatttgtgtaagtactctcatggtaatgattactttaagaagcagtgatattattgttgggattttatgccntaaataaaactcatttcagtataatctcatttgttatcaatagaagattagaagtcatttgtgttacatgtagtttttatatttatggtttaatatacaattttaattaaatctagaacatatagttattcacaactacagttatctcaacatagtggaaggtaattgttattatatacttcaaaagataatgtcccatgattaatcattgtactggatttacactgatgtga

SEQ ID NO: 137227 - DNA, 1499 bp, Cannabis sativa
  modified_base (1470)..(1473): a, c, t, g, unknown or other
aaagcatactagaaagcaaccccgagctgatacaaacacctcagccaagtaacagtgaagacaagccgccttggaaactacacattgacgggtcagctacagatcatctatctggtacaggcatcgcccttgtcacacctgggggcaacacatgcacgctacagtcaaatttggatgcaaggcatctaataacgaagccgagtatgaagctttaattgctagcctaaaattagaccaggagatgaaagccgagcacattgaaatctatagtgattcacagctggtggtaaaccacggatcaggagaatacgacgctcggggagaaaagatgatagcatatctgagcaaaatacatgacctgctcgcacaattcaaaagatacgatctcagacaaattccaagggaagaaaacaaaactgcggacgcgttagcttgatgggcaagcagtaatgtaagtgattaggcaaacttggttcctatccagttcctcgaagaggctaacattactagcatggaagagatcgaaatgattgatacttccccaaactggatgacaccgatagcagcctacctcaacactggggaactcccagataatcaaaatgaagctcgaaagatgaggaggaaggcagcacggtatatcatagtagaggaaattatgtacagaagaggattttctatgccattgcttaaatgtgttactcaagaagaagctgcacaacttctatctgaagtgcacgatggattctgtggaaatcatgccgttgggcagagttaatctaagaaaattctaaggcaaggttatttctgcccgacaatgattgaagattcaaaggcctatgttaagaaatgtgacaaatgccagagattttcgaagatacctcgagatccgccgaacgagttaactcagatgcaaagtccgtggccttttgccatttggggaatcaacctgatcggacaattacccaaaggcaaaggaggagtgcagtatgcagtggtagcagtcgattacttcactaactggacagaagccgaaccactcgcaaccattacatacaagaaagttcaagactttattgtgaagaacataatctgccggttcggattgtcatacaaaatagttttggacaatggcaaacattttgacagccagtccttcactgacatcctcaagcaaagggtcaagttaaagcagtcaacaagaccctgaaggatacattaacgaaaagactcgaggatgctaaaggaaactggccggaggagctccctgatgttctatggtcgtatcaaacaactgaagaacagcaaccggacaaactccatttgccatggcatatggatatgaagctatgctacacacagaacttgagtcgccatcccacagaagattaacgtacaaccaagaaggaaaccacgtactcctagccgaatcgcttgatgaaatcgaagagaagcgaaccacaacaaacnnnnagttgatagcccatcaacaaaaagta

SEQ ID NO: 137228 - DNA, 1975 bp, Cannabis sativa
accttaaaccttaaatcctaaaatttttacacatacccctaaatccctaaacactaaacccaaaaccctaaatcctaaaccctaaccttgacacgggtacaaaaaaataagcataacgagattggatcgcagtccccaaacccagacccggatacagaccctaacctagacctagactcaggacctaaactcggaccggaacccacaccagaacctcctctgggacctagaatttgattagaacccagagcacaatccgtactcgagctcgagaagggactaggactcagaccaggacctggaaccagactaaaacctgaacccatacagtgacctagacttggacccaaactcccgatccaaacccgaacctaaacttggacctagaccgggacctaggatccaaacctagaagggggacctaagccccaaacttgggctgaggatccggacctagatgggggactttgacctgaaactgggccccaaaaccgggaccgagatccaaaactcgaccccagactcgagacacgcgacacaaccttggactcgaaacgcaagacctaagtaccgggacacaaccccaaacctggacctaaatacattcatatgacggggcccaagaccttggacctaaactggaaaaagacggagatccgaatctagacttgaggtttcagcctaacccgtagtaagtgtttgaatcccaaacctggacccggatctgtacccagacccagacctagacccagactgggatccaaacacgatctcggacccggaatagcaatcaaaccatgtctagtactagaacccagacctgggaagtagcaggacccaaacctaaacccaaactcagactagaacccataccgagacactaggacttggatcggcacacccctgtgactttggacctaaacaaagaccggcacccagagcgagactcagacccagaccaaaaaactggggctggacccaggacctaagaacaagactcggacttgggatctgaaactcggacccacactaggagtgggacccaaacgcaaagtaggacctcaactcaaaccaggactcaagaccataactcgaaccgaaacacaaacttggactcggatcgggacctaggacctggacatagatgggggacccaaaccctgaaattgggaccccaaactgggaccaaagcttgggcctcataacttggatcaggatcaaggacccgacccaggcccaaatcatgacctagtacccacctcgggacttgggatctgggactcaatgcttggacctgacccgtagtcagtgttttgatctgggaattagaacagaacccgaacccaaactctaactcaaaccaagacccggacaaatacccaaacccagacccacacttgggaaccaaaattgaaacttgaattggaaccggactgggatctttgaaaggaaccggggcttcgacctagatcagaaccgaaaaccttacccaacctcagactctaaccgagaccgaaatacagaccttagcctcccccgaacccaaatcaagacttgaacccagactcaaacccaaactcgacccgaactcgtaccctgtgacttgaaactggaaccgaaaccagaagcaggacccacacccagaccctgaccgaaattcggtacccgaaactagaaactgaaaaagaactgcaagacgaggacccggacccaaactagacctagccttagacccaaaccgagactgaaatcgggcccaaacacattcgtgtacccaaaacgggaccgagacctagacccaaaccaacagaaggacctaaacctgggacccgatcccaaaccaagactcggacttagatagggatctggacacaaacctggactcaaacccaaacaagccctagaccgagattgaaactcgagaccttgattcagaccgagaccctgacctagaccaagacctagacccgcaccc

SEQ ID NO: 137229 - DNA, 767 bp, Cannabis sativa
aaacttggttgttaggattttatcggaagtgactttatcggcagtcaagtaccataatttttggtgtaaggtatgctttcttggttgttagggtttgacgcgtaagtgtcacaaattatattgaataatattttagaatacctaaggatgaataaaatgtcacataaaatttaaacataccaatgatgtatcataaaacttaaactaaagtaaaaataattatgtttctagaactagaactagaaccctaaattctattatcctagaaaacacttgaatcatcaaactcgaattaaaatattaatgggaaatacaatgataattaaaaattatctaagtcatcatcacttgttttagattattttttgttgttattaataactttaaattttttggaaatgttcaattatagctcttatgttgccgacatttcaatagttataggataaaattattcgatacaagtttctcttaaacttggttgttaagattttttgttaattttcgttatggataaatcataaatgcgtgaggagcactgattataatatagttttaaattatgttttgttgttattaatagccttaaatttattgaaaacgttcaattatagctgttatgctgttgaaattttagtagaattaagcatactttctttaacctatacattgataagaattaacaaatacatcctaaatattgattctaatacttaacagaagaattcttttaatttattttaagtaaaacaacaaattaaaatatt

SEQ ID NO: 137230 - DNA, 692 bp, Cannabis sativa
attattctggcgcctctctagacacagctcagcgtccggctatatgacgataaagacagcactcttgggaggcaacccaagtgttttctttcatttttcagactttttggctatgtttctagtttatgttttaagtatttcttgtattttaaatttttagttaagtaccagacattagtttttctagttgaatcgtgaaaaacgtgaaaaaaaataaaaaaaaattgtttttttcgggaccgggacccagtggtcacgaccacaaggttcctgggtcgcgacctggggttttaacagaaacactttcaattttcgtgactagggtcaatgctggtcgcaaccctttttccaagttgccaccccagtcgcgactaccccttttctagaaacctcaaaaatttgaatgtaagctagtcgcgaccagccttagggcaagtcacgactagctcacgaatttttctataaaatcccaatttttccccccattcaaccctacacaaaaaattcaaatccttcctcctctcagccgaccctaacctctcccattcaaaaatttcaaaattttcattcactaatcttcaattctctcatcttttcttcaatttctcaaacccaatccattcaaaaacccaatttcactcatcaatctacacataccatcaaaaacaatcccaaaaatcactcatattatc

SEQ ID NO: 137231 - DNA, 732 bp, Cannabis sativa
ttcatattcaggatgttaaataacatacatggtagtaaatctacatcctggtaaaacatattccaacagattgatgttaaaggagaagagtgtatgatacctgtccaagtgccggttataactcaaggggacttgggtatcggtctttcgactaactcaagttagaatttatgggtaatattataattgttattttgatttatattggtattaaatattgtactctcaatgagggggacatcaaaagatctaaatggactgtgcctgtatgttatgtagtagtagttcatcggacaaggtagagagattagataaaaaaaattaaaatatattgatagatttttcttgattaattaataattaatatttattaactgaataaaaaattaagaaaaagagaaaattaatgagagaagagatagtgagattaaagtgattttagagtgccacatcactgcttcatacttctcctttaagatatgaaaaattaaaaaatcaaatacgtatatattttaagttacgaaaaaaaaacacgtatatgttttgtatatattagtagagattgatatattgatacatttttcttaattaattaaaaattaatatttattaactgaatgaaaaattaagaaaaagagagaattaaggagaaaagagatagtgagtgtaacgccctaaataattaggcacgttacccaagatacttacaaaatcctaatcccctaattggga

SEQ ID NO: 137232 - DNA, 887 bp, Cannabis sativa
acccagtcgtgagaacaaatgaagaaaccagtccccaaatgaccctacatcaactggaatcatagccaaactcgctacccgctaataattttgggcaaattcacaacagtgcaaaattgattcactcgtcccatgacaaatcagacacaacaaagagacatccactaacaaccctccatacacaattttttgcttttggaggaagtttaaattgccaaaacttcttccaaaatgccacaactgccccgtccacactatcctcacggtttgcttataataatttaaacacattcttaactgtatactcgctagaagagtcaaactcccaataccagtaattcttagtacccgaattagataaggaaatactaagaatattgaccgccacttcctcatcaaataaatctttgacaacatcaacatcccaagctttttcattcaccacaaaaagactactaacatttttattagccaaactagaatttaaactacatgaactctaaattgatccatttggaacccagagagcattaaataaaagtgtctgctctccattaatattaccaattcccttattcacccctttacgaatcaaatcctttaccgtaacaagatttctctaaatataacttgaattattgccaaattttgtggaaagaaagttctcattttttttaaagtaaacaatacaaatgattgaattacccaattcagttaacaaaataatgaaagacgtggctgcttacaaattttatttggatttagaaaaaaaaaaaatctgaaaaatcataaatactttatttttcttaaaacaaaaataataaagggataattttacaaatgcataaaaataataaaaaaaataacaaaaatacggtttcacggaa

SEQ ID NO: 137233 - DNA, 657 bp, Cannabis sativa
  modified_base (142)..(145): a, c, t, g, unknown or other
  modified_base (197)..(202): a, c, t, g, unknown or other
ggatcaattcgcctggagtcatggagatatgatagggatcgaccctaatattatctgccatcatttaaatgtcgatctaagttacccagagaatcgatagaaatggagacccttggattccgagaggcaaggggcactaaannnngaagttgacaagttattagtcaacgattttatacgcgaggtgttttatcccnnnnnnatagccaatcctgttctcgtcccgaagcccaacagaacttggagaacttgtattgatttctctgatctgaataaggcgtgtccaaaagattgtttcccacttcccaggatcgaccaattagtggatgcaactgctacacacgagcttatgtcatttatggacgcatattctagatataatcagatcaagaacatacaagcttcgtaaccaacattagactctattgttataaagtcatgccgttcggactgaagaacgctggggcaacatatcaccgattggtaaacgaaatgttcacaaaccaaatagggcgaaacatggaggtttacgtcgatgataagttgttaaaatcgataaaaaaaaaataaggatcatacctcagacctcgcagaatgctttaagatattaaagaagtataacatgaaactaaacccaaaaaaatgttcctttggagt

SEQ ID NO: 137234 - DNA, 538 bp, Cannabis sativa
ctctctccttcacgcactctctctctctcttcacacacactccctttttgtcactgccgccgatcgaccctctcccggccgactgccacctccaccattttcaccctcaacctccacctcactcaacaaagcaatgggtaagtgtttttcttagtaaatagtctagttttttgttgaattgcatggatctgaacattgttagttgtaatatgtgacttttgtgtccttgaaatggaggtagagtttgtggctaacagtctgtggttttctgggtttttttgttttttgcgattttatgcgacatcatgcgatgttttgtgcgatttcatgagaaatctgaggttagggatgacatgattaattttggcgactttgtacgattattatacgatgttatgtgcgataatgatgtttggcgattaatgtgcgatatgttgtgcatcgttatgcgattttgttgactatgtgatattgtgcgactttatgcgatttctttcctttgttgtgcgattattgtgcaacatcataactggtttat

SEQ ID NO: 137235 - DNA, 1173 bp, Cannabis sativa
cttcagattctcggttaggtcaagtcctagttcgggttctagtcccggatttcgatttgggtctgggttctggggcctaggtccctagtctaggtccctaatccaagtctggttcctaggtcctagtctggctcgaggttcgggttcaggtcctaagtctcggtattagtccaggtgtttgggtccaagtctcagtcccagtcttggtctgagttcaggtttgggtccttgtcagggtttggatcttggtcttgctcgctggtcttaggtctcagcgagggtttaggatcaggtcccagttcgggtctcggtctaggttcaggtcccagttctcaggtcctagtcctagtcaaggtctcggtacaggttctggtccgagttttggttatggtttgggttcggttctggtctcaagtccatgtcctagtcacagttgcagctctgattctaggtcccagttttattccgagtccgtgtatgggtctaggttggggtcggggtccgagtcttagttcgagtccaggtatgggtttttttgatcccggcctgggtctaagtttgagtccgagtccaggttcgggtccttggtttgggtcccaagtttgggtctgggtctgtgtctgggtttgggtccaggtcccatgtttcgatcctggtctaggtctgggtcggtattaaggtctaggtctgggttcctgtccatgtccacatgagaatcctagtttaggtcaggggcttggtctaggtctgagatcgagtcccgagtttgggttgaagttcaggttcgagtctcagtcctagtctgggttcgggactgggtcgaggaacaggtttgagccctagttccggggcttggttctggtctagttatgggtcttggtccaggttcaagtcctagtcacgatcccagtcctgttccagggtcctggtcacgttctagttcatgtttcagtttcgggtcccaggtctcacaccgactatgggtcttctccaagcccaagttcccagatccagggataagatctggatgccaatcgcgggtcccagtcttatttcagttcacgtcgcaagtcccggtttgggtctcaatcacaattctgggtcccgagtcctgttccatgttcgagtctgagttcagatctgggttcgggtcccgagtctcggtttgggatt

SEQ ID NO: 137236 - DNA, 1959 bp, Cannabis sativa
  modified_base (123)..(137): a, c, t, g, unknown or other
  modified_base (187)..(194): a, c, t, g, unknown or other
  modified_base (694)..(694): a, c, t, g, unknown or other
attacattgaaatatagttttatttagggcacaaacccaacacttctatcttctcccttatccaaaaaaactgaatatcattgtgttttgtcttctcatgataaactggattcttgcacaaannnnnnnnnnnnnnnctgtcagaatgtacccttgccttttcaactagaagcttcaactccttcannnnnnnntgtagccatattgcttctttgaatgcctttgtggtcaccatgaattctacctttgtagttgaaagtgctactacggattggagctgtgatttccaactaatacaatctccattagtttgaaacacataagatgtagtagacctcctagtatccttgcttgatgcataataagcatccacatatcctttcaatgttactttttctgaaattctcttgtaagtaaatccaatatctgatgtccctctcaaatatctcaatagccatttgagttccctccaatggtttatcccaggatttgacatgaacctactcaatatgctaaaagcatgagtaatgtcaggtcttgtgtgctaaccatgacatacatgagacaccccagagccattgcatatagaatctcttccatctcttctttttcttctgctgtcatagggatttcttccttggttaattcaaactgtcctccatgaggtattgaagtgctcttagaatcttgcatnttgaactttgttaggatcttctcaatgtagttcttttgctttaggttcatgaatccatcactcttggatctataaactctaaaccaagtatcttctttacttgtcccaattcttttatgtcaaattctgtcttgagtttatctttaattcctttgattactgccttgtctttgcccattattaacatttcatctacatagagtagaagatacacaactgttgactcttctaggtgcttgaaatacaaacagtgatcaaacttggaccatgtaaaaccaatttccagaacatagctgtcaaatcattttttccattgtcgtgatgattgcttaagaccgtgtagggactttccaacttacaaactatctcttttccatcttgttccacctgaaatccaagtggttgctccatgtatatctcttcttctagataaccatttagaaatgcagttttaacatcaagctgctccacttctaaaccttgctaagttgccattaacagcataagtctaatatacttcactacaagtgataacacttcggtgtaatctatcccttctacctgggtgaaacctttggcaactaatcttgccttaaatattattggctcatcctgtgtcacacatcccatgtcttgttctttctaagagagcttaattcatcatccacagcccgagaccactccttcttgtactttccatttaatgccttttctatggtcaatggtttttgtatatcacatgaatgatctattgacaaagcatagacaatcaaatcaacttctgcaaacctcactggtatatggatttctcttctagttctacctctagcaagctggtagtcagacagatctggttgttccttagtctcatctagagttgtgtcaatactgtcattcttctcacctagttcaaatcctttaagctcgattttaaactctgccaaatcttccctcttgccagatgaatctgcatcaggtaacacacactgcctttctcggctttcaagtgaggaaaatcattttcattaaacataacatttctagaaataatcaccttaggtttcccattttggtttatgcaaattctataaccttttgtgcctataggatatcctagaaacgtgcctttgacagatttagcatcaagcttatcatcatattaatgtacatatgatgcacatccaaacactctcaagtgtttcaggtttggtatcttcccataccacatctcataaggtgtcttcaagtctatgactctattagga

SEQ ID NO: 137237 - DNA, 624 bp, Cannabis sativa
  modified_base (150)..(152): a, c, t, g, unknown or other
gcccaagtcttagttaagtgggatctttgtaatccttacaatgattttcgtcaattttaaagagaaatgctaaagggtacgagtggtacctatcaccctcctatgtgtcaatatcgctattggtctaactaagtatcgggtcccatatannntaatataatagcttttagggagtaacgctagccaatcgtaatgcgacatgtcaagaaagtgctagacaccactggtgcctaatagcaatgctcaattttaaatggtgaatcctcatgagattattaaaattttattttcttcttaatgcatttgagatttttcagcaaaaaaattgtaaaaaattctacactcaaatactattaatatattttaaaatacaaggactatttgaatattataataataatatacaatttttttaaatgaattatatacaaattcttattttaaaattctattcctggctgtgttgccgtgagagttttgtccctgttggtttggaagctatcttggtagctgatttgatttaataaaatttaatttttttggctaaaaaaaatggcaaaaaagagttgtaattatattaaaaaaataacattaattatctaaaaataagggtaaataccattt

SEQ ID NO: 137238 - DNA, 516 bp, Cannabis sativa
acctctcaattagaatattattttcttggtcccaagtatattcttggatagaggttctactgtattattgttctcttaaagcactaccaataaataatgtataaaagcatctctaaataagtagtgaaaagctaaaatataatttatttaacaaaaagtatgctccaatagtgtgccaaaaagtgatgtaaatttggcacatagcaaattttgtgtcaaatttggcacaacatttgtatgatgtaaaatttatatcacaataaatgcactacttttgtatttacatttatgtcatttttattattttattagtatatttaactatcacattaaattatgaaacatttatattattttttttttgtcttacatattaaaataataataaaagtgattataaagttattagatttctttttaataaaacattaattagatattaaattgagtaattacaattactccatatattgtttttttaacttttttttttcaaatttatggtttgggtttcta

SEQ ID NO: 137239 - DNA, 677 bp, Cannabis sativa
caaagaattttagtgatagttttatagaggacattacaataaggaatgggcctaaaatcactaatatattataagaacatctccaatgcaaaatgtaaatattgtgctaaatttggcacaaaaaatagataaactttatatttagcataatatttgttatgttgtccaatgcacaataacattttaaaaggtaaattagttttaaaaaaaatatcattaatgaccaacaataaattaaatatttaaaaaaattactaatgacaatattatcaataaatgtatgtattaaagtatttcattaatgacaaaagtataattaaaaagtagtatttactgtgtgtgaaatttagcacaatttaatctcatttttaatatctattaaatttaacataacttacagcacactagagctttttattgaaaaatattaaaaaattgtaattaactacctattacttcattggagatgctccgagtacacagcttatcagagttaaagtagtaacattaagctctttaaggagctttctagagttcataggagagagcatattagaatttgctacacatttctacacaatttagtctagaaatttctatacacttgtagaaaaattatctaagaacttaagagaattctagattagattaaatctagaatatactagttatgttgt

SEQ ID NO: 137240 - DNA, 750 bp, Cannabis sativa
tttttgtaaacctattatctaaacccatatttcatgtttttgtttctaacttaattagttttatttttgggagatttttaattatatacataaatttgttaataattacaaaaatgacgctgacttatataatcccaaaaacgtgggcagcttatgccgaatggtaagctatttaatttcaatttttttattctctttcctacgtaagccatttttaattattttttttctaaaaaaaataaaaagaaatctatcattttgtctctatttttagtcaatgttttgagaaattattttctcgctcttcactatttgtaattcttttttatttatttatttatttttaataagaatttttttaattatatacattatatttaaattaattatgaaaataattaaagtaatttaaatagatataaatagcgaaccatgttacaccgaaaacataaataattattttcctctctttctctctcttgtctattatttcaaaaaaaaaaaattcctatcacaattttgatcatttcaaaaaattatattattataatctatttttcaaattaatttttttaatatatgtagaaaacatatatttcatttattgtaattaaaaacaaaatataacaaaaataaaaacaacctcttagtttattttataatatattaataaataagtaaccaaactataaatttaaataaaattcagtatatatatagggtaatactatggtaggacctagaaaaagt

SEQ ID NO: 137241 - DNA, 556 bp, Cannabis sativa
aacattgctaccatctcctcgacacagacgtttcttgtttttcttaaatttttcctagtgctaagtttgttacataacctttgaaatgtttctctatccattctcaattgtgacacaaaattgacatcacttgcatatactaaatcatgcaagttttctaattatttgtagactctcattatggataatggttgattgaggcatcttctaaaacttatccatgcataagcactcacaatagtacatatagttaaaataacttttaaaatcacaattaaattatgcaccacaataattaacttttgctttcttgctaaacttaaacgagccattttatctacaaaaaataaataataaaaaaaattatatgacaatatcaacatatatacataaaacacacataaatatgtacaacatataaagtaatatgtaaaatttcttaggaaaaaaataatatgtgtaaacaagtaactaacaaatatattaaccaaaaaaaattaaataacaaacacaatatatataatatatataaaaaaaaaagtaattgacaatatag

SEQ ID NO: 137242 - DNA, 613 bp, Cannabis sativa
  modified_base (313)..(333): a, c, t, g, unknown or other
acccctaatcacttagaatagctatcaaacatgcaaacataagttaacagttctagcttttctaaagttcacgatcaggacaccgatgaatctagtaaagggttacactaagtacacaaccattccatcattctaaaattttcttatcactagggtatatccctagaagggcttaggcaactactagtaactaatcataacctttcactttcatcaatatgtaatccaaatttctagagaggtaagtttggatacaattcaaagtttaactgaatgatctttgaattgtatatccaccaaatatttctccacnnnnnnnnnnnnnnnnnnnnnttaaccacttaccttaatgttttacaacattgctagaaactcatgaaatttctcatacatttcaaatttctttgcacaaggtaaaatctagagtgatcgtcttaagattataacaataactcatatccatccctaaatgtacatctatatatgaatcatcttctcattgttgggttttgtgccctaaataaacccatttcaatataattagatttacaaactaataaagatcagaaattgcattttatgttgcattgtacacatgatttatttcatgatt

SEQ ID NO: 137243 - DNA, 613 bp, Cannabis sativa
  modified_base (54)..(61): a, c, t, g, unknown or other
  modified_base (421)..(428): a, c, t, g, unknown or other
agtgatgatgacttagataatttctaattatcattgcatttcccattaatattnnnnnnnnagttttatgagtcaagtgttttctaggataatagaatttagggttgtagttttaggaacataattatctttactctagtttaaattttatgataaattttatgtgactttttattcatccttaggtattctaaaatattattcaatataatttgtgagacttacgcatcaaaccctaacaaccaagaaaacataccttatactaaaaattatgtacttgacttcgataaaattctaacaaccaagtttaagagaaaccaaaatcaaataatatcctaattctaccgaaattttggcaccataacggctataatggaacatttcccaaaaattcaaacctattaataacaacaaaacacannnnnnnnaatataaaataatcacaacaatatttagcaatataaaagtttaccacccatccgactacagtacatgtattcacagaatctacttctctacggataaaaatttaagatattcaaactcatctaacatgcatattattccacacatcgatctggcgcagtacaatatattgcagaacctacttcac

SEQ ID NO: 137244 - DNA, 1317 bp, Cannabis sativa
  modified_base (26)..(28): a, c, t, g, unknown or other
  modified_base (694)..(695): a, c, t, g, unknown or other
  modified_base (857)..(872): a, c, t, g, unknown or other
  modified_base (1063)..(1065): a, c, t, g, unknown or other
  modified_base (1138)..(1141): a, c, t, g, unknown or other
aatatcaaaaattaataataatctannnaaaaataaatattattaattttaaaattttgatatttgggtttaaatattaaaaataatatattatttagatatttagggatttgaaatggaaaaatacaaaaaatagtgaaaaaatcacaaaaatcagatttttggtgcataacaccttgcttccgaggaggaggctgcatgcagccctatgcgagcgtaagaatgagtttgcaacctccttgagtgaggtttctcgatctgctgctgggtgggacgcgcagaatcgtgtttgaacatgggcgtgaccgaggcttctgacaaaaaatgtctgaggcatgtaggcggttggcagccttgtccgagggtctggtgcgatggtgcaccccctcttgacaccatatgcaccggaattttcaaaccttcatatctttctcatttttttattggaatcgagttccgtaaaaaaataaaattacttaatttttcacaagaaatccaaataaattattttcagaacaaaaataaaattatatttcatggaaaaattcagaattcacaaacattcatcaattcacacataaaccaacatgaacacatccaaatcaacaaaatcatcgttttaaattcatatttcatgaaagtaaattattatcatggctctgaggccagttgttggaacttattttactagganntagatttactaacatgtatgtttattataattctataatctaataccataaatatgaatttcctaatacaatgaaataaaaaaaaatataaagtttagaaaatcttacattgatgacatcagaataatatgactcctcccgttcagatctctagcccttgannnnnnnnnnnnnnnnagcattatcaagatctgaacttggatattctctcattcagtttggttgactaccttcttctgcacgatgattgagtacttgacttactatgagtggctatggtactctatcactaaagacttgaattgatagaagaacaacaagaaggattcgaaatcactatagaaagagtctctcatctactagttgtnnnacagagttagaaaattaggtttagattggttgaagggttagttggatgagaatgagagcatcatgttcctttnnnngtatttcaactagggtttaggatttaattatatggattaaaatagataaaataatgagtaaatagttgctttagtggtcggtcacttaatgggtctcactagttacaattttgccactttatttcaaccattttttttttcaataataccatattttccaattttaatcctataaa

SEQ ID NO: 137245 - DNA, 762 bp, Cannabis sativa
gagtcatgctcgcaagcatccatgcatcgaggctctctagcctagatactcgcactgtccataggttaccactaagataaggtaaatcccaataacgtcgctcacctcgtcactcgtgaccaaggtagcatgtctggcaagaagcgcacaccaagcagacgtgccaacgcttcttatcatgccccattcgatactgtctgaatcgtctccctcatcgaccaaggactcccatatgtccatggtttaatcctcaaggcaccatgcctccgtacatattggcaggccctcgtaacaagccaccaaacaagttgcatacattagacctctgtctctttccagcatggtgcattcgtcccatgcgcgcatgcaaactagccaatgaatgactactcgtgtcatcttgtgttgagactcgtggccaaggcgtaccacaacatctcttggaggtttaggccacgtcccgtgcaagcgacataccggtaagccaatggaaatgtacctgttaatctttggcagcattcttagacgcactactgggtcggcccgatagtatccatgagtattccaactcatggagacatatgagtcccctcgtggtcctcatacgcccgccctattagtcttgttgactagtagtagctcacttagcacaaaggaacatatatgatttctgctctgtagacatatggtcaaaccatataccaaatcacatagtttctcaaatctgattgtaccattgtattcgtagacctaaataaatgg

SEQ ID NO: 137246 - DNA, 720 bp, Cannabis sativa
tcttacatattattataagcccatcaaaataaatttatagaatatatttgttgattcaaagagaataactcagatagcggaagcgtacgttaatccatagatagtgatgatcttaatccatcttgtagagataatctttgtggtgattttgggtaatgctctcttctaagaaaacaagacttaaccttttctaattttctctcttgaagggggaagatgggaatagaaattgctcttgtttcttggggaccactaccaatttatataacctaataggttattaattttagtatttataatttagccccttaataaaatagaaatatctcttaaggtatctactcatttagcctgttgaccttgaaaagtgatcaattgacagtggggtcatgcagatctgatgcttgccaagtgtgtgcacaaataagaataaaaagcaatatacaactggatttattatagaggtttgaccctcttgtgatagcgggtaatgacctactccccttttaattgtattatacagagggaattactatccagattgctataggtgggatctgctatagtacccttatgattacaatgtatgaattgatgtctggcagaagtcaagtcttggacagcctagggtgttgtacagcctaggctaggcgtgtgagagaatgaagaagagagagagagcttagaggcagcttaagcaacttaggttttcaactagag

SEQ ID NO: 137247 - DNA, 963 bp, Cannabis sativa
  modified_base (927)..(933): a, c, t, g, unknown or other
gtaacttgttgtccatgtatcaggttgtacataaagtccttccaggacaatcctggccgcccatacactgcaggatatggtctagccggccaaggtctacaggttgaggtctggccagccatgctcctaccaggacctggcaggtcatgtgcctgccaagatcttagaggtcactgtagctctaccaagaggagcctaacttttggatgtagaggccagcctttggcaagtggaggacagctttgtacaccgtttccttgtagaggtcaggttccttttgtcgaacggaagttcccttggtctgacagttaccttttggccagccagcttgttcccagaccttggccggccatacaagctcactttagccagcctataggcttctcttggatagccatatatatttgtacaacctcttgatggctcgcttcacttctttcagttgctacttaacagttttgccataccttccatggagaccctgtaaagttgtattccacatgtactctatctttggcttacgtggacatgccacatcaggtggacaaattttggaataacatttatcccccaagtcattgttcaaacatctggtcggatagagactttctagctatcatcttgtttgtagcagtctctgttgagtagccttgtctagccaagtgttagcttttttcttggcatgcttttggatctttgatcttctctctctatatacatctcatcttctcttcttggatatctcttctttgtactttccattaacaagtttaaagcaatttttaagcttttggaaactttttgattctcatgttagtttgtaatctctttagtatattgatcctcctgacttttttgaaatgtataatgtgtgactttttgatggaaaagatttaactttgtcctttgttgtgattcttgactctnnnnnnnataaagaatacgaggcacatattcgagttt

SEQ ID NO: 137248 - DNA, 595 bp, Cannabis sativa
taccaacattgatttgcgaacccccttttgccaacacatcacaagtaaattctattttaccagcgcaataccaacttttgccagcacaaaaatgtgctggaaaaagtgaaatttcttgtagtgtatagttggaggtttggagttcccgaattagggttttgggcgtgtcgtttacgtgtttatgttatgtgattagggcatccatccaacacaaagttttccgttcaggtcagccaactcacttgaattcaaaaatgaggtaagaatagcgtagaacatatgatatatatatatatgcaaatatatgtatgtgtaatatatatatatatgcatgcttgttatggttagtacacaaccaacacttatacagaagtggtacagagtgtattggtatagcgtacaatgtttaaagagtacattacactgttaccaacacaagtacggaaaggtacagggtgtgtgtggtacaacacttagtgtgtgacagttagtagtcctatgatccgtaagaggaaatacgtggtaagctgtgtaatcccacatcacctggggaaggtcaactgggatgattctaagactgtgtaggtatgggact

SEQ ID NO: 137249 - DNA, 714 bp, Cannabis sativa
ttcagggggcacgatttggtacatgtcaaagttcggggaaaaaaatcctaattagcctataaaataattggtatataaaaatggtagtttattatattacatagcaacttattagtttcaaaaatattttttaagattacttaaatgtaattataatctactattttttttgagtgtagcgtaataatattttacaatcaattaatagcttaaagattttgggtttgaacccatgacctctccttttttcccatccctccctcaccactaagctagccttagtggcttgtaattataatttaccataatataacttaaaaataactattagtcactaaaatgtatacaaataaattttaagagagtaaccaaaatgtatctcaaattatataatataaaaataaaactttttataagaaggtaattaattggtttcttatctacaccattagtaaccaaaaaattacttttaaaaaaaaaatcaaaaaacgtcaaaaaacgtcacataacgtgacacattattattataaattaaacgcaaaaatttatattattgtaaactttcctattttatatgtggctacgaaaaacaaactcatgcaaaaactgtacaaaagaaaaataataatattacaaataatctttttatcatttgtaatagtcatgttcagagcgtaatatattttttaactgaattaaaaaaaaaaaaaaaaa

SEQ ID NO: 137250 - DNA, 586 bp, Cannabis sativa
cctattttgtttactacaattttaaaccgtcgggaatactagatttttcccgacagttttaaatagttacttaacttttttagcgacggtccccgaagaaaaaaaatcgttcgtttttttttattttaggaccaccgtcactcacgaattctgatatttgtagtagtgacagttcaaaccacgttacactatatattataaagttactaatttttataatatgatttttaattttttttatattaaaaacaaattatattaaaaacaaatatatatatatataatatatgtatatgatacattatttttttgagataatttaatataatgatttagtgactagtattatggtatgatgttaaaactttaataagattttttttgtttgtactgttaaaactttatagattgatttttaaatttttattataatattcgataataatggtagtgtaaactgctcaaactgtactgcgctacactgtatttttgtagtgtgatttttgcaattttaagatcttgcggttatgggtaaaaatcggtcggttatggtcgatttttacaattttataaccgaccggtcggt

SEQ ID NO: 137251 - DNA, 612 bp, Cannabis sativa
attcgagggaatgctacaatactgtattaaaaattgtagaaaagaagaagtcggtaaatgtcatctattttctcgaagctcctcctcctcgacatgaatgtttcaaaatcaaagaaataccacatactgaaaaactagatctggaggatcctcaactacactaacattacgcaagttacagaagagacaatcgaggtacctatcgattcttatgataatttaaagtgctaaaaattggttctaaactaacgttttagcagccaaaaaagcttgttacttttctcaaacaaaatctggatatttttgcgtgtaaacatttagacatgatcgaaataccgcccgaggtcatgtgtcaccgtttgaacatcgaccccaatgcgcgaggagtatgacaaaagcaccgcaaaatagaccgcgcgtgttaccaagtgcttaaggaggaagtggatcgcttactggcatgtggcttcataaagaattcattttatccaaactggtcatgaactcctcagctttatggacgcatactttgaatataatcaaatcccgatgtacgagccagactaggagcacgcctccttcatcattgatcgaggtttgtactgttataaa

SEQ ID NO: 137252 - DNA, 704 bp, Cannabis sativa
ctgggttcaggtctaggtgtgggtgtgggtccttgtcagggttcgggtccagggctagtcccaaacccagacaccgactacgagttttgtccaagcccttggtaaagatctggatccgaatctcgagtcctagtctaatttgatttcttgtgctaggtcacgagctgggttctaggttcaagttaaggtctgggtcaggtactaggtccaagtcctacttctatttcctaggtccctatcttgattctgcttctaggtcccagttattgtgtgggtttgggtctcggtctaagttctggttcgagtcctagtctcagttcgggattaggtctctatctgggttttgaactgggttcaggttttggttttgtccttgtcttggtgctagtcctagttcggttgtagttccatttgcgattctaagttcgagtttgggtttgagttcaggtcggagttcgagtcctggtctgagtttgagttcaggtctgaatttcagtctacgtctagatcaagctctgggtgtgggttcgtgcgctacgtccttgtcaaggttgggttcaagtcccaagttccatttctggtcaacttcaggtataggttccaatttcgggtcactgggtacgagtttgggtccagtttttagtttgggactggcttcaggtccaggtgtgggttcaggtccttgtcagggtttgggtccaggg

SEQ ID NO: 137253 - DNA, 594 bp, Cannabis sativa
cgaatcgcccactcccaggtctcccaaccgtgtcgtcccgtgttcttccctctggcttcgattactccgtctgataggctgtagcacaggttgtcgacgcatattctcgtaaagttctccatttttttctttttgctttgatggaagtaaaaacttggaggaaagaatatcaatatctgactttctttttgcttttcctctttttcttttggctcggtggaaaaaactcagttcgtcgtcagatttctttgctcaggtcttcgtcaccatcgtcgtcaagtgttatagctctattaatttgaaaaatatttaaaaaaattggataaaaattatattaatctaaaacatattaattttactttaaaaaatattttcaaactttattttatttatcaacacgtatcttaaaaaatcaaaccaaaattgagaatctaataaacaatttaaatgaactaagattttttgaaaaaaaatcaaacttatttatatttataaactcataccttaacaaataaagaaaaataattacaaaattcaacaaaaatataaatttattttgaaaaaaagttataaattaaactaaaaaaatgttat

SEQ ID NO: 137254 - DNA, 684 bp, Cannabis sativa
  modified_base (192)..(202): a, c, t, g, unknown or other
ttagcaaaatatttatgcaaatgtaatgcaactattatgaaacattaaaaatcagaatagtgtttctacatacgtaactctatctacatgtatcttttgatttatatgaacagattcactattataaatttagaaaacaacgaaaatacactaggaaaatatttaactatagtattgatgtaatgttttttnnnnnnnnnnnagttggattgtttgggaactccagcttaactttttgagatatgcttttcatggatctgaaaattgaagtcaagaaattagttttatccaaattaaactggctttacagttgaattttagttttgtcgtagtttttctacactttttttttttcatgaattcgaaacagcctctgttttgattgattctagtcatcttctcaggtgaagtcgtcagaattaatggtggttctctttctggttgaattttcattttggttgtgttgggttcctacgtggttgcgcgatggttgcccaagaagcatggatcctggattgaaggtttgtgtaagtggtatttgtgtaatttttttatgtgggatgtatatttattttttttgcccgctggaagtatttttgtaatattgttattttttttggttaaaactaaaaaaaaaaaaaaaaaaaagaaattattacataaaaaatataaattgacacttta

SEQ ID NO: 137255 - DNA, 662 bp, Cannabis sativa
  modified_base (255)..(265): a, c, t, g, unknown or other
ttctcgctagcatttggctcggaagcaatgctgcttgttgaagtgaacatattgactcatagaagagagttttagaatcaagaacaaaactaggaacttttaaaattgtccttggatctatttgaggaaaaacgaactgagttccaaatcatcaacggtgcatacaaacatcgagtcataagatacatcaacaaaagagtcaagaaaagactatttaatgttggagacttggtgttaagatgagtctttgcaaannnnnnnnnnncatcagcaggagtgttcaacccgaaatgggagggtccatatgtcatcgaagcagtagttcgagtcgaagtctataaattagctcgacctgatggctcgctaataaaaaactactggaatgtagaacatttgcgaccctactatcaataaataaattgtatcactctaactaatacaggcgtgttagcctgatttttaacgtactgtgcagcacgttgctaatcaatgaggttgttgaaaatggtgaataattaaaatttgcttatttaataaaaaacataaagtaatacattatgaaatctcgggataccgtttgcaaaataaatttataaaagtttgctattcatacacaaaagttttttcgccaagcgactatacagcaaaagcctcgatgtccc

SEQ ID NO: 137256 - DNA, 881 bp, Cannabis sativa
tatatatcttttatatcttttacatctttgcaatttcttttttaagtaatacataataattccatgattttatttgattatatattatgaacattagtgaattcaatcaccaatataaagtcaacttacggagtaaagagaaattgggacggagacccttgtgcccctgtggaatacttgtggattggcctaaattgtagctacaatgattttgatcctccaatgaatatatccttgtaagttattttatagcactccctaacttaactttttatttttaattttattattattgttctttataacatataattctaaattgattgaaattaatgatattcaggaacttgtcatcgagtgtattgactggcaatgtaactacacatatcaaaactctctaggattcaatctctgtaagtaccttaaatctatcatgattttgctctactttacttgctttttatctacaagttgtacaatcacaaactacttaattactctgttttgtttcagggatttgtttcagggtgttgaaaatggtacaggctccggagacgccatggcagcacgatttatttatggatcaaggggctgctttctctggttagcctggccgagcttctgcaattaaaacagggacaaagctttacatatcaatcttggaatatggtgtttcaaacgaggatattaaggtccctattatttctaattatattttttttcccttcatatatacataatcaaaagattataagattataagtcacttttataaaccccattaaataaaatggtttaggagaaattcataagtcactttttatttatatataataaaataaaataaaataattcccatttaataaaaaaaaaaaataagt

SEQ ID NO: 137257 - DNA, 591 bp, Cannabis sativa
tataccgcttacaaacataaaactttgggtaattatgccgctatttacccaaaattaatttaaacagatattttcttaattataatttatttttatttttaatctcgaccttgaccctgtactccgaatctaggatccaaactcgaacttcaaggcctagacctgaccccaccctgaatcatgacccaaaccttagattttacctagactcgaacccaaccatacacccatacccaaattccagatccaaccaataaaaaattgaaaaaaaattcttattttgttggattcaaaactattagaattatggaaaaaaaataagagggttttttatttttacactttaaaacagtttttttacatttttatggaattccacacagaaaccttatagcaactaacgaggcaacctaaattgcaacagaaatccgtatagcaacctacatagaaactaccggagcaacccaaactgtaaatttaaaaaaaaattaaaaaataatatatggagtaattttcaaaaaaaaaaaataaagagattgaaagtatactatttatttataggttaattaagatttttaccccctgaacttt

SEQ ID NO: 137258 - DNA, 785 bp, Cannabis sativa
taaagtcgctgctctataaatcgcttttcacatatcactcctttgacaaatgcaaagagttttttcaaatcctaaaaggcaacaagaagttccaatggatcgagaaatgcaaagaagcttttcaagcactaaaaacgcatttgggatagcccccgatcttgtcaaaaccaatgcctggagaagtttgatccatttacctagcggtgtcagaatatgcgattagctcggtactaatccgcgaattccaaggtcggcaatacccagtgtactatgttagtaaacgtttattagatgctgagactcgttaccctcaaatggaaaaattagcatttgccctggtaatatcgtaaagaaaattgcaaccttatttttaggctcatagcattgaggttttaacgaactaccctttgaggcaagttttagcaaagctagaaacatcgggaaggttgttgaaatggtcagtagaactaagcaagttcgacatcaagtacaaaccaagatctgcgattaacgggcaagccttggcagatttcattctcgagttcccaagcactgaggtagcactcgtagaagaaaaaattgatactgatgtgccaaatggcgagggatggactttatacatcgatggagcctctaatagcgaaggctccggtggcggcataatactcatcagtccaaacaactttaaggtacatgctgctttacgatttgaattttctgcatctaacaacaaagccgagtatgaagctttgatcgcagggttaaagctcgcccttgaaatgaag

SEQ ID NO: 137259 - DNA, 699 bp, Cannabis sativa
  modified_base (636)..(637): a, c, t, g, unknown or other
tctcctacaacccataatcataccaacacgggccttagtagcaaccacatcctctaatgtaatgtcttcaaaaagttcaagcatttaaatttccataacactatctcgtttcaacagctagctaatgcttgagtcgcttgaaacaacatgaacatccactatgtttttattacttaaagttatcctagcgatgacagagcaatcacacaaacaaaccagaaaagaagagcagtaagacacaaacaagatagcacaagcacaaacgcgtagggcagacacacccaaaaccaaaaacagtcaaagacagactagactttgctaaaggggccatgaatatcatataattcaatatacatgcgcctaagttttttcccttaaaccctaatattttcactagtcggtacgtactcattattaatagtcattattattgcttatagaatttagtatgatcaatgcttatatgatatttacttattagaaaaattatcataggtaaatattatagtgcattagagtataattacaaatgttatgttaaatataacatttgtctatctttttgtgttaaatttagcacaatatacacatattacataatggaggggattctaatggttacatttttattgtaannatcatggttacattttttttagccattggatcactattaaatggttgtgattaatttggaaa

SEQ ID NO: 137260 - DNA, 543 bp, Cannabis sativa
tggattcttcaaaattttcaccactagttgtagaggtgacacttacctcgtcaaaattgtgaaaggtagtattggagattagtgcttcattcacctggtgtagaggaaaactgacagcatgcgaacttaccaggtgaccagataacttgcttaattcctccttaatttgtttcagctcagcaagtaagtctttcatcatctcgcaatttgtcaccatagatgcttgtaactcaagaatagtgtcattgagggaacggttgtatagatgctgagaattataagaaaaccaagaatcttcctcttcacaattccactcatataatggattatagtcatactcaggcttccaactataatcatcaagactattctgatagaaagagttgtaagactgttcttcttcctcatcataaggatatgcactagatggtataagttcacaaggatctggtcgatgagactcgtaccaagccttccactttttagaactctcactcttgtaaaaagaatagtattggaaagtttcctccccgtcactaaatt

SEQ ID NO: 137261 - DNA, 924 bp, Cannabis sativa
gaacactccaggtcatgctacctcaacatatacaacctcatccagctcagattcactcctgttcagctttcgccttttctttacctacacatggaagcagaattgtgagttaacaaactcagtaagaaaagtatataacatatcatataatttctgacttgtatttaagcgcccatacacctaactacaaggctcaacagatgagtaagaacgttccgtacttgggtatagccactatacgacgttcattacgtacctcactgtacgagttttggtagggtttgtttcataccctgagtaccactgagtgatataccacacacaccaagttcttttccgtacttgtgctggtatcactgaaatgtactctcagataacattcactataccaatgcactctataccttagctgcataagtgtttgtagtgcaactaacacactaagcatgcatatacacataacatatacatacattaagatattgatatcacacatacatttccgacgaatattcaaagtggtgctggccgacctgaacggaaagtctcacgctagatggatgccctaatcacattatgaaacagggtaagttacaagatgaaaaccctaatcccgggaaacccaacccacaaccctaggctttattattctttctagcggttaatctatctctagaaatagggaaacacccaaccatgacacggaatggatgagaattgaggaaatgaaagccccggggaaccctgccaaaatatgctagccgattttacatgtacgtgtaaaaccggttacccggtttgcaccagttcacccaagaaatttcatttcttgcttaaaactccaccacacgtaaccaaaccttccagagtacctaattagggtatatacaatatattccagccagtatttcacagaaaaacata

SEQ ID NO: 137262 - DNA, 636 bp, Cannabis sativa
ggtttgatcactaaaatgccaattttgatctaggacttctctcgaaaatggttaaaaaaggggtaaggacctcgtcctcaagttctagaatcttggaaatatcaaaacgacatcccaaaagctctaaaataagcactcaacacccaagttgacaaatggcctagtgcgctgtgttttacctatctgattctgatttcgtgtcgaccgcccgtctagtttttcacaataattaagagccatgaattcggaaaattcaaattcacaactttacatttctcatttctcatttccaacatggtaaactactcaaaaagggcagtttcgagtctcccgtttacacagaactacaacatttccaagaactggtgaccacctttgctagaacacaaaaataaactaagtggtgtcaaaatgtaacttaggcataaaaaaatacatccccaagacattttaccactcacctagcgttcaggttgaaatcataagtcaacctaagcagttaaagtgacccaatctctagttacaatttttccgtacatgttgaattatatggattaaaaaaagaataaaatattggccaaaattcaactatggtcgtacacttaaagtaacccaatctctagttacaattttacc

SEQ ID NO: 137263 - DNA, 708 bp, Cannabis sativa
  modified_base (508)..(520): a, c, t, g, unknown or other
aaatcacaggaaaaatcaccaagacactggtttcttgatgaaaaaaccgatttcttaatgaagaaaccggtttcttggtgatttttccagtaattttaccgatgacaatgcaaattccgatgactattctggagtttgatgtcggtgccggaaaagtcgtcggagtagttgccaatgtcgaaaaaatcgctggagttattgccggcataaaaaaaattgtcagaattggcattgtcgccagcaaaattactagaaaaatcaccaagaaagtggtttcttcatcaatgaactaatttcgttacataacaataataaagattatgaaaacaaaacaaaaatgatatacactaaaaataattgaaactattttcatcaatcaaccaaatagagaaaaaaacacaccaaaaaaaatattcataaatataaacagaacaatgtacaatgcacaacaataatctaaaataaaatataagtgtgaattccagtttcaaacctagaaacaaaatannnnnnnnnnnnntaaaataaaaatatacaataacatcataaaataaagcaacctcattacagaacccttaaaacctgtaaaaccagtttcgaacttatgaaccctatgaaaccagattcggcattataaaaaatcataacgaaatataaatgctaaacaataaagttaactgaaacaagttatcaaaattagcatagtcg

SEQ ID NO: 137264 - DNA, 785 bp, Cannabis sativa
agttgcataaaaatccaagcttaggcttcgcttgaaaagatcaaaggaagaaagcatcatggagagtaagacagacttcaagcggtccttccattccgaggaggaggcttgaagacgtgccataccccagtgatctttcttgcacgaaaaacacagcgtgcatgtaagagtcctattgaattttcacgaggcaagctccggcttccgcgaaggaaggctgaagttgcagaaaaattcaagcttagacttcacttgaaaagatcaaagggtgaaagagtcagtgagagtaaagcatacttcaagcagtctttcccttccgagaaggagggttgaagacgtgcaacacacccaatgatctttcacgcgcaaaaagaaatgcgcatgcacctctcgagctctgggaagctttaggggttgcatgcatgcgcccaaggatctcctgggcagtctgtttcctccggtgaagtgcatggcctctaatggtttttggggaaaaaactcagactcccaataggataagcagtggaccaacaggagcttcctaactggtttataatgtctcgagttgctttctctaatgtaactctggggttgtagtcacaacaagcaacataagccttttgagtgaactgtgttaaaaatggcttgcctcaatcaatagtaccataaccaggcctgactggtggcccaacagacgtcgacgatattgatggtctcctcttaaccgccgctattacaggatcaatttctgaacaacttttccacctagtgcaaaggcaggggaa

SEQ ID NO: 137265 - DNA, 1023 bp, Cannabis sativa
gttttgtctcgtgacactaatgaaggctctaattgttcttctccatcagattcttcttgctcttctccatcggatctacttgttcatctctattaaattcagcttgttcttgtccatctaattttgcttgtttttgtctatctgattttgtttcttcttgtccacttgattctaatttttcttctccatttgtttctgattgttcaaaattttctattgattgatttaaataaaaagaggtaatattatatcaatcgagtacaaacataatagtcaagctttacccacaagaggtcgagctcaactcaagacagttgagctttatactaacattacaagaatttggagactacatctcgaccatgaatggtcgagctctactccgtatagtcgagctctacactaatattttaagacttttgatactacattggtcgagctctactaaaagcagtaaaggtttatactaacattttaattatgatctcgaccatttatgttcgagcttttctaacaccaatcaagctatataatttatcaaatagactttggaaatcttaagcatattttgtgaagttctacccatttacctcattatttgattgaattgttgttgtgcatgcgggaggagttggttcgttcaaaataaattatcgttggattagttgttttagatctataatacttggtattttacttcgcgccattgaattgccaaaatatagtatgttaaagttgaacttaggtgattgaacaattgcataacttgaaaatgctaatcataagtaaatatgcataagagctaattagtgcaaaaatgagaagaacattactcttgcctaaaaaaaatacaatagtctttaattttaactgttaattcataaaataatgtgatattaatatagtagtgtatttatttaaatttagataacaaatcaaatcaaatcaaatatgtatatgtattatgttatgcaaggccggccctgaaacgtagtgggctatagaaaaaaaaattatttttgg

SEQ ID NO: 137266 - DNA, 503 bp, Cannabis sativa
  modified_base (439)..(440): a, c, t, g, unknown or other
gtagggaacttttgctaggtcctaccatagtattaacctataattataaaacctattgaaactaactcatcgatatatatatatatattttgaaagagaaaataataaaaattaaaaaaccttaaaattaatacttagttgaaataacaataataaaaaattatatgaaatatatcattgatacattatttcaaatatattgttcaaataaaatttaaaaatacaactaatttgttcgataaaagaaaaaagtgacgaaatttaaaaaccctaaaaattttatgaaattaagattataagtgttccaaagccatcaatgtgtctctttttctctttaattctctcattttttttaattttatttatatatcaatttaatcaactccatctattttatctttttttctctattttttagttaatattatttaataaacannttaaaagaacaaaacaaaatatcactacactgcataaacctaacatagtaacattttattttt

SEQ ID NO: 137267 - DNA, 1024 bp, Cannabis sativa
tgagttatgagcacgcggtactcgggagacaatcacttttttgaacttctgcaacaactcgcatgctatggcgaggtatttagccaaacgcccgcctcttgccagatattctctgtttatctgacatacgacgatttgggagtcactaaaagcttgtaagtactcaatcttcagctctagggcgagctttaatcctgcgatcaaagcttcattgttagatgcagaaaattcaaatcgtaaagcagcgtgtaccttaaaattgctggaactgatgagtattatgccgccgtcggagccttcgctattagaggctccatcgacgtataaagtccatccttcgccatttggtatatcagtatcaattttttcttctacgagtcctacttcagtactcgagaactcgagaatgaaatctaccaaggcctgcaccttaatcgtagatcttggtttgtacttaatatcgaactggctaagttctactgaccatttcaacaaccttcccgatgcttttggttttactaaaactttcctcaaagggtagttcgttaaaacttcagcgctatgggcctagaaataaagttgcaattttcttgacgctattaccagggaaaatgcaagtttttccatttgagggtaacgagtctcagcgtctaggaaacgtttcctgacatagtacactgggtattgccgaccttggtcttcgcggattagtaccgagctaatcgcatattcagataccgctaggtaaatggataaaacttctctaggcattggttttgacaggattgggggctgccccaaatgcatttttagtgcttggaaagcttcttcgtacttttcggtccatggaacatcttgttgccttttaaaatttgaaaaaattctttgtatttgtcagaggatcatgttataaaatgatttagaggggcgactttacctgtcagactttggacttcttttggcttagtcggagatcgcatttctactaatgctttaatcttcgcagggtttgcctcaattcctc

SEQ ID NO: 137268 - DNA, 1423 bp, Cannabis sativa
  modified_base (52)..(54): a, c, t, g, unknown or other
ttttattcaaggtacttaattatttgtttctattttaataaatttaattaannngaaaattatatttaagttagaaatcttttaatttaagatcatcttaaaatagaataattttcagagtacattttattttattttagtaattattttttcatgtaaattccagaatacatttattttaaatgtggatattttgagagaattttcaattttgaatattagattaagttgaaaattaatttgttaattaattttggatcaacttaagtcaagtaatactttcattaatgattagttaaaataaacagactaaaatatattatattttaattagaaaaataaataattagtttgtgaaatatccagatggttattttttgagtaaacttatggtattttttttagatatatttaattaaataaaaattattatttaagttgattttattcaagacacttaaatattagatactttttagaaaattaaattaaatagaaaaattatatttatgttaaaaattatcttaattaattttagatcaacataaattagaataatttcctagatttattttaaggtaaataccattttagaccacgtgttttacaaaagttaccaattggaccttctatttgttaaaaaatagaccctgtattttctaaaattagataaataggactctgaactgatttttaactaaaataaaacttaataataatctgatatagagatgttatgataaaactggttatatttttttgtatctgttcgtattagaaattttcttaaagttgattacattaaaaaataaaattgttgaaaattgagctcaaggtcttatttttaccattttggaaatataaggtccattttatcatttaacaaaacagatggtctaattggtaaattttacagaacatagggtccaaaatggtatttaccctttattttgttttaatagaatttgaaaatgtactttcaatatacattgcatttcgaatttaattagagataaatatttataaaaaattagatttaagttgaaaattaatcttaattagttttggaccaacttaaactaagtaatttttataatatttattgaaaattaatattaaggatgaaaaataatttttttttagatctatccaggtgtgtatttcattttataaatattaaattgaaatttatatttatagttatataaattagtaattttaattaaataaatatataaatattaaaataaatagattaaaataaatatcaaatgaaaaatacaacaattttttttttaaataatgagctttaatttaaggatatttgatcttcattgttagtcttacatgtttaatattttaatgggacctcgagacactagacttcgtctcccatatggatggtcttacattgaacatttaa

SEQ ID NO: 137269 - DNA, 674 bp, Cannabis sativa
tattccgtttaaatgatgacgtgtatttgtcaattaacaattttgccccataaactttgacaactatcaattaaatcgtacatccttaaaataaaaatgagaaaaattcaacatttttttaataaatttgtttaagtaaacataatattttttttagtttaattcatcttttttttttttaaaaaaaataattttatattttattgaatttttaattatttttctttatttgttaagatataagtttataaatataaataagtttaattttttcttcaaaaaattttagtttttatttaaattgtttattagattcccaataattttggtttgattttctaagatatgtgttgataaataaaataaagtttgaaaatatttttttaagtaaaattaatattttctaattaatttaataattttatccaatttttaataattttttattatttttataaaattaataaaatattataattgctttaaaaaatagaatattataattttttaaaattatttttttttaataaaaggtggcaaaattttgtatttgtcgaaattcaaggggtaaaaatactaatttttaacagttaaagaaacagaacctaacaaccataattatgtaactattatattttagagagaatttttaacaagtagtatattttaagatg

SEQ ID NO: 137270 - DNA, 530 bp, Cannabis sativa
aatatcgaacagtttactgaaatctgtattttggtaaataaaaatgttaaactgtaaaaataaaaatttctctgtattaacatatttttgtaattgttttcaaatttttagtctatcatgcaaaaatttcaaaagaaaaacacttttaacacttaaaaatagctatttaacaaaataagattttaaagttccaaaattacaattttctcaacaaaaagtaagaaaacaataagaaatcattctcataacaactataaatcaactataaaacatccaaaaacaacaaaaaagaaaaccaacatcatcacaactataaataaactataaaacaaaaataaaaatcaaacagtttagttcactgaagtccgtatttttgtaaataaacgagtttaaatcgtataaataaaatttcaattttttctgtacttaaaaaagctattaaacagaataagattttaaaatttcaaaattataaaaatacaattttctaagcaaaaagtaagaaaacaacaagaaatcaatctcacaac

SEQ ID NO: 137271 - DNA, 904 bp, Cannabis sativa
  modified_base (532)..(536): a, c, t, g, unknown or other
caagacagtggcactggtaaaagtactgtggaggaacagtaaagtggaagaggcaacctgggaactcgagacggatatgcaacagaaatatttaaagttgttcaggtaaatttcaagacgaaatttctataaggagggggtaattgtaataccctagatttaagaaatggattagaaaaaccctaattagataattatgaataaattgaggaactatattataatatagttcagtatatgtgaatcaatatgaattttaacatgttaagaccccgttggtgagccatgggtattttagtaattgtgacccgagaagggtagaatgatgaaattaatttaattacgtgctaaatggaactatattattatatagtatacctatgttgtcttttcaggtgtgttctgacaggttggcgtggtatagtcacaaccgggtatttcgggacgaaccgggttcaggcccgaaatggaaattggatttgtttatttggcattttatttgatatgggataatctgaatttttatttgaannnnnttgggtatgaaatgacatgtttacacttatgtgtatgtgagatgaatttttggccctaagggcattttggtcatttgacctttaattactatatttgacaaaattgattttttcaggaaagcaaatgaatttttggctacttttctctctctcaccccgacccctctctctcaccctaactgtctcttgaaaattctagctttttggtgtgaattgattggtgttacttgattttggagcttgatttggaagaatttcaaggttgggattgaggtaatttcttgctgagtatatttgagatttagtgttgtaattcttgctgaaattattggggtaaaagcatattttgagttgttcttctcttgagg

SEQ ID NO: 137272 - DNA, 1221 bp, Cannabis sativa
gcgtggtcccgtggactaggagtgttcgggagaacactgataccacgtacaaatctcttgtgtcaagttatttaactttctgcaattatttttatattctatttattctattttgtcgctgcaaaactggtttctgcagtaacagaattacattctgcttctgcaggcgtatacaattttatattttcatatatattattgacatttacaaaaactctgtttttcagacctaaccatccaacttctcatcaactcacaatgaatccttaagaggtatgatcatctttactctaaatttctcgcctaatgccacctttcatcaaatccttccaaatttttacatgattacatctaatctagaccacatctttaaaaaatttaatgtttttaggggtgatttcccatgaattataccttggttcctaagtgtaaaaattaaagatacctctttgtctaggtcaaatagtaaatttggggatccattgtctaagagatttaggtttgtattttggtttatgaatgattccggaactgatggccaacaaacacttttctattttaatgctttgttagctaaaatgggtagaaaagacttatttgatgtttttggaaagactcagattgcaatatttgccttttattgtaattctcaaacatttttttttctactctgtcttaccaaaaatagatgacttagtaggttccctttctgttgctctcaatctaacagatacagagagcacagttcactcctttcaagactcctccacccatactgatcctaatctccattctaccaacattttcattgtggccaaacttcactcgatcaagtcctatagtaggaaacactttagagaaactatgacaaataattggaataaattgtgtcatttcctgattgtcattactgaaatgccccaaacctcttccttattaaatttgaatgcgatggtgataggagagtcatgattcaacaaccgttagtttaccttaacaatgctatcctcattgatataccaagtttcctgaatgttctaaatggagaatgttgacctcacttctagccaacgacagtgagtcaagataaagcaattagataaaacaaataatagaaagcaaaaataataaggtagaaagaacaccagattttctagaggttcgtgttgggttttgtgccctaaataaaagatcggaagagcgtcgtgtagggaaagagtg

SEQ ID NO: 137273 - DNA, 527 bp, Cannabis sativa
gatgttggaaataaaatttggccaatgaaactcccactcctatgtggtggccgaccactaccaccaattgtcccaaaagtttagcagtggtcgaccaactggtttccacaccccttggtgacttctttcacttagttttgacatagtattggtgaaaatatatatttttggcaagaaatcccatttcccttattcatggtcgaccactgccactcattatgccacaaagatgacagtggttggctaggcttatttcttggtgaaaaatggtttctttcacttgtgttgcactttttggtgttgagggaacatatttgaacaatttccccttggtgctttctaggtggcgaccactgccatctccagttctccaaaaattagaggtactgccatttccatatggcagtcggtgcataggctttattaaatgtgggttttgtgtcattttgactttatgcataaatctaagccatttcatgcccaaatgagttaagtctttgttagtttccttggcggattgaggtctc

SEQ ID NO: 137274 - DNA, 533 bp, Cannabis sativa
ccatttcaacacatgcatctttgggtttgctctcctcctccacgagaagcttccatcctatttttggctacttcaaaaatttcttgaataccatggacataagaagccacatgttgtagttactgaccaagatgtggccatgaaacaggccatcatggaacacttgccagatgttacacaccgtctatgctcttgtcatctcaatacaaatgcttccaaaatggttaaagatccgatcttcttaaaattttttaaatatttgatgtacaactactacacggaagaagaatttgaagtaaaatggttgattattatcgaaaggctagaactaacagataatgaatggtgccaaacaacattatacaagaaaacagtgggcagaaacttatttaaggggttcattcgttgcaggaatgagaactacataacgttacgaatcgatcaactccgctctaaaaaattttttagagaataattattgcttgcgtgaatttgtaacaaccatagatatgacagtctcaaagctcagacac

SEQ ID NO: 137275 - DNA, 603 bp, Cannabis sativa
gacatttgcaaaaacacggtttttcaattatgtttggtttagtatttgagtgttgtcttttgaaaagtgttcttagtaatgacccttttaaaagagttttgtttttgtttacattttcaatgttttcttagctagtgtactgtttttagtttcttgtttatattctttatttggttgctttcagtctatgttaggtcatagtgttgatgtcctaatagctcaaaaattgcatggacaatgattatgcttatgtgttggcaaagctttagaaaaaaaaatataagaagcactaaaaatttatagctacatatatatatattaggttgaagttacgtgtaatgtacgtacacttaatgtattacaatttttatttgttataatagatattgaaagtattgtacataatttaattaaataaataatattatttagaaggaaactgaatataaattaaaaaataaactaaatttcatactaaataaactaaatttaatatatagtacggaaagataaataaaataataatttgtaaaaactaaatgcttaatataaagtatatttagttatttactttttttcaatatatatatatatactattttt

SEQ ID NO: 137276 - DNA, 779 bp, Cannabis sativa
tgtgtttctgtttggggttgtgtttggggctgtgtttcttacaggggttgagaaagatgatccatgtcaaaatcagtgtgccaatcagactgtgtttcaggcaaagtgtcatgaatggcatttgtcacaggggggtactaggtgcttgtgtttggggctgtgtttggggctgtgtttggggttgtgtttcaagcaatgagtcatttgccacataggggtaccaggttgtgtttggggctgttttgggggttgtgtttggggttgagcctttctcatcctcctaagtctcaatctcttagaccttagagtttcttctacaggttcattgaatccagtgaccacaacctcaggggatttaggtgcatctgactctgcataagcatcagattcctttgtaggttcctgtcatgtttgacaaagtccaactacaattaacacattacatatctaattgaaaactcacaaataaaatgagtaatttttaactctaaataatccaactatctcagttacctattcctttgtgagatcagatgcttgatggctgtcattgccttcatatcctgagaagtcctctgccaaggccatataatcatccatctctggaggaatgaaataatcaaagtcctcttcaacctcatttgagtccacctcatttgaatcctcactttctgggggaaactgtggtgcagcctctgaatcagatgaggaactaatctcaattgcttcttgtaattcttctgaaatcacctctctgttgtaactgcagccataaactc

SEQ ID NO: 137277 - DNA, 843 bp, Cannabis sativa
aaaataatttccaacatttggatgacaacacacaacttacacccttcaggcggggatctctactgatccattgaccgcaggaagaagcatcactgagttcaatgaaagggttcaagtatttgttcggaaggaagaagcccgaaaaaaatgaatttgttgaaaacaagctcgggaagcaaacccagaaatgtttcaacaagtactgttttccacgagaattgataacttaggggcttctggttcgaagagaaaagacggtaccaaggaaccatcgaaggataaaaagaaacagaagaagcatcaataagtacgtgccagtgtatactatttatatcgagcttaatgaaacttgggagaatatttacctcgcacatgagcagaaggttgccttcggcaagcttgagcccatgaggaatttgaggagcaaaagagatcctaacaagtattataaattccataaggatattgggaatacgaccgacgaatgtcgccaattgaaagatgagatagaaagtcccattgctcgaggccattttaaatagtacgtgaaaagacaaggccatggatacaacctgcacagtctgcccaataacccaaacaaccaagggttacaacctcttccaattgaaggagaggacatcctggttatttcgggagggccacatatcgcaggggaaagcaataacgcccagaaaagatatgtgaaagagataaagaaagagcagtcggcatttaccccaaaaccttccaagacggtgaaaaccgaggaacctcccattgtattcatggaggaagacgagaaaaatgtgaggtatcctcatgtcgatccattggtgattacca

SEQ ID NO: 137278 - DNA, 663 bp, Cannabis sativa
  modified_base (32)..(38): a, c, t, g, unknown or other
  modified_base (361)..(367): a, c, t, g, unknown or other
tgctttagtgagtagtgtgttgtcacatctcnnnnnnnaatcaatcactctaataaaacaaaaaaaaattaatttttgatgtagggagacacaactactcattattttccggaatcgtcgaaaaaatcacggtcgccggaaaagtcgtcggaaagtcaacagaaaagtcaacatcgccggaacagtcaacgtcgttagaaaagtcaccaaattaaatgtctcatatataactaaaaatataaccagttatatgaataaaaactaataactcaaacctgttataattgaaatataaccagttctgtaacataataaataaatataaataacataaaataaaataactcaaatcagttataannnnnnnagaaccggttctataacagtgttataatgaataaaaaaaataacacgaaagaactcaaactatatataactaaaatagaaccggtcatataacataatgaatacaaacaagtaacaataactcaaaccgattacaattaaaaacaaagaagaaatcagttcttaaaacactgaaatataaattaaagataaaattagtttcataataaaatacttcataacacatgatacctcataaaaccggttacaatttttttttttaaatgtcttagatataataaaaatagaaccggttct

SEQ ID NO: 137279 - DNA, 753 bp, Cannabis sativa
attcattacttaataagaaatattgaacaaataatattgttaaccagtttttcaaatttaattttctatcttcccacattattttactattacggacattacctttatatattaggattatttgatcatgagtttatgcgttttcattgtgccattttaaatattttagtgatctagttataatcttaaaaattgagccattaataatttaaaaataatttttttgaataatataaacaatatcacttgtatattatatattttaaaagattaaaaaaataaaacaataaagcattttttaaagaaaaagaaaaactaataataaaatagagggaattgctatagttagggagtgaatagtgatgatgacattaatttcgaatatcacatgtaagaatgtgtgtatagatcatttctttggagcaccttttttctaaaaaaaaatgaagttgttttgaaattgttgtctttaaattaatataacaattgtggaggaaaagaagacgaagacgagtcactatagtggctcggtgacggtctcgcagcatgaggattgtagtatttgcttccgtgagcatgatgattgctgtagtgagtcactgagtcgactctagcatttttggctcaataatcaaaaggaagaagatgaagaagccgttggaaaggtagatgacatttctgctctttcggtttccttccttgaagttgagagcttagacccgagttctttctttgaccgaggtttggaaccct

SEQ ID NO: 137280 - DNA, 940 bp, Cannabis sativa
  modified_base (202)..(204): a, c, t, g, unknown or other
tctaataaggattgactacggtttacagtcttctttcttgttttagtcaattttcaacaagtacaatcaacacaagtattccaaccagaagcatcaacaggagaaagaactttaaagttaattaaacaatcaaccatttctttagaaatatgacccaatcttttatgacataacaataaggatatttccttaatatgaggtnnnttacccaaagtattcacaacattaaaagttgaatctaaagaagccaatgacaacttgtaaagaccatcagaataaaaacaatttccaataatttgggagtcaagcataatgtcaatattatcatttacaaaaaaaaaaaaaatatatattctagtctaaccaaaagcggaagcaaaactaaattcatcttaaaagtaggaacataaaaagtattaattgttcaaaataattttaacacgagactatatataattcaagaataaatgtgccaatatagataacgtcaactgcaacattattgcccactttaagcttggactccctctcactaggcttcctaagatcccttaacccctgtaaaggaagtaaaaacatgaacagtagcaccactatttaaccaccaagaataaataggaacatcaactagattagattcaaaataaacacaagctaatgggttacctgattgtgcttgcttcttttctaaccaagtcttaaatttgtgacagtccgttctccgatgtcccattttttcacaaaagtaacacttcacattagagtatttgaacttttcattgttattcttctgtttattcttatgctccttgtcattaccattatatttattaacaccatcatttttattcttgaacttacattttcctttgttgggcttgaggtgagaaacatagtgagcagattcattcttctcccttttttagcttgctttcttcag

SEQ ID NO: 137281 - DNA, 1169 bp, Cannabis sativa
aaaattaaaaaataaaaatattaaatgtgaattggtattggaggtagttttgtcgattgcgaactgtcttcaaccagtctgaattgtctgctgcaggctgtggtggagtgtttaaagttgttaaactttacaatgcctcgctgcaacaacttgttaatcctattgctagtgcaatttggtgtagcttaaactttactcagacccgaactcgggacccagccccgaacccggactgggactcgggactcgggacccgaacccgaacccggacccagatctttacacaatctattaattcatgtcaataccaacatagtattgtatttaataatactaatacaaaattaaaatggatataaaattataagttaatattaaaaatctttttttttttaaaaaaaaagagtcgggccggatcaaattcgatttgaataagtcggatcagatctgatccgatccgagtatgtgatctagcgggacagggtgggacagattcttacatgatctggatcaagtcggatcatagctggatcagatccgacccgacccatttacactcttaaatgaaagtatcttaaaactaagtaatctaaataaaaattaaataacaaaataaataaataaagcaattaattaagatgagagcatgattaaagtttaaggtaattaatttcaattgaatctattttacctaatttaacataattaattcttaaagtctaattttcaggtcatagcagatttactaaagaaatttttattcaggctaaagcatttactaaagaaatttgttgttagtagataagtttttattttttttattttttgtcatacactttgtttttgtatgtgttttaccttctaaaacaagaatatgaaaaaaattggtgatgtataaattaaaatattttacacacgtacttaacattattaacaactatttacgttttaattatcaagaatttattagttttagttatatttatatagttattagcctatatgaatcttttgcaagtatttcagtaaataatattagagtcatgactcatgaagcaaaataattcacgggattctatttatgtaatatttatgtacataatacatatattaatatatcaatttacaattttaaggctaattaggatttttgtcccctgaactttgac

SEQ ID NO: 137282 - DNA, 638 bp, Cannabis sativa
  modified_base (571)..(576): a, c, t, g, unknown or other
gattctcaatgactaacactagaggggcagtgatgccttctaaacttgatatccgtctatctaaggaacggtgtcccactgatccccaaaaggtagaggacatgagaaaggttctttatgcttcagcagttggaagtctaatgtatgctatgttatgcactagaccaaacatttgctatgcagtaggaattgtgagcaggtatcagacaaatccaggagaggaacattgactgcagttaagcatatactgaaatatttgaaaagtacaaggcattatgtgttagtctacaagggtggtgctttaaatcttgtaggctatattgatgacaggaagtctacatcttagatggtatttactcttgggggtggagtagttgtttggagaagtgttaaacgaatcgcaacatcagactctaccatggagctcgaatacatagttgtcactaaggttgctgaggaactagcctggctaagaaagttcttctcaggacatggtgttgttcctgaaatggaaaaaacactggtttttaattttgtgataacactggtgctatagccaacagtaaagagnnnnnnagccacaagagaagcaaacatattgagaggaaataccacatcatcaggaaatatgtggcaag

SEQ ID NO: 137283 - DNA, 641 bp, Cannabis sativa
ttttagtttattaaaattattttcaaggaataatgattactcggtttcagttatttggattattgttttgactgttttttggaagttttatcggttttgttgacaatgaaaataagtatcttcttaagtataagaagagtgtttttagtttcatgttaatgaatttttgctcaagtaatgtcttaaataaaagtttgtttttgtatgataattattcttttagtgttattttttacataaaatatatctttagtttattataatcgaatattacacttaaaggtcattgagacaatgcatgataattgattagaatatagtggtttaattgggttcgtgtggtatgtctagagtatgatttagttgattaattgtctataaatagaatcttaaataaataaatactaagcaaacgacatattaggaaacgtgatgataaaagcacaatgttttccaatatttataggccataaataatattgaaacttatttctacacttataatcatggttaacgtgattggtggaacaaaggacattactttcagtcagctaaaataaattagaatgtaagaggtatataattattagtattaaaaagcttatataattaaaatgaggttaattttcttaatattcaaa

SEQ ID NO: 137284 - DNA, 665 bp, Cannabis sativa
aaggaggaagagaaagaggcctatttggtttgcagactacatggagaagaagaagaaacagaggccttcttcgacgtttgatcccctggctccatcggatgagtgattgatggatactttctggaagtggtgttcaagactcattcccaatcatcgactttgggatttgcacagtggtgattacggtccatcattttttagaagctgttgacgcatcaggaatggcttacagattgcataagtaaactaatctataattttactacattttataagtcaagtaatctacaattaatatatttggttgtctaactactttctttaacctttatgtgcaacatatagatacaaccgtccatctactgaggaggcgacaccacttctttccattgacatttcctcagaagggtatcattctgtcaacatgtaaagcgtgtacacacttgtattcgttttcaatgtcgcggcacatgcatgaaggcaagggagtttcaataacgtaaacacgccgtaggtgcatgtcctttcaactaggttcacatcaccacatcttttaccgttaggtcccctacaaccattttacaaattggctccatttcgttggacgcgtctgaaccttgcattttcatgaatttttgccaagtttttttcaaagagcgtggcca

SEQ ID NO: 137285 - DNA, 1524 bp, Cannabis sativa
  modified_base (755)..(768): a, c, t, g, unknown or other
  modified_base (1002)..(1002): a, c, t, g, unknown or other
  modified_base (1490)..(1490): a, c, t, g, unknown or other
cttgtctagtaattcatcgagagagatcatacctgagggttccaaccagattaacggtgccattccacctgtcaaccaagaaaatcaatcgctaaggcagcaaggcacttttgtattcgaaaggttggaaagaactcatgacctaaggaatgatctgaatagaaggagaggagtagacgattagaatgtcacgacgatcgtgcagcctggagcccgatgctcaaattctcgctcataaagatgcagacatgattcaaattgaccagaatgttgagcaagttatcccagtcgtacaggcacagctagacgaactgaaaaatatgttccaaggcatggctggacaaagaaacaacgatctcgagctggaccgagcacgtggaactcctttttctctcgagatatatcttctggcgttgccccacaagtttaaattgccaacatggaaaatgtacacagaaagataagatcctctttcccacctcaagtatttcgaaatgcaaatggatgtacaaggggtacgaggagatgtgtactgcagaatctttcctgctaccctgtcagaagccgcccagcaatggtatttcaagttggccctaagaaagttcagttcatggaaagccttctctttgtaatttcatgcacagttctcctcctgtctccaatttccattgcatctaggagattcggtcgaagttaagcaatgaccaggtgagcctctccgggcatacatcaacagattcatgacggaggcgacnnnnnnnnnnnnnngtaactgaagatggaaagttatccgcgatactgggggcattgaagtcctcagtgaactttggaaggatataaggaagaacgggccggtagactcaatgagtgattttcttgatcgtgtcgaaggcttcatcaagctcgaagaagccattcaacgagcaaaaggtgagcaaaagcctggcaagtcaaaggctccttctactagaacatctgcccaacttccccattacccaaatnattcaagctcaagtggtaaacgttccaacaacaaccacaggcaacggaatgggaagaaaggaaaattcgtcggcaaatccgaacaagctccccgggagaatcaagcaaagtacactgcgttcactatcttgactgaagacatagaaagtatttacatggcaactcagtcgctggccccatataagaagccctggcccatgaagaaagatgtcagcaaaagggacatgacaaagttttgtcgatttcgcggagactatcgccatgacactaatgaatgcaacaacctaaagcgggaaattgaattcctgataaggaaaaacaacccacacttgcagaagtatgtcaagaccgatcagggtcagaggaatgacaatagccaagagttactacctccaccggtagatgggcatctgcaagtcatcattggaggcccgtattgttgggttttgcatcctaaataaaacccatttaaatataatcagatttantaattaataaagatcaaaaataacattttatgtt

SEQ ID NO: 137286 - DNA, 843 bp, Cannabis sativa
ataataatataaaataaataaataggtccatgtccgggaggggcatgttatcctcattctcgctccgtttaacatttagggatagaaaattattcccgtgcttacctcatttcctatttagacgagaaatccccacacatacccaccgcgagacctcatacctaacaggtgcaattttcagctctaattttgagataattataatagtatattctacattattaataaggtaaataatattttggaccttatattttgtaaaagttaccagttagactctctgttttattaaatgataaaatagactttgtattttccctcaaaaaaaaaaaaaatagactttgcattttctgaaatggtataaataggactctgaatttaatctttgtaacttttttttaatatgactaacttgaaaacaattcctaacacgaacaaatacagaaaatgtaaacaattttctcataacacttttagatcagattattattaaattttattttgacaaaaaatcagttcagattcctatttgtaccattttgaaaaataccgagtctattttatcatttaacaaaacagagaatctaattagtaattattacgaaatacaggattcaaaattgtatttgctcttattaatattgtttatagagtaatttgtggcgataatattaatgtatagcttccaatcacacttaaatatttaaatttaaattttgagggtaataatatttttttgttaacattttattgtaaatgaggtacacctcacgttaaatttattgttaaatgctaattatttacatatacttaattgttaaaaatttaacttataacgaaaga

SEQ ID NO: 137287 - DNA, 876 bp, Cannabis sativa
tagttgttatttttcttcatgtacgttataattatttaggatcttaaataattttttttggtaagtaagtatactttatattctaccagacaaacaacatgtatagctttggttgtactagttgtttgttggtggaatgtgaagtatcattaccaaaaaaaaaaaattatttaggatcacttataaattttcgaatttttttaaataatttacagtgttgaaaataaaatccaaatagttactgataattacttttataataagataaaagatagtcatgtgtgtaacaaaatatttgaattttatttttaattttataaattattcaaaaatttatgaaaatttacaagttgcataaataactataacatacttatttttagtggaaccaatattagatcaacaatgagattgatttgtttagggaaagtgaattattatataaaacttaatggatcaaagttcaatgtttaaatatgttggggtatcaatctaagtcccacattagaagattaggctaaagttatcatgaatataaatattttacctactccattaatacgaggtcttttgaaaatgtatttaaaaataaaactctgaaggcttaggccaaagtggggtcaagcggcgaattttgttagagatagcggcaacacatgttattaggttactttaaattttttaaaaattctgaataatctttagtgttgaaaacaagaattaaatagtctcttactaaacttatgacaaaatatttaaatcttattttttaggcattaaattatttatgtttttttaaaaaatataacagtaatttaaaaaaaaaattattctaagtatcaaaattacatataacatatatatagggatatgatt

SEQ ID NO: 137288 - DNA, 559 bp, Cannabis sativa
ggctcctcatcgttcgctctcttcagtttctcgtcccctctctctcacgttcctctcgccgtgactgtgatgggccacatccgaccaacgtcggctcagtcattgatggcctcgccaagttcgaaattccctgatctcgctacaccccttttcttctctccggttctcatcgcaccttcctttattctgtcgctcctctttttctcgatgggtattaatggctccaatgatagatgtaggttttttttttttatttgtgatttgttatttatttattttttttttttttgggtttgtttgtttcatgggatttggatatgaaatgtaggtaggtgtttgtttgtttctgttgacatatgggtttatgtttgaattttttttaagtattttcatatctattttttcatatctattttttttttttaaaaaaaaaacaaattaagacctctactgattgtgtttatatggtagtgatggtaattctggtggatgattttgataatggtgggtagtggtagtgatggtggtggtgttgggagataatggagaagaagatgat

SEQ ID NO: 137289 - DNA, 1224 bp, Cannabis sativa
  modified_base (460)..(465): a, c, t, g, unknown or other
cttacgttccaagtttgacgttccaagtttgagtactcaagtttgagtactcgagtttgagtactcgccgttgagtactcgccgttgagtactcgccgttcttactcgccgttctaggttgaatactcgcagttgttcttcacgtaatttcttcttattcttaatattattattcatttttggtgttgcgaattttgctcgacaacatttggcgtcgtctgtgggaacggagaagtacattcttactgaatacaagaaggagaatcatcatggctggaaaccaagtaaacagaggtattaacaacgaatccatcaacatcaaaatgatgaatgttccattgtctggggttaggacacccccttatatgtcatcaatggcgaagtaggtcgaggtaatgtcaggcccctcaatctattccttgaaattgctggcccacaagtcggagaaacatccacgccnnnnnnaacaatggggcactttccacccatcactccggtggcagtgtccgaggttattgtccagctaaccaccgaccagtatatcgcgatccaagacaagctgcgcgccctgcaggccgagatggatggacagaacagggcccgacgccctcctcgagcccccactactcgcacagaaaaccctcaggtaacccactctagacgtcgtaataaccgtgttcgcagggaacgaaggaccaaccccgaaggactcgacctgaatcaaccaacctcgagagactaatctgtgaggtatcccaaccaagagacacagatcgacgaagaccccaaacgacgtaaccctcgcagcagaccttcgcgagacaacgacgtagaattcgtctcctcgtcctcgcatggtcgcacacctagcaggtacatgaggtccggttctatggagacgcagcagggaggatgataccagattcacaggggtgatctgcgtgatcaccttaacactgttttcagagcacgctcccacgcccctcgtgaggaggaagagccccgtgatccccaaatgggcaatcagggtgtaaacactcgcacaaatctacctaacgcaccagctgcgactaccggggttaatgtcccaacaaacctcgctgcagtagccacagcccctgcagccgcagcactccctgctcccttagcgggaggtattgatcaaagcatgctcttccaggctttgaaaatgctcaagcagcagagaaagcccatatacaagct

SEQ ID NO: 137290 - DNA, 620 bp, Cannabis sativa
aacattgacatgactcgggacctagaactggaccccagtctcggtcctggacctagacccaaacctagacctaggacatgaatttaaacaagactaggacccgtgattgggatgcaaatcttgtccaatgattagagaaccagggcttggacacgacccatagtggatgtcttgatcatggactcggacaaggacccgaagctggaaaaggacctagacacaaacccaaacttgggacccaaaaccgaaacttgaaaaaagaacgtgatcaggaccatggaatcggagcaggaccgtgatttggaccttgactcgggctcagtttagaccgaacctagtcgagaactcgggttcagacccagtcctggacccaggctagcactcagactcgaaccagaacctgaagacgaagtcgggacacgatcccacacccggacgaagccctttacctaaattggaattcggaccttgacatggacacaaacccatacccgaacccaaataacgacacagacctaggcccagacgtagacgcagacccagaaccaagacctgaacttggaccttgactcagatctggacccagaccgagattcgaaaaacccgtactcggactcgaa

SEQ ID NO: 137291 - DNA, 981 bp, Cannabis sativa
  modified_base (908)..(925): a, c, t, g, unknown or other
caattattcattagctaggcaaaaactttaaaccacattcatcatcctccctatatgggaaatttagctcataacaataataaaaacatccatgattcattttgaagcaaaactagacataaaagatagatagagggtaaaagaaagaaactagatggtgatatcgctccaggtcttcaagatcgcttcctctcctctttcattcacttttcacgtctattcttccttactttgaccttctgaatcgtgttccttatataagaatgaaaggtgtgcctccaatttgagaaaaaaatctgaattaggtcaaaaactgcgttttccgtacctggtcgcgaccaccttaaaggctggtcgcgactacaggcaaacttcaaaaatcataggttctgccaaaatctcccagtcgcgaccatggtcgcgaccaaagaaaagggtcgcgaccagagtctatggtagtcccgactactgacaccagaagagcagatttttctgatttttcaccagtttgtcctgtcttttcatcaattgactgaatttgaactttgataccccgggaacctaaaacaaggaaaatcaagcgtaaaaccgctccaaaagacaccaataactgagaaaatgcttacttattagacacgtaacataggctaattataacctaacaaaattcccccaaactagattcttactcgccctcgagtgagataaagacaataaaaaaaaactaactacgctatcagataatcactatactgctgcctcatgctctgctttcttccttgcgcacactagaatttcaatcccaccaactctaacaattaatttagatgctcaatttacaacactatgcataaacacaagatgtagacacaatgaaacaatgtcattgttatcccaaaattggcacnnnnnnnnnnnnnnnnnngaatggtgacacgtggcatctactaagagcacctggtcggatcaacatgccaagca

SEQ ID NO: 137292 - DNA, 511 bp, Cannabis sativa
taatttctattaaaggaataaaacatataatacattttatataatgaagggtattttaggtattaaaaagtaaaaaagaacatttcttttattattttaaaaaatgaacaataactatctataaaattaaaaatagggtcatttacttacatttctcttctcttttctctcttttaccatttgttaatctttcttgtttatacccaaatcatggtggggtaggtccgtcaccttagacttatgaccaattgcagatttggatggcttcttccgtttggaaaagcagggccgccaagcagtttggagtcttcgccaaaaaattaaaattgttttttattttataaaaaattaatcaatatttcacaaatttaatttttaaaaaataaaaaaatactttattaattttaaaatatataagaattttagaatgagattatttcacaaatacacaaaaataacaaaagaattacaaaaatacgagtttaccgaattttaaatatttttacaattt

SEQ ID NO: 137293 - DNA, 635 bp, Cannabis sativa
ttttcgacccgcatctaattttcccgaccctaacccgtaaaattcgtgccgtgttcgtgttcgtgtgccgtgttgaaacccgttttgccacccctacatattaataacgaaaatatcaaaggacatattaaaatgacaagcactacaaaaagtagcatactgctattggtgcattttaatatcagcttccatagattttaatttaataaataatttagaaaactgctaacaaattattgggtatcacatcactatgatattgagcaccttaaagtgtcatataacaataatagtacaaagatcgtacctaaaaaataaaataaaacacaattgaaactaataaaaatatgtacatatcaataaagaaaatgttataaggcatattaaggtgccaagtaccacaaaaggtagcatatccttattagtgtactttaatatcagttcctacaacttttaatttaataaatgatttagaaaactgctaaactgctaatgaattattgggtaccacattagtatggtattgaacatgttaaggtgcaacatattaataatagtacaaaaaattatttacaaaaaataaaaaaaaaatggtacaaaaatcattcataacaaaataataaaaaaaaaacaca

SEQ ID NO: 137294 - DNA, 996 bp, Cannabis sativa
gtgttctatgttatatacaaatagatcttggatttattattaatttttctaacactattcactaatgatgttatcttgtttatagtaatttgtcaatgtaaataatttcaaatgatgaagtgttatatttgaaggaaattaatttatttttctcattaattaataactaaataaattaaaagggtcttaatatattagagactttcagctgaaaggaaacttacctcacaaattaaatttgctactctataaatggaagacttagccattgaaattgaaagtaataataagaaaagttttgggatgagcttcaattaatatgatgctgaccaaacaaacacaagtccattttcttggtccccagtttttaagggatattacaagatgtgatattgtttgtctagttgtgactttaatgtaaacaaaaataggctgtagaacaacccttaggatctgttcggccatgttcctcatattcttgattggttgtttctctaaatttttactctctaaatttgggcagtgcaagagaccttctaagacaattttttgttccaagtacttaacaaaaacaaacacactttatcgaaagttttatgtgtttagcaaaggcttagcgagcaacacctatgaaatttcaaccattttttatggaaattttgaactttacgatcttttaggcaaaccttttcaaaataatatttttgggaccacaagatatcacatctgtgaaaagttgctttattgaaggaaaagaaaaaaaaaaaaacaacttgattgagaactttgttttttagggagagatctaagttttcattcaacaaattaagaactagcatttggttggaggtaatgaaatgaaatggaatggaaaggaaacaagtttcattccatttctttgtttagttgcatttcaaagtattgacatggcattccaatggaatgctctttccaccattttagttgaatgacaattccatttaaaaaaaaaaaaaa

SEQ ID NO: 137295 - DNA, 756 bp, Cannabis sativa
aaatttaaattttatgcttaaataaattagtaggatcataatcctacttactacctgattaatccataatataaatataaaccctaattatttaccattgggcttattaggatattacatttcccatgggaactagagtagtctcgttgaatcccatgagttatgaaccactcggggagaggtcgtgatcagtgagtctgatggcaataaaagcatctttaaacaggaggttcactgaactcccattgtctaccaagatctggtcgacaatcttgttggcgatgggagtttcaattaccaaggggttgtgatgaggaaaaggtaccatcttggcatatgttgtgaaaattgtacacgcaagtgcacacaattgtcaacaagtaataaagtgataaatcaagtatcgtctccacaaggattgaaaattaaaaattaatttacaaaactaattactcacaaattggtttcaacaaaaaaaaaaggtaatattcatgcatcatttaagaatatcaatttaagaatatcaatttaacatattcatctaagtcatacaaggtaaataacatattcctatgtatttacacatcacactttttcaatgtaatattcatgcatcattcaagcaattccactgatttatttttttcaaaatcaagatttgctagtacttactaatggtgatcaagcaaaagtaagcaattacacaaaatactcttgaatgaacaaaatcaattcactaaacatagcaataaaata

SEQ ID NO: 137296 - DNA, 953 bp, Cannabis sativa
  modified_base (915)..(923): a, c, t, g, unknown or other
tcaaaacccgtacaaaataaatggatttagattttccttaaatgaatttgtgtcatttctgttttatacgactacctcatttattaaacgggtgtatccactcttaaatttattatatttaaattatatttttttaattaaataaatatattacattgctcataaatgtgccataaaaaagattgtaaatttattaaacttgttgtaaacatgtcaaccagttaaaaaaattaaccaaaattaagcacgattttttatctaaatgggttggatcaaggtaatccatttataaacatgttagagttctagtttatgacatgaatgataaatgggtaggatatgagtttgacatttacttataatacctaaacctcaatacgacccattataagaattgtcacctctacccctccaatccacacacagatggagtagagagtagagtaaagtagatattgtatagatatcacacattttatagaagatggtataggaggttaatagtgacgtcttgtaaatagttagtgatattttacaattaattattaaattaaattgtgtgagactcaatacttatttagttaacaatatgactagagatgcatattttcttcatggggatgagctccatacccacctttaatggggcgaggatttcctgtctaaatggaaaacgtggcgagtatggaagttattttttatccttgaatattaaacggggtagggacggaaataacattctccgccccaaggggacccatttaacatttaatatttttattatctttttagtaatattttatattttataatttacatttataatttttaagtatattagtattttattttataaaattttaagttgtgttttagatgataatttctatattaaataataaataatgtgtaatnnnnnnnnntttatataatttaatatttttatacattta

SEQ ID NO: 137297 - DNA, 693 bp, Cannabis sativa
  modified_base (173)..(173): a, c, t, g, unknown or other
  modified_base (355)..(365): a, c, t, g, unknown or other
gtctagttggtttttctgataaaagtgctgcttctcaaatgtggtattttgacagtggttgttctagacatatgacaggtgataaggatttttttagtgaatttcagaccaatgcaatgtggtgaggtcatgtctggtaacggtttaacaggaaatatcattggtatgggaantctcaattttgaagggttaccaaggttgaaaagtgttatgcttattgatgaactaaaagctaatttacttagtattagtcaaatttgtgatcaacggtataccgtcaattttgacaatgatcattgctttgttcttaacagtgacaatgcattttacaagggtttagatctgttgataattnnnnnnnnnnnacatctattctcacttgtcattctacatgtgaaaatattagtgtaataaatatttccaaaaatcttgttcaacattctcatacaaaacatattgatataaggcatcattttattagggaacttgttgacaaccaaacattacagttggaatatattgatactgaaaagcaattggctgatacttttactaaagccctagattcaagtcaaaatgtcacgtctggtaatggtttaacaggaagtatcattggtatgggaactctcaattttgaagggttaccaagattgaaaagtgttatgcttattgatggactaaaagctaatttac

SEQ ID NO: 137298 - DNA, 1068 bp, Cannabis sativa
  modified_base (190)..(195): a, c, t, g, unknown or other
  modified_base (385)..(394): a, c, t, g, unknown or other
ttgaaaaatcagattctacaaaaatttctaccaaaatttaaattttatttcaatgaaaaatgatttttgaatcaaaagttatcacaaaaacaaaattggggcacgtgacactcggttgtgtccccatgcgcgtgcggatgtgcatccttgagatattttgtttttcaaactttaaaaaatcataactaannnnnnaaaaatccaaattaggttctataaaagccaaaatttattaatttttcgtctactttccagtaaaaatattttcagaacaaaaaaaatatctatcaacgtaagctgcgatttccatacaatcatcaaacatgcacataaactaacatgaaaccatccaaatcaacacacacatcgttttaaatccatattnnnnnnnnnnaaatcattaccatggctttgaggtcaattttgaggattatttactaggatctagatttactaccatgtaagttatttaacatcctagatatgaatctctaaaacaatgtaatttaaacacatataaagttcaagaaaccgtttattggttgcagtggaataaaatgactcattccgctcagatctctaactcttgtatcctctctatagtagagtatcacaagatttgagcccgattctccttcacttgaattagattcttcatagtcttacacactatcattgagtaccaacttggtatgtgtgggcacgtactctatcactatagggtttgaaaattgaagagagaaagagagaaagaaggattcgaatatgagagagatagaaggttcaaaattttgattgaaacacttagtacatcatcttttaatttgagaccatcactgtctatttatagaaatccatctaggtttaggtttgaattatttggcattaacaaaaattgataaaataaatggcaaaatcaagcacatgtgaccggccataggatgtgggcctaccatttgcaattttttcatttttcaactatttatcttatttttctcaaaaaataccatattttctaattcaaccacttaaatgccaaaactatttatttaataagatcggaagagc

SEQ ID NO: 137299 - DNA, 924 bp, Cannabis sativa
ttactaaaattagacaaaagttcttaaatttaacaatctcaatagttcggggggaatttttaacggcgaaaaaagttcaaggggcacaatttagtacgtcaaagttcagggggaaaaattactaattagcctaatttaaatggtagttttgaattatatttagtttttaaaatttaattattactgcaataagttggtaatttcactttttttttctcttatgtatatgaataagttaattaataacaaagtgtctaaactttctctctcaaagggataataacaagggaaaaaaattaagattttgtgttcctaaatctatagttattagaggttgtcatttttctttagcctggcccgtcgatttttttgggcttgggtgtggcttggtcggaattgtattttattactgcaattcaattttttctctactataattagtcttgctcctctgatatgattttgagtgttttagtcttgtctctataacataattttgagtacttttgtcttatttgtgtgacatggttttaagtgttttagtcttgtatatgtgatctagttttgaatatttttcgccttgtctttgtgacatgattttgagtgttttagtcttgtctgtgtgatatagtttaattttatttcgttgttggttcgtatgtcctcatcaaagccttgccatcaaatcgttgttagtggttggaaataacaagttatctacgactaaatggatttttagtagtgcggttacgtacattacacaataattgggtgctcaagctacgaggttgaatgaacctgctgcaacattttctactgttattttttaattttctgagtgatggataaatagtatataagtgttcttaagattaattgtaatgttgtaatatttttcatttgattttatatagtttttttttt

SEQ ID NO: 137300 - DNA, 637 bp, Cannabis sativa
atgcttcgttctctcatggaaaactggattagctgcaatgtgttgtgctgccttgttatcacaatacataatggttggtcctttgtgttcaatcctcaactctttaagcaatgaaagcaatcaaaccaattcatttgtagtgttagtcgtagctctatatccagcctctgcagaagaccttgaaacggtttgttgttttttacttttctaagatatgattgagcttccaaggaaaatgcaaaaatcacttgtagatctcctagtatcaacacaagcagcccaatctgcatcagtatatgctctcagttgaatctcggatgcagcagagaggaaaattccttgtccaggagtagattttacatattgcaaaatcctttgagcagcttgtagatgtttggctttaggtaaggcaaggaactgacttagcttattaactgaataagctaggtctggtctagtgatcaccaagtattgcagcttgccaattatcctcctatatagtgtagagtcggctagtttatcagcaagtttgtcattctcgatttgtgacagcttcaagtttgtttccataggtgtatctactggtttgcttccaaggtagccaaggtcttctagtaattgaagagcataagctctt

SEQ ID NO: 137301 - DNA, 699 bp, Cannabis sativa
tcatccattcaaagtagatacaacttgtttgtaagagatttcttcatgtagattgaagccaacttgtttcaaagacccaatgccttatcttcatttgaaacttccctcaaaacctcatccttaagactgaggaggatggcactatgtgccttggcttcaatttcacgttttctcttcctatcttcaatcaattcgatggcttcaaaattttagtgcttcatagatcccttggtgaactagaaaagtcttcattttgattctccatgggctgaaatcattggagccagtgaacttgtcaacctcaaaccttattatagccattcaaaccaggttcttgaaagttcaagtttgattcttgaaatattgaaaatgaatcttgattggttgaatgtgattcttgaactctaaacccttagctctgatactatttgtggtgaatgcttaccctcaaaataagttgttacaacagtaacaatattcaagaatgcacaaacaaaactaaaactaatcacaaaatcaaaactagaacttaattaaaattagacaagaaaaacttagctcgagaatgaatgaatcatatggatttttattgattgaatagtcaatagtacacaattaagtatgcccaagaataaaactcaacacagtgaataattacaaagaaatgtctcacattgagagaaatcacttcaagagtga

SEQ ID NO: 137302 - DNA, 994 bp, Cannabis sativa
tgttgtcggtgggtgtctggtttgattgtgtcattcatcttttctgtcgatctctagcctaggggtggtggggtttgcctaaggttgtttcgattgactttgtgcagtgggatttggtttggcaatcgtgatctggtttgggcgtttgggtcgtgcttatggaggcaacggggaggtggaggaccggttgtgtaccgtggctgtctattttggtcagttccttgcaacagggcgagtcagagtggtgaacaaaatgacttgtgggttttagattcatggcttatggagaatttttcagtgtgttgtttattttttctatgtttagttttataacctttggatttattttcaataatggtgttgcaatattttaagtatggtgagggatccttactatattccaatttaggggattcccgaattttcattgatcctgtgttttgttgttcaatctttttataggattaacataaacatggttggtcgtattgttatttttttttttttttttgttctagattgaataataaggtattagccaatttttattaaaagatctttgacttataatcattgatagggtggagttggttgttgttcatttaggttggaaacttagtatttttcacaatttttttttatgttttattgttagcggcttagtgagcatttagttgaatatgctattagagttttcttaccttgttattggttagcctaaaattattgtgttgattattgagtgatatttaataaattttgtctaatttaccaattaattaatatttttcttttaccttcaaaaaaatccacattgcacattctatttaataatataaaaaataaataaacaaaaatttcactattatttttatgttattaaaaatatcacagtcattgtctgtcatgtatttttactatctaataggggtaatttgttaaacaaatttactaattaaaaaagtatgttaaaaggccatagctacaaatatac

SEQ ID NO: 137303 - DNA, 534 bp, Cannabis sativa
taatattatcacagtttttaataattaattattctattactattaaactagtttataaaatcacacacttgagatccctatagattagggcgttacagaaatgttcgcaaatcaaatagggcgaaacatggaggtttacgtcaacaatatcttggtgaaatcgataaagagtaaggattatacctcagacctcgcggaatgatttgaaatattaaaaaagtataacatgaaaattttttgggattcatagttaacgggagaggtatcgaggtaaatcctgaaaaaaaaaaaatcaaggcattaatagacatgccatccccgactgagcctaaggaagtacaagccttgataggaagaaaggcgacacttaatagattcatttcgaagtcaaatgataagtgtgagtggataaaagaatgaaaagaggcctttcagagcataaaaaggcatctcacgacgccttcagttttggcaaaaccaataactggagagatgttatttctttatttggccatctcagaagatgcgattagt

SEQ ID NO: 137304 - DNA, 765 bp, Cannabis sativa
aagctatagattccatatctattgataactctagaaattagagttatttttcacattttttaaactaaatttggcttaatccttgtgtttttaattagtttaataagtttgtaattatttttgaatttattagctttattttattttttataagtttttatgtgtttttataattattttgttataatatgatatgtgttaaataattataatataatgttaattttctaatttatttctcttattttaaggtgtgtttgtggataaaatttgggattaaattgaagaaacattgaagaaatggggtcaaaaaatacaattcgcaaaataaaaatcagatcagtccaaaagagccccattttcggtcatacttttgacccaatctgagttgttcgtgctctgatccaacagtccagatgggcgagtgtaactcaccccaggcaggcgcaagtgacacctggaaatcctgccctctccacctgccagccttccttccacgcgggtccactcccgtcagcgcccaaccaaccagacaacgccacgcaacagctcctcagcctcctctccatcaaagtcgcgccaagtggcatctgcaaaagaaaaagaagagaaaaaatggttgttaattggaatttcacccatccgaaaagggaaattttatttacaccccaaaaatttctaaagacaccacattttaataatttttattttatttaaaattaatatctttaattatactaaattttaacttttttcttccaattt

SEQ ID NO: 137305 - DNA, 1402 bp, Cannabis sativa
  modified_base (375)..(377): a, c, t, g, unknown or other
agactcggtcaaagaccgactatgggattgtgtccaaaatctaaatccaaacccgaactgggactcaagacaggaacctagatctgaattaagaccagaacattgaacatgactcaggacccagagctgggatcgaaacccagactggaccccagtctcggtcctggacctagacccaaacctagaccctgacctaggacatgaattgaaacaagactaggacccgtgattgggatgcaaatcttgtcaaatgattagagaaccggggcttggacacgacccatagtcgatgtcttgatcagggactcggacaaggacccgaagctggaaaaggacctagacccagaccaaaacctgggacccaaaaccgaaacnnnaaaaagaacgtgatcaggaccatggaacaggaccagaaccgtgacctggaccttgacccggactcagaactagacccaacctagcccagaactcgggttcagacccagtcctggacctagactagcactgagactcgaaccagaacctgaacacgaactcgggacacgatcccagacccggacgaagcccttgacctaaattggaattcagaccttgacatggacacgaacccatacccgaacacaaataccgacacagacctagaccgggattgaaacacaggacctaggcccaaacgcagacgcagacccagacacgaacatgggacccagaaccaagacctgaacctggaccttgactcagatctggacccacaccgagattcgaaaaactcgtacttggactcaaactaagactcagaccctgacaccaacttggacacagacccggaccctaaaccaaactcagacctagactaaaaactggaaattatgacccagacccagacctggaccgagaccttgactaggactgggacctgagacctaagactttaacctggactagtaccgggaccgggacctggacctgacctggtcctaagccgtcaccgtatcctgacactcgcaacccagaccaggatctagacccttaaaaggacccaaacctaaacccagacaaagatagggatcgagccctggacctgaacacggaccgcgaccaggactaaaaccaagactcaggacctgaacccgaaattggaactagactaggacctaggaaccggacttagatggggcacccaggccccgtaacccagaccatgatgtaaattttagacttgaacctgaaccaggacctgacctggacccgggaatctgaagtcagatccagacccagacatgaaacctgcccaagacctcaactaggacaggaaactggacacgaacacataccaggacaaaactcgaacccagaccaaaactcagacacagaccaagaatcagacccaaacatagacctg

SEQ ID NO: 137306 - DNA, 525 bp, Cannabis sativa
aaaaaaaaaaaaaaaacaaactctttaatatattattttaatattttttcttgtcttttcttttttccatttttttttctactaactttttttcattaatttttcatatttttttttttaactttaactgaggaaatatattgaatatttttttaaaaaataaataaataattgatgtataatatattgtaaaaagttgtgtgaaataatcataataaaagttaagtctaagcttaagtgatatattttaaaaaaataatatacaaataattaattaaattaagtaatatatttattagggtaattaaatattagattctacttattttataatttaataattaagtattatatagtatatagaatagaaaaaaaaaatgaaaattgtacacctctaaaaagaagttccgatagactttctatctgttttttttttgggaattcagcaagtatattcattcactataccaatttacaaccaaagagcatcttccaatagaagacctcaaaatatcaatgcttttt

SEQ ID NO: 137307 - DNA, 2053 bp, Cannabis sativa
  modified_base (52)..(57): a, c, t, g, unknown or other
agtatcgctagccaattgcaagtcgacacatttagaaggtgctaggcaccannnnnncccaatagcaatgctcttatataattagcttggtcaaacttttgcccccattaatagaaaattgtctagaaaactaaaaggtcagaactataactgcatggggttctttagaattgttgtgggatgtttatgttaaatataaaaaaaaattaaatttcatctaagttcataaatgaaacattcgggcttagtccaataacacccgaacccgaccacacccaacccgcaatactcgacccgaaacccgccatacccgaacacccaaaaatcgggttcgattgtgcatttccaccacctgaaatccaaaaacccgaacccgaccacccaaaaacccgaaaacccgacccgtgtgcagccctagtagtcacaaaaaatttatattgtgactaaaaagctgttactaaaagtacttgttttttttttatagtgaatatctccacagccatgtagtaaccaaatagatagatttaataaatcaataaaatactgatatattatatatcatccatcattcctcatttttaaccagtacatagctaatttaagtcatacatgccttcaaatggaaagtttaataaataaaataagactaaactaataacgacattcttcctcaacgacaccatcttcatccactagcatcaaactaagttctttgaatgggagaaaatagagggtgagcttataaagcccaggaaaacaactaatatcaaatgacccttggtttaataaatattcttacatagttagctttaaaaaaatatcttaacctcatcataatcatgtataaacaaaatagagagaccacaaataataaaaaaaagattcaaatacatattacactgtccactagacccctagctctcaatgccaataaaaaaaataacatcctaaaccgggttgtcgcgaaccaccaaaatgttgtgactcaaatttaatttactttctgtacatattctaggtcttacacctacaggtgagtgcacacttaatctacttatgatgacaaagagactaggtcgtaaaacaacaatatgcacaagacatgataagtatgtcacccattagtataacaaatacaggcattaagaacaacaaaagtacatattctctttattttagaaaattcggcagcatatataacagttataatttgataaaatctaaaaatcataacctgtataaataagtgtacaaaaatatatttgccactgagtgtctccaaaatagtccagaaaaatatacagattaagtttttgattttttaaacattttatagatcactaaaattggaatatgtcacatgatattcatcacaataaaatcaagtctattaatcaagttgagcccatacctctcccaagtcaattaaattttatccaaaaagacgatcctaagctcttaagtctcaagctctaattgttcagtccaatcttaaatattactttcatctatgaccatcaaatcactaaataatttttatcattgcattctacattcaaaattgagtctaacaacatataacgtgactatatttaaactttagagttctagaacttcacctaagcagtgcacattaactatcggtgatgataaaaattgatgtactagaaatgttaccaaaaataggagtggcatatatcaaaacaaccacctcgacgagtagagcacacccatacaaactatttttcaaaatggtacatgatatatattttttttaatattttcttatagtaattttttcaacaaagtatcgagaactcaagaagtatgtatgacaagatatcatattattttataataaattattagaaataatattaaaaaaataatttttataaatactctaatactttaggtagacataatattcatacaaatatatatatagggcaagactatggtaggacctagcaaatgttccctaccggtagggaactttttttgaccattgattttagatcatgtggtcgggaactttttttgaccattgatt

SEQ ID NO: 137308 - DNA, 540 bp, Cannabis sativa
  modified_base (478)..(498): a, c, t, g, unknown or other
aatttgataattctgtattgcattacctaatcaggcaagcccgtgccatagcctggcactcgtatatcgcataactgcatcacctaatcaagttagcccatgccaaaaccctgcacccatatatatatatatatatcatataattgcatcacttaatcaggtgagcccgtgccacaacctggcaccaatatattgcatcatctaatcagacgagcccgtacctatgcccggtacttatcatatgacactgacacctgtacctacgcccgatacgtccctaggaagaaatccaacaatgcttttgatttatgccataaccaaacattttcatatcactgacacacgtacctaagcttaatatgtcgccaggaaaatcacagcacctaattaggtgagcccgtacctacgcttggtactcataatatgtcactgattgtgttgtcaagcaaatttcacaacaccaaaaatgaataataannnnnnnnnnnnnnnnnnnnntaataataataataagaacaatatgatgaacaagtgcgagta

SEQ ID NO: 137309 - DNA, 923 bp, Cannabis sativa
  modified_base (545)..(548): a, c, t, g, unknown or other
tcaaaataagatcatttcaaatttaataattaaataagtaatatttgatcttataattaaaataaataaaataaataaaaataatcgaaaacttcaaaaataaccataaggctagtttgtggaaaaatcaaattttcaaattctaaggctatgaatatctaaaactaattttaattaattaaaaaaattatttttattctaataattagatttttatttgaaaattcagattatacacaaacttctaccgaatttgaatttcgtttctatgaaaaatgatttttgattcaaaagatatgacaaaaacaaaattgggcacacgggtatgcaatggatacccctgcgtgcgcatgaaggggaatgggcaaggaaaaaggctgcgtgcagcctatgttgggcgaggaagcttggcgtgagaagcccttcaaacagggccatatctgagtatcctcagtctggcgcttgtctgaagacacgtgctgtccgagtgaaacctcatccgcgcgcgcacgtgtagtttccaaaatcagatattttcatccaannnnaaaaatcataactaactcataaaaaatccaaattaagttttgtgaaagcctaaatttattgaagttttgtctaattttcaggaaaaatattttcagaacaaaacaaaaaatatttatcaacgttcattgtgatttccatacaatcatcaattatgcataaaaacctacatgaacacatccaaatcaacacaaataacattttaaattcatatttcatgaaagtaaatcattaaccaagatttgaggccagttgttggggattattttatcaggatattttagatgtactaccatgtatgttgtttaacatcctaaatatgagtttctaaaacaatagaatttaaacacataaaaagttcaagaaaccttacattg

SEQ ID NO: 137310 - DNA, 1235 bp, Cannabis sativa
  modified_base (1114)..(1117): a, c, t, g, unknown or other
taggtttcgttatatctcttctctaatacatttcattttttagattcttattacttatagttttcttagttattttaatttaaacaagacatgttggttttagggtattttatatagaataacctacacgctacttgtcgttggcttaatggttatgtacttgtgtgggagaatgtggtttaggttttaagtactgtaaaatgtaaggccattaaaaatttgaggcaaagtaaaaagtcactagaaaaataaaatcaaaatcaatgaatgtaaccataaggatctgaaagataccttacctttgagtttggttcttacagattgcttgaaacgagcggtgacgatctgcgatggtaattggagacaggcggttacgatctgcgatggtaattggccaggggcggtgacgatcggcggtggtaatactcaaggggtggcggtcggactggtagaggcgagatggtcttggtgctgagggagaagaaagagagttctctggacacatgaaaatgacatagggtagatagttagggttttttctccaagaaaatgaggatgcggtagaaaattagggtttattatctaaggatataattgtaatttcatcatcaaatttttaagtaaatggacattttcttattttttttataaaaagggacatttattaacttaattgttagatttagggccattttgcatcttgccccgagaaaaatatcccaaaaaagttgacaatcaacatgcccaataaagttgggtaaaatagcttcttaaataaaattttaaagatttgtgtaaaattgtgttatattatttaataatattatatgtacctacattaaaatgaacaatatatattattatgtgaataatttatattaaatatatggtaaataaatgtgtatcctattaatctatactttgtaatctatatgatgtaacttcactacaaaaaattactatttttagtgacaattttttagtcaaaacataatttttttgtgactaaatgtgaattttagtcacaacaaaatgttactggtgactaaaacatagtatttagttacaagttgtaactaatttagttttagtcataacaagtattgtgactaannnnacatttagtcacaacaaattatagtttttgtgaataatgcatttagccacggaccttttagtcacaacatataataatttataattagttacaattttttcacttttagtcacaagtt

SEQ ID NO: 137311 - DNA, 747 bp, Cannabis sativa
gggggggagccattaaagaacaaagaagaaccaacaacgaaacaaaataaaacaaaatcatatcacacagataagactaaagtactcaaaaccatgtcaaagagacaagactaataatagtagcgaaaatcgaattgcagtagcaaaacacacctgaccaagtcgcaacttagcccaaggaacaagcatggctagagagaaaaagacaacctctatagatttaggaacaagaaaccctgatttttttttcttattgttatccctttagagagataatttttttttttaaaaaatattttcataaacacataaaaattacaaaatacgaatttactgtttttaaaatatttttacaaattttctttcaaaatatatattttataattttactgtttttatgaatttactattttttaaatattttttttaacaaatttatatattatttttttaaataacatttttttttctgtaaaagtgtgaaaaaataaatatttttagtaaaaatgtaaaaaaataaaataaaaaataattgtgtaaaaatccttaaaaaataactctcttttgatttgatttttcattattgatttctcaaaaacatttttctttatgtaactattatccttatatataaaaatatatatggagtaggtttcaatgattacattaaatatataactatcatggttacattttttttagccattagattactaatgaatgattgtgattaatttggaaattaaa

SEQ ID NO: 137312 - DNA, 846 bp, Cannabis sativa
ggttgaagcagccgcctcagtttcaccataggccacttgggacgcgcagaactcaaggtacatgtccttagcatcacccaagtagtcaaagtttgcatgaggattagccttacaaaaatcaaagaagtgctcaagaccggctgtctctagatcattaaccttctctttcaaccttgccacctcggccaaaagctcctcctccttagtcttcttatcctcctccacccgatgaagaactgctcgaagtgaagtcctctcatcctgaagactgttcacttcaacatataaggtctcgatggtctcttcaagacggtcagcaaccacgagatccttagtcagctcagttatcttcttctgggcggtaaagagcttcttgttggcttcacccagctccatccaaaaaactcaaaattctgccctggcgacgtcaccatccttcttggctaagtccacctccgccctcatggagtcaaacagagccgtgttcctgaaagcaacagacttagcctaggagtaactggaggccaacttgagaccggcctgcacaaaggaaaaaaaaaatttagtatttgagctaagtacagaagattaaaaggaaatgtctagaaagaattaccctggtgaactccttcaagactccgccactagcagctccaaagaagagtcattgtcagcaccaaccaattgctcactgacctaaggaacaagccgattcatgtagtcggcaagcatctctttgccttcttggcctctggaagcaccggcaaaggtggagtaggtgcccgcacctgttcaggttcacttctgaccagctcagacccgaccttcggtagtctagacctgtcc

SEQ ID NO: 137313 - DNA, 642 bp, Cannabis sativa
  modified_base (28)..(30): a, c, t, g, unknown or other
taaattgttttatacggactatcctatnnnacatctcgggaaatcggggtgttacagtgcgaaacgaatttcaggaaaagaatgtaaggttttagcagataagatgacagccagaatcaaaatttggagtactagaaacttgtctttggcagggagagcagttctggttaactcagttcttatgtcaattcactcatattggagccaagttatggtgctaccaaagcgaactataaggggtattgaagccatctgtcaagcatacttatggaaaggaaatcaggtttcacaagggtcgggtccaattgcttgggatcatgtgtgccaaccaaaagtagctggagggattggtttgaaaagaattgcaaagtggaatattgctgcaatgacaaaatacgtgtgggcaattgcgaacaaagacgataacctgtggattaaattgattcactgtgtatacatcaaaggagaggattggtggacttatcaagctccacctcaggctagttggtattggaggaagttgaacttaaagcacaagtcaaaggtgttatggacattcagcaatttgttagcaccaaatacagtatatcaaatggctacaaatctctttgccccgcacaaagcaaagtgaattggagtcat

SEQ ID NO: 137314 - DNA, 562 bp, Cannabis sativa
ttaacactccccctcaagatggctggtagatatctactaagcccatcttgtcttttaagtacttgaattgattaggcaatagtgctttagttaacatgtctgcaagttgatccttagtcgaaacatgtgaagtcttgacaattccctcttgcactttctgtctaattaaatggcaatctatctctatgtgttttgttctctcatgaaacacagggttggctgcaatgtgcaatgctgctttgttatcacaaatcatcaaagctggtcctttgtgttcaactttaagctctttgagtaaggacagcagccatgtcaattcactgacagtatttgccatagccctgtattctgcttctgcagatgatcttgagactgtcttttgcttcttacttttccaggaaatgatcgaacttccaagaaaaatacagaaccctgtagtagaccttctggtgtccacacatgctgcccaatccgagtctgtataagctttgagaagcactggtgatgcagcaggaaacaaaataccctgtcctggacttgatttcacatactgtaggactct

SEQ ID NO: 137315 - DNA, 1076 bp, Cannabis sativa
aagtttaatgcaattatcgattgtgaaagaaagatggtaactcttggacctaaaggtgaggacccattcgtgttcgtgggcaaggttcaagagtcctaaatttcattaatttcatcatttaaggcaagagatttaatgtggaatggatgcatcagtttcttaactagtaaggtatacattatgaagaatacctatggaaccagaatacgttgcagtggtatgagaatttctgaatgtctttctaggggagttactggagttactattaagtgggagattgactttgaaatagatctagtacttgggcagagttagatcttaaacttcgtatagaatggtatttgagatggttgaaggttcagttatgctggatgttggacttgaaattgttggactgtgtatcccttcttggagtacgtcagttatatttatgaaaagaaagaatgaaactttacaaaagtgtattgatcgttggaaattaaataaactcatgatgaagagtaagtattcttttgtcaagaatagaaatagtgatgattaattttagggaagtaccatcttctctgaggtcggtcttcaatctggttattaccagttcaagatttaagagaatggtatttccaaagcaattttttttcgtacttgatgactctgtaaatattatcattaaggatattctgatttcctccaattcaaagaaggaatttgagaggtatttttgatggtattgtaatattttaggagtttaaactttatgctaattgttggaaatgcaaattttctgactctaagtaggtttcttagagcatgaaatggatatagatagtaccttgaaaaactcgacaaggattaaagcagtttagagttgacattaaatccaagtttacaactgaggttagaggttttctagaattaacagaatgctacggaatatttgttgaggaatgttttacactctaagtggagctaagtcaaataattgaaacaaaggttaactattgtaccaatattaacaatgccagtcaaagaggagaaatttgtgatttagggtaacacttctaaacaaggattagatt

SEQ ID NO: 137316 - DNA, 556 bp, Cannabis sativa
caactttaagaacaaatgtactttgttttttatgggtgtttatgattggatgcaatgaatagattcaatacaattctagacctctgttaaaatttactaacaaagtgttaaatacacaacaaaatagagttagatagatatttatataataggtaagatatgtgtgttatgttttaggcctatgcgaagcctcctggcctttcaaaacaatctgcattgcatatgccatcttatgaataagttgaaaactaccccttcgtacacattaaccaaatataactctaaaataattttaattgataaatattcttcttttataattaaaataccaaatataaccttacaaaacttatcaaaattagacttctttatacacataataggaatataacttataaaaatgggtataaattaaaaagtagtaaaataaggtaagaattaaaatatgaaacaaaaagtgggtagtgatttgtcatatacttatagtttgcaaattttgtttggctgtgatgttttggtgatatatagtatcactttagttcattgctcaaaagat

SEQ ID NO: 137317 - DNA, 729 bp, Cannabis sativa
gtttattttttaataattttattttttgttttaagtaatttatttttattttatttttaaatagttatttatgtgggccaataatattgtgccatgtgtacaccatatttatgtggacactatcttatgtacacatggacaaccaacttggcacttaacatctaaaaatggatggaaatggttaagtgctaagagaacatgagtttatgggattttaccactaaaattttagaattgggagttggttgcaataaactaagtatttatggggattatgccgcaaattacccttacataaaatgttacttattataaaaaatttacatttttaaatataaagattttttattttttatttttatttttatggtgttctataaaaataacacaaaaacaataaacaagaaaataacatccacacatcatcaaaacaacaacaaaaaataacatataaaagtacttcaaaagactgtaatttttgtaaataaaatcataaaaatcgtaaaaatatttataacttcgtacaaccgtatttttataatttttttattatttttgcgtgtcttttttaaattttcccatttatgtttatatttatcagaatttttataaaaaaatttcttgaaatataattttaagagcattattattaggtattagtagtgtttagcactttttagatgtgtcgccttgcgattggttagctactccctaaaagttattatatta

SEQ ID NO: 137318 - DNA, 1079 bp, Cannabis sativa
  modified_base (634)..(640): a, c, t, g, unknown or other
atcataatatatatcatctccacataatatatattatatatgtatcacatacataaatattctcatcataaatatatattatcatatgctcaacatacataatatataattcatataaatgtaatatattatgtatatctcacatatacatattaacgtgtaacatattcaaatctcatattatatatcactctattaatatgacatatacatccacatatatataactcatttatatatatctcaatccacatctcaacttaaaaaaatatgtgaatatatattttactaatataaaaaattgtaaatcacaaaatatcacaattcttacccttgtattatcacaagttgatttcttaccttccattgaagcgaggtaggaaaggataagcttttgactgttggaaaattattgtactctaatagaaataccaaatcaacaagattacaactctatgacaaataatacaaaggacaaacatgtataaataatgttacaacagtaaacaaaatatacacataaaatagagaatagagatgaagagagggattacaactcaaaccaataagctacacatgaatcacaatatataaatagcatatatatataagagatgtgagagcaatctcaacnnnnnnnacaccacaagtgtataatagggaatcacaaaacttgaacaaggtcttacacctttgtccgaaagttaatttccccctaccacaagcacttagggaatagaaatagctttctggatttatcaagcctatagtgtttctagcaatgtgctctcttgatagaaacttcttctcccaaagtaaactcaagatctctatttataatattttgaggatcacatttgaaaatcaaattctttcattttaccaacactttaattggtgtttaatgggataaaaacgttgaataagagagctggaaacaagctcaattaatttatatacgtttatgaacgtttttcaaaaatttagtttcaaatgttcgaaaacaaccataaaacaaccataaaacaacataaaaacaactattaaacaactgtttttagagaactcaaaatgtaact

SEQ ID NO: 137319 - DNA, 924 bp, Cannabis sativa
aaaaacagggttcaaacattttggaatgatcctactgtccgatcgggttttggaaattccggcaatgtctttcgctaaaataaataactaattcggtaagactatttggtaaaacaagctacatagtggcgaattattatgtagtcaaaaatgtatattcattagtgtaaaaataaaaaaaataaagttatttctatgtaatatttttatgaaattaatctaatatatttttattagaaaataatataatgttcagttaattttgtaaaaaaaataaaaaagataaacaaaaaataaaagtaataaagaaaatgtattgtttttatttaaagaaatgtaaatgaaattttaaataaatatttttattaaaattattgtgatatattttatgttgaaaatattttgtttggatttaattgtgattgttgtttgaattaaaaaatagcattattaaaagaaaagaaatgaaaaatagcacaaatagagcccaaaactatgaaaattggtatttttgaagtctacaaaatcaccaataaagcagcccaaattcggcccaaaagcccctctctcgcgcaagtgtcacgcgcagaggctctctgcacctgggccccacgcgtacatcaccaacaggtgccttcgtccacctcgtcagccctctctcattcgtgagcatttgttagcatgcctacaaatgtatatacttagctgtacatcagcaataaataaaaataaacagttaccctatatatatattttggaggagcatgcttgtaaatgtacacttttttctaaatgatatataaaatattggtatttaaaatatcagccaaaaacaatgtgagatgaaaaggtggccaacatttatttagtggccctttatatttatatataacaaatgatggccatttacccaacatttattca

SEQ ID NO: 137320 - DNA, 627 bp, Cannabis sativa
tatgttgtaaaagcactattaaaccagtttgtaaatattttgaaaataaggagacctcctaattaatattacttatcttttattataaagaagttttatatatctgtttttaattataaaaatttaattactcacacttttggtataattatatagcacataaagtaagaattttataaaagcacacacatatggcgtccttgttggacagggcgttataacatgatatcagagcaccaaggtttttagatcctgaagactggtttgatatgtacatttgctgcgaagactcgttcgactcatggttcagtaagctttaattaatagataatttgttaattatctgattgcctaattatttgaattatgttaatattggaaatgtgtgagaagaattatgatttatggatatacttattagtattgttattatctggaatgtgactgcaagtgtatagattatgtacccaaggtggactggtagaggtaaccgcgagctagctaggctcggggttctggtgagggcgagaacctccaccacaaccaaattgggaagagttatatgccgcgatgcaagagactatacgccagcagggtgaacaaatccgagaactgagagagcagcga

SEQ ID NO: 137321 - DNA, 508 bp, Cannabis sativa
ctctctaagtgtcagactctttccctctctccttcaacctctcacatgcccaagcctaggttgtacaacaccctaggctatccaacactggagttctgccagacttcgattcatacattgtagtagatcccacgtatagcgatttggatagtaattcccttggtataatacactaaaagaggagtagatcattactcgctatcacagggggctgaacctctataaaaaaatctgttttctattgctttttactcttatttgtgcacagacatggcaagcatctgattcacaaccccgccattggttgatcacttttcaagtataacaggttattttttgcatttttgattgtttatttatgttattgttttttcacaggttcattccgagatttgtgaaggaaaagttttggggtataaatttacatacgatcgtgtagatgttgaccaatccattttggatttggttgacaacattgtagaggattattttactaggatcaagattt

SEQ ID NO: 137322 - DNA, 826 bp, Cannabis sativa
tcagactcaataatagatttaaattgaaagaccttggagaacttaggtactttcttggccttgagattgcaaggtctaataaggggatttttgtatctcaaagacactatgcattgcaactattggaggatctggggtatttaggctgcaaatctgtaaatacccctatggaaattaatttaaaacttagccaagatagtgatgacaagctggccgatcctaccctctatagaagaatcattgggaagttacaatacctagtcataacaaggcctgacttagcttattctgtcaataaactaagtcagtttcttgcttctcctaggactactcatctcaatgctgctcaaagggtcctccaatatgtgaagggaacacctgggcaggggttgttttactctgcaaactcagatatcagactaaaggcttataccgatgctgactgggcatcatgcatcgacactagaaggtctaccacgggtttttgtgtttttcttggtgattcccttgtgtcttggaagagcaagaaacaacaaattgtgtctagatcttcagccgaggctgaatatagagcaatggccaacactacttgtgagttagtttggctgctatctttgctcaaagaattggggattgaacatgaatatcctgctatactacactgcgataataaagcagcacaacaaatagcagccaaccccgtttttcacgagcgtactaaacatatagaaattgattgccacattgttagacaaaaggttcaagagggtatcatcaagacatctcacacttccagcaaagagcagattgctgatatctgcactaa

SEQ ID NO: 137323 - DNA, 1448 bp, Cannabis sativa
aggatattccatcttatttttaaaatttttgactatcatgctttatgcttctattgccctttttcctctaaccatgttgtttttgtttcgtgcagaaatgtctcagaagatacttgatgctctgaaaaagagagttggaggaagctcaagctcatcttttccggccatgaaatctaagggcagtgaggtgaccccttccaaggaaaaggcaccggccggggaggttattgacctttctaaggagctaactgttgcagatccttctactccaaaagttactaagtccaaagattctcgaggaggaagctcagataggcctgagcaatcaaagggtggatccgagttggccaagtgcggatctgagcagatgcgggctcctactccacctttgccattgcatctagaggccaagaaaggcaaagagatgctcgcccattacatgaaccggttggttcttgaggtaagtgagcagctggttggtgctgacgaggagtcttccttggagctgctgatggcaggagtcttgaggcaattcaccagggtaagtctttgttgatagtttcctttaatccttctttacttggttcagacattaaagttttttctcggtgtaggctagtctgaagttggcttacacctattcttgacctaaatctgctgcctccaaaaatgctaccatgtccaacaccatgagggcagaggtggacttggctacgaaggatgctgatgacgccagggtggaacttggagttgtccagatggagctaggtgaagttaacaagaagctttttactgctgagaggaaaatagtcgagttgactaaggacctcgaggccttcgaccagcttgaagctaccattggcaccttgtcggcaaaagtgaatagccttcaagaggaaatgggagtttttcggactttcttctgtcggttggaagaagagaagaagactaaggaggaggcgcttacagctgcgatcgagaagcataaattggagatggtgaggttggaagagaaagttcatgccttagagacaatcggtctcgagatcttttatgacttttggaaggctaaccctcaggcgaatcttgattacttgggcgaagtcaaatacatgtatctcgagtacttttcttcctaagttgcttatggttaacccgaggtaactgcttctacctctggaaagaatgttgatgttccttgcgctcagagaacagatcctctggctcctactggcccagaagacctgaaccgagagcttaggactccagctgttaaaatacttctctttttatctttcttttttatatatatcttattcttccataaggcctttttctaagacatcatgacaagccaagcagtctttaaactttgaattatttttcatttcacagacaatagactgaccgagcagcttttaatctcggtattacatgcttttgttatc

SEQ ID NO: 137324 - DNA, 1764 bp, Cannabis sativa
taaaatgcagctaaatccactaaagtgcgtcttgggagtcggttcagggaaattcctcggattcatggttaatcatcgaggaatagaggcaaatcttgcgaagatcaaagcattagtcgaaatgcgatcaccgactaagccaaaagaagtccaaagtctcacaggtaaagtcgccgctctaaaccgttttatatcacgatcctctgataaatgtaaggagttttttcagattttaaaaggcaataagaagttccaatggaccgagaaatgcaaagaagcttttcaaacattaaaaacgcatttggggcagcccccaatcctgtcaaaacccatatccggcgaagtcttatccatttacctagcggtgtcagaatatgcgattagttcggtactaatccgcgaagatcaaggacgacaatatccggtgtactatgtcagtaaacgcttgttagatgctgagactcgctatcctcaaatgaaaaaattagcattcgccctggtaatatcgtcaagaaagctgcgaccttattttcaggcccatagcattgcaattttaacaaactaccccttgaggctagtcttagcaaagccagaagcatcgggaatattgttgaaatggtcagtagagttaagccagtttgacgttagatacaaaccgagatctgcgatcaaggggcaggccttggaagatttcattcttgagttcccaagtactgaataggcgctcataaacaaaaaaatcgacactgttgtaccgaatggagaaggatggatgttatacatcgatggggcttctaacagcgaaagttccggcggtggaatcatactaatcagtcccaacaagtttaaggtacacgctgctttacgttttgaattttctacatctaacaatgaagccgaatatgaggctttgatcgcaggattgaagctcgccctcgagatgaaaatagaatacttacaggcctttagcgactcccaaatcgtcgtatgccaggtgaatggagaatatttggccagaggcgggcgtcttgctatgtacctcaccatagtatgcgagttgttgcagaaattcaagaaagtagtcgtatcctaagtaccgcgtgctcataactcacacgcagatgcatgggcccgcctggactcaactagagaagctgaattactcgatgtaattcctgttgacgtattggctcacccgacagtgagtcgagaagaagtgatggaaatagatgttgccaaagaagttacttggatgactccaataattacctacctggaaaagggtatcttgcccgatgacaaaatggaagcgagaaaactgcgacaacgggctgcccgatacgtcatctatgatggaagattatatcgcagaagcttcagtcagtcgctacttaaatgtattgaaggggaagattgcgactatatacaccgcgaggtacacggggaaatctgcgggaatcatactagtggtaattcccttgccttaaaaatcatgcggcaagggtattactggcctaccctacggcaagacgatttcaacttcgcaaagaaatgcgataaatgtcagtgaatagccacgtatgtccatcaacctccgagtcacttgcattctatcacgagcccttggccctttgcggtctggcgcatcgacttgataggtgaatcaccaaaaggaaagggcggagtcaagtacgctgtagtcgaggtcgactattttacaaaatgggtcgaggccaaagcactagctgttgggttttatgccct

SEQ ID NO: 137325 - DNA, 545 bp, Cannabis sativa
  modified_base (28)..(39): a, c, t, g, unknown or other
taacaacaaaaaataatctaaaacaagnnnnnnnnnnnnatgatgacttagatgatttctaatcatcatagcatttcctattaatattttaattcgagttttatgagtcaagtgtgttctaggataatagaatttagggttctaattctagaaacataactatctttactttagttttagttttaagatacatctttggtatatgtttaaattttatgtgatattttattcatccttaggtattctaaaatattatgttaatataatttatgagacttacacatcaaatggcttgagacttaggaaattaataactagtaactaagtatagtatactaaattactaactagtaactagtcctaattctaccgaaattttagcagcataaccactataattgaacgtttttaaaaaatttaaagctattaatagcaataaaacacaatataaaataatataaaacaatcacaataatatttagcaatacaaaaatttaccacccatctgaccgcagtatatgtattcgcagaacctactacactat

SEQ ID NO: 137326 - DNA, 566 bp, Cannabis sativa
cgtaaattcatgagtgattttaatcactttgtcaaaaaaaaaaaaatataaaggagagttttgaagagatgatgtggcattctattcttttaatgttctactttttctactttttattttttgtttttaattttttttgtttgtatttaacatttataataattatataattaacatttatttttatattaattgaaatagaaattataatatgtcttttcattctataactcatatatcaaattaaatctctatattataattattattattacattctcttcatattctcatatttaatatgtatcaactatctatgttatatatactagctattatcatattatttgagcatcaaaaaatatttttggccaatcatgtaggcatgatatgtttctcaacgctgttttccacctctagcctctactagctgttgtctctttcatcaccaattgtaattgatttgatcaagtttgtttgtataaaaaattatttctatgaaactaaaaaaaatttagcatgcactattatatgtttctattttatgttttagttaattaatcaag

SEQ ID NO: 137327 - DNA, 1334 bp, Cannabis sativa
catacacctgtttacaaggcttaataaatgagcaagaacgttctttactagggtaaaactactgtaccacatacactacgtaccgacattatacgagtgttggtatggttggtttcgtaccctgagtatcactaagtgatataccacacacaccttgtactttcgcatacttgtgctggtaacactgtaatgtactcttaaacattttacactataccaatgcactatgtaccacttctgtacaagtgttggtagtgtactaagcataataagcatgcatatatatttcacacatacatacattcgcatatatacatcacatgttctacgctattcttacctcatttctgaattcaagtgagttggccgacctgaacggaaatcctcgtgcaagatggatgccctaatcacataacataatcgggtaaataatacgcccaaagccctaattcaggaaatccaaacctccaactaaaggttctaccatagacaactaaaactataataccctaagaaacagggaatcacccaaccaaggctctgaaatggacacgaattgacgaaaagaattgttcgggaaaccagtcctagatccggttaaccagtttgccaagtccaaacaattcaaaacctatccaaaagatgtccaaatctcaccaaactttccagaagacctatattgacctcccacagcataattcaagcaatagaatccaaaatacacacaaaatcaaaacatgccatggatgaaccaaacttgagttttcaaactcaaacttgtgcatccatgtcaccaaacctccaaaccagtaacaaacataaaaaccaactcaaaataaacttagaaaataaattataaacaaatctcaccctaacatccccaaatttcaaactttgcatattcaaccaaaatcaaagcttcaataacacaagattaagagttctagggttacctttgcttaacacctacttgaattcagctagctctccttcaattacaccagaaaagtcccaagtcaaggctggtcttatggtggtcgagcaaggaagaaagagaaagagaagtgagttttctctaatttttgtttttctttaatttcttattttctacacaatgaataaattacttattttggaataaattactaattaccgcttattttggaaattaaaacatgtgcctattcgactatcaggctactaacatgcttcctatcaggtttttcttaaaacatactattaaaataaactattaaagcaattaaggcttactgaactgtgagtcgagcaaatcgctgatgatgattatacatgtcgtgacgatcttcggaaga

SEQ ID NO: 137328 - DNA, 926 bp, Cannabis sativa
aaaatttgatttttccacaaactagccttatggttaattctgaaattttttattatttttgtttgttttattaagatgagatattacttattttattatcaaaatttgaaatgatctttatttttatattacaatactaataaaacttagaaataatctagctagaatttcacatttgctaaccatatcaaatttttaaaatttgttattttttaaaatattttttattcaattaaattataagattagaaaaatgttagttttgacattttatcttattagatatttattttgattaaaaatttatattttttatgaaaataacatgaaattttgaaaagttgttaattttagtttggatagatattttaggattttccaaccataaaattttcaaacttaggatattttattttatttttatgaaataaaactgataatattctaaccttcaaatatcttgttttcaattttatttatttttttaaatttattttattaaattataagattgaaaatataatatcagaaatatctcaattttcaaattaagatattatattatattatcttattagatatttagctaatttaaattatttaaataaattgaaaaatttaaaaattagttggatatttgattttcatctttgaattttagatatttaggagattttttagattttaattatttttctaacaacctaaatttgaattttagtcaagatatttttttaaaataaaaatatcttaacctactctccagatatttgttgcatgtttgttcattgattgattcaaaaaaaaaaaaaaaattagcaaacctattatttagtcgatctaaattactatgatgaacttgttgacagatccaatgatctaattttaatcatagtccaattttcaatagatcttataaataattt

SEQ ID NO: 137329 - DNA, 919 bp, Cannabis sativa
  modified_base (56)..(57): a, c, t, g, unknown or other
aggctaacattgtagtagtgttttcttatagctcttacaacagtgtctctgaatannaattcttagataatatatttagggtaaggtctcgaccaaactgtttgttaccctctgcccagtgaacatgtatcactatttatagggctgtaaacttggagagcaagtgttttctttctcgttacaatggatataaacagaatagatcgtgggatgaatgcttagtacaaagatcgtgggattgatgcagtatacactgatcatgggatcatgtgtatgccatatccctgtaatttgatccccgagttattgggatttcgttgatgactcataatacgaaagctgaatttgctaagtgttgattcctctgcgcagatcgctgatcgatttgcttcaagtatgccaccgaggcatcctgttagggcaataatcttggagcagatagtcgaggctgattccacgtgtcaccatcgtgtgatgccacgtcagagtgcaaaaattgggataacaacaataaaaataatgactataattctcttaaggttgagatttttttcttgaacaaagacaaagacaagacattatgaaccttaagtcaatgcaaaaattaaggaccatgaagaacacaaacattaaacagtacaaatcccttaggatttccttagagagataaatcgaacagagttaagagctattgtaaaaatatcttctatccgcttgctaatttcagtatattataagacaagtgttttattttcaacaagctctctaataacgtgatgacgaatctatgtgctttgtgcgagactgttggataggatttttttgaaatattgatagcactagtattatcatagaaaatagttaaagttttcaaatctaacccataatctgccaccatttgtttcatccataacaattg

SEQ ID NO: 137330 - DNA, 843 bp, Cannabis sativa
gaaacctcatttttaatctcacttggataaatttagtgatcacttgaatgacaattctattttagtgagaatgaattgtgaaataattcaaacgtacttgacttggtgtctttaattaagtaatttgaataagtaggagttgagagaaatttgttttgacaaaaatatgtattattttgttatatcttgtcacatgtttgacactagaatttttgtttctatttttctcctcccattaaattgattgcacattttttatttgctttcagtacgtatcaatgtttctcttaaacttttgataagtagtacaacattgatatatgttatgtgtactgatttgtttagtagcgtaatatatgtatattcgtgaatagttagactcaaacacaatatcatcctttttcacaaacatgaacatacatatatataaatgaccttatgtaatatctctcatgcatatatatatatgaatatatattaatacatacataaaactgagattattttttatacaatcgattcataagcccaagtagtttttttatttgagatattgctttatatcgattgaatatatatacacatatattcattttagattttcaaattgattatatctctcctcaagttcaattaaagtcttttacgataaaaaagacttttcaaccacaaaaataatttggtcaaaatcaatcaatctcatttttgttaaattgattcttaatgacaaatttgacagcataacctttctctttacttaagatttttatcttcttctttgattatacaccccatattgacttattttctgaagtctagggaatcaaagagaaatataaaaat

SEQ ID NO: 137331 - DNA, 679 bp, Cannabis sativa
ggggtcgttgtgtgggaagatgacgtggttggcatctacttcagtccaggttatggttgtggtatcttaggtttcctctcttccacagctaagattgcctgattttgttcatacagcaaggcttgagcatactttctcgagctttgcccgagtccccagcgagatgtggacccccaataatgacctgtaaatgcccgtccactggtggagacatcaatttgttctggttattgtctgtttgggcaaccctttgatcttgattggccttgacgtacttctgtaagtgtgggttattctttctaattaaaaactcattttctcgcttcagagtattacattcatttgtgtcgtggccgtagtcagcatgaaagcggtaaaacttggatgtgtctcttttacttacatcctttttcatgggagacagtttcttgaacggcaccatagactgagttatcgcatagattgtctctatgttgtctgttaagaccgagaaggcagtaaatttaaaggcattttccatggggtgctgctcgacattgccaatgaatttaccattctttccattgtcctgtgatgttgcccaattagttacactgcggtcgcattaataacgggctatgtcgtatccacaaggaggcaaattaccactaaagattagtataaatagaaaatgatagaa

SEQ ID NO: 137332 - DNA, 825 bp, Cannabis sativa
cgagatttgagaaaacaacttttgaattttcattgattcttagaaatggttataattattttggacatgttactaggatttgattggatgttgctttacgggataagttttctatagacaaatcttattagggagccttttttttgtaattattttctttttgtaaaaaaaaagaatacaagagcaacatttccattattacatgttgtctcttgttcaaaaaaaaaaaagagggagagagaaagaaagaaagaaaaagaaaaagaaaagaacagaaaaaattgcaaagagcaacatttctatccacttgtctaatatgttgcctcttgttcaaaaaattgtagtatttaattttttttaatttttttatggctcctagaataaatgtaaaagattgtctattttcgttcaaaatcccaaaaagttgatttgtggtactcgtatggttgtttgtccaaataattcataacttatcttcgtttcaatgtttattcaaatgtttgtcataaattgtctacaacaagtgtctatcacgtctcccatctcctcagttttttaagccacttttcccattatactatgcacgaaaattccacctttatgaacaatattttccctataaatagagaacaaaaacagtgtaaaaaaagcatcaaatttttagagtgaaaaatacactttgtcattttgttacttttctttttattattttagtttacttaatttagtaacaagaatgagtaaactagagtagtaatattggtgaggttagagtgtagcttttgtacttcttattttaattattgatattgattcttttgtgct

SEQ ID NO: 137333 - DNA, 1291 bp, Cannabis sativa
aagctctctggagctaactttgtcaaatggagagagaacattaatattgctctcattggtgaaaataccctgtttatgttaactgaagaggctccggagcacccaggtgagaatgcgaccaaggcagtcaaggaaaagttcgagcgttggcaaaatgctaacaacaaagctcggtactttatgctgtcaagcatggtcaacaccttgaaaacaaggtttgccaatactctcacgactgcatatataatgaaccaattgactaaactattagggatggcgtgaattcaggctcgatttgaggcgaccaagaattttatcattgcatcatcagaacgtgcatgatcacctgctccaaatgactagttacttccaagaggctaagaatcatggagctattctggatcagacaactcaagtgagtttgatcttgaatagtttgactctagcttttctaccctttacatcaaattatgtcatgaacaagttggattttgacttcaacaagctaatcaacaaccttcagacatttgaaaatttaattggaggaccacaaaaaggagaaactaaagatcctagttctggcactgctaatggtatggcaaaggctgaggcaagcattgcctatactttgaaacccagcaaaaagaagaattggaagaatagcaagaagcctcttaaagctattaaaatggctaatagaaaaaggctgataatccaaatgcaaagcaaaaaggaaagtgcttctattgcaatgaaaaaggccactggaaaccccagtgtccaaagtttttggcaaagaaacaaggtatttctatttatgctataaactcatgtgttttagagaattattatcccctagggttattaattctagatctaataaccaagtttgttttcttcttaatttagctctagctgcttaaacttggattgttatcctagcgagttgagtcggatggttggacagaagggtggagattgtccaagattgaagatgaagcttgaaatctacatttaatttttgatttaattatttcagtttatgaacaatttagtttcaattattggtttgggattttattccctatttcataattttgtagacaattcattatgatttttttttagattattaataaaattttctctataagaaattttcattatgaattgcatttatgaattgagcttgagatttctttaacttgtatgccaataccaattatatttatgtgtttatcatgtttttgtgttttattattgatgcaaaattcaatgtttatgaataatt

SEQ ID NO: 137334 - DNA, 541 bp, Cannabis sativa
ttttaactgacaagaggcataggcgatgacccgatcgacctgcatcagtacacactccaaaccctgtatagatgcatcacagtaaactacaaacttttcattatcataaggtagggctaactctgcagctatgattaatctctatttcagctcctgaaagcttgcttcacacttgtccatccacacaaaccgctgattctttttggtaagctcggttaagggtgttgaaaattttgaaaatccctctacaaactgacaataataaccagcctaacccaagaaacttctaacatctgtaactattttcggtcttgaccaatcccctgacggattcaatcttcctgagatccactttaattccatctttactgacaatgtttcctagaaaagacgcatgagatagccaaaactcgcacttcttgaacttggcatacaatttatgttctcaaagttgttgaagaaccatccgaagatgttgctcatgctcctcttctaactgagagtacacaatgatgtcttcgataaatacaataacacaaat

SEQ ID NO: 137335 - DNA, 1027 bp, Cannabis sativa
gtgagaattgcgaatgctaaaattggataatctaggttttatttgaaacgaaagtatttgcgtgacctatgtgacaattagagtattgcttagtgttgattacatgtgattctaattatgagattaattagagaagatgtgatttagaaccttaaagatttgaaaagagttaggttaatttgtataatctgtcattcacatcaagaaaaaggatagcgattaggcattaacaattgggtaaaaaaatcaacaggattctctaccctattttctcatcttgattaatctttatttgtctatttaagtttctcaaatttttattttgcttttaattataagaattattagtttgccaaatagaatcataaatttagtctactggtattcaatccaattccctgttgttcgacctcacctgtgtgagtttactactttattgcgtacacttgcgactatttacaatttttgtaacaagtttttggcactgttgtggggaaattatttgaagattgatattgcataagattacattgaattctactttggtttatttttcttgctaattgctaacttgtttctttcaaaattgtcttcgtgtatttcacgaattgaaggtgtatgcgacgtcaaggacatggtgtcattttaccggttgatcctgaaattgagaagaattgtaggagaaatagaagaaacaagaggcaagaaagagtttcagcaactgctcaaatagaagtaatcatggctgagaatgctaatggcggtaacaatggaggcaacaacggtaataatggaggtgctgttgaagatcaagaaaatggtcgcagtctgagagattacattcttccaactcttacgggggtccagtcttgtataagaccacccaccgtagatgctaacaactttgaaatttagtgtgccattctccaaatggggcaatcttcagtccagtttggtggacttccctctaaagaccccaatctgcacttgtcaaactttatggagttatgtcagactttcaaagtca

SEQ ID NO: 137336 - DNA, 1166 bp, Cannabis sativa
atgtcattgcattctcttttgaacaacttctctggtcgctcgctgagattgttcacgttggtgagcggcttctccttggcttcctttgcatatcgctcctgcaactttctggaatcacctacgatgtgaggcccgcctatgatggtcaggatgtttcgaggagttctcgaaccactcacgttttgattttcttctttgtcatctgctcggggatgactctcctcgctctttttgtatttgttgaacttccctctcctaatcagctcttcaatttcgtcctgcaaaacccaacactccaaagtagtgtgaccgatatctttatgatacttacaaatttttttggggtccctcttgttgcggtttccccttatggggggaggcttcttgaagaccccattcttctcttcgatagcgtagatatggtctcgtggtactgcgagctcagtgtagttcacgaagcgcggtccaccttttcttttcggtgaggattccttctttggaggggacttggccaatttcggacttcgctgtcttcgtggactgcgtcttcttgggcttcgacctctggaacttttccctcggggactgcgggatcgtgaccgtggcactgctgacttacgcttatctttgcccttctctaattctgccagagaattctcaatcctcttatgtggttctgccatggcaaagaactcgactagcaattcgtgtcttcgagcctgcagctccttccaaaaatcggttctcggcaggacacctgttattaacatacaaactatcaaagactcgggagccttctgaacttttgttacttctgcattaaaacgcttaaaatagtcctgcaaagactcaccaggttcttgtttgatgttagctagagttgtatagggcggcctatagatcaatgtggcttggaaatgcgtgaggaacaggtcgacaaagatttcccacatcgagatagaggcctcaagcaattggctgaaccaatcgtgggcattttcttccaacattgccgcaagaatgcgacattttgcgagctgaggtacctgatccacttccataattgtattgaatttttctaaataaccaatgggattagaggtacctttgtacttcaggattcgaataatcggaatcccttggggagctgagcttgtcgcactttc

SEQ ID NO: 137337 - DNA, 760 bp, Cannabis sativa
gtggggggggtttagcgaaaccaaaaccatagtattggggtttttataccgctatttaccctttattattttattgagttgatgagactttgaggactctaactttttgttggatcgtgtaatactactttcagaaattatagtaaatgatctatcttaaattatagtattatgtaaataaatgttcttattttaaaataaaatttgtagagaaatagtctgtttacaatatttattatttatattgtcttttgtcatataaaaaaaattaatattttattttttatattttttttagaattagaagcaaattacttaaagatcatgatatatttatattaattttgttaaaaaaaaattattttaaagttatgtcgattttttaaaattttttatgagttgttttagggttgttggtatatatattttgttataagattttgttatacagtatattttatacagtatatttttgttttgttctatggtatattattattttcagatgatatttatttttttattttaccatgtataatattatttgtggtaagggtgttcatataatccgtaatccgtagttccaaaccccaactaatccgaaccaaaccatttgaaaccggactaaatgaatccggtgtgaatgatttgataaattcgaactgttttaaattctctggttcggtcacggttttagaaatctcggtagcagttcaaaccaaatcaatccgtataattattatatatatacttaatatat

SEQ ID NO: 137338 - DNA, 830 bp, Cannabis sativa
tcaagctcccaaataccattatacataacacacgcattaacagttgaacctgtcacatacattttaaaaaatacagttataatttacaacaaaaatctcaccgaaataaaaaataattattactaaaaccataaaaaataaaacaataattaaaaattaaaaattattaataataattaataattaataattaataattaataataattaataataattaataattaataataaaacaataataattaatcattaataaaaaaaattaacaattaataaatcaataataaatcaatacaaaataaattaatcacaaaataataaataataactaataattaactacaaaaataattaattaattaaaaaaattttaaaaattaaaaaaatccatcgggtccgattggtccgaccatcggacccacatggaggagcatcggacccacgttcaaaaaattaaaaaaaaattacaaaaagccatcaggtccgatggggtccaattggtccgaccatcggacccacagtgggagcatcggacccacgttcaaaaaattaaaaaaaaaataaaaaataaataaaataaagcatcgggtctaatggggtctgattggtccgaccatcagacccacttgatggaccatcggaccatcggaccttcacccctgccaacaaattttcaccctacatcgggccccccatcgggcccgacgaaaaaatatgcagaaaatcagcaaaaatccagttttcacatgcagcaaacatttaaacagaaaaaacagcaacaatccacagatcaagcatcaaaataacattctaaactaaatataaca

SEQ ID NO: 137339 - DNA, 544 bp, Cannabis sativa
agctcccatatagcatcaatgggtaagtaatttttttttttttcaaatcttgtttgttggtgttatatttaattaagaatgttgtgtttgttgcttgatctgtggattgttgctgttattttgctctttttctgttaaaatctttgctgcatgtgaaaactggatttttgctggttttctgcattttttttcgtcgggcccgatgtagggggaaaatttgttggtaggggtgaaggtccgatgctcctctaatggggttcgatggtcggaccaatcagaccccatcggacccgatgccttaattttttttttttaattttttgaacgtgtgtccgatgcttctccatgggagttcgatggtcggaccaatcggaccccatcggacctgatggcttttttaatttttttttttaattttttgaacttgggtcagatgctccccctgtgggtccgatggtcggacccgatggctttttttaatttttttaaattttttgaacgtgggtctgatgctcctccatgtgggtccgatggtcggaccaat

SEQ ID NO: 137340 - DNA, 520 bp, Cannabis sativa
ccataaattataacacagtttggttattaaaatggtaaaattatagtaatcttctcgacgccatgcatgtttaaaaaatttaggaaagacccctatatttgtaataagacaaaaatattatcttttattatctttaatttttttttttttgaataattagcatttttctctcaaaacttttgacactacatgatcttgtcccctaaaatatacggcttgataaattttttccctaaaatataacaattacataattacgcctcttctgttctgttagttttcatttcttcaattcaaccgttaaaaattagtatttttaccctctaaactttgaccaaaataaaattttatccttttattaaaaaaaaaaataattttaaaaattataatgctctattaattcttaaaaaattaataaaaattattaaaacacttgataaaaatattaagtgtacttaaaaaacttaaattattcctaaaaaatattttcaaactttattttatttataaacacatattt

SEQ ID NO: 137341 - DNA, 681 bp, Cannabis sativa
taaataactataacgtacatgactatgagaaaaaatttgactaaaaaattatttcgggtgctaaaacagataaaagttcatcaatgtatgtattttaagggggtgcattgtagaatttcccattcttatattatcacttacacaattatacgatagttacatggtagttgttgtctagttgcgcatttcaatcagacgataattgatgggtggttggttgaatgttgtataagacgaaagtttcaatcaaacaaagcttgttgggtggttgctgagtgattgcatcagacgaaggttccaatcagacgaaataactgttggaaaaatatttatgcaactgttatgaaatattaaaaaatcaaaacagtgtttccacatgcgtaactctatctacatgtctcttcatgatttaatatgaacaaattcactattagaaatttggaaaataataaaaatacaggataaatattttactatagtattgatgtaattttttttatattatacttgagttggattgtttaggaactccagttcaactttttgagatatatatttcatggattcgaaattggaagtcaggacattagtattatgcaaattaaactggattcccgattgaattttagtttcgtagtagtttttttataatttttttttcatgaattcgaaacaacccat

SEQ ID NO: 137342 - DNA, 795 bp, Cannabis sativa
  modified_base (47)..(54): a, c, t, g, unknown or other
  modified_base (121)..(127): a, c, t, g, unknown or other
tgttagacttttttacaaaaattagaaaaaaaaaaatccttaaatcnnnnnnnntcaatagttcagggggcatttttagcgaccttaaaagtttatggggtataatttggtacatgtcaannnnnnnggggcaaaaatcctaattagccatgtaaaaataaaaaaaataacataaaaggttaataaaaaatgtcatatatatttgtaagacataatatattttttttttttcaaatttagtgtatatttgataagaatagaaatttggagcaattttgtttaataatataactttggtgacactaaaaaaaaatattttcttgcaagtttcatgtttcataaagcatgacgagaaatgtgtcagcttgttgaatattaactcaagtctcacatcaaaagaatggacaagaatatataaatattcatcagtatgaggttttttagaaggtactcaaaaataaaatatgtgtcaaagttgacaatattatactaatgtgaaagaaaataaaactataatacaatttttaagggagacatttgaacaaattgggagaaaatattcttacaaatgtgagtcgccaaacacgcagatcacaaaaaattatagtacaattgcttaggaaataggtgcttaaaatcactgttaattttactgtgaagatatagctatgtccctgcttattgccaattctactaacgctcctccaatttgggtaaaagaggaagagggacagtgtggaagagaagttgaaggagagtggaagtagaagccatggttgagcttgattttccaaa

SEQ ID NO: 137343 - DNA, 614 bp, Cannabis sativa
atgaacaactctttagtttgagggaaaacctgatggtaccttggtatgctgactatgtcaacttcttggctgccaatataacttctactgagttgtctcgtcaacaattaaagaaattcttttctgaggtaaaacattactattgggaagagccaattctctacaaacactatgccgatcagataattaggagatgtgtgcctgaagaggagatatattctattctaaaccattgccatgctttaccatgtgggggaaattttagtggcacaagaactgctgcaaaggtactgcaaagcgaattcttttggcctactcttttcaaggatgctaatggctttgtaaaggcatgtgatcgttgtcagcgaacagaaaatatctgtaggagaaatgaaatgcctttaacaggaatcctggaaatggaattgtttgatgtttgtgggatagatttcatgggtccttttccttcttcttttagcaatttgtacatcttattagctgtggattatgttttaaaatgggttgaagctgcggctactccagccaatgatggtaaaacagttcttaccttccttcaaaagtatatatttactcggttcggtactccccgagca

SEQ ID NO: 137344 - DNA, 667 bp, Cannabis sativa
cgtcagcagctctccgccaaccaacgcctgccacctctccacgcgtcagcctcacctccaacagcagctcgccaagtgtacctacagaaggaaaagaagaaaaaaatggctgattaaatgtgttcagccgaaaattacaaataaaatccaaaaaatccataattttctcccacactttacacctaaatatccatcttagcttcccaatcaattaaattattgccttttttataacatctaaatatctctcttaatttactgaaagcttttctctctggagccttctagcaggtatgtcgtccatctctttgttctctttgagtttggttcctcaatcggaggatctcgtccaccctaactggtatagtggtggtttgaccttttgcgcttcctcttctttgcctactctctcatttcccctatgtaataaatgctctaggggttattatgagtttctttcccatctcattaattctgatcagagcattaattgctcaaaacacttccttttgtctcctctaattaatttttcccatcattcccttttgtctcctcgccaattactctcgatttcccgtatctttcatcagaaaaacccccttgattatcgtaaattgggggcggacgcctgtgttcctaatgtccttcaggttcccctcattaatat

SEQ ID NO: 137345 - DNA, 2345 bp, Cannabis sativa
  modified_base (1174)..(1179): a, c, t, g, unknown or other
  modified_base (1919)..(1921): a, c, t, g, unknown or other
atcaaactcacttgagtttcttgatctatattagctccatgattctcaacttcctggaagtaacttgccatttggagtaggtgatcactcacgttatgatgaggttttgattcgtgcattgataaaattcttggtcgcctcaaactgagcttgatctgacgccatcccgaacagttcagttaactggttcatgatatctccagccatgagagtattagcaaacctagttctcaaggtgtcgaccatgctggatagcataaagtatcaagctttgttgttagcatcctgccaacgctcaaacttttccttaactaccttggtcgcattctcacctagctgctcaggagcttcttcagttaacacaaacagggcattttcacctatgagagcaatattaatgttctctttctatttgacaaagttagctccaaagagcttgttgtcagtcaacagtgacaccatgggattgttcatagtcatattgggtactacaaatatcaaaaaatagaattcaactaaggttcattacaaaatcatacacattcagaaattattaagcacttaggaagtaggaatgacaagtgaaaatacaaaaacaaacaatactaaataatttccaaggtttctaacaaactgatacagtgtcccctataggcgagagttgaaggtatcattcattgaatagagcaatcaactcaactaaaatggacaccattctagtaaccttttaattgatcaagatgagaatctggcattgtccagtttaggcgagagtcaaggtcattctatcttgtgagcttccaccattatttcatactttgtaagtcctactcttagcagccactattggggtggctgttactaaaaataaaacacttacaataatacttatctttcgagattctacagtgttaaattgctaatgagcgctcatccattagggatgaatctcactaaaataagaactatgtagaaccaacaatagagatcgaatatccttataataaagctcaatatttaaaatctattatcatctaatatttattttaatctatttattttaatatatatatttattcaattaaaattattacataactttaaatataaatataaattttaattgaatatttataaaattatacttagatagatctgaaaataaataaaattnnnnnncatcttagtaataattctcaaaaaatattacagaaattacttgatttaagttggtccaaaattaattaaaattaattctactgacctcggttttagccaacgacaatggatcttatttagtaagcgacaagtagtttataacgattgatatatagtaaagcaatataaagacacaggaattttatagaggttcatccctgagcagttcgacaatagcctaatcctcgttatatgtattaactcaagaacaaggagaaagattccttttcttatagctcttacaacattatctctgaatatgaattcttagataatatctcttaagtaaaatctctcaaccttttacccagtgagcatgcaccaatatttattaggctatgaacttggagaggaagtatttcccttctcgttacaatggatataagcagaaagattgcatgataaatacagaatacactgatcgtgggatttgggatttctttgataactcacgatgtgaaagctgcattcgctaagtgttggttgccatatatctgtaatctgatcccaaagttatagggatttatttgatgactcacgatgtgaaagctgaattcgctaagtgttggttgctctttgcggattgctgatcgctttgctttaggcatgcatatgaggcatcctgttcaaactgtattttccaagcagatactcgaagtcgattccacgtgtcacaatcttgtgatgccacgtcagagtgnnnaaattgggataacatttgccccaagtctgtacgggacttccaaagttgcgtgtagacttcatccgcgcttcttctgcatttggatgggagacacgtgtcaagcgcgtctgttcgtgactagatgtgaggctgagtgggcgtccattcagttttcgtctaataaatgctctgacaattaatatttcaaaatctgattttctctaaccacggttgacggctgcactcgattatttttgatttcccatatttgcttgtaagggggaaccgaggcgtctgaggttcttttgaaatgattacccctttccgttgcttgcatataaataccaacgagcatttgtacacaaattcattttcaccatccttctttgctaagtaagttcagagcgaaaagagaggtttgtggcttcaagtttgttgaagtgcc

SEQ ID NO: 137346 - DNA, 1268 bp, Cannabis sativa
  modified_base (629)..(630): a, c, t, g, unknown or other
aaaaaaatcatccaacctccattgttgtacaaaaaaaaactcaaaaacaacattcagtcaaaaagcaaatcgcgttcacaggtgaagaatcgtatagaaggaaatctggaaatcattgaaactcacccatgattgaatcagaaagagaattgaaggtaatacaattttttcatgaacatcctcaaatcttttattgtagattaattgaaatttgttattaattgatgaaaaccggattaaattgaaataataataaaatattggtgaatctgaacaaaaaaaacaacaacggtttgcatgaaaaaaaaatattaatgcatataaatagatgctacagagttttattctgtaaatagttgttcataagttgttttcaagtaaaataatagttgtttgggatctgcaaacgagaaaagatgaattcttattaattactgaatgcttcaaaatagttgtttaatagttgatttgacagatttaaatagtcgtccagatcaaaatgttacttgcaaaagttgttgctagaaagagttgttttttagttattttgacagattgaaatagttgtttgcaactactgaaactgaaacaagtaaataatttacattatttcaggatacggaaccatnncaaattttggtacaaagcaatgggtattgggatgacaacaaaaactatgttgaatatgaatcaagtggagaatcaatttccaccaactgcacttttgatgaactactgagaataatgatggaagaactccaatgcaaccctgaatcaatacaaatacaactaaaatatcaattgaaggaaggaggccaaccactacaaatcaaggatgacaaaagtctgttgttctacataaagctattaaccaaagaggttgatttcacaaggtacccattgtgtgtgaacaaaatcagcaacacaacgccacctaaccaaacaatggtgtgcaacaatatgatgatgacatcgtatgacaacaactcagcacaagcagatttgcagcaacttggaaacaacccggcaacaactatctgcgcacacaattggatcagttcaagatgatacattttttttagaaacagggaccgtgacatcagaatcaatcatacaacaaccagaaaacaacagagaaaaaactacagtagtagatgaatattaaaaaaccaaaaaacaactcaataacaacacaaaaacaacatcaacaaaaatacatagaagaaatacaaaaagaatgacagaatacataaaaccgtcatgataaa

SEQ ID NO: 137347 - DNA, 640 bp, Cannabis sativa
  modified_base (368)..(405): a, c, t, g, unknown or other
taaatcaaacatagttttgtaatagtctttagtgaactcaaacatagtatcatatcttattagtcataaagattttagataaataaatattgttatggtaattaattagataaataaataatgtaaatttttaatcttgtgatgttgtcaatttttttttagtattattataggttttttttttttttttggaaacaacacaattaatcacaggaataattaatgttaattttcttctcttttttcatttggagagcatatattttttatgatcgcccagattttattaccacataagaaatctccagataaagatgatttagtcccgtacgtcattgtattaattcccttccaaaataataataatnnnnnnnnnnnnnnnnnnnnnnnnnnnnnnnnnnnnnntaataataataataataatgtcattttcccttttccctttcgaatcagaaataatgtcattttccatatccatgaatgtatatagtgtaatctcacatatttttcatgcaaaagtaatatactcacgttagagagtgaatatacaccatgaataagtaatatagatattactggataggctatagtctatatagtctccaaattaaatgatctgatgtgtaatattacttttttt

SEQ ID NO: 137348 - DNA, 502 bp, Cannabis sativa
tcttccatgtatcagagggttcttagcctcatctttgcttttcaacaaataaccccagactttcctgttgtaatcatcaattatactcataaagtagtgtgcgtagtatgctccaccttttattggaatcctagatggtcccaaaggtcagaatggacataagctaacctttctatggtggtgtgttctgccttgctgaacttcaatctgcaagccttccccaaaacacattcatcacaaaattcaagtctttctgttagcttctctttgaatagtccttgcctgttcatttcctcaagtcccctctgacttacatgccccaatctgaggtgccatagctttgcttgactatatttagttgagtccataacaggtgatgcactacctattattgtctttccattcaagaaatacaatccattactcaaccttcctctcaacacagtttctgtgccttgtgcatttttcattacaccttccttaactttgacaacatacccca

SEQ ID NO: 137349 - DNA, 702 bp, Cannabis sativa
taatacaagcataaaagtaggcattattaccatctccttggtttagccaagttaccttactcctttggacaagaaacttttcagcattttttctcgaagatgaaaacaataagcagcctctttttcctccttgataaatctttctactctcggatgactttgagcttgtaatctggcttcgagaaacttgtctttagccttctgaaaatccaacgccacattaaccaaccttgctcgattaaatgagtttaggacatggttcagccgagccaatttagaccaaatccccaataagccagaagagaaaaccagtttatgccagctttccataaccagatttttgaactctcggtgctctgtccaatagttaaagaatctaaacggcttaactcctatctccaccataacagccgaagaaatgacaatagcacagtgatctgagacctcttcccaactgaaagaagctgaagagttaggaaacaagtccaaccaatcctcattcttgaaagcatgatctattctcgaatatattctatccttactcccttgattatttgaccatgtgaagaaagatccccgcctcttcaaagagtctaccatacccaaactaagccaaccattaaaatcttcaatctcaacccttgaaaccggtttaccacctactctatccccataattaattaaggaattaaagtcacctaa

SEQ ID NO: 137350 - DNA, 556 bp, Cannabis sativa
  modified_base (141)..(150): a, c, t, g, unknown or other
gtcaagaagaaagatggatcattgtgtatgtgcattgactaccgagaattgaataaactgatagtcaagaacaagtatcccttacctagaatcgatgaccttttgattagcttcaaggaaagacggtcttttcaaagattnnnnnnnnnncgggctatcatcagttgagaatcctagaggaagacattctaaagatggctttctgcactaggtatgggcattatgtatttctggttatgtcttttggactaaccaatgctcctgcggaatttatggatctgaagaatagggtattcaagaattttctcgatatttgtgttattgtatttatcgatgacatccttgtgtactctcagtcagtagaggagcatgagcagcatcttcggatggttttacatcaacttccaacttcgattcgagaatcgagaacataagttatatgccaagttcaagaagtgcgaattttggctatcttagatgtcctttcttgaacacattgtctataaggatggaaccaaggtggatctgggaaagattgaatccgtcagggattggc

SEQ ID NO: 137351 - DNA, 652 bp, Cannabis sativa
atctttgcgggttgctttgtttagttttctatagtcaatacaaatcctccaaccagtgactgttcttgtgggaatcaactcattcttctcattcttgattaccgtcattctgagaaagataaatttagtttatgatttataacccttaggctgatattatgttttaattatataattataattataatttgttttaaatgtatatataattataatttgttttaattatatatatatatataattttttgttcttcctcaccctctcttccctcacataataaaagtaagtacttaccgattattgtttaatttattttatgtacaaagcaaacttattagaaaaattattaatgatgattacaaatgaaatacggtgatgacatcaattttaaatatagtagtgactataaatgagatacgatgatgatagttgttttaaaattatatgatgaattttctatagatttattattttcttactgttttagatctctattttgtgtaagaaatatttagtttctaattttttttactgtagtgtattttttaaaataaatttacctgattttttttttatttatataagaagttgtatgataattttttttaattctttagagttttccatatagatttattatttttttaat

SEQ ID NO: 137352 - DNA, 605 bp, Cannabis sativa
ttacattatattttaaaatataagatgtgtttagatatgaggtaacaattatatataaattcttaatattttatttagcaaaatttatagtagttacacatgaaaataatatttttagtagttagtatttaaaattgaaagtttttagtaattacatagtgtaattatacttaattctcacgtggggcatgaaagttgaagagtgtaattggaatctctcaattacctccaattacataattacagtgtaattacatagtaagacaaacatgtcaaattatataattatctttaattatatataaatccaattacgtacattgacaaacacgcctgaagcctatgttttggtagagaggatttatggagggatggacaagtgaggagggagatgagtagaatgagaggtcaatttctttgtttggtaggagggaacaaaggaggaggaaggagggcgcaaatccttccaaattcaaaatatttaggccatatttggtaggaagaaatgagagtaagatggatctatatataaagtttagaattaaccacttgaggctagctcaagtggccataggagggggcgtgtgtgttggaggtcctgggtt

SEQ ID NO: 137353 - DNA, 947 bp, Cannabis sativa
ttttgtactctctctctctgttttttgttgtgttcaagttaaaattacataaaatattattacgtacacatttcaaggcattgcaatagcaatgttgaagatcagattcagaacgaaacataatatatgcggtatattaaaatattattgaataatgaatatataattgtatgtatatttttcatttaatgcaaaatcaaagaagaagaaaatttcaattcaaggcagcggtcaggtcatctcatctcatcttatgctataaatatattatatttatttatagctttaacttcaaatggttttgttttgttttggtcaacacaaaaggacacaaccacatacaatgaatcaatgatgcaattccaacaacttgctatatatttagactaaatcttatcaaattttaattttaaaaaataaataaaaatcctagctctcccacacgtaaccctaattaattttctttttatcttttcgtaaccctttattttgttaatatatatatctatacgtatcacagaaagtctaacataataaacaaagaaaaaataaattattaattcatatcagatgataaatattaaatgatactgtgcacgtgcagacaatatgtaattatatcatgaaggttaattagtccactcatcataaaataatactaattatatgttaattaattataaataaatgaataataataatttagacaataaatttagtaaagataagtctatttagtgaaggtacttaggtcatataagttatgtactcccattttttaagatgaaattatttatgtgacgtttggtaatatttttgttttctaatttttaatcagaaaatgaaaataaaatttttgtttttaaaaattttatttttgaaatacgaaaatgccattttgattatgaggcacttgatgatgaagccatgaaattaattgaagacaa

SEQ ID NO: 137354 - DNA, 524 bp, Cannabis sativa
aacatgtgatttagaacctaaaagatcttaaaagatttagggtaatttataatatgtcattcacttcaagaaaaggatagcaattagatattaacaattaggtaaacatacaacaggattcccctctctattatctcgtcttgatcaatttttcacttgtgttatttaagttttctgaattactttcattctttttcaatcataaaaagtattaatttgccaaatagaatcataagtataatttagtagtaattaatccaattccctgttgttcgacctcacttgcgtgagtttactacttgattgcgtgaacttgcgtagtatttaataattttcgtaacaatagcttagaacttgcatgtctggttcttttgaggcgaaatccttcacaacatttactaggaccatgatttaggcagtttgtttggacagtttgagcctttcaagcctaccataaaatgaatatcctttgtgaacccttttgagcctaaacttgtttcgtttcttcacccattgaactaaaa

SEQ ID NO: 137355 - DNA, 706 bp, Cannabis sativa
atatatataaaatattaatatattagaaaaatttgcattgaattatgttagatttcaaaaaaaaaaacaagaattgagcaacggtaattttatcgttttaaatttaattttttattattttatttctttataaatagtcactaatcattttacatttttaacacaaattcatcttctaaataatttcacatactcttcttttacaattcatgctacttttttttttcttaccaaataatagattcacaaaactcctaaaattctcaaaaattttcatataccaactcccaaaatccaaatttattgtattctcaatttaaccaaaaaatttcaaattctccacatactaattcccgcaatccaaattttcagtattctcaactcagtcaaaattttcccatatcttcattccctcaccaaaattttaactcttttgagacttctcaacatactccattattcacactacgaaattcactaccatatggctttcatagatcaaatatggaaaagagtacaattgatttgaatgttgaaacttcatcggcatcggcatcagcatctgaaacccatcatatagggctggaaaatgtggttatagacaatcagtggcggaaccagacgacgaaataaggaggggccaaataaaatatattttcatttaattttttttagtatgtaatattttataaatcaatataaaaag

SEQ ID NO: 137356 - DNA, 596 bp, Cannabis sativa
tgctaattgccttttctaatccaaattaatagagcgatcattacaggaataaaccataataaatggcacaaatgccatacaaggcacaaaaaccgtaaaaggcatcaaaaccatcaaaaaatagtacaaaaacaagtgtggtcttattagcacatatactttaaacatataataataccatttaaatagctagtaaaaagaaacaaaacaaatatttatatataaatacataaataaatacttatataaataataaataggaataataaaaagtattaaaaatactttatcatatttgtataacaaaataaaaaattttaaattaataatgatgagtataactaaaaatcgttattaaaataaattaaattaaattaaaaataaataatataattaataatataaaagtgtgaaagattaatgctaaaagtaaataaaatgataataaatacacatagtaaaggttttaacgaaaaaaaaatggcaagcaattaaaaaccaaaaagaaattgaggataaaattaaaaactaaaccccaatcaaaagcgttgagatttggttttttctcgcaagaaaaaactaaataaatatggtaa

SEQ ID NO: 137357 - DNA, 829 bp, Cannabis sativa
ttttatgtttgtaggtattatattcgttttatattctggaactggttataaacttttaggatatttgacattaaccattataatatgttctttatttttacgttttgtaacagcaacagtgttatgatttttcaattaattatgtttgtttttttaaagtcatccaactagagataaactattatgcaactgtatacaaaatatttttagtgttcaacatacttgttatttaatttgggacatgctacctcaatatattccttactgttatgcaactgttttcttctccttattatacaacttataaaaaatcatatctgacttttaacaaaaattatattaaaattcttttagtaataaatcattaataagtgtcaaaactgttttgaaactattatgcaactactagcaaactatttaaactttgccaattaatagcaatctatcaaatataatatttcatcatgtgtaaattctcatagagacttaaacaattcaaataattctgttgtatctattttattgattgattgttgcatgtctttcggttgtgaccgtgttgaccacatttgctaaacctgttttattttctttatatcctaatcagctataaatcttcttttccttggtcttccagatcttattttctgatttggtggcagaataaggatatcttttatgttcagtcatacatcccatgttgtctaattgtgtaccaaatatgttgagtcgctgtatgtttcaagccatgttcttgtcgtgtaataacttgaacagtagttgtaagcattcaagttcatctcttttatcacagcaagcgcatgagcac

SEQ ID NO: 137358 - DNA, 758 bp, Cannabis sativa
cctagccagccaaaagttccctctattggaacatccgtccagctcccctagtaccctagcagtttaagctcaggtggcaaacggtccaacagcaacaataggcaaaaaaatgggaaaaagggaaagttcactggcaaaaccaaacagactcccagggagagtcctaccaagtttactgctttttctgtcctaacagaagatataaaaaccatttacatggctactcaatcattacctccgtacaagaagccctcacccatgaaaaaagacgtgaccaagagagacatgaccaagttttgctgttttcatggggattatggccatgacaccaacgaatgcaacaatctaaagtaggaaattgaatttttgataagaaagaataatctgcatgtgcgaaaatatgtcaaggttgatcaaaattaaaggggcgataacaaccaagatttactaccaccatcagtagatggacatctgcaagtcattattggaggtccgcacgtagctggagattcaggcaaagcccgagaaaggtatgcccgaacagtacagcatgagcatgaagaagtatttctagccatcgaagaaaggaaaccgaaaatacctcgggcatgggagcccaccataacatttagtgatgaagacgctgtaaaatatattgtttaggagaagggaaagaagagggattctaacagtaatatggttggtccaccgactcaacctttgaaacacactcaaaggccaaataagcttccaatagc

SEQ ID NO: 137359 - DNA, 909 bp, Cannabis sativa
  modified_base (242)..(247): a, c, t, g, unknown or other
  modified_base (805)..(805): a, c, t, g, unknown or other
aataaaaagatgagacaacttcttccaatccacatattaacacacacttgagaaagacaataaacaaggaattttttacagcatttttaaccaagatttttcttcggtgtgtgctagtgacatcatgtgagaacattggctcactctcacaattgtttttattaagctgcccatttttttttttgctaccttttctatctttagacactccgactctttcttttgcaaccagctatggcttnnnnnntccctcagagatgtagccgtcctcttttaatcagaaatactaatacagaaggatcatactacttattagtaaatggactaaagagagctcttcccattgcatctaaaagaggtagcctttttagctgggaaaaataaagggtcaaaagatcctgaaaaactcacctatttagagcatcctcgatagaactagagaacatgtagatgggacatgaagtgcctcatagaaaaaaaaaacgataacaatcaaggcttagctgaacaaactgagaaagataatgatcatataccacaacgaattaatcagatagaacacatcaaaaaaaaaatcccaagttgcacacattaatatgagaattcaaggctttagtaaacaaaaatccaagagagcatcaagaataatatgtgattatccaatgtatttttactcaaccaattccaaaaaatgatatccgttatctatatattttgagtcaacatgcattttgaggaatgtttgtgaaacattcattatcacacatgataccacataaacaagcaatgaggaacactagacaanatatcatgtgtgtatcatatttcttttaaagcaaaagtgtacgatgtacaacatgatcaaaaccagcatacaccaggataaaaacatcatcctttctttgttta

SEQ ID NO: 137360 - DNA, 642 bp, Cannabis sativa
ataaattacatggttggaccagtcgccacttatcctttgcatgaagaactctcttagttcagtctgcgatttggggattaggaattactggatgagcataattattttaccccaaaaagttactggtgaagtcgataaattgtttcgtgactttttatggggtgagtcggtaattgtagtaagttgcattttttaacttggagtcaagtctttgcctaaaaattatagttttaatgatttggatttatttttaaaatcatagttataattacttaagattatatttgtattgtctgattatttataatatatttacattattattttttttttgagcaaccattatgttactaatttcaataaaatattagaactaaccatgttgtttgtcaaaaaactagttagtatagtcaattttgtttgtaatttaatttattccatgatgttgaagatatattatttagctttcttatatattttttatttgaaatctaaccaaaattctcattaaaaatagaccgatttaatgtattacatgataacttttaaatattaaattaaaaataattacaatttataaaatttgttagtatattaaattttaatttgtttaaattttaagttcaataactaatttgtcaa

SEQ ID NO: 137361 - DNA, 964 bp, Cannabis sativa
aaaaaaaaaaagtcagcaactgaattaaaaaatgaaaagaaaaaagagagccaaaattaactaaaaaatatataaaaaagaccaaaaaagaaagctttttgaagttttaataagtagaaaacagtaaaaacaaaaaaaaaattaagaaatgtataaatgtaaaaaatttcttgttaaattatacatgtaatgtttgaaaaaaagttagtatttgatctgaatttctcaaataggaagaaatcttaaaatgtaaatgtaaaataaactaaaaaaaaaataaaaattaattaagctagaaataaaaacatgaaatatgagtttggataataggtttacaaaaatatggcatatcaaatatcataaaaaatcttaaatgtgaaaaaatatcatagaagagtggcaaacctataaatactatatttttgtaacttttttataaaattctacatttcatgtaattttcactagattcaattagattgggaaagattggattagatagaattatagtgaaagtaattatgtatttaatttttgaataaactaaattattttttaagaattttttttaaaaaaaaaaaaatcagccaaaatcaaaatatatactaataatcttgacaatatatacatatattaataataaatgaataaaaattttaattcaaataataaaaaaatttaaatcataaaaataaaataataaacatttattaaaaatattaaagaaattatatttttaaaaataatatttcataacacaattaaatatacatacatatctatatactagatagatgttacgtgccaagtcacgtatattaattttattttaatttttaattttttttaatatcataattttaaatttaataatatttaatattgtgataatcattgaaatttaaaagcataatagtaatttaaataaaaataaaaattactattatactttgtaatagtaatt

SEQ ID NO: 137362 - DNA, 668 bp, Cannabis sativa
attctagtgagattaagtgtttcagccaccgcaactacaactcctcaaggaaaaacaacccctatttcatctcattctagtgagattaagtgtttcaaatgtcaagggcgaggatacacatctatccaatgtctaaataagagagttattgtgattcgtgaaaacgacgaggtagattctgaagatgaagaagagtttgttgatattctaggattagaagatgcttcaatagaagatgaagattatgggctagaatacggtgacatgctttcgctagtcaccagatgagcattgaatttgcaagcaaaagaagaggaagaagaggtacaatgtgagaacatttttcatactcgttgtcatgtgaaagacaaggtatgtagtgtggtcattgatgggggtagttgtactaacgttgcaagttcatccatggttgagaaggtgggacttccaacgcttaaacatccacgtcccaacaagttgcaatggttgaatgatagtggtgaagtgagagttaccaaaaaagttttcgtatctttctgaattggcaagtatgaggataaggtattgtgcgatgtggtcccaatgaaagttggacactttcttctaggaagaccttggcaatttgatcgacaagtccagcatgacggctttgttggaaattattttac

SEQ ID NO: 137363 - DNA, 671 bp, Cannabis sativa
caagtcaggcaccaataccacacttacgcacttattgccttaaaccctaagtcaactattttatttcttattaaataagaatctatcaattaatcacactaattgtggctttcatatcacaaattctagatgctcacatactgcctaaaatggaaagcggtaaataaataatcacataagcagttaagtatttactctcaatacttactgcaacacgagcctagcttgtctttgacgatgattgtacatgttcagccggtctacacaaagtttaaaaactttggcgctctgataccaaagtgtaacgccctaataattaggcatgctacaccaaccaatgttaaaaccctaatcccgctaagccgggattactagaaagaagagcggaaaaatttaaactttatttgcaatgcaattagaatataacttgtaaaaatttttaacattataaacaaaccaaaaagataacatgtctcgggatcccacaacctttttcataaaatattacaagttaattcacgtgtcgacctaagcggcaaaatccgggattgcaaaatatattcagtggtagacccaacacgcttggtgtagtattgcccaaaaatgtacaatccatcgccaagctctcaaactcatggctaattccagacaaatttaccctttcctacaca

SEQ ID NO: 137364 - DNA, 1613 bp, Cannabis sativa
catgtaatcaaccttaatcaataatctaagtgtcacataggttacgcaaatactctcgtttcacataaaacctagattatctaattttaccattctcaattctcacttttcagattttgaattgagatcgagggtcatcaagcttacacatggaattaaacacaagtatagataatttcacaaatcatgataaaaggaatggcaatttacattaactaggcaaaactttaaacaacattcatcatcctccctaattgggaatttagttcatagaaataaaatataaatatccatgattaaatttgaaacaaaaatagtcataaagaaaataaagagtgggagaaagaaactagatggttatttcgctttggatcttcaagatagcttcctcttctccttcattcactttttggggccgatttttgatgattttggcaatctgagtcgagtcccttatataggaattagggttgtgcctccaattggaaaaatatcagaattaggtcaaaaatcctgtgtttcgtacctagtcgcaaccaacttaatggctggtcgcgaccataggcaaaggtggaaaaacgacagaggcattaagttaatgctggctcccaagtcacacaatgcatttatcccttctattctcccaatggtgcaaggaatggtgaaactcccgggatctctgagtttgggagagagtttcttctacagtatggcgcttcaacccttggtcaatgccactgtttcatagtcttccatttttctcttctttgacaagatctccttcataaacttcacatagctaggtatttgttccaaggctttagcaaaaagaatatttatgtgtaactttttcaagacctctagaaattttgaaaactgcttgtctagattggtctttctgagtctctgcggatacagaatcttcacaggatgatctatactgattggtggagacacttgttttggtgcgagactttcagtagtcctcttttctgttgatgttggtgccagttgatttttaatctcctcttctactggttgtcccccatcaggcccttcatacttcttcccgcttctcagggtaattgccttacagttttcttttggattgacctctgttgtactaggcaagttcccctaaggacgggttgctatctgagttgccaactgccccatctgagtttgtgagtctttaatgaatgatctagtctttgtcataaactgtaagcaataaattcttgtctgaagaccaaaactcccactagagccttgttgcttcgattgttgttggttctgcgtctggttctgatttctctgctgatagaacccactattccttcgagcccctcgttgattgaacccaaagttatttttttgagagtaattcccaatggctttagtttcatccattggcaaactattcacatctaccgggcattcctcataggggtgagggcctccacatagctcacaaaaaacctgagcatgttttgcttgcacagctataagttttgttagatcctctacttaagctgtcaatatagtaatggcatctacctcaagcataccagccaccttctttgtctggcttctttcagttggccactgctgat

SEQ ID NO: 137365 - DNA, 1612 bp, Cannabis sativa
ttgaatgctccttctactgtgctgtagaaaaatgtttaggaaaccctaggcttagaaacctctacgattcttctttatcatgtcttcatgcgggtttgcagccatcatgcttgtttctgaactgcataacgccggtcttacatcttgcttattctaagcttcatgaactttttggccctaactcaagaaatttttttgacttcttgagttctgacttttctttgaacatagtcattctttttaatctgttgagtactcctggtcggcatatttgcttgtttattgttcgatattccgaccaaacactcatcttgtgtgttgtcttttgttgatgaactcaggtgagtcttgggaactcggacatcggatcgaccaagatttgcttcaacttctgcacgagtatcatcctcgtctttgttctagtcctccttcctctagtgaaggaaattcttctagccctgtacccagccatagaattatggctcgtacaaagaaaacaatgtgtctggctgatgcaactgatcctcaagtggctcggcttgccactttgccagcgccgaacaggatcctactgtccagatggaggaggatcgtgaaggggatgctgaggtccaagagatcgaggagctggacgatgtacatcctggcagtccctccgagggggaggaaaaggaagacgttgagcccccaaattacggggagtacaacaaggatggggagccagtcgatgctgacggagacgtcctggtttagggcatggactacgtcagtgaggaccttgccgcagcagttcctcataaaaggcagggtgccttgggcgccaggtgggtaagtcctccatccaagattacagaggcatgccttcgaactcttgaccaggacagatacatgggcgaactggactgctacattcccgcccacaataatcgtgccacaaaccctgaggggatgtgcacctagtcgggagcccatggtcagcaaggagcgttgatgcccttgcataagtacttcaaggatatggcggagttcttcgatctctgcccgacccagttcactcctaagggcattaagtatttatctgccttcttcgtcctctatgcttccgaagggtggggtactgcttctcctaacgaagttgcctgtttctttgacttgaagtccactcccaaacagtgcaggtctgggtacttctatttctctcaaccaggcttcaagtggttgaccggcacggacgacaaggccatcaacaagatagggcattttgttgatgaatacttcatggtgaaggacgtgagcattacccggactcggttccagcaaattctgacatatcaccgtcctcccctcactctagctcttagggatagagctcaaaaactttcacggctgcaaggggaagagtgaaatattatccagttgacctctgaggataactttgtgagctacaggctctatcccgaagactttactcctaagtccgtggcgaggaagaagaggaaatatggtgctggctcgaccgaatgaactcatccatagaatgagttaattcaactgaagcgtgaagctaagttgaaaggaggtgcaagggccaagcaatatgctcaggagccct

SEQ ID NO: 137366 - DNA, 631 bp, Cannabis sativa
  modified_base (413)..(413): a, c, t, g, unknown or other
cccccaagtgacggagcagacttatgactcttggtcacttttatattttttgcaagtgtgcttttttgtctgtcccgagttttgggcttgaccaaaccttttgtacgcacttgatggtaaattaataacatgataatagattcaacacaatttgaattttgaaataaatatctttattcatttattgatcggagatatgactgttaccgtagtaacttacatcaaagctactatactgatctaatctgatctttagcttaacatgaaataaaaaaaattgtagaaattaaaagtcgtactttcaataattgtcatttgacctgagtacttgaagattttatccgaacctttgggcatggtccacccagaaggccactcacttaagcgtaaatgttcttgtgtttcgtacttgntatggtcatccgacctggtacttctattggtagtatttttttaaatgttccccattccaataccgtggtgccagaacgagttgcattttttcatcatacttacccaatttgtacgcctctgattctagaacttcgatcacctgatatggtccttcccagttggatccgagcacacctgccatactgtctttggtgtttaaaaatactcttcttaggac

SEQ ID NO: 137367 - DNA, 746 bp, Cannabis sativa
aaaacgtgcacataaaagtaggtgggactttttgccggcgcacttacgaaccgtttgaccattggacaggttgcatcaggggttggcttttgccagcgcatttatgcaccagcaaaacccctcgaaaattttggcggtcaacatcccgcgcaaaggaaaacttgtgtggaaattaagtgggaaacttttgctggcgcaattaggtgcgccggcaaaagtcccaacttaaatgaaacgcagcgtttcatgcattttcatttaggaaagacttttgccgacgtacctaattgcaccagcaaaagtcgaaagtaaataaaacccagcagcgaaccctttcttccccatttttcctcctctctttctctctcttctctttctctctctcttctctttctctctctctctgcgattcccatcgccagcagcccgtttcttcaccatcaaaccccattttcaacctcccaaaactccattttcaacctccaaactttgtttctctctttttcctattttttttttccattgttttccaaaaaaactatttttcgggattccgacgagcaccaccgcctctccggtaacctatattttctttattttatttttgttttattttttttatttgtgtaaatataataattatagtttatttgtgtttaattagttttttagtttatattgtgtttagtttttttagtttatagatgtgtgtaattttatatagttttatgtgtatttttataaat

SEQ ID NO: 137368 - DNA, 860 bp, Cannabis sativa
aaacaagcattcttggcatctatcccagaaccacttggagaagaaacatttcgactcctttctgcaaacaacaggacgctgcaaaacacaacttttggagaattaattccaaatggtgatgaagagcccttagacaaaatgtgctctcaaaacaaattcttacaagaatacatgaagcaaacaaaacaactcgacagagcatgcaatcaaaagggtctaacaatcaaatgttctaccaaagacacatgctcgtgctcaaaacagaaggatgaaaagaagaaaagcttcaagtacagatcctcaaggaggaaaaccccatggaaattccttcgaaaaaagaaaaatccaggaaaaacatcaaacagatgtttctcatgtggaaaaaagggccactttgcaaaagaatgtccgaaaggcaaaactgccaagatgataacgcacatagaagatgccactggcgtatcactctctgataatgacgtagaatccatcttctccgttgacgatgaaatctccccaaatactatgtgcgcattacaactgagttctgattccgatgatgacagatacggagggctcttcagcatgcatgcgttccccgcgggccaacccatcccaattgcaaaaatgcatgtcatcccaaccaaatactctcggccaataaaagtagctgcattttttgatacgggagcatcatacacaattataaacccagacatcctaccccctgaattatggaagaaaaagaaacaatacttccatgtcgcaaataatcaagtcctccgcacagaactaatcagcaaaccaataaagctacaattcttccccggatgttccgttgtccacagggtcattggatc

SEQ ID NO: 137369 - DNA, 666 bp, Cannabis sativa
  modified_base (561)..(564): a, c, t, g, unknown or other
taatataattccacaataatactcacttaactagttagggttttgctaatccctttccttaattctagggtattacacgtattttaaaaagctagaaaaatataggccatgctagcacgacacacacgtatttacaactatgttgtgtagtattctcgaatatttgtccagatctgagttgttgtgtctgagccaaccatgcaagtgagaatttttttagacatagatgagagaaaccaaaaaacaagaacattatcttgttgatcctaactctcatactcagggctgatgcgattggcgagtcaatctacttcggtgggaaatttttgaaaagtgagagtccaatcaagaaattttcgaaggcgactctctttaatggcgtcaaacacctggtgttttctattgttctgtagttatgctcatctaattgtacagaaggcgaatgataaaaagtagcaggggagggttttggtagatctttaatcgtggtagagttgcttgttgagacgaatcttcggtgatatcagtagaagaagaagttgttgtaaattattttaccannnnctagatttactaacaagtgtgtttaattaacatcctaatatgaatttctaaaacaatgaaataaacaaataagggtttaagaaaaccttacattgggtgtag

SEQ ID NO: 137370 - DNA, 736 bp, Cannabis sativa
ggtgctgacaatgactcttctctggagctgctgatgggaggagtcttgaaggaattcacaagggtaagtctttcctgacaatgtcctttaatcctctttacttggctcaaattctaaagttttttctctgtgcaagctggtctgaagttggcttacacatactcccgagctaagtctgctacttccaggaacgcgactctgtccaacaccatgaggcggaggtggacttagccaagaaggacgctgaggacgccagggtggaatttggagctgttcggatggagctaggtgaagtcaacaagaagctttttaccgcccagaagaaaataactaagttgactaaggatctcgaggcttttgaccgacttgaagagacaatcaagaccttatctgtagaagtgaacaaccttcaagatgaaagaacatccttttgagcggcccttcatcggctggaagaggagaagaagtctaaggaggaggagcttacaactgaggtgacgaggctgggagagaaagtccatgccttagagacagccggtcttgagctcttctatgacttttggaaggataatccttaggcatacttcgattacttgggtgaagccaaggacatgtaccttaagttttgcgctttccaagtggtttatggtgaaactgaggccgctgcttctaccttcggccaaaatgctgatatacctcccgttcaaacaatagatcctccagctcctaccagccc

SEQ ID NO: 137371 - DNA, 745 bp, Cannabis sativa
ttagattgaaaaatttaaaatacgcacttatgcatttgtgcagattggatgttatttgacttcaaaaagtaaccgatttgatctaatccgcatttaattatatatatttttaaaaatttattatatataatatatattattttttttagtaatattaaaataaaaaagacgaacttctaaatataaataaatatatattagcttatttatttgggctttttttatttttacaattctaaacatttttttatgcatttttacggaattctatatagaaatctcgattgcaactagcactgcaacctaaatcgcaataaaaaatcgtatagaaactcctattgcaactagcactgcaaccactttagaaacccaaacagtaaatttgaaaaaaaaaaagttaaaaaaatagtatatgtatattaatttgatttgtacgtaaatggagacggaaatagatgattattggagataagaaacaataatcttttttaatttttttttctattttaatgaaatattaaataatttatcattaaaaaaaaagtaatcgatccaatccacacttagtgttgattggatgttgttttaccaaaaaggatcggatgaacaaccctaattttagtaggttctctatctatttcgacatatggaataattttttagtcaaattcttttcttgatcgtatacgttacagttatttaagactacttgtaaattttcaaaaaaaattaaataatttacaat

SEQ ID NO: 137372 - DNA, 770 bp, Cannabis sativa
aacagacactcatagcatcctcaaaaatggagctagagtatatggcgtgtgataaggctacatgtcaagcaatatggctgcaaaattttattttagcattgagtgttatggactctatttcgaggccgctgaaattgtattgtgataattccgcagcagtagctttctctttaaaaatgttagaagtacttcctgctctaaacacattgacataaagtactattttgttaaagagaaagttgcaaagtctcttattttcattgaatacacgcctagcactggcatgttagcaaaccaactaataaaaggtttacccatatgtgtatttttggagcatgttgctcaaatgggattgttaggagccttactgttgagcttagtaagagtttttctattatgtatcggacatgctagtaacttgtatggaatgcttataatttttattttgaacatgcataatgataatgtagtcatttctacttattgttgtcatatgtatgcatgtatgtgttgtttactaaagttacaggtacaaaatgagatgaatgcccatagtcccaattttgttgtacctgatgcatgttttggtttgattgttaatgattgttaatggattaaatatttttaaggtcaattcatacataatatatgtatgctgtcgatatgatattatgtacgtcttaattggttaccttatgtgtgacagataatgttatggtggttgattatattgtctaattgggagaatattagaattattattgtggact

SEQ ID NO: 137373 - DNA, 658 bp, Cannabis sativa
  modified_base (49)..(69): a, c, t, g, unknown or other
  modified_base (620)..(621): a, c, t, g, unknown or other
cattcagcggtccgcaaacatctgtatgcactaaccctaggggttgttnnnnnnnnnnnnnnnnnnnnnagaaagaacgtttggtcatctttccttcaaggcaggactcctatataggtaattcacctaagacgacatttttcaatggactgtctttggttagcctattgagtctatcatagcgtatgtgacctcaatgtaaatgccatagataagtttgctcatcattatcaatctcttttcttttaaggtttctaggtctagcaacattgaaaagttcattgtttagtgcgatttgtatattcggtctcaaaacataaagcccttgtcgcatgtgagcaacacacaattgaaatccatcacgagaaattgtacaaatagtactcaaaaaattcaatttatatagatgtgtttgtaaacatgaaacactaatcaagtttgtgctaaagtttggaataaataaaacattttctaaaagtaaaaatttcttttgaaacttgagtcaggcttttcctcttgctttgaccgatactaactcgccagttccaactttaagctttaacatttctggttgcagattttccaaagtttcaagcagctgcaatgaagaacaaacatgnntagtagatccagaatcaacaatctagatggatttttc

SEQ ID NO: 137374 - DNA, 1541 bp, Cannabis sativa
ttcgcaaaacctacttcactatggttgaatatttaagatattcaaactccactaatcattgataattaatttataacaaaagttacctcatgtgttacaattagatatttaggtcaaggaaggaacatgtttgctacttccttaacatatctgcactcctaaattgagattgagatttcagcattctcttgcatcatttatgaaatgagaatctgggcatgtgaatcatcgtaatctttagtgtgaattgtgattggaccctcatgttcgtacagataagctcgggccactatgttgtcgatattattagagtagagatatactagccgattagttgccctctgttcaaagaaattgtacacgagaggtggctcatttagggaaacaatctcctgagcataattttatggtcgaccatcatcctcctgagcatattattgtggaacatacacctgtccttctttctcatcggcatcctcattttgctcttgttcggcaatatttttcttctgttaagggatttgattttggcttttaatttatcaatctccctatgtttatgagccatagcatcagaaacttcccttttcttcctgccaaacagtttagatgccttggcaaggaacctgtaaatcaataaataaagttagctataatttatttttcataactaatgaaaaaatattttttaagtactagcatacccagtagccctgacacttccaggatgacccggtatcccgagcacctgcgttagaatgtcattttggccatggacctgaacttgtccatgactaactttctcctctagttgagcctaatgcacatatttaagcaattagtatatgatttatatatatatatatatgttaactcattattagtacttaatcaacgattatacttactatattttcgacaatttccttatcgtaattagtgataagtttcattctcttggttcgagattcgatccaaataggtggagtgggggatcttgaacttgaaggtccttttttttgcattattttataaaaattaaatgagtactattcccttttgatgcacattgttagaaattattaattacttaccatatcttcatttatgttcaccattctactccgactacttcgatgtttggattggatttttgttgaacgttccctttgcaccttactcaattcatacaatgccaaaaaaataccttagctaccagtacttgtatttaaaagttcaaatataattagtacctgaaattcaggagttagtcgactttgaacaaattccaatcaatctgttaagtcaatttctggatgctttttagggacgtttgccaactattgcaaatcatgttcttctaatacgggcataatgatatcttttaacatgcatattattacacccatccgatcgcaatataatatatcacagaatctacttcacttcgaatgaatatttaagatattcaaactccactaagcatgcattgataattaattataataacaaaaagttagtgaatgtatatacctatagca

SEQ ID NO: 137375 - DNA, 767 bp, Cannabis sativa
aacaactttatatatgtatatttttattagtaacacatattcgagatcaataaccagtaaatgatgttctaactttattgaccaggtaataatcaataacatcggttgttaagtttatcaagaatacatgttcaagatctataatcaataacaattaataacttataaatttttaataatgcatgtttaagatcaataacccataataattattaactttcaaactttttcaataacatgtattcaagatcaataaccaataacagttagtaactttcaaacctttcaataatatatattcaagatcaataacctataacgatcaataatttttaaactattacaatttttttttatttttttttatgattccactctgatcaattgatacatatatagtatattaatttagaactgcaaagaagacatgataaagtgactttctataagaaagaagaattacatggcagagggtggaatgaagtacagatgtgtcgagtgcggcaaaaaaataatttttaattttataattgctattagatttttttttttttagaaaaaaaaaaataaatcacttgaaccaatcttggactagcacacttatttagcacttaaagtattgataataagaatgagtgtagaattacatttaattaaaggttagttttactatttttttattaattaaggttatgggtgtaatatttttaaattataagaggctttattataaatattttaataatttaaatccaaaaaattaattt

SEQ ID NO: 137376 - DNA, 589 bp, Cannabis sativa
  modified_base (161)..(176): a, c, t, g, unknown or other
tattttgtagaatttaaaaaaaaaaaacttaatttgagatattttaacatataatttagattattattctttgtttattattatattcttaaaataacaatagccaaaccacatctattttaaaattggttatttttaaatcatttatcttattagatatnnnnnnnnnnnnnnnnaaaataattcaaataaacctatatattttaaattagtttgaatttttaatttttgaaaggataaaatatatagtttatttaggcccaattagtattgagcttatacaatgaataacaattatttaatttaaggttaaattcttccggtttgagttttgtgtgagagttaggggaccatagtagtgagtactacatattgtaaaacaataaaaaggaacaattaaaaataatattagaataactaaaaaacaaccgtaaaacaacggtaaaaacttaacacagtacacaatatgaaacttatactctattttttaaaaaaattccgccgtaaaaaaattaaaaatttgagttatagtgtaagggaaatttacatgatgtactaatttttccccatgtattacaaaaatactgtg

SEQ ID NO: 137377 - DNA, 647 bp, Cannabis sativa
acccgccttatacggatcagatctcatccgacccattatttttatttttaaaaaaaaatttatatctaaatttataatttttttccaaaatttatttgtttaagaactaataatgcattatttttttcttatatattttttattttatttgtcaaaatcaataaaaaaaaagaatatcaaattcttatcacataaaaatgtaattttactatagaaaatttaaaaaatttacaaaatttttgaaagtacactaatattatcatcaataataatgtagtatgatgattacatgaaataaatctctaaaaaaatacatgaaattaactataaactttttatatgttatgcttctagtcttcaagatttactgtaaaaataaatatgttaataataaaagtataatttaatttataaattttaaaaatgaaaacaattgccatattgggatctacattattagcttggtcatttacggtgattagtttaatttttgtgtctgtaaaaaaaattattaaaataatataataaaatattattaattaatgtataaacaaatataataagaaataaataattatacattgtttgtcaattgccaacaaactttgagtacagaccaatgcctccaaagtagtaggatgaagtct

SEQ ID NO: 137378 - DNA, 536 bp, Cannabis sativa
acccatagagagagggctcgtatagaccctaatgggggaaatacgacaaacaacactcaaggggaaagaacagagcgtgaagaagcaagtgtgacctcaaggcgatcaaagacccacagtcaatcaactcaaagaggagaaagtacccgatgagctaatgatcgagaaagcatgggaagcagtaaatccaggagtcacacgaggacaaagttcatgagcaagacgaggtccgtgagtaagacgctatctgtgagtaaaacaaggtctgccagcaattacttccaactggatctattagagcacttgaatcagaagaaacctgatcttcaccaataactcggtccaaagcaagaggatcctatccaattgcgaatagacgagttggaggacatgttcaggagatatcaagtgggggaattagggagacaatctggatacgactcagacgaggaacttgagtcgtaccacctagatatcatgaataccccttttccttcgggattcaaaaacctgcatgtctcatcatatgacgaaac

SEQ ID NO: 137379 - DNA, 520 bp, Cannabis sativa
attagtttctttcttagtgtttataattattttttgtttcacataatattatatacttaatttcaataaccatatcatgctttattagcaaactactttttggatcaatgcatcaatcttcgtcaaaaatttaagataacccttctggtatatggcttgcacaaaataccgtcaaaaagcacatcttgacaataaaacttcaagttttaaatgctatgaatgcaacgaatcatctattgagacaattccaaggtttatattaactcaatttagcacaaatcttattatcataatttgctacttaaataaattgatttgtatttaaatatattagatgtcactttcaagctcaactaacagaccacacaggctcactaatagcaatattgttcggcgaaaatgcagaaaagtttttaaattgtaccataaaagagcttattcacatcccaaatataaattctactacttaaactcattcacttcattaacatacattaatattactatctttctcaatgat

SEQ ID NO: 137380 - DNA, 645 bp, Cannabis sativa
tacccggtgtttccccttacggatcacgcgggactactaactgtcacaaaagccccaaatctctctctatcttggggctcaatgtttttcactgccgacgaagtctcgccgtcaaaaatgggggctaccacgggcgttggcgtcgtttaatggaggcaaggccaccgtggcctttgtcgagtttcaaaccatgagctctgaggttctcgtagcttccttcgtcgttcattcgccatcaaaagctcatcagagtaaaaaaaagaaattgggtccaatctagtcgtattcaagatccattgagtaaaatgattttcaaaaatgtattctattagtaaagatcttttagatcttgtcgatagtttctgcaagcttcacctttgatggtagacaagcatcgtgcgtggttgaactccggttagctcagggactgaagtgtggctagagatatataggggtgggctggggtcagggtgtggctggaggaagaatacgaagttgtggtggcgtagtttgaggaagaaaatgatataggagtggtgagggtggactgctggaggtagaagacgaaagagataaaaagaaaaagaaaaaaattatattttaaaatattttttaatttttaattattttttattaaaattatta

SEQ ID NO: 137381 - DNA, 1169 bp, Cannabis sativa
  modified_base (50)..(63): a, c, t, g, unknown or other
taaactcttatgtgtttatttcatcgttttagaattcatattaggatgtnnnnnnnnnnnnnntgttagtaaatctagatcctggttaaatatatccaacaacaaaagcctatgagacatgcgagatgtaaaaggaacctaactaaatggtgtgaatatcatggggatatttgtcataccacggaagagtgtcgtcagttcaaggatgagatagaatgtcttatagcacgaggacgctttcaacaatatataaaagggcaggataatgcccataatcaactcgatctgtccagtaactcgagcaaccaaggataataaccctccccggcaggaggaagtgacacctcagttatctcgagagggaacgtgtcaaaataagacaaagggcagttaacccggtaaagtaattacgtaagagaattgagtaaataccaacccgctagggttgcgatatcaagctgctacgtgtaaggctggtcgtcaaccagtagctgttaaagacaaacaactaaaaccaggattgattcacctagaaccccgggatatgtcaaggaccaaccctggatattgaaacaatatttgttggagtatgttagggactgaccctgagcatcaaaacccgttctatcaaaaccagatgcttctggaagattgataaaacaaacaattgaactgggaaagttcttatgagattaatgattgtaaatcacatcgttgatgttatattttaaacttcaattgtgaataaagtaatcatttctttcaacaagtaattataaagcgtaaaccctttaaaattacttcaggggcatatatgtatgatcaaccggaactaatctggaaatacataatacaatgcaaacccattacttcaaaaataaaatgaaatttttaaaaggtcctcgaccaaacgtttttgacgaaagaggggtcgaactgttataactccctgatcaaacctttttgacgagagaggggtcgaatcgttataacgcctttatcaaacctttctgacgggaaagggatcaaacagttttgttaacctatctgacgagaaaggaaaaacaaaagttataactagcgtataaagttgaatattaacagctcgcgctaaaggaaagtattaaatgagacataaaagtgtcttgaaaaaatacttaaacctaaaa

SEQ ID NO: 137382 - DNA, 805 bp, Cannabis sativa
caagttaatcataacaatttagatcaaataaataataggtttgtaaaaaaattaaacaaataattaagtaaacattcaaacatataacaatatctagaaagtaggttaagatatttctattttaaaataaaatatttaaaaatatcttaactagaatttaaatttaagttgttagaaaatatttgaaaaatatttaaaatcatacaaaccctaaaatatcttaaattcaaattaaaaatttaaatatcctactaattttcaaatattcagtttatttaaataatttaaattaattaaatatctcataagataatataagataatatcttaatttaaaaaattgaatatttctaatattatatttcaaatcttataatttaataaattaaatttaacaaaataaacaatttgaaaataggatactttgatggttatgatattatcaattttatttaaataaaataaataaaataaaatatcccaaattagaaaattttatggtaagaaaaccctaaaatatcccttcaaaccaaaattaaccatttttcaaaaaatttcatgttattgtgacctaaaatataaatttttaattaacataaataaccaataagataaaatatcaaaactaacatttttctaatcttataatttaaattacaaaaatatattttaaaataataaattttttaaaaacttatatggtaaacattttgaaattctaactagattatctttaagttttattaatattttaatgtcaaaataagatcatttcaaattttattaataaaataagtaaatatct

SEQ ID NO: 137383 - DNA, 513 bp, Cannabis sativa
ataatcaaactgggaatattaaaatacggaatttcacccaattttatagattatgtctccattagatcccttaggctaatgtaaattatatgctagagagtgagtgtattttgtgcaacccactcaaaaaagtaggtatattttaataaaatataatatgaaggtttgattaatagatacaaaaaaattgtatttttcaacttatcactaaaaactacttaaaaatttcttttgtattatttggtgaaataattattaattacacacaaaaatttatactttaatagttaaaatttaaagtagaaagttttgagtaattatatactatatttgcatccaactacatagttattatcagtaggggtgtgtggaaagtcatccaatccaattccaaccgaccgattcaatctcaaccgatccaatagaatcggatatctaatcataattggatcggattggtaaattttgaaaatccaatcggatcggatcggttgttggatgtgacatccaatc

SEQ ID NO: 137384 - DNA, 1128 bp, Cannabis sativa
ttgctaccaatgtggagtagcaggccatttcaagaacaactgtccacaactacagaagcccgaggctaagaaagagagttatatggaacctactcgggtgtttgttttgacccaagtagatgctgaagttggcccttcgacagttacaggtgagatatctaattgtggtattgtgtttactactttgattgattttggtgctacacattcatatatttctagtagaatcattgagaaattgagtaggccatgtgatatcatgtctggtggatttggtaccttgttacctacaggagaagtggtaatctcctggaggtgggtaaggtctctcccaatgttagtagaagcgagagaattgtcaatggatttgattgaattagacttaaaagattttgatgcaatccttggaatggattggttgactaagtacaatgttagtatagattgtaagagaaagatggtgacttttgaaccagagggtgagatcccatttatttttatgggaaaggtgcagggatctcggattcaattgatatcggcacttaggaccatggaattattatgagaatgatgtatgggatacttggctagtgtgtttgataccacaaaagatacacctgagggactggaaaaggttcgagtagtatgtgaatttccagatgtattcccagaagagttactaggattaccaccaaagagagagattgacttcaaaattgaattagtaccttgggctgagccagtttttaaggctccatatagaatggcaccgacagaattgaaagaattgaaagtccaattacagaacctacttgatctatgattcacaaggccgagtacctctccttggggtacaccagttttgtttgtcaagaagaaagatgggtcgttacgtatgtgcattgattatcgtgaattgataagagttgacaataaagaacaaatatcctttgctaaggatagatgatttgtttgatcagttacagggaaagaccatcttctccaagattgaccttcaatctcgttatcactagttgaggatttgggaagaggatattcccaaaactgcttttcgtactcgatatgggcactacgagtttttagtgatgtccttcggcttgactaatg

SEQ ID NO: 137385 - DNA, 978 bp, Cannabis sativa
gaagaagacaagagagagtgctaactgtgccatagaaggctcattaaggtagttaaggtagggaattgaaaatacagagggaaaattttaagtttaccgcccaaaataaattttctagaaattgaatattgtgtaccaatttgtttttaataatgaataattataattttttaaaaagaaataattatattatttgttatctttttttttttttgagaaattttaccgtcattaaaactggtaattgtttacaataacagagaaaataggatttgagatttcacccatccaacagacatcttcatccaactcaagagcatacttagctaaaccatgtgcaacttggttagcatttctcttaacatgagaaatagttactcctgagaaaaaggataaaaaacagctaatatcaacaatcaaattattaaaactagaaaggtttgaagatgtagaattgagggtcgaagaaacacgcaaagcatcggtttcaatatgtgtaattggaagttgcaattgcaacacccaattaagactatgaaaaagcgatttggcctccatttcatcagaacgaaaacaaccttgtacatgctttgatagagcagccaccacattgccttgatggtcccttatgatcgcaccaatccccaagatctttaactcttgattggctgccacatctacatttaactttagacttgaattgggtggtggtgtccatggtataaccctggggttgtctcgaatcggctgagtatttggagcagcagtaggttggctgctacagatagaaacttgctggttttttgcttttaatctgctaaatttttccaaatgagtcctacaaaagttgcaatgttgctgctggttctcggaactcccccatgagtgactttgtttctataatgccaaatagcccacattgtacaaacaatcaattcgaaatcttcctttgagtgaagggttgaaagatgaattaag

SEQ ID NO: 137386 - DNA, 714 bp, Cannabis sativa
ttctagttccatttgcgattctgagttcgagtttaggttagagttcgtgtccgagttcgagaactgctcgaagtttaggttcgggtcttgatttctgtctaggtgcaaatcaggcttcaggtgtgggttcgcctcctgggtctttgtctaggttcggtccgagtcccaagttccaataccgatttgagtttggattgaattctgggtgtaagtccttggtttcgatcctggtctgggttcgagttttggtccaggtacgtgtctgggtttagctttgggtctgattataggtgtgggtttgagttcgggtccgagtctgagttttgggtggggtccggatatcagtctaggtccagatcaagctctgggtgtgggttcgcatcctgggtcttggtgtaggttgggtccgagtcccaagttccaatcccgatctgagtctagattcagttcatggtttaagtccttgcttctaatcctagtcagggttcgagtttgggtccgagttcgagtctagctttgggtctgattctacgtgtcgggttttgagttcgggtccaagtttctgttcgggtttgtgtcctggtcttgacagtgaattgggtctaggttcgggtccaggtccaagttcgggtcccgcgtgtgggtccaagtttgctttagggtcacgatctcggtctagatctaggtccagcatttcgatcccagtctgggtct

SEQ ID NO: 137387 - DNA, 921 bp, Cannabis sativa
  modified_base (47)..(51): a, c, t, g, unknown or other
tgggttcgcgtcctgggtcttggtctaggttgggtccgcgtcccaannnnnaatcctgatctgagtctggattcagttctcggtcttagtccttggctctgatcctggtttgtgttcgagtttgggtgcgggtctgggtctagctatgggtctgattctaggtgtgggtgtttgagttcggctcctagtctgtgtccaggtttgtgtccaggtctggactccgatctgggtctaggttcgagtttgtgtccaggtctagaccacgatttgggtctaggtccaatttcggttatgattccatgtccaagtcctagttccagtcctggtcgacttccagttttggttccaatttcgggtcacagggtatgggttcgggtccacttttgggtttgaaactgggtttaggtccgggtgtgggttcaggtccttattagggttcgcatccagggctgggtcccaaatccaaacacagtcttgttccatttctggtgccaggtcacgagctaggtcctaggttcaagttcgggtttgggtcgggtactagctcccggtcctagttctgtttcccaggtccctatccagattctgggtccaagtcccagttattttgtgggtttgggtccggtctaggttcgggttccaatcctagtctcgatttgggtttccatctctgtctggtttttgatctgggtttcggttcagatttaggtcctggtcgtggtcctagtcctagttcagttctagttccatttgctattttgagttcgatttcggtttgagttcgggacggagttcaagtccttctgagtttggctttgggtctagttcacgtcctgggtcttggtctaggttgggtccaagtcccaagttccaatccagatctgagtctggattcagttcagggtctatgtccttggttct

SEQ ID NO: 137388 - DNA, 628 bp, Cannabis sativa
  modified_base (462)..(464): a, c, t, g, unknown or other
ttggatctcacgcacactaaatgttgaggatggaattgtcgtcccattagaattagtggataatcatttggattcaatatttgggccttcatcttgaaactttaaaccatatgggccttgatgaaattgaagtccacgtatggagaaataatcacttaattgaatgtatcatatgtagcttaggtttatcacatgtagcatggaacttaggctatgttggtgatgttgatgattaaaagattgcattgtctttatgggccttttaaaattgggttttcctattttctttttaccactttacctgaaaaataacataaaattaaagtaaattaaatatttcccataaaaataaatttaccattaaaattatgaaatatttaatttatattaatttatatacataattgaaggcttaaaatgtacaaatttgagccttgatcacaacccccaactagcttattnnnagtctctagcaattcaagcgaacaaaaataatgtcaataaaatattttctaggtcaaaaattttaaaagtggcacaattattcaaacaaaatattagtaacaagccaataataactataaaattactttgaataaatctagagctgtgagtgtgtgcaccaaac

SEQ ID NO: 137389 - DNA, 1006 bp, Cannabis sativa
taatgggagcggatacaagagcttttttcaaagtcacaaaagcttcatgacagtctttggtgaactcaaaagatctattctgctcaagtaaagaggaaagaggctttgagacttttgagaaatctttaataaacctcctataaaaacctgcatgccccaaaaaacattgaattcctttgacagtagtaggaggtggcagcttctcaataacttcaactttcgctctatccacttcaattcctttattagacaccttatgacccaaaacgattccttcttggaccatgaaatggcatttttcccaattgagaactaagtttgtgtcttcacatcttgctaaaactttctccaagttaactaaacaagtgtcaaaagactccccaaataccgagaagtcatccatgaagatctcaagaatgtgttccgccatatctgaaaaaattgccatcatacagctttgaaaagtggcgggagcattgcataacccaaatggcattctccgaaaggaaaaagtaccatatggacaagtgaatgttgttttctcttggtcttccggagctatggaaatttgattatagccagaatatccatcaaggaaacaatagaattcttttcccgccaaacaatcaagcatttgatcaatgaatggcaacgggaaatgatctttccgcgtggccttattcaactttcgatagtccatacaaacacgccaacccgtcaatgttcttgtagggatcaactcattgttttcattaactaccacagtgactttgcccttttttggaacacattgaactgggcttacccaagaactatctgaaatggggtagacaatgacaaagtctaaccacttgattacctcctttctaaccacttccttcatgatggggtttagccgtaattgctgctcaacaaaatggttgcacaaatcttccaacagaatcttatgcatgcaaatcgaaggacttatacccttgatgtccgccatggtccaaccaatggctct

SEQ ID NO: 137390 - DNA, 528 bp, Cannabis sativa
tcttcttctcacttcaaaaaatggaaagtaaataaattgaatgttgtattttgatatacgtaataaattttacatatatttttttcttttaccgtttacctttaaaaattaagatttacatgtgtaattttttttttttttgcaaaaagttaaaaataataatttattattattttttttaaaattgatatctattataacttatagcatcctaaaaacacatttatatttttttctcaaaaaacacacatttatatttatattttaataaaataatatcataattatgtatattaaaattaaaattataaaattaaataataattcaaattcaaattttacacatatatatatttaaagagttttttttataataaaaatatacatgttaaaaatacattatatatctacatataagttaataaaatgatgactttctaagaaccgagttggagaatttaaaatagaatagaaaagttaaaaatctacatatctacaacatatcgatccagaaatccaccaacacat

SEQ ID NO: 137391 - DNA, 767 bp, Cannabis sativa
tacctatttaagagcacaagcatgaatttcactaccatgattcacatttaccatctcaatagtggctgtcaagatagaatctgctttttacttgagaaaataaatttcttaaacaaaacatttgcattaactcattcctttagaaccacacagagtacactattataatttataaagtcacacaacaacatacccaaaccaaaataaactactgaccaagacattttcaaatgataaaataaggtagcattaagaatcttacagtttcgatggagcatccctgagaacatccaatgcttgaatagtctcttaagcagactcatgttgcttgctctttaaaaacggttggagatgaagtaaatccatccaagttgatgtggtggtacaaacaaacaagtatataagtgaatctaaaccagacacgtagaatagagaagcaaaaacttgtatcatatttggttctcacctacttttgaggagcatatcactttgcacgttctttaaaaactgttggagataaagtaaatcaaaccttaataaactaagcccaaaaatatgagatcagaatagatggattgaatgaaaatgaaaaaacaaccaatacaaaataaaatctaactaactctaaacggtaaagtagtatagattaattcaaatgtgagaatgaagggcattatactaaaatttcataactactttgtgctgaagaaacaatgagtcagaaaacactcctatctccaaaattaactctatgaacttggagttgg

SEQ ID NO: 137392 - DNA, 502 bp, Cannabis sativa
tggattaacttaagaacatatttaaatcaccaagctttctttaacactaatatattacattcggtattcacttttaattgacaacatcataaactataatattaagatacgcataataataatcttacctaataactaataatattttttccttaacttttaattgtatcactttcaaataacatagaaaaaaactaacataaaatttagtatacgtgcctcgcacgtagctttttgctagtataataatatataggaaaaaaaagagtataaatatttcaattttactttggaatttctatatgtttataaaaaaaaaaattataataaaccttaattaattttgttgacttcgcttttaaccaacgacaatgagtctttttgataagcgatgaacgatatgtcataataacaatatgtaataaagcaatactaagacacataaattttatagaggttcatccccgagcagttcggtaatagcctaatcctcgttagttgt

SEQ ID NO: 137393 - DNA, 599 bp, Cannabis sativa
tgtaaccaaaccattaaaaccaccactatttacagaactgattgggtggacaactaataatacgatcatattgcatacataatgtgccctaggggttggggatataagtaatagcattcaagtcagccaattaccctcaagtggccataggagggtgtgtgttggaggtcctgggttcgagtcccaaattatgcaatgtaatatataaacgctttaataaaaaaaaagtcagccaattacccacctagggaaaaaggtaattaattttaaaaaaatatttatttattacaaaaataaataattattattttgtcaattcaaaatagatttttctaaacatcttttacaaatctttatccctacccttgatagtgtttcaaggtggtgatttggggatcatggacctctaattctacactccaataaactaaattatttattgagtcttatcaaccaaatgacgcttgtttattaattccatgattactccactataaatatagaattgaagtcttagtaattatagaattatatttactgagtttcactgcagtgtccattgatataattaattatagtgattagccctccatgtgtta

SEQ ID NO: 137394 - DNA, 918 bp, Cannabis sativa
  modified_base (286)..(292): a, c, t, g, unknown or other
  modified_base (528)..(533): a, c, t, g, unknown or other
  modified_base (683)..(683): a, c, t, g, unknown or other
ttcactgaattctgcgagaggaataaaattatcaaaagcttctcgtcagtatccaggcctcaggcaaatggacaagtgaaagccgttaataaaaccctaaaggacactatcaagaagaagttatacgctgccaaaggtagatgggttgacgagctacctcaggtgctctgggcccacagaactaccgagaaaacagccacgagacacactcctttctcgctagcatttggctcgaaagcaatgctacctgttgaagtgaaatatcaactcacagaagagagttttnnnnnnnagaagaaaaccaggaacttttaaaattatccttggatctgcttgaggaaaaacgaactgagtcgcaaatcaccaacaccacataccaacaccgagttacaagatacttcaacataaaagtcaagaaaagactattcagtgttggagacttggtgctaagactagtctttgcaaatacgagagacgcgtcagtaggagtgtttaaccagaactgggagggtccatatgtcatcgaannnnnnttggagtcagagtctataaattggctcgacttgatggctccctaataaagaactactggaacgtagaacatttgcgatcctactatcaataaataaatgatgtaacttgcattactgatgtaaagtttaaacttcagttatgaataaagngaatcatttatattaagtaattacaaagtttcattccttaaattacttaaggggcatttatgtatgactaattggaattcatctggaaatacattgtataatgcaaacccaccaattcaaattttttttgaaactcgaaggttctcgactaaacctctttgacaaaagtggagtcgaaccgttataactccctgaccaaacatttttgacaagaaaggggtcgaatcgttataac

SEQ ID NO: 137395 - DNA, 509 bp, Cannabis sativa
tagttatcttgtctcgttttttactataaaactaacgagttttgaatattatctatttaacctttattttattataacgagttatttaatatgtatttatttgaataatattaattatattattcagaactgattcatattccatatattagacacgtgtcaacttctgaagtgtagccgaatttcgagtataacagaagtcatttaagtttacatgttattttcatgtttatggttcaatatacaatttctgttaaatctagaacatataattattcacaattacagtgatgtcatcacagtggaaagtaattgtaattatatgcttcaaagttttagtcccatgatttatcagtatagtgaatttacattaacgtgataatcattgataaagtttacttacacattgataagtggtatgtcctttccaaggcattagtaaagtatactagtattagatgtatagagtatacatcagtctggattgatattgacattggataagatat

SEQ ID NO: 137396 - DNA, 620 bp, Cannabis sativa
agagtaatgtaaacatgaaatcagtaataactttattgtatggtatatagtgaacaccttcagcacttgaggagtgtcaacacaacaaggagggacaagtgggtacaagatgaacatcataaaacttttgttctttggttaaaaaaaaggttgaaaatgagcatataaccaaaactgtgccagatgaattgaagtggttcgctaatggaccaagaaacatgccaataaagtaggagagctatctagttaatggacatcattttaacactaagtctcaggatgttattcaagttaatcaatatagtggagtctcaattgttgcacagacaatgatggtttctaattctaaagataaaagagtagtgtatggagacatgtcatattatggaaccatcaaagaaatatgggagcttgactacattaagtttcgagtggcagtgtttaaatatgattgggtttataataacaatggattcaaagaggatcgaatgggttttgaacttgtgaatttgcgtcaaataggccacaaagaggatcattttatcttagcatctcaaacaaaccaagtattttacataaatgaccccatgcatgatagttgtgttagcccaagatatgtt

SEQ ID NO: 137397 - DNA, 1404 bp, Cannabis sativa
attaaaccgctcatgttaggataataaccctaatcctggttactatttactcacatatatcattttcaacataagcgccaccgcacgtactctacatactaatcactgtcttacctgatgtcccataatagtagagattccaaattcccgggtgctcctaaccaggtgccagtaatcctagtcacaatactgagtttttacacaataagggttaatccctgttcatggcatttaaaattcaataatcacatagagctcgaaacgagctttccaacagtatgaagaacgtcccaaacagagtctcgagtcaaaagttatggcaaaaataaaaactgaaaaaaattaacaaactgccattatcatggtcgcgaccaaacctatgatagtcgtgaccactgggtttaaaaacccaaaaaacttagtttttagctacgaaaattacgcccaaaacacatccaaatccacgccaaaacttagaaccatcacataggttttcaatcattaaataaagagtcaaaacacaatttcatgcattaaacatcaacaacaaactctcaaaatttagattgcacaataatcaaaatcatgcctaaaccaacaaaaactcaaggtcaagaacttgagcttcgactcatgaaacccccatttattttcagcaacaaacatcaaataaagacctgaattctaataagaaaacaccctaatcattccatctaaagctcaacaatgaagaccacaacaatattaagcaattcatactcaaaatcatcaagattaaacatcaattctcctaacatgcaattcaagaacttcatcactttaacatgcttttacaacagctaaaaatcagcaagaactcaaataaaaatcagtaaaaactacctcaattccttgcacaaacaagctccaagctttcagcacaatttcccaataatcaagctttaaattaagctagttttcaccaaatcaaaaattgaataccaaagagggagagagagagagagagggttcgggtaaaggggagataagaccagaattttcctttcattttttcaaaaatcccatcttttatcaaatgtgaaataaagggtcaaaagaccattttgcccctagggccatataaccttcacttaagcatacaagggcaaaaatgacatttcatgcacaattcaaacccaattaatttcagattattctcactaataattaaaataccaataattaaatcccaattgcattttaggcccaaactccgttcggcctgaaatacccggttgtgacaatactgtgccaatctgtcagaacacacctgaaaaagacaatacaaacacactatataataacatagtcccataagcacgttaataaattaatttcactgttttaccgttctcgggtcaaaat

SEQ ID NO: 137398 - DNA, 662 bp, Cannabis sativa
tcgataggatgtcgttggtgtatcgataggatgtcgacctattttggaataaaagtgcaggtctataatgtcgatagcatatcgaccgtatgtcaatatcttgtcgacaagttgattgaattacgttatgttggttatatcgacttcatgtcaacatgatgtcgacaggttaacgatacttttatgtagttgatgtctgtttgataatgtcgatcgcatgtcgacatgattttgaccttatgtcgacgatttttgtttactgcaaatatagtccagttttctttggatgtcgacagtttgtcgatatgctgtcgacaaagttattttgttgctgctttcgtgataatgtcgacaacatgtcgacagtatatcgacagtttgtcgaccaaattatgtgtttactaactgtttgataatgtcgactaaatatcgacatgatgtcgatgtgatgtcgaccatttttttaatttttttggcagtattattgatttgttttttgttttttcagatggctccaggactcataattccagcacctgagcattttactggccgcgtgacatatagaggaaccagaatttttgcaaaaatcaaggctcggtttgaggagtacaacttgaataacacggcgaaggaaagccgtttcggcaacttttggaatg

SEQ ID NO: 137399 - DNA, 538 bp, Cannabis sativa
  modified_base (382)..(383): a, c, t, g, unknown or other
gaaatcacatgacctaagacaattccctttttaactatgaaatgatatttttcccaattgagaactaaattcttttctttgcaacaaattaaaagaagagaaagatggtgcaaacaatcatcaaaagaattcccaaacacagaaaaatcatccataaatacttcaagatttctttcaaccatatcagaaaatattcaatcatacatctttgaaaggttgcaggagcattacaaagaccaaaaggcatgcaacgatatgcaaagattccagaagggcaagtaaaggtagtcttttcttgatcttcaagggcaatgggaatttggttataatacccatcaagaaagcaataataagcatggccagctaacctttcaagcatttnntcaatgaagggtaatgggaagtggtatttcctagtggcacttttcaactttctgtagtctatacacactctccacccagtttggactctagtagggattaactcattttgttcatttttaacaacagtgatcccagacttttttggaacaacttg

SEQ ID NO: 137400 - DNA, 605 bp, Cannabis sativa
tagactaaacaattcttctggatgagagtgcattgtaaaatcaccttaaaagataaatttgaatttttatacttaatttaattatttaattaaaaaaaatatcaaaaaacatatctttatatactataaaatttatttatataaacaatatttaatttaaactcaacctttttttacattttttttactgaataattattatcttttattttctttggccaataaagcaacatcagcctatagaataagaaaataaaatattttaattatataaaaaattaagtataaaaacttaaattttcctaataatacctattcatgtgtaatatacccattaaaagtgtgtgtatatatatatatagggagtggattttgtcccgttatgccaaaatagggaatacaatccctgattgtactgtagccgttggattgaattggggcatgatctaagggctggggttaaagtaggggtagttaggggggaaaaatagtaaccggttgattttttgtattttaaattaattaatttttaaaaaactgacaccgattgacgtttgatgtacgtgacagttaccaattttgaaaatacattagtctttccttct

SEQ ID NO: 137401 - DNA, 2402 bp, Cannabis sativa
ggtgctctactatgtaggaaaggggtaagactttagctgatcaaccatgagtttcaggagctgggcgaagaatgtacatgttcgggccatgctagaccaatcgggttgggtctactagagatgtattttgatactctattttgccgcttaggtcggctaaaagaaagagacttgtaataatattttgtaaatgtttttgggatcccaatttctgtaactttaagtttacaaagtttaaagcattacaagtttattttcattcctattgttataaaactttaaattctgtgccctttagattagtaatctcatttagggaatgagggtttcattagtattttgggtagcgtgtctaattttttagggcgttacaatttggtatcagagcgccaaagtttttaaacttcctgtagactggtcgaacatctacattcatcgtcagagacaagctcgactcacggtgcaattagtattgagagtaaataccttactatttgtgtgatcatctgtttaccgctttccattttaggcaatatgcaagcatctagagtatttatgtgttatgtgatgccatgctttaaatgctatttgactaagtgaataattatatgaggtaaatagttgagttagggtttaaggcaataagtgcgtaagtgtggtattggtgcttaactcgaaggggttgttgattacaggggtactagtaatggaccctccacaatcatttagaccacagggcgagcaagtagagtctggggctgcccaaactgatccaccggcaccgcctccacctccgcagaatctggggacaatgcagggtttggtaatgctaatcctcctgccgattggcagtaaatgtttcaagaaatgcgaagtgtcataattcgtcaagaagaagagttgcgacgattaaggcaaccggctgcccctgttgatcaagtgttaccaccaacacctgtgccagtggtgggtaaccagcggtttgttatgccgcatagagactcggtatttgagcggttcgtgaagttgcaacctgtgacttttctaggaggtattgatataattaaggccgagcagtggatgagcactattactcgtatcctggataatatggaggtgacgggaactgagagagtgaattgtgcagcctttatgttgcaagaccatgcccacgtctggtgggatatcgtgagccaagctcgggatgtcagtgtaatgacctgggaggaattcaaaaatctgtttgaagaaaagttttacaacattgctgtaagaacttcacacatggaagattttgtgaagcttactcagggaaagatgttagtggccgaatataccctagagtttgatcggttgttgaagtttgctggtgatctagtgcccacatatttcaccaggaaacaaaaatatgtgagaggactgaatgccacaatcagtcgggacttgaagattaccatttcacatgacactttgtacaagaaagtggtagagctagccttgattgctgaagaggctaagcagcatgtagcgaaagagcagactgtaaaggattccgtcacggcatcgaatcctcctgctagttgtaatgtcaataaggggaccgacactggcaatcctaatcataaacggaaggctgaggcttctggaacatcaggagggaatagaaagtttcagggaaacagaggtggtcgtcagggccacgggtcctcatttcgatcatatcctgagtgtcctaaatgcaagaaacatcatccaggtgagtgtcgggccaaggcgtgtttccagtgtggcatggtgggtcactttatcgaggactgtcctcaggctaagaaagaggaacctaagaagaatactgcacataacccggggcgactttttaccatgactcaggctgacggtgatgctagtccgtcagttgtgacaggtcagttgtctattaatggctgttcatatactgtgttgtttgattctagaactactcactccaatgtgccgagtagagttattgaaagtttccataagccatgtgatatttatgcttcgaggtttggaaccctgatacccttggagaccttgttgtattcactaggtggattcggtctttgtccttctggattgacggttgtgaattgaccgccaatctaattgaattgcaactatctaattttgacataatcctaggaatggattttctatctaagtatggggcaacgatcgattgtaaatggaaaatggtggtgtttgagcccgatagtgctaacccagcagtgtttgtgggtaaggttcagggggcacgcataccaaaaataactctgttgaaagctaaggacctgatgaacagaggttgtctgggattaatagtcactgcagtggataccacccaacctgtgacatcagggcct

SEQ ID NO: 137402 - DNA, 622 bp, Cannabis sativa
tttattaagatgtaattattcttctatagatgtatatttttgttaatacgagacttaaaaattatataactaattacaatttagagattattcttatttataattggcccaaattgggacttaattttttttataataaattaaaaattattcttgaatagagtatttttatatagaggttctactgtatgtgcatatgtgtgtattgtatttacaatttaagaagcatatgaaaatatatagtatttattttttaccataattattgtataacttttgggtttaatttttatagtagatggtatatttttaatcatttatattaaaaaaaaaaaaaggaaataaaaataaaataaattatggtgatttgcgattatactaattatttaaattgtttttttttttttgtattttttattaaaatgataagatgaagaatcaacaaaacataaattaaaatgtaaaaaattaatttttaaaactgtaatataattaataaattaacataaattatatgtcacattaattttatatttaaaagggatattggcggctaaactaccagaattttacggtttgtaatacttaaccacaaaaactgaatttttggcggctaaactac

SEQ ID NO: 137403 - DNA, 611 bp, Cannabis sativa
tgaaatgaaattaagtatattggccaatcataaaattaatttaaatactttttaatttaccttttcaaaaaaataaatatttaatttaaatttaaactaaataatataatgggtgactcaatggttacatttttattgtaaccatcatggttacatttcttttttacctgtaatagcaggttaccaataggtaaaacttcttttttttagaatccattaattataaataattattttcttaaaataattaattgatatttaacaagacctattttagcaattaatatttataaataatattttatataaattcatgctataattattttaacagataagccatttaattataatattttacaacaataaaaccttctttttttttttacaaaaattagacatccttttacacagattagaattctcttcttgtataataaatttttaaataattaattatttttaattgatattaattttttttttataactaaaagagctaagtatgagtttttctattcgattttgatgttgtttcgttttctagaggaacttgactttgccttttgctttggtttggtttttttgagtaaatgactccttattaaaaa

SEQ ID NO: 137404 - DNA, 512 bp, Cannabis sativa
gaactttagattgggttagaaaatatataggataaactgcccaaaccgactgatgtacaaccctaatttgacttggatgtagaaaaaatacttttggattgaaacaacaataaaaataactgatcacgcccaatatttttattacatgtcatgtgaggcatttcataaaaagattgaattaaacaatcgtaagaaaaaatttagatgtgataaatcaacacgtgaacatgaatgatttctcacaccagggtaaattaaaatatatagaatgttatagtaataaaaattaaattaaaattaatactaacatttttattatctatttttcagtgctatatcatatgctgaaattgatgacactacaaaaatcctagatactgtgatgttcgcatatatcgcgggaaaaatattttcatgtattgctgctcaaataatgtactttactacacaagtgtagtttaaataaaaaaataaagggcattttacaattttgtatacattattttaattaa

SEQ ID NO: 137405 - DNA, 824 bp, Cannabis sativa
ttgggtcttctgttggcaaccccccaaactagactgtggattagagcatcttcagtatggccaacttgatctcaaaattgatagaatcaacgataggtggccatatacacaatctagaccctatcaggttaggaagcacatagtccctcaggtgaggttgattgcaaccatccgcttggtcttccacaccacctccattattgccattgttttcgacgttcgcattgtcagccatgactacttcctactcaacctctatttcagctctttccaatcttttcctccatctgttttgtctacaaatcttctcaattttaggatcaacaggtaatctgacagttgctctttgatgttgcataaattagttgttcctaagaaaagagaaaaatttcaaacgaacagaattagtaataatattgaaaaaaaaaacaaattagaaaaaaatttaatttttattaatattaactaacaatccccggcaacgacgccaaaaacttgttgtggaattttcaacacgcaagtatatgtatcgttaacaagtaatagactcacaaatagttaggtcattcccacaaggattgtagttaagtactttaaaattaaaattttatttggttatttgaatttaagaaggaattagaactagaatttaaagcaataaaaatataaaaaaaaacaagcaagtaaattgatatgtaaattaacaatgattgaagattagggttattgatttcaattgtatctatctattatggtctaaaatgattcaattcctattaccaatttctatgcaatagtaggtttacttaagtaatttatagtct

SEQ ID NO: 137406 - DNA, 508 bp, Cannabis sativa
tatttctgatctttattaataatttaatatgattatattgaaatgggttttatttagggcacaaaatccaacaaggtcatcccggctgccacctgggcgttgatgtaggccagctcctgttccctcctaaagaggtacttctggtaccagtcctccgtcgaggcgattatgtacacctggagcgccctttccgcagctggagtccttacattcaggcaaatgaccttaaaaagattgaagtcatccaccgactgattctcgaatcagtttggccttccgagagttctccgtcgtgaccaagtccccaacgttgagggccttcttttcataagtggagaaagtcttggcccgctggaggaatactcgagtaggtgcagtctgcctgtaaggtgggatcctaacccactctgtaagaagctccgggcggtccatggcctttgaaaccggaggaaaagaagaagcggtggcggtactccttcacgtgcttttgatggttgaaagggactgg

SEQ ID NO: 137407 - DNA, 1008 bp, Cannabis sativa
tatcgacccttcaggacgtgctttatttcctacgtagttcttcaattttttcatgtacctttcaaatggatacatccacctcataaaaataaatccacccaaaattgctttttcgggcaaatgaatcattatgtcaaaaaatgttggaggaaatagtggttgatatagattttgggagaaacttgcgaacaccaacaaaaagcaatcgttgcattattacatggtagtcgtgtgactttaacccgataacatttgttaagtttttgtttatttttttttacaaattcgaacaaaagccatttggaaatttcacatctctaataaatttacaaaattggagcctatcatcaggtttaagaatgtaaggagcatgtggtttcaacaacttccccctctcatcttcataaatccacaaccattctcggactcctaacttcttcaaatcgtgtcttgcattggtagtgtccttagatttattattgtccaagattgtgcccaataaactatcacaaacattcttctcaacatgcatgacatctatttgtgttttaaaatgtttgaataccaatagtcaagctcgtagaagatgtttttttcctccaattttgattttttgcaactcgcctacgcttcacaccaccaaatagctcatgatttcccaagagttggggtgggggtttgtttacttgttctaatactttctcacaagtgaaacgtctcggaggagatcttctcttaattttttcgtcgaactgagtatcctttctcattcgatggttatttggcaaaaatcttctatgacctacataagatgtcttaccaattactcaaattgaagaggtatcttcattacaagtgggataagctttgtatccctgaccactccaaccagataaataactacgagctaaaaaatcacaaactgcccacagaagagttgcgcgcagcttgaacacagtgtttgttcgacaatctctcgtatctactccgttaacccacaactccttc

SEQ ID NO: 137408 - DNA, 635 bp, Cannabis sativa
tgcctgccggttagcgaaacttttttggtagtaagagataaagtttatgagaggttttttggtttggaagaacaatcagtttattaaaattaatggaaggtaattgcgttgagtagtcaacttattggaaaaattaagattggtaatagtgattgcattaaattagtagacttttcaaaagaaagttgaagagatatcaagagagagaattaaatagagttttaaaaggtaataaatacactttaatataataatacacttaatgaaaaagtagaaatgagaaagttgtagagatatcaagagagagaattaaatagaggtttaagtttccaaatgtatccttttgttgttttcttgactatttattttaaaataattgtttattttttgtttcactctcattggtgaagaaaaattataatttaccctaacatctattaatttttattttttttattttttgtgtttcatgtatataaaagtataatataatttttgtcttttatgatttatctattcattaaattttatatattttttttttctcattttctctttttcatatatataatttaacatagatatattatttttaattttattatttatctagacattttttagaagactatcaa

SEQ ID NO: 137409 - DNA, 702 bp, Cannabis sativa
  modified_base (624)..(624): a, c, t, g, unknown or other
tataaaagaaattaattatttataaatagtcttaaaattttagatttcaaattaattgaatgtaatattaataattagttaaaaaaatattaatattcaaattaatgttttttttaaaaaaaaaaaatatgaaatatgttttttaatgtatatattactgatattatatataaaaaaacaatgtatacatcggacaatcattagagtaactcaaacggttaatttaaaaaaaaaaataataaaaatgatatattaaatgattgtcctaataaaatttaataataatctgatctatagatgtatgacaaaactgtttacattttatgtatttatttgtgtcataaattatcttaaagttagttataataaaaaataaaattgttaaaaattgagcttagggtcatattttcaccattttaaaaaatatagagtccattttgtaggggtgttcattaaatcgctcaaaccgcctgcactacaaaaaaacatgtttgaaaattctttgtggtgcggtcctagtttgaatttttcttaaaccgcacgatgcagtgcagtttgtggttttaaaatgttaatatgcggttcaaaccacaccgcaccgcatattataaaaatactaatttntatatttatttaggtccaatatgttaaagtccaattcaagcccactaattattatattgttgaaacttgaattttttt

SEQ ID NO: 137410 - DNA, 830 bp, Cannabis sativa
tatatgtactcccaaactctaatcataaccctagatcaaaaacttaaaattttaaaaaaatatataatatatataaaatagttacgatattctataataataataataatatgaaataatactactactactactaataataataaactaaataatatgctacaatatatttacccatattattattattaatatacctataatattattcacttataattaaatattaaattatctccaataatttaattatttatctttatacacaccctaaaataaaaaaataaaagaaatttcactaaagaaaaaaaatctcatactccactaaacttataaatattcaaaataataaattatctccattagcaaacaaaaaaaactaagcatttaaaaaaaatatattaattacttcaagaaaagcggatattacaataatcccccacttaaagaaatttcttcctcgaaatttaactttacattttaagtccacataattgttcccctcttaatgaattcgacaatcgaaattatccaattaaatgcaatcaatagactacctgattccaagttttgtagcataataattaagaatgtagccctccacataacgatccaatatatcgtcaacaaaccgatgtcattcatatagatcatatgtcttctataattacatgaattgcatgtaagctaaagatcgtaaaatgtcttcttacacatgcgagctagtcaatatatagccttagaatcacacaatttaacatactcgcatgattgagccacatgcatatcactataaaagaaacatttactaatccatccaactaatgaaa

SEQ ID NO: 137411 - DNA, 1054 bp, Cannabis sativa
acaaaattttaaaaatagaataaaaaaaatctaagatgccacctaaacttattctgtactttcctttatattatatatagatatttatatagatttaaatctctcttatattaaatgtggctatttaaagaagattattggtttaatgatttttcttttactttttcgtgaaagttaacggttaaaactaatagcattaaatcaatcaattaattatttttttttttatataaaaaaaataattttaaatatttaaatttaatttaaaagtaccaacaaaattagataattagttttcttatacaaatcttaattgaaatttgaattagatgttaatttatttaatttattataatttataaaaaaaattagtagttatattatttaaatatcttaatttatttacttattttattgtttaataaaattagtacaatatattttttattaataaatttaaaacgaaattaaattttatatatttgaaaaatataattcaattatattaaattaaattttaagattatatttaaattaagaattaggtaataataattttaatacaactctaagcaaacatgcatttcatgttactaatatctagttatattaaatgtggttatataagagaaattattttttaaaaaaacattacaatttaaatttaaactcactacatatatctctcttatcttttatcttatattaattgtaattatagaacatggtgtttttatttttttaatattacaattcaaattcaaactcattgcacatatctaaaaaaattatttctattattattttttatccaatctacatatattaaaaaaaatatcttaaaaaagttatgtttcttgaaaaatcattattttaatgttgttacctattgtatttattaaaaaaatatctttctattattatttttaaaaaaaaaaaaatagaaaaaccttataatatttctaataaaataaaaagtataataaaatcaataatattagtgttaaactaaaattataattaacaataaattttgaatattattatatttttt

SEQ ID NO: 137412 - DNA, 722 bp, Cannabis sativa
atttaatttggaattgaacatcaatgttttgtttacttctgtccaaacccaaagtagaacatattgtttgtgcaagtaggttgtaagaacattttgatggtatcaatatccctgtcacttcaaaatctgtgtagtttgttttgtccacccattgtccattataaaatatcataactgttcttggatcttccatatcaaactgtcattaatcaatgcaaatgtaacttttattataaacagttttgattattctaagtatttttttttattgacaaatgtacgtataaaaaacgattttctcacataagtatttgaaagtattgtttgtataataatcagttatgtatttttaacttttataattacctatttttgatagcttttggtggtgcttctaggaaaggcagaggaagacgatgaagatgtacatgtcgtcgagtactctgcagaaggtaattttttcttaagctttgattcttgatcgcatttgctctgttgactatttggttgatctgtcgttgattctgattcagctagctgtgacttttttgtttctgaagcttttttttgttcgtcaatggagttttttttttttttttggagagaagttttgcagttgtgatattgatttgtataatcgcagggaagcgattttgcaaatcgttagtgcagtttgcagaatcgaaaactgtttttaggatgttcgatcggttgtcgaacga

SEQ ID NO: 137413 - DNA, 550 bp, Cannabis sativa
tacaaataagttttggaggtaaccgaaaggtatctcaaattatatgatataaagataagttttttatgtacatgtaactggttggtttcttatcaacactattagtaacaaaaaaattacttttaaaaatgcacgaaactaaaaaaaatagaaaacgtcagatacgatagatttagtcgatgtagcacgtcaataatagtaataacgtcattattttaaattatatacaaaaaaaatgtatattattgtaaactcccctaaaaactaaaattaactaaacttaaaagaaacccaaaaaactcatcttgtagaggtcttcatatgtgaaaaattctgttcgaacatacaactctgacaatcacttaaaccagaattccaattaaccattcgaacacattgcactcacactgtcacaaacttagagagagagactaaaattagagagacaaaatgtttattctttcttgctttagaataggaagcttacaatgtctactcaacaactaacttgaattacaaactatacaatgtatttataggtgtccaaagt

SEQ ID NO: 137414 - DNA, 1649 bp, Cannabis sativa
cagctggcattacaattgcataacagaaaaggaaaaagcaaatcaaataaagtaaaggacaaaaatagaataacagaaagagaatctccaacaaagcaggagtattaggcagtgaatggttaggtgattaattagatgactgattaaccaatgaattactctgtcttaacagtttccactttaacattgcaaaagacaaaataatgatcttcatgatcaacgaaaccaaacctggctcgagttggaagacagttcgccaaaattttccaatgatggaataactgtctagagtgtgagttttgtttccaaaagtttgtccagccaggctcatgtaatctcttcgcttgatccacctagtaggtacttttggccaaaaacaatccaaattttaaagctttccaaaaaagaatatcctgaccctcttgcaaaggcttaatattcaagatagccgaagctatatctgttaaaaattacttcacaatgagcattataaaaacataatcatataaaagatttaaacattaataattataatgctcaacaaacaacccaaaatcaaatcattatatttagggcattaaaagataataaacatacctctctagtgtgtattgattttatcatgtgatttagatccttttacttgatcaatcatttctttcaatttacacatcaaagaaaatatatgtgcaaggggtgtgaatgaacactactcttttcactctcaaaacatacatacccacatacatcccttagtcaccagtaaggagcatgacccctcttttataaggattagtgggtcttttggtcttatagtccaaatagagagaattcattgtcttggcccaatgggctgaccaaaaacgctttagagcgtgtccatgggccccgagcgtgttagtacgttatgtccatcccattatggctcgatggcaataccatgcattaccgattatatagtcatcattatacgctaatattgacactgagtgagcaacacttaattatgttagtccacataaaatattctaacattctcccacttggacttcataattaatatatatgtgctcactaagcaatagtgtcaatacgcagaaatctcaagaaatactattgtctataagactaattatgcatcatattatatcgacgggatacgtatataatacatgacgagatatttgagattcatataacaagacgataactattgatctggatccactcgactatagcactgagactaagccattagctcgcatcaacaagtgtgcacacacaacatcaaagagttattcagaatgtgcatgaattcaacaatcaatagcaattctcaacatgtctgtcatacatgaaaaataatgactcccattgatcaaatacatctttggctcccaataatccaaacaagaaataacttcttagtacatatgttcaggtaagccgtgtcagtgtagtcattaacatgttgtctgtaagtgcatgttatgatactggtagaggaccccacaactttctcactacatatggaacgtcatcaccattaatggaacaatgatgcttctcaagtttcgagagaaagatatgactgtgatatttatcacataagttcagtaagttcacaatagaatcaactactcttaaca

SEQ ID NO: 137415 - DNA, 870 bp, Cannabis sativa
aacaaatctatagtagttcactccctctatcgcgacagtaatagagctacgtctacgtacttcgagtttttatttttcacgagatggtattacagagaaagtctaagtattagaagcttaaatttttctagagacaaaaacttagagagagaagttctgaccttgtgggtagttttctaaacttgaaaataagctaagggggctctccttttataggtgaaggaggtccacaaaaatgagagaaaaataaaaattagatgttttgaccgtcgatgatgatctaacggtaaaaattagctcttggcggtgatagctattttttggagcccggcgggacccactacaggtaagcttattttcgtaactcccttagggtaaaatttaatgatgatagattcagaattttgatgaagtgtgagacatgaattaatagagcattgaattagctttgaaatgaaagttgaatcgcgttaatcaaattaatattaagtgagttatagctattttactgaaggcaattcataatccagtgcccaagttgacatctagagcctaggttgatatatagcgtcaatctggacgctgcgtaagtgcaaaaacgtctaaggaatgtactttaagatgcctaagtgatattttgacatcacttagcctatttctataatctgacgaagttgttcacttctcgaagatgttgttgttctgctaaatgagagacgcgaaactcttcaattctgagtgaagtttcccattttggaaatgagaaatacaaagttatgaatttgacttatctgacttcatgtatcttagttattatgaaaaactagatggacggtcaaaataaaatcaaaatcggataagcagaaccca

SEQ ID NO: 137416 - DNA, 983 bp, Cannabis sativa
agctgcccagtcagcctgttgtctgtaaaatgaaatatacttccaagtttaaagaccgcttggctggtcatgatgtcttaaaaaaaggccttaggcggaataagatatataaaaaaaaggaaggataaaataagaagtacttaaacagctggagtcccaggctttcggttcggatcttctgcgccggtaggagctggaggatctgttgtttgaacatgaggtacatcagcattttggccgaaggaagaagcagtcacatcaggctcatcataagccacttgggaagcgcaaaactcgagatacatgcctttggcttcacccaagtaatcaaagttttcctgagggttagccttccaaaagtcataaaagagctcgaggctggctgtctctaaggcatggatcttttctcccagcctctccacctcggctgtaagctcctcgtccttagacttcttctcctcttccacctaacgaaggacagctcgaagagacgtcctttcatcttgaaggctattcacttctgcagataaggtttcgatggtctcctcaagttggtcagaagcctcgagatccttagtcaacttagttattttcttctgagtagtaaaaagcttctcattgacttcacccagctccatccgaacagctccaagttccaccctggcgtcatcagcgtccttcctggccaagtctacctccgcccgcatggtgttggacagagccgcgttcttgaaagcaacagacttagttcgggagtatgtgtaagccaacttcagactagcctgtgcagagaaaaaacttcagaatccgaaccaaataaagaggattaaaggaaactgtgaagaaagacttacccttgtgaattcctttaagactcctcccatcagcagctccatagaagagtttttatcagcaccggccagttgctcactaacctcagaaaccaaccggttcatgtagtgggcgagcatctccttgccttt

SEQ ID NO: 137417 - DNA, 580 bp, Cannabis sativa
ttttggtgtatgggattggatttatgcaagtttgagtttagaaacctaaactttgatcttttatggcatgttttgattcagtggttttttttttggatttattggttggaatatgttgtatatccaccgtttaggtactccggaaagtttggtggcatttggatgagttttgagcaagttagaggttgtttgggaaaacctggtgcaaaccgggtaaccggtttgccaggacctgtaaaatcggttacccagttttggcagattccccgaataaatcgttttctcaattctcatccatttcagtgccgtagttgggtgtttccctgtctcttgagttagtgtaatccctagtgaatataacagagcctagagttataggttcgggtttcctagatcagggtttcaaacatgtgatttacccggtttcaatatgtgattagggcatccatccagcacgagattttccgttcagatcggccaagacacttgaagctggaaagaaggtaagaactgtatataatgtgtgatatcgatatgcgagtgtatgtatatgttaagtgtatatgcatgcttatgtgtt

SEQ ID NO: 137418 - DNA, 918 bp, Cannabis sativa
  modified_base (32)..(68): a, c, t, g, unknown or other
tgcaacattaaatgttatttctaatctttatnnnnnnnnnnnnnnnnnnnnnnnnnnnnnnnnnnnnnttaaggcataaaacccaacaaactactcatcattggcctttgcacaagcttgaatattaaaaattattttcttcatggagatcttgaggaagaagtgtatatagagcaacctcttgggtttgttgctcagggggagtgaggacgagttttcatcttcacaaatctttatatggattgaaataaagtactcatgcttggtttggtaagtttagtcaaactgttgagaaatatggtttgtgaaaaggtaagttagatcattatgtgttctataaaagatcagctactggtatcgttgtgtatgtcgatgccatcattattacttgaaatgatattagaggcatctcatcttttaagtctttcattcatattcaatttcacacgaatgatttaggggtgctcaagtatttcttgagagttgaagttactcgaaataaataaggcatttttatgtctcaaatgtatgtacttgatttgttaactgaaacaggaaaattgggagtaaaaccttgtattactccaataaatctagttatgcatcttacacgtgatggggaaccatttgaagatactaagaaatatcagagattagttaaaaagttgaattatctaactatgacttgtcaagatattttattctcaattagtgttgttagtcagtttatgtcttctccaacaattcatcattaggcagtattagagcaaaatttgtgttacttgaaaggagcactaggatgaggtattgtttataaggatcatggacacacctagattgagtgtttctctgatgcagattgggcaggctccaaggtagatagatgatccacttcaggttattgtgtatttgttgggg

SEQ ID NO: 137419 - DNA, 2054 bp, Cannabis sativa
  modified_base (230)..(236): a, c, t, g, unknown or other
acaaccaggggttgcaccctcttcctgttgaaggagaggacatcctggttattttgagagggtcgcatatcgtaggggagagcaacaacacccaaaagaggtatgtgaaagagataaacaatgagcagacggtatttgttccaaaaccttcgaagaaggtaaaaattgaagaacctccgatcatattctcggaggaatatgagaagaacgtgagatatcctcacgtcgannnnnnngtgattactattcagctcgccaataaaaggataaagagggtgtcgatagataacgggagctccgtgaacatcctgtataaggaaatgctgaagaagatggggctcgaaaaggccaaattgaggccttgcatggtaaatctttgtggcttcactagcgacagtatttccaatctgggcataatcgagcttggattaaccttgggcaaagcacccctattcaccacagttatgcaagactttctagttgtcgatctgccatcggcttacaatattattaggtcatccgacattgattggactaggggcagttagttcaatcaagcacctatccccgaagtttcaaacaccataaggtgtgggagtggtgcgaggcaatccgatgctagctcgcgattgctatcgcttagagctacaacaaagaaaagccaaccaccagttgatggcagtcttggcagaggaaagcaaaaagaaggacgaggatcttgaccctcgggttcaagatgaaagaaacttattaaaaccaattgaagaattggaagaagttgttctcgacccaggaaattctgcaaagtgtgtttacatcgggatgaacttggacgagcaactaataagtttcttaagggcgaatcaggattagtacgcccggagccatggagatatgatagggattgaccctagtattatctaccaacattaaaatgttgatccaaactacccaacaaaaaggcagaaaaggagacctttggattccaagagacaaaaaggcactaaaacaggaagtggacaggttattagtcaatgactttatacgcgaggtgttttatccctcttggatagccaatcctgttctcgtcccaaaacctaacagaacttggagaacttgtattgaattttttgagctgaataaggcgtgcctaaaaaactgttttccactacccaggattgaccagttagtggatgcaactgctgggcatgagcttatgttatttatggatgcatattttggatataaccagataaaaatgcatgtcccaaatcaggaacatacgagcttcgtaactaacatgggactctactgccacaaggtcatgccgtttgggctgaagaatgctggggcaacgtatcaacgattggtgaacgagatgttcgcaaatcagatcggacgaaacatggaggtttacatcaatgatatgttagtaaagtcagtaaaaagtaggaatcataccacagaccttgcggaatgcttcaaaatattaaagaagtataatatgaagctaaacctgaaaaagtgttcctttgcagtttcctcaggaaaaattttgggattcatagtcaacgcgaggggtatcgaagcaaatcttgaaaaaatcaagacattgatagacatgccatcaccagcaaagcctaaggaagtacaagccttaataagaaggatggctgcactcaatagattcattttgaatttaactgatgagtgtttgccattcttcaatgtattgcgaggcaacaagaaattcgaatggacagaagagtgtgaagaggatttttagaacattaaaaggcatataacaatgcctccagttttagcaaaaccaataactagagaaacgttactcctctatctggctatgtcagaagatgcgattagtgcggctatagtacgagaagagggtaagcaccaacaacccatttactatgtaagcaaaaggttactagaggcagagtctagatatctccctcttgagaaactcgctttgtacctagtccacgcgtctcgcaaactacgaccttacttccaggcacaccccataaaagtgt

SEQ ID NO: 137420 - DNA, 732 bp, Cannabis sativa
  modified_base (68)..(69): a, c, t, g, unknown or other
  modified_base (103)..(105): a, c, t, g, unknown or other
cccctctttggttttcaatttctttgatttggaggaattgcttgaagttgaacttggattttggtgtnnttttgcttaattcttgcttaaggcttgaggtaannntccttcattgaatttaattgagatgcttgccggtttttagttgttgaaaaacatgaaaaggggtgttgttcttggatttgcatgataagaggaattggtgcttgaccttgttgttttttattgtgaattttaagatattgttgtgaggtaattgttgattattggttgagtgtattaagtattttctaggtcagaaattatgtatttattggttgagtttgcaactggaaattataggtggaataggttgaggttcatgtttatgagcttgatgagttgtgaattgaagcatgattatgagatgattaaaaaatctgaatttcagggtaaattatgggtattgatgcatgttggatgatattacttgcaatccactcttctagagagaaataaagaagcacaaaagcaagatttggaattgataaaaaccagagctagggattcggctgggaaggctagtgatttctcagtggatggaacgggaatgttgagatttgggaatcgagtttgtgtgcccatggatgagaacatcaagagagggatcatggatgagtctcatacgactctttattcagttcatctagggtcaacaaagatgtatcaagacctgaaagccatgttctggtg

SEQ ID NO: 137421 - DNA, 507 bp, Cannabis sativa
  modified_base (58)..(59): a, c, t, g, unknown or other
aattaattagaaaatatatttaagttaaaaattaatttgttaattaattttggaccannttaaattagaatatttttttagatattgaaatagattaataattaagttgattttattctaggtacttaattatttttaatttaatgaatttaattaaatagaaaaattatatttaagttagaaattcttcaattttagattaatttaaattagaataattttcagaatatattttattttattttagaaatcatttcccacattaattttgaaatgcatttatttttaatgtagatatttcaaaatttttcaattttgaaaattagattaagttaaaaattaattttaattaattttagatcaacttaaatcaagtacttttttcattaatgattaattaaagtaaatagacttcaatatagtatattttaattggaaaattagtaattagtttatgaattatctagatagatattttctagatagactttttggtatttttctaga

SEQ ID NO: 137422 - DNA, 1364 bp, Cannabis sativa
agactctaaagaaaatggggctcaaaaaagccaaattaaggccttgtatggtgaacctttgcagattcaccggagacagcatcgctagccttagcataatcaaactcgcattaactttaggcggggcacctttatctgctactattatgcaagacttcttagttgtcgacctgccttcggcttacaacatattgttgggtcatccagcactgatcggactaggggctatcagtttgatcaagcacctatccttgaaattccaaacaccagatggcctgggagtggtgcgtggcgaccagatgctggctcgcgattgctatcgcatagaactgcagcatagaaaggtcggtcatcagttgatggtgatcttggcagaagaaactgaaccgaaagacaaagatcttgaccccccgagttcaagatgagagaaacctgctaaaccaatcgaggaattggaagaggtcattctcgaccgtgtgtatacattggggagaacctggacgagtagctcaaatagcagttaataagcttttcgaaggcaaaccaggatcaattcacctggagccatggagatatgatagggatcgaccctaatattatctgtcatcatttaaatgttgatccaagttacctagaaaagagacagaaaaggagacccttggattcataaaggcaagggggactaaaacaggaagtggacaagtttttagtcaacgactttatatgcgaggtgtttatccctcgtggatagccaatcctgttctcgtcccaaagcccaacagaacttgaagaacttgtattgacttctccgatatgaataaggcgtgcccaaaagactgttttccacttcccaggattgaccagttagtggatgaaactgctaggcatgagcttatgtcatttatggatgcatattctggatataaccagataaaaatgtatgtcccagattaggaacatataagcttcgtaaccaacatgggactctattgttataaggtcattccgttcggactaaagaaggttggggcaacgtatcaacgattgataaacgaaatgtttgcaaactaaatagggaaaaatatggaagtttatgtcgatgatatgttggtaaaatcaataaaaattaaggatcataccttagaactcgcagaatgatttaagatattaaagaagtataacatgaagctaaacccaaaaaaatgttcctttggagttttctctggaaaaaatttgagattcatagttaaaccgagtggtattgaagaaaatcttgaaaaaatcaaggcattaatagacatgccgtccccgacaaagcctaaggaagtacaagccctgataggaagaatggctgcacttaacag

SEQ ID NO: 137423 - DNA, 691 bp, Cannabis sativa
taaggtttctcataccttttatgtatttaattttatatcgtttcagaagttcatatttaggattttaaaaatatacttgttagtaaatctaggttttagtaaaataaactcgaacaactggcattagagtcatggtaattgatttactttcaagtaatttggacttaaatgatgtatgtgattcatgttgatctatgtgtttattgatgattgtttgttgtttgcaaattttttacgttaaataattagaattttgttttgaaattattttttttagatagtatgaaaaaaattaagcaatttatttttttctagaacttgatttcgattttatttgaattagttatgatttttttgaatatttgaaaatatcaaggggtggcatcaccccatgcccacgcggacaccacgtgacacacgggtgttcggacaaggcgtgtccgaagaaatacgcacgcggagcttgtttgaaccctattctgcacgcgaaaatcatgccagcagcctctttggccgagttttcttggccaaccttacttgcttacgcgcgcggatggtatgcagcgcatattatctgcacccaatgcaacgaaatttcatttttttttcattttttattttttcatggaattaatttcgaatttttttgtgtaattttgtatctagatttttattttcaaatctcaaatct

SEQ ID NO: 137424 - DNA, 500 bp, Cannabis sativa
atacaatttcttatttaataaatacataaaataaaaatatatcttcaaacattatagtaaaaaaaaattaaaaaaacctttacacaaaattgagatctaaaaaaaagataactaataaatctatagataaatgacgatatatatgatctcaaaataactgtatcattgtcttgtagtcgggactacgttaattcaaaactgttgttatcaccgtatcttgtcattatattcaatgttattattgtcatcatcctatccactccaccatttataaacggattacatgggtcgtatttggattttattttttgacacaatattttttttaatactttcaaatatgtctttattagtttagataatttatttgttctttttaataatttttttttattgttaataataataaggaaattttttatttttacacttcaaaccagttttttttgcaattttacagaattctacatagaaacccctattgcaactagtgttgcaac

SEQ ID NO: 137425 - DNA, 714 bp, Cannabis sativa
ttaactgccaacctaattgagctataattatctaattctgatataatcctgggaatggatttcttgtctaagtacggggcaacaattgattgcaagcggaagatggttatgtttgaacctaatagtgtcaatccaacaatgtttgtgggtaaggtacaaggatagcgtatacccagaataacaatcctaaaacctagagacttgatgcgtaagggttgcataggattcctagttacaacaatggataccaaccagcctatttcatctagacctaaaaatatatgagattcgtgtgtgcaaatttttagatgtatttttagaggatttacctggattaccactttcccaagagattgaatttgtcatagagttagtttgaggagcagaaccagtatcaaaggtcccttatcgaatggctccagcagaattaaaagagttaaagggtcaacttcaggaattacttaacttgggttttactaaactgagttattctccttggggtactccagtgttatttatgaaaaagaaagatgggtcgcttcgcatgtgtatcgaccaccggggactggataagctcacaatcaagaataaatatcctctatcctgaaatgatcacctgtctgactaattgaagggtaagatggtcttttctaagattgatcttcgctcctgttaccatcagttaagaattcgagaagaggattacgagtttct

SEQ ID NO: 137426 - DNA, 705 bp, Cannabis sativa
  modified_base (377)..(385): a, c, t, g, unknown or other
  modified_base (645)..(656): a, c, t, g, unknown or other
tattctcttctctgattagtacggcactcacggcatgctccgtgatagctaagtatattcccagttcctcgtcgtccagaggttttgatagtacaggagcttttgcaagttgtgcctttagctcttggaaaactttttcacactccttcgtccactcgaactgcttgtttcctcgcaggatgttgaagaatgggacacacttgtgtattgatttaaagctgctgagcgcggcgatccgaccagttaagctttgcacttctttggtttttgttggcgagttcatgtccaggagggcttgaatcttttctggattaacttcaattcctcgagcattgacaatgaagcctagaaactttcccgagctcactccgaaggannnnnnnnngggatttagtttcatgttgaattttctgaggacattgaagcattcgtgcaggtcgtctatgtgccccccagcctttcaaataaaaaggtgtctggctgcctcagcgattgattcacttggttggcgggtggaatggcaccatttatcttgttggagccattaggtatgacttctcctaataaattactagataaggtctgcccgcctacggcttggcccacgagtgttgggttttgttccctaaataaaacccatttcannnnnnnnnnnnttacttattaataaagatcagaaacaacattttatgttgcatgattcac

SEQ ID NO: 137427 - DNA, 1618 bp, Cannabis sativa
atcgaaattcagttctatttcactatagcataatcgacactcacttctcagatctcgcatcaaaatcataaaatagttaattgatggccagactactaaaagtaattaagcacgaatgaaatagaatacatagaaattacggggaaaataaatcatattaaaaccataaagcaatgttacacaatatccatctaaccctaatcaattgtttagctacacatgttcatggaagaaaaatcacacattaactttagaaaagagaagaagatagagaataaaataatgctgaaaaccctctgtagaatgcctccagtattaactggtttatttctaagcaccaatcctaagcagaataggttttctagttcaattcagttttcttactttgtgttattaactggtttatttgtgtgttattgttgttcaagttgttgatttaatgcaggttttagattagattcttggtgttattgttgctaaattttaacaaaatcagagcttcgaattcaagatccaataaagggaagaaaagaatcaagattcaatcaagactcatccacaaccaatcatgacaggagcagcaagattcgaacttgagaagttcaatgagacaggggattttggcctgtagagataaagcttaaaaggaatacttgttcatcaaaaagttgccaaagctttgaaacccaaggaagaactgactgacaagttgatgaaggaagagcttgaagacatggaagaattgacatactacactatcataatgtacttgtcaaacactgtaagaaggaaggttcagaacatgaagacaattcgagaattgtggagtaaacttgaagagatctacatgaaaccttctctaactaataagatcaatctgttagaatctttatatggttttaaaatgtcttctcatttgactctagatgataattttgatgcttttaatcaaattattataggattggctaacttgaagtacaatgttgatgaagaaagccaagttgtcattcttctcagatcagccaagctgtcattcttctcagatcattgccagctgcataccaggaattgaaggttgtgatcaaatatggaagagatactctcacccttgatgatgttcttggagccttgaaatccaaagaacaagaaatggttaaagaaaaagacaatgtcaaggatgaagcttacctggccagaggaagagacaaccacaagggtagagatcactacaagaaggatcatttcaaaggacagcacaaatctcagtcaagattaaagtccaggggaaaaatcataaagacagaaaatgttatttttgtgggaaagtaggccacgtcaagaggttctgcattgagtataagaataaacttaaagaagacagagaaaagaagcatgattctactttaaatgtagaagactcagatcatttctcctctgatggtgacttgtacatggtttcagatcaaagaatcactaatgaatggatatttgattctggatgcacatagcatatgtgtcctactcttgaaaattttattaattataggaaagtaaatgctggtattgtactaatggggaatgacaattcttgcagggtaattggcattggaaaggt

SEQ ID NO: 137428 - DNA, 832 bp, Cannabis sativa
cacacttatttttctttcagatttatatgtagatataaaaatatatagataaatagattgattagaagacaacttaaaattaaatattaataattcaaattaagtttatcaataacaagaaaaatttcttaaattaataattttttagaaagttaaatgattaaaatttcttaaaaaataattaataaccgcctccgtaaggtccctacagcgtaggttgtttttaacccttatagtgtcgcctgataaagcgtcagtagcgaatttcaccaaaaccgacgctgaaagaccttaaaaaccgcctctaaagcccagttttgtagtagtgaatatatactacatatatcattttcaatatattaattatatggtgcaaattataaaaaataaaaatatatcctaaaattaatataaatgtattgtgatgttttttttttataaagtaaaatgattaaaattaataaaaaaaatgctaaaatatcatcttcaatacattagttgtatagtgtaaattattaaaaaaataaaaggcatcactaaaattaatataaatatatgtaatttattacaaaatagttaacataataaaaatctaaagctagaagagaaatataataaaattttaattatttattatggacatttataaaaaaaaaataaaaaaaaaatcatattagctcttatataattttttttttttaggttttcttagatatacatatatagatctattataatatactaggtgattgttacgtgccaagccacgtagtgttagttttatttaatattttagttttttattttaattaataattaaaatagtataatt

SEQ ID NO: 137429 - DNA, 788 bp, Cannabis sativa
  modified_base (171)..(174): a, c, t, g, unknown or other
cgaacagagtcaagccgagtggtatccaataccacggctaaaaaaacccaagacattccgctcgtaaccattccctagctgttaacactgaaattattgggatctgagacccctaaaccgaaccaacaaagaaaaacggttcttcaccctctggttggaagattaccatcnnnntcttacagtcaatactggctgagtacttggacaagaaatccactccaagtataatatcaaaatccactaaattcatctctatcaaatcagcactcaactctttatcctctattctgatcggcatatacctaatccaccttttggagataactaactctccgccaagtagtagcgttccaaaccctatttcatagctatcatgtggtctatccaatttactaaaaattctggctgccacataagaatgaatggccccagagtcaaacaacatagagaaataagagttgttgaccgagagttgacctgctaccactgaagggcttgcttctgcatcagcctgagttatcgcgaacaccctagctatagtgggtttcgctgcattcttcagtgcttcaattctgagttggggacaatctctcttgtaatgccctggcatgccacactggaagcacccctgccctttacactcccccagatggtgcttcttatagttggggcactctgggtaagtgtgtcgggtttcagtgccactctgacaattgcctcgaccctagttcccccagaatctcttgttctgacccgagccactcgttgcagtggatgcctttcttttc

SEQ ID NO: 137430 - DNA, 614 bp, Cannabis sativa
accagtagccaaacgaggaagatgaatcaatcagcacaggccgtccaaaactattccaacaggcttcagcaaaatcgcaagacagcagtgcatgggctgttgtttctgctgtagtttgacagacgagacaatttgaagaaattgggacatgtttagtgacaaggttcacacaggttgggagagaacttgctatagctcgccacaaaaaattcagaactttgggaggtatcttcaaatgccagaaattacgccaaaaactagaattgtttggccttggagcgactggtttttggctctgtagtagattatatgcacttctcacagtaaaatttccattatgttctgctgtccaagaccaccagttaggtctagcagtagagcttagaggaatgttgagaattatatcagcttcttggggagaaaacaggtgacagactacttcagcatcccaacataacatatttgttgcaaatagagaactatcagtatgtgtgctaagcccaggatgagtagaagatacatatatgttactagttgatggtagccaaggagaacccagaatttattacttgtaccatcaccaataacacgggcagccccaagccgaaccaagt

SEQ ID NO: 137431 - DNA, 846 bp, Cannabis sativa
caacggttttaaactgtcgcctattgtataaggcacagttataaaccgttgcctatatccaattataggcgacgttttaaaccgtcgggaaacccacattagcgacggttcctacctattatgcccgttttacgacgattgtataggcgacggttatagaaaccgacggaaatactttaaacgactatttaaaaacgtcgagaaaacccatttttgtagtagtgttatgtgtttttggttttgatccttaattaaaaaaaatatttaataatatattttgaatattattttaatttttttttttatagaaaaataaatatcatactatcaaaaatagatatgagcgaacgacatgatccacgaatgagtggccaaaggagaagagcttgatattcgaaaaaaagatgaaggtggttggccaccttagactggtgacggtggcacatggagattatgagggccctcaaattgttgtttttatatattttcatatataataaatacaacaaaagaatatatattggtatttgtaggatttttaccaaattgccctacaccaacaagagtattaatatcagtatcaaaggtcaaaatcgacctttacaagtctactttatactttagacttaaacggcaccgtatgaccaacacgacactcaatcttgtgtccttccgttctcagagttagggtctagaaaccctaacactcaaacactcaacctcccaatctcacaagtcgaaaccctagtagagcaagttctcttcaagaacttgctcgattccaagtctgaaacccagaatcaaacccacacacacatagatttaggtttagcaaaatgaaaaaca

SEQ ID NO: 137432 - DNA, 503 bp, Cannabis sativa
  modified_base (98)..(113): a, c, t, g, unknown or other
tgtctgtagattttatatagttttgtccaatgaagacctaattcatatgataaagatgaacaatggcagaacagtctaaatcctgagtaatcatgaannnnnnnnnnnnnnnntagtttctttgattcactcgttaaggtttttaaaaaaaattaatgattcttacaagttctattttggaaatctaatagtgtgtatggcaaggaacatgatctacaattatagaatcttcactaacctaacagatcgaatgttagttccctccatgtattaatttttgaattggaatgtagcgcacaaattttaatgggatctaattatactttcactagtaaattaatagtactaaaggataaagaaataattagaagggtaaaacgataatttgacaaaaactaatgacgaactgatacaaagagggctcatcactgaaattgattatatcaatggacactgcagtaaaacccagtaaacataattctataatgactaagagttcaatt

SEQ ID NO: 137433 - DNA, 993 bp, Cannabis sativa
aaacctacctatattactttgggagatttagtattttttgggttctaatatactaatatgacctttttcttattaaaaattggacaaatcaattaggtaagaattaatatgatagcattacccaaaaaaattaacaaaactaagttaattaactatgattgtattaccaacaacgaatattatgtcaaattttattaaattattaactactgaaatgagtggatgtcatatcacttttttaattttaccattttaactatgtacttattatttcaagacggtgatgtgacatttttatacggccgtatcaactcaattgactttattcattatgtcttccatgtgtactaatactttaaagcattttatttttactttaaatgtggaaattattatttaaatcataaaaccgtacatttatttgtttttaatataaaaatgtcacatcacatagtacttttctgatattgcttagattttgtttgtgggatttgattgaccttctccttctattaaaattggttaactaataaatagttaaattgggatttttcatattgtagtaattggatatattaccattgtaaaaatttattaactattaaatggttaaattgggaaaaaaaaaatccattacgtgtacatgaacctcatcacgtgtacatcaacccacccaaccactatataagtaaaggttaggtttttgaaacaaagcattttttttcaaaccctgttttactattacctaaatcaaatggacccttaccaaaacttcaacccttttgaaacaagtcctcaaaagtccccacctcatcctttttcttccacaagacccgtaggtacaccttcaaggagtcctagactccgttcagctttaatttcaggatgtcctaactatgctaggctcgagggtgttctccacaaacacgaaaaacttataaggaaggcacatttaaaagccacggtggctaagcaggagtcatacaaactggc

SEQ ID NO: 137434 - DNA, 800 bp, Cannabis sativa
actaaatggaaattttgataaaaaaaggaaagatttttctggttcttttggcctcctacccgaaccttctctctcactctcttaaactctaagttttctagttttaatcttggttgaaggttcgatcttgccattttggagtttggaaaattcaaggaggttcttgcaatacttgaggtagtgctcctactgttttatgttcttaagttcttgctgaaattgaaatgaattggtgattctaaagcatgaaattgttgtatgttctcttgaatgcatgcttatagatttagtgttgatcttcctaagttgtgtttaattctataattttgtggtggcttcattattgagctaaggaattaattcttagatgcttcttgtgcttgaaacctagctatgcttggtagaatttgtagctggaaattaaatgattgaatgggttgaggttcatgttttgagcttgaacttagtgagtttggtgcttaatattgtatattgttacaatcggaaattatgggagttattgttagaattgatgcatgaagtatgtattcttgactctttaataattgttaacaaccctatttgatggtttggaagtttggttgtgatttgggatggtttagttgagtttttggggctgattttcgtgttttgctgctggttttctgggttttgaacccaggtgccgcggcatggtatttagcataccgcggcgcgcccttctctttctgagcagatccttatgcaaacttcaaatagccatagctttgtgatctggactccgatttgtgagttctata

SEQ ID NO: 137435 - DNA, 709 bp, Cannabis sativa
  modified_base (570)..(571): a, c, t, g, unknown or other
gttgaaacttaaagttggtaatggcgaaatgttatcagttagagctagaggaaaagaaaaactcaagtttcaaaacaaaaatttgaatttagacaatgctttgtgtattccaaattttagtggaaacttgatttctatttaatgtttacagctgcaacaatataaattgaattttttgagttctagttctataatttctcaaaatgacattcaaattagtgatgcatctatggaacaagggctttatgttcttagaccagatgaaccatttgcgcttaataacgaactttttacaaggtggtgctttaaatcgcgtaggctataccgaatcagatttccaggcttgtcttgatgacaggaaatctacatctgggatggtttttaatgttgggggtggagcaattgtttggagaagtgctaagcaaaccgcaatatcagactctaccatgaaggtcgagtacatagctaccgctgaggctgctaaggaacttatttagcttagaaagtcatggaaaaaccactagttttactttgtgacaacactagtgctatagccaatagtaaagagcnncgaagccacaagagaagcaaacacgtagagaggaaataccacattatcagggaatatgtgggagtttagaattaattgaaatgtactgatagttttatgctagcgcaagtgggagttttttgggttttgtgccctaaa

SEQ ID NO: 137436 - DNA, 527 bp, Cannabis sativa
atgaactactatagatgcaaagagatatgcagggtatctctagattagttttagattttcattagagttttgctcaatttgtaagaataattgaactatctgtcttttaagtcttttttaggattacataaaattggccattaagagtttcattttaatttctttatatttataataaagtggttgttcaactttgaaaactaaaaaatgtgatgaacttcatttatggttagagattttataagtactgcttattcagtatttacctatcgtagctgaagtgggggtatagattaaaatgttagaataccaaagaatgtaaacagtaaaaagaaataaagaaaaaaaataaaaaagatgtgtaaggtctaaagatcaggacatagagacacaacttgacacgattctatattgatccaaattcatttattatagtgtaaggcatgggcattgaataagcagccgatgctgactcaaaatcctcctttctaccagtcacgcgtgcactgtacgatctatctagctaa

SEQ ID NO: 137437 - DNA, 1000 bp, Cannabis sativa
ttggcttcgggacttatctggaaaattgggagtgggaatgatattcataccatatctgaccattggctacctaatcataaatataaatctttctctagtactatccatcctccttcccagtttttatcatactttatctctgcctcagggacttgggatgttaataggttgggtgcttattttgataattctatcattgatgatattcttgaagtgccagttgcagggtgttatggtagggattctctgatttgggagaagacaagttcaggtgttttttctgttaaatctgcttatcatctggcttcctctttcctggatattccttcttcttcttctttcacttcttctaaaaagttttggtcccgtgtttggtctcctaatattcctcccaaggttaaactgtttatctggagaatgttatctaatgctcttccggttgcaacttctcttttttctaagaaagttcttgattctcctctttgtcctatttgtaaacttgcccctgagagtatcaaacatgctatgctagactgctccagatccagaaaggcatggagatcttccaggtttgtttcttattttgatattaataaacatatggatctaaatgatttttttatgggactgattgttgatcaagataaagagtctcttggtattttatactgttttttgtgggctttatggaatcaaaggaataatatcttacacaaacagtttctattccccctaaagatatttttgattggagtcttgcatattttttccaacatttggatgcgcagcaaagacaggtgccaagatcaggtccagattgtaactcagcctctgcaagggttcagccatctggttccaatgtcttcaaaattttcactgatccagccattgattctcaaagaaggaaacatagtattggagtggttctcttggatggttgtaatcgagtgaaggcaggtttcactactcctttttctggacttgttcctcctgctgttgc

SEQ ID NO: 137438 - DNA, 712 bp, Cannabis sativa
ggtaaaataaattccaacagctgtggcaactcaaaacccctccgaaaatgaagaatctgttgtggtgtgcggcgaaaagatatcttccaacaatgactcagcttcaatcgaagagagtgaatgtaaaccctatctgtccggtctgttctatggctcctgaaaccattggacactctctcttatcttgtccagttgcagcagtagtatgggatcaggtgagtattggtacggtaatgcaacaggacgtctcgtttatggactggtatatgcaccaatttattttgcttgattcggataactcaagcttgttagtggccttgtgttggacaatttagaatgctggaaatgataaagtttggcaaaacaaagcgatgggggtcgaaagcattgtggcgtctgcaacaaactaccttaatcaatggcgtgctgcttaaaattcaaacaatgagctactgctcactggtttcattcagggggatggggtggagcaatggtgtgttccaagcagtaataatattaaggttaatgtcgatgcggttgtgtttgatgataactctaccttttgtgttgggtttgtggcgagagattccaacgacttttttgtagagggcggtacaaaattattccatggttcgatctctcttgtggtggtcgaagcaattggggtccgggaggcgttgagttggatcaaagatcattcgtggctcagtgt

SEQ ID NO: 137439 - DNA, 938 bp, Cannabis sativa
aaatgataacgtatgtctatatgttttgtacgtgagtgctgaactgggtttttggaaatgttaatggcacttgtactatcacaatataggaccaatgagttctgtggaaacccataatcagtaaccattttattaagccagatcagttgagtacaacagcttccagctgcgatatactcagcttctgcagtggagagggaaattgagttttgttttttgcttaaccatgacacaaggttatttcccaagtaaaaacaccctcccgacgtacttttcctatcatctaagctcccagcccaatcggagtcactgtatccaacaatagacatgttggtatctctggagtaccacaagccaaactctgaagttccagataggtatttaaagatacgcttaacagcagacagatgagactgtttgggattagcttgataacgagcacacaagcctacactaaagcaaatgtcaggtctactggctgtcaaatatagaagactacctatcattcctctatatagggtgggatcaacagactcaccagactcatctcggctaagtttggtagtagtacttaaaggggtaggggcatgtttagtgtgatctaagccaaacttctcaagcatttttctaacatatttggactgtgagataaaaataccttgatcagtttgcttaatctgtagacctaaaaagaaactcagatcccctataagactcatttcaaattcactagtcatgagatcaacaaatttgacaacttccttttcacaagtagacccaaaaatgatgtcatcaacataaatttgagctacaaaaatacctggttgcaagagcttaataaaaagagtgttatcagcagtacctctggcaaacccatttgcaagaaggaaggaggttaacctgtcataccatgctctaggagcttgtttaagcccata

SEQ ID NO: 137440 - DNA, 691 bp, Cannabis sativa
aaaacatattccaacagaagccattttgatcatctctgatttggatagattgttcaggtggcttttgatgcctgctgagcatcgtcttctcctttcgcacctgttgcttggtggaaacctccttaacgacctaattagagtcttgtgcctctttagatgggtaaagatggtacatgagaaaatttgcaatggtagctagaagggaaatgttccaaacaaattctaacaatcgatgaatcacttgggttcttgacctttatcccaaggtaaaaggaggacgatagtaggaggggatctgctggaaagaaaggtggtcggcatccatgtctttaacaaagtaatagtcttcaaggaagtcactgatcttcaaaaccttcttgtgtatggtactgctcagccattgatgttcattctgagaaaagtaaaagtaccccaacctattctatttcaagcatgacttcaagtcaaaaagctagttggtctcgtgggtagaagcctaaccccatctgtgtttggcgtacatcacaaacaatgcaaccaaatctttgatgcctttcggagtaaattagatcgagaaattttgtagtaatttgaaatattcttaaagtatggatgcaagggcaagattacacccagtccggcatagggccttgaccgtgcagataaccctctctttgttgggttttatgcc

SEQ ID NO: 137441 - DNA, 703 bp, Cannabis sativa
gaagttatggccaaaatattaatcaatagcaccgtacttattatttttttttttaaaaaaaatcctcattccaaggggattcatctattttttcaagcactataaatagaaccttttatgctgctaattttagaatcctagagttacaaaattgagatagaaacttagagagagagcaaggaagagacgaagaccacgacttcgaagtgttcttcatcgtagttcttttcttctccttaaactcttattatttagtatgattatcattataatgtgtagttttgagtatttttctttagttaagggttatattaaaacccaagacatgaattcttgaatgttaatttctagtttctattatatatcaaattgcttcattttttctatgttcaatgtcatgattattgttttaattttatcttgacggccgttaaattaggttttattttaatctaccgtcatcttaagattactattcacctaatagtttagaattctaagtgtttgtgataaattgaaatttttaatattgtcaaaggtattttgattgtgatgaagaataacacctaggttaaatgaattacatgcttcattaatttattgcctagatcaatcaatctatctccataaatctcaaagttttatctaagttaaataaattgtgtgcttcgtagatttactgcttaggtaaaagagttaatta

SEQ ID NO: 137442 - DNA, 507 bp, Cannabis sativa
ttttttacttttttacttttttattaagtaaattaactaatatgcataggtggaatagcaattataatgattaaaaaaatatcaaaaaaaaaaaatcaaatgaaaaatcattaatcatgtgtaactactttatttatttttattttatttaatctacttattctacataattaatagcttattaagtcctatagtacccaatcttaatctattcttctttttgtttttgctctctccgtattataattttatctctctataatgttatattctttataattgtggagaaatcactgaaaatagtttcatgaatataatgtatttttctttcttttcatatatatatatatatatgattttcatttctttttttttttttattaatatttgtgttctttataatggtaaaaaagttactgagaatatacatttttaaatcgtatcatatctatatttcttattatattttttttatacaaccgaaccgaacattaaaattttgatata

SEQ ID NO: 137443 - DNA, 855 bp, Cannabis sativa
cttctggaatgaactacaacaggaggaagcagccaatttccaagatttctagaagagcgtccaaaagtacatcaatttgaaagaagcccaaatagtggcttacggaggatactacctgaccggagtatcaagatacgcacccagagttcaactctcgggagccatgcctccggccactcctcaaatgagcggcatacaattctccgctaccccaggatataatcaaagcttagccttggctctcgcgtcatcacactttgggacgcccgtgagtaacccctcggggatgaatggtcaagctccatctcagtccgtgcctgccaccaacctaacagaaccccctcagagctcccaaagcaaaaggtcctcaaagggtagcaatcggactgaggataagcgacaactgaggggatacacccctcagtatactcaatacacgaagcttatggacacaggagcgggtatactttgccaccaggcaaaaattactgaaacctcctcccctgtatagggataattcccgaatggatcccagtaaggtgtgagtatcacaacaacattggtcatagtaccaatgaatgcaagaacttgaaagatgaaattgagaacctaatccggctagatcatttatatgaatagattaagaaccgactatcccatctcaacccggctccaataggaggcccgttacctcaaggagctccaaggggtatacccagagaaccagcacccgttgtaccccccggaggaacaatctttcaacaagtccctagattttcaccaagaccaaatgggagagtggccatgatctccggtgggccccatatcgggggaaccaccagaaacgaactaaag

SEQ ID NO: 137444 - DNA, 528 bp, Cannabis sativa
aaaaaaagccccaatctcaaatctcaaacaagaaatgaagaaaaatagaaaaagaagaaaaaaatcactaaatctagatctgaattgctctcctctctctctcgcttccaccaacctgtacgacggactttatcacaaatctccattgatatcggcaacgaaacggaggccacgaatggccgagaacacgtctcacacaatttctctctcacgcaatactttgtcaagacgatctgagtaccactgacttcccaaaattccataaatctcgatcttgcctttttcctttgatccgtcgtcctctgcctccgtcgtccctgtaccttcaagatgtgtagccagccatctctgtgagaagagggaggaaagaagaagaaagagagtaccaatggaaaaactgatgtttaatttagggttttattttttgaactttttctttattttataatatgtttctaaaattaataaatttagtattaaaaataataggcaaccgattttgtgcccatatgtgcaaaacacggattg

SEQ ID NO: 137445 - DNA, 608 bp, Cannabis sativa
  modified_base (532)..(533): a, c, t, g, unknown or other
tcgaccattttatcaatcttccagaaacatctggttttgataaaacttgtctcaagggctgattggttaacactgatattgggtgagcctggaagtatggccgtagtttacgatatccgtggactagacataacgtgagtttttctagagggagatacctggattatgcccctagtaaccttttacttacgtactaaataggttgttggtgcttaccctcttctcgcactatagctgcactaatcgcatcttccgagatggatgaataaagaaataacgtctctccagttattggcttagccaaaactgggggcgttgcgagttgcctttttatgttctgaaaggcctccttgcattcttttgtccactcgaactttttgttgccttgcaatatgttgaagaacggtacacacttatcagttgacttcgaaatgaatctgttaagtgccgccattattcctgtcagggcctgtacttccttaggctttgttggggatggcatatctcttaatgccttgattttttcaggatnncctcaatgcccctcgcgttaactatgaatcccaaaaattttcccgaggagactccaaaggaacatttttttgggt

SEQ ID NO: 137446 - DNA, 613 bp, Cannabis sativa
  modified_base (576)..(588): a, c, t, g, unknown or other
cacttaattttgtatcacactttataatagcatatacattatacatatgtgcccacataaaattttaatccaacagtatatactaaaaaaattggtccctcctaataagtttacttagttccgccattttccaaacacacctactataatcatcaactataaattgaaaatactgcttactagagtgagtaggcactttttctggcccccgaagatcaacatgcacatatttgagtatcttcttagttgtgtgccttaccagagtgagttttagcttatgttgtttccctgaaacacaagcttcacaaaatggtaaggcacaagaatttaaattttcaattatttcttgtttgttcagttctttgaggccttgttcactgacatttccaaatctgtgatgctacaactgcatatctaattctagccctttcactaaacttgcctttctgagtgggacagtttctccttggagtttatataaacgatgatcttttcacctttcatcactatcagcgaaccttcggtgatccttaagtttccgtgcatgaacttgttgttgaaaatattttaccaggnnnnnnnnnnnnnaccaagtatgttttattaacatcct

SEQ ID NO: 137447 - DNA, 597 bp, Cannabis sativa
  modified_base (233)..(249): a, c, t, g, unknown or other
  modified_base (393)..(412): a, c, t, g, unknown or other
aataatataattcctcaattaactcataattatctagttagggttttgctaatccttttcctaatcccgggtattacagtataagaagtatcatctcaactagtgaggggactatgggcctatataatcaagcttataataagtagttctagaattcactaagtaaattctctaacttatcaattcctctttgcgcgactatagactccaaattacactcttaattatatagnnnnnnnnnnnnnnnnnatgatatagatacgctatgaattatccattgttataatcctaataatcaatgatccactatagatgatctacatcgagtaggaacaaatttagcgttcgaccctacaatgtaatttattcttaaaatacttagctacctataannnnnnnnnnnnnnnnnnnntataattactgaaatgagtactctgcaatttaactctattaagccaagctcgaaggaaattattattttacttctatgcatttgtaaaggctatagattcagtatctatgattagcgctccaactcaactgaactatcatgtccttaatctgtatgtcacgagaagatctaattggtcaacttta

SEQ ID NO: 137448 - DNA, 738 bp, Cannabis sativa
ccctgtaaacctaggataaaacttgccctttttcccgaaacgtttgatccccttcattggagacactcgtaggaatacatggtctcctacctggaattctacatttctacactttgagatttcataactcttctgcctactttgagaggcaagcactctggccttgatcttttctatagcctcattggtctattgcaaagattatggacctaagtatttcctttctccagttttatcccagtgaattggagatctacacttccagccttataacatctcatagggagccatccctatggcactctaataactgctattgtatgaaaactctatcaacggtacatacttactctaggagccttcaaaatccaacacatatgcacgtaacataacttccagtatctggattgtcctttcagactgtccatcagtttgaggatggaaagttatattgaactttagtttggtacccatggcctgctagagactctcccaaaattttgaagtgaacttcggatctctatccgatataatggatttcagagccccatgtaatctcactatctctttcacatataactatgcgtactgatccactgtaaaggttgtattcactggtagaaaattggcagactttgtaaattgatctactgcaacccaaatagaatcatacatccccgttgttctaggtaatccaaccacaaaatccatggtgctatcctcccacttctactcaag

SEQ ID NO: 137449 - DNA, 983 bp, Cannabis sativa
  modified_base (638)..(638): a, c, t, g, unknown or other
ttttggggtggtttgatttcgtgtcttgggattagattaggttcatattgcttgatttaagctgatttgataagttttgataggttttggctaaggtttgagtttatgaactcaagttgtgcctttaatggtggattgaatttctaaatttgatgttgagttatactgcttgaatatgcttcattatagtgcatacaggtattctggaagttttggaaagatttggggttgaattgaattaaagggagtaattttcgggctcccagctcagaaccagaatttcggtccctgggggcctgtagcaactggtcgaccagttggtgccaagaaccggacttccggttgagaaccggtctgccgattggggctttttccagagccctaatttttcccatttttgtgttgtttagggttcgagaatcctatttatcgatagggttatccttagttttaatttttaaatccccgatgtgagttttagcgtgttcctcattaaactttgaacgttatggtctagggccctgtaaagcgtcgagctgtgtttccactcaggctgaccgacacacttgagcacggagcgagctaagatagcataagaatgtatatatgaatatatgcttgttttaactatttacacnactaacactaattgtttatgtgattttaagggtgttagtatagtgtaggatatcggtgaggttacggtgttaccaacacgagtaccaaggggtacgttgtgcatgtggtacaacacttagtaattctcgagagtacatttaaggctctaccaacacgagtacagtacagagttggtacttcggtgcatttagtacagaggtcgtacttcccataagaacgttcttatccactcagttagctcaatttctgagctcagggtggcttaagcataaagccgacgttgtattacttatatatatatatatgtcttgcttatcttactgagtctgttgactcatcaattt

SEQ ID NO: 137450 - DNA, 793 bp, Cannabis sativa
tggtactaaatctaatttcctgtggtttgacctcgtcgatctgtgtgagtttactacttgattacgtgcacttgcgtactgtttacaaaatttcgtaacaccacccatccgaccgcagtacatttatatcgcagaacctacttcaatacagatgaatatctagcatattaatcaaactcctctaatagctttataattagtggtcaataatgtacctttagctagcaatcaatgatcaccgatatatttgatttattttctaataacaatccacaacctacaatattaaatgcaattcaaaaaagtttaaattagaattaagtgagaatagtaacaaataactaataaatatataactagtgactacatactcatataattacacattatttactatacattcttattaaattacattactattcctattactatatctattacattacaatgaactaaacacctaattaataattttagttcatgaatatttcttactaagtattaaaataagtttctaactaaaactatataactcattattacattacattactagctatttcaattatcattccattgtcaaaactattaaaattactaaaactcaaaagtttcaaactatatatataaatgtttattttgtcatagtaaaaatttctaccatttcataaaaaattctatcaataactcattcatatattataaaaattgaatctttaagaactagaaaggtaaaaaaatgatacataataaataatccctaaaatagaagacattattaacaaaaaaa

SEQ ID NO: 137451 - DNA, 519 bp, Cannabis sativa
ttggaagattgataaaatgaacgattgaaccgggaagttcttatgagattaatgattgtaaatcacattgttgatgaaatattttaaacttcagctgtgaataaaataatcatttctttcaacaagtaattataaagcgtaaacgctttaaaattacttgaggggcatatatgtatgatgagtcggaattaatctcaaaatacatagtacaatgcaaaaccatcacttcaaaaaataaattttatttggaaactttctaaaagggcctcgaccaaacctttttgacgaaagaggagtcgaactgttataactccttgacaaaacctttttgatgagagaggggtcgaatcgttataacgctttgatcaaacctttccgacgagaaaggaatcaaacaactgtaatttttgatttataacgtatctgacgagaaaggaaaatcaaaagttatgattagcgcataaagctgaatactagctgttacgaaaattatacgcaatcaagtagtaaactcacaca

SEQ ID NO: 137452 - DNA, 791 bp, Cannabis sativa
  modified_base (285)..(293): a, c, t, g, unknown or other
  modified_base (731)..(740): a, c, t, g, unknown or other
gaaaggcatactcacccaaaatggggaaaagcttatgaattgagatgcaatttaatagacacataattgagtaattggtggatgttggatcacaaagtaggttgcttattaaacaacgagcaatataattgagtgtagaataagttttaaagtggttaaccaagtatgaagatagtgaggattgcaaggaagcattggtagcatatgaaccagggactgaaaccttagtggtaatgatggaaaaaagaacatgagagtctcagatgttgatgaattagcatcatnnnnnnnnnactcactataagttagtatggtaatttttaccaagggattatcaataaaacaaaaaatatacttgaggtatgtatttttctggatgcgcttgaaaaacttatcaagatttctaccaaacatagaaagaatcttcaggatcaaggaatgatctttaattaattgttattagttgagatgtaacaccctaactattttaggaatgttaacgtgattttaaacttaactgaacagctcgttgctaatcaacaagtttattgaaaatcgtgattaattaaattttgcttatttaattaaaacataaaatatcatacatataaaaatctgggatcccgtttacaaaagtttaattgtgcatatacaaaagtttgtcgcctagcgactatataaaataagacttgatgtcccaaagatagtacgctccaggcctaactgccccnnnnnnnnnnatcttcatctgctcgctctcacggctacacagctttagccttgcccttacc

SEQ ID NO: 137453 - DNA, 658 bp, Cannabis sativa
  modified_base (622)..(633): a, c, t, g, unknown or other
ggtcagacaaacatgccaaattgtgtaattacctccaattacacacaaatccaattacattgtggctttccaaacgtaccctaaagggtttgtcctatttaggtatctagaaaaataattagttcaattttctttacatgattgtttacgttgtagctatttaggatcacttgtaaattttctgaaaaattttgaataatttacaatgccaaaaatcaagtttaattagttacttacaacatgtataagaaaaatagtcgtgcgtgcaataaaatctaaaaattttgtaataaaatataaataatttattttcgacattgtaaactaattgaaatattttaaaattttacaagtaatcttaaataactataacgtacagatcataaaaaaaaaaaaaattgactaaaaaattctagagagtatacaaaaatactctttaagggtagacttacccaaagtttatataaaaaactataaattttcattttgttgttcctgtattttttgttagttgttcaaagaatccacaaaatttccacaaaaataatatacagacaagttattcaccaaagcaatatatggaaaacaaggtgcatatttggcatcataactaaaaaactgnnnnnnnnnnnnaaaaacagaaaattattttttgaaa

SEQ ID NO: 137454 - DNA, 1005 bp, Cannabis sativa
agcacaaataatttgaacaaatttaaaaaaaaattattttacattatttatctaactaataaagttttattcttaaattataagatatttgatacaatactcttccaacgcttaagtgtgggtcgtatttataggcttagaattaggatcctaaagtcggtggctacaagaatcgaagttgttaagtttgttagacaataactaacttaaccaattctcatgtgagcgagatctctatgtcagcataagtcttagtgcatctgggaacatatgcgagcttcgacacacagaccaaaggcacccgttgaagaagcttctaaataggatagaaatagctggagtcgacttttcaaaattgtcttcttgggagatcaatcttccaggaaggataactagctgtccgaaacttcttttcggaggagggctagctatcttgaagactgaacccagagtggacatgtagtcattcgggagctcccttctgaactcaactatcattccacaagactccttcctagatggacaagttagctatgtgggaacaatactcaggagacacctaattttctaagaacaactttaggagacctttcattttgatggactataccacagtattgaattatattttggattatttcaaaaaattacaaaaacaataaaaaaaaattacaaaaatacagttgtacgatattttaacgatttctaagatttatttacataaaatatactcttctgatgcatttgtatgttgtattcttgttattttttttttattaatttttgttatttgtatattattttttatgttgttttattgttactgttttcttattatttttatgtaattttttgtatttttatagaaaactgtcaatatattcaaaaaaaaaaaaatttgaacctaaaattgtaaaaaatttataaaaataattagtcgttcattaatttttttagtcaaatttaattagcataaaagttactgttatattattttatataata

SEQ ID NO: 137455 - DNA, 529 bp, Cannabis sativa
attgttagtatgttaaatatatagaattagtaattatattataagttatatattattattaatttttttaatcaaatcttaatttattatataatttaatagtttatatgtattttgatttttatgacttataaatacaaacacaattaattaataattatgataaattaataaaaacattaaatgaataaaaaaatagataaaagaaagacaattgaagataacatatagagtgcaattaattatatatatgtattttgattttttttaataacttattataagtataggtacaattggttaatagttatgataaattaaaaaattattaaataaagaagaaaatagagaatagaaaaaagattgaagatagctcatatagctagagttctacatggttttttttatttttttttatcttttttatctatatattaatattgattgatattcatagtatttaattatataactctcatttaccaaaaataaaaacataaagattataatgtcacaacttctaaatatt

SEQ ID NO: 137456 - DNA, 736 bp, Cannabis sativa
aaccttccctcatgcattaaggctctataaatagtgagctagcgtcactaaaaaagggatcgaaagaattgctttagagagagatctaagagaaatactcacatatttcattgtaagagcttagaaagaaaacattgtgttctttgttctctagttaatacaatctaagggcagtaggctattatcgtactaaaggggccgaacctcttcaaaatcgggtgttctttatcacttattgggttttgctctatttttattatattcttaatcgcttcataattgactcactgtcattgactaaaagcgaggtcaacaataaataatacaactaataagctcaacctaaccatattaggattaagatccatagacctatgatgaaccagtgatatttacctagaaagatataatgataagtttatgatatcttatcaaagatatccaatgtgttctccatacattcgatactggtaaacttttccaataccatggaaaggacataacacttatccaatatgtaattatactttatcgccgattaacatgtcaatcaaaatccagtgaactaactagtcatgggacttaaacttttgatgaacatataattagaattatattctactgtttcaacaacactataatcatgaacaaatatatatgctttggactttatagaatttatacattaagtataatcatgaaataaatcatatgaaccatgaaacataaaatgtta

SEQ ID NO: 137457 - DNA, 1193 bp, Cannabis sativa
  modified_base (80)..(85): a, c, t, g, unknown or other
taattacatagtggacagttaattacaaagttgaccgaaatgtgtttacaacaatcatccctaaaatcatgggatttgannnnnnatcacgtagtgtaaatgcggtttacaattttaaaatcgtatgactgttattttcccgcttttattgggtcaaaacaatcgtgtattaaacacgtctttaattgttttatctggagatgtctcgacagaaacctggttctagtgatccccatagcgagctggggtcattcttccttccaaggtcgacaatgtatatctggtatcgatcgcggttcttatttacaaagaatcattttgactcgctggggttgtaagcctcattactgttagctggatgaagctataggatgtcttccgatagcgagacggtcaccttgcttacttgttcttgagccgatccaaattttacacttagtttgttcattgtatgctaaggactttcatgattgatacgtgtcgctttctttggtgcctcgctattcacatttagcaacatatagtttctcgctaatataataagtgccagtgtgtacatcgattccttgcctaagaccttacagccagcaggttataaatatactctgatacttatgtaattaatgagttattttataaaaagcaattgcatcgattcacatttgatttatcttgacacgtccaaccgaatttcaggtataataattgcatcttaaaaagttcttttttagtaaaaagagcttatgaataattacaataattacagagggtattttcgtcaagatcttttcttggaaaaaatgtatcctttgattctggcggttgtgcagtttcgagggtcattatgaatcgtctcttcatattatgcacttctcccagccattggatttctcaatacttagctttcttgtcactggaatttgtgtatataacaggtggctcaagcttatcaatttttataaacctctggctctttagtgagatccattttcagaatggatcatctctttcttgccaaaatgttccttttgagttcagaagttcatccttccaaactcataataccaagatacaccaaccattttccatttgtgcctaaagactttaagcctcaattggagccagaaatgatggattccaaggttgaggagcttccgaccaatccaaattaggggaaccctgtagcccaccat

SEQ ID NO: 137458 - DNA, 525 bp, Cannabis sativa
aattttctctccttggttaccaaaggacataaaagaaaatttctttctttcccttcaaaatttgatccctccaaatttctttcaaggattataacagtcctcaaccaagggttagatgcatttgttatgtttatttacaagaaactttttcatatattgttaatttcaaaattcaaataaagtcccactctggtggtttacaaaaaccaatcaacccacccaccccaaaccgtttcataccatataatactattatattagatcaaatacaataaaacccaaaacacatgcatgccaaaagctaaaatttgtgctgcaccacaacctcaaatctaccacattttacctcttcgatacaaagatcgatgtatgaaattgacaagcctcaaagaatagatgttacccgtacagagttatcggctgagccactcaagaaaatgggcaaggtcgggtgccaatctactgtggttatagcagaagtgtgggcaagagttcttaacccatttgtgtaatctcgaacctgat

SEQ ID NO: 137459 - DNA, 1149 bp, Cannabis sativa
cagcagggacttcgtggttgcccccaccttgacctggttgttgtccatttacaggggcattttgattctcctggatcactgcctcggcagggacatactggtttcccctgcctcgaccatgacctccactgcgagcacctcctcgccccgacctccagctctgtctcgcacaaccgctcttcattcaaccgagttgatcttttgggttcatcgttttccatcaaatcccttgtcttgttcttcaaaagaaaggagatggcagcggtaagaaaataacccaaaatgtatcccacacaaaaaggaaaaatctatacactaaaattaaataaacttttaaaaaaaaaacgtaaatcatcaagcaacaattcaccatgtaaaaaaatagtcttcattcatttatatataaaaaattacactaataagaaaattgtttgagttatactaaaattctaactccgaagaatcatttaattgttttgattaaccataccctaaacttctagctaactaaaggaaaatctaaagccaaagactaaaccaagctatgtgtctattcatccttatcttctggatcttcttctggatcctcctctgactcttcttctagattgtcttctgagtccttcccttgttgttccaccggttcaggatttgctggtagttgtatttcttcttcaggctcatccagatcttccacatcagattcatcctccaagatgtctcatgaaattggctcatagtcaaaatattctgtatcatggtaaatgccaactgttgtctctgggatgttggcaatgtagtagtcatgatattttgccccaagtttatggttgagcaaggttctcacaccctgctcattcattcgtacatccaagacagagaaagtgttgaggaatctctcaattgactctttatacttgttatgttccgaaatataaccgattccgttcacttgtctccatatttgatctaggtgagctcttgcttcctcagaccttagtgagtgtgacataactatatatttctcgtgtgccattaacgacacacgctcccatgccttgattaattttatccatatcctctattattttcctaagtttacttctctcgttagatgtcggcaagcgtcttaagcctttaattgcctta

SEQ ID NO: 137460 - DNA, 550 bp, Cannabis sativa
ttcttgtgtactgagatctaaatgagtttagatctcaaagcttgaggttgttcaagtgttaggtaactttgtacaaaagtcaatttagattacattgtttgattttaagaatcagaacttgaatttgtaattgaattgattgtatagtgaaagttactgtacccggttgaagggaacccaagcactactcggttggaatgcgtttctattgcagaggaagcttgtaaattttgtgttctttgattttaaattctgttcataacatagaaattaatctgttgagaatcatcaattagaacttgtagtaattaggactttcactatgattgatctgtatatttctttaattacagtaccaaaagttcataaaacatctattaatactatcatatgatgtgcacaggtactttgtagaacaaattccttcgatgatatttaatccctgcaaaaaaaacaatgggtgatttcaatgaagaacgagttagcaataattactttgcagaacaaattgaggacaagtggattgtagctgctgaaaagttagaaatct

SEQ ID NO: 137461 - DNA, 570 bp, Cannabis sativa
atgatgattgcttgaagtctcttctctcttgctcttcaatgtgttttctaatctcaaagttgcttgtttctctctctagtcgtccctcaatacgatgtacatgcttctttatataagtcaaagatagatccatcctcttagaattagaatttttttaagaaaatgataagtgttgcgctacagcgcctataccctgcgctgtagcgcctaagcgaaaaaaatcccaaaataaccacgtgctgaaattatattttttttccttcgtacaaaatcttttttccaatcaggcgctatagcacctaccccctgcgctatagtgcctagcaccaattctttctacttcgacattacttagtaattcatgcataacttttgcgtccggactccaaatgagatgatttaacatgttttgaaaagctaggaaggtgttctatcattttggattccataagttcttccaaaaaagatgaaatcattgtcaaaaataggctcaaagatctcagtccatcacaaaatgtcttttcagtacaaacctacacactaggtaaaaacacatcaaatctatacaaa

SEQ ID NO: 137462 - DNA, 945 bp, Cannabis sativa
aacaatttgtatatctttatcttgtgtaagaccttatagtcagcaagttgtaaatatactctgtcacttctgcatttaatgagttatttcattttcagtataattactatttcatgcattgatccctactctttccaatctgacacgtgttttccgttgaaatggtactcgaatttcgggtataacacttagttcctttgaataagtgatatgaatgattaaaaatataccatctaccataaaaattaaacctaaaaggtatacaataattatagtaaaaaataaatatcatcttcttatacttcttaagttataaatacaatacacacacatgcacatatataatatacttttgttgaagtattagaagtaatgatgtataacaaagtttaaattcatacattgcaaacttgtaatcaaaaattaagttgtaatcttacataaataataatgtttaatggactacacttgcacacatatagtacaatatatttgtttagaccttacaataataatatatatggtttaaacttgtaaacctataatcagaaatatgattataaatttgattataacatacaatgtttggattgtgctcttgaactaaaggtagcaacatatagtggcaaatatttcacaattaattatatttttttaaccaattaatagactatatatagactatcagtaattgaaaacctatttataattttaaagttattatgtttggtttatataatataatatatatagtcttggttaaattaattaattaatagttaatttttttattatataatattataaaaattaagcaattttaaattaatttttatcatgttgtagtttaaattaattagctagttagaaatattttttaaacttcaaataacaaaaaatttctttgttagagatattttttaaaatttaaataaatactatata

SEQ ID NO: 137463 - DNA, 1068 bp, Cannabis sativa
  modified_base (1003)..(1019): a, c, t, g, unknown or other
ttgcaaatttttcatgcaattttcccaacctgcattatcaaattttagaataattctatataatagtaaatacataataaaaaaaaattagaataatatttttaaaacttatataaaattagtaatctattctattattattattattattattaataataaaatacctcattaagaagctaaaaatataaataaaaattataagtcactcattcaaaaatttagaaacaagtttttgggggcctgaaagtcaaactcaatcaaagaattagaattcaaattatttcgagtcgaaaatgattattcactctaattatacacaaactaatgcaactcagctaaacaaaagacttattatcatgataaaaaaaaaaataggaactaataatgaagaagaaaaaataccactcacacccaagcaatcatgaaaaacaaaccacattattcacatacttgaaaagtatcaattacaattactaataaaataaagcaaagaaaaaaaaaacaaaccccattatattaacattattaagctaccactcactcacactcttcacaatttttaagcccaagaagcttgtacaaatattattacctcttcttgaaccatcaacttcttgctaaaaacattacgtgattgattagtaacattggaagccatagcactacagaatccaatcctgtgtagaaacaaaaaatacaccattaaaacttttagcatttttgttttacatttttaaggtactcaacacaacacttaatacctttataataggctaaggatttcttatattgtttaattattaaatccaaatgtataaaatttcatattgaaataaaccaataataatatattaccaccacatttggtatttttcttatactttacatgtatcatttgttatagtagtatattatttttaaaaataaaactgaaccaagatatatatatattagtagtaactactgattatatatataaatatgggtgactattcaatgnnnnnnnnnnnnnnnnnaccatatggttacatttttttttgacctgcaatagcaggttaccaatag

SEQ ID NO: 137464 - DNA, 627 bp, Cannabis sativa
gcctcttgccaaagctacttgatatcactcaaaatttcttcatattcttctttttcctttactaaactcaggtgttcttcttcttctgagctgtcactttctgagctaaaataaaaaatgtcatcattcaagggatcctctgttgggatttatgccctaaaagcaagtaattaatagataatatattacagaatatataaaatacaattataagataaattgatacagtaattatagaagtataagtgataaatatttaaaaatttcttattcatatggaaaaggtataattttgtaaggatgtacaagagaatatagtttatacaatatgaataaaactagtcgatagtgtattaaagtaagagaatttttaatatagaattactaagtactgtttactatacattatacgctaatgtgtgatcttaattcgaatcacatatgtggatagacatatagttatagtgttgtgtataatttaattatacatgactggatcggtatgtaataacatctttcatcgacatgtcatttatcatgaaaaaattattcatatcacaacaataatcattagtagatctgtctggatcgttagtacacataaactcccatttttttttttttttt

SEQ ID NO: 137465 - DNA, 930 bp, Cannabis sativa
gtatttgtgtaataaaaccaactttgtaagtaaaaatgtagacataggcgtgtatgagtaattgtgtaataaattgtgtaaaatggatttttcatgtaaaaatttctatttagtaactattaaactataattccataataaaattttaataattagataaatgttatgtttggtgtaatttattcaaaacaaataaataaaaatgatacataattaaaacgtattaaatcaatttaaattaaataattatgtttcgtactcaagtcttcacaaatactaatatatctatttttacatctctcctaacaaaaaaaaaaaattatgttctatatcccaaagtgtatattttaattttgggaaatataagtgttacacttaaaattttgtcaataaaataaaaaaattataaataaactttaatgaaaacaatgaatatttgtatggaaataatacacggtaatttttacatagttcaataattaagttaatctgggatcgctttggattccggctacaagtttgttattgtggagaatgattcgagagtagttatcgacgccatcaatgagaagggatctatccggtctgtgacacgggtattcgtgtctggaattgggtcaagttcatctgggatcttaaatacaaaggagctaatgttgatgatattttcttgtatgcttctattattgtggatactatatggagggtgcgtaatgacaagatccataataactgctctgttgattttaacaaatgctttgatattatttgtacttcctatgcagatatgtatgattcattgctctccagtcccactcctgcgttaccaaatgcttggtcccctcctcctctggactgggttaagctcaattgtgatgtgaaagtgggtttggagagtatgtgtattgctgttgtggctagagatcattt

SEQ ID NO: 137466 - DNA, 928 bp, Cannabis sativa
tacaccttaaccaactaagctatgaatatttgttgtttacaatacacttaattttacttaaataaaagcctaaatttttatttttattttgggctcctgaaaggtgtgggccctaggcacgggcctagcctgtctcttcctaagcccgatcctgtatatatatcaagtagatatgagaaaagcttatttatttgatcatgtacgtagaatgcaaaatatgaagttttcatcatcacatgatcctcattttaattttaacgatgtacaaaaaccaacagaagaaaagaaaaaaagaacactaaaagaactaaggggagcattgaataaaatgctaagaagtctctttaaaggtaagaaaagtaagaggaaacggtattcttagaagcctggtccaaatccagaggcgatggatgagtccacgagtaacggttatcactcggatcatttttctaatgatcctatttatgatgtagcaatatatgaagaaaatgattattataagggaagaaaatgatcattgttcaaattagtaataaattgctaatttattgataattagcaatatatattaatttgaaaaatagttttatgggattcgaacccatgacattgtataatatgccatacaccttaaccaactaaggtatgaatatttgttgtttacaatttacttaatttttacttaaataaaagcctaataatttttttttatcttgggccctcgaaaggtgtgggccctaggcacgggcctagctggcctatgcctagggccagccctatatatatcaagtagatatgagaaaaacttatttatttgatcatgtacgtagagcgcaaagtatgagcgcaaagtgtgtgtgggcactcactcttttcactatgtggcttcggttttgaagagggaaagagagaaagatggtttcggcta

SEQ ID NO: 137467 - DNA, 866 bp, Cannabis sativa
  modified_base (30)..(53): a, c, t, g, unknown or other
  modified_base (419)..(429): a, c, t, g, unknown or other
aagttcatatttagggtgttaatccacatnnnnnnnnnnnnnnnnnnnnnnnnggtaaaataatttccaacaggactggcttctgcatcggcctgagtaatggcaaacacccttgctggagtgggtttcgccggagcctttggtgcttcgtttctgagttgagggcaatcccttttgtaatgccctgacatgccatattggaagcaactttgtcctctacactcccccagatggtgccttttaaaactggggcactctgggtaagtatatcgggtctcaaaactaccctgacgactgccttgaccctagttcccctgaaacctcttgttttgacctgagccaccagttgcagtggatggcttcctcttctgatccatggccgagccactaccttcactgctaaagcctgatgcaggagnnnnnnnnnnnccgccaaccactggagtcctaacaaattcagtcatgcacccaactgcgcccttagcttgcagtgccttttccaccatttcagcataggtggttttatcgtcagtagtaatcatcaaatcatgtcgtatcttggcatttaatgcatccagatatttctccttttttctaaaatcagttggcactatactcgaggccaacctcgccaactgatcaaactgtgttgtgtattcagtaacactcatgttttccttctaagtcaagtgagtgaagtcttttcttttggcacttctaacgacctcattataatatttggcattgaaaagctcctaaaattttttccaggtcatcgtagtgacgtcatgtatcatggacaccatgtcccaccagactaaagcatcctcctgaaactggaaagtggctcacaccactctatcatt

SEQ ID NO: 137468 - DNA, 574 bp, Cannabis sativa
atctagatttactaacatatatatttaattataaactataatctaacatcctaaacatgaatttcttaaaataatgaaataaacacaaaaaagtttatagaaaaccttacattggttacagtaaaattaaatctctctttccgttcagatctctaacccttgatccattctgttgcagagtatgataaggatctgaacttggatattctcctcatttgatggtgttcaacacaatcttccacaaaggtctgagtattgacttgaattgtgtggacaattccttaattcacaataggcttcgaaaataacagaggaagaagaagagggattcgaatattatggtggctctctttattttctattttctctgacaaaagagtctgatcatcatctaaaaataaaagccatcttattcgatttatagagtagcttttagggttaggtttagaaataaaatagaattaaaaaagattacaaaaaatgattttatttaacctccttgatcgagccattaatgggcctttaggatttcaattttgccattttatttaaactcatctttcttttcacaaat

SEQ ID NO: 137469 - DNA, 1084 bp, Cannabis sativa
  modified_base (31)..(52): a, c, t, g, unknown or other
  modified_base (141)..(174): a, c, t, g, unknown or other
gattctcatcttaatcgaataaaaggttgcnnnnnnnnnnnnnnnnnnnnnngagctgacaactctattcagtggatggtatctttgactctaacctaacgaaacactggtatctgtttgttgaaaactttggaaattatnnnnnnnnnnnnnnnnnnnnnnnnnnnnnnnnnnttcctacttgctaagtgctaataatttttgaatataattttgtgttgaatcttacttgatttctatttattgatatttgcagtatttaatatgactgcaaacaatcccatggtgtcactgttgactgacaacaagctcaatggagctaactttatcaaatggagatagaacattaatattgctctcattggtgaaaatttcctatttgtgttgactgaagaggctgttgagcagcgaggtgagaatgcgaccaaggcaattaaggaaaagttcgagcattggaagaatggtaacaataaagctcgatactttatgctgtccagcatggtcgacaccttgaaaacaaggtttacaaacactctcaggctatagaaatcatgaaccagttaactgaactgtttgggatggcattaattcaagctcgctttgaggcgaataagaatttcatcaatgcacggatgagacctcatcagaacgtgtgtgatcaccttctctagatgactagttacttccaagaggctgagaatcatggagctgttattgatcagacaactcaagtgagtttgatcttgaatagtttgactccagcttttctgccctttacatcaaattatgtcgacttccacgagttaatcaacaaccttcagacatttaaaaatttgattggaggaccacagaaaggaggagctaaaactcctagttctagcacttttaatggtatggccaaggctgaggcaaacattgcctctacttcgaaacccagcaaaaagaagaactggaagaatagcaagaagcctctgaaagctatgaaaatagttaaaaagaaaaaggctgctaatcccgatgcaaagaaaaaaggaaaatgcttctattgcaatgaaaaggaccactggaaacccaagtgccctaa

SEQ ID NO: 137470 - DNA, 629 bp, Cannabis sativa
tggtgcaaagtgaaaagataaaatcacactaaattatatgtgcaaagtaataatattagggacgagataaatctccaattgcatatatatataaagtagtttcggtatgtgattgttatttcatataataaaacaaatgggcatatttttggaaataatttgctatttacgttggaatgtgtaattttctcttctatttttgcctacagttgcccaattcgactaaaagtttccatttgaaaatgcaccaattactatattttaaccttgactacggtcatttgtaacaaagcttggaggctctcttttgctttctctatagcgtaatttgcggtcaaattccctatacttttatgtttgttacggtttaacctctttactcgaaaaattatggctatactccctggactcgacaatcgttttgcttccgtcccttttggtctgttaagtgtcaaagtgacattgtcacgtatacacatgacaaattttcatggaatgcctaatattaataatttatatactaaaaaaatagaaaaaacataaaaaaaaattaaaataattaatattttttttccttttttctttttctttctttttcttcttcatctttcttcttcttcttcattttt

SEQ ID NO: 137471 - DNA, 510 bp, Cannabis sativa
aagatgaagattatccaaagtcttaattaatgtttctcattctagtattcattttctttcaatgttgagtttgtggttcattttttcagtgattttttccattattacttgttaatttgactctattttggtatattgatagttatggtttagttgattacaaagtcagtttattttgtattctctgattttgtcaacttgtttattgatgaattagtgattaatttgattgtttaaaataacaaattagtcaattactcaacttggtttctctgattttgtagaaatttgctactgatgtgtctatttagtcctaaattatttcttatgatgtcatcaacttcttctacttttctttatatagttttatagttttaattaccaaactatgagtaatcaatcaagtctaatattgtgtttttccacaactaaacatcacaaatcaaagatcacaatcttaattagcatgattaatcaaaagttaataatatgatcataatctactactag

SEQ ID NO: 137472 - DNA, 623 bp, Cannabis sativa
ttaaaatatattaataaaattaaaattaaaaaaacgataaaaaaaaaaaatatcacctgcatgaaattatttatccaccctgctcgattggataaatactcccagacagatgaggtcaactggattagttatccagacttctaacatgcccaaacactgaattggacaaattaacgtctaatccaatccagtcctgcgtaccaaacgggcccacagtgttatatcttcgactagtgagtagtgactagagtagagggaggagcaacacttgtctaaaaagattccatatttccctctactattttacttgttgtaaacaaatcactaacacaaagtaatgatgtacattaattagtcagattgagataataaagtgtttgcaattgagtcacacagcttacaattacaattaccagatttccccttttatttaatattataaagcctaccaagacctgttcattggtataatgtaaaatccagttaaattattatttttaattttattcaaaaaatagttataaacatagttttcttataaaattgatggtctaaactttatataaactagagcaatttgcggcgaaatccccttatgttttgatttttatacacttaacccc

SEQ ID NO: 137473 - DNA, 2279 bp, Cannabis sativa
  modified_base (138)..(138): a, c, t, g, unknown or other
tacaacaatctttgaaaaaccctcaacgaaccgacgataatatccagctaatcccagaaagcttctaacttcagtagctgatttcggtgttagccaatctcgaacagcttcaattttggccggatccaccatgatccnatctttatctactatgtgccctaagaaagtgacacgagataaccagaattcacactttttgaatttggcatagagcttatgatcccgtaaccgttgcaaaactgctctgagatgcaactcatgctctttatctatctcagagtacaccagaatgtcatcaataaacacgattacacacctatctagataatcctcgaacactcgattcataagatccatgaatgtcgctgtggcattggtgagtccaaaggatatcacaaggaattcataatgtccataccgagtacggaacacgctttttgggatatcttcctctcgaattctcaactgatgatagcttgagcgaagatcgatcttggaaaagatcgtcttcccctttcagttgatgaaacagatcatcgatttgaggtaatggatacttgttcttgattgtaaacttgttcaactcccggtaatcaatacacattcgaagggtcccgtctttcttcttcacaaacaataccagagcaccccaaggtgagtagcttggcctaatgaatcccagattcagtaatctttgtaatagtatcttcaattctttcaattccgctgaagccattcgatacggtgctttggatacaggatccactcccggaaccaattcaataacaaattcaatctcccgagtaggtggcaatcctagtaagtcttctaaaaacacgtcaaggaactcgcataccaagcttgtactctcaggccctgatgtcacaggttggttggtatccactgcaatgactatgaaccccagacaacctctgctcatcaggtccttagctttcaacagagttatccttggtatgcgtgccccctgaaccttacccacgaacaccgctgggttagcactatcgggctcaaacaccaccatctttcgtttacagtcgatcgttgccccatacttagatagaaaattcattcccaggattatgtccaaattagatagttgcaattcaattagattggcagtcaattcacaaccgccaatccagaaggacaaagaccgaatccacctagtggatacaacaaggtctcccgaaagtaacagggttccaaaccccgaagcatagatatcacatggcttatggaaacttttaataactctactcgacacaaaggagtgagtagctcccgaatcaaacaacacagtatatgaacaaccattaatagacaactgacctgtcacaactgacggactagcaccaacgtcagcctgagtcatgttaaaaagtctccctgggttctgcgtagtattcttcttaggctcctctttcttggactgaggacaatctctaataaagtggcccaccatgccacactagaaacatgccttagcccgacactcacccagatggtgtttcttgcatttagaacactcgggatatgatcggaatgaagacccgcggccctgacggccacctctgtttccccgaaactttttattacctcctgatgctccggaagcctcaaccttccgtttgtgatcaaggttgccactatcggtccccttacataaattactactagcatgaggattcgatgccgtgacaacatcctttacaacttgctctttcgcaacatgctgctcagcctcttcagcaatcaaggctagctctaccactttcttgtacaaagtgtcatgtgaagtggtaatcttcaagttccgactgattgtggcattcagtcctctcacataattatgtttcctggtcaaatctgtgggtaccagatcaccaacaaatttcgacaaccgatcaaattccagagtatactcggccacagacatcttctcctaagtaagcttcacaaagtcttccatatgtgaagttctcacaacgatgttgtaaaacttttcttcaaatagattcttaaactcttcccaagtcattacactaacatcccgggtctgacccacaatgtcccaccagacgcgggcatgatcttgtaacatgaaggctgtacaattcactctctcagttcctgtcacccccatattatcgaggatacgggtaacagtgctcatccactgctcgtccttaatactgtcaatacctcctagaaaagtcagaggttgcagcttcacaaaccgctcaaataccgagtcccta

SEQ ID NO: 137474 - DNA, 553 bp, Cannabis sativa
acacttgtcccaatgggaaaagtgaggcttccagtcaccttgtgctcgaacacaccccagagcactttcaagtactgcacgttcgtgatggtggactgcctgacagcctacaacgcaatcctcggccgaccggccttggtggactttggcgcagtcacgtcaatacggcacttgtgcttgaaattcccaacccaggaagctgggatagggacggtgaggggaaatcaaggggaggcgaggcaatgctataacgttgctgcccacctaccagtgctgatggtccgagaaactattgagccagaaatggctgaagaagacaagttggatccccgtgtgggatccgaaaaaatcgcagaaccaatggaggacattgaggaagtattagtgtgtgacctcgactccaccaaagtactccggctaggaaagagcctagacccggaggaaaaagaaaataaaataaagacactgaagggtgccattgacgttttcgcatggtgccaagaagacatgactggcataagtccccatctcatcacccatgtcctcaatgtca

SEQ ID NO: 137475 - DNA, 989 bp, Cannabis sativa
attaattgttcaaaaactaattattttattcttttaactttaatattaataaaaaaataatatagaatttttttttttttatattattagtaactataatacttaaaaaaaaaaaacttaataaactaatatatatatatatatatgtataacggttggtttcggttttttcggtcggcttattaccaaaaaaaaaaccgaccgtttaatggcggttttaaccgttagcggtttcttcagttttcggtttcgtcggtttcagttctaacggtgttcggtaggtcggtttgaacgattttttcgattttctagattttatgctcacccctaatacaagagggtgatcaaataaaattggatttgactatctctcactaatcttatcacacatttactatacagtattggaataaattaatagaaaaatataacaacaaaataataaataaaaataataatcaaaattaatatttgtaatatgttgtttaataaaattgtttggaaatagaatactgatcatttaacttgtttagtttatcaagaaacgtaatcagaatgcttgaattgagaaaattgttattttgagttaaactatagtatgtattagttattttgtaaagacatattttaaaggataaaattgtcattatatatttaatattaaaaaataaataaaaatcattacatttatagcacgtttactacgcaatattcaaaagcataataaagtaatagaataaatgaagaataatcaaaaataatatttgtaatatgttgtttactaaaactgattagaaatgaaatatgatagtgatttatcttgtttattttatctggaaacgtaattgggatgcttaaattaactaaattacccttctgaattaaattgtttactttatcaggaaacgaaatcaaaatgcttaaattgactaaattacccttttgagttaaattatagtatatgctagttattttttaagatatatttt

SEQ ID NO: 137476 - DNA, 754 bp, Cannabis sativa
cggagtacaactgttttaatcaatgggtgccctaaaggtcgagtgataccgacaagagggttacgatagggatgtcctttatctccttatttattcgtcttctgtgtagaatcattgtcttcgttattctctcttgtagaagctagatctgaactgatggggtttaggtgctctagattgggaccacgtgttcctcacttgttctttgcagacgatagccttgtgtttggcagggctaatggaggggattctgaaactataaagcgtatccttctaacttatgaggctgcctcgggggcagaagattaactttgagaagtctgctatcacttttagtccgaatgtgcaaatgtggatcaagatgaggtcctgagagtgttagggttgacatcagtggctacgcatgacaagtacctgggattacctacgatgattggtaaaaacaaacagtgggcgtttgaggggatttgtgagaatgttaagaagcgtgtgcagggatagaagaggaatttctttttagccggtgggaaagaagtacttatcaaatttattcttcaagctattctaacttagatgatgattgtctttaagcttctggcgaaaacctgtgagaaattaaaatctattgtcagacaattctggtggggttcatctagagatcaaaggaagattccttgggtgaaatgggaaacagtatgtcagcctaaggcgatgggtgggcttggttttcaggattttcaactttttaatcaag

SEQ ID NO: 137477 - DNA, 546 bp, Cannabis sativa
  modified_base (229)..(229): a, c, t, g, unknown or other
atgactcggctttggattcttcagtgtcttcttctaggccttcttttgggtgatcctcaaagtctatttccatttctacatctgctggaattgatgctggcatgctctcggatttaaagtcggacacatcaatttctacttcaaaatgataatcaggtatgtcatattctagttcattgatgttggttgttgtggatagatctaagtccttgctcttcggtattggagngtaatctggctcattgggcccttctggcatttcctcatctttggattcttcatctgaaggaatctctattacttctactattttctgtgcttttatttgaggtgggctttttagttcaagttccaacatttctgctgtcacttcaaaatagtctggcatttctgataaatctcgttcatttgttacgttcacagattcagttaatagtcctccatactgtcgtcacttagcttattcgtatgttcttgacgcattctgttgggttttatgccctaaataaaactctgtttcagtgcaatccagattattctatatca

SEQ ID NO: 137478 - DNA, 1403 bp, Cannabis sativa
  modified_base (307)..(309): a, c, t, g, unknown or other
taaatttgttgctaataaataccgaaatttgaaaaatagtaacataaattctcatttatggtttaatttttattctcatgtgtgtgttaagctctgagttcgaattttattgagtgtgtttttaatgtttgagttttagtgttttactgaggtcctaatgtctgagtttgtgtttataagatttgttttttttttttaatttatttttatagattttgaaaaacttgaaatttgatgttgtttctattaattattgggattcaaagtttgatgtttcatacggaaattaaagtttaccttttcgttnnnttgattgaaaaatattagtagaaaatttatggaataagaattttgaatatatgaaaatagaattgaaaaataacatttgaattgagaattaaagtgtattgttaatctccttacaaaaaaaagtttattactaatcattaaagataatatggcgcgaagaaaatagaaaaattaatttttatttcatttaataagtatataatatattttttttaataatatgaatttattttaattaattattgttgtttaaaattattttttctagaagaattattagtttggctaatactatattatacaatcaaaattatgatactatattattttttatttttgttatatatctcgatcatttaaaattgttctcaacatattgtatatcacctgttgtcatcaccatatctcactaactcgctattattttggtttaccaacaaacaaatcaagcaatgagttaacattattaacttatttttatacaatttttctttcaataatatgataagttaggtgtaagagaaatagtttaagatatagagagtttagagagagtttaattagtaagtgattgggaaaaaaatgtgtgagttatcatttttaaaaaaatggtgtcgtttgatattagggtttttttttaaaaaaaaaaaattgaaagaaaaatatgagttatcatagttgaaaaaaatagttaagaaagaaaaagaaatgtttggtttcaaaaaataaaaaaagtagttttagagatatttttaaattatgtgatatttaaaacatgatcatgtacaacatatataattaataaattgaaaaaaattaaaaaagtggtgatcgatttggagttattatttttcaaaaaaataaaataaaaaataaaaaattaaggaagaaataaatagagatatatatatttataaagctaataaaaaattaaaaaaaaatgaaagaattaaggagaaaacaaataatattaattaaagaaattttatatctctctttatatttatatatgggtatgctcttaatgggtattacccatgtatgggtattttattcttgaccattggatcaaatatctaatggttgatatttat

SEQ ID NO: 137479 - DNA, 564 bp, Cannabis sativa
aatctttagtttctactttgagcattcctttgaaataggtcttggagatatttgagagagtttttggaagaactattatttttgttaaaaagtgaagagtagaaatggttgtgttaaaaaaattaggacctgtttaaaggctatgggggtcaatgttattttattttttattttatttttattgttagtgttccaagatgcttagaaatattggtggtcttctacatgtctactctcggtagtaccaatatttgcgggtatggagtccaaaaatgcaggaattattttttctacaagtccatcatactattataaagttaagataaacttgggacacaaatattatctctcaaaaaatccaagataattgtgcatgaattttcttctagatatggaagtcctaaaaagggagcactttggccaaaagggagcaatttggagaacataaccctggagaactctccttaagcattgagatcaataacactccaagtggactagcctattaccgctgaaagggggtgaaccactataaattcccgtgttcatctttgttaaatttac

SEQ ID NO: 137480 - DNA, 819 bp, Cannabis sativa
  modified_base (748)..(760): a, c, t, g, unknown or other
acacctctattaattttataaaaatatctcattcaattattatcttatatataaacagataataaaaaaagatcatatttcattgaattattgaaaagacacgtctcattattgaattatgtttgagttctttcattttcagcgagacaagcaatgatcaatactaattattttaggaaatattagattttgagcaaaagtttacaattttattatgatacaaattttttttacaaaaatactttttctctataaaacaaccgtaaaacaacatcataaaacaattaaaaacaacagtagaataactaaaaaataaccgtaaaataatagtgaaaacttaacatagtacacagtataaaatttatacagtatttttgaagaaaaaaaattctatcccacaataaaaaaaaaaaaaggtaaaaatttcagtacgtggtgtagaaacctcttatttgaagcattttataatattacattttatgttactaataaatgcccgtgtcttttttcgtttcattttatttatatttttgttttttttttaattttttttataaatacttataataaaaatttatataatttaattttatattttaattataatgcaaattacaaaataaataagtcaatatacaagaataatacattagtcatcatcatatataatatgtaatttaaaaggatatatactattttacactttatgttttgtaaaagttattaattggaccatctgttttgttannnnnnnnnnnnnaccctgtattttctaaaattgtataaataagatcctgaattgatttttaatcaaaataa

SEQ ID NO: 137481 - DNA, 535 bp, Cannabis sativa
  modified_base (245)..(258): a, c, t, g, unknown or other
gtgtagggtgagattttaacataacactaacgagtgtaagagtaaggaaaaaactctttaaaatttcccttgaaaagaacaatatttttaatttgttaattagggggccattttaaccaatatcaacccaaaaccaatcttcatattcacgtcttagtggtgcatattctttgtgactagtggcaaaaaatattccgagatgggttcgggccacattttgcaaaggggtaccattatcagaaatnnnnnnnnnnnnnnatttcgattaaaatgattgttagtacatgaaaactactttttctctcaacaagtccaatagaaaagtgatgcacaacggtcttggctttgtccctatgaaatttcacgattttgggagatttgtagggtgagattttaacacaacactaacgagtgtaagtgtaaggaaaaaacttgttaaaatttctcttaaaaaaacaatatatttaaattttttaattagggggccattttaaccaatatcaacccgaaaccaatcttcatattaacgtcttag

SEQ ID NO: 137482 - DNA, 847 bp, Cannabis sativa
ctagagttagccctaccacaaaaatccttcatttaatacctgtcactaatcatatttcttaatatcgaacacagtaatgtacctctaaaagaggtctctattaaagaattttcctatattttatattaattattatttaagaagctaataaaaaattaaaaaaaataagagaattaaggagagaatagaaaaagctatttagattgatttgagagtgtcacatcaccgcctcatacttctcatttatatatatactagttaacaacccgcgctttgcggcgggtgtatgaaaaattttaacattactataatttttatatatatatttttttttttgaacaatatgagaagttaagtgtataaacaggtcagcttaagatgtaattacaattttttttaaataatggaagttcgacaatatggttcatataatatcgaagaggatcaatgctgattttattttaagttagtataaaaagataatggatgaacagatatattttggtttttttccaatcggagaagaagacgaagcagagtgaaatatgaataaaattagtttttattttattaattttaatggataaataatttatatttagtttttataatgtttaaataattaaatttatttggaccaattaatatatgccacatttaaataagtatacacagtggcaattttatgtggcatttaactgttaaaattaacttatactttaaatttgccaagagaagtaaatatataatagtattaccaccaaaaaataacataaggggttaagtgtctacaaatctattctatataaagtgtgtctatataactaaattcttggtttatgagaaa

SEQ ID NO: 137483 - DNA, 641 bp, Cannabis sativa
ggaaaaagctagcttttttagtgagacccttcaacgcgtgtcactaaatcctttcacaatcactcattgcgtgtcactgtaggcaagcaactccaaaaaagtgtcactatatcttttctttttattttttattattattttgtagatatagtgacacacaaaaagagtgactagattagattttttaaagaaaaaaataataatattcaattcttttaattaatattttataaattattttttttaattgctgtattgtttttattcaaatcaattttagggtaaaaaagtatcatggttattgttaccagatttcttttaaaaaatggtaccatatttctttttttaaatagaacttaaagaaatactttttatgaatattaatgctttataagataactaatcaaaattttatatactaccagctgaatctttaaagattagagaaataaaatactcacaacatttttataccaaatgaacaaacacaagtacaaaatcaaaaacaaattacagtaaaatgttcccaatataagttgatttgaagcaaaaagaatatataattgtttaaaagaaaatacaacaatgtaaacccaaaattatgagtaaatttgaataaaaaatcagaaaaaaataactta

SEQ ID NO: 137484 - DNA, 782 bp, Cannabis sativa
  modified_base (132)..(137): a, c, t, g, unknown or other
aaacgatgtttgtgttgatttggatgatttcatgagggtttatgtgattatttgatgaaagtaggtgatttacgaaatttttccatcaaaatatttttttttctttctgaaatattttatttggattccttnnnnnnaattaagcaactttcgtttttacgaaactcaattccgattaaaaatgagagagatatggtgttttgaagtttcgggtgcatatagtgtcatcgcaccacaccatgcgcgcgcaggtggtcagacaagatgaacccgtgtgcgtgtctaaaggggttctgtccgaagctgcacccgcctgcctgtccgaggatgcaccctgctagcagggtcttccgcgcgcgtgtcaccctacaggtgactcagttttctcggtcagacaccctgctcccgcgcgcgtcctgggccacctgcagcctattttggctgcacgtgcagccctccttggaagcaacacccctaacccgtttttttgggatttttcaaatttttcgaatttttccaatttcaaaccacagaaatcaaaacaaaatattatttcttaatatatttaaacttaaatatcaattttaaattaataatatttatttattaataggttattattaattttatgatattttgatgtttaaatttaaaaattaattattttatttttcaattctgttaagattttaaaaattagttaatttctttaatatttatatattatttacttataagatcagatatttaaatatttgacatattttaaatgaaaagataac

SEQ ID NO: 137485 - DNA, 1046 bp, Cannabis sativa
tgtagtttggttggttagttaatgccatattttgtggcatttagttttcttgccatatttatcataaaatggtttatttttcccatatttttgaaaatatcccatgaaaatatagaaatagaggaagaatgtgaaatggaataaaaatagaaatatgacagaatttatagtaataatagaataattttgtattgtgtattgtgtaataatagaaataggatggagtctgtttttttgcaatttaaatggaatgctataaatatagtgtattattatattttaaatatttaatagtgatagaatgtgtcaaatttcacaaataaaattgttttgattaaaaaacatatagaataattagcaattttactctctgaactttcgacaatactgattttatcccctaaaatatacgacttgttaagaatcctccctgaacttttacatttacataattttcatccttctgttaggttccgtcccattatttcgtttatatgctgacgtatttttgttaattagcaattttttcccttaaactttgacaactataaaatgataccccttcaaaataaaaatgagaaagattcaacattattctttagtaaatcttaaaaaaaataatttaaatcttaataaaaaaaatatatttttaatgattaagaaaataaaaaaaaatatataaaagtaattaagcaatttaaaaaaaatatatttatttattacgaaaaaattcatttagatataaaaaatatatattaaaattttaattattgtaaaaactaaattttacgggaacaagcttaagtctattattttttctctaaaaatatagatttgtttaaataaacataacttttttttttgtttaatttctaatttttgtacaaaataattttatatttttattgaatttatatcttatgatataatataaataaatttgattttttattcaaaaaaacttagtttgtttaagttatttattggattgtcaataattttagtttgattttataagatacgtgttcataaaaaaaaaaaaaaaa

SEQ ID NO: 137486 - DNA, 511 bp, Cannabis sativa
ttatgtgtcactttaaaactaaagcaaaaggtcctttttgtagtagtgcccatgaagaaggacataagtaaaagagacacatccaagttctgtcgttttcatgtagagtatggccatgacaggaatgagtgcaataacctgaagcaggaaatcgaattcttgatcagaaagaataacccgcacttgcaaaaatacgtcaaggctgactagaatcaaaggccacccaaatagacgatactcagaatctattgatgccaccactagtggacgagcatctacaagttattattgggggcccacatccagctggagactcgggcaaagctcaggaaaagtatgcccgagccttacaacacgaatagaaagaaacagttttggtcgtagaagagagagccaagaatactacgggtaggggaactcactataaccttcaatgaagcagatgttattcatgtgcacttcccacacaacaaccccttggtcatggaagtatagatagcaaacaagacag

SEQ ID NO: 137487 - DNA, 1000 bp, Cannabis sativa
atgctttgtatgggtatagttgcccactcttggtcacttgcatttcacacgttcaatttttatttgttcggctcttaggtttgagcaaacttatttttatagcaagttatgaatttatagtagacttattccattttttattcggcttgtgtaccagtacggggttagctacccaggccgggtagaaagcctcgattatgaagttgttgttgcgcagcttttctacctcttcttttagtgcttgggcccattccttgtccagcagtcttcttttttgttgaacgggtcggaagtttggattgatgtttacggcgtgtgaaattatagaaggatcgataccgaccatgttctcatttgaccaggtgaaaaaatctaggtttgctcttagaaattttatcagagctgattttacttcgagcaacaaaccttttccaattttgagtttcttggttagaacacttgggttaattttcaatttcttctaattcttccaccggcccaacatttgtatttggctccccaagttggggatccacatctttgtcctcgccttgggcggttccctatttggaaatgctcttgcccttgtgcgaactctcaatggaagattcttcctttttggccttggttagggcaaggttgtagcattcctgtgcagcttgttgatttcctttcaagcatcctaccccattctttgttgggaacttgatgcacgaatggaatattgatgtaacaatttttaagtcatataaggttggtcggcctaacatgacgttaaaggctgatggaacatcaagtattaggaattgtgccatcacagttatgctcttcggagcttgtgcaacagtgaggggtaagcaaatttttccctaaaggttcaacactctgctggagaaaccataaacgggctggagacaggggatcaaatctttgagttggagccccattttttcatatggtgttttgaacaagatatttgatgtgacagtcagtagtcccg

SEQ ID NO: 137488 - DNA, 838 bp, Cannabis sativa
aacacaagcttatgagtacgctttttacctctgcgaaatgaaacaatctggtccaagattaaagaagccagatcaatggatgccccaaggtgatacgaaatagaaaggatgccagtaaggggaggctcaagtgtttcatgagagtaggccacatctttttgagaggacaaaattttatagattaaattaggaaacacaagcttatgagtacgctttttacctctgcgaaatgaaacaatctggtccaagattaaagaagtcagatcaatggatgccccgaggtgatacgaaatagacaggatgccaaatcttgagacaccacgattttgttggaattgggaagccaattgctaagtgcaaaccgcatgagagatgcatgagcataggtgagatgtgtagttttgaagattctgcccagatttccattcaacccatgcaccagtgagttcagtgagcatcaaatggcgatccatagacatgatagcattagacacacctttgggtaattgcaaagccactgcaatgtccttgacagtaaaagaaaaccaatgcccccgaacgtatactttaccaaaaaattcagaattttcatcaagcatgtcattagtcaaattggcataaaattctttgacaatactttcaatatacccttcaaaaccagtgagagtatttttccattgatggtattgaacaaacttaacaataccatataccctataagcatgcaaatcttaattcctctcactttcaaacttgcgggtagcataaatattccaatcacgttgattatcatgatagtaaaatttggaatggacagtttgagatggagaaatattac

SEQ ID NO: 137489 - DNA, 642 bp, Cannabis sativa
gcacttttgccactaaaaaaaaaattgggtacttaagtcatataaatatggaactttgggtacttatgccgctattttctcattaaaatgtaataacatgtaaaaattattattatatatataaattaaaataactatattaatataaatatttgtataattggttattttacatactatgtagtatcaatgtttaaatcaattgttcgtatttaaagttatatgtaatttacacaaagagaatatattatactgttgataatgcactttttattttattttcttaattagtgtaaaaaaagttgcacaccgtcataattttttaattaatatattattagttttaaaatatatatataaaaataaatagagaaatttagatatgaaaagtttttttttatgaattattaattaattaatatttagtatatttgataaaatatctaaatatcatgttataatatgttttataagttattttcgtaataaagtttataatagtgtatgattatgtaaagtttcctaaaaaaaggtaagactatcctatttcttcagccaaccaataagagtcaaagactcttggggtaagttgaaaaatgccttttttattcatcaattaatcaaatttacctttaattttat

SEQ ID NO: 137490 - DNA, 2877 bp, Cannabis sativa
  modified_base (610)..(610): a, c, t, g, unknown or other
  modified_base (2419)..(2423): a, c, t, g, unknown or other
agtaggtgcctgcacccgttcaggattactcctgaccagttcagactcaaccattggtggtccaaactccttggagttggcagctttgggggtagaggggtttgcagcagttagctcctcggaaagatcaatgaccttccaggtaggcctcttttccttagtagaggacccctcatcacccttagacttcttggctggaggagaggcgctagagcttccgcctattctcttcctcagagcgttgagcttctgccgagacatgtctgcacagaatgaaaacaacgtggttagaaaacagacataagaaacataaggcatgtaaattaagaaggtcaaaaaacaagacaaagtaatatgcaaggtgactgcccgaacaagacttagaagaccatcatcacctgacatcgatcttattttaaacataacaactttcccttttccagacacgggaggggatggccgaacaggtgaaatgggctcccttatgcgaatcgcatgttcaacaggcctgggcagggccgagagtttcttctttctcttcaatggggtcacttgctattcctcggcttcatctttaggatttaagggctcctgagcatactgcttggcncttgcacctcccttcaacttagcctcgcgcttaagttgactgagttcattctcctgatgagctcgttcagtccgggcggcaccagatttcctcctcttccccatcacggatataggagtaaagttcttgggataaagcctgtacctcacaaagttatcctcggaggttaactggataatattccggtcttcccccggctgccgggcaagtttttgagctctgtccctaagagcaagagtgaagggaggacggtgatatgtcagaatctactggaaccgagtgcgagtgatgcccgcgccatccaccatgaagtaatcatcaacaaaatgccctatcttattgatggtcgtgtcattcgtgccagtcaaccacttgaagcttggttgagagaaatagaagtaccccgaattgccttgcttggaggtggacttcaaatcaaagaaccaggcaacttcatgaggagagggagtaccccactcttgggaagcgtagaggacaaaaagggcagataaatacttaatgccctttggagtgaactgggccgggcaaaggccgaagaagttcgccacatcctagaagtatttttgcaagggcatcaacgctccttgctgaccatgggcaccctaccaggcacacatccttttgtcagggtttgtggcatgattgttgtgggtgggaatgtagcagtccagctcgcctaggtatctgccctggtcaagagttcgaaggcgcgcctccgtaatcttggacggaaggcttacccatctggctcccaaggcaccctgccttctatgaggaactgccgcagtgagctcctcactgacgtagtccacgcccttaaccaggacgtctccgtcagcatcgattcgctccccagcctcattgtactccccgtaatttgggggtttaacgtttgcctcttcctctgcctcagagggactgccaggacgtacatcgtccaactcctcgatctcctggacctcagcgtccccttcatgatctcctccatatggacggccgaatcctattcggcactgggcagagtggcatgccgagccacttgaggatcagatgcgtcagccagacgcacggttttctttgtacatgccatcatcctgtggctaggtacaagagttggagaaggcccttcgctagaggaaggtgggctagaacaaagacgaggatgatcctcgtgtagaagttgaagagattcctcgtcgatccgatgtccgtgttcccaagactatcctgagttcatatacaaaagacaacacacgagatgagtgtttggtcggaatatttaacgataaacaggcaaatatgtcaaccaggagtactcaacagattaaagaacaattatgttcaaagaaaagtcagaactcaagaagttaaaatttttcttgagttagggagaaaaaggttcatgaagcttagaataagcaagatgaaagatggacgttatgtagttcagaaataagcattatggttgtaaaatcgcacgaagacatgagaaaaaagaatcgcacaggtttctaaaactagggtttcctaaacatttttttacggcacagtagaagatgcattcaaaatgtaaacatgcagagataagcatgaaggaaattagaaactaactcgagagtcaaatgtatgggttcgaagtaacgtcaatccaacaagcagtttgtatgaaggcacttcggaaaatttaaagccaagaatttctcttttcgctctgaaggttacttagcaaaagagggtgatgaaaatgagtttatgtgccaatgctgttggtatttataggcaagtcannnnnagaggtaattgtctcaaaggaacctcagatgcctctgtttccctccttgaaagcgaatatgggaaataaaaaataatcaagtgcagccgtcaccgtggaaagagaaaatcggattttgaaatattaattgtcagagcatttattagctgaaaatcgaagggacgcccagtcaacctcacatcgagtctcgggctgtcgcgctcgacatgtgtccccatccaaaggcagaaacagctcgaatgaagtctacaaggaactccggaagtcctgtacagtacagacttgaggggcaaatgttatcccaatttttgcactctgacttggcatcagatgaatggtgacaagtggaacccacttggaatatctgcccgggaagcatagtctgagcaggacatattgctggcacgctcagagcaaagtatttagtaatccgcgcagagtaaccaacacttag

SEQ ID NO: 137491 - DNA, 969 bp, Cannabis sativa
agtcttgaaccttctttgatgtgatagttgcaagtggttcggcttcagtccacttagtaaaatagtcgactgccaccactgcgtactgcatccgactttacctttaggcaactgcccgattagatcaattccccaaatggcaaagggccattgactttgcacctgtgtcagctcgttgggcggtgctcttggtatctttgaaaatctttggcatttgtcgcacttcttaacataggctctcaaatcttcaatcatcgttggccagaagtagccctgccttagaattttctttgataagctctgttcggctgcgtgatttccatagaatctgtcatgaacttcatatagaagccgtgcagcttcattttgtgtgacgcatctgagtaatggcatcgagaatcctcttctgtacatgaccccttccactatgatgtactgtgtcgcctttcttctcatttttcaagcttcattcgattatttgggatttccccagagttcaggtaggtcgctattggcgtcatccagtttggggaagtgtcgatcatttcgatttctttcgtgccagtgatgctaggctcttcaaggaactggatagggaccaagttttccttgtcacttacattgttgcttgccaatagagccagcgcgtctgcatttgtgttgtcttctcttggaatttatctgagaccgtagcttttgaattgtgcgagtagataatgtattttgctaaattatgctatcattttttctccccgagccttgtatttgccggatacatgatttaccaccagctgtgaatcactgcagatctcaatgtgttcggccttcatttccttgggtagcttaagtctagcgattagggccttgtattcgggttcgttgttagaggccttgaatccgaatttgactgcagcgtgcgagggcaattcttgcaccagatagttgatctgttgccgacccatccacatg

SEQ ID NO: 137492 - DNA, 683 bp, Cannabis sativa
actaggctctgtctcggtcgcatcttctcgcaagttcacatcaagcaaggtgaactaatcattctttctgatcgcactagtttctgtgtccatacttcttctttctacagttaacaacatagtagtggatacttgcgacaaattatcttttcctgcgaagactgactccacgtggtaacttttcacgagattgggctcatatttttaggtaaaaaattcgcactataacaatgatcatatataaagtgtgaaattaatcaaacatatatgaaatatgaactatgaactaaggattcaaacctctagctattgatttttttttttagctttaatctcacacaagttttggattcacaaaagaaaattaaacttagttagtgtgagtattcagactttcaagctctctctactttctttagatgtatttactgtgcttcactaaatgaatagtgagctcagggaccgagaccctatatttatataagtgagacctttcatcaaagtctctgccacattaattgtcagaatattttgacaattaattctgaaaattaaatcgagtaactgaaatatttagtaattaaatttcaccataattataatattttaattaattattaaataataaattatattacgggtttttttttttattttttatttttacacttgaaaacagtttt

SEQ ID NO: 137493 - DNA, 551 bp, Cannabis sativa
agctagggatctcaggcttagcaacagcccccatcggccaaccttgggctggccaggcacattggtgcacctctggctggccaagggaatgatctccctccccaaggcatctaggagcgagcaacccaaagtctaatcttcacccgactagagtcgggaatgggtggaaatgcccaaaacaattgtgaagtgagagtaatcattttagggatcaagatccatctaactgcagcaactggtgcaatctacctcttgtcaacacacgggttacatcagccaattgggggatcatgggctaccaggacaactgcaaagcataagcttggccggtcaggaccaacctccctacctaggagtggtcggccaaggccagcaacactgcacatgactaccaaccttccaccatacacgctcctagagtatggacagccaaaccctagcacatttgagcctgcaacccatcaaaggagggccagattgtcaagtccttgcagcaacggatccttctgtgcaagcacagttggatgaaataagggacatggtcaatggct

SEQ ID NO: 137494 - DNA, 1099 bp, Cannabis sativa
aaaagaagacaatttaaaaaagaaattataaaagtaaaataaataaaaaatgtgtaaaaataaaaaatatatatatcttatggatagtacaaaaaatgtaaaaaaattccataccaccacaatataaatgtagagtttgaaagaaatatacaccactagaaaaatatgatttagaggcacttttttaaggcttacaatgtcgattttgaagaaattcgctatcaatgctattctaagcgacgtcatagggtgagaaaaaatcgacaacataaggactctatggcatcggttattataaattaactaatgtcgtaggaccctataccgtcaattattattaaataactgatactatatgattcttctatatttttttagctttataattttgtattattaaaatcttatttacttatttttcatatatatatattttgttaacacagattttttttaactaaatttgaacctcacagtagaaatttcacacagaaaaataaaagttatagacataaagatttgaacacaaggttttttacgtagttttacagttaaaattttgtatagtccatgggtcaatcttattcaaatttctgattatttttttaggaactctcccgtatgagttttttcgtccccttttttgatattgtttgtcactattgataattacatagtggacagttaattacaaagttgaccggaatatgtttacaacaatcatccctaaaattgggggatttgattacatatcacgtagtgtaaatgtggtttaggatttgaaaatcatatagctgtgattttcccggttttactggatcaagacaatcgtgtattaaacacgtctttagttgttgcatctggtgacgtctcgacatagacttggttccaatgatctaaatggcgagctgggacccttcttccttctgaggtcgaaaatgtcttgtgttgatcccagttcttatcgtcaaagaattcctagaggctcatttgaattctccatttgggctcgctaggaagtaagcctcgctgacgctaacggatgaagtcttcccataacgagacggtcacctctcttacttgttcttgagccgatctg

SEQ ID NO: 137495 - DNA, 548 bp, Cannabis sativa
  modified_base (51)..(52): a, c, t, g, unknown or other
aatgttaattctgccgtgtggcagtaaaattgaaaagtattaccccaaatnnagtatttttgtaaaatgcccaaaatataggggagctcttaaaaatacactattttatggtatttttccaagaatgtacttaaaaaagaagctaattacaaaaatactgtaacaaatcttaattagggtgttgataaaatagttaatccaattaaatctgcgcgatcaaatccaatccaatctttaaagtgtagatcgaatattaattgacatataaaaataactgatatatctaactcacacatatttatataaaattttaaaaattatatatacaattactatttttaatgtaagaaaaaaatagtaaattaaaaatctaatacatataatacaaatatatttgaaaacttaatagatcaaatgtatatttcatttttatatataattgtttgggattttttatttttacactttaaaataggttttttttttttttgcatttttatggaattctacatagaaacccttacagcaactaacgaagcaacctaaat

SEQ ID NO: 137496 - DNA, 734 bp, Cannabis sativa
gttcatacaaaaatatttaactcaaactcaactttttcttttcttatttttcttgttaatttttttttttaattcttcttttttaccattggaataatctcagcccatatatataaaaatgaaagatttttttaattagatagaaaaaattaagcataaaaattcaaaattttctaattttactcattcatgggtaatacttattaaaagtgcacccttatatatacatatctctcttaaattaaatatggatatacaatagaaaatattattcttttaatattaatacaatttaaatttaaattcactgaacatctaaaaaaaaatatatttctattattatttgttttaaaactctttgcacatattcaaaaaatatctttttactattatttttttatatatttttaaaaacaatatatttctattattattttttttaactcactgcatatatatcgaaaataatatttttctattaatgtttttttaaaagaataaaatagataaagtgtttatgatatgtgacttcgttacctattgttgttacaacaaaaaaattaatttttctaaaactaaaaataaaaatacacataatcaaaataaaaaaaacctaagaatatataactaattataaatgctaacattacttagtatatatatatttatagagatttatggctgttgcccctaattttgcccaatatacgtggaccaaccacacagggacacgt

SEQ ID NO: 137497 - DNA, 607 bp, Cannabis sativa
agtttggatcttctaggccagtagaagctggaggatctgttgtttgaacgggaggtacatcaacagtttggccggaggtagaagtagccacctctggttcaccataggccacttgggaagcgcagaactcgaggtacatgtccttagcatcacccaagtagtcaaatttggcctgaggattagccttccaaaagttaaagaagagctcaagactggctgtctctagagcattaaccttctctttcaactttgtcacctcggccgaaagctcctcctccttagacttcttctcctcttccacccgacgaagaattgctcaaagagaagtcctctcatcctgaagactattcacttcagcggataaggtctcgatggtctcttcaagacggtcagaaatctcgagatccttagtcagctcagctatcttcttctgggtggtaaagaacctcttattggcttcacccagctccatccgaacagctctaagctctaccctgtcgtcgtcagcgttcttcttggccaagtccacctccgccctcaatgtgttggacagagctgtgttcctggaaacagcagacttagcctgggagtaggtgtaggccaactt

SEQ ID NO: 137498 - DNA, 901 bp, Cannabis sativa
gcagaccttgatcgttaaatgttgagcatatttgactcgagcctcggattgatttccctgatgaattgaagagtcacttggcattgtgggaagagttattcccaactttgatgctgcagtctggcctatttgagaatcatgaaatgatcatcatgcctcaactgaccgtctcagagaggcaagttagaacttttagttcaaaagtcatcaacgggagcattgcacgacagaattgattttttattatttaacttgaatttaatttgcatacttttatttatttactttttattgtctcatacagcggtgatagcgggatgtatgtgatagagcacatcgagtatagtatgccagatcttacgtttaataatgtgatgacaatatgaagaaatttagagagcggtggtgtgtagatttgttttaccagaatttatcatgaacacttatattttttttaattgatatttattaaaataacaatttaactagtttcttttattggtatgtttatgttctcttattagttaataataattttaggccttcctttcatgccacaaattataataattatctaaacataaaatatcataaattttaatgtttaaaaaagtccacatgaattcaataacaatacacaacagtacaacacataatagtacgactaaattaaaattcatttttaacctcggtaggtgcaagtgcttctgttgtgcccctttgcaccgtacttgccacaatttcgtggtataataatcctttcaccattacaagcagttctttttgacttaattcttgcaaccttttgattcttgggttgccctactggttgcttctcaacacgcactccaactgtcatgttctttatgtcatcaggtaattcccaatcatcctcgtcacc

SEQ ID NO: 137499 - DNA, 1507 bp, Cannabis sativa
acatacatggtagtaaatctggatcctagtaaaacatattccaacaatagatcttccaatgtataaaccgccaattccttatcctcataggtttatgaagaagaaacttgatgaggaatttgctaagttcttggaaattttcaaaaaaaagtcaacatcaacatttctttcattgatgcattagagaagatgcccaattatgttaagtttatgaaggaggtgttgataaagaaaaagaaatttgtggattatgaaactgtgagcttagctgaggaatgtagtgccataattcagaagaagttgcctcaaaagcttaaagatccaggtagcttttcaattccttgtgagattggtggtttaaaatttgagaagtctttaagtgatcttggggctagtataaatttaatgccattttcggtattcaaaaagttgggtattagtgaagtaaagcccacaacaatttcattacaattggtagatcaatcattcacttatccaaggagaattatagaagatgtgctaattaaagtgggtaagttagtgttgacatggaagaagataaggatatgctattgatccttgggcgccctttcttagcaattggtggtgcacttatagatgttcgatgaggccacttaaccttgagtgctaatgatgaagaaatcaagttcgatatttataagtcttctaatcaagctgatattgagaatacatgcaatatgattgagtcttgtaattccaatgaagataatcgaaagactaatcataaagaaaagacaaagaagcctcgagataaaaagaaaccaaaggaggagttttcaataggtcaacaagtgttggtgattcattcaaaattcaaatatttgataagtaacgttatctcaagatggaaaaatcattttaatgtcaaagagttacttccttgtggccttgtaagtattaaaagtgagattctaaaggttcacaagcgtaaactgaaggcatgcactaatgagctccgacgatcttattgaccacctaagggtcatgatgacgttccacctgctattgatggctatgttacagttatgcacccgtagtcctagctgctatggtttgttttctctcctttaattttattgcataatggggacactttttagtttaagttcgggaatgggaaggcaattttcatgtttttaatttttttcacttttttttaaaaaaattattttggtttttatgggtagattcaaggttttatttattattattggatgcctgtattaacgttaacttatgacctatgggaattcgatgatgaacttatgctgaactctttgatattatttattatgtgtgaaaaacttttggattgtgtgcttaacctattatgcttgcttttgatattgtgatatgagttatgtgttattatacttgttctatatattgtgattttatgtgcctatgcagacttgatttgacttggttgatattgagataactagaacttgtgtgattaatttat

SEQ ID NO: 137500 - DNA, 838 bp, Cannabis sativa
tagaatagtccaagtggatccttgtcacagaatataaaactcatattccatacgtaaacatacagttcggctccattgatagattatggatattatcaacttgtaaaagtcaaattgtaatgttcaatgcagtcttggaaactgaaatttaaaatttctatttagaatctaaaatttaaagtcaaagacttaaatttatatcaaatatatcttgactaatgattctttcttggaccaccactactaatctaattctatgtttaggttgtatacagtaagcatacacaagtaggagattttaagatcatggatttaaatcatttcgggataaaatgttagaaatatagtcatatgcgccattcaatttcatagaagaaaatagaatgacatcataaggaaatgatttataaacaatctatctaatgatatactatttaagcaaattctaaatgaaaaagctaagaggaaaaactaaaggataattttgattaaaaaaagaatcccacgatgtctcgtttaggcaagagtcaaagttattcttattttataaatctcttcattatttcatattataaacactagtttaagttgtcatctttggatatacaactagatgctgcatttacaaatacttatctgtcaagatctaacactattatgtttgtgtaacggatgaaaatcctttgagatttgtcccagtaaaacaacaagttaagttagactaacaatgaagattcaaaattaaaattacaacaattaataacagaaaaaaacatgattcaatataaattcatgcacattcagaaattatcatacattcagcaagtaataaagacat

SEQ ID NO: 137501 - DNA, 523 bp, Cannabis sativa
ctgatcagactagctcttggttacataggctattccagtagtatggacgccaggaaaaacaccaggagtcagggtaactcggtcggatccagtggtggtcaagtagttcagattccccaaaatgttcgtggccgaggtagaggccctagaggcagggcgcgcggtcggagtgatgttaactcgccgtaggctgcctaagaatgggaaaataggtttgcaaaaatgcaagctagaattaatgagcaagatgaagaaatcagatgtttaagacaacatggtgctgctacgatccctgctccagaaatgcaggtagctcccgtccctgctgtacagggaggacctgttgttacaatgaactaaatgaaaccattgtatgaaaggtttcgcaaacaagcacctccaatctttcttgaaggtcccaatgtaatgaaagccgagcagtggctaacggttattactagaattttgaatttcatgggcgtcaccagtaatgacagactggcttgtgccacattccagtttc

SEQ ID NO: 137502 - DNA, 632 bp, Cannabis sativa
gggtctgacgtgaaaaaccagccaaaaatgacataaaatcaaggaaaacttaggggtttgatcgtgattggatttctagtcgatctacggtactaatttcgagtattaatggctaaatgtgtatatcttatgtaaaaggcaatccaaaaatttgaagaacataaataaattgattgtaataccaatctccgtcaaatcacaaaataaatcatgtaagaacattcataaacagttgataatgagatattgataatcaatttcagatcaaaaacaataaaatcaaaaacacaaaatataatttcataatataattatataaaccctaaaactttaaatttaaaattctcataatatactcaatgatttcatacatataatatatcaacagaacgagaatttaacgatgaataaaactcctaaagttttaagattcaataacaaaaatttgatcatttatttattacgaaaataatatgtaactaatgataattaacatatacaaattaattatacaaaatataggtcttaaatcatatacaaaaggcaatctgataccacatgttagataaattaaccataaacccaagatctatttgtatataatataaaacacgataacaatatataataat

SEQ ID NO: 137503 - DNA, 1244 bp, Cannabis sativa
  modified_base (695)..(698): a, c, t, g, unknown or other
atctctacctcagcgtcctcttcatgatcctccccctcctgggcgtgccaggccacttgagggtcagatgtgtcaaccctacgcattttcttcttagtacgagccatcattctatggctggacaaaagatttaaggaaggtgcctttcactcgaagaagttgggttagaacgaagacggggatgatcctcgcgcaagagttgaagcaagtcctggtctattcggtgttcgcttccccaaaactcacctgggttcatctacaaaagacaacacgcaagatgagtgtttggtcggaatatcaaacgttaaaacaagcaaatatgccgaccaggagtactcaacaaattaaagaataagaatattcaacgaaaagtcaaaattcaggaagtttgaaattttctcgagttagggcgaaaaatttcatgaagcttagaataagcaagatgaaagacaggcattatacggttcaaaaagcaaagcatcatggacgatgaaatcgcatgaaccacgacaaaggaaaatcacagagtttctaaacttagggtttcctacatatcttctacagaaaagtcgaaggtacattcagaaagtaaatgtgcaaagtaaacataaaggaaattgagaacttactcaaggatcagatgtctggattcaaaatacgccaagccaaacgagcagttttgatgaaggcacttnnnnaaactcgaagccaaaaacctctcttttcgctctgaacttacttagcaaggaaagatggtgaaaatgagtttgtgcacaaatgctcactggtatttataggcaaacaatgaaaaggggtaatcatttcaaaagaaccttagacgctttggtttccccctaaagagaatattggaaatcaaaagtaatcaagtgttgtcgtcaaccgtggtgagagaaaatcgaatttcaaaatattaattgttagagcatttattagctgaaaaccgaagggacgcccagtcagcctcacattgagtcgagaacagatgcgcttgacatgtgtctcccattcaaacgcaaagatagctcggatgaagtctacacgttccttcggaagtcccgtatagacttgggggggcaaatattatcccaatttttacactctcacgtggaatcacatgatggtgacacgtggaatcgactccaagtatttgctcgcaagatatagttcgaataggatacctcatatggatgctcaaagccaagcgatcaacaatccgcacagag

SEQ ID NO: 137504 - DNA, 613 bp, Cannabis sativa
ctatagtgtctcgcacatgtagccaaaattgttcttttaaggtaaaatttattttattacatttagttactactaagctttaactccatgtgtgagataaatttatcaaaaataaatatatagacaagtgtgtttggttttatattgtgagctatttgagtttattatattagcagctattaagttttaactttgtgataaaattttaataattagataaatactgtgtgtgttgtaattgaatttatttaaaaaaaatagtaaaaacttattccattgttttcgcactcctctctcttcctttttttgttccctcgttatctctcatgattagcatcaacattacatatgcttggggggattttgattttagggcttgcgtattgtggtgattcaaactcacttttctctctcactgttgattaacaacagtggcaagattgaactcaaacaacaacatcttggacaagaaacataaaccaaaaaaacagagatggaaactagagaaatattgaacaaacaacataagaacttaatgaacacttgaaagaaaaagaagcaaagaactcacatccactttattccttaaatgatcattgattgtacatggaga

SEQ ID NO: 137505 - DNA, 946 bp, Cannabis sativa
taatttaagtttttttttttaagtaaaattactatttttattaggttttttaataatttttattattttttcagaattaatagagtattataattttttttagtaaaagggagcaaaattttgtattgataatagtttaggagtaaaaatgcttttttttaacggtaaaaaaaaacaaaacataacaaaaggggcataattatgtaactgttttttttaggaggaatttttaacaagctgtatattttaagaggcaaaatcaggtagtgtcgtaagttaaggaggtaaaaatgctaattattttgaaaaaaattgataaaaaaatcattaatttttttctcatgttacattagaatggtttatccttccatttcaatagtcattccaccaaaatggtggaaaggacattcaattagaatgacattccaatactttaatgcaaccgatcaaaggaatagaatgaaaattgtttcctttccactccactccattttattatctccaaccaaacaccacctaagaagtataaaagatgaagaacaagagcgagacagagaacaactaaagagaagaaatcttaatgatcttacacttttataaataatcttgaccaataatgaatgcctaagcctttttgtagaataggcaaataacaatttgttttgttgataatattagtaggctgcataatgttaggctacggattaggttgacttagtaagatgaagccaaaaaactaattaataggattatgagcttgttagctttacttctacttattgaagtttatagttgctttttggatagtctactttaaaggagcttatcaaataataatatatatatatatatgtataattcgtaatgggtattactcatgaatgggtaaaattagaaaattttgagtttttgtgtttaatttttttatctaattaaaaaaatctct

SEQ ID NO: 137506 - DNA, 1077 bp, Cannabis sativa
  modified_base (376)..(379): a, c, t, g, unknown or other
tatattgaaagtattgtcaaagaatttcatgccaatttgactaatgatttgcttgatgactgaattttttggtaaagtctatgtttggggatattggttttcttttattatcaaggacattgttgtggctttgcaactacccgaaggtgtgtcaaatgctatcatgtctatggattgccatttgatgctcactgaactcactcgtgcacgggttgaatggaaatctaggcagagtcttcgaattacacatctcacttatgctcatgcatcactcatgaggttttcacttagcaattggcttcccaattccaacaaaaccgtggtatctcaagatttggcatcttttctctttcgtatcacctcgggggcatccatnnnnctggcttcttcaatcttggaccagattgcttcatttcggagaggtaaaaagcatactcataagcttgtgtttcctaacttaatctataaaattttgtcctctcagaaagatgtggcctactctcatgaaacacttgagcctccccttactggcaccatcttccaacccttggagtattttgatggaacttttcccaagtgtcctaaagctggtactgctgctgctggtgcaagctcgaatttctgctcctgtaaatgtccaggaggtcaagcatgaggtttaacaggtgaacaatcgtcttgctgccatggaggaggttcaacaggagatgtccaagcagctgtcattattgatcaagctatatggggcataagttctcttttatttttatgtttttgttggacatatttttatcttttcatgtttttgtctttggcccttaaataaacaaaaagggggagtaatagtttgtttataatttcttgtttcccaactttggatcctttttccagggggaattgggtttagtacttgtgattacttggattaaaagttagcttgttatttcgatttttgattgtgttactcaggatgagtttttgtttgttcttgctaactttgatttgtaggtacttctttgttaaaaaatattttgattatctaaagtgtcaaagagggagattgtaaagtcatttttt

SEQ ID NO: 137507 - DNA, 535 bp, Cannabis sativa
aggacttagcctgcgaacccacaaggcatataggttagagagtggtcaaagtattctcaagaccgcatttagggtttattaacaatttactcatatatgatatatatcttaaacaatttgctaaagtaaagcttatagaacggtgagttgaacgcgacactagcttgattgtacatatcttgatggtcttcagttgacaacctagtggctctgataccaaactgtaacgcccgaatttgaaatttactaaacttgaaagctaattttaatatattataatcaattaagtataaaggtcgggatcccgatttataaaacaccttaaaaactatatttgttaatacaaatccccttgaacatttttcttttaaaaaaatgacgggcaacacaaaatacaactcaaaatattgaaagaccgaaacccttcaggttgcactatcgtgatatgtacaatcactgccgagctccatctcactgttcctccagcttagcttttctttacctacacaaggtagcaaactgatgagtcaataga

SEQ ID NO: 137508 - DNA, 745 bp, Cannabis sativa
aatgatcactttcatgtttttcaatcaaccttatttaatcagatgcacacacaaccccattcaatccattcacaaatctcctatcctatcaataccatttgtattaggtatcatcaaatttaagttttgacttagaataaaacacaaatattttctggcaagattctagtattttaatcactcgccaaatatttagtcgttttttgtctttgattgaagagtgaatttggaaagataattattcttaaaagttgcttgcaccaccaccaaacttaattattatatttttctatgaatatgatgtagacttgtactcataaaatgttcatagctggagatttaactcttaattttcttagttatatgatgctgctcttttctctgtttttccttcgctttttctcacgaaagtttcgatacccacacctcctacctcggcccctaatcgtcgaacacccagagattgaaagaacaatcggaggcccatttgaaagaagagaatagattagagtgtagcagtgggagattttctgttgaggctattaatctaaatccatggaaaacaatcccagaagaatgtgtagaatatgtgagaaattacattactggaagggaatatagtacctatatccaaagggcatctagagaggcagctaattgcaaaaaattgcaaaaaattgcaaaaaaattaaagatccctatttaataataaattacaaattattaattaataattatacttaat

SEQ ID NO: 137509 - DNA, 731 bp, Cannabis sativa
tggtattcttacaatcaactaatagcttatagcttaaaggtcttgggttcgaacccatgacctctcctttttcccattcctccctcaccactaagctagccttagtggcttatatataaactaatctcaaaagaatagcatttgtctctaaattataaagagagtgcaaaagagagtacaaaagagagtctccttattacccttctatttttttaacggcttttttatttttacgcttcaaaatatatatatttttttttgcatttttgcagaattctacatagaaactcttattgcaactagcgctgcaacctaaaatgcaacaaaaaattgtataaaaacccctattgcaactagcgatgcaaccactttaaaaacccaaaccataaattttttttaaaaaaattaaaaataatatatgaaataattatccttttttttattccaaacataatactcaaaatcacactaaaaaaatatcgtaatatttaacctccacaaaataaaactctatacatatataaatcaccaaatatggtgattgattggaaaagttctaacaggagtatattaaatttagtgtcacaatatcattaaatttaatgtcaaaaattatttctaccctaaccataatactaaaaattacattaaaaatattacttattattatattaattttgtaataaaataaaaataattatagtattcacatttaaatttacacacaataa

SEQ ID NO: 137510 - DNA, 827 bp, Cannabis sativa
aaaacaaagacaaaataaaggaaataaaattaaaaaggaaagctgccaattgccttggaaaacgtgatcagcttaatttgggactaaattgagtctagtttgatgagaaacagaaattttttctccccttcactcttgacaacggtctcctcttgttttaaaattctgttgagtaagtttttgagttcttctttgaatttctttgctcgcgccctcatcactgggccaactataacattacttgtttctttagccttagtgttctcatcattcccccctcttgaaaaggatttgtcctcaaatcttcacttgcatcaaaagggctcaattcagacacattaaaagtaccactaacattatattctctaggtaaatcgagtcggtaggaattgtcattaatcctttcaagcaattgaaacgaaccatctcctcgaggtagcaatttggaacgtctttgggctgcgaatcattctttcttcatgtgtaaccatacccaatcaccgggctcaaaaacctgcttgtgacgacccttgttagcttgctttatgtattgctcggtccttctttctatgttgagtcgtaccttctcatggatttgcttcacaaattctattttctttttgccatctaaatttaaatgctaagaaacaggtaaatgtgatagatctaaaagagtcaaaagattaaaataatgaaaaataaatggtaaaccctttgcatagtggccgaccatatgagggaaatgagcctcacttagcaactttcccattttgttatttttcaatcccgttttctcaaaaatgctattttctaatttaaccatttaa

SEQ ID NO: 137511 - DNA, 1329 bp, Cannabis sativa
ttttttttaattttttttaaaaatgggatatttactaacttagttttcaaatttaagaccattttgcatctcaaaactatattttaggggtcatgacctctatatatgatattttaaaaaaaattacactctatatctactttttatttcttattttaatttttaccttccatttattttatttttaatttatacccagttttataggttatatccccataattttgataaattatgtgaggttatatttggtactttgattatagaataggatatttatcaattaaaattattttggagttatatttaattaatgtgtaataaaaagggatagtttttaacttatccttataatgtacgtctacttggatacttaattgtactaatagtcatattaatacgtacccaactccggaccccggcttcagacccggactccgacctcgaccccgactccgatccctgacctcggaccctgaccctgacctcgaacttgggtcgaacccagctgtttgtagattgtattgtattgtattaaataatactaatacaatccaagacaacactgtataatttaatactatacaatttaatacaacacaatgtaccaaccaaactccaatatttttaattatttgttttctctattccttcataaacaaatcatttttattctggaaggattattgaacaaataatgacttttttagacggatagtaatttttctttgcagcggtagattcaattgatctcttttacttgcagggaaacctgaatctaaacccactctcgttccattcaattcttacaaaatatttctagacttgattaagagttttgattatcattatcatttaatcatttataattgtttcacgtataatgctaataaaaaaaataatgacaataatatctttcgttattgttttattacagcgatgtcgattttttactattaagtggcagctaagtttaggggtgtgcataaatcatccaatctaatgacaaccgaccgatttaattacaaccaactgctaaacattatatatatcccaattggattggatcggatatttgatggggtgtccaaaaatccaatacatccaacatctaattgaacacattaatattttcgtttggtttgaatgagtaattaaattttatattattatacgtaaaatatgtatgtatacataaaaattattaaaattttacttttttttttctttatttggaaggatctaatcagatccaatacatattagacctaaaatatcggatggattcgatccgatctaaaaaatactagatctaaaatattgaataaa

SEQ ID NO: 137512 - DNA, 531 bp, Cannabis sativa
tgacacttcttcaagattttgaagaagggaatgcacttatctgtggaccgggagataaaacggctcagagcagcaaccttttcggttaggctctgcacgtctatgtatttctttggggtggcatgttcaggagggcctgaattttttttggatttacctaaatccctctctggctgacaatgaagcccagaaacttccctaacttaacctcgaaagtgcatttctttgggttgagcttcattccgtatctccggaccacttcaaaacattcttctaagtcgtccgcgtggctattgcacgctttagacttgaccagcatgtcgtctatgtatacctccatgtttcgccccaggaggcctttgaacatccggttaaccattctttgataagttgcgccagcgtttttcagtccgaaaggtatgactaggtagtgcacggtcctgaagctagtgcactcttgatctgctacgtgcatttttatttggttataaccggcgtatgcgtccatgaaggacagtagtttgaatccgg

SEQ ID NO: 137513 - DNA, 765 bp, Cannabis sativa
caagttttttctgattcaagtgctatcacaaatccagttgggagtaattactaacagattgtgtcctacttacggacctcgtcttgctcatggacttcgtccttgagtgacttacagatttactggttcctgtgctttctagatcattagaacgacgaccactctctcctcctcgagttgatggactgtgggtccttgagcgccccgaggtcacactggcttcttcacgccctattctcccccctgagcatggtttgtcatatttcccccactagggtttgtacgagtcctctctctataggttcgagaagaacgatggtgatccctcgctggtgaccaacgttccctaggttgcgtcccagggtcttcctcatttcctcaatgaatttcctgttcattagtttctggttgcctcccattctcattcctacgagagggttctggctgatcattcagatttttagggggaaactcattttccccaggttgttcttcctgagcatttttctatctcctggttcgtgagccacgaggttcgcctcgtggtcttctcactctaggttcaagttgattttgagtgttattcccctgtgctgccctagctacagcttcatcacgctctattcaacgttttccaagttttcctcctccaggcgacgcctaagatgacggttttccatttcataagtaccctcactcgtgggctgagcaccccccacgatggggcccttcatctctcactccaggattttggccattcccatg

SEQ ID NO: 137514 - DNA, 789 bp, Cannabis sativa
gaatctctactattgaaggacatcatgtaagacagtagttagcacgtagagttatgcgtggtggcacttatattggaaatatatatgtgataaatcaataactaggattagggttattaccctaagatgagcggtttaattgcctagggttattaccctagtgatatatgttgtatgaaagctatgccatgatatatatatatgggtatatgaatatataagatttagggttatgtgttctaggcataaccaggttggactcggtaactagaacagagatgaaccattctaaggccttattgtatttacacgtgtgagtgcaacacgtaggtctacgctacatggacattaataggcatgtgagcgtaacatgcaggtctatgccatacaggcatatgagaatggcattactttttatatagtgtgataaacatgttatagatatattatgctatcttgctgggcttggctcacgggtgctcaactgtgcaggaaagggtaaacttgtttctgatcagccatgagtgtgggaggtgaacggtgaatgtacatgtttgggccacactagaccgagcgggttggggtatactagtgatgtattttgaaactctgttttgccgcttaggtcggccgatgtaaaaaaacttgtaatagtgttttgtaaatatttttgggatttcaacttttgtagtatttagtttgtaaagtttaaattattacaagtttattttcattctgtttgttatcaaagtttaatttctgcggtaattttattagtaatctcaccta

SEQ ID NO: 137515 - DNA, 620 bp, Cannabis sativa
ttttaagttataaaactaatgagtatatactgttttatttttagtttttatgacattaataatgacaataaaaaatacaacttttggtttttctatgacattttacttatcattctacttttaacaataccaacactaattaaattccttcactattttctgaatgatctatttatattctcaatatatagagaagactaaaagttgatacattgaatccaatgaacccacccattaattagttatccattttcaatacccaaacaactatttaacttcccaaaacataccccaaagactataagattacacataaatacagcagtaatttgttatagacgtaacattgattctctttcaattcacagttttcaactttttatggctcaaaatggcaacagtctcggtccggcggagaagaagagactgaaaatgacatcatcatcaccatctgctgaggaggatgacgaggacagaatttctaaactacctgatgctctcattctacacatactctcgtttcttcccactgtggatattgtttccacaagccttctttcaaatcgttggaaactcatgtggtatttagtccccaacatctctttctccattattccttc

SEQ ID NO: 137516 - DNA, 1129 bp, Cannabis sativa
attttggcaaatatttgtgtatttagaaattcaagatagagtttcacctatattgattttttctccaactatctcatcctctttttagttatatttatttatccaaatgatgaatgtctcatactaatattcaacaagataaattgatgatacaaacttcattgtggtcagttgctaagaagtttatctaaagaagtttgtcttctaatcttaattcaccaaaagtaaagcccgcgtctctctcacagtttactaagtgttgtattatttttatttttataaatagtatggtacaatatattaatcattatcaatggtgacttttcattttttttttaattaataattatttattatcaatggtgacttttcattttttatctcccactattattattattatcattattattattatgacatatttacttaataactaatctcatacctattatatatacctatatatatgcttctacaaaattaaagagattctattgttatgcaatatttgataatatattcattcatatagctttgggtataggtggtaagcatcatatttttatattatttttctttaaatttttattgtaaattatgtttttcactcaatagagaaaattatagaccatatactattatatacattatgtaatatacacatatatatatatattagttggatacaattataatatatataactaatctcatatctatatatatattttagcaaagatcgaagagaatttctactattttatatcaatttgatgatatctattatcatctagatctaacattagaaataagcatcgtatatttttttttttaatatacattaatcagatacaattataatatatataactaattttatacctatatatatgtttctattaaaaattgaagagagctttcactattttgtatcaatttgatgatatctattattatctagattggatattagaggtaagcatcattatatattaacaatattaactatttttttttataatgatccatatagaatttaccatttaaaaaaattataaatatatacttttaaaattatatttattatttaacgacacatttgtattttttttatattgaatattta

SEQ ID NO: 137517 - DNA, 639 bp, Cannabis sativa
  modified_base (49)..(51): a, c, t, g, unknown or other
tcaatgtaatctaacaggcaataagacatgtacgctaaacatgtaatannntatgcatgatattatactaatcttccctcaattctgaattcaggtgtgccggtcaacgtgagtggaacaacaggtcggcgaattataggctcctaaatcacatcgatacaaccacacataagtgactcgctaaatcacaactgggactaaggtttaaaaataaaaccctatctacagaatcttaatatactaatatcccaatctagcaagaaattaactaactagaaacctgaaactgacacgaaacgacaagctgaaaaactggttttccctctgcagcaaaatctgggtaactggttttacaatgtaaaaccggttagccgattttacctagaaaacctacaaaaaacaaacccctgcatattataccccaataaacatattccaagaacaaaacaaccatctaagctcaaaatcaattttcaccattaaagcttcaagcatgagctctaaaactcaaagcttgctaaaaccttcagacaactactaattcatgcttaaaacaacataataaatcataactaaacctctgaaaacaacatccaacaactacagcagcaaaaccaacaatcatgcaaaaatctcaaa

SEQ ID NO: 137518 - DNA, 1620 bp, Cannabis sativa
attggtactacctatatcaacaaggtgcatttgttttctggtagtccatgacgaaaatatttcatggttaagcgtgcttgacttggggtaatttcatgatgagtgaccccctaggaagttttcccaggaagcgtgtgagtgacgacaaagcacgctaaaaacacatgttggtttgtagggtcagtcatcagtctatgaagcaaccggagtgagatactcgtatataagagccatcattccgtggatgtaaggacccaatggaggcttaaagtgggaacgttacaaaatatatatattatactccaaatttggctcaaaaagtgacacgtgtcaatcttgtagaacatgaaccaaaataaatataatgataattatgtcattaaatgcaaaatggaagaactcattaaatatggaattaatagagtatattcgtaacttgttgactgtatagtattaagcgagatagggatatacaaactatcaattcatgtattgaggagaaaccatcttgcctcggaaggcataatctcgagacaatatatagcaaggcatctatctcgctacatataagaaagtatcgacgaggcgaattggctgttgaaatacttagcgtataacccacgttataataactaagtgtaatagcatgaagggcatgattatccagtctgcaaggccttatggtcaaagagcagttcttaagtttgctcagtacactggtgctcatgccattgctagaatgcgtataaaccaattcgttcgtctatgaacaaagcgagatgcctctgacgagatacctttagcgagatgactctaggccacgttcgtatccactactttgaagatgagagtaacaaacggttatgcaaatttgtagctatacacgtgttaaaataggatgtggtcaaagcccacgattctacgaatcagttatgtatttcaaattcaaatgtaaataactgacaacctatatacctataaataggggcagattataaaaaaagggacgaaaaatctttgagagaagagagatcactgattgtaaagacctttaattctgtatccagtaatatctgaataagatagactcgtggactatgtagagttaactacaaaaccacgtaaaaatctggtgtcattattgtttctattattcttcttctcaaatttcttatagtttctgtgtcaaatttatcacaaaaaaggcttattaattggttaacaaaaatctgcgttaacagtttggggctttcattgtgagcctacgtgataaaagctcagaaaaatccctcctaaccaaaggaaattttttttccatgggtgatcatgatgataacgataacaatcatcctgaagagactaaccgtcgtcctggaaaggaaccaatgggttcacggagaccacccatttcaagaacaacatattcaacccgttcaacacgtttgagaagaagccaacgtggtcatgatcaaaacccagaatctgggaatgaggaaaccaacactaatgctagaggatttgtacctatgagtgaaggagcttatgatcccactagatatgtaccattggttgaattggaaaattgcaaaccggcaacgtctagccgatgccaaccaacaa

SEQ ID NO: 137519 - DNA, 1181 bp, Cannabis sativa
cttcaagactactttgtcaatttccttgtttttgtcggccttgcgccttatcaattaattccacaagcttaccccctgctctcaagcttgtttattttttacgttgcgagaggctgggcttcacctaggccggccgaaattttatactttcatgaacttgtatctatccccaagaaaggggacaagtttaaagacggttttttcacctttcaggcccatcctttaaatgagggtccggtcccttttaatcatcaaaagaatgtaaaggagtaccaccatcactttttcttttcttctagcttccaagccgtggaccgcccggagcttctcacggagtgggtcaggattccccctcttctccgcactgctcctacccgtctgtttctccaacatgccaagaccttctccacttacgacaaaaaagacctcaacgtgggagacttagttacgatagaaaactgccgaatggccaaactgatctccgggagccagtcgctggatgacttcaatctctcaaaggttttctgccctaacatccgcaccccggccacagagaaagcgctccgggtggagattatagcctcagtagaggaccaataccagaagtacctctttaggagggaacataaactggcttatatcaaagctcacgttgtgccgggaggacccttcgcttggaagcaggcacagatcggatgccttccaggcctaagtctttggtcctggttcctaatactggggctcccgatgccagcacatccggctccagtaagtctcctttaatggtctatcatgttcctttagtccaagagtattcccggtataggcctgtagggttcgatgaacatcttcttcagtttaggatgccctccactcggtggggggatcatgccaaggccttttacttttccaatttaggttatttcttaggtcggtcccggatgggtttcagacctcctacacccatccctctggatcactcagcttacttgtcttctagctagtttctcccctcagacatctttcttgaggatgatgaagctagcattatagttcaagactttgctagggctgagttagatagtcaggataggactagctttattgttttattttcaggcgcatgctttcttatagccattctaacactttgtatgtttctttttgaagcagctaggcca

SEQ ID NO: 137520 - DNA, 588 bp, Cannabis sativa
ataggttcgatcctccaaccaatcccttttaattattttatgaaatagcattacatgcatatatttttacagaattaaaatcaaaggtactatatttttttataaaaaaaaaaaagtcaaagatactattaataataaataaaaaatatttattatgtattttttacattatttttaatactctattttatatttttctacaaagatactaaatatatagcactatatgaaatactcttaataattaaatattgctttaccaagatagtttacataataaaaattaactcttatatatattatataaaaaaactaaattgatagtgtcaatttaattaatatttaaatttttataaaaggaaaaagcctcatttttaattttgctttattaggctctcaacatcttaataggtgtattttaatacaaagtccaacacattgtaatttaataaataacataaaaaacaagaactttttaaaatattaaatggcaatgctcatacaaatatattgcatgtgttctcaaatattgtatatatattgcgtgaagcttattgcaccactaatcaatctaaaatattgatatat

SEQ ID NO: 137521 - DNA, 912 bp, Cannabis sativa
aaaagtaatttgcttaatttttcccaaactatccaaataaaataattctagatcaaaaatcatattattttttataaaaaattttgtaattcacaatcaatcatcaattaaacacataaactaacatgaacacatccaaatcaaacaatcatcattttaattaaaataattcataaccatgctcatagattgagtctacaagctaatattatctcaactagtgcggggaccatggacctatataatcaagcttccaataattagttctagaatttaccaagtaaattctctatcttattagttcctcctgactccactatagattcagaatcgcactcctaattatataaaatgctctatatattctaaatatagatacactattaattatccaatattttaattcaaataatcattgatcctctatttatgatctacatcgagtatgtgcaattttaccgtttacccctcaatacattttatccttaaaatacttagctcattgtaaatgatattttagtaaactaatataattaccgaaatgcgtactctaccatttaatctcacttaagtaagtttgaaagaagttatcgtttcacttctacgtatttatagaagctataaattctgtatatatgattagcgctcccactcaattgtactaccatgtatccaagatgtaagtattgaaaagatccatttagtcaactttaacaaacaagtcaaagaacataaataatacacttgaaccagaacctaatcatctcaggattgatatcattgatctaaactaagtgatatttacctagaaaaaatattatggtatgtttatgtagggttttatgccctaaataaaactccattgtaatccagattattcaatatcactaaagtaacagaagtatttttcat

SEQ ID NO: 137522 - DNA, 942 bp, Cannabis sativa
  modified_base (906)..(911): a, c, t, g, unknown or other
gcttgatatgtacattggctgcgaagactcgttcgactcatggcttagtaattgttaattgttagttgattaatagattaattgttgattgcattaattgcatgcttattagaaatgtttaagctattagggaagcatgataagttatgataaaattattaaatgtttttatggtaatgcttattagccttaattctagtttgacagattttgatgatggaaagaaatggatgtgagtcaactggaaggtgtacctggggcgatctagtaaggataatggcaagcttaccaggctcggagttggtagtgtgggtatgaattttccatttccacaggactaggagcaaatgtatgccatgaagtaagagattacctgaatggtaaggtagtagagcatacatggatgatccagggcagcgtggtgagagacaatatcactaagctggactgattggtaaagttttgttttaatgaagcggttgttaagactactaggaaggttgaatccaattgaaggtaggaatagtgtatcgctcgaaatgtggatatagtggttaaacaactaggagttgtttcgttttatgctcaagtggttgagctaacacttactgttgagggagtaacgattagatcaacaggatatagtatgaagaaagattcatgaaagcgaatgtccaatgttggatctgataagggtgtagaccctagtgaactcatggaaaaggactaacaacccaccagttacgggtcctagtaagaaaatttaaggtaaccaaagaatctgacgggtgggagcgaagacttacaaacccatccagagggtcaagatgcaaaagacatcagcaaagtgaatgctaaatttgagcctgcctctaatgtggggtagtagtgttgggttttatgccnnnnnnaaaactctatttcaatgtaatccagattatt

SEQ ID NO: 137523 - DNA, 763 bp, Cannabis sativa
  modified_base (370)..(371): a, c, t, g, unknown or other
atatcaagtgggggaactagggaatcaatctagatacgactcaaacgaggagcttgagccatatcatctagatataatgaataccccttttctttcggccttcaaaaacccacatgtcatgtcatatgacagaaccactcatctggttttgcatttgaataactttaacacaataatgcgagcgagtaatgtgacgaacaatttacgctgtattttgttccccacttcgcttgttagagcagcgagtagctgatttataaagtttactcatcattcagtaacctttgggagcagctgtctagggatttcaagaattagatctagggtgctagggatagacgaatgttgccaattgaaagatgagataganngtctcatcgctcgaggccattttatacagtacgtgaaaagatagggcgagggatacaaccagcccagtctgcccaataacccaaacaaccaggggttacaacctcttaatgttgaaggagaaaacatcttggttatttcaggagggccgcatatcgcaggggaaagcaataatgcccagaaaagatatgtgaaagagataaagaacgagcagtcggcatttgccccagaaccttccaaaaaggtgaaaactgaggaaccaccgattttattcacagaggaaaatgagaaatacgtgaggtatccttccatcgattcattggtgattaccattcaactcaccaataaaaggatcaagagggttttaatagacaatgggagctcggtaaatatc

SEQ ID NO: 137524 - DNA, 556 bp, Cannabis sativa
tcagagtacagacagaagtggagaagaaccaccgtggaagaaagcagaagacacagcttcgccggagaagacgacgcagcgagctggagagaaggatcggacgggaaatcctatgtttcccgctctgataccataacaagaaaaacagagaaaagtaattttgatttattctgagaaaaatgtacaaagcagtcgaaagaaagaaaggaaagggagctttataaatagctcagcctaagtcagttacaaacagggaaagaaataaagaaacctaaccaactaactattaacagaattcctaactactttcttataacagaggagtagactaaagaatacaaaaggaaaaagagatatgttgcagcggagtacaggatagtgtatatgtattctttaataaaactattagattttttgatataatgatgaataataaaagagatatttaaatttttgtgtttaatttagctacttaattaagaaaatataaaaaatatatcaaaaatatatttatataaaaaatacttaagtcaaaattaattttcttttttttttt

SEQ ID NO: 137525 - DNA, 843 bp, Cannabis sativa
tagacaaatagtgcggtggcaccataattatgtgttatatatattgagattaagggttattaccctagtgattattaatgtgtaaatgatatgccatgttatatgtgtattgagattaaggattatacgtttaaggtataattaggttggactcggtaactagaactgaaatgaaccgttctaaggccttattgtatttagaattgtgagcgtaacacgtagatctatgccacatagacataaataggcgtgtgagcgtaacacgcgggggtctgtgtcatatagacaaaaatgtaaaatggcattattgtatatgtgatatgatgattataattattgatattatattgtcttactaggcttggctcacgggtgctctgctatgcaggaaagggtaattttgtctctaatcagccatgagtgcgagagcttggcggtgcttgtacatgttcgggccactctagaccaagcaggttggggtctaccagcgatgtacttttgtgactctaatttttccacttaggttggctgatgaaaagacttgtaatattttgtaaaagatttttgggataccagaacatgtcacatttgattgtaaagtttaaagttgtttcaagttttattttcattctgttttagattaaagtttaaatttctccacttatctttcatgtaatcccgatttaggggattagggtttcataaatagttgtcatgacgtgcctaattgtagggcgttatagggttatacccaaagagaatgtgtggactatgaggatacttttagtccagtcaccatgctcaaatccatcaaaattgttctctccatagctactgctttcg

SEQ ID NO: 137526 - DNA, 851 bp, Cannabis sativa
tgttaatatttttttttttgttttatctgttgtatgtttgttatttattatttttttttatatattattagttttcttattgttttctagttgtttctatgaaaaattataaaaatatatatataaaaaaaaaaattaaatgtaattaaatgtaaaaatgtaaaaaaatgtaatctttttacaaattttacaaaaaaaacaaaaaaaaaaatagtatcttatgtaattatccctatataaaaaataatgaataaatacaggtacaattttttttttttttttttgtaaataccattttgttattaaatttgtattttgtaaaaattattattttattttgttaaatgataaaaatgaattatgtatttgtcaaaatggtatagctaaactgattttatgtcaaaataaaatttaataataattcgatctagaggtgttatcacaaaactggttacattttttgtaattgttcatgttaggaattgtcttcaagtttgttattttaaaaaaatattgaaaattaagcacatagttttaattttatcattttggaaaatatagtctatttaatcatttaacaaaataaaaggtctaatcaataacttttgtaaaatatagacaaaataatatttatcatttttttttctcccaattttgacaattactaaatcgtattggtgaacttttcttgcctttgtggtaattatttcacacttataattgtagctactaaacattaattttatgataaagttttggtaattagataaatattatatttaatgtgattttattaaaaaaaaaaaaaagactttcatgcctttcaaaatttctcaagattattgattttt

SEQ ID NO: 137527 - DNA, 514 bp, Cannabis sativa
aaaagaaaagaaagaaaagtcaaattgaggaaattcaatctttttttcccctctctctttgctcggccaacctagaccagaaggaaccaagttcagctccattatttttctggaaataaattaaagattcaagaactcttgaagctaaggtaaaactactgtagaaccctagaatatgtttttgaagtttttctttggttgagtatgtgatttttgagaataggggttgttaaggtttaaagcttgtgtaatctgattcctaggttaattttgagttatttttaagctctggttgttagttttcaaaggtgatgatggatttggtaagtttgacttttaaagctcaagtttagagctttaatggcatcctttgatttagtgggtttttctgtgaattatttgttggaaaatgttgtgaatacaatgtataggtaccctggagagtttggttaagtttgggattgaattgagttaggggggttggtttttgtgttcccagcacagaaccggtcga

SEQ ID NO: 137528 - DNA, 674 bp, Cannabis sativa
gaaagaggttggcgcaaaggtcttttggcacaagtttgggttttgggttggctggattctttgatagaaaccacgccaactttcctttggaattctttatcagcctgaggaggacctttaagatcgctcacaagatctatgccctcaaggatcacttgtgaggatcgcccatggtgtgctacggggttcccctggtttgaattggttggaagctcctcagccttggaatccatcgttttcggctccaattgaggcttaaagtccttaggaacgaatggaaaattgttggtgcatcctggtattatgaatttgggagggtaaacttctaaactcagaagagacattctagtagaaaagagatgatccattctgaaaatgaatctcactaaaaagtcagaggtttgtgaaaaaagacaagcttgagccgcccttttatacacaaagtccagtgacaagaaagctaaagattgggaaatctaacagttgggagtcgggcaaaatatgaagagacgatacataatgaccctcaaaactgtacaaccgcaagaatcaaaggacgcattttttctaagaagggaccttgatgaaaatgacctctgtaattattaaaaagctcttttttttttaaaaaaaaaaaagaacttttttaaggggaaattgttatacccaaaatt

SEQ ID NO: 137529 - DNA, 1366 bp, Cannabis sativa
ttcagcataatccaatcttgtccaatccagtccaatccttttcagtccaatccagtccaatcatgcgtaccaaacgggctcatagtgtatatatgaatgtaccgtatctataaatatttataaattttaatagattaattggttaggtattagttttagatttaggtattattgtggtaatttaaacacccaagtgtacgtatcataacaagtaatagactcaatcgatcacacaaggattgtagttaagtactttataaaattaattatttacttctatttggtgaattcaaaattaaaaagcaaataattcaaagaaattaacaatgattaaagttagggtttcgatttcaattgtatctattgattatggtctaatatgattatcttcctgttaccaatttctatacaatagtaggtttactaagataatttattgtcttctcagatatataaatctcaattacttgtaaattttctactcatgtgataaatgaaatatgcaacaggcattaaacacagaaatcctataagttatctaaactatacaggtactctcgtcctatatcgaaatttagttctatctcattatagcataattgacactcacttctcagatctcgcatcaaaatcatagacagtttattgctgatcaggcaattaaaagtaattaatacgaatgaaataaaatacatagaaattgagggaaaataaaatcatattagaaccataaaacaatgtcaaacaatatccatctagaccctaattaagtgtttagctactcatgttcatcgtagcaattttagagatattaatttagaatatagaagaaaagtatgctgaaaaccctattgagaaagtcttcaatattgattttgctcaccaaaattcgcactccttgattgcctctaatttcgtactgaattgcctcttgaaaattattaaagtccacttattttatagccataaaaatgataaaaaataaataaaaaaccctaaaaaaacctattctgcttaggattagaaggggcgatgagttttctgctgcgtcgactgatagtattttggccataactctcgatattgctcagaattggacaattcaaaatgtttcaaaaagataaaagagagatctagaacttttatgttttgactttcttcaaaatctgataagaccctagtcgaatttaggcttgaagttatttcggctttatttttttgtacattgttctctattttataggtcatattattgtgagatctttttatcttttttcaatcttattcctttgatattttttaatcttcttctattttaaatctgcaaaaataaaagataaaaagcataaaattgctccaaacaaga

SEQ ID NO: 137530 - DNA, 579 bp, Cannabis sativa
aaaaaaactaacaattaatatagaaatgaaaatataagaagcctaaaacaataaaataatgtattgaaacacaaaatagctagttagttaaaaaaaattataatataccctaagtgaattattaacatataaataaatttaaaattactgaaaccaggtatgttaaacaaccaattaaaaagtgacacaaaaaaaccagttccgtaaagcaagcaaattatgtaaatctgacacagtaaaaccagttttctaaaataacaaaagaaaaatgaaacttaaaccttaattacgtaaaacaacatactaataattaaagatggaaacaagtcatctagtacaactactaaaaaattaaacatacataaacagataaattaaaacaaattaatatactttaaaagaaataaaaattacataccaaagataaatctttaaaatttggatcatatttacttttttttcttcttgtgaataaccttccaaagaatgttaattttaactagatgaagtttttttctcaaagttagctagtatttgaatttttaacaacatctttcattgcatccttattggaggaat

SEQ ID NO: 137531 - DNA, 505 bp, Cannabis sativa
agttatttcgtgttatttgtttttattcattataacactgttatagaatcgtttctattttaattataactggcttgagttattttgtgttatttatttttatgtattaattttgatatttaatatcttatttaatttgttattatttataagtgtcaacccaggaaattggcatatgtacttttctgaggttaggtgagaaaggccttgagaatgacaaaatcattcggccatgagagtgacaaagtcacatgctcctgggagtgacaaagtcacttggccatggagtgacaatgtcactcggccaggcctcttgagaagtcactcagccaagccccgtgagaagttactcggccaagcctcgtgagaagtcactcggccaagcctcttgagaagtcactcggtcaagcctcgagagaagtcacttggccaatcctcgtgaaaagtcacttggccaagccttaaagtcactcagccaatactcgtgagaagtcactcggccaag

SEQ ID NO: 137532 - DNA, 653 bp, Cannabis sativa
cagacattgaaagataaactcataacaacactcgtcctatgcgttccaactaacaaagacaaatttgtagtatattgcgacgcattaaagcaagggctcatttgcgtgttgatgcagaatgagaaggtggtagcctatgcctctagacaactaaaggagtatgagacaaggtatccgactcatgacttaaagttggcagcagtggtctttgcattacctctatagagagaagtgtgaaatatacatagatcacaaaagcctaaagtacttctttacgcagaaagggctcaacatgaggcaaaggcagtggttggaattggtaaaatattacgattgtgagatactgtaccatcttgaaaagggtaatgtagtggcagatgcacttagcagacgcaactatgcaagcttgtcgatgttaaggacattagaagtgtcgttgcaacatgaaataaagagattcgagatagagttagtaacagaaaagctagctaatctcacaatcgaatcaaatttattagagaagatcaaagaagaacaagcctaagatgagtttttaatcaagaagcgggtcgaactacaaaatgagaaagtcggggacttctcagttgatgaagagggcattctacaatacaaggcaagggtgtgtgtaccta

SEQ ID NO: 137533 - DNA, 527 bp, Cannabis sativa
taattactagctattttaccaaacaaaatattagcaattcataattctcacttcatatctaaatacaccttgcattttaaaatatagtttaattactaaactgtgtaattaccaccatagtaattaccctacctaataattaaacaattacttccaaacacacgaaaattcattctaatgcaaatctagtattccactaataatagtagaatactgtagattactacatttatttattttttaatatttttattatattaataatttagtataataataaaaaaaaatatactttttaatgtaatttctgtggttagaattaaaaaaaactaatagaaaaatagtctctttttagtgtaaatttaacattaaatttaaattttacattggagatatatatggccacgccacgattaggtgtggtcaaaccttgcccatattatttatattaatatataaaaatataaatatttttactattttatgaaaacaagaaagtaatagatccttttatttggtaaaatttg

SEQ ID NO: 137534 - DNA, 1182 bp, Cannabis sativa
  modified_base (504)..(507): a, c, t, g, unknown or other
agttatttctatccatgtgaatggttagatttactttctcagttgtattctaaaagttcctatcacaagtttcatccaaaataaagatgggcttagaatcataaaattctcccacttaaataaggtactgtgattatgtgtacaagaacttttattggtatcaatttctattacaatagtaaattttaattggaacataaattaagatcaagaataagttctaaataatttgctaattttatttattatattacatccatgtttaattaaaaaatatgtgtgccatatagtactgtggtgtatagagtatagtctagagttcgaaatgaactacatatttcaatagtttaatccacccctaagtgatatagagatcatgtagagttatgagtataattcagattttaaaaagatcgttgaactgcatattattcttaacttcttccacccctatcagatcaaaagatctttttactaaacaaattcttaataattgttttagannnnacaattattcataaacatagaattgaattctaagtgtttatgtggcattcattctttgcagagtttaatataccatagaatttgtatcaataataaaatacaaacacatacaaaaattataaacatataagtataattcttattggcatacacaaaataaagtaaatgaagctcaattcataaatgcaatttatttccaaaaagagaagaactttattataatattctccaaaataaagcgaattgcctgtaataatatgaaaaatagggaataaaaatctaaaccaataattgaaatccaaattgttcttaaattaaaacaaataattcaaaaattataataaaatagaagattccgagcttcatcttcaatcttggactatctccacccatctgtccaaccacccgactcaactgcgaggatagcaatccaagttcaagcagctggagctgaaataagaagaaaaacaaacatggttagtaggtccagaattaataacccaaggggataataattctctaatacacatgagtttatagcatagaaagaaataccttgtttctttgctagcaacttaggactttggggtttccagtggcccttttcattgcaatagaagcattttccttttggcttatctctaagattagcagcctttttctttttaactattt

SEQ ID NO: 137535 - DNA, 1208 bp, Cannabis sativa
gtcttcctccgagtttgggtacgggtttttcggatcatagtctgggtccaggttcgattcctgggtctgggtcccaggttcgtgtctgggtctacgtctaggtctgggtccaagcccagtgttttgatccgggtctgggtctgggtcggtattcgggtctgggtctgggctcgtgtccatgtctaggtccgaatcccaatttaggtcaggggctttgtttgattccgggatcgagtctcgatttcgggcttaagtctcagtcctagtctgggtacgggactgggtcggggactggctccgaggccgagttctagggttgggttctggtgtaattcgggtccccgcccaggtccaggtactggtcacagtccctgtcctgttcaagggtcctggtcatattctgattcaagtttttgtttcgggtccaaggtctgggtctgggtccaggtattggtccagcttcgagtctttgtccgagtcccagatcaagacatcgactatgggtcttgtccaagccccggttctcagatcctgggacaagatctggatcctaatcacggatcccagtcgagtttcaattcatgccccaggtcccgctctgggtatgggtctaactgtgggaccgagactggggtccagttttgggtttcaatccctgttctgggtcccgagtcctgttcaatgtttgagtctgagtttaggtctgggttcgggtctcgagtcccggtttaggttcaggttcaagttttggacccaatctcgtggtgggtctatgtccgagtccgggtccaggtccggttacagttttgggtctgggtccaagtcctggtcctgttcttattcctgggtcccgatccgcttctagtttcggttctagtttcaagtaacggggtacggctttgggtcgagttttggttcgagtctaggttcggatcctggtttgggtcatgggcgaggttcaagtttgagttttagtctcggttagggtccgaggctggatctggtttcgagtttgggttcgggtttaggtcccggtactgttccaagatcccgatctggttccagttcaagtttcggttttggttcccgtgtgtgagcttgggtcttgtatgtatctgagtcctagtttgagttcgagtttgggtttgggttctggtctaagtcctagatccagacaccgactacgggtcgggtccaagcatcgagtc

SEQ ID NO: 137536 - DNA, 579 bp, Cannabis sativa
agtcttttggacatgctttgttcaggttggtgaagttcatgcatactctccacttcttgttggattttggcaccaatacagggttggatacccactgaatgtagaatgcctccgttatgaagtcattgactcttagccttttaatctcatatttgagtgcttgggcacgttctttgtccagcatccgcctattttgttgaacaggttagatgcttggatcaatgttgagtgcatgggtcattacagaggggtcgattccgaccatgtctccatgtgattatgcgaaaaggtccaggtttaccctaacaaattctactagtattgattcaatttctagagccaagccttttccaatcttcagtcttcttgttagaaaagtgggatcaacctctactttttccaactcttctatagttccaaagcttcctacaggatccccaaagcgaggatctatatatgtgtccctgccttgggctagacttcattgccccttgttgggctcatcttctaggcttttggggggcatcttctcttttttagccttggacaaagccaagttgtaatagtgacgggtagact

SEQ ID NO: 137537 - DNA, 604 bp, Cannabis sativa
gatgggctgggctagggttataaacccttttggcttcggtttattagaaataaacgatggcatagggggcacaccctatgccgtcgattgtttccgaaaaaccgacgccataagtggcgtcaaaattccttcaaaaaaattccaacccatgccgtcggttctttaatatttgctgaaaaaaagtgcctctaaaggcttagtttgtagtagtgatacaagaaaataatattttaatagttaacatttaaaatagaaaatttttagtaattagacaatgtaattatagtcaattttcataggagaatttgagagtgtaattagaacccctcaattatctccaattacactattatagtgtaattacatggttatacaaatatgtcaaattatattattaactctaattacacacaaatttaatattacactgtgattttctaatcgtgaacttagttttaaatttttgagtgttaatattgtctatttattgaaatagaaaaatactcaatattaaaattatgacaattttttgttttttcttttgatccatattggagaagggtgatttgggaatggataggagaggtgcaaaacaaaacaagta

SEQ ID NO: 137538 - DNA, 1522 bp, Cannabis sativa
gtttctaaatttctttttgagctttttaaaagtgttgtttttgtatgtttttttaaccggtttcttttttgtttttcaaggttaatgttgatccttctgatggcgattttgttcaacatgttcaatctggaactagttctaaagttccagttgaaaaagagattcagccctctgtcagggaaactcgtggccggaaaaaaaatgtgttcatatgtttataattttgttctttgttactgtttgtgaatgttgtttttctgatgtatatttatcttttttgttttctgtttttttcaggccacagtggctggttgtgatcttcccaatccgtcggtacgtcgtacaacacgttctggcgttaaatctgttgcgtcgaagggccctagtccttcgatagctgaagagtccgttaaaaaatccactagtttttcgaatgtggtaagtgctttaagtttttcattttacatatatgttttgtttttatttttaatgtaatttttatttatggaaccagttattttatttatcatgtgcttgttgttgttgtcactggctaaatcttattttataactggttttttaacaggatgtttacttgaagatgaaaacggagcaccggttcacaagtaagctctagatttggaataacccgtgggttattgaggagatcaatgcaaatcttactccttctcaaaaggcgttattttttacgacgcctttttagcaatttttgaagatgggcattgttaagtggcacattgccctgcctcaccttgctttagtgagggaggttcatcaagagagggaggatgtagaaaagtggttcttaatccgggacagagttgtccgtttcggtttggaggagtttgtcttgatagcggggttaagtccggaagggtcatttgacttgaacgattttaaacagaagatgtcgttcaagaagaagatgtttcctgatttgactattaaagtcatttaagaacaagttagagcaaggtttttggcgggagaatttgatgatgatgatgttgacgctgtgaagatggcgattgtttatttgttgagtcactatttatatgggtatgagaacagtaagagagtcgacaatgagttatttggttttgtggatggcgatttgtctgagctaaggaatatcgcatttggtaaactgctgtgggataggactttccactacatgaattttgccttcaaggacggtgataatatatattacaagattgagaaggccaaggaagaaaaggataagttttattcttttaaattccaagggtttccatttactttcctaatttggttggtcgagatactaccaagcctgtctcctaattactgcaagaggattgccaatacgtatcctcgaatgttgaattgggagagttcatataagaaaaaaatcggtggatattcaaaacttgtttatgaggtttttaataattctgaggtacctttcaattattataactggtttttttttttaaaaaaaaaaaaatagtgtattcat

SEQ ID NO: 137539 - DNA, 502 bp, Cannabis sativa
  modified_base (175)..(178): a, c, t, g, unknown or other
aatgtggcccggacccatctcgaaatattttttgtcactagtcacattgaattggtgctacaaagacgtgtatatgaagattgatttcgcgttaaatttggtttaaatgacatcctaattcaaaaattgaaaacattcttcttttcaggataaattttaacaagttttttctttnnnnttacactcgttagtgttctgttaaaatctcaccctacacatctccaaaattcgtgaaatttcacggggacgaagccaagaccattgatcatcactttctattggacgcgttgagagaaaaagtagtttttgtgcacacacaatcattttaatcgaaatagtgaaaatttcacatttctgatagtgatacaccattgtgaaatatggcctgaatccatcttcgaatatttttttaccactaatcacaatgaattcgtgctactaagacgtgaatatgaagattagtttcgcgataaatttggttaaaatggccccctaatttaaa

SEQ ID NO: 137540 - DNA, 640 bp, Cannabis sativa
ccacacccggagcctgatttgaccctagactgaaatccagacccaaacccaaactaagacaaggactcgaactccgacctggactcaacccataactcgaactcataatcgcaaatggaactagaaccgaagtaggactaggaccaggaccacgacctaaacccaaacccgaacccagaacaaaacctagacagagacctaaacccgaacccgaacatagaccaggacccaaacccacacattaattgggacctggacccagaataaggatagggaccttggaaacagaactaggatccggacctagtaactgacccaggtgcaaacttggacctaggacccagctcgtgacccggcaccaaaaatagaaccagactgggacccgagattgggatccggatctagatcaagggctgggacaaaacacgtagtcggtgcctggatttgagacccagacaaggactcaaacactaacaacgacccgaaccgacacccgaacctgaacccaatcccaaacctaaatgtggacccaaacccgtatcctgttacccaaaattggaaacaaaaccggaagttaatcgggactagaactaggatttggacttggaatcataattgaaatttgacatagatctagaac

SEQ ID NO: 137541 - DNA, 705 bp, Cannabis sativa
gaggcatgtttatgaaaaaattttgtgtttctgtccccagctttcaaccatttaatcctagcacgttgcctccaatagatctcttctttgtacagcagagaatctagtgcagacttcaaagaactaagcctacgggactcctcagaactaagagccatcttactctgaagttggtcaatttctaaattgagtcgagaaattctagtcttaaagagagaattatgctttttaccccaagacttaagatggctagcacagtgttgctgcttatcaaaaaaagattgcaacccagaagtagacaaaggaacagcttgaccagtccaaacttctttaacagtagaataaaattcaggatcctccaaccaaacattctcaaatctaaaccttttatttacaaagttagggacattataagaattattatctaaaactaacttaagagctctatgatccgagccaaaaaaaccgagatgatgtaaagaattattagggaaaaggtcacaccaagattccgagacaaccacccaatctaacctttctttaacactagaattataccaggtaaatttgttaccaacaaaaggaagaggaataagagaaaatttgtgaataaaatcagcaaaagaagaagaacaagagttagaactaatactacccccatatttatcactactaaacagataactattaaaatctcccattata

SEQ ID NO: 137542 - DNA, 702 bp, Cannabis sativa
taatcttgtacagtgatttttaattctatacttaaaaagttctaagtacgaattttggcccactaacttgtgtgacaagttatttcacaaaaatgatatctaaaatttctaaactgaattttaagatcacatatcatttaactatgagaaaaaaattaaaatttttgaaatcaaataaatgagtagaaagttatacgcattttagagctgaaaaagtggctttttttgccactgccctatttttggtttactgtttttcacaaaaacggtaaaccgtttaaaaaaatggccaattgttttttcctagtattcctttttaaaaagcatgataacgattataaactgttggtttttgttcctacactatataaactcgtttttcactcaaaataaaatgttggttgagtatttattccatataccaaacatattcaagtgattttaagaacccccaagtttaaactccaacaaaacacttttcacacactttgagccaaatttcgtatttattttttctaagtgtctttgctaatcactgtaggttcttcattgtatcatcatacttctacagtgatttttcttgtacttctaaacacattttcaaattgtgattgaggttaggttggcaccggtattgtaaacaactcagttagagtgagattgacactacaacaatccgaggaagaggtggatagtccttgg

SEQ ID NO: 137543 - DNA, 669 bp, Cannabis sativa
ccttaattcttttcttctttttttattgttgttgtgatcaatttcaggacttttataactttctattggattcaggaatggactcaatttcattatcttcaacaatagtacttcaattgtcaaaagagagtgcatacaagagatactcaagatatcttagtgtattgagatcattatatattgcattcattatttacttttaattgtcaaaattataaattatattatttaaatatacataataataataatctcacctaataattaataataattttttaaaatttttaattgtatcacttttaaataaaatagcgtaaaatttaatatacgtgcctcgcacgtagatttttactagtatatatataaatatatatatatgagtgcactcttaataggtattacccatgaatgggtaaaattagaaaaaattgagtttttatgcttaatttttctatataattagaaaaatctattacttttacatcatatgggctgagattgttccatcgattgaaaaaaaaaaaattaaaaagaaaatttagccaaaaaaaaaaaaagataagtaaaagttgagtttcacttaaatatttttatatgaatatatttttgatataatataaaaagatatattttttgatattgtttttaattaaatagttaaactaa

SEQ ID NO: 137544 - DNA, 719 bp, Cannabis sativa
gtttcaaaaatgataaacacataaacacatagggaaatcttaatatatcatgtttctactatgagatgcatgataatatataacagtgtgagatttctatgtatgacatattattcactaatgcatgagcattgttatcccaatttttgcccagataacatggcatgtccacctaggcaagattgatgccacatggaatacaacttgtcagtaagaaggccaagtcaccatgtacaacatactaattgagaaggagtcgaaatacttaagcagaacaaagagacaatgaattggccaaccaagggagtctggtcggaccacccctagctgaccctatttccagcataagtcagccagcctccagcaaaaggagggccgaccagcctctctcccggtaggcactttttgtgcatctgtagctttcaacctagacaacacttccagttacgaattaggctttaaaaacccatgaaggtaggagataaacttcaattatttacctattctttaagattaattaacatattatttacttactattttaatgtgtaacaaataggtgatatctcctcattttaagggatatcaacctatcatctcctataagctctcctatataaagagcactaaacaaaacctaatatttctaagttctatgctctaagttttaggctctatcctcttaagttctaaagccctaactctctctctctctctct

SEQ ID NO: 137545 - DNA, 541 bp, Cannabis sativa
  modified_base (279)..(279): a, c, t, g, unknown or other
acattttctctacgggatgggcctgcggatacccgtctctaatggagtggagattttccgtctaaatagagaatgtgacagggacggagattaccttttgtccctaaatgttaaacatggtggggacggggatcacactccccgaaccgatgagactagtttagtattttattttatatttttaataataatttataatttatgtttgtatttttttattatattagtattttttatgaattttaagttgtgttttgaataataattaatgtgtaatantttaatttttatgtagtttaatatctttgtatattataaattttatttttttattaaggaatttcccgtcccgtccccacctctatcaggggatttttcgcctcattcccaatagagaataaatgggaatagagattaaaattcttaatggagatggggactggaaaagcactccctgccaattccttgcccggtgtgcattcctggttagcacaggccaaatctcatttacatacctatcttccttctttcttttttctct

SEQ ID NO: 137546 - DNA, 1252 bp, Cannabis sativa
  modified_base (305)..(317): a, c, t, g, unknown or other
  modified_base (811)..(816): a, c, t, g, unknown or other
tttttttgaataaataatttaaatacaacaaacaatatcaatgtaacaaatgtgaagtaagatatttattatataattaaattattattttaactaaccaactattttgaaaatttagggttgttaaaaataacctaaaatatcttttcaaaaattaaagtttaaagtaatttttaaatacctaggtttatttaaattattttaaaaaattaaattaaatatttaataggataaataatttttttttaaaaaaaccaaatagatattttcaatgtcattttctgatcttataatttaataaaatnnnnnnnnnnnnntaaaccaattttaaaatagatatgattaggaaattattaaaataataaacaaataataattatctaaattatatgtcaaaatatctcaaattaagcctttttaaaatttttacaaaaatatctaggttatttaaatatttaacataccatttataaatttttgataagtaaattgatataaattatcatttttctaacttatgatttataaacaattaaatatttcacaaaataaccaatttatgaatttaaaaatattatggttagaatatctataaaatatctaggttaattttaaatttattaattatttaattttttatataagataattttaatataatatttcaaattaaaaaaaataaagttatcttctaatttaaaatatacctaatattaaaatatctaatttttttgattaaataatatataaatattaaaaaaattaacataattttaaaatctgaccataaatttaaacctcaaaatatcannnnnnataataatctattaaaaattaaaatttattagtttaaaattgatatttaagttaaaatatattaaaaataatattttattttaaatttagggttttaaaattggaaaaatctgaaattaggtgaaaaatcccaaaaaaaaattggattttgggtgcaaagcaccttgctgtgcacacacaggctgcgtgcagcctcatccgtgcgcgcaggaggatgtattgcagccttcgtgtgcttgcttgctcggcatgacacgcgtggctttagacaacatcgagcctttaaacacgcaaattgtccccaacatacgcgcgcgtatggcttccttgtctgaagactggtacttgcgatttgagcaccatgtgcatccattcaacccgaaacttcaaaaattcagaacttttttaattttattgaaatcgagttccgtaaaaa

SEQ ID NO: 137547 - DNA, 689 bp, Cannabis sativa
tacagactaatttcattaacaatcatcaatataaatattcaagtatgaataaatcagaacaattcaaaatcagaacaaataaatattgatgattgttaatgaatattcaagaacaaggcagcaaagaaatgaataaatggaaaaaaaatgcaaaattaaaaaaaattcaagaacaatgcccaaaactgaactagaacaacccattaaaacccccaaaacccattgtattgaaacctattcatagaagagatatatatatatatatataaaataaaagagcaaatttgttttgggtctgttgctttcggtcgtctgcgatctccatcttcccctgccattaaagtcgtcaaacatgattttgacttgatttgggtaatatttgagcatgcttgcgatataaagtgtatgccaataaatatttcagatctggaaataaggagaagaaaaaaaaaaagatgatttttatgttgataacaataaccaacatgtttatatgcaaaacaatattctcatataacacaatcactctttcatttttcttcattgacactttaattttttccccccaaatgataataatgtgtatattataggtttatatacacaattatgacattcttgaccattagttatataaaacatatcgtttataaaataatttacaattaattactgaattcttaaacaaa

SEQ ID NO: 137548 - DNA, 1735 bp, Cannabis sativa
  modified_base (420)..(421): a, c, t, g, unknown or other
  modified_base (1284)..(1299): a, c, t, g, unknown or other
tatttcttttaataaattattatttacttgatttacgttggtctaaaataattaattttaaactttaatctattttttaaaaggaaaatttcaaaatatcagcctttgaaaaaaagaatgcatttcaaaattattgtaggaaaatgattaataaaataaaataatatatattttgaaaattattctaatataagttgttctgaaattaaaatttcgaactgaaatataattttctatctaattagatttcctgaaaaataactaatatttaagtgtgtacaataaaatcaacttagatatttaatttttttatttaattaaatgtattaaattagaaacaaataattaagtatctagaatatcatcaacttaattattaattctaatttaatatctaagaaaaaaatattctaatttaanntgatctaaaattaattaataaatatattttcaacttaaatttattgttctaattaattaattaaatattaaaaaaatataattagttactagaaataactatctagaatttatctcattaaactaagtgttattctaaaattaatttgaaaaattaatgaaaataaattccatgtattttaaaaataattatgttgctaatttaattttaatttggttaaactaatctaattagcctactaccattatttaaataagacaaatgggtcttcacaattggggtggttcgtgtgaggaaatactggattcagtatgttgtacccactactatgccccctaactctcacacaatgtccaaaggagagaaattcaatcattaaataaataattgttattcattgaataaccccaagtattgggctaaataaaactatcttatgttatattttattttagcaacctagtccatttaattaactaaacttaaatgggcttcctatatgcatctaagcccaaaagtaaatatataggcttacacatgtcaaatgatttggatggaccctatcatgtttctaggtttatcacagatgaaagaaattataaaatttacatattacaaattatttatatgatctcttgacaattagactatgattaaaattagattattggatttgtcaacaagttaatcatagcaatttaaatcaaataaataataggtttgtttaaaaaaaatttaataaataaataaacaaacataacaaacatgtaacaaatattttgaaagtaggttaagatatttctattttaaaataaaaaatttaaaatatgtcttaactagaatttaaaatttaggttgatagnnnnnnnnnnnnnnnntttcaaatctaacaaatctcctaaatatctaaaattctaaatgaaatttaaatatccaactaatttttaaatttttcagtttctttaaataatttaaattaatcaaatatcaaataagataatataatataatatcttaatttaaaattgagatatttctgatatgttatttctaatcttataatttaataaaataaatttaataaaaattaaaaaaaaaaaaagatattttaatgattaggatattctcaattttatctaataattaaataaaacaaaatatcctaagtttaaaaattttatggtcacaaaatcctaaaatttctattcaaactaaaattaacaaaattttcaaaatttcaagttatttgacaaaaaaaattaattaaaataaatatttaacaagacgaaatgtcaaaagtaacatttttctaat

SEQ ID NO: 137549 - DNA, 598 bp, Cannabis sativa
atgatcattgtggattacatgtgtaaagatattttcttctcgattcttaatttcatctttgtttactttttaatttgttgggaggcttgagaggtatgagattatgatcctatacttggttatgatttttttgtttttttttcaaactttgagacatatttaattagtttttattttctactaggttatgttttttttaggtaggtttatcttttatcttctatggattatgaatttataataaatatttgtgagaatattggtttaatttatttttttcaattattttaaattatttttttttcattttaccttaatggatatccgatgggttttccataaccgatgagcatttccataccccgaatccgttggttattagacggggatgggggcggggattgcattccccgtacattaaccgcgcaatttccatctttagtcccgttacattaaaatctaattttcaggactaagaaccagaagaaaaaaaaaagaaaaaaagaaaaaagaaaaaaaagctcgaacctatgcaataacccatccaatgtcattgtaattggctatataaggtataatttctatgtctaataatcca

SEQ ID NO: 137550 - DNA, 1123 bp, Cannabis sativa
aggatacaagggttatagatctgattggaatgagacattatattccgctgcaaccactgtaaggttcttgatactttatatgtgtttatttcatattgttttagaagttcctctggtaaaatttacgcacataccttttcgagttagcagatattactcttatcccccacttgaagaaatttcttcctcgaaattacataatctagtacgttcactaaactttcatattcaattttcaaatccataacagattatgctatagccctacaagtctccatttgtcacatccccgcttcaagcctctatttgacccttacactcacggaatgatggctcttatacacgagtacatcactttggctgcttcatgtaatgacaactgacccaacagaccaacacgagtgtttccaatgtgctttgtcctcactcgcacgcttcttgggaaaacttcctaggaggtcacccgtcctgaaattaccccaggtcaagaacgcttaactatggagatctttcatgatgggctaccgaaaaacaagatgcaccttgttgatataggtagtacaatcaatccatttaagctctcttcaattgtgtagccatatacatacacagtctcaaaatcatcccacttgaccttcctcatgcggtgtgggcttccacaacttagccggtatttctccttacggatcacaagactactgactgtcacaatatatcaacatggtgcatcttgttttttggtagcccatcacgaaagaattccacagttaagcgtgcttgacctgggttaatttcaggatgggtgacctcctgggaagttttcccaagaagcatgcgaatgaggacaaagcactatgaaaatactcgtgttggtttgtagggtcagtcgctagtccatgaagcaaccaaagtgatttactcgtgtataagagccatcattccgtgggtgtgaaggcccaatggtggcttgaagtgggtgttgggattttatgccctaaataaaacccattaccatctaatatgatttgtcaataataaaatattagaaatcatttatgcttacatgttatattcatgtttatggtttaatttatatatatacacaaaatctgttaaatccaga

SEQ ID NO: 137551 - DNA, 628 bp, Cannabis sativa
aattgatttgagttttcaacaattttaaaatacctcagtcaaaaatttatgacaaaaactagaaagaaatagttgactgaaaagaggtacgaattgagcaaacaagaaaatttatagaacactatcacttaattgagcctatttgtcatttttttaatgaaagaaattttattaatcagaaactttcgctactaaataggatagcaaatcagttggaacatgttctaaattaaaatgacgatcaagaaataagatagcagtcttagcaaagttatgagctattaaattaacagatcgtttgacaaaaaaaatagaatcattcgtaagagaagcaagcaaacttttacaatcttttacaatcaaaccaaagacagaattcatatttaaagagcttcaaatggcttggaccgcgcaaagacaatcaaattctaacataatatgttgccacttcatttctttaacccaattgagcacctctttgatacccaagacctccgccaaaattggttcaaccacaccatgtaccaaccgtgtactccccttgtcacgacccgagccctaggctgtgacagatgtgtaatatccataacttgggtggtcaaaggtcacactttgacccttgtaggaa

SEQ ID NO: 137552 - DNA, 609 bp, Cannabis sativa
tttgtgatttattttcatctaaaattgctgaaaaaattgtttgtgatttatgtatatttagatcgatttttttttttgtgttaaatcagtatatatattgttccttcgggtatatatataataatatgtgtatttatatatatattttatttgggtatatatattttagtttgtgtatatatataaaatttcggtatttatataatataatctgtgtatatatatttgatttgggtatttattattttatttgtgtatatatgttaaccgtgtatatatatttgattcgggtatttattgatttatttaagtatatatgtttactgtgtatatatatatgatttgagtatttattgttttatttgggtatttagttcactgtgtgtatatatatatataatttggatatttattgttttattttggtatataagttaactgtgtatatatatatatgatttggttttattttttaaatataatgtattgtttttatattatatataataatattatttttgtttatataagtgtatattatatatatattgttttagtaatattgtatatgataaataaatatattttgtaaagtttatataaatattt

SEQ ID NO: 137553 - DNA, 806 bp, Cannabis sativa
aatcaaatacaatttcaacacttagaaactaccactcccatcatatatacacccaaatcaacaacacaaaacacatgtaatttccaagtttatacaataaggaaaatcacctacaaatcatcatttactcaaacattcaacctatcaaataacacaatttctacataaaatcagtaatcagaaatcaaatacaatttcaacacttaaaaaccacaactcccatcatataaacactcaaatcaacaacacaacacacatgtaatttccaagtttatacaataaggaaaatcacctgcaaatcatcatttactcaaacatgcaacctatcaaataacaatttccacataaaatcagtagcaaaactctaaataaactagatagaaagctaccttgaacttctcttaaacacaagctttaaattcaccaccacacaagattaaaccaaggctaatttcaagaatttagaatggttgaagaattgaaatgagaaagaatgagagagggtcagctagggctgaacaacacaaaaaataagcttctaatttcagtcatgttccccttttgttgaaaattaactcaatcaagcaaaatgacaataatgcccctaaggccataactcctcataagcacatatacaagggcaaataggtcaatatcacatagcacaaaattcaattaatttttaaattaaccacacatcaataaaatgcaaataaattatcccgaattgcatttcgggcccgaaccccgttcggcccgaattatccagttgtgactataccgcgccaacctgtcagaacacacct

SEQ ID NO: 137554 - DNA, 599 bp, Cannabis sativa
ataatattattgtatcattattatatattttttattttgtgtacaacttatttttcttttgattttagatgtcttctaatgaagattggatggcttcaccaaataaaatatttgatcctaatgaagcaatacaacgtattgagaacactatattttccctttaatcttgatacgatactctgttgtgatctaacaactgtagttttcttatttgtgtgttagaatataaagggaaatcggaagggccttctgggaatgcacggttttatctttccggtctcgtggtaccgaacatgtcttccgggtacaaattactgaaggcggaaggctttacgagtgtggaaccaagatatgttcatggaaggacatgtccaggtgggattgacccacttctcctttgctgatggtcccactgataggtctgcagtgcttaactggagtccacgtgtccaataccaaaaatgcgaataacagtgacagtttagtttgcacatcatcaaggctaaaatttgggataacaattatattgtgcaattgttatattttattgtatacaaaaattataattttttttaaaaaaaaagtgtataagagtttcc

SEQ ID NO: 137555 - DNA, 633 bp, Cannabis sativa
aactaagaagtcttgcataatagtagcagataaaggtgcttaacctaaagttaatgcgagctcgattatgccaaggctagcaatgctgtctccggtgaatccgcaaaggttcaccatacaaggccttaatttggcttttttgagccccattttctttagagtctccttataaaggatatttaccgaactcccattgtctattaatactctcttgatcctattattggcgagttgaatggttatcaccaacggatcgacgtgaggatatctcacgtttttctcatcttcctccgtcaatgtaatgggaggatcctcgattttcaccttctttgaaggttctagggcagaggtcgattgctcgttctttatctctttcacatatcttttcagggcattattgcttttccctgcaatatgtggccctcccgaaataaccaagaagtcctctccctcaacgggaataggttgtaacccctagttgttttggttattgggcagactgggctggttgtatccatggccctatcttgtaacgtactgcttaaaatgactttctatctcatctttcagttggcgacattcgtcggtcgtatgccaaatatccttatagaatttataatacttgttaggatc

SEQ ID NO: 137556 - DNA, 812 bp, Cannabis sativa
agtatacatcagactgaaccgattttggaagtggaaaagatatcataaacttaccattatatcattctaagtcaatatcacttaattgatcttaggtcaatagatcttaatcctgagatggttaggttctagcttaactgtattatttgtgttctttgacttgttcgttaaagttgaacaaatgaatcttcccaatatgagtgggagcgctaatcattgatgtggaatttatagcttttgtaactatatagaagtgaaatgataactatatagaagtgctcttattttagtaagtatattagtttactaaaatattatttataggaagctaagtgtttaaaggataaaatacattgagtagtagaacggtaaatttatccctactcgatatagatcatttatagaagatctttgattattttgattgagacaatggataattcataatgtatctatatttggaatatataaagcattctatgtaatcagcagtgcgattccgaatctatagtggagtcaggaggaattaataagtttggaaatttatttgataaattttgaatatacttattaagagcttggttatataggcccatcgtccccacattgtccaagataatattgtcttgtagactcaattaattagttttaattaatcagttataattctaaataagactatatcttatttatgaattttcactcagcaagggcttaattgcaaagaatgagaggatttagagtttatttgttaattaagagactttgtatggtctaattaaaaaatgagttaaatgaaaattttatttgat

SEQ ID NO: 137557 - DNA, 502 bp, Cannabis sativa
ttcagggagcaaaaatcctaattagcctattatttattttaaaatttaatacgaaaaaacaggttaatttaaaataagaaattaaaataaatattaattaaataaactaacggatctgataacctctgtgaaagttaatagaaaaaaataaaaacaaatcgttaaatcaagaattatcgttatatagtcacttttaatatataaaaatactctctaattataatatttaataatttttaaaagaaatatttaaaatatactttattcatcaatattattaataaaaaaaaaatataaacactgactcatataatgactagagaattctagccctcttctatttttataatttaacatttatagtatattttattgttgatttatttatatgtataatttaataattttttaattgtatatatatttattgattatttaaaggggaattactctatatactattttttttaattttttattttaaaatttacggtttgggttt

SEQ ID NO: 137558 - DNA, 557 bp, Cannabis sativa
gtatgtgtatgcctcctccctatcagttcgagaaagatgctgggggtgtctcggtggtaacccacatgtcctaggttgagtcccaggatttctctagttattacaagggatttcctagttttgggttgccttatgttcttgtttctatgagaagactctggcacatcattgttttcattccccgattcgtaaatccctggcgtctttgaggtacttctcgacgaggtacttgattattctattgttcgtctactaaaacatccctagttccttcaggttgctcctcctgggtgttttggggattttcttgatttgcttcctgcctcctggttcttgaacctcgacgtctaccacgtggtcttcttttgccaggatcatgttgattttgtgcattgtttccttgagtggctctggctgttgctgcctctctttccaactcagcattttgttggttagactcgactaagttttgctggagttgtcgattttccaattctactaatggtacatacctaatggggtcataagcatcattacttcttggtatataaccagta

SEQ ID NO: 137559 - DNA, 580 bp, Cannabis sativa
aaatctacatactccacgagtcaatattatttctggatagttttggcataaaaaacttttgagtacataggaataaatatgaatattcactcaatctcatagggtctctgtccttcaaaaaatgatcgatctctttcccccaaggttccgtccctatttataggggttctaggaatgacagttattctcttttgatcttatttaagtaaccgttcatagggtctttgtccttatgagaatgagtgaatattcatatttattcctctgtactcaaaagtttttttcgctagaaatatccagaaataatattgactcgtggagtttgtagatttaactacaaaactacataaaataatctgtgttatacatatatttattaattctttatttacaagacttcatttattgttaacagagttaataaaaacatatatagatgtattaatgttttttttttaaggaagtacgttgtagaatttttttttataaaatatagaggtaagttgaaaaatgcctcttttattaatcaattaaccaaatttgcctctaattttatatttatttgaaacatacctctttt

SEQ ID NO: 137560 - DNA, 760 bp, Cannabis sativa
  modified_base (27)..(33): a, c, t, g, unknown or other
  modified_base (596)..(600): a, c, t, g, unknown or other
  modified_base (719)..(720): a, c, t, g, unknown or other
agagattgatcttgtcaaaaccactannnnnnngatgcaaatgccatagatatattagaatgtggttgtggtttcggatgacttatgtttagttactataaagagttcttagaatagtccaagtgggttctggtcacaaatacaaaactcatattccatacataatatatagttcagatccattgtagaaaatggatattaaacttgtgaaagttttactgtaatgttcaatgcattcttggaaactgaaatttagaatttctattggaatctaaaatttaaagtcacaggcttaaatttataccaaataatctttgagtaataattttttcttgaaccacactactaatttcactctaaatataagttacctctagtaaacatatacaagtaggaaatttcttagatcgatgacttatatcatttcgggatagattgctagaatacagtcatgtgtgccattcaatttcataagagaaaatagaatgacattataagcatatgatttataaaccatctatctaatgatacactatttaggaaatttcttaatgaaaaagctaagaggaaaagtaaaggataatttcgattaaaannnnnatccaacgatgtcccgtttaggtgagagtcaaagttattcttatataataatatttttcattgtttcatatcgtaaacactagtctaagttgtcatctttggatgtacaactagatgtnncatttacaaatacttatctgtcgagatctaacactattat

SEQ ID NO: 137561 - DNA, 653 bp, Cannabis sativa
actatgaatcccaaaaactttcttgaggaaactccaaaggaacacttgtcgggttaagcttcatattgtacttccttaatactttgaagcactccgcgaggtccgtggtatgacttccactttttactgattttactaacatattatgcgacgtaaacctccatgtttcttctgatctgatttgggaacatctcattcaccaatcgttgatatgttgccctagcattcttcaacccaaatggcatgaccttgtggcagtaaagtcccatgttggttacgaagcttgtatgttcttgatctgggacatgcatttttatctggttatatcctgaatatgcatccatgaatgacataagctcgtgcccaacagttgcatccaccaactggtcaatcttgggtagtggaaaacaatcctttgggcacgtcttattcaaatcagagaattcaatacaagttctccaagttctgttggatttttgggacaagaacaggattggctatccacgaaggataaaactcctcgcgtataaattcattggccaacaacttatccacttcatgtttgagtgccccttgtctctcagaatccaagggtctcctcttctgtctctttgctgggtagtttggatcgacatttaaatgatggcagataa

SEQ ID NO: 137562 - DNA, 856 bp, Cannabis sativa
  modified_base (635)..(637): a, c, t, g, unknown or other
ataccctcctaggaagagaagatctgaaaaaaaaatattttccatccttagtaacaattttccaataaatattatgaaacttaatttaagttggtctaaaattaattttcaactcaaatttaattttcaataaatatatataacataatttgaaatttaatgtattaaaaatacattttcaaaaccattctaaaataaaataaaataaaactggaaaataaattattttaatttatattgatctaaaattaaataaattaattttcaacgcaaatattattttcctatttaattaaatctcttacgaaaaatatcaaatatttaagtgtcttgaatagaataagctgaaatattagttttctaacttaattaaatatatctagaaaaataccgaaaggtctacctagaaaatatatatctcgataattcataaactaattatttaatttctaacaaaaatataatatatatatttatatttgtctatttattttaattatatcattaatgaaaattacttgattttagttgatccaaaattaattaaaattaattttcaacatctaattttgaaaatatctacaattaaaataaatgcatttcaaaatctatgtgggaaataattattaaaatannntaaaatatattttgaaaatgattctaatttaggttgatctgaaattaacaatttttcaacttaaatataatcttctatttaattaaattcattaaattagaaataattaagtatatagaaaaaaataatttaattattaattctaaattaagtgctaagaaaaatatcttaatttatgttgttctaaaattaattaatttatcaatttataagttaaat

SEQ ID NO: 137563 - DNA, 1455 bp, Cannabis sativa
agtaaaacattgacaaaaaaaaacaaaatagttactgtaaaaacaaatagaacaaccagaaaaaaactgaagaaaaattgaaaaacaacaaaaagaaacttacattgcgttcagacttgaaaattttagctctcttaggcttaagagcgtcgaccttaactggaatggctcttttcttagtgcccgatgtctctggaacatcacccactaatttcttagcattttttttaaccccatcttagcttcgactttggatgaaacagttggaggtttcttagattttttagtgtgtttcttggccggagatggggatttcgaaccacttctagtggttgtcatttatatagaaaaaaaaatacaatatgggaagatgaacttacagttaaaaacgagagaaaataagaaagtggaagacaatgtaggttgaggaaaacgtgggttagggcttggagaaggtgatcgtgggaagaagaggtgggttagggcttggagtgggtgatcgtgtgaagaagaggttgaagacaatagaagcagagaaaaaaaaatcaaaaaaaaaaagggaaaaatggagttatgaaagaggtggcgtgttgaagcatgacatatacatgctaaaaggtaatattgtaattatgaaactttttgaaaactaaaattgaaaaatttaaaaggtaaaaaagtttagaaaaccgtgtaatgccaaaaaagtaaaaaaatgatgaaatatgacatcaggtgtaaaaatctcaaaaatctaattgataaccaaaaagtataatttaatgtaaaataatttgaaatgaatacaaattttaataaattaaaatatagaaggtaattacttagcttaatttctccaccatttagttctattacgtgcatggacttggtccgactaatcaaaagattagcttaaaattaaaattaaaaagttacagctaataaaataaatcttaatagaccaaaagatgagcttaaaattaaaaagttacagctaataaaataaatctttttaaggaaaaaactaaaaagtaattaatttaattttaataaaaattgcattttgaaatttaaccaattacattttgaaaaagctgaaaaaacgtgttacaattaatatcagagaaatttaatataaaaagcaataaattctatttatataaaaaaaaatcaaatataaaaatgaaacaaatatacaattactttttcgattactatcattgaatgcaatgtcatctccacgcctccgtctaaagtgagccaccaagaacattagccgatttgtattgctgccgccttcattttatagataaaatatttggaagtgcttccggtcacgaataaaagtgttcgacataagtaaatataaaattgagaaacactaaccacttcggattttacacataagtattgtaaatacatatataaacctgattaataataagaaaacaaaac

SEQ ID NO: 137564 - DNA, 855 bp, Cannabis sativa
tcttcttgattatagaaatctcatatgtgggttgcaatattaacttctactggcaacattgcctctgagccaaatgccaacgagaatggagtatgccttgttactgttttctcaattgttctgtgagcccaaagtacttgtggtagttcatcaacccatctaccttttacagcgtcgaacttccttttgatagtatccttcaaggtttttttaacagcttctacttgcccattcgcttgaagacttgacactgacgagaagctcttaataatcttgttcctctcgcaaaactcagtggataccttaccatcgaagtgagttccgttatcggatactatcttaatgggtaatccaaatccacaaattgtgttcttgacaataatgtcgagaacttttttgaaggttatggagaccagaggttcatcctctatccacttcgcgaaaaaatttacagccacaattgcgtacttttctcctcctcgccctgtggggagtgccccaatcaaattgattccccatattgcaaatgggtacgctgaggtcatcattcttagtttcgttggtggtacgcgaggtatatgtgaaaacctttgacatttatcgctttctttaacaaatttgtgtgtatccttatttatagttggccagtaacatccttgtctaattatcttctctgacaagcttttccaacctgcatgatctctacaaaagccctcatgaatttccctgatgatctcgcttgtttctacgatataaattgccttctactatcgtgtagcgaggcactgagtacaagagttttcgtgccttgcttttattttctagaagttgcccgttgagaagatagttgactat

SEQ ID NO: 137565 - DNA, 503 bp, Cannabis sativa
gagcatatgtacaaaatacaaaaataaatacaagacacatctcacattaacaaaaaaaaaataataataatagagccatttaagttataacatcacatagagtagaggagttaattgttcaatacaaaagaataatttactttgactgtaaacaatttcatttatacacatatttctatgattttaaccactattttcaaacaaaattagaataggaagaagatgcccacctcaaaattaaaccaaacaattcaaggaaaaaacttttaaaaatgaaagagtctagaaattgcaatagaagaatggtggagattggggaggaagatcctgctctcctcacttttggtagtttggttctttggccttgttcaaaagaaagacaaaaaatagggcaaaatgtgatagtgtattgggggtttcttgaatcttctatatatgttttttctttttatatttttttttaataaggaaatttcattaagattaacaggcatcagccttaa

SEQ ID NO: 137566 - DNA, 555 bp, Cannabis sativa
  modified_base (346)..(346): a, c, t, g, unknown or other
tcactattcctaaaactgttcatgaagcaatgtctcatcctggttggcttgttgcaataatagaagagatgaatgctttagttgcaaatggtacttgggacttgaataatttaccttcaagaaaacgggccatagggtgcaaatgggtgtttacggttaaattcaatcaagatggaacaattgctcgtttaaagacccatcttgttgccaagggttatgctcaaacctatgtagtggaccattgtgatactttttctcctgttgctaaactcacacttgttcaactgtttatttccatagcagctactcatcattggcctttgcatcagtttgatattaaaaatgntttgcttcatggagatcttgaggaagaagtgtatatggagcaacctcctgagtttgttgctcagagggaattagagggaattagggtaagtttctcgtctttgctcgtctttgcatctttgcaaatctttatatggattgaaacaaagttcttgtgcttgatttggtaaatttagttaggttgttgagaaatttggtttgttgaaaagt

SEQ ID NO: 137567 - DNA, 629 bp, Cannabis sativa
caatggaatattatttcaaacttcttgcgtagggactccacaacaaaatggcagagttgaacgtaagcatcgtcatattctatctgtggcaagggctttgctctttcaaggtcaccttcctcgttatttttggggtgaatgtgttttggcggcgagtcattcaatcaatagaacaccttctagtgttctaaaaaataaaactccttatgaagtcctatttaattctttgcctaccttcgacgaattgcgtgtgattggatccttatgttatgctcataatcaacgtgctaagggtgataagtttgcaagtcaaagtcgaaattgtgtctttgttgggtacccttttggtaaaaaatgatggcgactttttgatctagaaactaaatctttttttgtttctagggatgttaaattttttgaaaatcattttctttttggttgataatgctattgctactactatttctgatgttaactttggaaatatgaatttgagtggagatccttgtattattgatgattttttggggatacctaattcgttatcaacccaaattatccaacaaccactcactactcctccttcgcatgagcccactcataatactcaatctcatccagcacatatt

SEQ ID NO: 137568 - DNA, 647 bp, Cannabis sativa
tagtagtgactcgaccgctgatcagaaaaagaaagccaccatctacacctggtggctcaaattagaacaagaggttttgagagaagcagggtcaaggcaatcgccaaggtggttttgaaacccgatatacttacctagaatgtaccaactgtaagaagcatcatttgggagagtgtaaagggtgaggatgttttcagtgtggtttgtctggtcagtacaagagggattgtccacagctcaagaaagaagaagagaagatagcagcaaagcctgctccagcaagggtgtttgctcttactcaggctgatgcaaaaggtagcccctcagttgttacaggtcatctctcggtcaacaaatcttacttctctgtattgtttgactctggggtcactaattcctatgtggcggtcaaaattcttgataaattaggtagaccgtatgatagctatgataaagggtttggaaccctactacctggcgaggacttagttatctccaaaaggtgggttaggtctatgccgatcaaaattgaggaaagagagttgagtgctgatttagtgaaactgggtttagcaaattttgacattatacttagaatggatttcttatccaagtattctgctagtatcgactgtaagtggaagatg

SEQ ID NO: 137569 - DNA, 625 bp, Cannabis sativa
atgtcgcccacgcagactcaaggcggtggaggaaatctgtttcttgaggatgctgacgctgcgaacatagaggaagttgtggacgaggctgccagcaaagtcgtagatggatctactaccccaactgcccctgctgctcctaatgcttaattttttactttaacttttgctagactttttttatgcggtacaagggtactcgcaacttgtacttggataaatttttcttttgaacaaatttacatcccttcggggatatttatcgatattataacatttctgcagtacacgggtactcgtgttttcgctatttataatatctcaattgtggcttaattacagcgtagaaaaatttcaaaatttcaaaacctcgaaaaatttcataactctttattggtcaatagtacatagtgagttatataccccctatacttagaatatttatgtaaataaaatgactaagtataaatacataacgagtacaaacgatacagtgcgagtactattgataataaaactttaagctctcgtcattccaggctctttgaattgcagtaccatcgagttctgcgagtcggtatgttgcatcaccaattttttttgcgatgagatatggtccttccca

SEQ ID NO: 137570 - DNA, 1088 bp, Cannabis sativa
tttagggtgtgggaaatagagaaaaaataggtgggcatgtgggaaatagaaattaataaaagtaggtaggcacgtgagaaatgtggcgagaagtaggtgatgatttttttaatgggccttaaaaccgtcgggtatagtataggtcgtcgcctatactatactcgacggttttacaccgtcgggtataaggctctcccaaaaattcacattttattaaaaaatatcgcctattttgtttactacgattttaaaccgtcaggaatactaaatttttctcgacagatagttacttaatttttttagtgacggttcccgaaaaaaatcatttttaggatcgtcgtaaattttgattatttgtagtagtgtttaccatcacggggccaaacctctataacaaatttgtattcttattgcttaattattattattaattgtttctttagctaaaagcgaagtcaattgggtggttagtgtgaagtgtttgtggtgattaagaaaaaagatttctcttcataaattcctctcttacaatctctctattcttgtgcttgcattgaagacattagtgtgtgcgaggtatgttttagtactcattaatatgccctaaataaaatattacatcttgattgatgtttatgagcattgatgattattatttaatctgtggaataattatgcttatatttataatatttttagagatatactaattataaaagatactagtagtgctagtatctttttatgtgttaatatcgttattgatccaactaagtatcatgtcctatataatttaatgtaataatttttaaagagtattgctagacaatcgcaaaataatatgtctagaggtgctaaacactactgatacctaataataatactcttttcaataatactaaataccactagtaatttatagcaatactcatttaatattttgtaaatgtggatttcatttttatcattaattacctttttataaagaaatttgaattatcatacttacaaaatcccattatttttttcctaaatacatacttactaaaattgctaatatatgtcaattttactaattttctaaaact

SEQ ID NO: 137571 - DNA, 515 bp, Cannabis sativa
  modified_base (313)..(317): a, c, t, g, unknown or other
tccctaacttattaatttctccttacaccgcagtagatttgaaattgcactcttaattatatagaacgttctatatgatcgacggtatagatatgctataaaaatttaaccatcgttctaatctcaataatcaaagatcctttatagatgatttatactgagtagggataaagttaccgtttcaccccttaatgtattctatccttaaaacactgagcttcatataaatgatatttaataaactaatataattactgaaataagagattttcaatttatctctattaagccaagcttgaaggaaatcatcatnnnnnttctatgtccagatagaagctataaattccatatctatgtttagtgctcccactcaattgcactctcatgttcccaagttgtacgtgttacccaatctaaatggttggctttgactaacaactctaagaacacaaataacaatcttgagatcgaacctaaccatgtcaggattgaaatattttgatctaagatcaact

SEQ ID NO: 137572 - DNA, 612 bp, Cannabis sativa
  modified_base (585)..(586): a, c, t, g, unknown or other
ataaaaactttaatattaatagttatcttattattttttagccactaaaaaatctttaattataaggtatttggtcaacttcgagtatcccaaaataccccagtatttctaaaacaaccttatctcaataatctcaacaatttcaataactaatactgttgtaatatttttagtctccaatcgagtccctaaggtcgccaaacctaaaaatatttttattttatgaataacttacattatatccatatgttttaattaaatctctgtaattaataaattacacttattttattcacttattggatcttcagggtcaccgtacctgaaaatatttttatttcacaaataacttacattatatccacatattttaattaaatctccgtaattaataaattatgcttatttatccacttatagcaaaatttataatttatgctaaattaagttagcaggatcataattctactcattactacttaattaacccataattataataaattctaattattcataattaagtttccagaatattacaacatcagccaagtgtaggcctggactgttgggttttatgccctnnataaaactctttacaatctgattagt

SEQ ID NO: 137573 - DNA, 1346 bp, Cannabis sativa
tactaactagttactcattagtaactagttagtaactatagttactcataaattatataactagtaagtagctaaataaattagtaaatttgtagtatttctttatgatgtaggttgtgaggtcaatttgtaaggctttgacttatttggtgtcgatcggtttctaggtagctcgaggtatacatttactaacttttattataaattaattatgaatgcttaatagagtttgaatatcttaaatattcatccctagtgaagtaggttctacaatatattgtactgcaccagatcgatcgatgggtggaattatatgcatgctagatgagttggattatcttaaatattcattcgtagtgaagtaggttttgtaaatacatgtactgtagttgaattttttagaaacgttcaattatagtcgttatgctgcccaaattttggtagaattatgataatatatgattttagttctcttaaatttggttgttaggatatcgaaagtgactttatcggaagtcaagtacataatttttggtataaagtatgctttctttaacgttttttttaagtataaggatcattgtattgctcaatcaccaattacaactcaaacaattgcttctcacctattcctcttgcctttctattttatacatctttctataaaccattctctatctatagctttagccttttttggcattacatgataaattctatattgcaaatctcccttaattttcagtattccgaatataccacactttttgattccaaagagcatcatttcgggccctccaaatgtggtaagccgtggcagcaagtgcagcatgatgtatactcttctgagttgcagatagcttcgctttatcggtccatttagcaagttgcaacaacctaaaaacaacaagtcaaaatattaaatcaaaatacatggtagatacaacctaaaaacaactcctcgcaactcggcacataggccgatagagtcaatatatacattgttggagaagactgtcacctcatggctgctctagcttttctttacctttacctgcaccacattgcacccgtgagtcacaagaacttggcatgtaatgccccgatttctcgagacgtcacactagctagtccgtttaaaaccatttataataaagacgataaaagacttctttaataaaaaaaaactaagcatgagatctctttatatttataacaaaacattaattgattcataatctttaaaatataaatctttacaaaaattatttgaatcatgatctttaacaaaatatttttaaaccaaaacatcgtgataatcccctaacatgtaatccatgcctcga

SEQ ID NO: 137574 - DNA, 667 bp, Cannabis sativa
  modified_base (189)..(191): a, c, t, g, unknown or other
tttttatttttttttattttttgtataaatagttatttatcttttaataattaaatttgtagtaataattgttaacgcagattttcgttaactaaatttgagcatagccgtgatactctcacacagaaaaaataaaagttataaaaataaaagtatgaacacataaggtttttttacgtggttttgcannnaaaattctgcatagtccacgagttaatcttattcagatttctgattgtttttcaggccctctcttacatgagttttttcgtcccttttttgatcttgtttgccactatttataattacatagtggacaattaattacaaagttgaccgtaatttgtttacaatgatcatcccctaaaatcacgggatttgattacatatcacatagtgtaaatgcggacatgatttgaaaatcatgtacctgtgattttcccacttttactgggtcaaaatgatcgtgtattaaacatgtctttaattgttgtatctggagatgtctcgacagaagcttggttctagtgatctcaatagcaagctgggattagttttccttccaaggtcgatgatgcatgtcttgtgacgatcgcaggttttattcacaaagagttcttttgaagctcgtttgaatgttaactttgttagaattattttaccagga

SEQ ID NO: 137575 - DNA, 558 bp, Cannabis sativa
  modified_base (232)..(233): a, c, t, g, unknown or other
aaaataaaatttactctatattttgttttgataaaataataataattatttgtttaagaaaacctacaattagatcatgtacctatttccttctaaaagatattaacagaaatagtgagtgactcttaaattttgatctatgaggaattcatgtttggaataggttaatgttagcaagagaatggtaatgttaaacattaccttgtttgtttggaaggtttaatcttaaaanntcattcccttggtaatataaatactcttgaggagggtaatgttgatgcattaaaaaagggtgggattagttattcccttctattatattaatttgaataatatttttaaattaataaataaatttaataccattaatattatgatttattataaataaaatattatttagtttgtatgatcggtttttttgaaactgagttatttttatgttattagcaataacatatatataaattttaagagaataatgtataaatgacatagcgaacaaaaataaataacatagtgatatatagaaatacttattttaattaataaaaaata

SEQ ID NO: 137576 - DNA, 990 bp, Cannabis sativa
atggtaactccacaagattagcgcacaattctctgccttcaattctaattaataccgatctaacccactttcttgaaataatcaattccctattaggcaacagggttccaaatcctatctcaaaaacatcaataggcctaccaagctgattaagaactctcgaacatacatatgatcgtgtagcacctgaatcaaataaaacagtaaaagcagaaccattgataagaagctgacctgtgactactaaagggctggcggcaacatctgcctgagtgatggcaaatacacgcgctggtgcgggtttaattttaggcttgggttcctctttcttcaactggggacagtctttcttgaggtgtcccactgatttacactggaaacaagctctccggttacaagtcctgggatgatgtttcttgcagcgcgggcactcaggataggaataagtctgacgtccccctttattctggtttcctctaaacctcttactttttcctgaactccccaaaaatgagaaagttctcttcttttgctcaaaagtggaatcaccactctcttttccagggccagaaatagggagagtagtggtcccaccagcaccaagagtctctcaggtttcttgcaagaacttaactgctccttcagctcgaagagccttgtcaaccatttcagcataggttgtggtatcatttatcgtgataaccagatcatgtttaatcttggcattcaaccctgccaagtacttctccttttcactaaaatccgttggtacaatcccataggccaatttagccaagcgatcaaacttggttgtatattcagtcactgacatgccttcgccttgtaccaactaaacaaactctttccgtttcgcactccggaccgcctcattgtagtatttagcattaaacaaatcccagaattcctcccaggtcattctagcaacatccttggtgagggataccgtttcccaccacaccaaggcatcct

SEQ ID NO: 137577 - DNA, 844 bp, Cannabis sativa
  modified_base (62)..(77): a, c, t, g, unknown or other
atctgttaggtggtggagctatatcatggagaagtacaaaacaaacactcataacttcatcnnnnnnnnnnnnnnnntttgttgcatgttataaggcatccaaccatggaatatggctgagaaattttgttaccggcctgcgcattgtgaataaaattgaaagattacttaagttgtattgtgacagtaagtcagctgtaatgtattctaacaacaacaagagctcgacgaagtcaaaacatactgacaccaagttccttgttgaaaaaaaaagggtacaaagtggatagatttgtatataacacttaggtacaaactccatgattatcgatccctttactaagggtttgccacccaaggtctttcatgagcacattgctcgcattggtgttttagatcatgaggatatctaaattcagtgggagtttgtctttattatccttagtgtgttttatttatttcatgaaatatgtgtatttggatatttttttttatcggaaattatgttatttagtttatttcactttgtaaattaagttaaggtttagatctctatgaagtaaagtatgaccaattaaaaattgacatgaatagatcaccatgcatgtaattttcataccacattatcatgattgatccatgtcatttaactatgtggatatatgtgaccattgatgagtttagttgtgattgatacaacaaaaactgctttgatcctatgttgactagtcaatggacgagattgtacatgcctatggttatgatgacaaagttatgagctcaataaggttaacgcatttatatgtatacatatgtggctcagtgagagattgttagaaattta

SEQ ID NO: 137578 - DNA, 1221 bp, Cannabis sativa
atcctctcttgatcagcagaagtttgtattatctaacactttgttaacaattcattaaaaatacttttaatatatttagtcttttcttgagaaataaattacaaaatttaatatttttgtcatttatttgagtttatattcttgtactaaatatagatgcatctcaattgtgaatgtattttatctatttaacatttgatatatattatttataagttttattgtatatatttacataaaatattatattacatattacgtaagtttaagttctatttctttagataaaatgtttaattattaaaaaaaattacataaggttgttattctaattcttaaactataataatataatttaatttattttaataaaaatcaaaattcggtttaactaagttttgtcttacctcttattaatcagatatatttcttgaattctttttattcaacatatgttgttgttacatcttttggtgacttgacttgtattgcgactgctaatatatctgcttttcgaatgttaaaatattttagatttaattaagactttgcatagaaggaaaatattattagtatattaaattaccaatttattctttagaagacatttaggggtctaaatcattaaaattgactattttgtagtttttgtcttcattttttatcaatttttctatttttgttgtagagacaattatccatttgtatacataacctttacaaataattttttttaataataatgatataatttcaaaatattaaatgcaatagtatgaaataatttaaaaactaaactttaagaaaggtttgattttatctttctatatattaatttttttaaaaaagaaatatctttaaatggtttttataaaatttaagaataaggttcgacatttactttttattcaaaaaagattcttctttgacctgacattatcatttttaatactaaatttattgattttaaaaacatattataaaataaagaaaaagttaaaaaaaaaaaaaatcctaaattaaaaatcagtttttccatcggtactctctttcttattctttcctccctcttctcacagagacgactggctacacatctcgaaggtactggggcgacggaggcagaggacgacagatcaatggaaaaagacaagatcgagatttatggaatttcgggaagtcggtggtactccgatagtcttaacaaagaattgcgtgaga

SEQ ID NO: 137579 - DNA, 912 bp, Cannabis sativa
  modified_base (553)..(569): a, c, t, g, unknown or other
ccttatcacaagttgtactcacccatgataggataacctgcaagtaaacccatacaagcagcgaaaaagtatatcctgctagtgctatgctcacacaagcagcaaaaaacttatcctataagtgttattatcacacaaacagtcaaaagtcttatcactatcacacactaataacattagcataaaacaacaatccaccatagaataaaatatttaaatacaatcctataatacagttgtatgttttaacatatacatcatgtgtacagatgtacactcttcttacctcagttgttaagaacaccttcttgctacttcaagcatctcactgaatttttttgttgagaactagatcttaaacattcattaacacaacaatacactcaaaatacattcaagtatgaatctctgtactcataaagaaacttacgtaaaaatacataacacataagctaatttcacttgcatgccacaccattcataatcatttatcattttgattcacacaaacacgttgtatgttcccacataaacatttttaacgtaaaacatnnnnnnnnnnnnnnnnnttttacgtgaaattttactaaaaaattatttatttactaaatatgccattaggtaattatttatcaaattcagaagatatcatattctttaaccatttatatagatcctaaaacatatccaatctgcttagaaatatgtgtggaatactaaccatgattatgtataaatttatatgttaaaaatgaataaaattctaataaataattaaccaaaaatagtaaaatatctcaacatagtctcaaattaattcaagacaccataattgtaacgcccgtacttttataaaaatattaaattttatttacaagcgttaaacgcgaaaaatcataatgtcgcattttt

SEQ ID NO: 137580 - DNA, 1514 bp, Cannabis sativa
  modified_base (1465)..(1487): a, c, t, g, unknown or other
tatatctcccttgtgattgaagtgtgagacatgactttatagagcattgaaacagcttcaaaatgcaagttgaatcgcgtcaatcgaatcaatattgtgtgagttatagttttttgactgaaggtagttcatgaatgacgtcaacctgaacgttgggtaagtgtaaaaacgtccaagggatgtcctttaagatgcctaagtgatgttataagtaatgttataacatcacttagtctatttttatgtactggcgaagctggtcaccaattctcaaagatgttgctcttttgcagaaatgagagactcaaaactctttattttcgattgagtttctcatgttggaaatgagaaatacaaagttgagaatttgacctttctgacttcatggatcttagtaattttgaaaaactagaaggacgatcaaagtggaatcagaatcggataagcagaacctagcgcaccagaccatttgtcaacgtgggcactaggtacccattcctgagctcctaggatcttgttttgatactttcaaggcttttgaacaagaggagaagatcccctaccccattttgaccattttagattcaatggtcgcatcagatttggcatttgagtaattgaaggcaaggtggccccatttccaggggtttgggtttgtagttttctacccgagtttgcttgaatcttcattatttctgataatagaaaaagttcccagaacactttttggtgaactttatcgaaaacagcccaggttgacatattgtgaacctaggcgctaggcccagctccagatgtcaacttgggcgtcgtgtcccagttttgccctttcagaaattctgtttggtccccaaaaatagttgaatctcaatattttttgaaaacaaagaagatacttgaaagtgttcttgaaaaactccatttaaaattgtccaggttgacaaaatgtcaacttgggggcagggctagccccaagtgtcaacctgggtgttggaccctatttttagcacccaagaagtgttatgttttctttgaaaggacttattttcccatttttgataaagatagagaagatgaaaaattcggatcgtcgatctagtacttggaaggcgctcagattgatgaattgtcaacttgggtgttgggtgctcggggccccgagtgctcaaaaatgaacttgctccaattttgattttgatgcctcaaatatgtccgtaatatgtctagttggtgtcctaatgtaatttttgacccattttcacaaagacggtcccgaaaactgaaaccctagttgggaatatcaacttgggcgtcgggtgaaaccctaagtgcccaagttggtttccaagttacaggttcatgtactctcagcttccatggattggattaggttgctccatgtcttcatggtacaaaatactaaaatataatgagttggattcaagttactgttgggttttatgcnnnnnnnnnnnnnnnnnnnnnnntaatcatatttacttattaatatagat

SEQ ID NO: 137581 - DNA, 822 bp, Cannabis sativa
tcctggtaaaatattcccaacagcgacgccccctcgatctagtgaaggcggaagctctggagaaagaggtggacaaactgctagctagtggcatgatccgggatgtatattatctagaatggctggccaatccggtactagtgcctaaactgaatgggacatggcgagtgtgtatagacttcactaatctaaataaggcctgcccaaaagattgcttccccttaccccgaattgactagatggtagacgccacctccggattcaagttattgtctttcatggatgcctacgccggctataaccagatcaagatgctcattgcagaccaagaatgcactagcttgaggaccgataaaggggtatactgctacctggtcatgcccttcaggctaaaaaatgctggtgcaacgtattagagaacggttaaccggatgtttaaaggcctcctggggcggaacatggaggtttacgtggacgacatgttggtcaaatcaaaggcatgtgggagtcatgcaaacgacctcgcggaatgctttgaagtggtccggaggtatggaatgaaacttaacccgaagaagtacactttcggggttaaatcaggaaagtttctggggtttatcgtcaaccaaagggggatagaggcaaacccggaaaaaattcaagccctccaaaacatgccttctcccaagaagcacaatgatttgcaaagcctaatcggaaaagttgctgccctaagccggtttatttcccgatccacagacaagtgcattcccctcttcaacattctgaagaaatgctagaaatttgaatggaccgaagaat

SEQ ID NO: 137582 - DNA, 631 bp, Cannabis sativa
gatatggtcaaagctaggccttggcccccgcatcttctcactttggaaatccctcggggatgagtggacaagccctgttgcactccgttccgcccgcaagcttagcaggtccttctcaaggctctcagagcaagagatcctcaaaaggtagcaatcggtcggaggataagcggcagaaaagggggtacactccccagtatacccagtacacggagctaacggactcccaagagcgtgtgtattttgtaccaggcaaaatacgcactaccggagaccgcctcctctgtacaaggacagctgccggagggaccccaataaaagatgcgagtaccacaacgacattgggcacaacaccaatgaatgcaaaaatctcaaggatgagatcgaaaacttgatccgattgggacatctttacgagtggatcaagaactggttgcctcacctcaatccggtccaggcagcaggagctttgcctcaaggaccaccagggggtgtagccggagcattggccccagttgctcccctcggagatgcacagcatatccctggcctgccaccaagacccaacgggagagtggctatgatctcaggaggacctcacatcgggggaactacccggaaggagctgaaa

SEQ ID NO: 137583 - DNA, 537 bp, Cannabis sativa
  modified_base (131)..(134): a, c, t, g, unknown or other
  modified_base (493)..(501): a, c, t, g, unknown or other
aatatataaagatataaaaattatttaattatttaaagtgagagaaaaagtttattaatatttatttatttactttaagcttgttttttaagagtacatcatttacctattttttctcttttttttttttnnnntttttatttttttttatttttaactttaaaaagaatttcgaactatgtcattactcgattgaacctgaaaaaaatattattttataggcatacataatgatagattgtgtttgaaaaataatttgttgtttcaatatatgaaaaatagactaataggtttattggtgtatatcattatgtttgattatagtttactctttattgaaaaatataaactaatagatttattagtatatacgaaaagaaaaataaaaatttgtttcaatatgctaaaataaactaatagatttattagtatatacaatagtacagcttatacaaaaaggatgttgtgtaaactgttaattccatttttggcnnnnnnnnntgacaaaaatattttattatttaatgtatatttcgg

SEQ ID NO: 137584 - DNA, 1081 bp, Cannabis sativa
tacaaggaaccttctgaaaagcaacaagagcgaattgataaacgcctctccaagcaaacttctcgaccatcatcaggtagtttatcgcatacataaatagcgcgttagaacttcacccttattagcattaatcattattttttgctgtaattgcataaatgactttcttgaagtccgcacccactcttaaccgcaagctaaaatctggaacagcggcaacttcccgtgtcgctcctcagaagaggaagagcgatgtggtggttactcctatcgcagattcttccaagaggccagctaagggcattcaagagaaagggaagaagctcgtgattgacccagcggtttgagctcgcaacatattgtctcttcaggagaaatttgtaagtgatgagttccaatcgaggattgacaagactcttactgaggagctgctacctcgctccgcagagttagcttcgcagttcattgctatgttctcgagggcttttgttattgggtccaaggaggttgaacttgcggagagacaccttgctcagcttcaggaagacaataagaagctgaagcaagatgcatcttctaaggacaaggagctcgaggaacttcgcaaggctaaggagcaagtcgagctcgaggccaaaaagctcagaaaaagatcgaggagatgtctcgcgacttggaggttgagaaggagaatggaaaaaggcagtatgaccaggcggtctcgaattacatctacatcactctctccaagattcctgacttcgacttttcaatccttggagcagaagccgttgaaatggctgaggcttttcgcgccatgtcgcccacacaaactcaaggtggtggagggaatcttctcgaggaagttgaggttgcggatgctgaagaagtcgagaatgaagccgtcagcaaagtcgcggatggatctgttcctgctactcccaatggttgactttacctttaatattcgcttgtgctaaactctatcctttttttttgtttatgcggtacaagggtactcgcaccttgtacttagacaaatttacatttgtgtttattttgaacgactttatatcctcgc

SEQ ID NO: 137585 - DNA, 764 bp, Cannabis sativa
agtaaacctgctattgcataaaaattgataatagaaaagtaatcttattaagtcatattcaatagatacaattaaaatcgaagccctagtttttattaactattaatttccctaaattatttctcctttcactgtttttattgttttctagttttaacctattcttaatttttatttaaccaaatagaagtaaaagtttaattttaacgttcttaactacaatccttgtgggatatcgacctcactcttggtgagtctattacttgtaaatgatacgtgcacttgcgtgtgcaaaatatcacaacaggataagttgagaactatcttttttttattacacattaaccaaatataactgtaaaatcattttacttggtaaataccctcttttataatcaaagtaccaaacataaactcacataacttgttaaaataaagttcctaacgcacataatgaaattatgagctataaaattaggtataaattaacgagtaataaaataaaggtaaaaattaaaataggaaaaaaaaaacagtgagtataaagtttatttcttttttattgtttttgtatttttttgaaattatccttatagtttgtcaaccactacaatttttacagtttttctctcacaacacaactatatattggcgggataatacatacataatcactagctacgtaccttaacatttccagcttgtttgatagcatccacaagcttgagttgaagaagaatatggtggcttcgaacatgaacacc

SEQ ID NO: 137586 - DNA, 894 bp, Cannabis sativa
agacaaggatattattggccaacggtcaataaggacacgcatgagtttgttaaaaaatgtgataggtgtcagaggttttcacatttacctcgtgtaccgccaacggaacttaggatgatgaccttgccttacccatttgctgaatgggggattggcctaattggggcattacccacagggcgaggaggagccaagtacgctgtggtagcagttgatttcttcattaaatggattgaggccgagcctcttgtttccatatcctgtaagaaagtcctcgacttcgttgtcaagagcattgtctgtaggtttggaattcccatgaagatagtatttgataacggaacccagtttgacagcaacttgttcactgaattctgtgtaagaaataaaataattaagagatgtcagtatccagacctcaggcgaatggacaagtggaagctattaataaaaccttgaaggatactatcaaaaagaagctagatgctgccaaaggcaggtggatcgacgagctaccataagtactttgggctcactgaattaccgagaagacagcaacgggacacactcccttcttgctagcatttgactcggaagcaatgctacttgttgaagtcaacatatcgactcacagacgagagttttataatcaagaagaaaaccaagaactcctaaagttatctttggatctgcttgatgaaaaatgaactgaatcgcaagtcactctgcagtgtatcaacaccgagttacaagatacttcaacaaaagagtcaagaaaaggctattcaatgttggagacttggtgctaaggcgagtatttgcaaacaggagagatgcgtctacaggagtgttcaacccaaactgggagggtccatatgtaatcgaagcagtagt

SEQ ID NO: 137587 - DNA, 549 bp, Cannabis sativa
ttgttttttttttctctctttatctagttgagttgaaaaaaaaaatacatatatatagtacatacatatagcaagagagtgggaactagatggagtgaacatgttgggttgaatatgaaattttaggtcagcgcttaagagaaaaagaaaaagtccttgataaattgaggtagttaggtcatgagcctaaaaatatcatcctttaccaaacccgaacctaaacctcacatttcaatcctattcaagtccttttgatctaagttgtaaagctaagctacattagtggagaggatagcactagttcaactaatggaagcaaactttttaaactttacgatcaagggtagttgctatagaagttcaaggtgttggtgggaagtatttgcacactttattgattgaattactcttggtaagtattaaggacataaatagcatgaaaaattatgttgaaacacacaagtcaaggcatattcactaccaccaattacacttccattccatctaattgtgagagcatttttcgtcgctaaaccaagtgtgaaagag

SEQ ID NO: 137588 - DNA, 723 bp, Cannabis sativa
ccctttagcttccttttttataaaattggttaaaaaaaaagggaagctaaaggcctatattatagtagtgaaatataaataatttggcacaacatttatgataaaaaatttctatcactacaaatatacaactttattattaatttttattctttattattttagtagtatatttagctataacattaataataaactattaatattcttaaaaaaatacctatcaagtaaaaataaattaaattttaaatattacaataaaaaaaatggaattattacataggaaatataaattgacattttatttacaaaaatacattcataagttaaagacaacatttataccttttatgtgattttaattattaaaatatcacttacactatcatcacttacacaatcaaacgatggttgcatggtggttgctgcgtggttgcacggtggttgcatcagacgaatcagaggatagttgcagtgtggttgctaggtggttggccgaaggttgcatcaaacgaaggtttcaatcatatgaaagtttctgagtgtttgttgggtggttggctgaaggttgcatcaggcgaaggttttaatcagatgaaataactgttagcaaaatgtttaggcaactgttgtgaaacatgaaaaattaaaacagtattttcacgtacgtaactctatctacatgtctcttaatgatttaatatgaataaattcaccattaga

SEQ ID NO: 137589 - DNA, 605 bp, Cannabis sativa
aactttaggatgcaatttatctgttatgagctttgcgttgttgatgtcaacctctggatcaatttttttttccagttgttttccaattttctgccatttcttcagcaacaagatttgcatagtcaactatgttgaattagttgttgtcacattcttctgtttcaatttctctttcttcttctgctagttgttccagtgtgaatgattcggttgttggcgcgttgttctcaatcattccctcaatttgttaaacttgtgttgttcttgattcgaatacaggtattgtacgtagcagttgttgtgttgttgttctgtgcgttgacgcacaatggatacgtggtgaaatcaatttctttgatctttagttgcaagtaaaagaagaggctcgcatcgttgaatatgttaatcggtggtatttcatattttgtttggtactggatttgcagggttatttttgtgggttcgcacgccaatgaagagagaaaaatttgtacaatatattgttcatacttgtaattttttggtatgaattctccactaacctcgtaattgacataattttttctttcttcctagcatctattgctcttcaagagaactggtat

SEQ ID NO: 137590 - DNA, 1595 bp, Cannabis sativa
  modified_base (36)..(39): a, c, t, g, unknown or other
tctagaaattcccgaaccaccttgatgtcttctagnnnnacagagtcaggccgagtggtatccaatacaacagccagaaactctagacatccatcacgtaacaattctttagttgttagtaccgaaattaccgagatctgagatccccgaacttatccgacaaaaacaaaaggttcttcaccttcaggttggaaaattaccatcttcctcttacaatcaatactggctgagtacttggacaagaaatccattcccagtataatatcaaaatctgttaaactcatctctatcaaatcagcactcaactctctatcctctattctgatcggcatagaggtaatccaccttttggagataactaactctccgtccggtaatagggctccaaaccctgattcacaactatcatgcggtctccaatttactaaaaaattctggttgccacataggaatgagtggccccagagtcaaacagcacagagaaataagagttgttgaccgagagttgacctgttaatactgaagggctggcttctgtatcagcctgagttatcacgaacacccttgctggagtgggtttcactgcagtctttggtgcttcagtcttgagttggggacaatcccatttataatgccctggcataccgcattaaaaacacccctgccctctacactcccccaaatggttccttttacaactggggcactctaggtaagtgtatcaggtttcagaattaccctgccgattgcctcgaccctggttccctcggaacctcttgttctgacctaagccactggatgcagtaggtgcctttcttttctgatcattgcccaagccactacctcccctactaaagcttaatgtaggaagggtaggagccccaccaataaccagagtctctcgagattctaaggtgcacttcactgcaccctcagctcgcaatgccttatccaccatatcagcatagctggtgttgtcatcgatagtaatcattaggtcgtgtctgatttttgcatttaatccatccaagtacttccttttcttactgaaatcggttggcacaattcccgaggccgaccttgccaagcgatcatactgagtcgtgtattcagtcacactcataatttctttctgagtcaactgcgtaaattcttttcttttggaacttctgactgcctcgttatagtacttggcattgaacaactcatggaatttctcccaggtcattgtaataacgtcatgaatcatagacaccatgtcccaccaaaccagagcgtcttcttgaaattggaaagtggcataggcaaccctatcattactagtgacgcccataaagttcaagatccttgtgatcacaattagccactgctcggctttcataacatcgggacctctacctcagccacgaatatattaaggggaatctgagctccctgaccaccactcgatcaaaccgaatttccctttcgcctagcgtccatactaatctaaatagtctgcgtaactaagagctagtctggtcagatcgtgatcaaagaaaaacttactaatgtcgcttatttggaaattaaaaacatgcatctattctactatc

SEQ ID NO: 137591 - DNA, 1115 bp, Cannabis sativa
  modified_base (676)..(676): a, c, t, g, unknown or other
ccaacacaataccaacttttgccagcacaaaaatgtgctcgcaaaagtgacatttcttgtagtgataatacatagattattataaatttccctacaaaaatttaataaaatacacacatcaaacatggtcaatattatacatataaatgtatatatataaacactataatataggatgctttacaccacatactgaaatttctaacttttttatttttttattgtggggcggaatttttttttgaaaatactgtctatcgtaagttttcactgttgttccacgattattttttagttgctttatttttgttttaattgttctatttttttttattgtataatttttttttataaaaagacagcatttttgtaaaaaatttcgtgtaacagtaaaattgtaaacttttatccaaaattcaatattttttgtaaaaacccttataatatagctactcatcacagataataagatcaaacaaaagtcatactactaattaattttctttaatgaatttgcctaataagccaaatgttaaaaaaaattatctaacgctttaaaaataaaataaaactaatcgccctttaaacattacatttagatatatgattatttaaattataattaaatattattgtagtaataaagtaatataattaaatattaatatttaataanaatgatcaaaatatttatttagtatgatttttttaagacgattagaaatttgttcttctaattattgaatgttgcaattgaattaaaaatttataccattttaaaaataaaaaaaattaatttttattaatgtaataatataattaaaaagaaccaattaaaaaaatataattataaaaaaaggtttaaaactgtaatgtgacttaaaaaaaaaataactcctcatacattcactttgcttgcacttaactcccaaaatttaaattttggcggtaaaactctcaaaactacaaaatcgttagcaatgtataatttttatccattttaggtgttaattgctatgttagattgtccacgtgtacatagcgtacacgtggctcaattatgtacacataattttatttttttaaaaaattaaaaataaaaaatctaaaaaaaa

SEQ ID NO: 137592 - DNA, 808 bp, Cannabis sativa
  modified_base (749)..(753): a, c, t, g, unknown or other
attcaagtgtgtaagtctcctctattcaaaaaaaaatatcttgattcacattatttgtaacatgtctattttttctcaacatttgttaagtatagttggttcttgagatactaattagttattctctttaaaaagcataacatgtatacttgtcatttgtatgaaatttgattagttgcttgctctagagtaccttatatttattgtacatattttaattatttttatttattttgggttttcaaaaataaaaataaaataaaataaaaaaagagagtgaggcgtttgtgtcttgacttgtgggctaagaaaattttgagctttgtttggtaagtatcaacatttaatctaaattgatttattttgataagttaccttttaaagtttgatatcatgttcattgtattttgtcattgatcttgaaggattttcttaaattgcctaattttgaaaagtattttggttattctagtttctttttatttattttttaaataattttggaaaaagagtggggcagtttctttgtgttcgtggactggtggtttttcaaatttgaagttggtttccttttttgcgcctctctcccttgattatttataccaactctctttgtcatttattctcaccacctacccgattcctcttctttgtttccttgtttctttatttttctttctctctttcagatgcccatggcgaagataaagaacttaagccaaccaaaaagtgtaaagcccgcttagttnnnnnggaaattatcagttgtttatgattaattatgaaattatttagagctatttaaata

SEQ ID NO: 137593 - DNA, 561 bp, Cannabis sativa
atacactcaattcatcaaaatcacaacaacacttaagaacatgcaatcacaagagaaaaacacaattcaagacatgcttttaccacaataaattcagcaagaagtcatcattaaattctacataaacttagcaagaagttacctaaaccccaagctcaagaatcgacaattccaaagcttcaatcaacaaccacttcaagcaattcttcaacaactcaagttgaaaatcaaatagggttaaagggggagagagaggattcgggtgagagggagaaaaatccagaaaatttatctattttcataaaaaaaatcaacttttattaaatgtaactcaaatattgtcaaatgaccattttgccccaagggccaaaaagcatactctttaacacacaatggcaatttagtcattttatactcaaatatttccaaataaatttcagattatcaattaacaaataaaatttcaactaaaccaatcccatttgcatttcgggcccgaactcggttcggcccgaaattcccgattgtgactataccgcgccaacctgtcagaacacacct

SEQ ID NO: 137594 - DNA, 869 bp, Cannabis sativa
  modified_base (36)..(42): a, c, t, g, unknown or other
  modified_base (605)..(609): a, c, t, g, unknown or other
attctctgtttataattgtcgtacaattgtgattgnnnnnnntttaccaaaggctttgtacaggtataggtgcccccccaagtgactgagcaggcgtatgactattggtgacctgtcttttacaaatataatgtttatctgttcggtgttttaggtttgaccaaaccttttgtaagcattgtatggtaaattataaacatgctgatttttttgactcaattgaattttgaaataactatctttattcatttatggatcgaaaagtgtatttgttaccgtggtaacttacatcagagctatttgatctaatatgatcttttagcttaacatgaaataaaaaaaaattgcagacataagaaactgtactttaaagtggtcacccgacctgagtactttgtttcttttatcgaaatctttgggcgtagtccgctcagaaggccattcacttaaaagaaaatgttcatttagtacttaaagtgatcatccgacctgatactttattgctagtattttcttaaatgttctccattccaatactgtgatactagaatgagttgcatttttttgtcatacttacctaatttgtatgctccggagtcgagaannnnnaccacttgatatggtccttcctagttaggtcctagtacaccttccgtactgtctttggtgtttaggaatacccttctcaggaccatatctcccacagagaatttccgagcgttcacttgtttgttgaaatattgagctactttttgttgatgggccatcaactttaagtttgcagtttctcatctttcatcgatttcatcgagtgattctgcaaggagtatgtgactggtatcatgatcgtacgtcaatcttctgtggga

SEQ ID NO: 137595 - DNA, 1173 bp, Cannabis sativa
tgcgttatagtgtttatcgatgacatccttgtatactctcaattagaggaggagcacgagtatcatcttcaaatggtattgcagcgacctagagatcacaagtttatgcaaagttcaaaaagtgtgaattctggttgtcagatgtatcttttctagggcatattgtcggaaagaatgggattatggttgatccaagtaagattgagtcaatgaagaattgactgaggccaaaatcagtgacagaagtccaaagtttcctcgatttagctgggtattatcgacattttgttgagggattttctaaaatctctatgccactgactgagttaactaagaaaaatcagcgatttgtgaggtcagacaaatgtgaagcaagttttcaggagttgaagcaacgtttgataacagcaccggtgttagctttgcctttagattgagaaaagtttgttgtttactgtgatgcatccagacagggtctgggatgtgttctaatgcaggctgacaaagtcatagcctatgcctctcgtcaatttaaggattatgatcatcgttatccaactcatgatttagagcttcctgctgtggtttttgctctgaagatatgggggcattatctttatggtgaaaaagtgagatttatactgatcataaaagtctcaagtactttttcacccagaaagatttgaatatgaggcagaggaggtggctagaacttgttaaggactacgactgtgagattttgtatcaccccgggaaagctaatgttgtggctgatgcactgagtagaaaaggtcccaggcagatttccactgcggtgatgatagcccctcaactagcttctgaaatggttagtgcagggatagagtttatagttagaaagctgcacaacttgatacttcagtctgatctgttagaaagaatcagaaaggcacatctagaaggtcctgagctagtcaaaattcgggatgaggtaatggttggtcggcctaaagacttttcagtctcaaataatggaatgttgttgtataaagctcgagtttgtattcgtaatgttgatgaacttaagaaagtgatcctagatgaagctcacaccacaccttattcactgcatccaggaaccaccaagatgtatcaagatttaaaacccttcttctggtggtacgggatgaaaag

SEQ ID NO: 137596 - DNA, 878 bp, Cannabis sativa
aaaccctagtttagaaatcaaacataacctaattcccaacaaccccaaattaggtcaagcatcccatatttaatttaaaacagatagtacacaactccccgggccaaaacagaacataaagcaaacccgaaaaatttcccctgcaagcaaccggtcgaccggttctggcaaaccaggaactaaagtttccttctccaatttttgacccaaaactcctccaaacctaaccaaactttccagaacaatataatagctataaaacaacataatcaagcttcaaaatgcaacaactcaatcatttaatcaaattcacatactcaagtgaagaaaattctattttaacctcatctagcatattcaatccaaaccagttcctatatctaactattatgaatttaaacaacctcaaaactatcctaacatcatacccccaccatccatatagctcacagccccttgaaatttcaaaaccctattcaaaactaatctaaaacaataagaaatcaaggatgaacataataaaattacctcaaacttctatggttctccaaagaatgattcaacaagaaagagaggtgatttacaacaagcttttctcccaaaattggctgtcttgaaggcttggacgagagggagaagaaagagggagagttggtcactttttgatgaagttacttggttcctaagttatatagtaaagaaaatatttctttcttttctttctttttttttaaaaaaaaaaaacaatcagcccacactaataaatgtcaaaaagtcaaaatataaaaaaaatgactaatctaccctccccccaaaaacctaaacttaaattataatctaagggcattttggtaatttcactaattcaccaacccgac

SEQ ID NO: 137597 - DNA, 1156 bp, Cannabis sativa
  modified_base (720)..(724): a, c, t, g, unknown or other
cccatctcaagtattttgagatgcaaatggatttacaaggagtgcgaggggacgtatgttgcagaatcttccccaccacttgtcggaagccgcatagcaattgtatttcaagttggctcctggaaagtttagttcatggaaaaccttctcttcagaattccatgcacaattctcttctttacgtcagctcccattacatatgggagattcggtcgaagtaaaacagcgaccaggcgagcgactctgggcatacatcagtagattcatgacggaagcgaccaaggtgtcgcaggtaaccgaggatggaagatgtccgcgatactggggggcattgaagtccttggcgaactgtggaaggatataaggaaaaacgaaccggtcgactcaatgagtgatttccttgaccgggctgaaggtttcatcgagctcgaggaagccattcggcgagcagaaggtgagcaaaagccgggcaaaatgaaggctccttccattggaacatccgcccaacttccccattattccagcaattcaagtggcaagcgttcaggcaacaaccacaagcaaggaaatgggaagaagggaaagttcaccgaaaagtctggacagactccccgagatcatgccaaacacactgcattcactatcctaactgaagatatagagagtgtgtacatagcaactcagtcgttaattctgtacaagaagcctgggcccatgaannnnnataccaacaaaagggacatgatgaaattttgtcggttccatggagactacggccacgacaccaacgaatgctacaacttgaagcgggaaatagaatttcagatcaagaaaaacaacccgcactttcataagtatgtcaaggccaaccaaggtcaaaacaaccaggatctgttacctccaccgatatatggacacttgaaagtcattattggaggcccgcacatcgctggagacacaggcaaagctcaagagagatatgcccaaacaactctgtacaagtaagaagaagtcatcctggctgtggaagagaggaagcccaaagttccacgcgtaggagagccaaccataactttcaacgatgaagatgatgtccagatcaaattcctgcacaacgacccgctggtcgtggaagtccagatagcaaacaaaatgg

SEQ ID NO: 137598 - DNA, 522 bp, Cannabis sativa
tgatattatactcgaaatggacttgtccaaatattctgctagtattgattgtaaatagaaaatggtaacttttcaaccggagaatgaggaactattttttttgttggatcggttcaaggttctcgtgtcccaagaattttagcattgaaggctagggatttactacgcagtggatgtgtaggatttctagcggttgtaattgatttcggaaaacctgtgttactcagacccgaggaggtcaaagtggttaaagaattcctagatgtgtttcttgagaaattaccaggactaccaccacaacagaagatagatttcattattgacctgatacttggagaaaaatcggtttcaaaggcaccctaccgtatggctcctgcagaattaaaagagctaaagatacaacttcaagggatgctggatttagggttcacctgaccgagtgtatcgccctggggaactccagttttatttgtaaagaagaaagatgggactctgcgcatgtgtattgactatcgggagctg

SEQ ID NO: 137599 - DNA, 626 bp, Cannabis sativa
  modified_base (51)..(54): a, c, t, g, unknown or other
ttggaattgcttcacatggatcttatgggtccaattcaagttgaaagtatnnnnggtaagcgatatatttttgtgtgttgatgatttccctcactttacctgggtagattttttacaagaaaaagctgacacatttgatgattttaaaactctttgtttgagattaagaattgaaaaaggatataacattggtaaaattgtttgaattcggagtgatcatggtaaggagtttgagaactcagtatatgatgataaatataagtctacaggtataactcatgaatttttagctcctaaaactcctcaacaaaatagagttgttgagaggaagaatcgaactttgcaagagacaacaagagttatgttaaataggaagaagctaacaaaacgtttgtggggagaggctataaacacaactttctatacaataaaccaaaaaatcttatgaaatcttgaaatgtaagtgtccaaatgtaagtcattttcatatctttgggtgtgtttgttatgttttaagatatcgggagcatattggaaaatttaatgctaaaagtgatgttggtgtgtttattggatattccttaaacagtagagcttatcgtgtttataacatgagaactcaaact

SEQ ID NO: 137600 - DNA, 772 bp, Cannabis sativa
tatctcttctacttcaatttttggtgggctctttaattccactactaacatattttctgtcacctcaaaatagtcaggtctttttatttctttacagtcccgttcagttttagggtcaatggaatcgataatatctttcttactcttatcactaagtttgtaccgtacagtcttgaggcatggttcctccacaccattgacttctatagtataaggcttctcaaaaaaaaaactatagaatttcgttgctaactcatgtattaatattgtgtacctagttgtctcctcaacattctttgtggtattatgccaagttttatcgatatgataaagtaattcgagaacgtgagataatgccacccttaatactaaaaatttctcttgtgaccaaatcaaggctccccattttcttacaattttattaatctctccattgatagcgataatctccctcagagctctaagtattttatcttccttgcccaaaacatggtcgatcttaagcgataagatgctcttgatttctctaagtaccacttcaggcgacgctcttattttaggaggcatagtttatcaaagatctgcgtatcacatatccaactattaatggcaataccaagcatactaaaagtaacacttacgttatagtgagagggatctttttcagtcttctatatgtatgatgtgagtatccttcgagttaacggacgatcgactctgataccaactgtaacaccccgatattttgccttattttacaaaatactaactt

SEQ ID NO: 137601 - DNA, 523 bp, Cannabis sativa
agcaattgtggctccaagaaggtgataataatagtaaatattttcatgcttatgctactaatcaacgtcgtaataactttattgctaaactcaaagataagaatggcaattgggttgattggagttcgggattgcctcaagttatggtcgattatttttttgcacttttttcttcttcaaataatttttggctggaagttacgagtgctgtggaaaatcgagttttcagctgaccaaaatgtcgacttgctacagtcggttactgatgaggaggttcgcaaggctttatttcagatgcaccctgacaaggcttcgggtcctgaaaaaatgactccagcatttatccaaaaatgctggtcggttgtgagtagtgatgtaatcactttggtttgaaatttctttgaaacggggcagcttcctagaggtttaaataacactaatttagtgttaattcctaagaagaaacaaccaatggacatgggagacttaagacctatttccctttgtaacattctctataaga

SEQ ID NO: 137602 - DNA, 516 bp, Cannabis sativa
atcccaaaacttctgataaaaccctggactcatgccatccggaccaggcgatttgtcagggtgcatttgaaaaagtgctgcacgaacctcatcttcctcaacaaaaccgagaagcatagcattttggtcttccgtaatagagggttgaactccttgtaaaacatgactaatatcaacatttgaagcttcaaacaatctattaaaataaatctaccatcaccccacctagaccgacctcccaatccacccacactccatcttctctttgcagacgttgtatgtgattttgccttttcctcgagctagcaaagttgtggaaacatctgctattagtatcaccagaacgtagccaaaactgcttcgacctttgcttctaataaatttctctcttcgtcaaaatctcaaaaagttcctcttgcttctccttatgtagtctgaccgaaacctcatcccttctcttctttaaacttcgaatcaccattttacattggttgattctgtaacaccctaactacc

SEQ ID NO: 137603 - DNA, 827 bp, Cannabis sativa
  modified_base (290)..(304): a, c, t, g, unknown or other
  modified_base (766)..(771): a, c, t, g, unknown or other
tcatatttaggatgttaaaaatatacttgttagtaaatttagatcctgataaaatatatttcaacaattggcctcaaagtcaggttaattgattcactttcaagtaatatggatttaaaacgatgtatgtgtgattttgatgtgattcatgttgatctatgtgtttattggtgattgattgatgtttgcaaattgtttacgtaaaataattggattttttttctggaattatttttattgggcagtatggaaaaaattaagcaatttacttttttacagaacttaatttnnnnnnnnnnnnnnntagttatgaatttttaaaaatcggaaaaaaatcagcaagtgtgacacctccatgcgcgcgcggacacgagtgatcactccatatccgaaggagcatggccaggatgtctgaaggcgattccctacacgcgcagacaggctgcatgcagcctttgtatgcggcaaacctttcccaaatcaccatccctgtgctcgcggatggtatgcactgcatacgtgcataccatccgcaccaaatttttttttttttattttttcatattttttcaatgtattaatttcttattttttgtgtaatttcgtatttagaatttatttttcatatttcaaatctaattatcataattaaattaattatttttttaattaatttaagatattagtagtttttgaaccttgaaaatagataaaaatctatctttttccttagttggttttctttatttttaaaatttgattattnnnnnntatttttaaatttaaggtctgatattttatattttagattatttaattaattttat

SEQ ID NO: 137604 - DNA, 636 bp, Cannabis sativa
gtataacagtatttttcacggcccttgtaccctcagaaatgattccccgatccactttactatcaacagtaggtattgcaacattactggcaggtatagcagtgtttttaagttcagtatcacccttttcagattccgtagcaccattcattttctcagttgaaatccccttgcttccaacatcatgttcaacagcagttagcttatccccttgttgttttttcttccacacaatcggtttccctttgttacagtttgaaattgagtgtccaagcatatcgcaggccgtacacttggttggaagccactcatattcaacaggttgttccattagttgtttcttctcatttacataagcaatagttctcaaaggttcttccttaatctcaacatccactaacaccctagcgcacttgatcatagaccgctcaagagtgaccttgtcagccataatcggctttcctatcgtgctaacaagtgcactaaaattcttcttccccctatattggagtcccaagccatttaacctcacccataccgggaccgatttgaccattcgggctgtatccatatcctcggaccaaggccttagaatcacaggtttcctgtcgaattgaattactctgctttcaagaa

SEQ ID NO: 137605 - DNA, 1508 bp, Cannabis sativa
ctaattaatatgattctgtcttctttaatttcaagtttttcttcttttgagaaactatatagtgtattcttgactattcttctttaagagtctttggttctacttgttttgtgcttcgtcctagtgtagagcgtaaaaaattgtcatcacactctactctttgtgtgtttcttggttatggataacgaaaaaaagggctatcattgttgtgatctagtttctcaaaaattgtatgtatctcttcatgttgtttttttaagcatatacctttctttactattcctggcactcctcgtaatttgacaattcatatcttattcacattgacccattatctgagtctgaatcatccactactcctacagttccttcccttcttcacactctcgcatgcattgtgttgaaaggtctcaagaattagatactggtactttgtaacctgaaattactcctccattagatactggtactttgcaacttgaattcgctcctccccctcctcctgcagttgttccagaccctcctgagattgtggaccctcctcctcactatcctcagcgcatttgtaagtctactcgccaaccaaattttacatactcttcttatcatacttcttttactttgttttttagcattactcattgtcattctgagcctttgtcctacaaagaggcaattattgatcccctttggcagcgtgctatgaatgaggaactccttgctttgcaaaagactcgtacttgggatttagcacttttgcttcctggtaaacatgctattggttctcattgggtttataaaatcaagaccaagtctgatgggtctattgaacagtacaaggctcaattagtgactaagggtttctcacaacagtatatggactttgaggagacttttgctcctgttccaaaaatgactactattcgtactcttactcttatagtagtggcatcggttcgtcaatggactatatctcaaatggatgttaagaatgcctttatgaatggtgacttacatgagaaagtctacatagttcctcctcttggtgttcctcataagaaaggtgaggtttgtaagttaaaaaggccttgtatggttttaaacaagctccctgagcattgtttcagaagttctctactgttattttgtctcttgattttgtttcaaaaaatcatgattcaactttatttgtcaagtgcacatccatccacatgttgtattatgctttccttttatgttgatgatatgattattactggggatgatttatagggaattgaaatattaaagtcagaagtagctttttagtttgagatgaaggatttgggttcactgcgttatttttgggtattgaagttgctttttctccaaaagtttatcttctttctcaattaaagtacactaatgactttattgagcgtgctcgccttactgatactagagttgttgacactccctctgagttgaatgttcaatattctccttctgatggctctcctttggaagat

SEQ ID NO: 137606 - DNA, 728 bp, Cannabis sativa
tgtggatttaaactaattagtcccatgattttacagtatactggatttacactgatatgataatcaacaatttggtttgcttacacttgtatagtgaaatgtcttttccaagacattagcaaagttagcttgtattagatgtagatatacacagtggaaaaaaatcataaacttgtcataatatctttcgaagtaaatatcacttagttgatcttagatcaatgatctcaatcttgagatggttaggttttggtttaagtactgtattactattacatgtgttctttgacttgttcattaaaggtaaccaattggattgaactaacacttacatcttgggagtatggtagtgcaattgagtgggagcactaatcatagatatgaaacttatagcttctataaacacatagaagtgaaacgatagttttcttagagcttggctaaattagtttaaatggtggaatactcatttcagtaattatattagtgtattgaaatatcatttacaattagttaaatattttaaagataaaatacagtgaagggtagaacggtaaattttcccctactcaatgtaaattattaatagaagatcgttgattatttggattgaaacaatgaataatttatagcgtatctatatttggtgttgagcgttttatatattcaggagtacaattttaaatctatagtagagtctagaggaattaataaaatagagaatttac

SEQ ID NO: 137607 - DNA, 633 bp, Cannabis sativa
acccgaactcaaacacccacacatagaatcagacccaaagctagacctagacccggacaaaaactcgaacccagaccacgatagaaaccaaggacatagacccagaacttaatccagacccagatcgtgattggaaattgggactcagacaaaacttataccaagacccaggaggtgaacttacacccggagcatgatctggacctagattgaaatccagacccgaacccaaactcatactaggatacgacctccgacccgaactcaaaccgaaactcgaacagaatcacaaaaggaactagaaccgaactaggactaggaccaggaccaggacctaaacccaaacccgaacctagatcaaaacccagacagagacccaaacccgaactaagactaggactcgaacaccaacctagaccgggacccgaacccacacaataacagggacttggaaccagtattaagatagggacctgggaaatagaacgaggaccgggacctagtacccgaccaatacctgaacttgaacctaggaccgcgctcgtgaccctgcaccagaattggaaccagactgggacccgagattgggatctgggtctgaacccaaggcttggacaaaacccgtagtcggtg

SEQ ID NO: 137608 - DNA, 1471 bp, Cannabis sativa
ttatttgtttaggaaattttttttaatcaaatgtaagcataaaaaatcaaatttccctcgtacaatttaaattaatatcttatatattattgtgtataagtatgtcacaatcattacaattttttttttttaaaaaaaaaaaaatctgttttaaaataaactaatcatgtaaggtgtgattggctattaaagatgtatataaattaatctaatgtaataacaatcaatcgatccagtaaagttttttttttttttttggtaaattaattgacaaaatatttattaattaatttgtgtttttcttagcaattatattaattttagtataattgctcatttcttttatggaaattcttttgtatttgtttgggaaatttttcttgcagagaataaattctctttatggaaatttgcctatttttagaaacttgacttttcctttttttaattgatgatttcagttttgtcatacttttagcagatcaaataatctttatttggcatgtattgaagacaaaattataatcttggtcatttttggaaagtttcttttttggtcctgatttgatgcaacacagtctaattctgatgctacaaataaaaaaaaaattaaaaaagttttgtgcagctgggaaatcgtgtttcttgttgtctatagggttgttatgttctataaatagaaactagagagcaaacgatttacctcttctaactttattttttatattttcgtctttgtgagaagagagtttcttttgcgaaaacctagctagagtgttcatctaggttttagtgtttgttttgttcttatactgttcgtagaattggttgaaaaacttgtttgaacaaatgtgggtcttcaagagaagatttttctaagtctcatttcgggaggaagtgagcatatatcttcgagagaagatttgtttaaaactttactttgggaggaagtaagcacacatcaatagctgaagagagtttactacttggtgtatttcagagattatattcgcaaggtggattacaaagggtaccgacaaattactagagggagtctaaatttatttaagtcaattgcttttgtaattttgatactttactaattgatttcattctctgggcatgaccccgtagctcgaacactgaaaccacatataattctcttgtgttaagtttttaatttgtgcactatttatttttagttctattttgattctacaaatctgtgttctgctgtaacaggattccagtctattgctgcagatcgttactgttattttttaattactaaagtttagtaaatatattggcatttgcaaaaacatagtttttttaattagtattagagtgggacactaaactcttagtgtggtcctttaacattttctcatatttttgtaatatgttccctttgcagaaagaaattctattgtttatccaccactcctcaataattctaactatccttatt

SEQ ID NO: 137609 - DNA, 904 bp, Cannabis sativa
taactgcaataaattaaaatttataactctaaaattatatttaatcaatagatatccaaggaaatcttgagacacttagtcaaatttaacctcttactcatgtatgaagaatttcatcatatttgaaaacattgcaaaattgaatttccatttttccaattttttagttttcctaattaaactattatttctaaaataattggtatttggagagaaagaacttttagttttaactagcaatagaatataaaacagaaaaagaattaaattaaaacaaaataggttcaaaattgtaccctactcacctcttaatgtatattttcactccttgatagaagtcccatatgcaatcttaccatattttcactactgtcataatatgtcgatcaagacaagagcccccaattaaacattaacacttttcaatcttgctattcatattacagaaagaaacaatttttattaagaaaatattttaacaaactgaattatcataccaaccgaaagaccttactagtcttatcaaaaaacattttaccaccatactggtttaccaaaaaaacaaaacaaaccatactggcttacataaacatgcctgaacgtaactatgaagcacccaaaagtgtaaaccacgaaagacaaaaacataccacaataaatttgtaaaaacatcgtgacccagaaaagaaaaaaccacatatcctttaaaattcatcagtcgaaaatcaccataagatcaaaactaaatagattggttaaaccaaatactggaataaggatattaagagatgcaataaaactattcaggaaatccaacaacaaaactgagatttaattctataatttggaactacctatgcatacttcaaaaaaactgaagaaaaaacgaaagcaaattctggga

SEQ ID NO: 137610 - DNA, 639 bp, Cannabis sativa
gttttctaatttctcagctcaaaacaaacacatcacaaccaacaacaacattataaataaggatcaacctgcccatttgaagagagtttttatttttggcccagagaaaaagacttgcagcaaccattttttcttacgagaatcacctcagaaataaaagagaaaaacagagagagttagagagaaatattgtaatacaaactagaaattaaaaggaagaaaaagagagaaagagaaagagcaagagattacctactaagctttgtggctaggaatctccaatccttgtaactgatattgttttgataatgaagactcaagcaactttgagggtcgcttgacggagacgtacctctgatttagagggaactccgaaatcatttcttggtgttcttcttctttattttttgctggtttttctttagtctttctctggctttttgggttgtgttttgtgtgtgttgcaggtgtgaaggagctgctgtaggaggaagaaaaatgcagcagtaggtttgggttagaaagctctcttagagcttaaagaaggagattagaagggctgaagaagaaagaaaaaaaatgcagcagtgggttgaaggtgatgagggttcggctgctaagttttcagcaagaagaaga

SEQ ID NO: 137611 - DNA, 732 bp, Cannabis sativa
gttttcacttgcccagttatgaagcctcctctggatcttatctaaaatctcaccacagtcagctgctttccattttgttatctcaagtgaacccctaaatattttagaggaaacattccttcttccatcttgattaagtctaagagaagagtcttgcaatcctccttgataccaccaaaataggcctgagacttgtccttgtttatagtaagacctgttactgcacaaaaatcgttaataatttgattaatgatctggatagagttgatattacctttacaaaagataataaggtcatcagcgaagcaaagattaattagcttcacttttttacatagaggatgaaagccaaagcttttgtctctgaagcttggaggagcagctgggttagatattccataatcaaaacaaagagcaaaggagatttagggtcaccttgggaaaaacttttctctcctttgaaagctccatgaagcatgccatcgatcatgagcgagtaagaagtaccctttaaacaaaccagaacccacttaataaattgtgatggaagacatagaccctcaagtaaattcaaaataaagcgccaatccaccgtgtcataggctttacaaaggtctattttgaataagcaccttgcatagatatttttttttagcataccccttgagaatgtcttgaaaaatgaagatattgtgagccagtaatttgtctttgataaaaactccttgattg

SEQ ID NO: 137612 - DNA, 981 bp, Cannabis sativa
  modified_base (353)..(354): a, c, t, g, unknown or other
caagttctggtcctagtttgggggctcaattcctaggtctgggtcctgcatctatgtttgggtcttaggtgccagtttgggtcaatgttcgtgttccgattcgggttcgagtttggtccgagtctagggaccagtttggtttgtatcaaagtttgggtcccagtcccagtctgggtcttggttttgggtcctaggtccttgttcttgggtcctggtttcagccgcgattttttggtctgggtctaggtcctggtcagggtctgggtctaggtccccgtcttagtttaggtcctaggtcataagtcctggtctagttccaagtcctggtatgggttctggtctgagtttgggtnnaggtttgggtcctgttacagtcctagtcctactctgatttcggttccaggtccggtatctggtcggacctgaacctgggacctgatcccacacccaaactcggagctagacatggatctagatacaaacctggacatgaacccagacgcggacccatatccagactgggatcaaaacgtggaacctggatcttgattgagacccagacccaaacctggacccgtacacaagacttggactcggacctagacaaaaacccagacctagacccaaccgttgaatcaaatcaggacttagaccccgacccaaaccccgactcgtacccgaacccaggcacgaagtcaaaatcggaactgggactagcatccgaacccaaacatggacccagactgggaccaagggcccagacctggaccaggatctggactcaaaccaactcgaacccagatctggacctagacccggattggaaacccgaacccaaactcggattaggacttgaaccgcgatcgggccctagacttggaccggaacctaggacccaaacctggacccaggacccgggcttcggaactggcactaagaccctggacttgagcccaaacccagaccctgaagttggaccca

SEQ ID NO: 137613 - DNA, 1479 bp, Cannabis sativa
  modified_base (26)..(39): a, c, t, g, unknown or other
  modified_base (1221)..(1235): a, c, t, g, unknown or other
gaaggttttccatgaactaaactttnnnnnnnnnnnnnngaaataccattgctgagcggcttctgacagagtggcagggaaaattctgcaacttacatctcctcgtaccccttgcaaatcaatttaaatttcaaagtacttgagatgggaaaggggatcttctctccccgtgtacatcttccacgtcgacatttttaacttgtggggcagtagcaggagattgatctcaggtgagaaaggagttctgcgtgctcgttctagctcaagatcactatttctttgtccaacaatgtcgtgaaacatatttttcagttcgtctagctgggcctgtacggctgggctgacctgcttcggattctggccaatttgaattacgtcagcatctttttgagcgagtacgggcttcgggctgcacgattgtcgtaagattctgattgtctattcccctcattctgtttagatcatttcttaggtcatgggttgtccctaacctttcgaacaaagaagcgcttggctaccttagcggttaattcgcttggttgacaggtggaatggcaccattgatctggttggaaccatcaggtatgacttctcccgacaaattaccagataaggtctgctcgcctaccgctgggcccacgagtggaactcgtgatcggggattgggcggctgaccatttgcagtctgagaagtattcatcgttggatcctcgtccgtttctcccaggggaataacattcggcgattgtcgacctacaatttggtaggctcttcgtatcagcacggtagcttaccgactgcgatcttcgatctctacatggtgaacccttaatgcctccatctctctatctctccattcgacgaacatgcgcctttgtttgtcaaacgcaagatttactccagcgcgtagttcgtcttgatcatgatgtagggtattattatgaccatgcatgagtccgagcgctgcacagagattttttaattcagtggcatctccgatagtcatctaggcgttggttccaggagaaacagttgtgttatgtacgccctggttgagtgcggaactgttattcccagtctcttacacaccaggcgcaatttcacctataagaactgcttcaccattcgccatgcttggcaattgtctatgattaacagcaggcggaaccctcgtgtttcctgtgaatttgttggatcagtcaggcctctacgagtttgcannnnnnnnnnnnnnnttggatgttgaataaagagcaatttgtgatcctgctctcaatgaaagcacaaaaatgttgacctcacttttagccaatgacaacgagtctattttataagcgataaatgatttataataacaaatatgtgataaagaaataaaaagacataggaattttatagaggttcaaccctcatccgttcggtaatagcctaatcctcgttgcttgtattgacttaagatcaaggagaaagattcctttt

SEQ ID NO: 137614 - DNA, 567 bp, Cannabis sativa
tatctggccagaggcgggagattgtttaagtatctagccatagtatgcaaactgatgcagaaattcaagaaagtagtcgtgtcccgagtaccgcgtgctcgtaactcaaacgcagacgcaatggcccgtttggcctcaactagagaagctgaattactcgatgtaattcctgttgacgtattggctcacccaacgataaatcgagaagagacaacggaaatagatatcgcccaagaggtcacctggatgactccaatagtcgcatatctggaaaagggtatcttgcctggtaataatatggaagcaagaaaactgcggcagcgggctgcccgatatgtcatctatgatggaagattatatcacagaagcttcagccaaccattacttaaatgtatcgacgtggtagactgcgactacatactccgtgaggtacacgggggtatttatgggaatcatacttgtggtaattccctcgccctaaaaatcatgcaacaagggtattactggcctatcttgcgacaagacgctttcgctttcgcgaagaaatgcgacaaatgtcagcggata

SEQ ID NO: 137615 - DNA, 651 bp, Cannabis sativa
cccttaaaaagttcttttttagtaaaaagatattttaagaattctagaggacattttcgtcaagatttttccttggaaaaatgcaccctttaattctgacagttgtacagtttcgagagtcattatgaatcatattttcatataatgtacaacttcctgccgttagatttctcattctttggctttcttgtcaatgaacttcgtgtataaaagggcatctcaagcttgtcatttttcattaacctctggcttcgttagtgagatccatattcagaagggatcatttccttcctgccaaaatgtcccttctgaactcagaagttcatccttccaaactcatattacccagatgcatcaaccattttccatttgtccttacaaacttcaagcctcaaccagagctggaaatgatggtatccagggctgaggagctttcgaccaatccaaaccaggggaaccctgtagctttccatggccgatcctcacaagtgatcctaaagggtataaatcttgtgagcgatctcaaaggtcctccttaggctgatgaagaattctaaaggaagatcggcatggtttcaagtggatatgggaaggaagttggcatgttttctatcagagaatccaaccaacccaagaccctaacctgtgcta

SEQ ID NO: 137616 - DNA, 679 bp, Cannabis sativa
tggaggcttgaagcggggacgttacaatatacacttcttcctcaagatctccatgaaaaaaatatttttaatatcactatgattcaaaggccaatgatgagtaacttccacggatatgaatagtcgaatagatgtgagtttatcaacaggagaaaaagtatcacaatagtccactccataggtttaagcataaccctttgcaacaagacagacctttaagcaaccaattattccatcttgattaaatttaatagttaacacccatttgcaccttatgacccgtttttctgatggtaaattgaccaagacccaagtgccacgtgcaactaaagcattcatctcttctatcattacagcaagccaacaaggatgagagatagcttcacaaacagttttaagaatagtgatagaatcaagagaagcaataaaagtgtaagaagaaggagagatgattataagaaataaaagaagaaatagaaaaagtacattggcgtttacctttacgtagtgcaatgaaaagatcatctttgagtgttggatctgatgacgaagatgttggattatgttttaccaggatctagatttactaccacgtatattatttaacatcctaaatatgaatctttaaaacaatgtaaataaatagatataaagttacagaaaccttacagtgggtgca

SEQ ID NO: 137617 - DNA, 922 bp, Cannabis sativa
  modified_base (798)..(813): a, c, t, g, unknown or other
cctgccctcagcttacaacatattgttggatcgtccagcactgatcaggctaggggcagtcagttcgatcaagcacttatccttgaaattccaaacattagatggcgtgggagtggtgtgtggcgaccaaaagttggctcgcgattgctatcacatagagttgcagcatagaaaagtcgatcatcagttgatgacgatcttggtagaagaaattgagaaaaaagatgaggatcttgaccctcgagttcaacatgcgaaaaacctattaaaaccaattgaggaattggaagaggttattctcgacccaggaaatcccacaaaatgtgtatacattgggaagaacctggaccagcagctcaaatagcaactaataagctttttgaaggcgaaccaggatcaattcgcctggagccatagagatatgatagggatcgaccctaatattatctgccatcatttaaatgtcgatccaagttacccagcgaagcgacagaaatggagacccttggattccgagaggcaaggggcactaaaacaagaagttgacaagttgttagtcaacgattttatacgcgaggtgttttatccctcgtggatagccaatcctgttctcgtctcgaagcccaacagaacttggaaaacttgtattgatttctctgatctgaataaggcgtgtccaaaagattgtttcccatttcccaggatcgaccaattagtggatgcaactgatgcacacgagcttatgtcatttatggacgcatattgcggatataactagatcaagaacatacaagcttnnnnnnnnnnnnnnnnctctattgttataaagtcatgtcgttcggactaaagaacactggggcaacatatcagcgattggtaaacgaaatgttcacaaactaaatagggcgaaacatggaggttt

SEQ ID NO: 137618 - DNA, 823 bp, Cannabis sativa
gattgatattgggattaagatatgactattattgttatgtaatgaataggtttcatgattagacaatgacaatgtgatgataccatgaatgtgatatacgggctcaccttattaggtgatgcgatatacttgtcgacgataccttattaggtacaggcaacagtgatatgagaatgccaggctatggcataaattgaaaccgttgttgggtttcttcttggcagcataccttattaggtacgagcggaaatggcatgtgaatgccgagttatggcatagactgaaacaattattgggtttcttcctgacggcgtaccttattaggtacgggcagtagtgacacgtgagtaccaggttttggtacgggctcttctgattaggtaatgcgatatattggtaccagattatggcacaggctcacctgattaggtgacacaataatattatgtatgatgttaaattatggcacaggctcacctgatttggtgatgcgaatatgcgatgtacgggtgccaggctatggcatgggcttgcctgattaggcaatacaatataggattgccagattaaagcaccgacttgcttgattagataatgtgatgtaatagagatggttactttatgaggtaacatatatataatttatattattagatgaatatgatttctattatgatataatagttttgtattgctaaatatgtttatactgatgtttattcatgacagatgcagtagtgatttgggtttcatgttattggtaatgcgtgattgtttgattctgattatctaagtataaatgataatattcaaataataaatt

SEQ ID NO: 137619 - DNA, 566 bp, Cannabis sativa
ttgggtcgagaacaacctcttccaattcttcaattggttttaataagtttctttcatcttgaatccgaggatcaagatcttcatccttctttcctctttcttctaccaagatctccattaactggtgaccggctattctgtgatataactctatgcgataacaatcgcgagctagcatctgatcacctcgcaccactcccacaccctcaggtgtttggcaatttacggatagatgcttgatcgaactaactgcccctagtccgatcaatgttgggcgacccaataatatattgtaagtcgatggcaggtcgacaaccaaaaagtcttgcatgattgtggaagataagggtgcctctcccaaggtcaatgtgagctcgattatgccatgactggcgatactgtcaccagtgaagctgcacaaatttaccatgcaaggcctcaattgggcctttcagccccatacttttcagtgtttccttgtaaaggatgtaactgaacttccgttatctatcaacaccctttttatccttttgttggcgagatggatagtaatcaccaatggatcg

SEQ ID NO: 137620 - DNA, 740 bp, Cannabis sativa
taattatactattttaattattaattaaaataaaaaattaaaatattaaataaaactaacagtacgtggcttggcacgtaacaatcacctagtatatatatataacagataactatttattagtttttatactaaattaaagttaccaaaatgtattttaaatattttaggatatcataatataactttaaaataattaattagttattaatttaaatgtctataaattttactaataaattatattgtgatttattttattttattgtaatttgttagttcttcaataaattgaaggtaacataaatattattataccaaaataatgtaaaaattatatattttaaataatataatataaactaataataacataaagttaataatatgagatattttattttaaaattgatcatatttatgatgaaaagtaattaattggtatcttatcgaaattataattaattggtccaaaaaatgtatcttatttgtaatgatttaaaaattatttgtaattttattctttatataatcaatcaaaatatatatataatttacatttaaaaatatgaattggcttaaacgtgaatgatatttttttaaaaaatataatttactaaaatggtagcttaattaacaacttattatttttgaaaataaatttaaaagttactcaaatatattaatacaacttaaattattaattattaaggtgtatacatataaattttagagctagc

SEQ ID NO: 137621 - DNA, 682 bp, Cannabis sativa
tattaaattaatttcatcttgtgattctggaaaggaagcgtgaaaaatccttcaaacttagtttgaaggtaccactgatgtaaatagatcacgttttaccatgttgcaaactagatttgatgaattgagaatgtcggaaactaaaacttcgtctgatttttatgaaaaattatctgatatctctaatgagtttaaaccttgggagaaaaattagatgaacctctcttggttgggaaaattgtctgtgtgcttcctaacaggtttgatacaaaatagctagcaatggaagaggcaaaagactttggcaaaatgaaagctgaggaactcatgggctctttaaaaacttttgagttaaatcaacaaattaagaaaaagagtaagcaaagtttcttgaatgagaaaagcaaaggtattgcgtttaatgtttctgaaaatgttgtttctgatgatgaaaatgatgatgaaatggccttgttgacaaaaaatttccaaaaatacatgaaatctgttagaaataaaaataatttttcaaaaactccaaaaggtaacagttctggtaacaatccctctaaacctctcagctaacaatgaaaagggtattcaatgcagagagtgtgaagggtatggtcatattcaatctgaatgtgccaataccttaaagaaaaataaaaagggtttgaat

SEQ ID NO: 137622 - DNA, 604 bp, Cannabis sativa
aggattcgaaggctcctgagtatactgtttggccctggaacctcctttcaacttagcttcccgcttcagttgaatcaactcattctttggatgagctcgttcaggtcgaccagcaacagatttcctcttcttccccgtcatggacttaggagaaaagtcctcaggatagagcccatacttcacaagattatcatcggaggtcaattggataatattcctgtcttcccttggcgaccgggcaagtttctgagctctatccctaagggcaagagtgaggggaggacggtgatatgtcgaaatctgctgaaaccgagtccgggtaatgctcggatccttcaccatgaagtactcataagcaaaacaccctatgttgctgatggcgttggcatctgtgccggtcagccacatgaagcctggttgagagaaatagaagtaccccgacctgccctgttggggggtggaattcaaagtaaagaaccaggcaaccacgtggggagaaggagtaccccatccttgggaagcgtagaggaggaagagggcggacaaatacttaatgcccttaggagtgatttggggccgacagagaccaaaaaagtccgccaca

SEQ ID NO: 137623 - DNA, 1488 bp, Cannabis sativa
tttatttagggcataaaacccaacaattgccaaatcgagggtcctgggtatgtctctgttttggaacttattttaccagtatctagatttactaacatgtatgtttgattataatctataatataacatcctaaacatgaatttcctaaaataatgaaataaacacatataaagttgtaaaaaatcttacatttatggtagcagaatataatagctcattttgttaagatctctaacctttgatccgttttctcgcagagtattaccaagatctgaacctggatctcctagataatggaattcttcacaaactttcacactatgattgagtattaacttgaattgtgtgaataagtactctcttctctacaggattcaaattctagagggcagaagtgaaggaatttcaaaatctaataggagtctctcttaatttatctgacaaagtgaattttgagttttcatcttatgttatcagggttacgagacaaagagcctatcattaccaatttataagatttcatccagggttaggatttaaattatatggaattaaaaaagataaaataatagcataaattaaacccttatggctaaacctattagtgggccctacaggttttaattttgcaattttatttaaccacttatcttttctttcacaaatgtcatttaattctaatcctataaatattaaatctatctatttaataattataataaaatttctatttaatttatttattaattaagctttacaaagtctcttaattaataaataaacgctaagttcgctctttcttctcaagtaagcccttacttactgaaaattcataaataatacatagtttaatttaaaattctaattgattaattaaaatcaattatctgagtctacaagctaatattatctcaactagtacgggggccatgtgcctatataatcaagctcacaataagtagatccaaaatttaccaagtaaatttcttaacttattcattcctcctgagtccactatagattcagaattgcactcctgattacatagaacactctatatgttctaaatataaatacgctattaattatctattatttctaaataatcaaagatcctctattgatgatttacatcgagtagagaaaaatttagcattctacccttcaatgtattttatctttaaaacacttatcttcctataaataatatttcagtaaactaatataattaataaaatacaagctcatctatttatctttgttaagccaagctcaaaggaaattatcattttacttctatgtcattatcgaagctataaattccgtatctatgattagcactcccactcaattgtactatcatgttcccaagatgtaagtattgggaagatccatttggtcagctttaacgaataactcaaagaacacagataatacaattaagccagaacctaattatctcgagattaagatctattgatctaaga

SEQ ID NO: 137624 - DNA, 546 bp, Cannabis sativa
gtttcgatgtttacttgttgaatttgaggtgattttgagttagaaaacgagtttagaactttttaaagcttagtccgaacgttaatggtgtttttcatataagggctcgatttttaatttctgttacataaggatggtaatatttatggcatatatgtgccttatgaagtttggagtgatgtggataagttttggtagtatttcggtgagcgcgaaaattgagcttttcgtatttcatagtttttagaaatttttaggagatcagaaatagtatttttgtcataacttttgactcgggtgtctgttttggacgttatatataccatttcgaagcttgcaacaagctctaaaatatggtttatgttttagagccaaaatataagtttattttagggtttttataccgtgggattttgtagaataccctagattatcttatattaatattaaacagtgttttgggtaaacaattattagtttactgttgttgtgacatagggccgagatcatcagggatagttctccacttgggttggccaaaatgta

SEQ ID NO: 137625 - DNA, 520 bp, Cannabis sativa
  modified_base (28)..(36): a, c, t, g, unknown or other
atagattagtgataataagtttataaannnnnnnnngtggcgtccctgagggtcagggcgttacagtaggacaacctggatctttatatttgattggtatcttttgtttgatcaccgcacttacttatcctgtcaagaatgcagttttcttgacatggtgcttccttttcatggtgcataaatccatgatgaccttggcatatgctggtacttgtttgatcacatgcaagagaggcaagttgatcttcacttgttttaaatattctaagatttcaccttgattttctagtacctttatagtagatttcaaagcctgagggaagggcaccttcactggaaggttctgtggtacatcaacatctggagtgggcattggtacactagtggtcttaggtaatagtgatattgtacttttaccacttcgagtagtaatggcattaaccccctttagattagactctgaagaagtagaggtttgtgccatatgttgccctttgggagtgattagaggttgagcggg

SEQ ID NO: 137626 - DNA, 1578 bp, Cannabis sativa
actttattacttgttacgattgcgtatacttaacttgcgtatgtaattttcacaacacacactaaatcaaaacaataagtttagagtatacatcttgaagcctatcagggtatccatgaaacttcttatatgttgtatctcttaatctagttgatgagaaattagcaatttggactcacactagtatctttcaaatcggttcaccacacacaaaaaatagtgtgggctattaggataaagtgtataacttttgttcttgttgagttctcaacacatgagcaagaacaatagagagaaaaactaatttccttttctctctgtatattttgaaatttgtagtgtaaaagaagtgttctgatttcttaaattaggctcctatttatagtagttgaatccctttaattgtttaattttttaaataaacaattatctaaataacaaaattcagttaatgatatttatgagggaatctcttgaaatattcatgactacttttcaaattagatatttacctaattgatttaactaaataattaattaacccaaaacaaatttccatagggacaaggacaagcataggtgcctaccattgtctttagtacaaggttagtgtcttttgtcgtgacaacttttgtcatgaaaaatctagtctcgacaaattttatcatgaatttttttgtcttttctctattttttgccaattcaaaatatacttttctgaacatcttcatacaactctttatacccacacttgacaatattttaaggtgacgattcagggaccatgaacttataattgtaaactccaataaagtagattatttattgagtctcatcagtcaaataatccattgtttattaattctatgattactccgctataaatttagaatttcacttttagtaattatagaattatatttaatgactttaacagcagtttccattgatataatcaattctagtgattagctctctatttgttggttcgtaattagtgtttgtcaaaattttattttacctttctaattacttctttatcttttaataccattaattcactagtggaagtataattcaagatcacatctgaatttgtgcacaacattctagttctagaatttacacttaaagggaaccaacattcaattcgttaggatagtcaggattctataattgtataccatgttaccagctatccatattattagattcccaaaacaaaagttgtaagaatcatcttctctgagaaactttaacaactgaatctaagaaactaataacatgaacaggagttcatgagaactcaaaatttaggttgatctactattgatcattgttatgatatgaattaggtttttatgataaacggcctgttaataaagatagcttcattcatatcgatcattgtcatatataatttctattatatacaacaccttcacttagatgtctcattatatcagtaattcgaactgagattacttgcaccatagaaagggcatcaatgaaccgtactagcaaccattgattaaagatttcataactttaatgtgttgctgattgttttattcatag

SEQ ID NO: 137627 - DNA, 594 bp, Cannabis sativa
ccgaagccctctactaggaacaatagggccaagagtgtagccactgcttacaacattgtattgcactgtggaaagacaaccatatatgagacggacccatttttcatcaaaccccaaccgagaaagcattggacaaagaaagtttcaatccactctatcatatgctttactcatgtccaacttcaaagccatataaccatctttaccaacatgtttccttttaagatagtgcaaaatctcaaaagaaaccattatattatcagtaataagcctccctggaatgaacgcactttggttaactgaaataacctctgaaagaagactcttcatcctatttgctaggactttggtgataattttagcaacaacattacacaaagaaatgggtcgtaattcacttatcagattaggtttctttttcttaggaatcaacacaatattagtattttgcatcccctccggcatctcttcagtttgaaagaaatccttcacatattttatcacatcgtttccaacaatactccaatatttttgaaagaatttaggattcataccatctggtcccggagacttatcagggtgcatttggaagac

SEQ ID NO: 137628 - DNA, 529 bp, Cannabis sativa
tgactaaattaggttactagctcattaaagtaagtacttaaatggcaagttttacattgtttacctaatatgactattagctcaaagcatgtttggtacgtcgtattgtattgtatgttattgtgtgtatagcattgtgttggattgtattatattgtattagtattatttaatataatactatatttggcattgacttgtattagcatgatgtataaaattatattatctttatcataaactccaccctgacctcgactcttagttcgggacaagatatatttttgagagtgagggcctaaaaatctaattttgcttaggcccatatattctcagggccaactctgagttcaggttaggagtctgaggctggagtctggggttcgggtcaaggtccgggttcgagtaattgggttcgagaacggggtcggggtccttaacccagaccttttgtaaatattataatataagttaatagattatttgttatgcattaaataatgcaatttacattatattaaaatttatg

SEQ ID NO: 137629 - DNA, 503 bp, Cannabis sativa
atggttggagttggcgacttgagacttatgggaattatttggttaaaagtgcatataaattcttgcaagaatctaagggtgcttggtgccgagatgctaatagtgatttttagaagcggctttggtcattaaaaattcctcttaagatcagtaattttttatagcgagctgtttcgggtgtgcttccaacgtgttttcaactctaaaaacgtcatgttcctgtcaatgctgactgccctttgtgtaactctagttctgaaactattcatcatgcgttggaagaatgctcatttgcaaaggctacttggcatcgtagcatagtggatgtcgaggctggggctgtaacattctgcagcaagttgttgagaatttttaccaaggggcacgaagttgaaatggaataagtggcgatggtaagttgggctatttggcgtgcgcggaatgactttgtttggcaaaagaagagttggcttgcttcaaatattgtaacatcagctagaatc

SEQ ID NO: 137630 - DNA, 775 bp, Cannabis sativa
cattttgatctcttccgtgccagtaatgctaggctcttcgcaaaactggataggaaccaagttcgctttatcacttacattactgcttgtcaatcgagctaatgcgtctgcagttgtgttttcttcccttggaatttgtctgagactgtagcttttgaattttgtgagtaggtcatgtatttttcttagatatgctatcatcttttctccccgagcctcgtattctctagattcgtgatttaccaccagttgtgaatcactacagattttgatgtgtttggctttcatctcccaggctagttttaggccagcgatcaaagcttcatattcggcttcgttattgcatgccttgaatccaaacttaactgtagcgtgtaggtgttgccccctaggtgtgacaagggcgattcctacatcggatagttgattcgtagctgacccgtccacatgtagtttccatgtcagcttgtcttcactgtttcttggctaaggtgtttgtactggcttggggttgccttccgatacgctttctggtttgcctgtgaattctgccacaaagtatgttagggcttgacctttgattgctgttcggggcttgaaggtaatttcatactgacccagttctaccgcccacttaagtaacagtccagaagcatccagcttttgcaatatttggcttaatggttggttagtgcacacctgaacagaatgagcttgaaaatagggccttaactttctccttgctagaatgaggcagtaagcgagtttctctatc

SEQ ID NO: 137631 - DNA, 972 bp, Cannabis sativa
  modified_base (738)..(740): a, c, t, g, unknown or other
aagctaaagcaaaatgacatatacttctcagttacacactaacacaacataacacaaacatgaccacataacattactaacatgactttaactacacaatattactacacaaacaactgaagacatcaatacaaacaaacgatttaaacaaaagcacacataacaacaacacataactaacatcatttaactaaacaaacacaactatcactcatatttacagtaaagcaaatagagtaaggaaagaagaaaactccctcaagagtcggactcttcaccatcaaccggatgccaaggcgcaagaatctgatctggaacatctggatatcctgggatatctgtgcgcacgttggtctgcagtgcacgcctcacccacatgtctttctctttcgtactccaagtttatagatattttttttgaacccaatactcccagttgttgcagcattgcttcaacaattcattctcttatgcatctctgtttcaaaatgctgagccaatgctataactcttgggacctgctgctttaaacaacaattcctgcttttcagcatatttcaacaacttcattttctgccttgcacctgcaataaaaatcaacaccatagcaaaaccattagtaagtgttgaaatttgaaaattatatatatgtaattatataagtatgtatataatatattttttttctttttcttctttttctcttttttttttcttttttttttcaaggggtggcannncccaaacttattataaaatatatatatatagctaaatataatcttgtttccctgctcccgggttgcccaaaggtgattcactaaagccatggcaacccgaagtcctttttcctcaaacctcttccaaagttatggaggtttttgctcgatcaacctcatcacccccaaacttgactccttggcctttcaccaagaattttcttcttgaaagtgcatcacgtagttctaccac

SEQ ID NO: 137632 - DNA, 668 bp, Cannabis sativa
atgatccatgtgttgagatagaaatggaatctagagagatgaaattgcgagatggttcagccaaatcgcgaggagaacaagttcagagcgacttttctagtgcgcgaattgggattgattttggtcaccgtcattctccagttacagacagctaggtagagaaaatgcagaaacttgactttcaaaacacagcctaagatatttggagtaatttcaaacctaatcaggtactcactctctctactcgattggaatatactgaacctttaaagataggtgaccaaactgttgctcgcctaaacctggaagatgttgagatggaatcatcaatgtggaaaaatgctattgtctgtatagttctcggttctaatccctcattcaaggtttttgaaggttttgttaaaagggtctgggcaacctaggaatagaaaaaattgtaagaatgcactctggatttactcttgtaagtttcagggatgaagcaacttgtgacctaatattggagacaggggttattcaaattgatagaaagccagtggttcttcgtccattaacaacgaataagtactcgatgagaatggtaaagtctgtcccggtgtggataagattgaatggataggcattgcaatattgggagaagaaaaatcttagtgttggaaattatttta

SEQ ID NO: 137633 - DNA, 556 bp, Cannabis sativa
tatttttaaattgtttatctaatactttaataacatccctaattttcatattgttttataaaatccatatttagtaatacgatttattagtaattatacatcatagatattaatcatttaattttcttaagaatatttgatatctagtaattactactttattatattgtttgaatttaatcacatcaaaattcaaatctaaatataatttaagtgtccatttcttaaagtcaatgactaagtcatctttttcttaatagatatttttttcgaactcctcatataccataatcaattttaataaggttaaagtttatcatttattgaaattctatattcaatatcatattaatgtattgaataattattgaggctattaatgtgattattgaatagtcatatttcgactccaaggttcgaaattaaaaagtgttaactttcacattaattttttttttctcattaagctttaatgtttcatatgtcaaaataatcactaatttaaattagtttgacactcgaaccttttggtatatatagtagaacctctatctaa

SEQ ID NO: 137634 - DNA, 1505 bp, Cannabis sativa
tcactaacgctcgtacttacgcccagtacgtcgctaggaaaatcgcatcacctatttaggtgagcccataatcacatgcataatatcatcacattattgatactcaaccaatcagtcttttcattatataacaatattaattatatctcaatattaatcatttcattgcaatactaattgtattacatacaatgtactatgcagtgcaatatacttttcttacctttaatccaagttcatacaagttgtccaacccaattggagaactatccccaataatctcggccctatgtcacaacaacggtaaaccaataagtatttatcctaaaacactgtttaatattcacataagacaatctaagattttctaccaaatcccgcggtataaatacactaaaataaacttatattttagctctaaaacatacatcatattgtagatcttgtcgcaagcttcaaaaaggtatatagaacgtccgaaatggacacccgagtcaaaagttatgaaaaaaatacgatttctgatatcttaggaatttctaaaaactatgaaactcgaaaatttttattttctcactcaccgaaacactacccaaacttatccaaatcacttcaaacttcacagggcacatatataccataaatattactatccttgtgtaacagaaattaaaattgagcccttaaatgaaaaacgccattaatgttcggactaaggtttaaaaagtttaaaactcgaattctaactcaaaatcacatcaaattcatcaagaaaacatcgaaactagtcccatgactacccaagaacaattctataaggtcagaaccttcataactattctaattcacaaaactcctatacaaaatcaattatttttaaattaaaaacgaaattaaaccataccttaagctttccttcttctaggatttgctatcctgctactaccggagcttagatcattaagtttcgggttgaaaatcgaagaaaatgggtataaggagagaaggttttgaagaagaagggagaatgagggtttcgttcattttttgtttactgtgttatatgttacttgatatagataatatatatggaaattgataaaacttatcagttaatgtattataataaaataataatattattaataaaaataaaataataatataatattaataaaaatattattattaatagttatattatcatttcttagccactaagaaatctatatttctaaggtatttgggcaacttcgaatactccatagtacgttggtaattctaaaatcaacttatcctattaatcccgtcaatatttctaactaaaatcgttgtgacatttttggcctccaatcgggtctctaggatcgccgaacttaaaaatatttttatttcccaaataactcattttctatccatgtattttaaataaatctctgtaattaacaaattacagttatttatccacttatcagatcttcaggatcgccggacctgaaaatatt

SEQ ID NO: 137635 - DNA, 1514 bp, Cannabis sativa
acaatggcagtagtgacactatcaatgtcggtgtttagggctcccatgacacatagtatgtaatcaagttaggggtagtgtacaagagtcactagtttcgtgacgaaatcagtaaccgataccgacataaggttccacttagtggtgtcgatgtgcaatggcagtagcgacactatcactgtcggtgttcaggggtcccgtgacacatagtatgtaataaagttaggggtagtgtaccacagtcactagtttcgtgacgaaatcactaaccgataccgaaataggattccacttagtggtgccgatgtacaatggcaatagtgacactatcactgttagtgattttgggtcccgtgacacatagtatgtaataaagttaagggtagtgtaccggagtcactagtttcgtgacaaaatcactaaccgatatcgaaatagggttccacttagtggtgccgatgtacaatggcagtagtgacactatcactgtcggtgtttaggggttcgtgacatatagtatgtaatcaagttaggggtagtgtaccagagttactagattcgttacaaaatcattaaccaataccgaaatagggttccccttagtagtgccgatctacaatggcagtagtgacactatcactgtcggtgtttaggtgtcccgtgacacatagtatataatcaagttaggggtagtgtaccggagtcaccagtttcatggcgaaatcattgaccgataccgaaatggggttccacttagtggtgccgatgtacaatggcagtagtgacactatcactgtcggtgtttaggggtcccgtgacacatagtatgtaatcacgttaggagtagtgtaccggagttactagttttgtgacaaaatcactaaccgatatcgaaatagggttcgacttagtggtgtcgatgtacaatggcagtagcggcactatcagtgtcggttattaggggtcccgtgacacatagtatgtaataaagttaggggtagtttactagagtcactagtttcgtgacaaaatcactatccgataccgaaatatggttccacttagtggtgccgatgtacaatggcagtagtgacactgacactgtcactgtcagtgatttggggtcccgtgacgcatagtatgtaatcatattatgggtagtgaatcggagtcactagattcgttacgaaatcattaaccgataccgaaatagggttccactgattggtgccgatgtacaatggcagtagtgacactatcactgtcggtgtttaggggtcccgtgacacatagtatgtaatcaagtaaggggtagtgtacctgaatcactaattgcgtgacgaaatcactaatcgatagaaaaataggggtcctgtaacgcactaaataattaggcacgttagccgagttatttaggaaaccctaatcacctaagcggtattactaatcaaaatagcacagaatttaaacttttgtaataaacggaatggaaataaaacttgtaataatttaaa

SEQ ID NO: 137636 - DNA, 1606 bp, Cannabis sativa
agttcctggtaaaataacttccaacatctcaaggccccacactacgagaacatcacgttcaaggagaaactatggtggtgataatcaaaacctagaaggaaggaacgaagataccaataattctacaggatatgtacctagaagtgaggatgcatatgatccaactaggtatgtaccattagtggaattagaaaatagaaaactctgacaacgcttagccgaatctaactaacgaaacactttgttagaaagagaagttgcagcagctagggcaactcaaggaactaatactcagaatcaacctgatcttggggtgagaagaccacgaggcagacatcgaggttcaagagccaggagacaagaagccaatcaaggaaatccccaaaacacctaggaggtacaacttgggggtactagggatgttctagtggatgaacaacaaaataatcaagagcaacatcgagatgttcctcagagatcccaaggatttatgaaccaagagaatgaacataatgatgtaccggaagcttctcacaggaatgaggatacgagatagcctcgacctagggtgcaagaaatccctcgtggcaacgagagaaaccctgagactcaacttaggataggtgggctgccactgagacaccctcagcgtccctctcgatcagagagggaaggtgtatacacgtacctaaatagaggacgtgtatctaacctcttctgaaggagaagaccaatacaagacgaagcaatttctagctcggagcactcaaggtctcgaggacacaatcgatcaagtaggcaaacacaagaagaaagtagaccccgatgttatgccgatcaagaaagcatgagcaatatgcgaagctatcaatctgagagttactcaaaaacgagatctgtgagtaattatgagcaaagacaacctgatctttgtgaacatttgaatcgaagacaacccaatctttgcgagcaactaaatcagaatgcacctgacttacgccattaacttaatgcaaatcaacaatagatggatcccatccagttgcgaatcattaagttggaggataagttcagaaagtatcaggatggggagcatgggaaattacctggttatgactcagatgaggaaaccgagtcgtttcatcctaatatttttaattttgaattccctcagggattcaaaaatccacacatctcacagtatgatggaactacagatccagtcgctcacttgaataactttaataccacaatgcgagtcagtaacgtttcgaattatttgcgttgcatcttattcccgacttctttaattagggcagcaagtagctggtttgacaagtttactcaccattcaataacatcttgggaaccgttgtctaaggactttaagaaacagcttcaagctactagagacaggcgacttgaagcatcatccctaactaacataaagcagcaaccaggcgagtcacttagagcttacctgagtcgcttcaggacagccactgcaaaggttagaaacttgaatgacaatatttagcttacttctcttcaagtagggatcacaaccaatctttcaacggccgggggtgagttgtgggatgactta

SEQ ID NO: 137637 - DNA, 2316 bp, Cannabis sativa
  modified_base (48)..(57): a, c, t, g, unknown or other
  modified_base (1104)..(1105): a, c, t, g, unknown or other
tcttcatcgttgaaggatatggtcggctctcctgctcgtggaactttnnnnnnnnnntcttccacggccaggataacttcttcttgtttgtgctgcactatttaggcatacctctcgcgagctttgcccgaatctccagcaatgtgagggcctccaataatgacttgcacatgtccatctactggtggaggtagcaagtcttggttgttctaaccttggtcggtcttgacatacttttgcaggtgtggattgtttttccttatcagaaattcaatttcccgcttcaagttctagcattcgttagtgtcgtggtcgtagtctccgtggaaccgacaaaactttatcatgtcccttttgttggcgtctttcttcatgggcctgggtttattgtacggggccagcgactgagttgacctgtatacacttttgatatctttagtcagaatagtgaatgcaatgtacttagcatgattctcccggggagtctgttcggatttttcagtgaactttcctttcttctcgttcccttgcttgtcgttgttgctggaacgcttgccacttgagcttgaattatttgggttgggaagttgggcgaatgttctagtggaagggcctttgacttgcccggcttttgttcacctttcgctcgttgaatggtttcttcgagcttgatgaagccttcggctcggtcaaggaaatcactcaatgagtctactgacccgttcttccttatatccttccaaagctcaccgaggactttgatgccccccagtatcgcggataaccttccatcctcgatacccgtgaaacttttattgcctccgtcatgaatctgctgatatatgcccggagtggctcgcctggtcgttgcttaacttcaaccaagtctcccaaatgcaatggaagttggcgtgaggaggagaattgtgcatggaatttcgatgagaaggttttccatgaactaaactttctaggagccaacttgaaataccattgttgagcagtttctaacagagtggcagggaagattctgcagcgtacatctccccgtaccccctgcaaatccattttcatttaaaaatacttgagatgggaaagaggatnntctctcccagtatacatcttccacgtcgtcattttgaacttgtggggtagtggcaggagattgatctctggtgagaaaggagtttcgtgtgcttggtccagcttaagatcattgtttctttgtccagccatgccgtggaaaatatttttcagtttgtcaagctgagcctgtacagctgctctaacttgctcggcattctggtcaatttgaattacgttagcatctttctcagcgggaatttgagtacgggctccaggctgcatgatcatcgtaatattttgttcgtctactcccctccttctgttcaaatcattctttaggtcatgggttgcccccaaccttttgaacacggaagtgcctggttgccttagcgattaattcgcttagttgtcgggtggaatggcaccattaatctggttggaaccatcaggtttgacttctcctgatgaattaccagacaaggtctgctcccctaccgctgggcccacgagcgaaactcgtgatcggggattgggcggctaaccatttgtagtctgggaagtattcatcgttggatcttcgtctgttccacccaagggaatgacattcggcggctgctaacctacattttgataggcttttcgtatcagcacggtagcctaccgactacaatttttgatatcttcatgatgagcctttaatgcctccatctctctatccctccattcggcgaacatgcgcctttattcgtcaaatgcgagatttacagcagcacgcagttcatcctgatcatgatgcaggctgttgttatgattctggatgagtccaagagcgtcgtggagattttgtaactcagtagcatctccgatggtcgtctgggcgttggttctaggcggaacagttgtgttatgaacgccctggtttggtgcagaactgttattcccagtcttttgcacactaggcgcggtttcatctataagaagtgttcccccattgcccacgttcgtcgtctgtccaggattaatagatggtggaacccttgtgtttcctagattctgcaaggcaggatccaccgtctgtgaatttgctagatcagtcaaacctctacgagtttgcaccatcctatttgtggtagattttgaatagagagcgattcttgagttcagctctcaatgaaagcaccaaaatgttgacctcacttttagcctacgacaatgagtctattttataag

SEQ ID NO: 137638 - DNA, 812 bp, Cannabis sativa
cagatagtaaatgggttagtccggtgcaagtagtaccaaagaaaggggggatgacagtaatcaagaatgagaagaacgaattgattcccacaagaacgcttactggttggaggatctgtatttactacaggaagctcaacaaggtaacaaggaaggaccattttcccttgccttttactaatcagatgttagaccggttggctgggcaagagtactactgtttcttatatggctattctgggtaccatcaaatagccatagcagctgaggatcaagagaagactacatttacatgtccatatggcactttttcttttaggagaatgccttttggattatgtaatgcaccgacaacattccagagatgtatgatggccatattctcagatctaacagagaagtgcatcgaggtgtttatggatgatttttcagcattcgactcatcatttgatcaatgtcttagcaatctggagttggtattaacaaggtgtgaagattctaatttggtgcttgactgggaaaaatgtcacatggttaaagaagggatagtgttggggcacaaaatttcaaaaagtggtattgatgtcgataaagctaaggtatccacaattgaaagcttaccccctccagtttcagttaagggagttcatagcttcttgggtcatgccgggttttacagaaggtttattaaggatttctccgaaattgcgaaaccattatctaatcttctcgctaatggagtgtcttttgagtttggaaaggattgtcttgaagcctttcaaattctcaagaagttaatctcagcaccaatt

SEQ ID NO: 137639 - DNA, 688 bp, Cannabis sativa
tagtgggaaatattttagagaaaataaaatatcgaggttaaacggggttatgaaaattgaccaatttacccctagttttgagaaacacctaggttatgactttgacggcatttaagtcattttctttagtgaaggataggtggctgccctaggaaagtgacacctagcaagctaatttcagcaagggaaatggattttccctaatcttcatttcatttagtgaattaaaagaaaatacaaaaaaatcaagagaagctctctttttccttctctctctcttcgaaaccagcaagaacaaggaggattgctgctgatttgtggtggtttcagcaaggaaatcttaggagaatcaagctaagttaagccctagtagcacccttccttagtttttaagttttacttggtttgagtttatgattttgagaattagtggctgttagggttaggttgagttgtagtttagatttttaggttcatttgagttagtttaagcttcttccagctgattttgatgtttgttttaggttttgtgcaagtttgaggatagaaaccttaacttggatctctaatggcatgttttgattcagtgggtttttctatggtttactggttggattatgttgtgtataccctaattaggtactctggaaggtttggttacatttggtggagttttgagcaagaaatg

SEQ ID NO: 137640 - DNA, 863 bp, Cannabis sativa
cccagtcggggatccacgtcttctccccgccttgggtggttccctatttggcaatgctctttcccttgtctgaacattgactggaggattattcctttttagccttggttagggcaaggttgtaacattctcgtgcaacttgttggttcactctcagacatcttaccccattctttgttgggaacttgacgcacgaatgaaatatcgatgtaacagcttttaagtcatataaggctggtcggcccaacatgacgttaaaggctgatggaacatccaataccaaaaactgtgccatcacagttatcctcttcggagcttgcccaacagtgaggggtaggcgaatttgccctaaaagtgcaacactctggccggagaaaccgtatacgggctagaggcaggggatcaaatctttgagttggagccccattttttcatatggtgttttgaacaagatatttgatgaggctccattgtctatcatagttcattccactattttgttagctatctgcacttccacaactaatggatcattgtgcaggaagagaaccttgacagcatcttcttcattgaatattatagtgggttcccctacctgtggtatttttggcttcctttcttctacggccaggaccacttctttttgctcgtgctgtaaggttcgggcatacctttcccgcgctttgctcgaatctccagctatatgcgggcccccaatgatgacttgcaaatatccatctattggtggaggtagtaataaatcttggttattgtctgcctgggcgaccttctaattctggtcggccttgacatatttttgcacatgcgggttattttttcttatcaggaattcaatttcccgc

SEQ ID NO: 137641 - DNA, 2781 bp, Cannabis sativa
  modified_base (27)..(43): a, c, t, g, unknown or other
  modified_base (2036)..(2038): a, c, t, g, unknown or other
aggttgttaatcaaacatacttgttannnnnnnnnnnnnnnnntaaaataatttccaacaggagcagcatgtaataaaggagcagactgtaaaggatgccgccatggcatcgaaacctcctgttagtggtaatgtcagtaaggggaccgacggtgataaccctgatcacaaacgaaatgctgatgcttctggaacattagggagtgacaaaaagtttcgaggaaacaaaggtggccgtcagggccgcgggtcttcattctgatctcatcatgagtgtccgaaatgtaagaaacaccatcagggggaaatgttgggccaaggctatgttccatatttgatatggattgtatgaatcagatgtcccaggattacctagacagatgtgtgattgtgtttattgatgacatcttggtttattttgcattagaagaggaacatgagtcgcatcttaaatcagtattgcaacagttacgagatcacaagctgtacgcaaagttcagaaagtgtgaattctggttatctcatgtctcctttctagggcacatattagataaagatgggatcatggttgatccgcctaagattgaagctgttcgagattggccaccaccgaagtcggctactgaagttagaagctttttgggtttagctgggtattatcatcggtttgtcggggtttctcaaagattgttgtacccttaacggagctgacccgaaagaacctgaagtttgtttggactaatcggtgtgagaaaaattttctggagttaaaacagcacttgattaccgctccagtgctaactattccttcttataaggaaaagtttgttgtttattgtgatgcctcgagacagggtctgggatgtgttcttatgcaagctggaaaggtaatagcctatgcttctcagcagttaacgtagtacaaacagacgtaccttactcacgacttagaactcgcagcagtagtatttgcgctaaagatttagcgacattacttatatggtgagaaatgtgagatacacactgatcataaaagtttgaaatacttcttcacccagaaagacttgaatatgagacagagacgctggctagagttggtgaaggattatgattttaagatcctttatcaccctggtaaggccaacgttgttgctgatggcagagtcagactaatacagtgaagcaaatctcccaacaattagcaaatgaaatgacccaagctaaaatcaagttggttgtggggaaattggctaatatttccctgcaatctactcttttggagcgaatcagagaagcacaattgcaagatccatagttagtgaaatcccgagatagggtttcagctgggaaaactaatgactttacagtggatgatacgagaatgctacgatttatgaatcgtgtttgtgtgcctatggatgatgatattaaaagagagattatgaatgaatctcatacaactccttactcagttcatccaaggtcaacgaagatgtatcaagacctcaaggcgatattctggtggtcaggcatgaagaatgatattgctgaatatgttgctaagtgtcttacttgtcagcaagcgaaggttgaacatcagaggcctgcagggttgctgcagccactgaatattccagagtggaaatgggaagacattgctatggactttatggtaggattgcctaaaaccatgggacagtacgactctgtgtgggtcatagtggatagatttacaaagtcagcgcacttcttacctgttcggatgaacttctccattgatcagtatgctgagttatatgttagagaaattgtttgtcttcatggtgtcccaaagtccattatttcggatagagatctgaagttcacatcgagattctgggaaagtctacatcgagctatgggtactcagttgaagttcaacacagcatttcatcctcagacggatgaacaatctgagaggactatttagattttagaagacacgctacaggcatgtatattggattttgaagaatcatgggtaaagtaccttcccnnnatcgagttctcgtacaacaacagctatccggtaacgaacgggatggctccttatgaacttttatatggaagaaaatacatatcacttattcaccgggatgaagtaggtgaaagaaagttcctgggtcccgaggttgttcagagaacaagtgaggcagttaataaaattagagcacgaatgctcgcagctcagagcagacagaagagttatgcagatccaaagtaacgagatattgatttctagatcgggaacatggtatttttccgggtatcgcctatgaaaggcataaatcgctttggtaagaaaggaaagcttagcccgaggttcattggacctttcgaaattcttgaaaggatagagcaagtagcatacaggttggctatgcccccagcgctggcacctgtacatgatgtgttccacgtttcgatgcttcgaaagtatgtctcagacccgtcccatattctgagtaatgaagtattggaactttagtcatatttatcatacgactagtgcaagtactggatagaagagaaaaagtattgagaaacaagataattgcactgataaagatattatggaggaacagtaaattggaagaggcaacctgggaagtcgagacagatatgcaacagaattattcggagttgttcaggtaaatttcgggacaaaatttttataaggagggaataattgtaataccctaaaattaaaaaaaaaatggattagcgaactctaactagtta

SEQ ID NO: 137642 - DNA, 1462 bp, Cannabis sativa
atatacatgactatatcgtgatggttaaaatatttttgaaatgggtaagatagtaacgaacaaatcaaagaactcgtgtaatataattaagttagagtttaaccatctaaaagttaaagaaaatttgctaagaaaatgactcgatttgtttctcttggtgttactgatgaacatgctgctgcatctgcctctacttttgttcttagaaatgactgaattcaacttgcgttcggaaagaatggagacaagtcaagccttacttctcaggaggatggacaacatcataaaattcttctgatcaaatgatcatgcttaagtagtccattttttatctttactttttttctatgttttttgttgaactatgatgactttgtctattttgtttagtttctttggctccttcatagacaaaagggagagtagtatttattttttggattgttaattacaactctggacccttgttttagggggagttgttttgtttgtggtttgtgaacttttcagtttaaaaagttatttattttatgtgttcgtatactttcatgcagggggagtattttctatactctattatttttgtttctaacacttgatgtaggttttcttcttataaaatattttttcaatcaaagtgccaaaattaattctattttggcatctttaatttgacaaaaatattttaaaatttattacttaatttcgactatagtatttatttggttttcatattttgtgtatttgacttttatattttgtattaattaatttatatatatttggaaataaagacgttgtctagcttttctatttatagaaaataaggtataaagagtaggtttggtgacttattctttctctatctatccagctgtgttaatatgatattgtgtgagttttctaaaatatttgatcagatttcttgtggactgattaaagatctattttagggaattgtctagtgagttgtggtcttgttcaagccatgtgtgagctgtcaataagatatatattggttataaatacaccttacagcagtgaggtcttgtatatctttcatacgccttaaattgtattcatatcttaagaaaatagtgtctttgttttgtagagaagagagtgttcgtctcttactttgtttatatgtattttgtattgtcttgagtctgtattgaagtctgcaaaagaagaagaacaacaatgctaccttcgggagaaggttttacaagctttcgggagatttccttttaagtcttgcctcaagaggaagcaagcactcttcaaggagatcgaaaggagtttgagcacatgaagtttcagtaagatttgattagaaagtgaaatacatcaagcttgcggcatacaatcagagggagtctatttatgcataagtcaattactttgtatttttgagatctatctaatgaatcttatctctgggtgtgaccccgtggactag

SEQ ID NO: 137643 - DNA, 1496 bp, Cannabis sativa
  modified_base (375)..(375): a, c, t, g, unknown or other
  modified_base (591)..(593): a, c, t, g, unknown or other
tcatcgtttcacttctagaagttacagaagctattgattctatatctatgattagtgctcccgctcaattgtactaccatgttccgaagatgtatgtattgggaagatccacttggttaactttaatgaacaagtcgaatgacatgaataatacatttaagacagaagctaaccatctcaggattaaaatctattgacctaagatcaactaaatgatattgacttagaaagatataatggtaagtttatgatatcttatctaatgtcaatatcgatccagtcttatgtatactccatacatccgagactaacatactttgccaatgccctggaaaggacattccacttatccaaagtgtaagtaaactttatcgntgattatcatgtcagtgtaaattcagtgtactgacaaatcatgggactaaacttttaaacatataatcataattattttccactgtgtagacaacactataatcatgaataactatatgttttggatttgatagaatttatatattaaacatataatcatgaaaaataatcatgtgaacaatgcaacataaattgatttttgatcttttattaatnnntaaatctaattatattgaaataggttttatttagggcataaaattcaaacaaactcccacttgcactaatataaaactaaaagtgtatttcaagtaatcttaacaccttgatgtctagatcaagtgtagtatgtagtattatctttgtaataggatatgacaggttgtattcaatttcaaccttctccaccattacatctccttagtcataaaatccttgatattgtgaatttctttctatatgtttactcttcttaagatattgaattcttttttggcaactatatgtatgttatcgggaagtaacactagtagttaatccatgactggaataacgcttaaaattttatagaactttccataaggtgaaaaattatctagtagccttctggactactttaacattcagtctcactggtagagttagagactctagattagtttttacacttttccaaaattactgctccaccccaaagtaatccccatctcataagtagactttctagcattaacgcaagtctagaaacctaatttggtgtagtctaagagtattaaaataccacccttattgactaacatatagttcctcttttaatcttaagagttatctaattgtcttccaatgttcctttctttgggttaaactgatacttactcacaactcccactcaacaacagtgtctggtctaatgcataccagagcatacatgagacctctcgctgttggtgcttaaggaattcttttaatgactttttttttggaatagttgaaattgctccttagataaataagatatatctctaggagtcaaaagacttcctttagagttagccattagaaaaatgctccagcatcttactaaagtaagttgcttacacttgagtaaataaattaccagg

SEQ ID NO: 137644 - DNA, 847 bp, Cannabis sativa
tgcttgacctaggattttcacagcctagtgtgtcaccctggggagctttagtatcgtttgttaagaagaaagattggtctttacgaatgtgtattaactatcaggaactgaataagctaacaatcaaggaaaaataccctttacctaggatcgatgatctttctgatcaacttcaagggaagacggtcttttcaaaaattgatctccgatcgggctatcatcagttaagaatccgagaggaggacattctaaagacagctttctgtactaggtatggacattatgaatttttggttatgccgtttggactaaccaatgctcccgcagctttcatggatctgatgaatatggtattcaaggatttcctcgatattcgtgttattgtgttgatcgaagacatccttgtgtactctcaatcagaagaggagcatgagcaacatctccggatggttctgtaacgacttcgagaacataagttatacgccaaattcaagaagtgcaaacttttgctatttcaggtgtccttccttgggcacattgttagcaaagatgggatcaaggtggatcccggaaagatagaatccgtcagggattcgccaagaccgaaaatagtgacagaagttagaagcttcttgggtctggctggatattattgtcgttttgtagaagggttctctaaaatttcaacacctttaaccgagcttactaaaaagaatcagcattttgtgtggacagacaagtgtgaggctagcttccaggagctgaaacagagatcaattagagtattgggttttatgccctaaatataactctttacaatctaattagttatcattataagaaattt

SEQ ID NO: 137645 - DNA, 768 bp, Cannabis sativa
tgttaatatgtcagtttatttaatatgtatatatataataatatatatatatatatattttataattgtatgattttgtagttttttagttaaaaaaaattgatatgtagaaagaaaaaaaaaaaagcctaacctaactcgaaacctgacccaacccacccaaactcgaacttgacccatccgaacccgaaactcgaaaaaatccggtctccatacgggtaggttcagtcccaagatttcaaaactcgaacccaaaaacttgaaacctgttaaaacccacttaatatacaccctgatgaaattaggttagaatattaacatgcactcacacataaagtgaaataagtcatgcgtgaaatggtgtcactcaagttgtgtcttcactagaccaatgcaaacttgggtaagcgtcgatcctttctttggtgacatttaaaagttagcattcataaaagtagtttcacattataaggaatcactctaaatataatgtctaatgtgaagtaattaacttactcattgacaaactagaaacactattttactacatattttaatttaagaataacatgtgtagcatattaagtatattcctttcatacattatagcaaaatacaatatttttttgtgtattaatttgtatgtgatactaattaaaacacgtacacaccctaagttatctattttggactcgtttggtacgccgtattgtaatatattgtattgtattgtattagattgtgctgtattgtattgtattagtatta

SEQ ID NO: 137646 - DNA, 750 bp, Cannabis sativa
aaaaaaaaataatctttatttggcagctattgaagaccaaatcgtgatcttgttcctatttggaaagtttcccgtttggtcctattagttcgaacttgatgctagaaattaaggatttttttaggaaagttttgtacagctggaaaaatttatttgtggttgtttttaggatttttatgttctataacttggacttagagagcagccaaacattttttacctcttctagtttcattttatatattttcaattttgtgaggatagaatttcttttgtgaaaacctagagtgtttagttaggttttagtttttaaattattgttcttatattgttcttagaataggttgaagagctagtttcattgaacaagagaaaagtattcggaagaagacttatcaaagtcttactttgggaggaagtaagcactcacacatcaaaagacgaaaggagtttgctgtttggtggtgtttagaaatcaaatttacaaagcgaatgacaaaggattgcagaaaatcattagagggagtctaaatttatttatttatttatttatttttgaaattaaactcttattaacaagaaccagagtttaatacaaatcaataaaaaagatgaaaaattctcaatctaagctaattcaccatccaccctaagtgcatgcacaactaatgtttgagaaatagacacgaactagggatgcctcaggaaaactagaaaacaaactagcaaaaaaactaaaaaacctagctc

SEQ ID NO: 137647 - DNA, 681 bp, Cannabis sativa
ttattggtatcaatttctattactacagtaacatattaattggaataaaaaacaagatcaagaataagttctaatagttttctaatttgtttattatcttacatccatgtctaatcaaaatatgtgtgttatagagatactgtggtgtattgagtatagtctagacttcaaaatgaactacatatgtcaatagctttttgcacccctaaatgttatagagatcttgtggagttatgaatataatctagagttcaatagatataagagatcgttgaactgcatatattacttcttaacttcttccaccctatcagatcaaaagatctttttattaaaagaaaatcttaataattgtttaagaattaacaattattcataaacattgaatttgaattcgaagtgtttatgtggtattaattctttgcagagatgaatatactatagattttgtatcaataataaaacaaaaacacatacaaacatgataaacatataaatataatttgtattggcatacaagttaaggaaaaatgaagctcaatttcttagaagcaattcataacaaaatatcttaaagagaaaattttattactaaactcaaaattgtcataatgaattgtctggataaatatgaaatagggaataaaatcccaaaccaataattgaaactaaattgttcat

SEQ ID NO: 137648 - DNA, 633 bp, Cannabis sativa
ttttagcatataagtccatgtaaagccgggaatgattcatcaacaaatggtcaaaaaatacctataaccttctatacttattatttggaatggtccccatatatccatgtgaattaagtcaaaatttgtcattgcaaaattattatttgagacaaaagggagtctcttttgtttagctaaatgacatatatgacaaaaagtattagaattgggaatgaaagaattgtcaatctttttatttataaaattcgaaatatacaatgatggatgaccaaggcgattgtgccattggtttacattggatgtatataaatcgaaagaagattgactagaggcagcagcaagtggtttgtcttgagataggaggtacaatttgtcatgtttcttagctatcccaatcaccaccttccgagaaggatcctgtataatacatgaattagttttaaaaaggacattgtagggtgtattagaaactaaatcattgatagacaggaggttgattcggaagtgaggtacatataggacattatgcaaaacaagagagttattgatgcaaactgtgccacattttgtgacttgtaccaacccaccagtaggtaaaactacatgtttaggaaaagatgtgttattgaa

SEQ ID NO: 137649 - DNA, 820 bp, Cannabis sativa
gatagtattgtcttatgaacattcagactcagtaccgtgtgggacacggggattacggttatgattaggtgtatgggcgccaggttataacccgggttatttgtatgatattcattatgctttttttattgagttgtcgacttacagtgctatttccatgtgtaggtaagggcaaagctaaagctgaggaatcgtgaggaccagcagatgaaggttgtgcatgtcggggcggttaagcctagagcgtacgatccttgggacatgaggccttttgttgtttagtcgctgtgcaacaaatattttgtgaatgaattgcaaactttttgtaactatattttgtaaacgcgatcccggaatctgataagtataatatgttatgtttcaactaaaatgcaaaattttaattattcacgtttttccaataacctcgttgattagcaatggaaggaaaaaggactaagaccttcctcacgcacacacagacgaccatctttagcgaagtccctccttcccctaaagcatccgtttcgacctagtacgttaaaaatctagctaacacgcctatgctagttagggtgttacaatgacattcgaaggttggtgacctacagtttggtaggcttttcatatcagcacgatagcttgccgactacgattctcaatctctgtatcatgagcccttaacgcctccatttctctgtctctccattcggtgaatatacgcctttgttctttgaacacgagatttactgcagcgcggagttcacctgttcatgatgtagggtattgttatgaccctactgttaggttttatgcccta

SEQ ID NO: 137650 - DNA, 610 bp, Cannabis sativa
aggaagaaaaggaacacaagctgaaattggggcagattgctgaagcaatgctgaagcgaattcagcatcctggcagtgacgtggaaacacgagtttcacttatctacctcagcaacttcggtgcagtcactcaaattacaccagccagctgacgggaagaaaggggactaaccctagtgggccaaagtggaaagtttgggcttctattttgggatatgaagttggtaccctaaaaacccaacatctaaaagaagagaaaaaccaagtacaccattatcatcttcatcatccaataaggtgagctaccatttttttgaagaggagtttttaattgcagaaagtacaaagagaagaaaagtgaagggggacccaagtgcaaaagaagagaaggacacaagttttttttgtttgcatttctcttccctttccttttatattttgttcttttctttcttatctttgaatatcaaaaacttgataacttgtaaacttgggcagcaaccatggatgagtatttttcagcttggattttatttttttcctttaatatgagctaaacttttgaggctttaatggctatgaacttctaagttggggatgattaattttt

SEQ ID NO: 137651 - DNA, 523 bp, Cannabis sativa
ttgtacttgctattagtatttttagtgtatttaatgtcatatcggtatgatactcaataagtggtttgtaattttttttgtctcttgtatttttttcatttgtgtggatgatatttgtactatttataactattatttttggtaaataatttttaattagttagtaattttttatgaataatttttgtaccatttactattttttttatattttatgtttttttttgttttagttttttaaaatgaatttttgtacttgttattggtactcttcatgtacttaatgctatattggtgcggtacccaataattagttagtaattttcttttagtcttttttttaaaaaaatttactttttatgaataatctttgtactatttttttagtaaataattttttcattattattactatgtgactctttaaggtgttcattaccatattgatctggtacccaataattagttagcactaatattaatatgtacttatctttagtaacttcaattagaattttaattt

SEQ ID NO: 137652 - DNA, 1017 bp, Cannabis sativa
ctgagtctgttgactcacatatatcaattgtttatatgtgtaaaagcaaaggctgaactgcagtgaactcggactagatgaagattgtacatatcgaggcagttagacctagagtgttcagatcttaggaatagtagagctttattttgatagtcgctaggcgacaacttttgaatacaagtattttagaaaataattgttactttttaaatgggattccagaatatgtattctatatttttatttttgtttaagtcaaaattttaattattcacgtttttcaataaaccttttgattagcaaatcatgagtgcacagtaattagaaactacagtaatgtgcctaatctagtagggcgttacagtttcccttgccaagatgaagaactcaaccctagaagacctaatgggtgagcacaaaacgataatgggacatcagtggctcgggcagctgtagcacttggaacattcatggcagacaaaggaatcgacttgccaaaagtaggagtaaaaaaatttaccaattgagggcacgaacaagatcttgtcttgataaaaaatcacagtaaaatctctttgtaccaccctgttgttcaaacttgaggaaatagatggtgtccgaccatcttaacacctaatatttctagccttttatttcagttatttttcctgattttttaatatgacaaaaaaaaaattaagagcataaataattatttttgttatataagttagagctgatgaacattttttttggttatgttcgtggatgtatctcgattttttattttgtgtgtgtggttttttttttttttttttgatgaattaagtgaatttcattgctcaaaaacatatttatacaactaaatagcattctccaagtagaagaacctaaaaaaataataaactttacaaactgtacaatgcttctaaccattctttatcactaattgacactttctttgggcatgtacaagatattctcttctttgacacatttttaactttgcacactata

SEQ ID NO: 137653 - DNA, 1579 bp, Cannabis sativa
  modified_base (797)..(798): a, c, t, g, unknown or other
tacacttgcgtgtgcaaaatatcgcaacattaacaacaaaaactactatccaccatacaatcaacaattgtcttaccacaaaaactgctatgcaccattttaaataatattaattatattgcaacataacatgctatacattgaaattaagaccaaaaggaaaattactttacattgaactctcaggattcatcttccaagacaagttcccatggctcaacgaagatatcaaaactttcacaaacattcttgttgatgaagaaggctttcaattcaaatagacaatatttgattttctcctgcagatgttgtggtaatgtcatcgtgtcagtgtctcatttgttgcaggaattgcttccctactcaagaccgaacaatctacatttgaaatccattcaataaggaaatgaccaaatatagttgggatgcacttggaaaagacaacattatatctttagctttagatccatctcaaaatcccatagacatttcttatagaattcaagttagtgacagttgaggcatttgagattggagaagaagaagaaaagtacttcacaatcgaaatatactcttcaagaacaaaagaatggtataaatcaagagagatttgtcaatgcaacaacaacaatataattttgttctttcgatttcaaatctttcttgatttcaaccatttttttgttcttgaagagtatatttagaatgtgagacacttttcttcttcttctccaatctcaaatgcttcaactgtcactaacttgaattcggtagaaatgtgtataggattctgaganngatcaaaagctaaagatataatgttgtcatttccaagtaaatcccaactcagtttggtcattttcttgtttaatggattacaaatgtagattgttaggtcttgagtcgggaagcaactcctgcaaaaaatgagacgctgacacgatgacaataccacaacatcctcagggtgaaaatcaaatattgtctatttgaattgaaagccttcttcatcaacaggaacgtatgtgacaattttgatatcattgttgagccatgggaacttgtcttggaagatgaattctaagatagagagttttgtcctttgtaatttagattggatgaaagaacgatcagatattaagttgttccaagatttagatacacatttcaattgaaacaatgtctttgtaggtaatagggataatacttcaaaaaatacatcattatttaagcaccttttcttatatgtataacatgtttcactatactaaacaagtaaaataccataattgtaactttttaataacaaaaacagctatgcaccatacaataatatattgccctaccataaaaactgctatgtaccattctaaataattttaattacattgcaatataacttgttatgcaatacaattaagaccaaaaggaaaattactttgtgttgaactcacaagatttatctttcaagacaagttcccatggctcaacaaagatatcaaaactgtcacatacattcctgttgatgaagaagactttcaattcaaatagacaactttacttttctccctgaggatgt

SEQ ID NO: 137654 - DNA, 670 bp, Cannabis sativa
ctaaaaggtcgcctctaataattcgcgcctaaaagtactattaggggcgacaaaaatgtcgcctgtaattaggggcgacattgtcgcccctaaaagtaatcaaaacaaatttttgaactttttacttttttaggggcgacaatgtcgcccctaatactcctaaagtcgcccctaaaaaggtgtgtcagaaatcattgtttgacttttaggggcaactatgtcgcccctaaaggtttttacattaaaaaaaataaatttttgataatattagaaatattaatatttaatttatgaaaaataactattataataaataaaataaaatattaaatatatttaataaagaacaattagaataatataatagcataaatttttatactaacataatataaatttgataatggtgatacaataacataaatgttcaaatgtaacataatataaatttgataatctaatactatagcataaatactaaaataaaaaggcattaactagtacaaaaatacaaacaacattactaaaatagtttaaatacaaaagaaaaaaaacattaataaagtagttgttgataatgttgttgtaacatagatataaatctttggatctgacgttcggtgattgagctttcatagacaattctgaacttggagttcacactgctaca

SEQ ID NO: 137655 - DNA, 927 bp, Cannabis sativa
  modified_base (455)..(457): a, c, t, g, unknown or other
gctagcatttgaattgaattttgatgtaaacattgtagcttttatccttgttatccttgctgaatttattgttgaaaagcatgagtttgttgaagatgatgataggttgcatggtagtgatgttctattgttaatttgagtgagtgttgcttggatttttggtgtaattgttgtttgatctctggagggaattctagagtttttctcttgccttgaattcaagttatttgttaatggtatgttgttgatggaaatttattgggatgcatggttttgaagctctagttcaagagcttgaactttgttaagttaaagcatgattttgggttatttatacaatcttaattttgagagttgttgttgatgttttagctctctcttgtgaggatttttatctgtaagaagttaattttcgttatggtttgattaaggttcgaatatatggaaaagtgagnnnttttagaccttaaattctggttttctagatttttcaaacccactggccgcggtcagatttatggtcgccgcggccataaaacccagcagagagccatccctattcccaattttgttttggccataacttttgactcgggactccatttttgacattctttatatcgttggaaaactagttctgagctctttatgattatcaatattttgaatgccaactttatattttgtgaaagtggatttacggattaaccctatttgtgaaatcccagattgtgtgactaggattaccagcacctgatcaggagcacccaggggtttggaatctctgttattgtgggacaacaggtaagacagtattttgcacgtagagtattctatggcgcttatgttgaatatgatatatatgtgagtaattgtaaccgggattagcgttattaccctaacatgagcggttaatagcctagggtt

SEQ ID NO: 137656 - DNA, 665 bp, Cannabis sativa
  modified_base (398)..(399): a, c, t, g, unknown or other
  modified_base (619)..(630): a, c, t, g, unknown or other
ttgtacccactactattgacccctaactctcacacaaggcccaaaatagaggaatttaacctttcatcaaataattattattaattgaataagcctaatactaattaaacctaaataaaactaccaaggtgatattttattttagcaacatagtccatttatatatttataattaaataggcttcctatatgcctctaagcccaatagcaaatatataggctcacttatacaaactgatttggatggaccctattatgtttctaggtttatcacagatgaaataaattacaaaaatttacctgttacaaattatttatatgatctattgacaattagactatgattaaaatcagattattagatctgtcaacaacttaatcatagcaatttagatcanntaaataataggtttgttaaatttttttgaataaaacaattaattaaagaaacattcaagtaacaaatgtgaattgagatatttattacttatataattaaattattattcaagtaactattttgaaaattaagagttattgaaacaacataaaatatattttaaatttaaaaattcaaactaattttaacatatgtaagttttatttgaattattttatnnnnnnnnnnnnaatatctaataagataaatgatatgaaataaccaa

SEQ ID NO: 137657 - DNA, 1139 bp, Cannabis sativa
cattaaatgcgagatgactgctcagaggaagcctgacatctcccggagatgctttgatgccaccttgatctctaggagcatagagaactccgtatgccttctctgggaggcatatctcggagaatgcctttctttataaagtcttagctattaatttgagtgctaaagcctttgtgtccacgtgtccttgtctggttagtccacgtatattgggcaaaatcagggccaacatttacccccaagccttgtttagttgtgaaatgaacaaggcttgttgagatgcctccggttggctcctcggtttcttggcacgtgcttcgggcgcgtgaaggtgtatttaatgatcaccattactgcagcgattcgctttttgcaggcatcgatttgtttcttgtccattaattgatacgacgcattaatgggtgtcagatggatactcaagcgtttccaccaccttgatgacaaaccaattcagccgttggatctaggaattcgaatcgtgtgccttcccaactgcacgattggtaggtgatcacgcctgttccacatgcacttcagcctataaaaccaacattctcccttcatttggttactttcaaactttcaccgaattccttcaaattttccaaagagaaagaaaccctcgaactagaaaaccttcaaacaccataggtttcttactgaccttccttcgctattgtcagtcaacgtttcaccgtcgatcaacaacaacgcccagttctaaagctttatgtaagtcttttgcatcccgtactttattgtttgtgttcattgcatgcttcattgttcatctgctttttctgggtttgatgtttgaattttctgggaatctttgtcttgagtttctgtgtattatattttttttttggaaggctcatcttttccttacgcaatgaccttcaagggttcagagaagactttgtctttctcggtttttaccctttcttcttttttttttcttttctttgtttattcataatgtcaccatctgtgagattcttgcacccgacttttgtccagggaaaccttctaaggcattcttattggcaatcgtccggagggggcctctttccagcggttaggggacccacattcccttttttgacttagggtttggt

SEQ ID NO: 137658 - DNA, 530 bp, Cannabis sativa
aatcacttcaaaactcttaaattgataactatcagattgtaatgggttttatttagggtacaaaacccaacaggaagatgtgtggattggatagaattctatgatgacctcctatccggaattggcaattttgactagatgaaagaataagtgcattaaagacatagaaataattgaggaaggtggcttcagggtggttaattgggactttaacttcagaagaaatctattggacatggaaatcccaagcttaatggagctactgcagagattggaacatgtgaacatagctcactcctcgattgatagtaggggttggaatccagagtatggaggttctttctcctgcaaatctgccttcctttggttcacctcaagtcacggttcaagggacttagactggaccaaaaatctatggaaatgttgcgttccagtaaaagtaaaagtttttggttggttggtggctctaaggaaagcaaatgttcatgaagtaatacaaaagagaggaccatacatggccatttctccgg

SEQ ID NO: 137659 - DNA, 713 bp, Cannabis sativa
cctggagggtttcggtcttttactattttgagtccgtgttttgagttgcctgttcacgaatttgtaaaaaacaaaataaacatatatatgtatatgctaataaggtactttaaatcatattttgatactcgggatcccgacccatatgtttataaagttataatatagtaaaattatcttttgaatttagtaagttatatatacgggcgttacacctaagatgcctaatgtctaactatataccccgctatttcaaaagtatcaaaccataactaagtgactctataggccaaacgtcgcattcaactattaccgggcataaataatgaaatttataaaaatggtaaatggcggcaaaactcccaaaactttcattttggtttcactcaaccccgaaaacccaaatttgggcggtaaaacccccaatactcgtattctgttagcaatttacccttttccgtccattttaggtgttaagtgccatgttggactagacacagtatacacgtggcacaattttattggtccacgtaaaaaaatattttaaaagattaaaaaattaaacaaaattaaaggataattacggcaaaagtcctcaaaaagttagggttgaagcagattagtccccaacctcaaaaattggcagtaatagtccccaagatcaccattttcgttagtccgttagtacctctttgttggaattattttaccag

SEQ ID NO: 137660 - DNA, 909 bp, Cannabis sativa
tttatatatatatactatgtggttaaaaacatgccaaaggcacgtaactcccgttaaaattaatggattaatcatatttttttttttatttttatcaattgtatttaaataaagacagatcaaatatctaattaaattagcagattagatgtaaaaaaaaattaaaattctaattaaagttactaaaagataagtacatattaatattagtgctaactaattattgggtatactagatcaatatagtattgaacatcttaaagtgtcacatagtaataataatgaaaaaatcatttacaaaaaaaatagtacaaagattattcataaaaagtaaaattaaaaaaaaaaaaaacaaaaaaattactaaccaattattgggtaccacaccgatatagcattaagtacatgaagagtaccaataacaagtacaaaaaatcattttaaaaaaaaataaaacaaaaaacataaaaattaaaaaaaaaaaatagtaaatggtacaaaaattattcataaaaaattactaactaattaataattatttaccaaaaataatagtaaatagtacaaagatcatccacacaaatgaaaaaaaatacaagagacaaaaaaaaaaattacaaactacttattgagtatcataccgatatgacattaagtacattaaaaatactaatagcaagcacaaaaaaatttaaaaaaataaaattaaaacaaatttaaaaaagtacaaaaaaaatgggactacactaatatggcattaaacacattaacgataaggcaataaccatattaagacactacaagaaatgtcacttttaccagcacatttttgtgttggaaaaagttagattacgctggtaaaatagaatttacttgtgctgtgttggcaaaaggggattggcaaatcaa

SEQ ID NO: 137661 - DNA, 1505 bp, Cannabis sativa
  modified_base (293)..(293): a, c, t, g, unknown or other
  modified_base (607)..(622): a, c, t, g, unknown or other
  modified_base (855)..(861): a, c, t, g, unknown or other
tgtgcagctcgctgctaatcaacgaggttaataaaaattgtggttaattaaaattttcttacttaattaaatacttatactattacaaacaaaataatttgggatcccatttacaaaatacttttcaaaagtatgctattcatattcaaaatatttgtcgcccaacgactaatagccgaaacactgatgtcccgaggatcgtacactccaggcctaaccatcctgacatgtacaatcttcatctgctcgtcctcacggttcctcagccttaaccttgcccttacctacacatnaacatagcactgtgagtcaacaaactcagtaagaaaagcataaatcatataacatacatacatcccgggttatgaccagatgcccatacccctgaccacaaccttaacccccatgtcccacacggtactgagtctcgaatgttcgtacgactgtacttttgacatagtaaccgcctatactcggtacgctagtcatactctaaccataccgatgtgttactgtatgagcctatactcggtatgtcagtcatactctaaccataccgatttgatactatcaagtagtactgtactatcgaccataatatcagccnnnnnnnnnnnnnnnngtcatactctagtcgtaccgatgtaatctaacaggcttcctaacatggacgctaaatatgtaaatacatatgtattctgttatactaatcttacctcgattctgaattcaggtgtgccagtcaacctgagtggaactatctgctcggcgaattactggctcctaaatcacatcaatcgtaacataggttagtgacacgctaaatcactttccggggacttaaacttgaaactnnnnnnntccctatcgatgaataacatggcaataccctaaatatctcgaaaatgggaaaaactagggttctaaaaattgccccaactgatagaccggttccccaaccagaattccggttctgtggggtttcctggggaccaaccggaattccagttcctacaggtcccattgaaccggaattccagttccgtccagaaaagtttcaaataattcatatctcatgcaaatcaaccccaaatcatatcaaaccttccagacctgctaaatagaccccaatgaagatttcaaaagcaacaaaacaacaacccaagtatagattcaaaatccaccattaaagctccaagttttgagttcaaaactcaaacttggttaaatctaactaacaatcaacaaaacctgcttgaatccacttaactaaacatttttaagcttcagataacaacactaaacaataacagtagctacagcaagcagttcttcaaaacatgaaaaatttcattttcttaaaacccaagaaactaaagagaaagctataagaaattacctagagcttaagcacttcaaatccttgaagaatcttgctggaaatgcagaaaaatcccaccaaaccctacctattctaagggtggccgagagagagagagagagag

SEQ ID NO: 137662 - DNA, 775 bp, Cannabis sativa
attttgttcttcagatcgtatgatttctagcagatctaagtgagtccaatccaaagctcctagcaactttccctttggttttcctgagtttcaagttaacagttttgcatgattttgggtatttcagttctgtagctactgttattgtttgaagtatgtttttgaagtttaaatatggttagatatgttgatttaagcatgctttgatggctggttgtgaggtttgttcaaagtttgagcttaagagctcaaactttgctctcacatggtggtttttcattctgagcatgatatggtgttttattattgcttggaatatattctttgggatgtatagagcaggtctggaaggtttggtttgatttggggttgatttgagggacgtgtaagaaccaaaattccggttggtcccccacaaaccctatagaaccggaattctagttggggaactggtctaccggttggggcagttttgggaatcttagtttttcccatttttatgatatttagggtattgtcatgttacttatcgatagggaaacttttagtttcaagtttcagtccccgaaaaatgatttagcgtgtcacttatctatgttgtattcgatgtgatttaggagcctgtaattcgccgagtagttattccactcaggttggcaggcacactaaatttcaaaatcaaggtaagattagtataatgtcatgcatatgttaatacatgttgattatgcctgttagaatacattgataacagtaataatatacgtagagttgt

SEQ ID NO: 137663 - DNA, 858 bp, Cannabis sativa
acctagattgggcactcaaactcaaaatgaaaactagaatcgggactttagactggggttgggacccaagacccgacacaagtcttggtcttaggccaggacccagacacggacacggaccgagacccaagatccgaagtggaatgttatcgggaccaaagattgggatctggatcttgacccatgacccgaggcttggacccaacttgattcggcgtctagatcttcaaatcataccaagacccaaatctagaacaatttctagacaaagcatccaaacccaaactcggacccgagacccaaaatcggaagaagaatcggaataaggactgttgaactggatctagacgtggaacagaacacgaacccagacctagactgggatcgatacccggacccaaacccaaacccagacgcaaacttgcactaggacctacgacccaaaacctggaacccaggacctagaaccacactcgtaccaaaactcaaactcgaaccaaagactaggactcggaccgagattaggactgggaccgagacacggactacaactgagacctgaacctagactaagaacagaacccatactggaacaaggactgggagtggaacattggacccgatactcggacctaggacctgagaatggaaccgtgacaaaggtcgagaccaggccaagacccgagacaaggagcagtatgaaacacgaaccaggaccggcaatgggactgagacccttacccagacaaggacctaagaccttaacctgaatttgggacccggatccatgacccaggacccaagacataaacctagacctaaaccttgatttgagacccaaactacgacccaagacct

SEQ ID NO: 137664 - DNA, 572 bp, Cannabis sativa
ttatttgaagagattgaagctgaattgtatcctggatgccattggatttcttcacttaactttctagcaaagttattgcatttgaaagttcgtggaaaaattcctattgacgtatttgatgaattattaaaattattgaatcttgcttttgcgaaaggaaataaaattccattgacgtactatgaggctaaaaagagagtaaaaaaattaggtttaggctatgagtctattcatgtgtgcgagcatgattgttgcttgttttataaagagcatgccactaaagatgcttgtccaatttgtggaactagtcgatggattacttcaacaaaagctaatggaaaaagggtgccacgtaaggtgttgcgctattttccattgacacctcggttgaaaagattatatggttcaagacatactgcaaaacacatggtatggcatcatactggaaaatcgaaggatgaacgagtgatgcgtcacccggttgatgggattgcttggaaggactttgatgctaaacatcctgattttgccagtgaacctagaaatattcgcttaggtttagctgctgatgg

SEQ ID NO: 137665 - DNA, 533 bp, Cannabis sativa
  modified_base (62)..(77): a, c, t, g, unknown or other
  modified_base (149)..(155): a, c, t, g, unknown or other
gaaccaaaactggaagttgaccgagactggaactagcagttggacttggaatcataactgannnnnnnnnnnnnnnnagaaccgtaaccggaccaggacaaaggcttcaaatcaaacatagactcgaattgggagccggacccggatcnnnnnnnaaacctggactcaggacccgaaaccgaacctaaaatcagacccaaacatggaaccagacaagggacacagaacaagggtcggtacctagaacagcacccgagtctcgatcttgtacccaaactcagaagtgggaccttggacctgaacaagtttcagaccgagtctcgtgaccgtgatccagatcttgactcgggattcgggtaacaaggtctggaacagacaagtagtcagtatctagatctgtgactcagactaggaccataacccagacgaagaaccaaactcgaactctaactcagaatcacatatgtaactagagtcgaaataacactaggaccaggaccaggacctaaacccaaacccaaacccaaatcaaa

SEQ ID NO: 137666 - DNA, 1524 bp, Cannabis sativa
aggtgtatgtggacgacatgcttgtcaagtccaaaaaggctgaggggcatgtggaggacctatgtgagtgcttcaaattacttcgtagctacaacatgaagctcaacctccttaaattctcctttggtgtaggctcgagaaaattccttggttttatagtcaacaaaggaatagaagaaaatctagataagatccaagcccttttggacatgaagtcgcccacaattgtcaaggaagtaaaaagcctaacaggacgtattgctgcattaggcagatttgtgtccaagtctatagacaaatgcgtacccttcttcaacattctcaaaggcaacaaaatatttgactggacagaggaatgcaaaaactcattctaggagctgaagaaataattggcccaaccatcgttgttgtctaaacccctaaacaataaagagctaagtttgtacctagctgtcacaatacatgttgtgagtgctatcctcagaagagaagaacacggtgtacagcaccctatatactacatcagcaaaaggctaattgacgcagaaagtcgatacccactcatggagaagctgacctacaacttacttttgacttcaagaaaattgaggccctaattccaggcacaccccataaaggtgtacaccgatcaaccgctgcggtaggttttccaaaaacctaaaacattaagccaactactcaaatgggccattgagcttggcaagtttgagatcacataccaaccaagaacatccataaagggtcaagcccttgcagacttcgtggttgatgcaccaactcaacttttgatatccctcaagacttaagaaaaaagcaagagccagagaagaagcgagagcaagagcagcaacaaaatcccaaagcaccaacatggaaactccatgttgacagaagctgcactgactaattatctggtgcaggcattacccttaaaacacctaggggcagcaactgcacggagcaatcaaattcggcttcaaagcctcgaataatgaggctaaatacaaacccttgatagccagccttaagctggcacatgaagtatgggctaaccacctggacatattcagcaattctcaattagttgtgaatcaattcctagatgaatatacagcttgaggtgaaaaaatgatggcctacttgagcaaaatcaaagacttgctaagttagctcaaaggctacataactaggcagatccctagagagcagaatggtatagcagatgcacttgcctgtttggtaagcaacaccattgctgacaaagcaaagttggtgcccatacagttcctagaggaaccaagcattgttatcccagaagaagtcgacatgttggatgacactccaacatggatgacacctatcatagcttacctccaaactggagccttgccagaagacaaaaatgaagcaagtaaaaaaactagtgaaatcagcctaaatagtggctaaaatggattggattcatccatgagatttattggatggatcttatccaatccaata

SEQ ID NO: 137667 - DNA, 559 bp, Cannabis sativa
  modified_base (27)..(36): a, c, t, g, unknown or other
  modified_base (343)..(343): a, c, t, g, unknown or other
  modified_base (518)..(522): a, c, t, g, unknown or other
gggggagattgttaattccatttttgnnnnnnnnnnttgacaaaaatattttattatttcttattaatttcggttgaggagttattattggtaccatattttgtgtatttaaacttggaaggaaagttgtctagctttccgatttatggaaattgaggtaaaaatggtaagttttgattacacatttattcttatctaactagttgtttattctgatcttgtgtgagtttcctattttcttagatcagatttcttgaagagaaaatcggagctaaactttccatttctataaaaggaaagttgtacttactgcacacgattctgtaggtacagaaatagaaantcctggactgattgaagaattattttagggaagaatctagtgggttggggtcttgttcagactgtatgtaagttgtcaataaggtgtatattgattttaaatacaccttttagcgtctaggttttggtatctctttcatacacttaaaattgtatacatatcttaaggaaagagnnnnnttgttatgtagagaagagctgttcgactcttactctg

SEQ ID NO: 137668 - DNA, 551 bp, Cannabis sativa
taaaggtcaatttctaatccacttgtacttggtttttttgaaaagatgaaaattgcttttttgggtttttgtgacattttgggaggttcgaacatgtatgtccgtagggaatatacatagggttgtatttttctgtgtagaactggataatcttagaaaaatagacctgaaatttgtataaccgtgaactttaggaagaaaattttgaatagtcgcacctttcttatttgcttatttcttgaatacacgcgggtattcggatgaacacttcgaatactcgcatacctgcttcctttaggttttacagagactttatcattcctagtcgctgttttagaacatagggctttatattctttgtatattttgttgtgggaacattggttaagtctttcaaatggtgggcgtgtcgccgtattccaatgctcacacgtgcgatcttatgttccttgaggtactgcaatacgcccagccatttgcgacatacgccagtgtttcctgttccaatataagtgtattcttcgaccagtagatttgctcaaaacggtggg

SEQ ID NO: 137669 - DNA, 1167 bp, Cannabis sativa
  modified_base (614)..(617): a, c, t, g, unknown or other
taatgtgtttcatgtctccatgttaagaaaatatgtatcaaactcgacccatattctgagctgtgacgatgttaaacttcagacaaatttattatatgggaagaatatcttatcaaggttttggactagaaagatgaggtactatgaaatgagacaattccactagttaagaaagtgctgtagaaaaataacaagatagaaacagtaatttgagagttagaatcataaatacaaggataatatcctgaattgtttaaataaattttgaggatgaaatttctataaggaggggatggttgtaatatcctgataagcctaatggtaaataactagggtttatatttatattataggttaattatgcaataagtgggattatgatcctactaatttatttcaacataaaatttaaattttgctataagtgagtaaataagcgtaatttattaattacagagatttatgtagcatgtctgaatgtaataagagctatatgtggaataaaaatatttttaggtttggtgaccctgaagacttgacaagtggatatataaacataatttgttaattacatggatttatttgaaatacatggatataatatgagttatttnnnnaataaaaatattttcaggttcagcgactttggagacccaattggaggctaaaaatgttacaacggttttagttataaatattaatgagattattgagataagttgattttaaaaataccgaggtattttggggtactcaaaatttgccaaataccctagaagtaaaggtttcttagtggttaaacaataataagataactattaataataaattttttgttaatattatattatattattattattttattattattaatactatattattattactattattgtaataataatatattaattgaaactgataagtttcaatttcatatgattatataatatatatatattaattttaacatatgtaacagtgaagaacgaacgaacaaatcctcgttctctcgcttttgacaaatttttctctctttatatccattttcttcaaatttcaatccgaaacctagcgatttaagcttcggtagtagtaggatagcaaatccttgaagaagaaaagcttaagctatggtttaatttcattttaagttaaaaa

SEQ ID NO: 137670 - DNA, 2394 bp, Cannabis sativa
  modified_base (1654)..(1654): a, c, t, g, unknown or other
agttcctggtaaaataacttccaacgaaaacgccaatagtaacccactaaaccgagaaaacttcaaactttagtgactgtttaccataattccctaggtctaccataattccgtcttttccaacaatatgccccagaaaagatactcgtgacagccaaaactcacactttttgaactttgcatagagtttatgatctctgagtcgttgcagaaccattcgaagatgttgttcgtgttctgcttctgaccgagaatacacaagaatatcattgataaatacaattacaaaattatcgagaaaatccattaatactctgttcatgagatacataaaggcggccggagcatttgttaacccgaatgacataactaggaactcataatgaccatacctggttcggaaggctatcttcggaatatcctcttctcggattctcagttgatgatatccagatctcaagtcaatcttagagaataccgtcttgccttgaagttgatcaaacagatcatcaattctaggcaaaggatatttgttttttatggttaacttattcagctctcggtaaccaatacacattcgaagagttccatctttcttctttacaaatagaaccagagctccccaaggtgacacacttggtcgggtgaaccctagatccaacattccctggagttgtatcttcagttcttttaattctgcaggtgccattaggtaaggtgcttttgaaacaggttccgccccaggtattaagtcaataataaaatttatttttcgctgaggtggtaatcctggtaattcctcaggaaacacgtccaggaattacttaaccactttaacctctcaggtccaagtaacacagatttactagaatcaactacaaccgctaggaatcctacacacccactgcgtagtaaatccctagcttttaatgttgagattcttgggatacgagaaccttgaaccgaaccaacaaaaacaaatggttcctcattctccggttggaaagttaccatcttccatttgcagtcaatactagcaaaatacttggacaaaaagtccatcctgagtataatatcaaactcggccaatggtaactccacaagatcagcgctcaattctctatcttcaattctaattaacactgatctaacccactttcttgatataattaattccccgataggaaataaggttccaatccccatctcaaaaacatcactagccctaccaagttgattaagaactcttgatgatacgtaagatcgtgtagcacccgaatcaaataaaacagtaaagacaaaaccattaataaatagctgacatgtgaccactgaagggttggcggcagcatcagcctgagtgatagcaaatacacgtgctggagcaggcttaacttcaggcttaggttcctcattcttcaactggggacaatctttcttaaggtgccccactgatccacactgaaagcaagctctccagttacaggtcccgggatgatgtttcttgcagcgcggacactcaggataggagtaagtctaacgtctccctttaccctaatttcctcgaaaccttttaccttgccctaaactccccgaagatgggaaagttctcttattttgctcaaaagtggaatcaccactctcttttccaggnccagaaatagggagagtagtggtcccaccagcaccaggagtctctcgagtttcttgcaagaacttaactgctccttcagctcgaagagccttgtcaaccatttcagcataggttgtagtatcatttgttgtgataaccagatcgtgcttaatcttggcattcaaccccactaagtacttctcctttttactaaaatccgttggtacgattccaaaggctaacttagccaaccgatcaaactttgttgtgtattcagtcactgacataccctcgccttgtaccaactcaacaaattctttccgctttgcactgcggaccgcctcattatagtatttagcattaaacaattcccggaattcctcccaggtcattctagcaacatccttggtgagggataccatctcccaccacaccaaggtatcctcttgaaattgaaacgtggcacatgccaccctgtcattcccgaccactcccatgaaatttaatattctttcgataacagttaaccactgtttagccttaagtacatcagggcctcccaaaaatacaggaggtgcttgcttcctaaatctctcatataaaggctccatacggttaccagcaacatgctgctccgctggcaccgcaggaaccgcagcacgcggttgcaggggaaactcaacaggagcatcccgttgcctgagtctctgaatctcatcttcttgtattctagcttgcatctcagcaaacctttgctccca

SEQ ID NO: 137671 - DNA, 550 bp, Cannabis sativa
ccactaccaaaactaaaatcaatacaagaccaaatttaaaaccagttacaagttttcgagaaactccaagactcgaccatcaacccactacacaaaacaattactgtctattaaaacaaaatattaatttgccacaataaaagtagaaaataaaatgagaacattcgacaacaatcatcgtcgaaaaagtcatcactaccaaaaagtcattgtagttagacatcgaagttgtcaccaatgttggacattttagttgtcatcggagttggacctttgaatttgacaatgaaaaattagtaatatttatcagctaattaaaaatatgacaccgagaaactagttatgtagattaactaaattaaaaactaaatcttagaacgagttatgtattataacaaaaataataatttaatacagaaaccaatttcatattacaattaaaaaaaattgaacaaacatatgaagcctaaagtaataaaaaaaaatatatattaattataaaaatcagttacttaaaaaagaaaaaatatataccataaaataattttta

SEQ ID NO: 137672 - DNA, 1061 bp, Cannabis sativa
  modified_base (50)..(58): a, c, t, g, unknown or other
aaattgttttcaaaaaataattttgtgtttttaaaaacaaaaaacagttnnnnnnnnntgatgccaaacatgcacttagcttttacgaggttcgatcaatgaacgtggtgtccattgtctactccttagggaaaaaagccattgttggctttggattttgttgatctttagaatgtaatatattagtgtgctaactttgttgaccaaaggattagatgtaaaatcgtgtttaaatagaatattttttaaataattgtaagttcactaaataaacatattcaatactaaaagtttataaattttgagatcctaacaaagttcaagatgtaagattctaagagcactttaatacctcttggaggaaagtttgtattaaccaagaaagaaagccctacaataggagaagagaaagaagagatggaagaaattccatatgcaatggttttggagtgtttcatgtatgtcatggttagcacaagaccagacattgctcatgctttaagcatattgagtaggttcatgtcaaatcctgggataaaccattggagggcactatggttgcttagatatttgagagggacatcgaatattggattgacttacaagagaattatagagaaagtaaccttgaaaggatatgtagatgttgattatgcatcaagcaaggatactaggaggtctactacctcttatgtgtttcaaactaatggagattgtattagttagaaatcacagctccaatccgtagtagcactttcaactgcagaggcagaattcatggcaaacacagaggcattcaaagaagtaatatggctacaaggaattctgaaagagttgaagcttctagttggaaaggcaagggtatattctgacagccaatcctcgattcatttgtgcaagaatccagtttatcacgagaagacagaacatattgatattcggttgttttggataagggagaagatagaagaagtaattgagctggagaaagtgaagtcataagagaatcatggtgatattggcactaaggtgttacctgttagtaagttcaagcattgctt

SEQ ID NO: 137673 - DNA, 760 bp, Cannabis sativa
tgctccttcagatttactatctattgtaatggatgaacgttctggttaaataaaatcttattccatttcaaaaaaaaaaaacacttttaaaataaactagattgaagttacgcgcaattgcacgtatacttagttatattttagttttcttttttaaatattataatttataattattataatatataatattattgatatttttttttttgaaaagcttgataattttagtgcactttttaaaataatttttaggtaaacaaaccatctcattttaaaaaaaattaatatataatataaaataaaaagaaaaacagtgtgtaaagtttcaaaaataaatttttaatttttatttataatttaagataattataagaggtgtttctaatcttgtgttgctttagtgactaattttattagtataatgaaacaataatcaataaataatagtaaatattccagtaattaagtcatttcattttcatgaaattcgctaagtacataaacttaagaatagtcctgttatataaaaatattgtacaaatttgagaaataattattttcaccagtctctctcggaacgtatttccctcagatatgagcttcctggacttatctgcattaatgcacaaaatatgctagtaagctaatacttaaacaaatatatacttttaaaaaatggcattcttgattcatattcaaacctgaaagtttaacaacaattttctcttctttttctgaaattatgttctgtcgaaat

SEQ ID NO: 137674 - DNA, 603 bp, Cannabis sativa
tcctctaacatacacttttcaaaatagtctagaattctcatcaagaaaatcatcagataaattagcatagaaatctttgacaatatttgcaatgtaccctttgaatccagtgagaatgttctcccattgacggtattgaatgaacttaacaattccatacatcctatgagtatgcaaatcatagttcctttcactcttaaacttttgggtagcatataaattccaatcacgctcattatcacgatagtagaaacgaggacaataggagagagatgtaggaaagttaccaggagatgattccttcattggctgcttgcctttggcagcagcagaagccttggctgctgaagaggatcgagtaggagttgaagtagatttggtcaaacgaggctctggctcgagttcagtttcctcactgtctgaggaaacaccaatgtcctctggaatttctcagaatggagagacacggattttaggaatcaatggacgaatcctccatgggttcttcttcttcagaactcaaagaactcgaagggtgatttaccttttgtttcttggctggaggcactggcttgtcatgacttcgagaagatcgaagttcct

SEQ ID NO: 137675 - DNA, 988 bp, Cannabis sativa
atatgtggggatctgctggaaccgagtatgggtggtgcccatgccatccaccatgaaatactcatcaacaaaatgcccaatttcactgatggccttatccatggtgcccgtcaaccacttgaagtctagttgagagaaatagaagtaccctgacctaccttacttaggggtggacttaaaatcaaaaaaccagctaacctcgtggggagaaggaatatcccacttctaggaggcacagagaacgaagagggaagacagatatttaatgcccttaggagtaaattgggtcaggtagaggcaaaagaagtctgccacattcctaaagtgcgggtgcaaaggcaacaatgccccttctgggcatgagcacccgaccaggcgcacattcccctctcagggtttgtcgctcgattattgtgggcaggaatgtaacagtccaattttcccaggtagtcatcctggtcgagatcccgcaagcgtgcctcactaaccttggacggagggctcaacaacttggcacccaaagtacctttccttctatgaggaaccgtagcagtaagttcctcactggcgtagtccacgccctcaaccaggacgtcgcaatcagcatcaactggctcaccgacctcattgtgttccccatagtttgggggtgcaacctcctcctcttcctctgcctcggagggactgttaggacagacatcatcctgctcctcaatctcttggacctcagcgtccccttcatgatcctcctcctcttggacggctagatcctgttcagctctggataaggtggcgtgtcaggccacttaagggtcagatgtgtcaaccctatgcattgtatttttggtacgagccatcatcctatggctggataaaaggcttaagccagactgcctgtcactcgaagaagttgggctagaacggagacgaggatgatcctcgtgcaagagttgaagtagatcctggtcgatttggtgttcgcttcccc

SEQ ID NO: 137676 - DNA, 764 bp, Cannabis sativa
tcttccgatcttttttaattttaaaaacagaaaactgattaaaaaaatgttatcaaacgtcacctatatttattttttatttttttgaaaaatgcgtagacatattaaaacaccaaataagttagacctcgcggtcattacaaattaagttacttagaatggaggacggatccaccataccagtcacattacagttgaaagcccattttgccacattatgagctgcatagttacaacttctagaaataaacgaaaaattacatctagtcaaaaggttcgagagctttttacattgaattacataattagtaataccccaagtggaggaaattcccttcagagtattgatcaccgtcttagagtcgctctcaccgatcacaaaagaaagcttcccactaatcgctaattccagggccaacaggcaagccacaacttctccaataagcgaatcaaagaaattgaggatattgcttgctacccacaaaattgagtccttatgatccctagccaaagccaccgcacacattgagtcgctaccaaccttaacgtcacagttgattttgacccaatcgtctggcgggggagaccacatcgaagtcgtgcaaatcaccagcgtgggaaataaacaaaggatgtaatttgcataacaagtaaaaatgtaacgccctaatctatagggacgccacgtgtgtgattttataaactagtttaatactaatagaataattaattattaaaaaccgtgataatattaaaaacttaac

SEQ ID NO: 137677 - DNA, 1428 bp, Cannabis sativa
  modified_base (1387)..(1387): a, c, t, g, unknown or other
gatcaagagaaatttgttgtttattgtgatgcatccagacagggtatgggatgtgttctgatgcaagctgaaaaagttacagtctatgggtctcgtcaactgaaggattatgagcagcgctacccaactcatgacttagagcttgctgctgtggtttttgctttaaagatatggcaacattatctttatggtgagaaatgtgagatttatactgaccataagagtctcaagtactttttcacccagaaagacttgaacatgaggcagagaaggttgttggaactggttaaggactacgactgcgagattttgtatcaccccgggaaagctaatgttgtggctgatgcactaagtggaaggggtcccgggcaggttttcactactattttgatagcccctcaattagcttccgagatggttagtgcaggaattgagtttgtagttggaaagttgcacaatgtgacactctagtctaatttgctagaaagaatcaaaaagtcacaattaaaagatcacgagctagtcaagatttgagatgaggtgatggttggtcagcctaaagacttttcaatctcgaataatggaatattactgtataaagctcgagtttatgttcctagtgttgatgagcttaagaaagagatccttaatgaagttcacacctcaccctattcactgcatccaaaaaccaccaaaatgtattaggatttaaaaccctatttctagttgtatgggaggaaaagagatgtggtagactacgtgtccaagtgcttaacctgctagcaaatcaaagttgaacgtcaaaggttggcagggttattgcaacttttagtccttcctgagtggaagtgggaggacattgcgatggattttgtaactgctttgcctagaaccacaggaatgtatgattcggtatgggtcttagtggatcagctcactttctaccagtgaaagctacatatgcagtggatcagtatgctgaactgtatgtaaaggagatggttcgtttccaaagtttacatcaaagttttgggtgagtcttcagaaagctatgggtaccaagctgaagtttagcacagtatttcactcttagattgatggtcactcagaaagaacaattcatatactagatgatttgttgcgagcttgtgtcatggactttgagggttcatggagtaagtataagcctttaattaaattctcctacaacaatagctacaagagtacaatagggatggcttccctatgagatgctatatggtagaaaatttcactcccctatccattgggatgaaactggagaaaggaagtacttggtccatagttagtttagaggaccaatgaagctatagataagatcaaggctcgaatgcttgcttctcaaagnaggcagaaaagttatgctgatctgaagcgcagagatgtcac

SEQ ID NO: 137678 - DNA, 666 bp, Cannabis sativa
ttattcgtgaattgaaaatagtataatccaaattaatttgtagtttcggtcatatgaaaacattgtcatgtgatttatttctcatgtttccatgtaggttgcacgagaaactctttctttgataagaacagtccggattcatgagacggaagaaaaagaagaaggaaggtgatcttatgttaatctcctctcgggatgttcatcccttttaatttttgtttgcgtcgtaaactttgacatccaaggcatatgtattcatgctcaagctgtgatgataatgattatgtgattcatcctatatgatgttaggttcaaccattggctggataaaatagctttcataactattcgagaaagtgtggcttatggactctggaatctgagcttttttactctatatcgttcaacacaggtaaagtttatctttaggtatgggaaatcataaaatagactcatgagtgagcagttcactttgtactaactggtcagtttttagacactcagtttaatgctttatttttcaattgtcatggttgttattttgttattattcttattttctgttgcaccattgattttttattagtcttattatgctttatcatttgttgttaagtactctaaaaaggtgtcgtatttgtaatatataggataattcaacctgta

SEQ ID NO: 137679 - DNA, 574 bp, Cannabis sativa
agtagagaacccgtgagccaagcctagcaagatagtaaagatatcaataatcacaaataacatatcgcatatataataatgccaactccctaattgtgtatttgatataggcatgcgtgttacactcacaccccgatttatgtctatgtggcatagacccacgtgttactctcacacgtctatttataataaggccttagtagtgtttatctcgattatagttatcgagtcaaacctgattaagccttgcccgcataatcatattcatataaacacaatccatatattatattcctttagtggtttatcgtgatgatgcatatcaggtctaacccagttatgtctcactcgcataagctttgacatatattcacatattcaatatcttcaatgtatatcataatatatgaaatcttaggataataactctaacttgcataccaattaattacccatataacatactctatagcatgctcgaaataacgcttatagatggtaagaactgttggaaatattttaccaggatctagatttaatactatgtatgcttcattaacatcctaatatgaat

SEQ ID NO: 137680 - DNA, 675 bp, Cannabis sativa
gtatttttgtaattttttttccttttttatatttttctgttttttccctttctaatttatcttttatttacaattttacagcttaaaatttttaattataaatttatgtttataaaattttaaaattacaaaatacaatttgctcattaaaaaattaaaaaaaaaacaacgaaaaatcaaactcacgataactataaatcaactataaataaactataaaacaaccaagaacaaccaaaaaattaacttcacgacaactataatacaactataagtaaattataaactaaccaaaaaatacaatttattatttttattaaagatgtatgtttataaataaaaaagttcaaaaaataaaataaaaaaaattctgtattgacgtatcttcataagtttttttaaatgtttggtctattgcgtaatttttttttaaaacaagatgtattgagatttaagtagtattaaatttttcttttaaatttgcaaaaattaggcaacgttgagtttttttttccaaactaaaaataacattgtgttatgaatagttatttataaatagtgttactttgtcatatattgtattactagatagatgttacgtgtcaagtcacgtatgttaattttattttagtttttaatttttttttaatatcataattttaaaattaataatat

SEQ ID NO: 137681 - DNA, 534 bp, Cannabis sativa
tgcatggaaactcactatacatatataagctctactactaattaataaaaataatattaaatatttatgatttatagtactattttttatttttattattgttttatattaaaaggtcagctaattatcttcctcaaaccattgttattttattattttcttcaaataatgaaataaagtcaagtgttggtggtatgcatgaaacatggttaatattgtcattgaattttcttttatatttagggttataatacatattggatcgaataaaaccacgcatgttcaattgttcatttcatttcataaaataaataaataaataaagaaaatccacgcatgaaatagaagatgctgctaatattgtgatccaatctaatctcccaattaatttaaatttatttatacattaggttaatagaggaagtcaaatctaataaaatgtatcaaaatttgttcttttttttttttttttgagtgaaaatacttgttattataaattaaacaaagagttcatctacaataacagagtaaata

SEQ ID NO: 137682 - DNA, 1339 bp, Cannabis sativa
  modified_base (162)..(168): a, c, t, g, unknown or other
  modified_base (281)..(285): a, c, t, g, unknown or other
  modified_base (1193)..(1194): a, c, t, g, unknown or other
tgaataacataaataacagtatcataaattatttaaatagctataaataatttcataattaaacataaccaactgctaatttccaaattaactaagcgggctttacaaaatatatttatgttgaaagtaattttttttttattaattttagaccaacttaannnnnnntatttttcttagatattaaattagaattaataattaagtttattttattcaagatacttaattattgatttttatttccagaaatttaattaattagaaaatatatttaagtnnnnnattaatttattaattaattttagagcaatttaaagtagaatatttttcgtagatattaaattagaattaataattaagtctattttatttaagatacttaattatttgtttatattttaataaatttaattaaatagtaaattatatttaagttagaaatttttaatttcaaatcaacataaattagaataatattcaaactatattttattttattttaataataattttgctacataaatttcgaaatacatttatgttaaatgtagatatttcgaattttttttctatttttgaaaattagattaagttaaaaattaattagttaattaattttggatcaacttaaaattaagcaatttttattaatgaataattaaatgaatggattaaaatatattatattttaattagaaaataagtaattagtttatgaattatcttgatagatattttctaggtagacttttggtatttttctagatatatttaattgaatagaatattaatatttaagttgattttgttcaagaccctaaaattttgatatttttattaagagatttaatttaataagaaaattatatttatgttgaaaattaatttattaaattttagaccaacataatttagaataattatttctaatcttttttttattttattttaataaaattttgaaaatgtattatttattaatagattggatttgaaattctatcatacgtatattaaatttgagttaaaaattaaatatttaattaactttggaccaacttaaattaagtcattttctaatatttattggaaaataaattttattttttagatcttcctagggtttatttttatatatattaaattaaaatttatatttagagttatctaaattagtaattttaattaannaaatatatgttaaaataaatagatcaaaataagtatcaaatgaaaatacaaccctttaaaataatgagctttaactatatggatattcgatctccattgttggtcctacatggttaattcattcaatataaccttgagacgctag

SEQ ID NO: 137683 - DNA, 1575 bp, Cannabis sativa
  modified_base (602)..(603): a, c, t, g, unknown or other
  modified_base (1535)..(1539): a, c, t, g, unknown or other
aagctgaaattcttgaattgcacacagaaaaccctcaaccctagctggttcttgaaggcacgaaagagagagagagagagagagtttggaaatttctaatcctttttagtgtgttttctttcaaagtataatcaaagaattaaaacaatattcaacttaaagaaataaaacttaagaattactactaaccacatcccactaaagacaaaataagggtaaattactaatttaccctcttttcaaaaccttaaagtaacttgccacctaggggtattttagtcaaacctaataaccccgaacaatcctgacataccaaatatctatctataatgccagactatttctaaagtactaaaccatagaaagaaaaaagtgactctacaagccatacgtcgcattccactgttactggacataaaataagaaaaacataaaatttcacatatagcataattaatacacctagaatttatatatatctccataattacgtaaataataattaaaagtctaattttattaaacctaattatctgctaattctcaaattaaagctaaacgatcattataatttataacatgtttagcaatataaggaccannagacacaatatgccacaaattataatccataaattgaaggtaagtttccattctaatttttcaataagaaaaatctactccattatagtgtggagctctatttgtgctcaaaccttctaacatattattttgtgaattacttagaaacaacatgctctaaattgtgaaatctaataaataaatgagccctcgctctgataccaattgttaacccaagatatgtttctaagaggagtgaattggactttaaactaatttcaaaaaattaaaacttttaatacaaaactatgtaattaaactcttaatcaaataaatacaagcaatattgcaagcaataatatatagcaaataatcaaacttgtaaagtaaagagtttaagggtaagaaattacaaactctcgatttttataaggttcgacagaactaagccacctacatccttgatcttcaaagctatggacctagctttaagttccactatcgagccaagttaatgggcttgattagcccttacaaccgggaatttttaccaaggtgtttcccaatctcgtaaaatagttttgtactgccaaggactatcaacatttttctcagattattgtagtaacaatctcactctaaccgggttatttataatgtcagtgccaacctcacctcaatcacaatgtggaaatgtgtttgaaaatacaagcaaattaactctagaagtatgatgaaacaatgaaaaacctagagtgattatcaggaacactttaaagaattaacaaaaaatttggctcaaagtgtgcgaaaagtatttattggattttagacttgagagctcattaaactcacttgaatatgttaagtgtatgaaataaatgctcaaccaacctaaatttttgaataaaaatagagtttatatagggtctatgttggaaatattttaccannnnnttagatctactcataagtatgtttattaacacccta

SEQ ID NO: 137684 - DNA, 867 bp, Cannabis sativa
ccggcggtctgggcatttattaccggaattcgccggtaatatacaaatctgttgtagtgtatacttattaagtagtataatctaaaatataatattttgatatatgtattataaacagagtaataatattgaaattaaaaatataattttaaattacataaaaagacaacggttttgtaacaaatattaaatggtagacttggcaaaaaaaattgcatgtgtttttataataaaataaaggaaaaagataacaacttttgaatttaataaactgagcttgtgattgatgatgtagttgtttttaaaataatttttagactttttttttatagaaagaaacaatttgacatacaatttatgaaaatttttatattttattttgtggatgtgaaatttctactttaaatgaaaaggaaagtcatgattcatataactaattactttcataatgaaatgtatatttgtcttactgtcttgtggtaattaagatgatagataccctataaagttggttgagcgctcgcgcgatcgttataattattgaaaaataaaatctaaatatgaatatttagttatttcagaaattcatatattaagtagttgttaatatttttactaaataagtaaaatattataaatggtgtgtttactatttctttttatttttaaataaaaaatagaataattttttattattatatatataataatattacattggatattatattaaaaaaaattatttatatttttagaataaattttaaaattatattaaaaaaattaataatttaataaatctattaatatactaaaatataataaatttataattataatatactaaaatatttaagtcatataatt

SEQ ID NO: 137685 - DNA, 627 bp, Cannabis sativa
  modified_base (358)..(363): a, c, t, g, unknown or other
agcactggaggatgcatgcagcctccctgcgctcacacgagccccattcaaacaagatttgcccatcacaaccgagaaaactcagatagggccttgtccaagctgcgtgaaccccgagcgacacagggtgtctgcacacgtaaagaggtgatgcccctcctaattttttcaattttcaaaaattcataactaattaaaataaaatcgaatttaagttctgtaaaaaggaaaattacttaattttttccatactatccaaataaaataattcgagaatttgaatccaaatactttacgtaaaactttcgtaaacatcaatcaatcatgaataaatacatagatcaacatgaatcacatnnnnnncacacatacatcgttttaaatccacatttcttgaaagtaaatcattaccatgactctaatactagttcttggaatatattttaccaggatctatatttactaacgagtatgtttattaacatcttaaataagaatttctaaaataatagaatttaaacacatataatgtttgagtaaccttacattgattgtagtagaatataatgactccccctactaagatccctaacccttgttcctttctatcgcagagcattatcaaga

SEQ ID NO: 137686 - DNA, 935 bp, Cannabis sativa
  modified_base (863)..(870): a, c, t, g, unknown or other
taaatgtaacatctagttgtacatccaaagatgacaacttaggctagtgtttacaatatgaaacaatgaagaagtttataaaataagaataactttaactctcgtctatcgagacatcattgtattcttattttaatcaaaattatcctttaatgtttcctcttagctttttcatttcgaatttgcttaaatagtatatcattagatgaatggtttataaatcatctgcttatgatgtcattctattttctcttatgaaattgaatggcgcaaatgactatattctcgaaattctatcccaaaatgatataaatcctcgatcttatagaaatctcttacttgtatatgtttactttaggcaaattagacttagagttagattactagtggtggtccaagaaagaataattactcttgtatatttggtataaatttaactctttgactttaaatttagattccaaatagaaattttaatttcagtttcctagaatacattggacaatacagtataactttcacaagttttaatatccattttctgtcaatggatccaaactgtatgtctatgtatggatttttgagtttgtattctgtgaccaggatctacttggactattctaagaactcttttattgtaactagacctaagtcattaaaagactagaaccacattctctatatctatggctttattatcttgttcttggtggttttgacaagatcattctctacaaagagtcaatatgtctatatccacttcaaagtaggatcatctatattcgaatatggatgtacattcaggggtgggtatgagttttttgttaaatttttaaaacaattactctagattttaccttatnnnnnnnnatttgaaatgtttgagaaatttcatgaatttctagcaatgttgaaaagcattaaggtaagtggtt

SEQ ID NO: 137687 - DNA, 579 bp, Cannabis sativa
ggttaaaagacacaattatttcaataggatacacattaattttttattaattaaaaatattggcaaatttttgttaattaaaactttgatcttttagctagtgcaaatgtgcgttggtaactttttccagtacaatttgcaagatagtaaaagtaatatttttttgtattgttccttagctaatttttggtaaataataagaaatccataaaagaaaaaaaattgaaataaaatgtaaaaatatttgatactatttttatataaatgagacgtgttactgttaatctcctattatgctagaatattttttttaattttttttacggcggtgttcgttatgcttataacatcatctttgtaaatttttgaaattttttaaatagttcactgtggcaaaaatacgtttgaaattttttgaacacacatggtaaactagaatatcaagaactctgttttcagcattgtaaaaatattcaaaaaattcaaaaaatttacaggaatgatactgtatgtagtattttatataaattaaagggaattggcggctaaaccacttgaactttacggtttgtaacactt

SEQ ID NO: 137688 - DNA, 828 bp, Cannabis sativa
taatgttattatatatatttaaaaataaaaattatgtagatatttaatataaaaataataaattttattatatatatttaaaaataaaaaattacgtcgatatataatcacatctatatataaaatatatatttaaactttaatttcacaacaattttttgttttaaaaataattaatgatatattataaacttctaataatttgtacactattataatcacactctcctaactacaaatttaaaatgtgtctatcactattattatttttttaaaatatatgtttagacataatatataaaatgtattttgaaattaattaattctctaatcaaattcaaattttctcaaaatattttttaatataatccttatatataatgagatcaatataaaatacatataaaaaataagtataataataaaattcattcttttattgtacatttaaaatgcgtatatataatcacataattaaacatacaaatattacaattaacatcacttaattaaatttaattaaaaaaactaattatacgtgtgtacaattgcacgtaacttcaacttactatatatataaaaggaagcaactcaatgaaatgcaacccacgcactttaatatcataataatctatatgtatctacatatatttgtaatagggtacactcttaatggtattactcatagatgggtaaattttagggtttaagtttaatttttctatctaattagtttaatctctatttttacattatatgggttggggttgttccatcgggtgaaaaaaaattaagaaaaaaatttttttggcaaaaaaaaaagataaa

SEQ ID NO: 137689 - DNA, 561 bp, Cannabis sativa
  modified_base (531)..(535): a, c, t, g, unknown or other
tcactaactaattactttattttctaattaaaatatgatatattttagtctatttattttaattaatcattaatgaaaaatttatttgatttacgttaatctgaagttaattaaaaattaattttcaactttaatctttaaaaaaaaaattcaaaaattatttgcatttaaataaatacaatttcaaaatattttgagggaaaaatgattaataaaataaaatataatatattttgaaaattattctatttaagttgttctgaaattaaaatttccaacttaaatataattttctatctaattaaatattctgaaaataactaatatttcagtatcaagaataaaatcaacttaaatatttaattaaatgtattaaataaaagaatcaaataattaagtataaaatcatctaatttattaattctaatttaatactaggaaaaatattctgatttaagttggcgaaaaattaattaataaataataaattttcaacttaaaaaatgttttcctaattaattaaatattagnnnnnataattagttactagaaataactatc

SEQ ID NO: 137690 - DNA, 1499 bp, Cannabis sativa
  modified_base (64)..(67): a, c, t, g, unknown or other
tccaggtctgggtctgggtcaaggttcatatcaggatccctatctacgtccgagttagggtctnnnnttgggtcctaggtctaggttcgggtccaggttcagattcgagtctcggtcttggtctgggtacacgaccgtgtctgcgcccgagtttcggtctcagtaaaggtttggggctatgttcgagtttggtcgtaggtctgggtctgggcccgagttcgggtcttggtctggttcaagtctaggtcttgggtcgggtcttgggtcccggtccttattttgttgccctggtccctatctcgattatgggtctaggtcctagttttggtctaggtttgggtcctggtctaggttcaagtttgggtcctagtcgcagtttgggttggggttcgtgttcgtgtcgacgtttgagtcctagtctgagtttgggtttgggtacggatcttgttctaggtctggatcgggctccgggtgtgggtttgggtcctgggtcatggtctaggtggtttgagtcctagtttttgatctcgatatgagtctggaattagttccgggtctaagtcgtgggtttctatcccggtctgggtttaagttcagattcgggtgcaggtcccaggttcgggtccaattttgggtttgagtccaagttcgcgtttggtcgtggtgtgggttcgtgtctaagttcctatccttgtttgggttcagggcaggtttcggctccaggtctaggtatgacttcagattcccaggtctaggtcaagtcctgggttgggttcgagtcctggatttagatttgggtctgggtaccggggcctaggtccctggtctaagtcccctatcaaagtctggttcttaggtcctggtgtagggcccagttcgggtttgggtcttgagtcttggttttagtccaggtctcggtctggattcgggtccagctctcagtcctagtcttggtccgggtttaggttcaggtccttgttagggtctggatcctggtctgggttgcgtgtctcaggtcctgacgagggtttaggaccaggtcaggtctaggtcccggtttgggtcccggtccaggttcgagtcccaagtctcgggtcccactcctagtcaaggtctcagtctagtaaaggtcacagttctagttctgattccgtgttcgggttcgattctaggttttggtctgggtccaggttgggtcagggtctaagtcttagtttgagtccgagtacgggttcttctgatctcagtctgggtctaggtttgagtccgtgtccaagtttgggtcctagatctgggtcccaggtttgggtctgggtctacgtctgagtccaggtcccgtgttacgatgccagtctgggtatgggtcggtatttgagtccgggtctgattcgggtccatgtcctggtctgaatcccagtttatgtcaggggcttggtctgggtctgggatcgagtcctgagttcgggttcgggttcaggttcgagtctcagtcctagtct

SEQ ID NO: 137691 - DNA, 684 bp, Cannabis sativa
taagtaaaaatgtagtaataggcgcgtgtgagtaattttgtaataaattgtgtaaaatggatttttcatgtaaaaatttcaaaaacttatttataataatagggaaatttacatttttttccattttttctttctttttttactgttacatgacaatctttacttttatactgcttttttttattgttatagtaactgccgtggatgtgtttgacagtttttttgttttaatttttccttaataaaaattgatgatcaaaaatttgataccctaaatattaataccctttcatttcactttaatcccacttctctattattctcccttactattcatcatcatcatcttcttcttcttctttttcactctttcttttctcaagttctctctatctttctccattcatatataagttttttttttttcttgttcagttcttcttcttcatcttcttttcattttttatttagtttttgaagtttttagtcacgtttttggaaaagataagaattagtgtaattttttttattctgatttttcagaactaagcttactgatataacttctattgtatttagtgttgagactgtgtagaaaatggttagttttttttaatcatttttttattcttttggtttttttgatttgttttagtgttgttttacggttgtttttcataattt

SEQ ID NO: 137692 - DNA, 1339 bp, Cannabis sativa
  modified_base (164)..(168): a, c, t, g, unknown or other
tcattatattctgctgcaactaatttaagattttttaaactcatatgtgtctagtttcattgttttagagaattcatacttaggatgttattcaacaacttgttagtaaatctagatcctagtaaaaaaaattcccgacattcaaatcccttaatacttgcatnnnnngttagatatttacaaaagaccaaactgtccttgattctagatattatcgagccattctattgggcttttagggcccaattcgcagcccatgtgttgttgtccacgtgtagaagtgttcaggaaagccagcgtgcacctcttggctggccaggctggctagccatggtgcattcccaaggctggccaccccagctcaagagagggagctagttttttacttgatgcctgtttgagtgttggggtctctgtttgtttaagtgtttgacttgaccttcctactggtgagttgtagtgccatgtggcactgattttgtccgcgtaagcatgccatgtcatgaggaaaaaaattaggatagcatttagtaaatatgaaaaaattaattatgtgtggtatttttgaaaaaatgttgagatcttgttttggtgtaaaagtattttttaaaattagattgtgttatatttgtcaaataaatatgtagtttgcttatttagaatatcttatcttgactttttatgtttaagaaatgtattaatattttatttattttaattgatgtgatttctttgtcaaggaaccgtgtacaacttgtgtctttaatgtatattttgttttcttatttatataaggaaactatgttgaaaatctatctaggtacagtgaatatgtttaaatagattgatagtctgcttgaacagattctataaagatcgcttagctttaatttagaaattagcagataattaggatttaagttggaaaattatatattagtattgaattaattatttatgataatttattagaattcagaatgcatttttatgtcacatatagaaatttcataatttatgcatattttgtgtctggcaacattagaacgcggtgtttggcaattagaatcacatcctggtatttttagtatagcaggacaataaagttagacattgggaatgtcaggaatagtcgggattttagaattctccaaaatatcccttagtgaccttttataccttttagtgtggaaggggcaaaatggtcattttgccccattagctctttgtcttatatgttaatacatgttttagcgtacatgttgtttatgcctgttagattacattgatagcagtagtagtatacatagagttatgctgaaaactgataaatgtatgt

SEQ ID NO: 137693 - DNA, 615 bp, Cannabis sativa
aataaaatattagaattaaacgggattatagaatttgaccattttacccctagcttaagaaataccttagttttaagttaaggggcattttagtcatttctttttttaggtgattaggtggctgcctaattaggtgacacttggcctattagttttcaacaatgattaaatgaatttttcttaagtctcattttaggaaaataagggaattgaaggaaaaaccaaatagaactcaccctctctctttctctctttcggctggggcaaaacccagagggattcaccctcaaagtttggtgtttttttttttggatttaagccaaggaattgggcattcttgaagcaaaggtaaaccctagaccattggtttcatgttttcaagctttttctttagtttgagtatgtgatttctgagaataggggctgttaaggtttaaagtttgtgcaatcttgatttctagggttgattttgagttggttttaagctttggatattagttttggtgtatggtggtggaattaagtatgcttgagctttgaagctcaagtttagggctttaatggcatcctttgatttagtgactttttctgggaatttctggttggattatattg

SEQ ID NO: 137694 - DNA, 665 bp, Cannabis sativa
tgttcgctgaatggagagataatgagatggaaacattaagggcttagcaagctgccattgacgaccgaactcgataggccactgtgttgatacgaaaagcctatcaggctaccggacaacagcttgtaaccgacatccccctgggcgaaacagacgaagatccagcagtgaacacctctaagactataaatggtcagccgcccaatctccagttacaggttccacctgtgggccaaacggcaggcggacagacccggtctaccaattcatcagaacaagtcatacctaacggttccaaccaagttaatggtgccggctagctaatgggccaaaccaaccagtctgtgagacaaccaggtgtttctgtatttaatcgattgggaacagttcttgatctccaagatgatctgaatagaaggataggagtggacaaccagcatgacgcactagtcgttcagcccggaacccgtgctcaaaatcccgctcaaagagatgctaacacgactctggttggccaagaggccgaacaagttagtccagatgtccaggcacagttggatgtactaaaatatgttccaaggcctggctggtcagaggaacaatgacctcgagttgtaccgagcacgttgatcccctttctccccagagattaatgtcttggaatt

SEQ ID NO: 137695 - DNA, 1219 bp, Cannabis sativa
ttagtcactccttctattactcttccttcactcctcttcatccacctatctttctcttctaccaaacatagtgttagataataaaatatattaattcaatgtacaattactattatacaaaatatttttttactaaaatgttcacatactctattgatgccaataaaaaccaacttgcaccaataaagtgcttactacactatactagcaattattaaaaatattttttactttaatttattgatacttattttattcatattgtatgatcttaatttttatgtcagttataatatatttgtcgcttaattgctatatatatttattagtcaactaagtattttcttttgcttgcttgtagaatatatatttaatattttgagagtcacttatttttgttttttaagattttgattttcatgtttttaaaaaaatagttttataatatttttttaaaaaaatatttttacttttttaattagaaaaaccaaaaattctttaaaaatggttacataattcaccctaaataaacctataaagatttattaattaaataaataaattatatatatatattaaactcataaccttatttattatttttttaaagcaattgctttgaaaaataaattcaaaatttatatctgtttacctaaaaattgaccctggtgacataaacatcaatatttaacatgtagcaagaaaaaaaacatcacagagttgagtagtccaaattcatagcagtcgacctgggaaggaccctagccctacgcccaagttgatttcaagaatttggactgagtgtttggatcctgccaagttattttcaactcactatttttcagtattctatatcttaagaagacatgaagaatcaaagtccaaggctaagaagctgaaaatacacgaaacaacacctcggaagtcaacccgagcgcttagtgttttcacctagcacctagattgacattccaacaagagtttttgtttccgggatcctcttagtaaaaatgggtcaaaatttgtacaaatacatgaattagacatgtcacgaacatatttgaggcatccgaatcagattcggtgcaactttaaatttgagcactcagagcatcacgtacccaaggcacccagtgcccaagttgacatattgtcaacctatggtgcttccaattaggggtgttcataaaaaccgaaaaacagaaaccgaccatcaaac

SEQ ID NO: 137696 - DNA, 642 bp, Cannabis sativa
tcataaagggacctcatttgtgtgcttttgaaatgcttcagcaccagttttttcatctttttccaacttaatatctctcgtgttttattttcatattcataccatagtaaagcatcccctgaaaatgaaataacagcagcctcaatcttctcgtcattgtcatatccatgacaagagaaaaatctttctacttgtaatatccatctgtttggattctctccatcaaaagtcagcatcttcaacttcttgagccaattttcatgtcggaattgcaagtcttgctggctcctatcaaaatattcccactttaagctccgattcagacaaaaacctgccataggagtgatgcccatggccgctgactgtcgttccagcattgcggcactgtgttagggtgccatggggctcgctgggcccttgttttcctccttttccttgttgccagcaactccattaacatcttttttgggttcttggacagttcttgatttttcttgaatttctaagaaagtcttgaattgttgctgtaacatttcttggagagattcttgcatctgttgatgaagctgttgtactatctctcgtattgaatcatgaagagattccttaattccagaggtgtcaacttccaaagcttcacga

SEQ ID NO: 137697 - DNA, 1746 bp, Cannabis sativa
ccaaaatgcccttgaatatagatattattcagctattatattgggcttttagggcccaatttgaagccacaatcatgttatccacgtgtagaagtgcaaagtaaaccctacagagcttctctggccggtcagacacttgtagggagcaggctggctggccatggtgtagtccagaggctggccgaccagcttttgtgaggaagctggtctgtcatttgatgcttgtttgagtgtcgggctccccatttccttagatactgacttggtcttcttattggtgagttgtactaccacgtagcactgattttatctacgtaagcattgccacgtcaggaggacagaaatcgggataacaaaggtctaaatctagattcttcttctgatgatgattgaactacataatcttcctatgctgagtattgctttataatgtgtgagcaagttctcaacactaaggagcacgaaatttcataaagaaatccaaaagaaaatagcctctaaatttttgaaaattaaagagaagaagaagtgagcttttagggttttctagcttagaaaatcatcatctgataaaggtctcttctctttctatttataggcttcacttaaggttaagtttagatgagattgggcttaaaataaagacttgggctgaatcaactcttagggccaaattgcatatgggctttagagttagatttatgccactttatttcatttaaatgaaacaatgtatcttttcttatttttagcacttttcttatctaattatttaaatactaatttattttaataattttaaataattatcaaataaaatatagctaaaatattttattaattagacccgcaaagtgtactaattaacaaataaactcctatttctttttttcttctcaattatagccttccttggtaaaattcataaataagacatagtcattatttaaaatcctaattaattaaataaatcaattaattgagactacaaattaatattattccaattagtgcggggatcatgggcatatataaacaagctcctaataagtagatttaaaatttaccaagtaaatttctttgcttattaattcctcttgactccactatagattcggaattacactcccaattacatagaacgttctatataccaaatatagatacgctatgaattatctattgttacaatctaaataattaatgatcatttatagatggtctacattgaatatggactaaattactattttaccctttaatgtactttatccttaaaacatttagctacttgtaaatgatattttgaaaaactaatataaatacggaaatgaggcctccatcatttaagcacgtttagtcaagctctaaggaaaccatcgtttcacttctattagttatagaagctataaattttatatctatgattaacgctctcactcaattgaagatgtaactattgggccgatcttattggtcaactttaatgaataagttaaagaacccatatagtacaattaagatagaacttaaccatcttaggattgagatcaattgacctaagatcaactaagtgacattgacttagaaaagacataccaataagtttatgatattttttctattgtcaatatcagtccagtctgatgtatatctaaaacatctagtatactttgctaatgtcctagaaagaacattccacatattagtgtgtaattaaattttatcgttgattatcacgtcagt

SEQ ID NO: 137698 - DNA, 827 bp, Cannabis sativa
  modified_base (233)..(233): a, c, t, g, unknown or other
cagactctatcatacatcctactgcgccctcagctcgcagtgccttatccaccatttcagcataggtggttttgtcgttagtagtaatcattaaatcgtgtcagatttttgcattcaacccatctaggtacttctcctttttactgaaatcagttggcacaattcttgaggccaacctcgccaatcgatcaaactgagtcgtatactcagtaacactcatattttctatctgngtcaaatgggtgaattcttttctctttgcatttctgactgcctcattatagtacttagcattaaacagctcctagaatttctcccaggtcattgtagtaacgtcatgtatcatggacaccatgtctcaccaaactaaagcaccttcttgaaattgaaaagtgggacaaaccactctatcatttccagtgacgcccatgaaatttaatatcctggtgatcacagctatccattgctcggctttcataacatctggacctcccaggaagactagaggtgcctgcgtacggaacctttcatacaggggttccatccggttctttacaacaacctgttcggcctgcacagcaggggcaggtgccacaggtatttttggaacaggcactgcaggagcaccctgctgtcttaactgtcgaatcacttcttcttgttcattgattctagtttgcatttctgtaaacctgttttcccaattctgagcatcctgagcaacttggacagcctgggcaacatgtggcaggttagcatcaccccgaccacgtgccctgcccctgggacctctacctcggccccaaacatttgggggaatctgagct

SEQ ID NO: 137699 - DNA, 738 bp, Cannabis sativa
  modified_base (706)..(712): a, c, t, g, unknown or other
gtttacaaaatagctaccaaaatgctttgctctagattgaagaacatcttaccaagccttattgctcaaaaccaaagtggctttgttaaaggaagacttattgctcagaatgtaataatatgtcaagatctcatcagacattatggaaggaagaatgccatggaaaattgcatgataaagctagatcttcaaaaggcatactatacagtggagtgggactttataaaagaaatgatggaagccttacagttccctactcagtttgtaaagctggtgatgaattgtgtaagaactgaaaagttctcattaatgtttaatggtactctacatggattctttgagtcaaaaagaggattacgccaagaggatcccttgtctcctctcctctttgtactgggaatggaatacatgcctagaattatgcaaagaattggttctaaagaagatttttggtttcatgaaagatgtgaggggatcaaactaaatcacttaagcttcgcagatgatgtgctcttgttcagtaagggtgacttcaaaactgtgtatctcatgctacaaggattgaagctattctcattgtcctcaggtttgcatcctaatcctaccaaaactgctgtctactttagtggaatgcatgacaggaaaatgcaacgaatattaaatatgtcttgtttccgtagacacaatgccccatttagatatctgnnnnnnncgatatgtgccaaaagaatttcaagc

SEQ ID NO: 137700 - DNA, 721 bp, Cannabis sativa
ataccatctaattttatgggttactacaataaatattataatattttatatttaaaagtttgctagtatctaaataaatttactttaaataagtaacaccaacatattctatccaccacagaagagatcatgtttaaaaatttgatttcttataagttattttagaaattagttgatatttaaaaatttaattttttagtaaagaaactaaaaggttatttttaattttaattatttttttcgacaatagtaataaaatatatgcttcccatatgttaaaataatctccttgtaaagtaggtcgtggtgataaaatttttgagctcaaataattaccggtgtaaccaaaaaaacttttatttttaaaaaaaaaacaaaaagaaaaaagagttattttttaatattaaagaaataattatgaatatagtataagaaaattatgaatatattatacaaatgtgatatatatattttttaaatctactacttagagaggaggctactgctttggtggaatgaaagtgaccaataaattaaaatgatattgaatgcttacagaagagagagaaaaacaatttagaaaaagaaaaaaaacatattgaatgcttaataaaaggttttgggtgattctacaatgcatgcccttaaaagggatgtattgatgcacccttaacttatttcggcatttagaaaaaaaaattagtctattttttttttcata

SEQ ID NO: 137701 - DNA, 929 bp, Cannabis sativa
tttttatgtgtattaaattttattataactttatttctattcatccatatattccttgttcagattattctcaacaatacccctataacttacttacatgcttatttaactatttgtcattttgttatatgtgcaatcaatggctgccacaactaaactccaattcaattacatttaagtgttcaacttcttttattggtccaccaaacgcttctaggagttttgtgacttttgtcaaatgcaaatactgtacgtccttgattggtatattccatttatgatcttcttctatactattttcaaaatccaatttggataaattcaaaatggatgagtggctttggggctttccaacaacttgtgagttgctacaaatgtgagcccaccattgttatttctcttttgtgaatttcaccattgttttttcttttgaaaagaaagtgacttttgtgattttccaccatgtcttgattttttttattattatttatagatttttttttacatatgtttagatatatatatatggattattctagctgaaaatgatccagttcgaattgaagtaccaaaaggacaattagctaatgattttaaagcacgcttgaaacgtgatagactagtcgattccaaagataaaaattctcgaaaagaaaaggaaggagcaaatgatcaagatgaccttaatgaagaggctgaaaatttcgaggaagatgttgacataaacaaatctcttgaggagattcaggtacttaaaaatagtagaaataatgagatctcaataaattatgtcaatacaagaaaataatgggacagactcgaagtaattatcgataatatctttgcttataatgtagcgctagaaattataaataaaaaggagaatcttgaacctaaatctatcaaagaatgtcaaaatagaaaagatt

SEQ ID NO: 137702 - DNA, 614 bp, Cannabis sativa
tttctttttaattcaaaatttttattttcattgataacattaccttctcctttttcgattcatgtgcttgctctaatatattatttggctcaaaaattttagacacagtgaaattttcatctccatctctcaaattataagcattaatcttaatttgtagacaaaattctttccacacagtgcttgaatcactgtcggaacatcattgttatttgtaggtaatagtttcttcactgatgtgtcaagtaatttttcagctataacattgattaagacaaaagttgtttccccacttttatctcttacttttatatgaattttgtaactacattgacgaacaaaattgagtaaatctattaaataacataatctttttttttttaaaaaaaaaaaaaatcattaaactattttccttacatcataatgatagtcatatttttttacaatggccacaataataaacaccatcttgtaatcaacctttctcaaacatgtcttgcaagacacataataccatttaaatgtagtatctatttcaataatctttgcctttattaatttacataatacaacaatagttaagagaagagaaaatgaatagaaattaaaattcc

SEQ ID NO: 137703 - DNA, 624 bp, Cannabis sativa
ttaaatttgttcctaaagacttcaagccacaaccaaagccggaaacgaggtattctaaaaattaggagcttctgaccaatccaaaccagggaaaccctgtagcctgccatggctgatcctcacaagtgatccttgaaggtatagatcttgtgaacgatctcataaggaaatggcagtggtcgggccttgcataaggaaaatggttgcactagcgaagttacattttcaacatctatatatcaaataaaagtaagaaaaagtgacccaaggctttataaatcccttatcggacaactgccattcggaaatggcagtgcccatcaattttgataggcactgccacaatagagtggcagtagtggctactacacaaggaaatgatattcattggcgaagttatatttttaacaccaaaatagcgaacttgtatttttccctattttaaaggcctccttcacctataaaaggagagcttcctaagttcatttctcatattcaaaaatctaccaacaaggggagagcatccctctccagtttatctctctagaaactagagcttaaacaattagtctttttttgtaattaccatctcgtgagaaataaaaactcaaagtagaggtagct

SEQ ID NO: 137704 - DNA, 581 bp, Cannabis sativa
gaggtctcgagatcacctctgattccttcatcattttcactcgcaggagttgagatctgtaccggtgagagaaaacaaaatatgtattaattttgggccaatcaaaatatgacacgtgtacatatgtgcatatatactagaattaataaagcacaaacttatctataagtaatagctaattttttttaggaaaattaataaacaatttgtgtatattttgtatattttgacttggctaattataatttttcttccccgaattccccgaactttgatatgtaccaaatcatgtcctttgaattttttttggcgttaaaaatttccctgaactatttttcattcaattttattgtttcagtgattgtttacgtactaaaacatgctccccaaattttgatatctaccaaattatatcactacaactttgatatgtagtaaatcaggtcctctaaacttttatctatgttaaaatttttttactaaaattggacaaaaatctttaaatttaaccatatagaaaaaaaaatgctatcatttcatctaatcaatcgataaatatcctttaaaaaaaaaaaaaaaaa

SEQ ID NO: 137705 - DNA, 756 bp, Cannabis sativa
  modified_base (719)..(726): a, c, t, g, unknown or other
tttcattctttgtttacataatagcattttcgtatagcctatactatcgtatatgctaataaatctataagtttattttggcatattaaaataaagttttatttcttttagtatattggaataacaattcattttattttatatagcctaccattatatatgtcaataaacctactagtttctgtttgttggaatttttttcaatacatagtaaattataatcaaacataatgatatacactaataaacttattaatctatttttcgtatattggaataacaattcattttttcaaacacatatcatcatgtatgcctataaaataacaaactaattagtctatttttaaaatatcaaatgttagatgtattggtaacattaaagatacttatacttttaaaatatcaaaatcatcatctgtttgtaaaaaaaaaaaaaagttaaaagtgaaaaacattataaagagaagaaattattaattcatactcatagtatggaacataaaagataaaaaaaaaaagaaaaaaaaaaagatatcagtaataaagagaaaaataaattctcactctagacctttatttattatgtagtgatgctcaacttgattgacgtgatagatttcgaaaaaaacaaaagaaaaaacttgattgacataaacaaatgatattagcttgcaacacataaatcaaaagcaaatgggtaaatactattttggacnnnnnnnnttgcaaaagttacagattggaccctgtgtt

SEQ ID NO: 137706 - DNA, 536 bp, Cannabis sativa
caggattttgagtctgccaatcttaaaacaacaggtttatgtaatgtaccacggtcttcacccaggccctcttccttggtggttccaactagatacaagattaatacggatgctgcacttgatcctaatcggaaaaagcatagtcttggtgtagtggtgacagatgctcaagatcgggtggtggctggcgttattgctccgctgacaggaactgtccctccggatgttgcagaagccaaagctcttctactagctttagaatgggcccagagtgttcatctccctgttgatattgtggaatctgattgcaagggtttagtggataaagttaatgggtcttttagtaactattctgttttgagtgattttgtatctcggattagacacttgctatcgttcagtcctacctgtaatcttcattttgtacctcgtgagttcaataaattggctcacaattgtgctagggcagggttaggattagatggtgagtattgttggaatggctgtttgccttcctggctttcctgaggactctt

SEQ ID NO: 137707 - DNA, 858 bp, Cannabis sativa
aatatatattatatatatgtagagcatgtgatataatatatattagtgagattaaatatgtagaaataattatttctatgtatttctatgtatttctatgagacatacatatataaggacacaattttgtcctgtgatgtactttcacgaaatgtattatgtgatgtacgatagccgttagatgggagagttatttgatctgagggctgggattgatctaggggtcattatggttaaaaaatagtaacgtaccctgagatccatctaatgtatcatggaatacattcagtgaaagtaaatcacgggacaaaatcgtgtccctacatatataatatatattatgtgtatataatatatatcatgcatgtatattaaagtaaggagctaaaacaataggtattgtgatttttacctattaataggtatagtaatttgtagccttgatttaatcaaatggctcaaattaacccttaaaaactacaccataattaaagtatctttttttttttgtttataattaatcttgaatactattaattacaagttcaactaacaaactccaaacctataattttttttacttatttatcttatgactatttataatttttaattaattattttttttaatttgaactttatatatttatttttaattagttttattttctacttaacacaataattgtagctagaaaagtataaaatattcaagttatttaatcctacaattatcaatacaaccaataatataataatggtgtaagcggtaaaattattgtatataaagtacaatgacatgatcgttcaatcctttcaaaagatataattttttttttaatttaagattttaaatta

SEQ ID NO: 137708 - DNA, 799 bp, Cannabis sativa
tcagaacacaacaagccaaattcagtattgatgaattctaaaccattatctgtcctaagcactttcaatttcttttcatactagttttcaacttcaattttccatttcctaaatttttctaggcattcatttttagttttaagtagataaacccgtacatgcctactgaatcatctacaatagacaagaaataaagtttacctgagtgagttccaaccttgtgagacccccacagaccagcatggacatattccaatggcctcttagagcaatgattgcctgccatgaacttcagtctgtgatgctttcccaacacacatgcttcacagaatggtaataaattaggtttgaaatttactaggagcccttgcttggtcaattctttgatcccttgctcactcatgtgacccattcttttatgccacatttccatctcggtttcttgctgttgtacaatactggcttcacaagccattactatttttccttgcagaatgtataagccattattcttttcacctttcatgatggtaagagacccctttgcaattctcttctaaccattgcaagatttataattgtagccttcatcttcaagtgttccaagtgatatcagattttttctcaactcttgtatgtgtctcacttcatgcagtattcgaacagtgccatcatagtgcttgatagcaacttttccaatgcctattaccctacaagaattgtcacagtgatttttcaattgcagtgctatctttgctaatcaaagaattttcttgaaaattgtgtcaaattaaaactt

SEQ ID NO: 137709 - DNA, 916 bp, Cannabis sativa
ggactagggacagtcagttcgaccaagcacctatccttgaaattccaaacacaagaaggcgtgggagtggtgcgtggcgactagatgctacctcgcaattgctatcgcattgagctacagcataggaaagtcgatcatcaattgatggcgatattggcagaatgaaatgagaagaaagatgaagatcttgaccccgaagttcaagatgagagaaacctattgaaaccaattgaggaattggaagaggttattctcgacctagaaaatcccacaaggtgtgtatacatcgggaagaacctggacgagtagctcaaatagcaactaataaggtttttgaattcgaaccaggatcaattaacctggagccatggagatatgatagggatcgaccctaatattatatgccatcatttaaatgttgatctaaactacccagcgaagagacagaaaaggagacccttggattccgagaggcaaggggcactaaaacaggaagttgacaagttgttagtcaacgactttatacgcgaggtgttttatccctcgtcgatagccaatcctgttctcgtcccgaagcctaacagaacttggagaacttgtattgatttctctgatctgaacaaggcgtgcccaaaagattgttttccacttcccaggatcaaccagttagttgatgcaattgctagacatgagcttatgtcatttatggatgcaaattctagatataactagataaaaatgtatgtcccggatcaagaacatacaagcttcgtaacaaacatggtactctattgctataaaatcatgcctttcgaactgaagaatgttggggcaacgtattagcgaatggtaaacgaaatgttcgcaaatgaaatagggtgaaacatggaattttacgtcaatgatatgttggtaa

SEQ ID NO: 137710 - DNA, 2267 bp, Cannabis sativa
  modified_base (1047)..(1057): a, c, t, g, unknown or other
  modified_base (1362)..(1369): a, c, t, g, unknown or other
  modified_base (1426)..(1428): a, c, t, g, unknown or other
  modified_base (1883)..(1893): a, c, t, g, unknown or other
  modified_base (2199)..(2223): a, c, t, g, unknown or other
tgtcactaaagatggtcttttttgtagtgattgtatttgtgacttcgttgttggctaaaaattgagtcagcaaacatcatattttatgagagagaactaatgtcgaactctatgaaaccaaataagaaaagttaaataaaaaagtaaaagacatttgtttctatttcaaatattcaatatacgatgatccaaattttatagcagtacgaattttattttattcttctcttttataccttatatatatatatataaattctctttttttataatttatctaatgtaatatttaatatagattaacaaataatgatgtaagactaatcaccacaaaaattacaaactcttaaatttttcatttaatacaagaattacttaattataaaaataagaataagaaaaaaaaattattttcactctagtatcttataaaacaaaattaattataatattattatagaaactcaaatttctaaaatttaaactaaaaaattgtaagaaaaatatgttattacaatattttgaagtaatagtatacttaccaattatgttatgataattttgctgtttaaaacaattatattaattattattaggctaaatcaattattataattaatattttttatatatagataaattattatgtattttataatatatgttatgccttttcaaaaaaaaaaatatatgttttagctagaatggaaatatttgttgtagtaaggtttgagagtgtaattgacggttattgaagtttttaaattaccataattaaattgtaaggtatcaatgtattaatatatatatatggaatgaggaaaaaatagaaataatggatataaaaaaatgtcatcaggtaataggttaaaataaaaaaatatttaattaaaaatttaattaatagttataaatatcaaccattagatttgatttaatggctaataatagaatacccattcataggtaatacccattaagagcatacccatacataaatgtatattttggacttaatagaatttatatattaaatataatcatgannnnnnnnnnntgaaccatgcaacataaaaagatttctaatcttatattaattattaaatctgtttaaattgaaatggattttatttagggcacaaaatccaacacatatctctctcattttttatcaaaatcgagttccgtaaataaaacaaaattgcttaattttacacagagaatccaaataaattattttcagaacgaaaaataaattattttcatggaaaattttcattatttacaaacattcatcaaatcactcataaaccaacatgaacacatccaaatcaacaaaatcatcattttaaatccatattnnnnnnnngtaaatcattaccatggctttgagactaattctcgggaattattttaccaagatctnnntttactaacatgtatgttgattaatatcctaaatatgaattctttaaaataatgaaattaaacacataagagtttagaaaacgttacattgatggtagctaaataatatgtctccttccgttcagatctctaatcccttttcctttctgtcgctgagtaataacaaaatctgaatttggatcttcttttctccttcagttttggttaaccaccgtcttccgcactatgattgagtacttgacatgctatgtatgggcatggtactctatcactatgcctcaaattgatgaagaacaataagaggggagaaatcactatgaaaggagtctctcatctactagttgtcagagaatgaaaactaggtttaatttggttgaagtgagttgaatgagaaagagagcatcgtgttccttttatagtattttaactagggtttaggatttaattatatggannnnnnnnnnntaaaataatgggcaaaaataccttaattggccggcctcactagttacaattttgccactttattttaactatttatccttctatcaataatgtcgtattttccaatttcaatcctataatgtcataattatttatttagtaattataattaatactcaaataagattgtcatttctcttatttatcaattagacatttcaaagtctcttaattaatgaataaatcccaaaacctttcttcacaattaaccctttgcaaagtaaaaattcataaataagacatagtcgaattttagaattataattnnnnnnnnnnnnnnnnnnnnnnnnntctgcaagcagtattatcttaactagcgtggggaccatgggcct

SEQ ID NO: 137711 - DNA, 671 bp, Cannabis sativa
  modified_base (309)..(321): a, c, t, g, unknown or other
gtgcagtatttgaaagtgctctggggtgtgtccgggcacaaggtgactgggagcctcacttttcccatagggataagtgttgttccattaaaccccctgagttgggaacaacttggtgataggtctcggtccgttaggcctatcgcagtgaaaacctatttgaataacagattcaaggaactcccattgtcgattaggactctggccacgatcttattggcaatgtgggtctctatgaccaacgggtcatggtgaggaaaacgcactgttttagcttcttcttccgtgaaggtaatgggctgatccatnnnnnnnnnnnnntgagctgggagttgagtaacttccaaaacttcatcgtgtttcacggcccctgtgtaccgtttgagccctttgcgggtagttcctccgatgtggggtcctcccgagatcatagccactctcccgttgggtgtagatggcaggccgagaacatgctgggcatctccggggggaacaactagagacaatactcctgctgcacaccctagtgctccttgttgcaaatctccagccgcctgacctaggttgagatcgggcaactggtttttgatcaactcgtagaggtgtcctaatcgaatcaggttttcaatctcgtccttgagatttttgcattcgttggtgctgtgcccaat

SEQ ID NO: 137712 - DNA, 503 bp, Cannabis sativa
gatggcttatgcatattcccgggcaaagtcagttgcttctaagaatgctgccatgtccaacaccatgagggcagaagtggacttggctaggaaagacgctgatgaaaccagggttcaacttggagccgtccgcttggagctgggtgaagtttacaaaaaatgtcttgctgccaagaagaaagtagctgagctgactaaggaactcgaggcttctgaccaacttgaagctaccatcgcctccttatcatcagaagtgaacagtctttcaagaataaagggaggttcttcgggctgtcttccataggttggaaatagagaagaagtctaaggaagaggagcttaaagctgaggtcgagaagtacaagccggaggctgaacaacagagagcagaggctgagcagtggagagcggaggtgacgaggcttggagggaaggtaaatgcctttaagacagcgggtctcgagattttttattacttatggaaagctatttcgaacgcaaat

SEQ ID NO: 137713 - DNA, 563 bp, Cannabis sativa
gaggcagtatgcgagtttttctattaacggatatcggccctcgacctcaatgagtcttttactgatgtaatagactgggtgttgtatatcattcccttctctgattagcacgtcactcacggcatgttccgtaacagctaagtatattcccagttccttgccggccagaggttttgagagtacgagaggttttgcaagttgtgcctttagcccttggaaagccttttcacactccactgtccactcgaactgctcgtttcctcgcaggatgatgaagaatgggacacacttgtctgttgattttgaaacgaatctgctgagcgcggcgattcgaccagttaagctttgcacttcttcggtttttgttggcgagttcatatctaggagggcttgaatcttttctagattatcttcaattctttgggcattgacgatgaagcccagaaactttccggagctgactccgaaggaacactttaagggatttagtttaatgttgtattttctaaggactttcaagcatttgtccaggtcgtctatgtgcccccaagcctttctggatt

SEQ ID NO: 137714 - DNA, 536 bp, Cannabis sativa
gcttcgccactggatttaaacttgggacctcctctttaagaggagtgtggaaccactagactatgcctatgaccactttaattagttatgtattaattattacttttattattattcacaccatttttctaattttatactaattttagggagcacgtgcattgtctttttgtagatcaattttttttttcttttttttttcttttgtgtgactcttcaaaatattaatgttttaaatttaaataatttaatgtttattttttaatcttataattttttttacttaatatatttataaactcttctatcttcaaaaaacaataatactttaaatttaattttttttcgtttcttttcttttgtgtgtgtgactttcaaagtattaatgtttcaaatttaattatctataatctatatctataacatatatctataacactagtaaaaagttacgtgcaaggcacgtatactaaattttatgctagtttttttctacgttattgaaaagtgatacaattaaaaattaaaaaatatat

SEQ ID NO: 137715 - DNA, 529 bp, Cannabis sativa
ttcaatgttcgacattgggactgagagagccacatggctaacactaacactaaaactagagttgttgatgccatttgaaatctataagccattacttgctagtttgtgttatggttatgaacttttttatgagcttgtattagaaatgagaagatggtgtattttgatatggagacactttggtttatataagaaaataaagttgtatattaattagcatacaaacagtttacatttcaagattataatatagtccctttggtttctacggcaaattaggataatatggacaaatggacattgattcatgttcaactaattaactaattaaaaaagtgttattacaaaacatatttcattattaaataaaaattttaaattttaatcacaaatgacaaaatacaagtaaaattatgttagcagtgttttgaagttttttttgtcttctccttgtttgggaataccagagaaatgaagatttttttttataaaaaattataaaatttaatgtagtttttttttttttttt

SEQ ID NO: 137716 - DNA, 565 bp, Cannabis sativa
  modified_base (367)..(373): a, c, t, g, unknown or other
attaatatataactcccatacataaaattataactcccaaataataattttatgctaattaatatattatgtatgttattatcaataatatctcatgtgtaacatacagaatattaattatataaatatatatgttgtatatatcatatacatataacatatatactttaatatacatgcatgatatatattatatacttataatatatatattatatatacatgtctcatataaataaatagaaataattatttctacatatttaatcttactaatatatattacgtatgtattagtctcatataaatacatagaaaataagtatttctacatatttaatctcacaatatatatatgtatattatnnnnnnntctcatcatatatataatacacatgttatggactcaataaagatatgtaactcatgcacaccataacaactaaagagttaagaatttcaaagtaagatgtgtaacatctttttacactcttaatgttggtgataatggtggaggttactcatagtaacaagtaactctccaaatattataaaaaaatgacaa

SEQ ID NO: 137717 - DNA, 667 bp, Cannabis sativa
attgcttaagaattaacaattattcataaacattgaatttaaatttaagtatttatgtggtattatctcttttcagagaataatatactatagattttgcataaataataaaacacaaacacatacaatatgataaacaaataaatataattggtatttgcatacacaagataaagtaagcataaagcttaattcataaatataattcataatgaaaacctgttaaagagaaaattttattaatactctcaaacatatcataatgaattgtgtgaaataatatgaaatatggaataaaattccaaactaataattgaaactaaaattttcataaactgaaataattaaatcaaaaataaaggagattttgagcttcatcttcaacttggacaatctccacccttctgtccaaccatccgactcaactcgctaggataggaatccaagtttaagcatctagagctaaaataaaaagaaaatagatatggttagtaaatctagaattaataaccaaagaggataataattctctaaaacacatgagtttatagcaagatagaaatatgttgtttctttgccaaaaacttaggacaatgggtttctagtggcccttttcgttgcaatagaagcactttcctttttcctttgcctttgaattagcagcctt

SEQ ID NO: 137718 - DNA, 1092 bp, Cannabis sativa
aacttggtattagagcaaccatagttttaaagttcttgaagatgggtcgaatatgtacatttgctgcgaggacaggtcaactcatggtatagtaagtgtttatgttatttgctattaccttacttgcttagacaattatagtgtacaatgggaacaagtaccggttatctatattaagaatatgtgtatggtatacgcatactgatattgatatatgtttgagttttaagtgtttggaagatgtggattagatgtatgacaagttatatagtaagggcaattgaattgcctaattagcgagttatctgggctcggagcaaacggtaaggaagagaatcctttattatcataatacttgaaacgtataaattttgatatgcaggatatgattagacaataagggaaagcagatccaagatctaagagaataacaggctcgttttgtgtctattcttgttctaccaacacttcatgttgtaccactagatgtggtgaaatatatgaacccaacttatgagcagattagtagatagaaactaaatgtaccaccaattatgggatagaataaaaggttctagggtgaccatgatagcggtcaaagtgagtataagaaattgtgaccttatcctgagtgttcaagatataaaaaggcaccatctgggctaatgtagagccagatcttgttattgtggggtagtgggtcatctgaaaagaactttcccacaattaaaaaagactgatgttgaagaagaaaagtgtatgagtcctgcctaagtactaattgtgattcaaggggacctgggtatcggtccttcgaatgactcaagttaaaattttatgagtaatattatagttgttgtttcaattgatatcgatattaaatattgtacactcaatgaggggatatcaaaatatctaaatggacagtgcatgtatgttatttacgcggtaactcatctgacagggtagacagattagaaaaataaaaatatgagttaaatttgctgatattcccaagtggaacatatgtatggaggaatgttaatggggcggatcggatctgatccaactctgatccgacctgatccagat

SEQ ID NO: 137719 - DNA, 1028 bp, Cannabis sativa
tttaatctttaagtttgttatttttatacagtgttgatacaaatttcaaattttataaaagtttttgttactgttaaatattttaattataatatatgttggttaattttttaaatttattaattattggtaatttaaatatatttggattatgttttatgtttgtttatgtaatgttatagtatggtactttttgttttgttttatttgttttatttggtgactgtatatggaggttttcaaggtcacttttggagttacttaaatgagataagttttttatttttctttgcttattttatgattattttctatagttagtttacttcatgttacaagatattttgtaagaactcattctttgttttgttatttttgtaggaaaactttcaattattcaagcaaagaacacttattttgatggaagggctagattggtctttcttgtttgttggagctttctattcatttcaagagtctgattgtttagttttgatctctgctttttctaagcgtttcacttgatgtaatgatttggacgctttcttagttgatttggctagtttactttccagttttcttgaggcattcctagttcatgtctccgttcatgaattagttgcccatgcacttagggtggattgtgaaagagcttggattgatactttttaatcattttttattgatgtattaaactcaattattattaataagagtttaatttcaaaaaaaagaaaagaaaagaggggctccacttggacacgggttttgcttgggtccggcacactaaaatttcagctatcagagcttgggtcgacaaccgaagggtggtgggtgctgatcgaagatggaatgaactattgaaacactactacaaaattggactttagtggcgatttttaaggggttttggcgttagtttaggcgaaattcactaccgacgctgttccagataacgctgtagggttcataacaaccgacgccaaagggtacctatggcatcgattttttcataacaaccgatgcca

SEQ ID NO: 137720 - DNA, 655 bp, Cannabis sativa
aaaattatttttcattaaaaattcgtaattaacatatattcatcaaataagcacataaactaacatgaacatatccaaatcatcacaatcattattttaaatctatattttatgaaagtaaatcattaccatggatctaagaccagttgtttggaattattttactagaatctagatttactaacaagtatgttatttaatattctaaatatgaatcttctaaaacaatgaaatttaaacacatatataaagttcaagaaactttacattgattgcagcggaattactctaacccttgttcctttctatcacagagtattaccaagatctgagcttgatcaggttttgaattcttcatagtcttacacactatgattgagtactagatttgctatgggtgggcatgcactcttttactataaggctcgaaattatgaagaagaaagaacggagattcgaattctatagaaagagattctcaagtttttctagttgtttgacaaagaatgaaaactaataaacttaacgcactcccaactggtgctttataatagctaaaatgtaaaattttcaaagaatgatgctaaatattagctccatcagatgaggtaaactcatctttattttagctcaagattttgagctaaatctttct

SEQ ID NO: 137721 - DNA, 552 bp, Cannabis sativa
tgcaaaaggaaataaatattaatgatgaccatcataaatgcagcccacgcgcttaaagcatgtgtctttatgccactaagctaaccggaggcacctagcaagcctcacttacccttcactaaatgaggcttgggggtaaatgttgcccttcatttctcccaaaatacgtggacacggataagggagacacgtggatctgtaagaaccatcgcttaggataatcaactaagtcttagacaaaaaaggaatatctcgaggaaggtgcctcccggaggagagcataagaagtacctttactctctgggaggccagagtcttgctaaggcagttccaggaagtatagagatctcttgaacagacactttgcattttatgccgcatggaggaatatgtattgaaatctccataaatgacatgacagatggcgtaacccccctttaacggctattagactataatcgatgagtctactgatggctactctatgaggaatcacatcagttaagaggggataaaagattatatccacctaactcctaagatacctacggt

SEQ ID NO: 137722 - DNA, 557 bp, Cannabis sativa
  modified_base (180)..(180): a, c, t, g, unknown or other
atgaaaaaaaattagactaaaaattttttttgaatgctgaaacaagtcaagggtgtatcagtacatcccttttaagggggtgtattgtagaatcacccaaacctatatatcgtatgacaaaagtcatataccatataacaaaatatatttacctacaataagaaaataaaataaaataanataatataatataatattattacaaaaattatataaaccatattataaaatttatgtacaaccataaaataattatatcatacttataaatatacctcatttatataaaatataaaataaaaactaaacatgcatgatttaaaataaaataatatattatacaataaaacttatatgtcgtataaaaaaaatataccttacaatagaaatatatatataataaaaaaaaataaaaaatatatatatagcatgctaatagaattatacgtcacatcaacaaaagtacaataaaaaatagaacttaaatattattctaaaaaattaatataccgtataacaaaaaatacatatatcattcatcaaaacatatatactaa

SEQ ID NO: 137723 - DNA, 770 bp, Cannabis sativa
  modified_base (490)..(492): a, c, t, g, unknown or other
aagttgatccaaaattaattataattaattttcaactcaaatttaagtttctataaatatatatagcaaaatttgaaatacagtgtatttaaaataaatatattttcgaaattgcataaaataaaataaaataaattctgaacaattattctgatttatgttgatccaaaactaattaataaattaattttcaacacaaatataattttcccatttaattaaatctttaagaaaaatatcaaatatttaagtatcttgaataaaatcaacttacatattaattttctatttaattaaatataactagaaaaatactttaagcatacagaaaataaacatctagatatttgactaattaattacttattttctaattaaaatgtaatacattttagtctatttattttaattaatcattaataaaaaatttacttgatttaagttgatctaaaattaattaacataacataattaattttcaactttaatnnntttttcaaaaaaaaattcaaaattatctgtattaaataatacaatttcgaaattggtgggaaaatgattaataaaataaaataaaatatattttaaaattctaacttaagttgttctgaaattaaaattgccaacttaaatataattttatatctaattcaatattctgagaaaaagtaatatttaagtgtctagaatagaatcaacttaaatatttgattttctatttaattaaatattttaaatattagaaacaaataattaagtttcttgaataa

SEQ ID NO: 137724 - DNA, 679 bp, Cannabis sativa
tctcgcactatagccgcactaattccatctttcgagatagccagatagaggagtaacatttctccagttattggttttgccaaaagtggaggcgtcactaggttcctttttatgttctgaagggcctcttcgcactcctctatccacttaaatttcttgttgcctcacaatatattgaagaatggcaaacccttattagttgactttgaaatgaatctgttgagtgcaaccatctttctcgtcaaggcttgtacttccttaggctttgttagtgatggcatgtctatcaatgccttgatttttctagggtttgcttcgatacccctcgcgttgactatgaatcccaaaaatattcctgaggaaactccaaaggaacattgttttgggtttagcttcatgttatacttctttaatattttgaagcattccgcaaggtctgtggtatgatttccaatttttactgtctttactaacatatcatcgacgtaaacctccatgttttatccgatctagtttgcaaacatctcgttcaccaatcgctgatatgttgccccagcgttcttcaacccaaatagcatgactttgtagcaatagagtcccatgttggttacgaagctcgtatgttcctaatttgggacatgcattataatctggttatatctagaatatgcatccataa

SEQ ID NO: 137725 - DNA, 588 bp, Cannabis sativa
tattccataaaaagatatggcaccgattcacattccctttatcttgacatgtgtcctccagccgaattgcgggtataacaattaccccttaaaacgttcttttttagtaaaacaaactttttaataattacgaacgacattttcgccaaaatcctttcgtggaaaggacgcctcctttgattatggcagttgtatggttttgaagatcattatgaatcgcctattcatattctgcacgatttccagtcattagatttctcaatctttggctttcttatcagtgaactttgtgtataaaagggcagctcaagcttttcattttcacaatccttctggctttttattgaaatccatttttagaatggattacttccttcctgccaaaatgtctcttctgagttcaaaagtttatccttccagactcataatacccagatgtaccaacaattttccattcgttcctacagactttaagcctcaattggagccgaaaatgatggatcccagtgtaatacccgaaattaagaaatggattagcaaaaccctaactagataattatgtataatggaggaattatattattatat

SEQ ID NO: 137726 - DNA, 524 bp, Cannabis sativa
  modified_base (70)..(85): a, c, t, g, unknown or other
atttaccaagtaaattcactaacttattgattccttgttccatccaccatagaacttgaaattgcactcnnnnnnnnnnnnnnnnctctatatgttccacgatatattttattagattatctactaaatattaataaagataaaaaataataataaaatatgatagtttcaattcataaagatattattttattaaaaaaataatataataataataataaatcctttaaagaacaaatgagtaatattttttttattaagtcagacattaaagtagagatagtgtttaaaataagtgaacacttgtaaccattagtgaaggttgtggcttgtggttttatggaggtccataaaataaaaattgaaagtaaacaaaatatgtagaaaaataaatagcaatttatatatagggaaaattacatgttgacacgtttttttccatttaattctaataataacgttactttttaaatttttgaatataccgttatttataccgttttttttattttaaaccatttttt

SEQ ID NO: 137727 - DNA, 632 bp, Cannabis sativa
atttttatttcaaaccggagtcaaggacaaaagcaagactctcttatacatcggattatagagttattcaaatcataaaagatactcttacagaagagcataaaaagttgtttaggaaatcttgtattggacaaatgattgttattcaagaatttgaatttcaatctcaacttttgcatcaaatgtttatgagggaagtcttgtatttgttttgtattttttaatgaagatgtgatattataaataatgtataaaataaaatatattactacataatataattataaatattttatagaataacataataaacatacatctaaattttattttgattcgtttaaaattataaataaacacacttctataatttaaataaattaatgtttatagttttgatattatatttttatagaaaattaatcaaattatatttattccaaataaaatgaataataaatatttctttcttattacaaaattattttgtttataaatgttaaaactgtttaacatttattaatttaattttacaaatttgtttattttgtgtttttataaatatttttaattattaaaaacttcaaaattattgttaaaataaacatgaagcattattattatgatgtcac

SEQ ID NO: 137728 - DNA, 509 bp, Cannabis sativa
gtttgctgggatattaaccccagtcgtcgcagctggtgcgctaggcggattgatgcgattatttacaccctgatcgtccattccgggatcacggggctctttgacatcacgaggtgtctaggagcgcaccttgaagacaacgttaaggtgatcgcgtagatcgcccctgtgaacctgatatcatcctccttgcggtgtttccaccgaacccgatctagtgtacctgctgggtgtgcgaccatgcgaggatgaggaggcagattcaatgtcgttgtctcgcgactgaggtctgctgcgaggattgagtcattcaaggtcttcctcagtctgtgcctccggattgaggtgttccctcgatgttggttggttcaaatcgagtccctccgggttggccctctgttccctgtgagtacggttattacggcgtctggaattagttacctgatggttttccgtgcgagtagcgggtactcgaggaggacatggagtcctgttttgtccatccacct

SEQ ID NO: 137729 - DNA, 1996 bp, Cannabis sativa
tctctctctctctctctcaaactcaacatctgtaaactgaacacagaaagagggaaattcttactattataaatattgcttataggtgtgatagttgatgacaaattttctctttttaaaaattaatattaccaatattgccattttgttgactggtcatattattcttcttttttcttctatattaataatgtcaccattttgttgactaattcaaccaagttagctcccataaactttattctcttcctcttcttctctccttctatttctctgtaactacacctcgtcttcacattacgttggtgatgatgagtttgggtgattcaaccacaacctctatctacacttagtattatttttttttgttctgtgaagaggatatatctatttggaatggatttgaatggtgtggtgttgtaaatcttcaccttcgacatgcacatctctggattgatttagatgttaataccaagtatttttattgatttcaaaatcattaattcttttacctttttttctctctatctttatataaaaatgtaaaatccttaattttttttttattcatatttctcaatttttttttcaaatccctaatttctttacctctttttctctctatctgtatataaaaatgtgagatgcctaattttttttttctattttttcaatttttttcataaataaaatttacagctagttactattttgatgaaatttatcttcctttacacatattttaatttcaattttttatttttgaatttcttgaactgatgcatgtttggtaatttctcccttaaaagaaatagctaaaaaaaaatatataatttctggggttttgtttttttttaaaaaaaaaacaaaaattatacaactatttgttaacttatctatatttagctttctcatcaaatacgtgttacaatgctaaattttttttatttttcataatatcaatttttcataatttatgaatatctgttagtagagttttcaaagtatttgaagataaactttttattttatctcataatttgttacgtgttgaactaattgatatattagtgctgagtcattatatatgtgctaaatgatttgtcagattgagagttatcctttctttaaaggttagtataagtatactattctaacatgatcaaacttatcaaataatcagttttaagaagtggaactttgctgtagaatacgtaattgcttctctgatttaacttcttcaaactctcaggttttgtttactgagtcattatataatttgtatacttaagtcatgctttcatgtatatatgattttatttggtaaaatttattattatgtatttaaattttatgctttgatgtgtatgttctaggtttttgattgaatctttgtgaatctttttgggtctttctttcttatttatatactcttatagttgcatctgtgagtctcaacatctctctctctctctctctctggtctctttttcttttttgcaggcatgttttaactctgttttggcgggtttggcttgcaaaattctttcacacttttaaaggtcaattttttgaatcgtaaaacatatttacagtaattggttctcccgttttattccaattattgataaagatttcaaatttcagctttaaggggttcaaaaaagtattcttgaactcaatcttatcttttattttgactcatatagtttaaacatatgaatatattgcactaaaataatcaactctatgttttaagaatatgatatatggggcttaattttaaattttatatattatttaaacttttcttcgacgacttgatttttggtttaaaaatgaattatttacttttgattctaaaatagtatatatacctctgcttctatctttttttctttcttttttaaatggaaaatttgactttctatccgtagattggtgttgatgcacatgtaccttttttttttttattggattttcatttttctaattt

SEQ ID NO: 137730 - DNA, 580 bp, Cannabis sativa
tatttttgtacatgtttgagtctaagtaggtaaatttttcaaattattatttttctagatttcctattggtgttgttaatgtgatcctcatgaatttgttatagttattcatgtccttaaatttgttattacacaatcagacacctttcttaatacactgacaaatatacacattgatttagtaccccaccctccatcatcaaatgaatcacaaatacgccctctacctccacctgaactacaaatacacattgccccattgcctacaaccgctaatgaaccaaaaatacacactctggaactccacttgaaccacaaattcaccttgcaacatcatctgaaccacaaattcactctgcaactccatttgaaccacaaattcaccctgtcccattgcctgctacatctagtgaaccacatttacaccttggatcagtgttacctcaatctataatagccaatacaacatcaacaccacttatatcagtatctgtctctccgcattagccaaatacctccataggtggctccattactgcccctccactaagattacacgtggcgtttggttggaggtaat

SEQ ID NO: 137731 - DNA, 1055 bp, Cannabis sativa
tagttcggagggaatttttaacggccaaaaaagttcagggagcacgatttagtacatgtcaaagttcaggagaaaaaattactaattagctttctttttatgttagtttaatgaccttttatcctggctgggatctcattagtacctaagctagttattagtttctgtttagaaccgttagtgttacttagagctgttaatgacacttaacaactcaatgtacttgtctaaggcctaagctataagtagaaaacttttaaaggtttagacacttactcttgtacaaattcatacacacactagtattcattaaaaaaaaaaaatcactttctttcttttctctgtttatcatatattcgaattaggatcaagcttaggcaattctcaacatttataattaagtgcgtatacaaaagagataggtatttagtctaataatatttagactttcattttctcttttttgtcttagatgaattttccttttgtaagcttatataattactttttatatacatacaatttattgtcaatcatcataaaattattttagtattgctgctatactttttgtagtgttatattttggagtttttacaccatatactataattttaatttttttttttacttttttattacgggagggaatttttttaaaaaaaaatactatatttttttttcaaaatactgtataagttttatattttgtaccgtgttaagttttcgctattgttttatggttgttttttagttgttccattgttgttttaattgttctattttattgttttacggttattttataaaaaatcaatgtttttataaaaaattccatgtgacagcaaaattataaatttttacctaaaatctaatatttttataaaaatctcttatattttctgttgtggcatgttaagttctgtatttaataaggtaacgagaatccgtttctgatgaggacatcaaggaccaagtatcaagtccaattccagtgggtccagtgactagggcacgagctaagagattcaaggaagagcttaacagcctagtac

SEQ ID NO: 137732 - DNA, 565 bp, Cannabis sativa
  modified_base (510)..(525): a, c, t, g, unknown or other
gtgagggcaagggtgagaaaacaagataccttgatcagctaagaacctagcaaatggtttatactcacctcctccatcagcctgaacactctttattggcaaaccaaactgtttttccaccatactcttgaattgaataaacatgtcaaaggcctgggattttaatttcaatgggtaaatccaagtaaatcgactaaaatcatccaagaaatgaatatagtatcgaaatccatcttttgagggttcatgagaaggactccagagatcagtatgaataagggcaaggggttgggtggctctttttgaagaattggagaagggaagtctgtgacttttcccttgctgacatgcattgcagaattggaattgttttaatgtgccagtgtgtggaatggtaggtagtaatttctgcaatgtggacatggctgaatgtcccaatttgtagtgctagagattgatttttgagggtgttgatgttggaaattatttttactaggatcttagatctannnnnnnnnnnnnnnnttaacaccctaaatatgaaatttctaaaacgataaaataa

SEQ ID NO: 137733 - DNA, 1025 bp, Cannabis sativa
gtaagagactcattcatagcagtcgacacccgattatgcacacaagccgtgaccctatcccaatcaatctctgaagctgtcaacaactcattaaaataatcttcaacgacacttggtaagccattttcccaagccacccaaatcccacttgtatttttaagagacaaaatctgattgtttttcctcctagtactcgcagaagcatgaaagtacttagtgttttggtcaccagattgcagccacaattgtttggatctctgcttccagaagacctccttctgggcgaggacttcgaataaacgattttgagcctccttgtacctgttaaccgaatcaacatcccttcaatttttcaaaagcttcaggattttatgacaactatttattcgctgcttaaaattaccagtgatatccttcccccatttggctaaagcagtactacaccatttgatttttcagctcaaagaattcgactcatgaacatcccaattatcatgcacaatttggcgacacataggctcacgcacccaagcatttttaaaccgaaatttctttaaaactaaccacttttctgaataaattaagattcaacaaaataggacaatgatcagaagcaaaaatttctaaattttctaaccttgcatgcggaaaaagatcattccaaccatgcgtgatgagagctctatccaaacggacttcaatccgtgccccgtacccctccctttctcccaagtgaaaggatagcccaccaactccatattaacaagactgcaatctaaaaccacatcttgaaatccctgaattaaagagtttggataaggtcgaccgcctctcttgtcactatgatgaaggacattattcaaatctcccattaaacaccaaggaagagtcgattccccagcaagctgccgaatacgtcccaagaattcacacacaaactcctctgaggttcaccatagaagccagtcgcacgaaacaaagggtatccgtcaagcttcaactccaaatcaatgtgattattacta

SEQ ID NO: 137734 - DNA, 721 bp, Cannabis sativa
ctttcggagtatcagtcagggggggggtaggtaataaataatagaaagaaagcatcgggggggaagtggccgtcaaggtcacggatcctctttcaagtcatatcttgaatgtccgaaatgaaagaatcactatgagggtgaatgatgggccaaggatacgtagtatattggatatggattatatgaatcggacgttccaagattacctgaatagatgtgtgatcgtgtttatcgatgacatcttggtgtaatctaaattagataaagaacatgagttgcatctcagagcagttttgcaacggttacgggatcataagctctatgctaaattcaagaagtgtgagttttggttatcccgtgtctcatttgtggggcacatagtggataaagatggaatcatggtggatccggccaaaattgaagctatacgggattggccagcaccgaaatcagctactaaagttagaagctttctgggcttagctgggtattattgtcgattcgtggagggtttttcagagattgcggtacccttaacgaagctgacgtgaaagaacctaaagtttgtttggactgatcagtgtgagaaaagttttctggagttgaagcagtgtttgattaccgctccagtattaactcttccttcagataaggaaaagttattggtttattgtgatgcctcgagacagagtctcgactgtgtgattatgcaggcttggag

SEQ ID NO: 137735 - DNA, 528 bp, Cannabis sativa
gtgcagccctcgagaggctgccagcagcgctcatgcgcgcgcaagaaggagatttgtagggtctcacgtcgagaattctcagtacctgcagcctgggacacgggcgaagtgaagggtcacgtgggtgagcatcagcatgctcaaacaagttttgtcctaggcacgtgcgcgcacatcaccttgtctgagtgactagtgtgcgtgcgattgagcctatgtgcacccgaatttcaaaccatgatatctttctcaattttaatcggaattgagttctgtaaaaaccaaaatttcttaatttttctcaaggaatccaaaaaaaaaatattttcagaatgaaaataaaactaatttcatgaaaaatattcgtaattcacatacattcatcaaataacacgtaaaccaatatgaacacatccaaatcaagacaataaaaataattcatcattttaaatccatattacgtgaaagtaaatcaataccatggctcagagaccagttgttgggaattttaccaagatctagatttac

SEQ ID NO: 137736 - DNA, 564 bp, Cannabis sativa
tcaaggggtgtctcatgttccccgagttgttcttcccaagccttttcctgtctcttggtttgtgagccatgaggtctgcctcgtggtcttctcactccaggttcaggctgattttgagcgtttgtcccctgcatcgccctggccgaagttgcctctcgttctaactcagtgtttcgacgttgcgcctcttccagacagtgtctcaggcgacgacattctgtttcataagttctttctcccatagattgggcacctccacggttgagatcttcatccctcgtcccgagattctgaccattcccacactgagttctcctcgagcgcgttgtccacgtactaggactaacatcgtgttgagttcttcgaggacgtgtggtccgagcattgggcaatcctcaggttgagccctcctagacaggtggtccttctggattgcgaattggtagatcttctagagcccacgggctcttttccagaacgaaggttagtttcctcacgtggggtgttaatattctctggattttcagccataaaggagaaggtttttctttaaaagaagggaag

SEQ ID NO: 137737 - DNA, 546 bp, Cannabis sativa
agcatatctcttaggtgggaattgcgtcagatgggagacaaactagctagtcatcttcgaggcaaacggagccaaggtgggcccaacgaagtgattgaaccagtccttcaacgaatccatgttcaagtcccacggattccgaaaggcttcctcctggagagtattttgttgctccttccaaaggatcttcttcagggcctccacctcagcatgcccccgactgtactcgtcaagggcgtaattgtgtttggccactcggagattctgcctctcctcgtccgcaggaaccggcgtcaacactatgccgtgaggcacagtgtattcctccaccttagaaggaatcccagagtcatggctcggggccggagtgtccaccctgtgggtccgcttagaggactccacctccaccatcttgccctttcgcttacgctcaagggcaaccgagtcctcttcttcacctttttcaactttctcctcctcatccaccaagacgatggtgcctgaaggggcattggagaaggacctcccgggagtgaccaactgaga

SEQ ID NO: 137738 - DNA, 523 bp, Cannabis sativa
ttaatgctgactgacatgtacctcaatccaacctttgaattagcatgttgtgacagttattcttcagataattgagtgcataacgtacaattttagagggaaatcgaggtatttaaaattttaaatgattacttttcctcgttaatttgcttataaatagggctaaaaaccttaatcaacgacttttagccattttcactttcgaagaatcagagaaagaaatcttttttctttcaatttctttaaaggatcttcaggaaacaccgaccagtgtcatctgagtaattcaaaagccttgaatcagtgagtaagttcttcattttctttcttttacatgtttaaatgtttaattttccttggtatttgttgcaaaacttgatagttcttgaacttattctaggagaaccatagaaaaatttggtttaggactttgaaatcttgactatgcttaatcacattgcttgatcataactgcattttaatttggattccacgatactcactttcacttacccattcgggg

SEQ ID NO: 137739 - DNA, 852 bp, Cannabis sativa
cttgccacgtgtctccatcccaattaatgagggataattgtatttgaacctcctgatacaaaatgatctctcatttcttttccctcccattttcattttccttctccctctctgatttttgaacccttaaaaattttcctttacattcttcttcacttttcttttaccagaaaagaaataaaaagtgtttgacttttacagaatcgtttgaagaagatcagaattttcaaggttaggggaaacttattgcaactgtttccttttattttgaaaatcaatatgtattctgtgttttaagaggtagaaaatgaatgagacaataagatatatgtatgagacttaattggctttttgacaaactatgcatttctttaggaaatatagactcgaaacttgaataatcacgggttttaggaagaacacctcgagtgttcgcacatttcttgttgagtattatgaatacttgcgaggttcgtgaggaacatcctaaatatttgcacacttctgaactgcctctgaaagttagaagattcgagtttctggagagaggaagatagaaatctggaggaagttttgaatctttgaaatttcagagaaagaggggaagaggaaaatggaaatgagaggaaaaatatgaaatgggttcctattagggggcttaaataccattatccctcattaattgggattatgacacgtggcaaaagaaaagcctaaggtcatcccgtctaacggttatccatgggcacccctacacaaaatccgaaaagtttcatgatgtggctccctaaataggatgaaatgtaataattacagccgtcattttttgaaaccctcgatgggacaaccaaa

SEQ ID NO: 137740 - DNA, 1065 bp, Cannabis sativa
cccatctcgcagttcacaatgtattccatgtttctacgctaaggaaaaatgattcagaccctgctcatgtacatagttatgaaaatattgagctacaaccagacttgtcatatgaagaacagccacttcagatccttgatagaaaggataaagttctttagaaatagaccatagctttggtcaaagtactctagagaaatagcaaggtggaggaagccacctgggagttagaacccgacatgagagcttaatatccagagtttttgaggggggataattgtaaagaccactagaataaatttggaaattaccagataattagggcttaattatggaacttgtttagtagttttgaattatttaattatgatgatttatttgaatttaaaatacaatttatatgttatatagaatttcataattttgcatgttttgtgccggtaatattggaaggcggtgtttggcaattagaatcacatcttagtatttttggtatagcggggcagtataattagaaattgggaatgtcgggaataggttagattttagagttttccaaaatagccctaagtgaacttttatgattttagtgtgggaggggcaaaatggtcattttgccaatttatggtttgtcattttgtgagattatgttaggtttatttaacctaaattttaatgactaataagatgatattttgcaataaaacaaaccatttttcattaacttattatttattaaatacatgttagaaaagattagaactctctctctctaaactctctcttgctcgagccctatagaacaagctagggttctgggtttctttctcaatttcaagcaaattccagcaaattctaagtgatctcaagctctaggtaagttcccaacactttgccttttaatttcttgaatttcaaattaatgaaattacatgattttgggtattagctgttgttgttgctgttgttgtttgagattgttttcagaggtttatttatgttagattatgttgatttaagcttgaattggtggctgttaggagatttaaccaagttttgagtttt

SEQ ID NO: 137741 - DNA, 511 bp, Cannabis sativa
gttacgcttggttcaaaatcttctacggaaaactgcacccaaatctcttcctgcaccctccaataatcttcatcttcatcctcaatcgccccacgaaacccaattgcggcaccatttctcgaattcgatggcttcgagttcgagccctagcctctctatatggcgacggaagaaggagatgagtaaggaaggtttggtcgtcgccaaggagctcaagcgaatccgatcggagacgagagaggggcaaagggaggagacgagagagagaaagaggactgggagggtttctacagaaaaagaagaagaaagaagaaagaagaagaagaagaagacgaagaagaagaagaaagaagaagaaaaagaaaaagaaaatttaattttttaaaattaaaaaaagtaaagaagtaaaaaaaaattaaattattattctgatttttatttttttaattatttataattattttttaaaattacaaattatgtggaccactaaaaatttgtcatgtgtaca

SEQ ID NO: 137742 - DNA, 875 bp, Cannabis sativa
ttagaattcatattaggatgtttaatgaaacatacttgttagtaaatctagatcctgggaaaatatatccaacacttcaatcgtcgacctagtacgtcgcgtatctcaacacttagtatatttttattagcttgcaaggtcgcttatgtttgctttttattgattgtagataggccagctcgacctgttcgagaccctactcccagagaaattggcgaagttctaggtagcttgcctgttcaagatcgcgatgggcgattgctatgtacgactgccaaactgggagaacataagctaattcccgagaacactagccttcagcgggagccagtatacaaggagccttatgagaaacaaaaggaaagaatagacaagcgtctatctaaataaacatggagtatagccttttgctacaagacgtgcctgaaatcacaccacattaccatattcgtccttcttggttttaagtatccatttgcgaccaattggttttacaccttctggtaatgggacaactccccaaactttattgccttgcatagacatattctcttcattcattgcatcaatccacttttgagagttataaattttcatggcctaatgcaagttgattgtatcatcttccatcattcaaatttcatccgcatgttcttgaagaaatacaaaatagtcatctgaaatagcatttcttctctctcttgtggacctccttaatggctcttgatctttagggtgttgaatttgttcttctggaacaatagcctcatctttatttgtgagttattcaatattgtgttgtttaagttcgagattcatttcttgatcaatgataggtgtggaagccttaacattgtctagaatgatagtaggaa

SEQ ID NO: 137743 - DNA, 1023 bp, Cannabis sativa
cgtcacttaattaaataattaaaagaatattaaaatacaaaatttcacaatacaatacaatacggccaaatacagcgtaccaaacgagccaaattatatattagctagtttcattcaaaaataatatatatatatattagttagtttattgttacatgcattgtagtatacttagttatatttttgttatgtgtatttttaaaatttcatagataaataaaggaaattatttattaattttttaattatttttaaaaactaatatttaaaggtttaaaaatttgaggaaaataatataaagtttaagaatattaaaattcaaaatactcccaatattaaaaataacaataaaaaataaatataaaatttaagaatactaaaattgaacatatcctaatattaaaaataacaatgaaaagataaatataaagattaagaatattaaaattgaacatactcccatcattaaaaataacaataaaaaataataatatttcaaataatatattaatattcatatatatatatatatttaaattaatctaaaataaataatattaatatatgtatctatctatatatataaaaaagagacataagacggtgacgtgacactcaaaaatctctctaattaggattatttgttctctcctaattaattctctcaattttaattttttattagcttcataaatattaatcaatataaaaaatgaaacaccctaactagcttaggcgtgttagcgtgatttttaacttactgtgcagcttgttgctaatcaacgagtttaatgaaaacatgattaattaaaatttacttatttaattagaaacttaaagtattagatatataaaatttcgggatccgttttacaaaatactttttaaaagtttgctatacacatatacaaaagtttgtcgcccagcgactatacagcaaaagcctcgatgtctcaaagatcttacgctgcaggcctaaccgcccggacatgtacaatcttcacctgctcgtactcacgggtc

SEQ ID NO: 137744 - DNA, 716 bp, Cannabis sativa
tcaaataagacatattctattttcgaattcagttgatttattaaaccaattaattgagtctgcaaagtagtattatcccaaataatgtgggaaccatgtgtctatgtaactaaactcccaataagtaaaatgcactcttaattacatagaatgcactatatatcaaatacagatatgctatgaattatttattatttcaatctaaacaatcaataatcatctatagacggtttacatcgattaaggataaatttatcattttaccctttgatgtatcttatcctgaaaatacttagctacttataaattatatttcaataaactaataaaattatcgaaataagagctcttccatttattttattttagccaagctctaaggaaactatcgtttcacttataaatagttataaaagctatagatttcatatctatgattaatgctcccactcaattgcactacaaaattcccaagatgtaagtatgagctagtcctacgagtaaactgaacaagttaaagaacccgtatagtgcaattaagctacaacttaaccatcttaggattgagataaattgacctatgatcaactaaataatatcgacttaaaaaagatataacattaaatttatgatatattttccactgtcaatattagtccagtccgatgtatagccgatacatctgatacaagttgctttgctaatgccctagaaaa

SEQ ID NO: 137745 - DNA, 679 bp, Cannabis sativa
cgccagtgacctttccgctccgttcatcttcgtcaaagttcgttcgtcgtcttcgatcaatgatccattgacgtccccgatcaaagatccgcctccgatctttcagcggcaccgtgtgaatcgattcccacggtgaactaccattaacacccaacacaatctctcgtagcaccattttacgatccataaacattcaactagtatcaccttcttctatgtacacgtaagacgatcgtattgcccgattaagagatggcgagattttcagatccccaatctccattcgagcagagagcttttcctctacctccggcgaactgcgattcaaccttggcagtgcatcgcagccatctcggattataccgataggatcgactgaagaatcatccattgaatccactactgaaaggtaccacatggccttcagtgagttcttcgacatccacgaattcctccatatttgcaggagttgatttcagagtagattgtgccgccacatataattgatcaaattgatcgttaatagttgtaaagtgttgctcaagcatagaactaatctttttcaaattgagaatccaaagtttgcttgaaaaatgactccatagatttgaagagttgaacaatctcttcatcttccatggttgagagttcttgcagtgaatctttcactgtaatttct

SEQ ID NO: 137746 - DNA, 951 bp, Cannabis sativa
ttttttttttgtaatttcataattaataaaggttattttggtaattcaattaggagaagcccataaacattctcacttttattatagttatagattttgaccaatactaaaatttatcccattatatatatataaaaaatattaattttaaaaattataattttctattaattttaaaaaaacaattaaaaaattattaacaaaccttataaaattattaaatttacttaagaaacctaaattattcctaacaaaaaatttcaaactttattttaataataaatacatattaaaaaatcaaaccaaaattattcaaaatccaataaataatttaaataaactaagattttttgaagaaaaaaaatcaaacttatatatatttacaaacgtatatctaaaaaataaagaaaaataattaaaaaatttaataaaaatataaaataagttaaggaaaattgaagcataagtccccaaaaaatttactttgttgtagataagttttaaatctcgaaaaattgttgtgaaagtacccaagctcgccaagcttgtgagttcgtttattcccactccatttaggtaagtaacggtacacatgtacgccccaaatttattctcatattttttaacaaaaaaaattattgcaaaaactaaaactaataactaaaataaattaaaaactaaaaataataattaaaaatataattaattaaattgttttgagagttaaaacaaaaacaaaatgtaggaaatttagctctgatacatgggaaaacctctgtaattctaacttcaagatcacacttaaaacaaacaaaaataaaatcaagaacaaaaaactagcaaacacattaaactagaaaaatataacacatatgaatttaaatagttgtcagatataataacacaagagatttatactggttccgctcctaagtttaatgtgaacttggt

SEQ ID NO: 137747 - DNA, 902 bp, Cannabis sativa
atttatcccactaagaaaaaggttttagacttacccatgtgactctaacggtcatccatcacattttttgtcgtcgctgagcaaaagccggccactagaagagatttttgcctattattttatctttttttaatccgtataattaaatcataaaccctagttaaaatattataaaaggaatatgattctctctttctcattcaagctatctaaatctagttttcattctctgtcatacaactagtaaatgagagctccttctatagcgattttgaaccccttgtattgttcttcatcaaattcaagcctttagtgatagagtaccatgcccactcatagcaagtcaagtactcaatcatagtgcagaagattgtggttaaccaaactgaaggagaagaagatccagactcagatcttgttattactctgcgatagaaagaaacaagggttagagatctgaatggaaggagatattaatatttcgatgcttctgtgtaaggtttactaaactttatatgtatttatttaattgttttagagaattcatatgagggtgttagattatagttaataatcaaatatacatattagtaaatctagttcttcataaaataatttccaacacaatgaagtttcgaaatcgatgctacataatcaataagaaattaattgaaatgaacttttagttttatattagtacacctgggagtttgttgagattttatgcgctaaataaaatttatttcaatataatcagatttactaattaataaaagatcagaaaccattttatgttgcaaagctcacatgattactttcatgattatatgtttaatgtataaattatgttaaatccaaaatatatagttattcatgattatagtattgtctacatagtggaa

SEQ ID NO: 137748 - DNA, 847 bp, Cannabis sativa
catttgacacttgattttgtgattatttgtggtctctctactttgtttatatattttgataatggtgatgagatattttattattaaaagctaacaatgtaagaatctttattaaaccaaggatcctttgatattagttgtttttttactggcctttataagctcaccccttattttctctccttaaggaattcagtttgatgctagtggatgaggatggtaccgttgaggaagaaaatcattattagttttgtcttattctacttattaaactttcaatgtaactgattttgtatttaagctgaaatggatggtctggatgacttaaattagctaagtgccagttagaaatgaggaatgatggatgctagatattattttggtattttatttaacttattaaatctatctattcagtgactacataattgtggggttattattgttcttttatattaatgagtggtcctgattttattactagtattttcttatcgatataggagttaatccattatttttaaataagtattttgtgatataattaaatgattatttataagtgttatcttcctacaagggtcaaagtgtgacctttgaccacccaagttatggatattacatatatgttacagcctagggctcgggtcgtgacagaaaaatagtataagaacatcaggtttaattacctcggagtgtgtcactaaatagtttaaatttattttaaaataataatggtaataagtatcttgatatttacatgtataagacatatttatattattagcatccaattctcactaattggttagcctttggttctcagacctaagaaaatgcctctaaa

SEQ ID NO: 137749 - DNA, 595 bp, Cannabis sativa
tcaattgctggtcagccttgttgagacggatgcccttcgagtttcaaatgctttatgcaaatattcatcagctatttcttcttttcaagatttaattgctgatatcactagtcttttatctttttttcttaatgtaaatgtttctcatgtcaaacgttcaacaaatatggctgcggacgggttggctaagtttgctttaggggtggatgaggcttgttattggtcagattgtatacctccgcctataaactctgttattataaatgactataccttttaatttatgataacaagtttatttcctaaaaaaaaaaaaatatatcagtttttttttctttttttgaaatgggagaatttctgttatttaagattttttttttttgcaaaggtttagaacatttcaaatgatctataatagtggctttatttatttatttattttttttgccagatgtattctttaaaactctgattgttatccatgaagtgtttattattattattattattattactagggaactaagccgcgcttcgcgcggtgttgttcaacttttacaattttttattatataaatatattatacttgttgag

SEQ ID NO: 137750 - DNA, 1136 bp, Cannabis sativa
ttaaagttagattcagcaaaagcatacaaatggggattagaattagcataaaaaatcagtccttgtccaggtgtgcctttgaggtattgaagaatcctatgtgcagcatgtaaatgaggtgttggtggctcatgttaaaactgacttaaagtgttgacggcataagagatgtcgggacgggtaatggacaaataaatgagcttaccaatgagtcttctataaattgttgggtccggaagaggagtgccaacatctttgctcaatttaacattcggttccatgggagtggaaggaactttggctcccaaaaaacttgtatcatggagaatttgaagtgtaaaaggccattgagaaacataaattccagccgaggaacgacctatttccaaccccaaaaaaaaatcggagaggaccaaggtcttttagctgaaaagtcgagtgtaattgcttcttaaaattctggacaacaacatcattgttagaagcaatgacaatatcatcaacatacacaagaatagctaagaaagtattgttagtattcttgataaacaaagtatgatcattaggagattgtttaaaatcattagctaaaagatattgactaggtttagtataccattgtctagaagcttgtttcaaaccatataaacttttgtttagattacaaacgaaattttgggaacaatgcccagaggagaatagcctttggggagttgcatgtaaatagtttcatgcaaatcaccatgcaagaaggcattattgatgtccaattaatataaggaccaatttttgattgctgaaatagcaagtaatattttgagagtattaaattttgcaacgggggcaaaagtatcaaggtagtctatcccgtgtttttgggtatagcctttggcaaccaaccggggcttacacctaacaacctcctctttttcattatatttatagttgtagacccacttacattctatagcatgttcaccgggacggagaggaacaacatcccaagtcttgttagccacaagagcaatgatttcggtgtccatggcttgattccattcacgaatggtggctgcctctttatagctagtaggtgtaacaatggcattggcagccaaaatggcagcacgaaattgagg

SEQ ID NO: 137751 - DNA, 1261 bp, Cannabis sativa
tttcttgttgagtttggctgtgatggagataggcgccgagttttgctgcagcaaccttggacttatcttaaccaagcaattctcatggacatcccgaactctttggatgttctaaatggagacagtcttttgaaacttcccttatgggtccaagtttttaacacacctttcctcaagcgatccgaggaactggcgacccttgtctcatcttctcttggccaccttcttgaaatttaccggccttcgctccgagaaacctggggcccctactttcggcttcgaattatgtttgatgtcgcccaccctttaccacggggattacctatccacttctctggaataaacaaagtggtttggttggaactgaaatatgaaaacatcccggacatctgcttcttttgtggccgcatgggtcatagctacaacaaagggtgtatggattacatgaaagcttgcgatgaagccccgttccctccggaactaaggtatgacatcaaaactatcatgggtaaagttaaagttacaactaacactctgttatgtcatgatcagctcaatttcaccaaccccccggtggcgtctttcatgacttccaatccggctagtgctgtttgtgttgcccccccggaaaactcccccccttttccaacctatggcacccttgagcaagggccctcccacggcctatcccaacaggtgggcctttacaaatccggtcccacttcttacatccaagatcctcctcccatggtacaacttgacgctcatacaaatccccacactgctatccaaaccaccgggatccaaaccgaaaccgtcaacccctcgtacactgccctcctcaatgccacaatgagtaactccagtgtccaaaaagtttctcccacctccaacctgagccatacaatcacaccccaaaattctagcagttccaactccaccagctccaaatactgtcaggttcctctccctgacaaccttcccgtcctggataccagcaaaaaacttgaagccatgaatctcacttatcaaccgggattggccaccccctcgggctcgaaagcttcaaggaaacggaacaaacctgattccaaagacaagttcaagaggcaaactgagatgatcaatggggagctcaggcatcaaataaagcgctcccgttccgacactcctcaagccaacgatgattctactagtatggcaggctgtgcctttgagccggcctgcccgcctccatgaagattgtgagctggaatgcacg

SEQ ID NO: 137752 - DNA, 540 bp, Cannabis sativa
caaaactggtctctgcagtatcagaattatattctgcttctgcagacgtatacagttttatattttcgtgtatattattgacatttgcaaaaactcaatttttcacttctcttcatctttacaattctctattttatgtatatttatgctatagagttgtaatattatttaatcattattttgtccttgtattattcttgtcagagagttgtatttctcggttatttttattgaagcacaataatttccaacatctctctttacgcagttcgtgaggggcaaaagtttgattccacttgagttgtgacttagacaattgacacctcgtttcgattgagtcgtgtttcatacttatcttaagagcagtagtgttcatctaatccaatccacattatttcgctcatagtgcatctgatctgcataagtacggattttatattttagatccaatccaatccgcacaatagctcaaatcaaatccaattcaatttgcaaagtccggattggattaattattttggattggttacttttttaata

SEQ ID NO: 137753 - DNA, 548 bp, Cannabis sativa
  modified_base (68)..(75): a, c, t, g, unknown or other
tttagtcacaacataagaataatgttttataattagtcacaacctttttacttttagtcacaagtttnnnnnnnnctaaaagtaagattttttgtattgtgtattggtaaacagataagaagtacttttgaagctagagtttatttgcttagtcataagcaaactagaagagatgtataatctgtttgtttgattaataatgaatattcttcttcttgataaaaaataaacgttaacgttctatataataatgaaaataatatatatatatatacatatatgttgtctaaaaatttgttaagtaccacatgattattaaactatctcaactctacaattgggacaaaatttactaacttgtaaccactcaacaatgcattcttcatgatacgcgtgagtgcatggtagcttagcagcttccaaatcaattgaaacatcctccaaacaaattgaacaaaaaatttgattatcttttacctgcactttttctaatttttcaattgactcttcactcgccgccacaaaacgaataggaacatcattcatat

SEQ ID NO: 137754 - DNA, 608 bp, Cannabis sativa
ccattgctttttgttgtgggcatggagtattttagtagattgatgaggaaggttgggaagaaagaagattttggtttccatgagagatgtactgatatggagttgaatcatttaagttttgcggatgatgtcttaatgttttgcagaggggatttcaaaagtatctacttaatgatgcaagctctcaagcttttctctatcacttcgggtttggtacctaataatgccaaatctgcagtgtattgtagtggtatggaagaaaatgaaattagaagggtgcttgacatgtcagggtttacaaagcaaaatgagccttttcaagtatcttggagtgcccatctgtgctaggaagatatcggcttctaactgtagcagtctggttcagaaaatggtaacaagaattaggatttggagctcgaggcacctgtcctttgcagggagattagtgctgattaaatcgggtcttctctccatacacatctattggtgtcagattatgttcctcgttaagcaaatcattaaggagcttgaagcaatatgtaggagcttcttatggacagggaaaagcttgatgaacggagctagggctgtagcttgggaaaaggtgt

SEQ ID NO: 137755 - DNA, 1935 bp, Cannabis sativa
gtaaaataatttccaacagtagctcgtataaatagtggtctcatctcagtatttagggatacaaaattaatcaaagagaacactcaagagtgaaatcacgatctactaagagtaaattattgagatcattgtaagagctttcgagaaggaatacttcattcttttatctcacaagttaatacaattgaagggaagtagactattaccactatcacggggccgaacttctataaactctagtattttctttacttattaccttcgctttctattatttatttaatcttattgctttaattaagactcaatatcgttggctaaaagcgaggtcaacataaatagaatagaatgattattccactttgaaaaaaaaggccaccccaatacaaagataaaaaatttaataattttttagttatcaattttattttatacattttaaatttaatttttattcctatgtttcgtttcttccaattcttgccaaaaattccacacagacttagggacaaatgttatcctaatttttacactgtgacgtgacacttgactggatgacacgtgtcttatatttctcaatttgggcaaataattttacttctagcaacccataaaaattgatgtagagatccaagacatacgtgcatggcatgatgtccaatcagagtcattggtggacatccgaccaactcgaccgtgtgatcaactcgcatgcaccggctaggggatatgagttaacaatttcagaagtgatcgatactatctccaaacttgcatgtcacaaagcaatccctacttttgtaggataattttgtaccttcagagaataaagacaatcaacctagatttctcaatttcttcattgtaattataaaaacatgctaattttctattttatttcttatagattaagggaaaccattcttatgtaagtagcccctataaatagttgtctcatctcactattaagtaacacgaaattaatcagagagaacactcaagagtgaaatcacgatctaagagtaaattactcaaagatctttgtaagagcttttgagaaggaatacttcatttttttatctcatgttaatacaactgaaagcgaagtaggctgttaccactatcacagggtcgaacctccataaactctggtgttttctttacttattctttgctttatattatttgtttaatcttatcgctttaattaagactcattatagttgactaaaagcgaagtcaacaaaaataaaatggaatgatgattccactttaaaaaaaggaaagactattaccacttttcctcccaaacatgtacgttaagtactcattatgaagtataggcatcacacaggcagtatcactcaactgtcagtgcgtgactcgaggtagacctttcaaaaggcatttaatgccccagacaccgaatagactctcaatcaagtcacgccaaattaacttcaacaactaggacacacgtcacccatccggacaacttcctagtcgaatgaagttcacatgcgaccacgaaggtctcacgcagacttagggggcaaatgttatcctaatttttacactgtgacgcgacacctaactggatgacacgtgtcttacatttctcaacctggacgaatagttttactcctagcagcccataaagattgatgtggagatccaagacatgcaggcatggcaagatgtccgagcagagtcattggtggacattcgacaagctcgatcccgtgatcaactcgcatgcatcagttaggggatgtgagttggcaatttcaaaagtgattgataccatctctaaacttttatgtcacgaagcaatcaggggcggagccagcatgaaaagttaggggggccaaactatattataaatttaagtataaaaaatctcaatatttttattaaattcataattaaaattaa

SEQ ID NO: 137756 - DNA, 570 bp, Cannabis sativa
atcaaaattataaacatttaattggtgatcagtcaattaaaagtaattaagtatgaatgaaataaaatacatagaaattgaggggaaattaaatcatattgaagccaaaaatcaatgtcagacaatatccatctagaccctaatgaactgtttagctacccatgttcatcttaacaatttcacgcattaatttagaatagaagaagaagataaagaagaaaagaatgttaaaaaccctggtgagaaagcctttaatatcaatttcgctctctaaaattcgtactccttgattgcttgttgaaaactattgaagtccacttcttttatagtcaaaaaatgataaaaaaaaaaaagacaaaagacgctgaaaacctatttttctcaagattagaaggggcggccacgacatgggatttccatgcctaggcatgacccccctttatttgggtagtgagttttttactgcgtcgacgactagtattttggtcataactctctcgatattgctcagaattggatgattcaagatgttcagaaagataaaagagagattgtaacgtccccgcttca

SEQ ID NO: 137757 - DNA, 940 bp, Cannabis sativa
  modified_base (525)..(532): a, c, t, g, unknown or other
tcctggtaaaataattcaaacattacatactatgattgagtactagacttgatatgggtgggcatgcactcactcactataggcttgaaattcaatgaagaataatgaaggagatttcgaaatagagaaaggaagaagggggtctcaagaactctagttgtctgacatgtaaactaggttataagagttggatgagaatgagaccatcattttaattatatggaataaaaatgataaataatagcaaaaataagcttaactggccggccatatagatgagccccactagttataattttgctattttttcaaccatttatcttttatttcacaaatgccatattttctaattttaatccaataaatgacaaaactgctcatttaataattataattaattatcaaataaaattatcatttatcgtatttattaattatactttacaaagtctcttaattaacaaataaaccctaaaacctcttttcttctcaactaggccatttgcttagtgaaaattcataaannnnnnnnagtctaattttagaattataaatgattaataaaaaccaattaactgagtcttacaagcagtattgtctcaactaatgtggggacaatgggcctatataatcaagcttctaacaagtagctctagaatttaccaagtaaattatttaagttattaattcctccttgcaccacgatagatttggaattgaactctttattatatagagcgctatatatgttccacgatatagatacgctatgaattatccattgttataatcctaataatcaatgatcctctatagatggtctacattgagttgggacccgttacacccttcattgtattttatccttaaaacactcagctacctataaatgatattttagtaaactaatataattactgtaatgagtactcaaccattt

SEQ ID NO: 137758 - DNA, 1022 bp, Cannabis sativa
tgtcaaagatttctatgctaacctatctgatgattttcttgatgaaaattctagactttttcgaaaagtgtatgttagaggacattgattttcattctctgaaaaaggacatttctcaagccttgcaatttccagagaatgtcccaaatgccattatgtctatggatcgccaattgatgctctctgaactcactggtgcaaggcctgaactgaaattgggggagagtcttactttttttcatgcatctctcatgcgatttgctcttagcaattgggttccaaactcaaacaagactgtggtgtcttaagatgtggcttcattcctctaccgtatcaccttaggagcatctattgacttggcctcccatattttgaaccaaattgtctcatttcgaagaggtaaaaaaccaacttttaagctagtgtttccaaatttaatctttaaggttttgtcctctcagaaaaatgtggcccaatctcatgaaacacttgagccttcactcactggaacaacattccaaccctcggagtattttgatggagtgtttcaaaagaggcctaaagctggtgctgctgctgctgcaagctcaagttctgctgctggggaaatccaggaggtcaggaatgaggttcagttggtgaacaatagtcttgctgccatggaggaagttcagcaagagatgtcaaagcagttgtccaccttggtcaagctttacagagactaattttttttttctctttctttgcttttattggacatattactatactatcttatttgtttttctttggcccttagataaacaaaaagggggagtaatattttgatttttaattgtttgttttgaccaactctggacccttttttccagggagagttgtgtttggtacttgtgaaattatttggtttaaaagttagcatgtttgtattattatttttggttttcgattgtgttactcagggggagtagttatttgttatggctaactttaatttgcaggtactttgtgttaaaaaatat

SEQ ID NO: 137759 - DNA, 1128 bp, Cannabis sativa
ttggaggaagatttccaacaaatagcaacaagcctcaatgtcaaatttgccacaagactggacacttggctcttgagtgcttttataggtttgacaagagtttcactggtattcttccaacaccagaaagttcaaaactaatgcaagctcatgctgctcaagcctcccagggaactgacagtaactggtacccagactcgggtgcaaccaatcactgcacatctgatgtgaacaacctgatgcaaagcatggattataatgggcaagagaaactgtatgttggtaacggatcaggtttggctatacatcatactggtagtgcttactttaagtctcaacactcagataaacctctaattctcactaacttgctggatatacctgagattaccaagaatttattaagtgtctctaagtttgctcttgataacgatgctttctttgaattccatccttttgtttgttatgttaaggacctgaggaccaaagccacaatcctgactgggaccctccacaatggcctatatacttttgatccaggccaattccaagttttgtcaaagccaacacaaccttgtccaacactgcacaaccctgaccaggatcaagcctgtcttgttgcctcagctactagaaatatcacctcagatcctaccagtatcaccccagatcatagcacttgtactcactgcaataagcctttgttgtctaactttgagttgtggcacaataggttaggccatcccaatgagagagttgttaggactgttatgaatacttgtaacatttctgatatcaataaaagagataattttgtgtgtgaaacttgctgttttggtaaaattcacaaaattccctttccaaagacatctgttactgtatacactgaaccactccaactcattgtctctgatttatggggaccttcacactctctctctcataatggatacaagtactatatgagctttgttgatgcctacactaggtttacttggatttatgtgcttaaaaacaagtctgaaactcttagagcctttcaaaatttcaaaacagagactgagcttcaaataggcaaaaagataaaagttttgcagacagattggggggggggagtttagatccttc

SEQ ID NO: 137760 - DNA, 1163 bp, Cannabis sativa
aaattaattattttttaaaaaatacgtaataataaatataaactaaattaataatattaaattaaataattattcaattatttatatatggggactattattgtagggattgggtatagctccctttatatatatgtattcataactatatatatgtgaagtttttttttagtttgcagaataaaggaaaagtatttttttaaagaaaaaatctattatgaataaaacattatgaattgaacaaaaaaaaaagtgatatatgtaaatataaagttgatgtcatcattgtagttcctattgatatcctcaaatttctaaactcaacactcaatttatcgttctgatcgttgatcaaaaaagtgctacatgtaaatatagtattggccaaactaataattcttttaaaaaaattattttaaaaaacagtaattagttaaaataaattcatattattcaaaaaagaattaaatgaaataaaaatcaatttttccatcttcctctatccatattatctttacagattaacaataaactttgattcttgattctcgattcaaatgctatttttaattctattttcatatattcaaatttctcatttcataaactttctactaatatttttcaatcaatgaaacgaaaaagtaaatgttaattctcgtatgaaaaattgaactctcaatctcaataatcaatagaaacaacatcaaatttcaagttctcaaaatctataaaaataaataaataacagatttcataaacacaaactcaaatattagaacccagtaaaacactaaaactcaaacattaaaaaaacacaaaataaaattcgaacacagaacttaacacacatatcagaataaaaattaaaccataaatgaagatttatgctactatttttcgaattatggtatttattagtgttgccttttgtttttcccaaaatacgtagacgcggataagggtgacacgttgatctgaatgaacatccactcacgaaggtcaactaagtcttgaacaaaaaaggaacaccacaaggagtgggcctcctagaggagagtataagacatttctttactctccgggaggctagagccatgctaaggcattttcgggaggtaaagagattacttgagcaatcacttcgcatttaatgccgcatg

SEQ ID NO: 137761 - DNA, 740 bp, Cannabis sativa
atctagtattaaacatactaaaaaattgatatttgatagagacaaagaaagttttatccgagaaaaatgagttgaatgaagaaaatctaagttgctacttatataaatataacaaattaaaaaagaaatacaaaatagtagttaaaatgttttaattttgcttcttaaaataatttttcgctctttttatataaaaaaatataaaattataattatattaaaggtataatattcttccacatataattctcacacaattatataaatagttagatcataatctctttgtttgtattaaaaaaaacaaacaaatgaatcatagaaaaagaaacaaaaacatggaagaagattttaatatattgacttttcaaacaagtaaattagttttatgatcaatataatttcaaaatattataaaagtgacaacaaattatcacaacattataatttcacatcattataatcatcaatttctatgaatcatctcttttctacaatacaaagcaaactagattcaggacaaattagtgtagtttttgacttcaacttatgaaggtaaaaataaaagagggtaaagacaaaagaaatagacttgtaataacattaaatttatgaggataaatttgtcataattagtgtagtttttgacttcaacttatgagggtaaatacagaagaaatagacttgtaataaaattaaatttatgagggaaaatttgtcatcaactatcacaccaataa

SEQ ID NO: 137762 - DNA, 592 bp, Cannabis sativa
gaaaatgttcttcatttattgtatttacatttttattaatttaaatcttatattcaatgtataaacggactgataattaaatcaatctctatgtaatcaaagaacacttgctttgtatataaaggagtgatccaacatgaaataaacaagacagaaaacccttacaatagttgactaagaaaaccgtgatctgactgaaccactatattctctttgtgttatttatatttccagtacgtctgagtgtctatagtttgagtactcgcccttctgggtagagtaatcgcataatcttgttcatactttaaatacattattttatttggtgttgtctaaattcctccaacaataatttacacttctattggagatgttctcataaatttatcacgaataattagcatggaaattctcttatgttttaatttttgtacacttagttctcttatttttttttttgtgacaaaatcttcttaagtttatttatttatttattttgtaaatttgagatattagttcaatatcaatattaaatactaattaagtgattaatatgtacatttgtgtatatataaaagtaaaacttaaaagt

SEQ ID NO: 137763 - DNA, 647 bp, Cannabis sativa
tgaatgcttccaactttaagacatggaaacgagatgtgaaaattactttaggcatatgacttggacttatgccttcgagaagaaaaatctaccgatcttactgatatcagcattgttgcctagaaaactcttcatgcacaatgaaaaattcaaataatcttagtctcattgttatgaaaagttcaaatcctgaacattcatttagtggtttgccaaacactagaaatgctaatgaatttttaaagcagtagaaaaattatttgacactagtgaaaacgctgcaactggacatcttatgaatgaaatgacaaccattcaatgtgataaatcaaaggagtgcgggatttattttgaaaattgtaaatgttcagtccaagttaaaagatcatactattcctcttcccgaatttcacaccattcttcaatttcttcatgaacttcctacgatcttttagctttatcaagacagcctaaacacttataataaagcatggagttttagtgacctaatttctcagtgtgtagctgaaataagcaaactaacaaaataagaagaatgaatcttctcactttgtttctcaactcaagcccaacaaaggataaagaaaatatgaaaagaagcaaccacaaccaggggctaagggatc

SEQ ID NO: 137764 - DNA, 1147 bp, Cannabis sativa
  modified_base (294)..(303): a, c, t, g, unknown or other
  modified_base (546)..(560): a, c, t, g, unknown or other
ttgttatgaaatcccatatttcatgtaattttcactttttttaattgtaatcggtttaaattattgtgtgttacttgtttgtattcattatgttatataaccattactattttagttataattggttttgagttatttcgtgttattgatttttattcattgtaacacagttacagaaccggttctattttaataataactggtttaaattattttgtgttatttatttttattcattatgttacagaaccggttatattataattataatcggtttgagttattttgtgttannnnnnnnnnttcattatgttatagaaccggttttatttttactatatccgagacatttgatccccactttcttttttttttttaaaaaaaaaataatatcggttttatgaggtattatgtgttatgaagtattttattaagaaactatttttgtctttaatttatatttcagtgttctaggaactaattttttctttgtttttaattgtaatcgatttgaattattgcatgttacttgtttgtattcattannnnnnnnnnnnnnntctattttagttataaccagtttgagttttttcgtgttatttatttttattcattataacactgatatagaaccagttctattttaactataattggtttgagttattttatgttatttatatttatttattatgttagagaaccggttatatttcaattataactggtttgagttattagtttttattcatataaccggttatatttttagttatatataagacatttactttggtgacttttcagtgacgttgacttttccggcgttgttgatttttctgttgactttccgaccacgttgacttttccaacgacttttctggtgacttgtccgacgactttctcggcgaccgtgatttttccggcaactttttcggtgccggtgactttcccggcgacttttccggcaaaacttattgttgttttgtaaatatgagatttctactttttttacaaacatatggcataaaaaaaacccatataaatgttaaaaaacaaaaaaacctcataaccacttagctttatttatttatgccataaaaaagtaaactcttaaaattttgaggtatattgagaaatacctctt

SEQ ID NO: 137765 - DNA, 528 bp, Cannabis sativa
  modified_base (500)..(502): a, c, t, g, unknown or other
gatcggtcgaggggatcaccattctcggtatataaatgccttacctttgccaaagttcaaaatactggtatggaagatgtatgccggacgggaggacctgcttgctcatattaaatacttcgagatgcagctcgacctctagaagtttactggtgatgtgctctgttgcatattcccagccacactttcgacgatggccaaacagtggtactttaaactcaccccggggagattcaactcctgggctgagttctcacgagaattctacacacaattctcgtccttgagacttgtaacgtcacaactggaagaccttgtcgaagttaaacagcgacaaggggaacttctgaaagattatattcatagatttatgatcaaggctaccaaagtcaaaggccttactaaagaaggctgatatacgactataccggggggcatactcccactaagcaacttctgaaaagatatcaggaggatatctgtaaagaccgcttagtttnnnttggaaattagcagttaatcacgttt

SEQ ID NO: 137766 - DNA, 749 bp, Cannabis sativa
tgaaaaagtccatcctttccaatatccacatcctccatctatctctgttgttcagcagcctcaggggggattttctcttccttctattcctaattttcctactatccagttttcctctttatttccccagtatttaactgttgatactcaatttgctagtgcttctgcctctgatggtgttatgattcctactccgattaaccctaacaatctggctctgagtactggatcgatggatcctactctgcatgctccttcaccagtttatggggcttattctactgattctatacttgtggctgatagggcttcttgtgaggtttctgggggtgttcaatctgttcagtctattgtgggtagtgcttctgtttcagcctttagggctgtttctggtgattcaaatgcccctggtagccagggtgatccttctgctatccaacctgattcctctgtgcgagggaaaggccttgcttctgcttctggagtaaaaagggcttctttccagccgcatcagcttatggttggaggctctcttagggaaactctcaagagagctagggcaaatgaaaatgatgatgtaaccactcttgctgacctatccttggaacatgcgggtgttgttgggcacacccgccctgaaaaatgactattatcagttggaatgcacgagggttggggagtactcgtgcgttccgaaggctctccctgttggtgaaggagcataagccttcaattctttttttgatgga

SEQ ID NO: 137767 - DNA, 917 bp, Cannabis sativa
aaataaactatagagacaattattattttaagaataaagtaataaaagaaatgataattatctaaataatatgtgaaaatatcttaaattaagccttttcaaatttctaaaaaaatatctaaaatatttaacatactatttatagatttgtgatcaataaatgatataatattgtaataaatatcatttttctaacttataattcataaataataaaatatttcacaaaataactaattttgaatttgaaatttttattgttaggaatctataaaaatatctaagttaatttcaaatttattattatttaattggtcatataagataattttaatataatatttcaaattaaaaagataatgctatgttttaatttaaaatatacctaatattaaaatatctaaccttattattaaataatatataaattttaacaaattaataattttttaaaatctgaccataatttaaaatataatatatttaattttttaattttaacctcaaaatatcaaaattaataataatcgattaaataattaaatattcttgatttaaaaaatttgatatttaagtttaaatgtaaaaataatattttatttaaatatttatggttttgaaaacaaaaatttgaaatttgtgaaaaaatatcacaaaaatcgcaattttggtggagaatcacttgtctgcccaagaaggctgcacacagcctccctacacgcgcgcaagtggagttgcagggtgggatgtgcgggaaacctcagcgggttgtagggtcatcgtgggcggatgtagcatcactcgtgtctgaagcccgggtttgaccgagttcagacaggctttgtccccttcatgcgtgtgcaaatcctccttgtttgagggtttgtgtgtgcatggtgctcgagtgctcgacactc

SEQ ID NO: 137768 - DNA, 662 bp, Cannabis sativa
cgtagtttatgagacacatggactaggcataacgcgagtttttctagagggagatatctggattctgctcctagtaaccgtttacttacatagtaagtaggttgttggtgctttccctcttctcacactatagttgcagtaattacatcttccgagatggctaaatagagaaacaacgtttctccagttattggtttcaccaaaactggaggcgtcgccaaatgcctttttatgttttgaaaggcctcttcgcactctttgtccagtcgaactttttgtttcctcgcaatacattgaagaaaggcacacactgatcagttgacttcgaaataaatctgttaagggcagccattcttcctgtaagggcttgtacttccttaggctttgtggtgatggcatatctattagttcctttatttttttggggatttgcttcaatacccctcgcgttaactatgaatcccaaaaattttcctgaggaaactccaaaggaacattttttcgggtatagcttcatgttatacttctttaatatcttaaaccattccgcgaggtctatggtatgatccccattttttatcgattttaccaacatatcatcgacgtaaacgtccacgttctgccctatttggtttgcaaacatttcatttaccaatcactga

SEQ ID NO: 137769 - DNA, 519 bp, Cannabis sativa
  modified_base (487)..(487): a, c, t, g, unknown or other
acattaaagttttgaataatatatctaaattttaacaaacaaaaacacaacctaaaaacaactacactttctccatacaaaatcatatataatctgaaaatcatgtacaaaatcatatataatcatatgcaaaataatcacattttcaaatagaaaaaacaacaaaaatagaaaaataatctgattaaaaaaacgaaaatgaataaccaattcttacccgagatgccgtctgctgcgccagtctccgcccagacctcgcaccggtctccgcccagacctcgcaccggtctccgtctgctgtgccggcctcagctggggaaaattttagggtttgcttgatgcttgagagggtatcgtgagagagagagagtgctggggttatacaaagggtatcgtgagagagagagagagagtggctggggtagttgaagagtatttaaggctgaaatatatatatttttttttaaaataaaatggtatagtgacntgccacgcgtgtgaccaaagaggtatccccac

SEQ ID NO: 137770 - DNA, 819 bp, Cannabis sativa
ttgattttcttccattgttataaaatctgtaacacttctaatggcaaagctagtccaaaatttaatgagagccaacacatgtaagaatataattttttttattattttttttaataattttttacatttaattttttaaaaaaaattattatcttcgtcgtgtaacccttaaaaatgtgtgccgaaagaaataattttgtactataatattactagctaggctcagatgaaaaaaaaactagggcaagaagttaaaagttgtgttaaatttggacacaataaatattattatttttatatatattataatgttattaattattatgatcaattgacttttactaaactttaccttttttatttactatattatatttatttaaataataaaaaataaaaaataataatttttatatgttatcaacaaaatattaattgatcatcaatataattaattattttttttcttattttacattttgtgcattagagcacaattgtaaatagtgggcaaaatataacataaattttatttttttgtattaaatttagcacaaattttaaaatcttctattagagatgatttaagagcatcatcaatatagggaagaaattagactctattttatattgtcttttttttttttatttttaccctcaagtctatcatttttactttttttttaatattatactaattttgccatgtcacttcaagatactctctacgtgacttttttatatcaaggtaaatttagttaattgataaataaaagagatattttttaatttactcccaaccaggcccggccctgggca

SEQ ID NO: 137771 - DNA, 1232 bp, Cannabis sativa
  modified_base (26)..(29): a, c, t, g, unknown or other
tacatattattagtttattacacatnnnnaatctatatattatattattataaataatataacagtccttgtatcacagatcaacttgcacagggagaaagggagagcgagagaaggattaccaaatatctttggagacctaaatataaaaaatgtgtataaaagcttttaaaattaaaactgcttccttaattcatgatattcatgatgatatttaaaattaaaaatatccagcttcttcttcttcttcttcttcaaaaaaaaaaaaataacagtaatttaaataaaattcaaatactatgctgtgaccaaaaaccaatttgaataaagaatgcgtatattatttatttttattttttttatttagataatttataaaatacgattgaaaagaataaataataaaccagtttttgttgatctaactaattaacatatatatatatatatattgaaaataatatttcccagtgaagttaatgttcaaatactttatgaaacagaaaagaacactaatataaatgcaaacacattcaagcctcgtaatcaaatcaaatgataacccacaggaaaagatgtaaactgaaaatctcaaaagattggcctactaaatcagaaaaatacaagagtgaaaaccaaaagcaatcttgattgccttaaacacatacataaataattaaatacaagtgcatggtcatggtcatggtcatggtcacttctttgttatttctatgattttagttttctttagcatgttcagaattggagtgtaatataagaatgtcctaaaagaaacttcatgcatccagatgtatcatataattgatgatgctaatgctagagtcactatatgtatgtgaacaaaattttaatttctaactaaaatcatatgttaagaacaatgaaaattttataattgaaatattatcgacattggaagaaataaccaacaaacataatgaagcaagaccgattagatcttatttaccatgtatatctgacaagtatatgcttgggccagtgttgagaatcccagaattgttgacgaatgcttggatgaacctcaatgtctgtttggaaaaatgatacaaaaggctatgatgaaaacaaccttagaacaaaaaggaaccaaccttcaatcgatttcatttcctcaataattatacataacagattttcagatgaaaaccaaccttttcattttcgacgagttgtatcattcattcgacctt

SEQ ID NO: 137772 - DNA, 712 bp, Cannabis sativa
tatacggtaccataattttttttcaattttaccatttttttaaacttttatacggtttctttttaaaaattacatcatatacggtttttgttttcatcatttaactgcctatatgtttccttccaatatgtcaaatttcaatcacttccctgccagttaccataatctaacccactctctcgatattatcattatattttgaatttcaatcacttcacttcctcttcttcttttttctgatcatcgagttcttacttttcttttctgtttttttttttctgcttgttgtttctgcgatttttttttatttgagtaatgggttactcgatctcgttcgagttcactgtctccttctcctaagaaagccaaaaaaaagtctattaaagaatctaaacccaaatcaattgctcaaacttcttcaaaaccccctaagcagaaattcaaagttgtggttgctgttggtgagccttcatctggtgatgctaggaaaggtaagagaaagaggattgataatgataatgattttgtttctgttcgtcctagaaaggtatttttgaattttttatttttgtatttttcttgatctgttgttttcatgttgttgatcattttttatttgaatgttattttgtttgtttattatttgtttatttctttaattttttgggtttagggttttttctatgttgtttttatgttgtgggtttcaatc

SEQ ID NO: 137773 - DNA, 904 bp, Cannabis sativa
  modified_base (49)..(55): a, c, t, g, unknown or other
aatgtttaatgggccggcccatagtatttttgtaattttttttcctttnnnnnnnttttctgtttttttccctaaattttattgtgactaaaataaaaattatgctagtccaactcaaattcaccatattattatatcatcatgaggtattttttattttcaatttatcataattatatctagagcattgctatgagacatcaaggtgtttaatatttttatgatatgacgtcttatcagggcagaccctaggtataggcgggctaagcccgtgcttagggcccacacttttcaggagcccaaaataaaaaataaaaaaaattattagacttttatttaagtaaaatttagaattttttacacaaaatgacaaaaaaaattattttttacgtacatttatattgccacagggcaattttatcttttttaatgtttatacttttcatttatactacttcaaagttttcttaattacaaatttactgatttagtcttccactagtgtataaagcccctttcccaacgacttgactccactcacaccagctcaagtccatatgtatcgtgtaaaacctcacttgatcaacccttaatctcatgatctagctactacaagaaaagaaatgctagtgtagtgtaagtaatatcatgtataaatattttattttatatattaatggtattttttttttattttcttaaagttattttcatgcctatataatttacatattgaaatggagttgttatgaaatttttttttgttatttagttttttgaccaagagaaataaatatatacttgtttttttttttcaaattcgtatgttgtttttattttattttttaagttgacgtaaatgttgatgtccaattaattttcatattaaaatagaattgttatt

SEQ ID NO: 137774 - DNA, 967 bp, Cannabis sativa
aaatagatagatttaacatttatagagttagaattaaaatatgatatttgtgaaataaaagatatttttaaataaaatgaaaaaattgaaaccgtgtagggttagggttcggccaacaagggtttttaatttcatattttttaaagtcattatttaatattttttaatttcatttaattcttaacctaaccttaggagatatcctagaaatagaataagatgctcttattttcttaatcaattatcagacttcattgtcagacaacttagaaaataaagaaagagcctctagtctattttcgaaatcatcctcttcttcttcctttattatttttgaaaccctatagtgaattgagaaagttcccacacaattcaagtcagtactcagacctttgtaaaagattgtgtagaataccgacaactgaaaaagatccaagttcagatcttgatcatactttgtgacagaaaggattatgggttagaaatctgaatggaatgagacattatattccgctgccactaatgtaatgtaatatcacaataagtccaatggtaaataattagggtttatatatatatatttatgggctaatcatgtaataagtgagattatgatcctattaatctatttcaatataaattttaattttgctataagtgaataaataagcgtaatttactaattatatagattgatatagtgaatataatatgagtgattggtggaataaaaatattttcaggtttggtgaccttatggactcgatcgaaggataagtgagtttgatggaaatattataataagttaatagtgtaaatattagagtaagtagaagtatttgtgatttgacttatatttcttaatagctaaaaaataataagataactattataaataaacttttattaataatattaatatattattatttattatgaaatattagtattatgtaatattataatt

SEQ ID NO: 137775 - DNA, 994 bp, Cannabis sativa
tttatgaattgttataaaaatggaacttttttaagaattgttataaaatgaagggctatttacaaaaatatggaaaaaaaaaatcaaagttttgataaatatggcatgcaaacttaattgtattaaatatggctttttttttcaaaaacaaatttaaaaatatgggaaatcattaaagataaaaaaatgccataaaaaactataaaattgtgttcatattttatcatacaaattaaccagttatttacataaactctgtaactataattttttttttttaccaaaaaaaaaaactacaaaaactaaaacaatagtaatataattttgttaagacaataatttattctatgtaatcatgttgaagacagttaagtctgttaggttgttagagttagttggagcttattctagcatgtgttaaatgttgttgagttagttgtaagaatcggttaggattctgttattgttttaccattgtattgctagtataaaagctgtaacactttccatcaatgaaactaatctttccacaatctttgctactctttcatttcctttctttcttctttctctctctctattttaccttctctgtcacaggttcatgttcatcaatggctaaccattttaacaaatcaaagccaatttttaaatgaaaaaaccaactatacacttgtcaaaactcatatataaattttacatgctttttataagctcaaaaacttgatcatcaactcactatcaaaactaatgccaaaactaatactaacacaatactaatgttaaaaccagttaataatttctctgaaactccaatactagaccatcaacacactaccaaaacattcactatccactaaagaattatattagtcgcaaaattaagaagtaaaaaatagaataagagtaaattgctagagttgttatcttaatgaaaaaaaccagttatgttatggatgtcaaaaattataaataaattttacatgcttgtatt

SEQ ID NO: 137776 - DNA, 631 bp, Cannabis sativa
ctaaataaaattatttatgtgaaattttattttagcaacctagtctacttatttagtaaaacttaaatgggcttcgtgtatgcatctaagcccaaaagcaaatatttagatcaatatttgcatctcaatctctgtctacagcatctcctcctctctcaacctttaaatcaaaaaggtattagttttattattttttttaaaaaaagtcaataagttataaattaaaccattagttatagttatatatatatcacttatactgttataatgtttagatacttatttaaatattttgaaaattatgttgtagctttatttttcatatttttctttcctgtgacttgaaattcatatagaatacttgagtaattaaaatctaattagatatataattaggcaatatagccgcttttcgcgcggctattttaattttattttagtataataatttaaaaaaaaactacttaagaaattaataaataataacttaaaaaattaatctaatatataataatattaagattataccatcgaatttttattaaaaataaaatttaaaattctattttatttattaaaaaatttaaaatttatatgaataatgtatacatagaattttaaatttctctat

SEQ ID NO: 137777 - DNA, 542 bp, Cannabis sativa
  modified_base (30)..(39): a, c, t, g, unknown or other
taaacactatgtttatattattattgatannnnnnnnnnattattaatctaatatatttgttatgataatacttgtgataatatgtttttttgaccaagtgtgtgattatatgttaatctaatatgtttattaaaattaaaatttaaatataaatttataaataaaatatgtatatttattatttatttttaccatatatagtttatacataaaaaattaagaatatgtttctcatagttaataaaatgtataaattataaataatttgttatgcacatataatataattaagtattataatatacataaaattataaattttcaataaaaaaaggactaaacagatggttgctgcgttctagatgaccttactcattagacatatcacatagtacttaccttttgtctgcacttttaaattgcgttagattagagcaaatcaacaaattattattttttttaaaaaaaataataaaatcgaaacatttgctataattttttttttatggtgagatgattttattttattattttattaaaa

SEQ ID NO: 137778 - DNA, 987 bp, Cannabis sativa
aaaaaaaaaaaaaaaacactcttacctataagtgtattttttatcaataaatttattattattgatttagatgagaaacttacatctttatttttttatacttaagtgaagaaactcagtaaacaatacataaatatgagtttgtaaatatgaaaacgtttgaatctaattatttaaataaatataaaattttaggaagaaaattaaatatacttagaaatgttttaaaaataggcataaggaaagtgtgaactttatttccagcatgttaaattattctgaatttattaaaaatttgcaaaatatttttagaaaactacaatttacattgacatataaaaaaaaaataaaattaaaactatttggatatcgaaaatacaaaatgagtgtttggtacacttaattttagagagtataacatagaatgtccctaaattaattatattgttgttttattattattttttattatctatagttgtatgtttattttttttttttttgatagtttactctgtggctttaattataaatttaatagaatgagaatataatgttatatttctttatttaagtaataattatttattaatagtattattatagtagaaaagtaatcacataataaatttgttttatgttgttaaaaaataaataaacatggtttatattttttataaatagattatttagaaaaaaaaaatctttaatatataatatatatgatgagagagaaatacattaactccctcaaaattgttgagggactaaattttttgacactaatttattatagtgaaaaaaatattatgtacatgaattataagaataaataaaaggttttttttttacacataataaaaagatggggagttttcaatataatacttaaaattgattttatttacaaaaatacctttaagaaaattatttgcacaaataccgttgtgccacgtcagcatatataccgaaatttaaaataattac

SEQ ID NO: 137779 - DNA, 577 bp, Cannabis sativa
ttaattttgtgtgggttttatatatattgtttaatgaataatatatacaataataaataattttttttttttatgtaaattttggtattgtaattagaatgagaagagtttacaataccataagtaacaccatactaattagaaggaaagatacctaaagatattataatgtgtttgaatcaaatggatcaattcacgataattcaacaactattaataagagaattgcctttaaaaaaattaagaaaataaaaaaaaaaacttttcttttaaaaaataaaaccttatggcatgtttgatttgttgtaatcaacattgtaatgaaattatgattacaattctaatgtttgatttgcctttaaactcttgtaatgacattccattgtaatcactattacatcacttttatgaaaagtgattacactctcatacctcatgaatcgtcattacaattaattaaaatgactattttacccttattttatactttttcttactaaagtagagatgattttgtcaatttactatctattccaatattaattttaacaataaaccaaacataacaatcaattcc

SEQ ID NO: 137780 - DNA, 814 bp, Cannabis sativa
cattttattaatcttctagaagcatctggttttgataaaacttgtctcaagggttgatcggttaacacttttatggggtgagctggaagtatggtcatagtttgcgagacgcatggagtaggcataacgcgagtttttctaaagggggatacttggatttttcctctagtaaccttttactcacgtagtaaataggttgctggtgctttccctcttctcgcactatagctgcactaatcgcatcctccgagatggctaaataaagaaataatgtctctccaattatgggtttttccaaaactggaggcgttgcaagatgcttttttatgttttaaaatgcctgttcgtactcttttgtccactcaaactttttgttgcctcataatatgttgaagaacggcacacatttatcagttgacttcgaaatgaatctgttaagtgccgccattcttcctgtcgaggcctgtacttccttaggctttgtcggggaaggcatgtctattaatgccttgatttttttttttaggatttgcctcaatacccctcgcattaactatgaatcccaaaaactttctcgaggagactccaaaggaacatttttttgggtttagcttcatgttatacttttttaatgttttaaagcatttcgcgaggtctgaggtatgatccttactctttattgatttcaccaacatatcattgacgtaaacctccatgtttcatcctatttggcttgcgaacatttcgtttactagtcgctgatgtgttgccctagcgttcttcagtctgaacggcatgactttataacaataga

SEQ ID NO: 137781 - DNA, 551 bp, Cannabis sativa
ggagaatcatcaagaagaaatcttgcaaaagacgagtgtgcctattatcatcagaaatggtactggaagaaagactgtccagacaaggacaagccaaatgaacatgtcgcatagaaggttgatatgcttacaaaagtagttacatggatcaagtttcaacactgcttgaacttgatcaacatctctcagactaagagcgcctagggcgcatgtggaggcaacgcttttgttttttagtttttttgccaaggtggagattgttgggtttgactcaaaagtcaacttgtcttggagttgcaaaaatatggttcaactttcaagaattttgggacttgctatttgttgcatttatcaagaagcatgctctctcatttattacatttggttggaggataagctacctcatttattacatatggttggtagttgaggttttccttctataaatatggagctcttagaagagcatttgcgtctcaatgaaaaacaacaatttgggtacaactttgtacaattaggttcattgggaaatttgtcaaagagagagagag

SEQ ID NO: 137782 - DNA, 1497 bp, Cannabis sativa
  modified_base (1000)..(1006): a, c, t, g, unknown or other
aaaaatagaataaaagagttatagaatgccacataaacttgcttgtgcattcctttatatatatatattgatgattgatattgatattgattgatatggatacttattattaagacttaaaaaataacataatttcttattatcttttgataagtgttaattacaacttcgttctcagcctctatattagaaaacacatgctattttttttttttttaatttcaattatttttcatggtgttgtcgttgttgttgcaataatattatcttcataaattttaagatttaatttctttgtgtacaaatgtcaactcaattttaattacaaaatatggaaaaaaaaattattaccattttcacatacatttttatatacaattataaacttttttttcttcaatttttttttataatatatatagtaataattattgattattttatattttttttttctaaattccataattcttgttaaatttaaacataaatgtacttaacataaaaacataatttgaatataaatgtattcatactattgtatgtgtatatgtatttattttattttctattaattaaacatacactaatttaataaacaaaataataatattcacatagatttattatataaccctatgtgtgtcatgtttattttttaataatttttttagaaaataaataatgtatatatataaaattgtttattctttttctttgtctattgtgtcatttttatttttctaattaaataatatttagagtttataaagttatgtttctttatttattttttaatgtaagaattttatttcaatagaaaatttattcactataactcattagaaaataatcaatatatagaaacaatagaaagaaaatatatttattttagtataatataaattggctatgtcgatttttatgattacatgataatataaaatactttgtatatatatgtttattttgttttttatttattaaacatactaatttnnnnnnnaaaataataatattcacatatatttattatatcactctttgtgtgtcattgtttattttttagtaattttaagcattgatttatatttatatacattaatgtttataatttgacattgtattttattaaaaaaatcttattaaattataataattcatacttaaatagataataaacatttattttttaataaaaaagtatttaacttgtttatttttgtaaaactatttattatttatttaattaattttatgaaattttttattttgagttttaataaacatattttaatattaataatttttaaaacattaatttaataaacataaagataatatgttacaaaataattttacaaacattattaattacattaatctaattatgatacttagtttaattattaatgatttatattatttaattattaaaatgtatggttttatgtaataagttttcaaaatgtgtaagtttttaaaatactttttttt

SEQ ID NO: 137783 - DNA, 793 bp, Cannabis sativa
  modified_base (762)..(762): a, c, t, g, unknown or other
cgtcagaattaatggttattttctagttgttctcgtgttgatgtggtggatctgtccgtaggaagatagaggctacaaatacatttcttcttctttttctatagttatttttgtggtctttttactttgattctcctataaatatatttgacgagctcactggcaaaaaggttttgagatgtgtgattcttttatgtttttcttagtggttatttttgcttcattattttacatttgttttgtgtttgtttaggtttgttttagtatttttttcgttctgatttttgaggattgagcttgtaaatatagccgctattgcatatggtattaatgttgtgcagaagatgtttagttttttttaatctaatttttttttttaattttttttaatgttgttttagtgttgttctgccatgattatttattttttactattttcgttcaacctcattgaaattaatggttattttctaggtgtgttcgtgtttttatggtaattctgtgcgtgagcatggaagatggaggcattattcttgatattcgatgtctacagtataaaagaaaaaaaaaaagctcatgacagtataaaagtaatttttaccgtgtaacagtaaaattgtaaacatttgtttaaaacctagtatttttgtaagtttgaggaaattacattgtatacccacttcactttatttgttttgatttttacctccattttcattttctttgagatataactacttttatagatgatgtccctattanaccccttaagttaatataaattatatgctag

SEQ ID NO: 137784 - DNA, 1417 bp, Cannabis sativa
attccactagggttagatttgaattatatggcattaaaataaggggatttttcatatatatacatgattatataattatttatgaaaataacaaaaataattttaattggttacaatagtgttagttgtaccgaaatatatataatatactaattacacatattttttatattgtgtcgttggccacttgttgatagttttttttgtgtcttttttttcgttcttttttgtttttcttttattttgttattttaacataaatttattctttcttttttttttaatatttatttttatcattttttcaaactacagcattagtttggtgggcttatatatagtaccattcaaatctatttttagatgtaactattttaatatatatatttctaaatgaaaagcaaaattttagtttattaaatattgttaaccaaaaaaaattatatttaaaattatgagatgttagatgttatcaaaaaaaaaaaaaaatactaagatactatatagtttataagataatattatctcatatatatttttgttacttattctatattctaccaggttaattataattataaaatggttatatactgatcaaaatatacttatgttacttttttgtttgtttatttttatagcaacttttacgttacctttaaatatatttaaaatttaataagatacaataaaatacaaaaattactaaatagcttatattaacaaaataaatatattttttaatatacataattattgtatgatgttattaaaataagtttatatagaatatatacctaccatacagtaattttatatatataattataaaataatttttagtaatatgaaattaaagacatattagattttgtttaaattattggttacttctttttttttttcattaataaaatataaaagagactataaggttacttttaattctaaaaattttatctgaaaaaaaaaatctattattctcatatatcaaaagaatcatctcaaaaaaatagatcataatagtatcactcttgagctccacaaatagcagtagaacttaaattttatttttcttaagttttccttataagttattttcaaaatctatcaaaattattctataaaagagagaatacaatttagtaactaaaatgttacctacttaatattggtctgaaaaagatatacttcccacatattaaaatgaccacttttaagaatagatcacaatgcttcaatttttaagcacaaataattattggtgaaactgaaaaatattatagaaattgatcaatatttcttcgtaaagtaaacttatgtagcatacaatttagtaacttttgaatataaaataacaaatatttattttaataaccaatgaaattagttagtatattttattttgtttaaactt

SEQ ID NO: 137785 - DNA, 612 bp, Cannabis sativa
atttaataaataaaatctacttatgatagtcaagtacatttattttatttatttaaaactatatctgtatagtaaagtgtattatttaggcagcagtatatgaaattattttttccatgatatctgcaaacatcataacatctacgatctttgtagtgtcatcaagttcaacatatactatagcactggaaaatagataataaaaattaattatacatgtataaaatctacttatgacagtacatttattttatttattaaaaactatatctgtacagtatgttgacaaagtctctttagtcgtagggcgcccaccacaaaattgacctacaaaacaacaataaataaaacactctattactacataatttaatgaaaaaataatagctaaaatgaaataaagatagtaaaataatctatattataatattaaaccattcataaatataaagacttgaaaaacttatctgtcaacactgaaaggtcgttgatatagaagctaagagcacaaaatggatcacttcttttgtccatcgattgtatcacaaaactaccctaaacaattaagggcaagccataaaaaatggcacgaaagccgtaaaaggcacaaaa

SEQ ID NO: 137786 - DNA, 743 bp, Cannabis sativa
ggctcacgggtgctctactgtgcaggaaatggtaaatctatctttaatcagccatgagtgcatgagctagacgttgtatgtacatgttcgggacacactagaccaagtgggttggggtctaccagtgatgattttctgtaactctgttttgccgcttaggtcagatgatgagataagacttgtaatagtattttgtaaaatattttgggatcccaagacatgtatttttgttggtttgtaaagttaaaattattataagtttattttcattccgcttacatttaaaatttaattttcgcgctaatcttattagtaatcccgtctaggggattaggcttttctttaatattcttgggtagcatgcctaatagttagggcattacaagttgtgtttgttacttgtgattatctttggtttaaaagttagcttgttattttgtctttcggtattcgattgtatttctcagggggagttttttatttgttctggctaactttgatttgcaggtacttctttgttaaaaaatattttgattatctaaagtgccaaagggagagattgtaaagttctttttttggcaatttatgtgccaaaatattttttatttatggtgagatttatttgttctttcaatatgattttatcacctttaatattcggttttattgctcttttctatcttaggaaagattgatttttcagctggacttttcttgtatggaaacatcttgtaagagaagca

SEQ ID NO: 137787 - DNA, 603 bp, Cannabis sativa
actaaggtgtatttggtaacatttttttaattagttttttgtttttaaattaaaaaagtaaaaatattttttaaaatcatattctgtagaactatttttactttttaatgtttcaattaagaatctaaaaaaatttactttcaaaatttttttaatcaatattttggactccaacaccaacttaaaccttgaaaaccaaacctagactcagtcccggacttggacccgccctcgatctcgacctcggatccagccccgaacttgacttaataaaatcaataaatgaaaatgaaaataaaattttcaaaatacacatttgttttttgtttttaaaattaaaaaaaaaaattagttataaaatacatttttgaattttatttttgtgattaaaaaatttaaaaataaaagtgttactaaatgccatctaaatatctcatcaaataaaattcaaaaataatccaaaataaaattaatttatgaaatatataataaaattttatttattaataatccaaaataattaatttatgaaatatataatatgtaagaattatatcaattcataactattagtaagaatttaaaatcttaaaataatttaat

SEQ ID NO: 137788 - DNA, 1527 bp, Cannabis sativa
tttttttttttttttaaagtttataattgattttactttctccgagaaaaaacaaactttagtaattatttgaaatctggtgtcacttatttaatttgtcaattagtaaaaagagaatttctatgctttcaacgataaagataaatgttgacataccaaaaaataaaaataagaaaataaagataaatgtgtttcaataaataaattaagataaattattataaaaaataaaaaataaataacaataattgtccggaaaataaaataaataaaagagatatttgtagcgaaattttcttaatatttacaattattatatatataaccataattaaaaaaaagtgacagtaaaaatactttatctcacgattttgttgcagtcatatatttttttagttgttaagtgtcaattaagcccgttaagtgtcagttcaaaaatatgtgactacatatttctttaacttatttaataggaattttttcaatattatacctaaaattaattttatttataaaaatacctttaaaaaaattatttacacaaatatcaatgttccatatcagcatagataccgaaaaaagtaaaaattggaaaattttcgtttccaaaaattgagttttgaaaaaagtaaccatttaattacttttgatgtgaataagatatcaattacttacttttctattaaaaaaaaattattttagattttacacatatataaataataaaataactattttaatatgtgagaaatatatatttttctatctctaaagaagaagactaatattaaaagaaacttttctgttttttttttatatacatattttaaggttatattatgttattttattgtttaagatacattgaggttatttttttttaatgtaacacatatgatgttttagatactattcaatttatttacaaattattttataaacctattaaaatagttttatagaaataagtttataaacctattaaataagtattatttaatgtgtaaatataaaaataaaaaaaaaatattttttagtaatttataaagttgtctgatacattaatttttatttaaacttaaatattgtttatttatttatcaacaaaatatatataaaaaatactttttagtaacttataaagttgtttgatatatagtgatttaaatattgtttacttggttaactaaatattaatggtcaactaaagattaagaaactaacatattacttttgattttggtcatcttcttcgattatgataaaaaaaatatatatttcccgcatattaaaatgatcacattaaagaatagattgcagtgatgcaatttttgagactaaaaagttagatgtgtagtaaaagtatctttttaaattaaaaaaataaaataaaaagaattgttttttaaacttaatggttttttaataatattatttgttctattatatatgtgtggaaaaaaaaataatttggtgacatcacaaaataagagtataaagaggtttcaatggttacatttttattgt

SEQ ID NO: 137789 - DNA, 512 bp, Cannabis sativa
  modified_base (125)..(128): a, c, t, g, unknown or other
  modified_base (192)..(204): a, c, t, g, unknown or other
acaaccatcttaccacaaagtttggcatgtgcattttgtaactctagaaataatattttacaagaataaatgaataaattttgaaaaatttgaccacgaaaatattaatatgacaaaaaattaannnnatgcttgaatatactcaccacccccaacaaaaatcagacaatgtcctcattgtttaaaaatatnnnnnnnnnnnnnaagaaatgagaacacttagagagtgagcgaatgcaaagcgacatgatattgattcttagaaaaataaaaacataaaaaacaaaagaagaaataaactaacaaaggttaaaacataccaaaaataaaagaaaacaaggaaagatagaacctgattggtctcggcaaaccggagacaagtctcctcaggaaggcttaccaacttaatatttttgactatccagtatcaaaaatgaattttcttttatcctgtgtctcaaaaatagaagcattagttacattttcagaaaaaagaaaatggtcattgtcta

SEQ ID NO: 137790 - DNA, 1167 bp, Cannabis sativa
aatattgtgtatgtatgaatgaatttatttgaaccatgtaatttatttttgtttattgatatttgtagtgtcaaaatgttgtttaactatcctcatcccaatccttatctactcaatgcctttgcaaattaactccaaagtgcaaagatgactcctggtcagagtatcacttcacacttgctcttaatgaacttgaaattccagaaagtaactatgctggggattgtattatcaaaagagcaatgggttcaatttgttatcaacaacttatcacatgagtataacaaatttgttgtatcctatatgatcaacaattggaactcgtccgaaatagacaagctggacgctgaattgcgtgcttatgaaagaacattgttgattgcaaggaggtccctctctagtactacaagaaagggaaaaaagaaagctgaagatattgagaatgattcgtccgacaatattgcaagtgctggctcagctaaaaagattggagaaaattctattacttcctcggatcatcttagactataaattgaaccagcaatagagaaaatcaaagaacagttaagcagacatactattcaatgttctcactgtggacaaaaggaatattttaaatctaaatgtctcagacttcttaaccctaagaatgaatgaatcatgtgttttagagaattacaaatccatttggattattgattcttgatctactaaccatacatgtttggtcttcactgcagctgcttgaaacttgggattacttaaatccaattgagttaaagctcaaaggttataatggcgaattagtatcggtcaaagctagaggaaaagcttgccttaagtttcagaacaaatttttgattttagacaatattttgtttattccaaattttagcagaaacttgatttctgtttcatgttatacaaacataacattttcaattgaattttttgaggtcgatttctcgtaatggaattcaattatgggtttctcacatggaacaagggctttatgttttaagacataatataccaattgcattaatgaacgaacttattaatgttgctaaacctagaaaccataaaaagaaaaagattgataatgaagatgaaacatatctatggcatttacatcttggtcacgtaggctatgatagacttcacagg

SEQ ID NO: 137791 - DNA, 687 bp, Cannabis sativa
agtctcaatactgagatttggtcaaggagcaaatctgttctactcttagaatgcccgaagctactgatggctctttctatctggggttacctaatatcattggaaggaaaaaaacggtgattcttggctttcttaagaacaagattattaaccgaattaacagttgggatggtaaattcttttctcgtgctgggaaagaaatcttgcttaaaactgtcatccaatccttgccaacttatgctatgagtgtattcctcattccgttgggcatttgccaagacattgagaaaattatggaaaacttttggtggaaaacaaaaagttccaatggtcaaggcatcatatggatgtcttgggatcgtatggctgcacctaaagaccctgggggtatgggttttcgccatctccattatttcaacattgccatgttggccaagcaaggttggagacttttatgttcaccatctttcttgctagtcaggtctattaagcaaaatactatcctcgcactgatttcctaaatgttgaattgggcaataatcctagtttcgtctggcgtagtatttggagtgcacaacatttggttcatcttggggctagaataactatcgaactgggctttcaacacacattctcaaacaaccttggcttcctgatcctgtcaacccctatgtctctactacagga

SEQ ID NO: 137792 - DNA, 1007 bp, Cannabis sativa
accccatttttaacctcaaccccatctacttatcccatgaacccttactctacttacactgctgccatagtgtctgtagataaggaaaatcaaccacctaataccaatattaagagttccaataacacactattcacgaggaaaatgttgagaagatgttaaaatatccaaggatcatcatcttctcctttgtcacgagaggttgatattgtaacttaccacttaggggtattttggtcatttccaaatcctcaaataattctgacatttccaatatctaactaagtcgtcccgctattacaaaagtactaaaatgtaattctattggctaatcgccgcgttctaatgttgtagaacacaaaacaagaaaaacatgaaacttcatatatagcataaataatacaccctaaattcacataaattttcataaattcataaatcataattaataatctagtttcataattaagccctaattatctattaattcccatattaaaattaagcggtcttgacacatttaataatacaatttaattactatattctttgagctaattcatattctttttgtaggacatgtgtcagcttttggtacatagtcaaattttgaatataacacattgccttagtaaaattgaataaaattttacagaaatttttgaatccaacaatctcactagttcgaaaaaaaaatttacgacctaaaatattcaagggacatgatttggtacatgtcaaagtttacgaagcaaaaatcctaattatcctaaacaatgataatataaactattaaaaacaaaatatgtaattaaatttttaaattaaaaaaattattttaaaattataatttttagctaaaaaattgaaggaaacaaccatgtataattatttttatgattttttgtttaaagcatctccaagaaaacaccaaatttagtgttacactatcaccaaatttgtcgtcaaaaagtatttctactccaactacaacaccaaaaattaca

SEQ ID NO: 137793 - DNA, 1466 bp, Cannabis sativa
  modified_base (465)..(479): a, c, t, g, unknown or other
gctacctagtcatgcctttcggactgaaaaatgctggcacaacttatcaaagaatggttaaccggataatcaaaggcctctaggggcgaaatatggaggtatacgtggatgacatgctggtcaagttaaaggcgtgcaatagccacgcggacaacttagaagaatgttttgaagtggtccggagatacagaatgaagctcaacccaaagaaatgcacttttggggttaagtcagggaagtttttgggcttcagtgtcagtcagagagggatttaggcaaatccggaaaaaattcaacctctcttgagcatgccatccccaaagaaacacaaagacgtgcagagcctaaccagaaatgttgctgccctgagccgttttatcttccggtccacagataagtgcattcccttcttcaacatcttgaaaaagtgtcaaaagtttgaatggtctgacgagtgcgaggagnnnnnnnnnnnnnnnaaagagcacatggccaagcctccaatcctgtcaaatcccattctcggagaggacttgtttctgtacttggccgtctccgagcacgcgatcagtgcggccttagttcgggaagaagagaaaactcagcatcctgtgtactacgtcagcaaacgcatgataggggcggagacgcgatactacgtcagcaaacgcatgatagggacggagcctccaacgagaatggatctggagcgggggttgcaatgatatctccaagcagacttcgactccaagcagccctaaggttcgacttttgagcttcaaataatgaggttgaatacgaagccttgatagcagggctgagattagcaaagattgtaggggctacaagagtagaagtctacagtgactcccaactggtagtgaaccaggtgtccggaaaatatcagacgcgtggagagagaatggccgcgtatgtagcgatagtctgggaactgctccacgagttcacggactataaagtagaaaggatccccagggaaaagaatgctcacgcagactgcgtggttaagttagccttagacagtgagatcgagaaactggggttagtgcccgtggaacgcttggcagaggcaagcatcaaaataaaataggcgataacaatggttgggcaagaacccagctggatggtccccatcattgaatacataacgaaaggtgagttgcccatagaaagggcactgtccagaaagattcagtatcaggctcaccgttatgtgatgatggacaaaattctccatcgaagcagactcagcatgccttatttaaggtgtgtatcggaccctaaagctacgctaattatgctagaggtccatgaagggttctgtggagatcatacaggaggaccgagtctctcaaataaaatattgagacaaggattctttttgccagcaatgaaaaaagattgcatagactacatccaaaaatgtgattcgtgccaaaggttcg

SEQ ID NO: 137794 - DNA, 732 bp, Cannabis sativa
atgagttgactactctattcaactgatgatatctttgactctcacctaccgagacactgtatcagctgattagaaaccttaaaaattatttgagatgtgtttgttttgtattttcacatgtctttgttacgtgctaaatgtataataatttttgaactgtgtatgaatttatattgaaccttcactatgttttctgttattaattattgtagtatcaatttcgagtctccattgttggtctaacttaatttgttttttctaatggaacatatcccaaaagattgtcattcgttagacaaatataatagtattagatctcgacagataaatatttgtaaatgcaacatctagctgtacatccaaagatgacaacttagactagtgcttacaatatgaaacaatgaagaaatttataaaataagaataactttgactttcgcctaaacgggacatcattggattcttatttaatcaaaattatcctttattttttactcttagcttttttcattatgaaattgcttagagagtacatcattggataagaaagattacaaatcatattcttatggtgtcattctatttttttcctgtgaaattgaatggcgcagatgactatattctagatatcttatcctgaaataatagggatattagcggctaaactacctgaactttacggtttgtaacacttaaccacaaaactcaaattttggcggctaaactacctaa

SEQ ID NO: 137795 - DNA, 1021 bp, Cannabis sativa
  modified_base (455)..(459): a, c, t, g, unknown or other
atgaagcttagaataagcaagatggaagacagacacaatgcggtttaaaaataagctctacggctgaaagcccacatgaagatatggtaaagaagagtcgcaggagtttctaaccctaggtttttctaagcattctttctacagcacagttgcattcaaagtgtaaacatgcaaagaaaggcataaaggaaaattatagtcggcaagctaccgtgctgatacgaaaagcctaccaaactgttggtcagcaacctctgagtgtcatccccctgggtgagatggacgaagatcaagcgatgaatacttcccagactacaaatggtcagtcgccaaatcaccggtcatgagttccacttgtgggccaagcggtaggcgggcaaaccttatctagtaattcatcaggataggtcatacctgatggttccaacaaggttaacggtgccattccacctgtnnnnnaagcaaatcaatcgctaagacagcgaggcgcttctgtattcgaaaggttggggacgcctcatgacctaaggagtgatctaaatagaaggggcgcagtagacgatcagaatgtcacgaagatcgtgcagcctggagcctgtgctcaaattcccgctcagaaagatactgatgtgattcaaattgaccagaataccgagcaggttagcccagctgtacaggcacagctagacgaactgaaaaataagttccaaggcatggttggacagagaaagaatgatctcgagctggatcgagcacgtggaattcctttctctcctgagatcaatctcctggcgttgccccagaagtttaaaattccaacatggaaaatgtatactggaagggaagatccactttcccatctcaagtatttcaaaatgcgaatggatttgcaagggatacgaggacatgtgtgttgcagaatttttcctgctaccctgtcagaagccacccgccaatggtatttcaagttggcccctaaaaagtttagttcatggaaagccttctcttcggaattccatgc

SEQ ID NO: 137796 - DNA, 890 bp, Cannabis sativa
  modified_base (566)..(570): a, c, t, g, unknown or other
aggtacttggaagtggttagaaacaacacatgtatggttgtgtggtaagtgaggcagtgtacgtaagggtgcactagtcattggtactgctttctggttaagaacgtaagacactccagatttgtatggaagctggagtgtgagtgtgtcatatttctgtattactgtggctgcctctatttaaaaacatgatggttttattgtatggttgatgtatgtgattgtgctatgatgtgtgaattgtaaaaaccgcttagatttaatttggaattagaagataattaggatttaattatggaaaatatttattaattttgaattatttaattatgatgatttatttaaattcagaatgcatttaatatgtcatatatagaaattttatagttttgcatgttttgtgtccggcaatattggaacgcggtgtttggctattagattcacatcctagtatttttagtaacgggacaatatattttgacattgcgaatgtcaggaatgggcgggattttaaaatttctcaaaatacccctaagtgccctttatgcccttttagtgtgggaggnnnnnaatagtcattttgccccataagctttttgtcctttagtggacttggctttagttagtaatctaatttttatatgaatattaggctgatattatcttttgattaaacaaatgaattctactcatttatccaaaataagaaaagactttctcaaccctctctccttctctctcttaaaattcctagagcaagcaagaatttggtgtttctttctaaaattcaagctagtttcagcaagaatttggtggtctcaagttctaggtaagcttcttgtaacctctcctttagtttcttgaagtgtaagaaagtggatttttgcatg

SEQ ID NO: 137797 - DNA, 742 bp, Cannabis sativa
ttattgacttcactaacatatcattgatgtatacttccatgtttcttccaatttgtctagcaaacatttcattcaccagtcgctgatatgttgccccaacatttttcaaaccaaatggcatgactttataacaataaagtctcatgttggttacaaagcttgtatgctcttggttagggacatgcatttttatctcgttatatccagagtatgcatccatgaatgacataagctcgtgcccagcagttgcatccactaactagtcaattcttggcagtggaaagcaatcctttggacacgccttattcaagtctggaaagtcaatacaagttctccaagttccatttggttttgagataagaacagggttggatatccatgagggataaaaagcctcgcgtataaagtcgtttaccaacaactaatccatttcctacttgagtgccccttgtctttcaaaatccaaggatcgtctcttttgtctcttggctgggtaatttgggtcgacgttcaggtgatcgcaaataatcttagcgtcaatccctatcatatctgcgtggctccaggcgaactgattctagttcaccctcaaaaaacttattagttgctatttcaattgttcatggaggttcttccaaatgaatacacggtttgtgggatttcctggatctagaacaacctcttccaactctttaatcagtttcaataaattcctttcatcttgaatctgaggattaagatc

SEQ ID NO: 137798 - DNA, 642 bp, Cannabis sativa
aaagtctgctaagctgcgaggagaaattaataatttctatcagctggacaatgaatctctccatgaggcttgggagaggttcaaggatcttatcaggaagtgtcctcatcaaggtattgagaagtggatgctggtccacaacttctacaacgggttgattggtaatactacaacacttatagatgctacaggtggtggggcatttatgaggaaaagtgcaaacgaggcctatgaactgttagaagagatggccctgaataattagcagtggccaactgaaagaagtcagacaaagaaggtggctggtatgcatgaggtagatgccatcataaaactgataactgtttctttgttgatttgatcgatactattgtggaaaagaaaaagttgatagaagatcctttagaattgagcttaaccgaggatgagttggttgagcaagaaggaatggaggcgatgggctatgctaaatggctcgactcctatgggccattgaataggaagtattatgaagagttggggtttgtgccaaagaagcctgctccatctacagagaaaccaccagagctagaactgaaggtgcttcctaatcatctacggtatgagtttttgggagaagacaagaagcttccagtgatagtg

SEQ ID NO: 137799 - DNA, 530 bp, Cannabis sativa
tggtcattcattaaggggtcaaaagatacctcaaacaaataaatttacatgtgaggcatgttcccttggaaaattaaacacaaggtctttgctaggaaaacttgcaattgaataaccttcatttcttgaacggattcaaggggatatatgtggaccaatatatccaccatgtggactatttagatacttcatggtactaatagatgcatctagaagatggtcgcatgtatgtttattgtcaagtcgcaatatggcatttgcaagatttttggctcaaataatcaaattgcgagcgcaattttctgattatacaatcgagagagttaggcttgacaatgctggtatatttacatctcaagcattcaattattattgcatgtcaattggtgtttctattgagcattctgttgctcatgtacatactcaaaacagtttggctgaatcattgatagaaacctacaacttgttgctagaccgctaataatgaggacaaaacttcttgtagaagtatggggtcatgcaatcttaca

SEQ ID NO: 137800 - DNA, 604 bp, Cannabis sativa
  modified_base (170)..(175): a, c, t, g, unknown or other
ttgatcattttgcaagcaaattcataaagtgtcaatttgcttggtaaactcaaacataatcaaagaagtagattcaacaagtatatctaatacttcatacttcgttagagcaaaagatccatcaagggatcaagaactcaagaccctattcaaaagagatcttcaaaagnnnnnngtcaaaagtcaacccgaaagtcaaagttatagtcaactcacggagagaagtcaactttggatcaaaacatgcaaatcaagctagaaatctcatctacatcaagactacacacaatcaaatggtataaatttactttagtcttcttaaagtgattttcataatacactagggtttataagtacaaattttggcccactaactaccttgtgcgacaagttttctcaccaaatgattcaaatttttttttattgaatttctaaatcacattttgtttaactaagagaacgaaattggaatttttgaaaataaataatcgagtaaagagttatgcacattttagtgccaaaaactgcatgttttgaacctgcctgattttcggcctaccctttttcaataggtagtccattttaaaataagtagtccgttttt

SEQ ID NO: 137801 - DNA, 919 bp, Cannabis sativa
  modified_base (137)..(153): a, c, t, g, unknown or other
taacatggatgaaagttcaggggcataatttagtacatgtcaaagtttaaaggacatgatttggtagatattaaagtctggagagcatatttttacataaataatcactagaatagtaaaattaaatgaaattagannnnnnnnnnnnnnnnnaacaatctcaatagtttagggagcatttttaacgaccttaaaagttcaagaggtatattttagtacatgtcaaatttcaagggacaaaaattctaattaaccatatataaattatgagtccacatatcattttttttttaaataaaacctcataataataattatgtgtgcatatatattaaatatagaggttttaattcccaattaaaactaaaatcattgaagacaacattgccgataggcaggtaagttgaaaaatgcttttttaattaattaattaactaaatttacctctaatttttatttaattgaaacatgcctatttttttacgtattgtacccaagataccctgacataaaagagtcacatggaaggtatcttgaagtgacaagggcaaaatttgtacaatatttaaaaaaataggtaaaaataatatactttaaaaaagaggttaataataaaagaggacaatataaaaaaaggtatagagtctaatttccttagtattatttagggataatttcaagaaaacgtaaaaataataaaagaaaattacaaaaatatgatttgtttgaaatttttaatattttttaccgttttttagattttatttacatataattcggtctttcgatatatttttataaaaaattctatagtgcacccacttaaaagagatacaccgatatatctctatctattttagtattcgaaataatttttttgtcaaattttttctcatggtcatataaattatagttattt

SEQ ID NO: 137802 - DNA, 517 bp, Cannabis sativa
ggaacaatttcttggtgtcataggtagctatgctagaaccaacatccactctgctcattgttttaggatcagtgagtttaagatagtgaaattgacacaatagataatcttgaagaatttggaactatttattactagtttgaatctgtgatgattaatgttgagtggaattaggattcacttaaaagagtaatagaataagtaactggggtaaatatgttaactgattaacaatcactactacatcattattttcataatatgtctagttattatgttcgtgagacttgcgaattgagagagaaatctaagattactatgcttaattagttctgagtaatgatctgaatcaatcaagctagattagaatagattagtgttgtttgatgataatgatgattattggtttatagggaatggtgctaccttggacttggactgttgagaaataagaatttgtccatatcagaagagtaactctgtaattctgattgatagaaaaacaaatgatttcaaa

SEQ ID NO: 137803 - DNA, 779 bp, Cannabis sativa
gagaaaccatatacaagctgggtgcagggtatcaagtctttaagacggagtcccattttcttttaagttgtcttgaataggatgttcgaggaagctttattatctacaatagtccatgccactgtcttatttgcaatttgcactaacacgaccagggggtcgttgtgtgggaagtggatgtggctggcatctacttcagtgaatgttatcgcatgttccactacccgcggtacttttgcttttctttcttccatgaccaagaatgtttcgttttattcatactgcaaggctcgcgcatacttttctcaaactttgcccaaatctccagcaagatatggacccccaataatgacctataaatgcccgtgttcactctgatggaggcatcaattgtggttttttgattattgtctgcttgggtggccttttgattttggtcagccttgacagacttctgtaaatgcgggttattcttcctgatccaaaactcaatttctcgcttcaaattattacacttgtttgtgttgtggccatagtccgcatgaaaatggcagaacttagatgtatctctcttacttacatcctttttcatgggagatggtttcttgtacggcaccatagactgagttgtcgcgtagattgtctctaggtcgtctgttaggactgagaaggctgtaaattttgaggcattttccttggggtgctgctcagcattgccagtgaattttcccttctttccatcaccctacctgttgtcattgttagacctcttcccattt

SEQ ID NO: 137804 - DNA, 546 bp, Cannabis sativa
cgagtcgggcttctagagatgaggccttttggaaaagagaagatcaggcaagtggggttctatgcgtgcggctaaagaggaatcttgatgtatgaacatgaagttgaaaggaagagtaccacaatcgacgattttggagcccgaatcttcgaggaccagtggctcgggtatgtagaaataacctgtagatggtcatggaacaggccgaagcagaccagcaaattaatcatcgccggaggcggaaaagatgcaagacaaggaatggcgacctctccaaatagaggcattaaagtgagcatagattgttagcctcgtcaaacgtttcagcacttgaaccttaaggtttctcaccttcttcatatattataactggtttgagttattttatgttatttatatttatttattacgttacataacctgtcatatttcaattacaacgagtttgagttattagtttttattcatataactggttatatctttagttatatccaagacatttacttttggtgacttttcaagtgacttttccagtgacttttc

SEQ ID NO: 137805 - DNA, 729 bp, Cannabis sativa
agagtatacatcattccaaacaacattccctggttgccgataaagtcacacaatgcaacttgctgcaaatcctctccaaataacgtgatttggatacacgttgctataaatcctcggggcaccggaattgtgattatatcacgtatgtatttgattcttagaaattcagcaaccatccatttagtgacttagcgattaaagccatgacctttggtgagaataattcatcttcttcatcagcatcgccttgtggagaaggcataggacctttccccttcgacacatcacattttgatggcagttgagagagtggaccctgtacaaaacaaaccataatatatcaaattcgatcctaattctaccaaatttttggtagcataacagctgtcactaaatgccccacaaaattttaaacatctatataatgacaaataatacagataaaatagttgtttattcatccatcccaccgcagcacatatatttgcagaacctacttcactatagttgaatacttaagatattcaaactccaataatcattaattgaaaaactgagtttttgcaaatgtcaataatatatatgaaaatataaaactttgtacgcctgcagaagcagaatgtaattctgttactgcaaaaacaagttttgtagcaacaaaacagaacagacagaatataaaaataattgcaaaaatttaaataacttgacacaagagatttgtacgtg

SEQ ID NO: 137806 - DNA, 910 bp, Cannabis sativa
  modified_base (265)..(271): a, c, t, g, unknown or other
  modified_base (467)..(470): a, c, t, g, unknown or other
gtttagtggtcccttctctttgattcgtcatttaacggaagaagaacattttcttgcaaaccgctactataagaggatgactttcaaggtgtgtggagcggatgatgctgttgctaggggtaggagtaatttacttggaaagaggcataagaagaccacaagtcatgttgcgaaatgttgagttcttgctaattaacatgaagccggtggctctcagttgccaactgatggtgtggttatagcttctccactgaggggtgacaannnnnnntctattgaggagagtatgatcaacttgtctatctcttccaatatttcggcttactttgaccctacttccattaaaagccatgttgaggctcttctccatctgagagatgaagagtgtttgaggggcatcggagttgcggggtgagcaaattacagtgtttctacgatttaccaagtaagtttggaaagaatttgtnnnnacacatatgtagttatttttgtgtattactcatgataattcgacttgtcttatgtaggctattcaagcagtcctctacttgaggtgtgacacaattttgctttatcaaaagagcagggctttgaacaaggagcattccagacttagcaaggaagtggagaacttgaaaatggaaggatagactaccaaatcatcatatgacaagctcaaacagagttattcctcgttgaacattgagttggagcgtgtgcgtgacaaacttaaggaggaggaggctaagtatgtcacattgtaccaggagattgatgatattttgcttgagactactatcaagacaaggggtgagttgatgatacaatataagaaagggctccatcgtggatgggatgtcgatggtgctattgcacttcatgaagaatatttggctcttgagcaagagaa

SEQ ID NO: 137807 - DNA, 1789 bp, Cannabis sativa
  modified_base (449)..(449): a, c, t, g, unknown or other
tttaaatatattacaagtttattttccttatgattaatataaaagtttaaattctgcgctatcctaattagtaatcctgattagggaattaggcttttataagcattttaggtagcgtgcctaattacttagggcgttacaatgaatatgggagaaaatgtacaaccagttgttgccattcaaagggtagaaatctcatgtgtttattgtggtgatgggcatacttttaaaaaattgcccctcaaatctagcttcagttttctatgtgggtaacaaaaatttcaaccgcaacaacaatccatactcaaactcttacaatccagcatgaaagcatcatctgaatttgtcatggggaggtcaaggagcaagttcaagttgaacacaagcacaaggaaaacaatcatttccaccaggattttttcaacaaccaagacctcaacaaccatacnaacctcaaagctctcaaacaagttccttagagagtttaatgagagactatatggccaagaatgatgctgtaattcagatccaggtagcctctctttagaatcttgaaattcaattggggcgattggctaatgatttgaagagtagaccacaaggaactttgcctaatgacactaaaaacccaagaagagatggcaaagagcattgcaaagcggtaaccttgagaagtgtaaaaattctagagtaaaatgtggcagaaacaaagggtagcaatgagccctcttcaatccaaaaagagggggaaacgaagaaaaccagcaagtgcagctgttgaaattcccccagtagttacagcatcagatcagcattctactgcagaaaagcctttgcaaaagccactccaccttttcctcaacgattcgaaaagtaacaagaagatggtcaatttcagagatctcttgatgttttgaagcagctccacatcaacataccattagtggaagcattagagcaaatgccaacatatgtgtaagttcttaaaagatattttgacaaagaaaaggaggcttggtgagtttgaaactgttgctttgaccgagggctatagcgctatgttgaagaacaaaattccacctaaattgaaagatctaggtagcttcacaattccaatttctatagggggtcgagatgtaggaagagctctttgtgatttgggagctagtatcaatttgatgcccatgtctatttttaagaagttaggaattggagaagcaaggccaaccaccgtcactttgcaactagcggattgttccatggctcatccagatggtaaaattgaagatgtcctagtaaatgttgataagttcatcttcctaatggatttcattattcttgactatgaggaagataggaaagttccaatcattttagggaggccattttttgctacgggaaggactttgataaatgttgaaaaaggagagctcaccataagagctcaagatgagcaagccacattcaaggtctttcatcccatgcatactccggatgcaataggagaatgcttagcaattggagatatggatcctaacatgattgaggagttcaaattcaaaaatagtaagaaggggagaaagaagattccccttaaagaaatttctaaggatcacaagccacgagaaagcaaaggcaaagcatcatttaaccttaaaaaactacccaaaaagaagagaaaggaaaataagtttagtagaaaaattcggtctcaaatgtttgaagttgggcaacaagtgattttttctaactctttaacgaaggctactcatggacgactagattcaag

SEQ ID NO: 137808 - DNA, 1421 bp, Cannabis sativa
gcattttgtctattcatgtatgtgctttatgttcttggttctcacggattgtaccaacttgtttgtaccaactggtttgtactactttttggttatggcagttagtagtttaatgttgttttgttaattgttttactaaaccctttagcaacttgaagtgcattctgtgcaatttaaatgaagaggtacaaggtaaccagattggtgtgtttcaagtgttgtgttattgtttatggcacttggtagttaagtgttgttttgttcattcttttgtttgtgcaaagttttgactctttggagtagttgatcaatggcttggaagcaaagttttttgtgtgtcaaacatcatatgtttttgtctgttgtgcatggtgtgtttgaagtctgaattctgggaatgctttttgtttcgtataatttttaagttttggaattcatttaattgaaatgactttcacatcattttaatgtacttgaatgtataacaggcaagaagcatgaaatgtctgttaatctgtgattagggttttcttgttttaggattataatctttttgaaaaagtatttttgttgtaaatactatttgaattaagttgtttttggtgattttaggtgattcttatatacgattttacttgtcttttgctcaattatttttttttctatagtttatttgctgacatatgtagtcgttatctgttaaatttatttttcttttacttgattaggttcatcaaacatggttgggaaacgaaagacgaaaggggcagcagatccctcaaagaaggatgtttcccctcaaccgaaggataatgccgtagcttcgagacatttctcgtaagtcttgagatatggatagttgtttactcgtgtctgacatgtttaacattattgtattatgtttaacatttattgtttactatatgtagcaatgcaaactataaagcccttcgagcagctgagaaggaattaagtgaaaagaggtatgatcttgactgttactcattttttttttatcaattgtccttaattcgtcgtacttgtttgacatgctttaacatgatttccatttactctggagttgatgtaagtttgccccatatttcaagttactggtaaattgaaaattctatttaaagatttcaccgacgatcagaagtctcagtggagaaactatgaccctaaccctactcccgccaagaagccagtgcaaacaagagggaagaaagcaaaggcagttgagggtaaggggaagaaggtggaggtggatgaggaagaggttgctactgaaactgaagaagcgtctgtgtacggtcgatgctccttcaaccgtttaattcagatttgcaagaacctgaagttagagtagaaagatgtgatcctaaatgctggatttggatcattcatcagagaggatgcac

SEQ ID NO: 137809 - DNA, 811 bp, Cannabis sativa
ccccaatctgggtgagtatgcctttccattattgcttaataaggtaatcctttcccataatctcaatagtctccttatataccagattgactatctggtcaaatataagtatcaatattactcaaatcattatgagattataagtggttagcggttaacgattatttatattagttaatatctataaaatttaatattaaattatactaataatattataatattactattaatatcttttaataatttttttaaaaaaataatcaccaaatcatttatgaaaatacgcaaaaaatattaataattaagtatatttaaatttaaaattaatttaaatatataaactacataattgttcaatagattaacgaggactagcgtgcattttagcatttgtcacctgaaaaaaaatctttaaaaaaattacaaataatattttattgtaactgttaaactgtacaaataaaaaatgcaataatattttattgtagctctgcaaaatatacaaatcaattattttttttatatatatatacactaagttatcattattatgcctattgcatatataattaattatatttttaatttttatttttgttatatgtatttttaaaattttataaattaaaagaaattacttattaatttattaaaataaatatattaataatatatattgaacaatatttattataatgtatattaaacatactctgaatataaaaataacaattaaaaaattaataatgttacaaatagagtatattaatatttatggaagaggtttcaatggttacatttttattgt

SEQ ID NO: 137810 - DNA, 537 bp, Cannabis sativa
ccttatcaggaattcaatttcccacttcaagttgatgcattcattagtgtcgtggccatagtctttgtggaatggacaaaactttgatatgtctctcttactaacatctttcttcatgggcccgggtttcttatatggggctagcgactgagtttccatgtaaacactttctatatcttcggtcaaaatagtgaatgcagtgtacttgtcacatgttctctctgggagagctttgttcggatttccggcgaattttcctttcttcccattcccttggccgtggttgttgttggaacatttacaacttgagcttgaattatttgggtaatggggaagttgggcggatgttccagtagaaggagcctttgacttgccaggctcttgctgaccttccgctcgttgaatggcttctttgagcttgatgaagctttcaacacggtcaagaaagtcattcattgagtctaccagcctgttcttccttatatccttccaaagttcgccgaggacttcaatgccccccagtatcgcggataactt

SEQ ID NO: 137811 - DNA, 503 bp, Cannabis sativa
  modified_base (181)..(183): a, c, t, g, unknown or other
aaactagaaactaaaagtttcccgatcgataaaaagcgtggcaataccccaaataacataaaaacgagaaaatctagggtttctaaaaatcccccaacatgcagaccggttgcccaaccgaaattctggttctgggaattttcagaaccccatccggaattccggatgcacaactggaatnnnggttcctcgcagaaaacttcaaaaattcatactttgctcaaatcaattccaaacccaaccaaaactttcagacatgttctaaataccccaaataacatttctaaagcatctacacagtccagaacacacagatatcaaaaatgtcattaaagctccaagctttgagttcgaaactcaaaatttgttaaatctaactaacatacatccaaatcagttcaaacctacttaaacatgcacattataacctctgaaaacacaggaattcgacctcaacaaacacagcaacaaaactcacaatttcacttgaaaaaccatagctt

SEQ ID NO: 137812 - DNA, 512 bp, Cannabis sativa
  modified_base (295)..(296): a, c, t, g, unknown or other
  modified_base (457)..(459): a, c, t, g, unknown or other
aattttttttttttgaataaaggacaacaacaattaaattttaatttccaaggggtgggagcccgaaaaactctttggatgctttatagctatcatttcttattaatcagctacaataaccacctttaaaagatattttgtagtagtggcaattgaaacatgccagagtagggtcgatattcagactgttgttggacctgccacaacttttttttaatggtgtagtgctgcttttcaatgtgtgggactgagaaaaaatattgtgttttggcagttgttggaaatattttaccannatctagatttactaccatgtatggtacattaatatcctaatatgaattcaaaaacaatgaaataaacacatataaagtttaggaaacatttacattggttgcagcggaatataatgactcatttcgttaaacttctcgagcccttgattcctttctgtagnnnagcattatcaagatctgaacctcgatctctttctctccttccttgatgatgat

SEQ ID NO: 137813 - DNA, 1035 bp, Cannabis sativa
ttggaatgatagctttcccttgaccaaagcgcactatagttgggagacagcctcagatcactgtttgtgtgtggttttaatgacaaccaatgtggatattggatttaaaccgtttcggtattataacttttgggctgatcacccagattttacaagagaggttcttgataattggcacaagccgataggaagagagggcatgatgggtttatacttgaagcttatgagactgaagcacacaatcaagaagtttaatagagagagaattggggatgttgggaggaactatcaagtagctaaggacctctatattcaagctagaaatcaagctcaggaacacccgcatgatacaacctatcaacaaaacgaaaaagaggcagcaatgacttttaacactcaagagaagatgtatcacagttttctaagacagagaagcaaagtcacttggttatgtaaaggggatgagaacaatgccttttttcatgccttcctgaaaaaaagaaggatggaaaacaacattgtttcctacaccaatgaccaaggtgaggttatagacaatttcagagaggttgttgatcacttcataaagcacttccaaaactacatgggatctagctcaagacctagtcaaggcttaagaaaagactgtatggagatggggaacaaccttaatagggagcaacaactgaacctgatcaaaccctttactagcaaggaaataaaaaaggcactttttagtattccggattccaagtctcctggtccagatgggtatggagctggctttttcaagaagatgtggtcagagattggaactgaattcactaaagctattgagagcttcttcatgacaggtttcatgccgcgggaacttcatgcttcgatgatcacactcattcccaagactggaaacccgactagggctgtggagtatagacctattgcctgctgctccaccatatgcaagtgtatttccaagctgctttgttcaaggctttctcaagttcttccgggtattgtgaatcagaaccaagg

SEQ ID NO: 137814 - DNA, 815 bp, Cannabis sativa
  modified_base (649)..(651): a, c, t, g, unknown or other
taagggaattaacaatgaataaaggttaagactttcgatttcaattgcatctattgattatggttaaacatgatgctattcctattaccaaattctatgcaatagcacgtttaataaggtaattatagtcttctcagatatataaacctcaactacatgcaaattttctactctcatgataagttaaacatgtaacaggcattaaacacagaaaccctataagttatccaaaccatataggtactcttgtcctatattgaaatttgattctattttactatatcataattgacagtcgcttctcagattttgtatcaaaattataaacaattaattgtcggctaaacaattaaaagaaattaagtgcgaatgaaatagaaaacataaaaattgaggggaaattaaatcatattaaaacaaaaaatcaatgtccaacaatttccatctaaaccctaatgtgttgtttagctactcatgttcatcataaccatttcacacctattaatttagaatagaagaagaaaatagaaaagaaaagaatgctgaaaaaccatctaaatactgaaatggcatcttaatcattcatctctattcagccaaagctcgaaggaaatcatcgtttcacatctaaatacttatagaagctatnnnttccatatctatgattagcgctcacactcaatttaactgccatgtccccatgttgtaaatatccacctgaatgattgattagctttcacgaacaacttgaagagcataaataatacaactaagctgaacctaaccatataaggattaagatctatagacctaag

SEQ ID NO: 137815 - DNA, 830 bp, Cannabis sativa
  modified_base (202)..(203): a, c, t, g, unknown or other
gccacaaagctgcatccacaatctcttagttgtgtattagtgatccactccgagtagttgccctctaatagtctctcattcatgttgtacccaagttgctagctgtgcctggaccttctttgtctttctcctttgaaaatgtctctttcgaaaccttgcacattttactctattgtctcctccaccaagtagatgaccttgnntttaaagtttacaactttccttcggtaatctaatatttgttgatgctctgtttatctctttgaattcaagataccttcataagctattacctccaacaattttagcagatctcttcctacttcttatcttggattctattcgtcacgcatttctataacagattcatatctaaagccttcacatacatagttcccctctaccttaggagtgtgtaacttatagaacatccatcaggatagtactttaaagatctattcttttatcattcttattaagagcgagttttgtgaaatgcgttgttccagtctagtatagcatcaactatcctaagccattacctacttcctataggtttggcttccattcataactaggtgtgcagactgcttctttaaccatttatagacaggtacaattctatgcatcagtatttagttagatattgatacattttattatgtgccttaagttgcactactagtgttggtgatctctggcgcagagcctatgaaaactctttaaaaaaaaaaatcatctcggtcatcttcgcattccttccaatgcctctattagatcattagccttaactattggattttttttttttttgaacatcgaccatctgt

SEQ ID NO: 137816 - DNA, 1083 bp, Cannabis sativa
aaaaagaaatgaagttatggaagataggggagatcgtggcataaatgggaggttgaaattcatgggttagggcttcacaggtgatgatcgtgggttatggcaaaagaaaaagaaaaaaactaacagaaaataaaagaaaaattttaaaaaataatgaaagagaagaagatggcagggatgaaaacccatgacataagcatgcaaaggtatttttgtaattatcaaatttttgaaaatataatattgaaacacaaatttgttataaatgtttaaataaccgaataaagacaaaaatataaaaaaaaaaatagtaaaatgggacaccaagtgtaaaaatcccttatccaaatgcatgcaaatctttttaaagctaaaattaatattatatttaatatgaccaaaatttattatgtgaccaaaattgaaagaggtaatttgttagtggcattaacaaattctaccattcttaaattaacataggtttctatttttctttaaaaattacaagtaaatattgattttgacaatattaaattgaatttcttatactttaaagtaagttggatatctcattacgattggattagatgttaaaaattagattttaattaggttggattagttaatgaatgtatatttcaaaatccaatcaaaaactaatctaatccaattatattggattgaattttgaggtttaattaaattagatcggatgataattttttaaattcaattactaattggattaaattacatttggagaaaatgattagatcatatgcccaactctactttaaagcactactcacattttattttctatttatctaggctaattaggatttttggtctctaaactttaacatgtaccaaatcatgctccctgaatcaagtaattaataaatggctaattgcgatttttgtccctcaaactttaacatgtaccaaatcatgccccctgaactattggaattgttagtgttctcctcaacagtgagtgttttaatatttatactcgcaagtgcacgaatcgtttcggaatataatgttcatgtaagtgcaaggtcgaacccatgggagttg

SEQ ID NO: 137817 - DNA, 843 bp, Cannabis sativa
  modified_base (73)..(106): a, c, t, g, unknown or other
cacccaatgtaaggtttctcataatttatatgtgtttatttatattcattttagaagttcatatttaggttgnnnnnnnnnnnnnnnnnnnnnnnnnnnnnnnnnntggtaaaataattccaacaagaaccgagttgtctccatcgttcttctgtaacatagccgccattactgctctcttgtttgtcgcttgcaaaacggaggctttatgtaccccaaaaagggagaagtttagtgaggagcatagtttaacaatggtaatttgatatttaactatatcttttgtctcatcttagtcatgcttaggttaggtggttcaaaaaagtttctcttcttcttcttcttcttccttctgactcgaaaacaaagctagggttctatggatttttcctctcttctcaacttctcacttgttgccaaaatctaggattcttataacaaaaaattggtaagttaatgattggattccgagaagtattaaacacagagttaaggtttgtcgtttgggtattattaataaaatagtgagattattcctattgtgattaaatgacctaaagtataaattgtaagttatggtatcttgtcttttgacatgcaaagttcgtattggttttgagtgatctgctagcccctgttttcaggtttcagtgctctatttttttcttcttttggttctttggcagtggtacaatggccccagacatggctgaagctttaacaattaaagaggggttaagttggatcaaggatcatgaatggcataatgttgaactcgagtctgattgtctctcaattgatgaagctattcgaagtaacatcaccatggtttcgcctcttggg

SEQ ID NO: 137818 - DNA, 510 bp, Cannabis sativa
tttcttttttgcctgtgcattttaccacaaagtctgctaaggcttggccgttgattgttgttcggggttggaaagtgattttgtactggcccaactctattgcgcacttgagtagcatctagaagcatcttgtttttgcagtatttggcatagtggttggttggtatacacccgaagaagatgagcttgaaaatcaggcctcaacatcctcgttgctagaatgaggtagtaggcgagtttttctattaacgggtatcggccctcgacctcaatgagtcttttactgatgtaatagactgggtgttgtacattattctcttctcttattattacggcactcacggcatgttccgtgacaactaagtatattcccagctcctcatcatctagaggttttgagagtacgggaggttttgcaagttgtgcctttagctattggaaagcattttcacattccgccgtccactcgaactgcttgtttcctcacaggatgttgaaaaatggaacaga

SEQ ID NO: 137819 - DNA, 691 bp, Cannabis sativa
ttctatagattttgtgatcgaaaaataaatcatcattttgatggaccaaaaattatagtttttttcaagaaaaattagaagaggtagagaagagaggttggactccaaactcatgttgatgagcgaaaataattacgcccagtgatatgattgaacggaactataataccactaatactttgagaataaatttgtattaatttagatttaaacaagtggatacaaagaaataagtgttaaatagttgtaatgataatgtattgaagtagtgatgttggttatgtatatactagagattggtcttgctcagaagagaattgtttgagagaaattgttatctatgggcaaatagaaaagtaggtagtatgtttggaagtattaggagacttgatttagttttcaaattttgttatagttgcttaattatccctcacactttttggttagaattatttcttctaaattattcttttattagaaaaaattgtattcatacacatctaaatattgatttagagttcacatagctaatatattctaaattaaatcttatctagagcttacttaaggtttttagaaatttttttcttcaaatgtgtagaaatttttagactacattgttgtagttgtcaggttatttttaatattaattttagattaaatttagtatatttttaattgagttttaatc

SEQ ID NO: 137820 - DNA, 586 bp, Cannabis sativa
aacaaagtttgagttctaaaacttaaactttgtctaaccactaaattaagccaccaactagcttcaaaatagcttaattaacatcacaataactccataacactccaccaaaagcaaaatacaaatacagcaaccataattcacaattcatgcaaaacaaagcttgaaacttaagaaaccaaaaaagaaaagggctaaggagttatacattggtttggattcactaaagacttgttaaaacacccacaaacaagctgatgaaccacaaaaagctgctggttctccaagggtttcgagagagagagggagttaagaaagaaaagtgagttttctttattttctaattttggttaaatgaaattaaaccattatctatctaactaagaaaatgataaacattcagatattaaacctaattaaactcactaaaagataaaggatcataaggcaaaaagaccattttacccccacattaactaaaatgtcacaacaccacttaggagtaatttggtcaattttaaaatcttgactattcccgaattctcaatgtttaactattttgccacagtatactaaaaatactaaa

SEQ ID NO: 137821 - DNA, 612 bp, Cannabis sativa
tgtgaaccatgcaatataaaataatttttgatcttttattaatagtaaatatgtttttattgaaatgatttttatttagggcataaaattctaacagtgtctaagcctatatttttttcgtgtcgtgcctaagcacatatttttttgtgttgggtcgtgcttgtgcctctcagactcgtgctgattttgtgtcgtgtcaaaatgttcggcctatttttacaacactaatcgaaaccaccacccacaactactaaaatcaccattacccaccaacctatttttcaaatccaaatcacaaacaaaaagattaaacaaaactcaaaccaaatttaaacgaattcaaattcaacaaacaaatacacacatatatacacgaaaatctcagccccaaaacccaaatttgaaaacccaaattttttttccacaactattatcttttctcagatctaaatccaaatagcacaaaaatatcaaaatatataggattatttatacacacaaatatcaataaaataatccaaaaaaaaatcatgaaaaactttcgttgtttggcttttcttgggtgttggttttgaaaaccctagatcgagaataagagagagagagagagag

SEQ ID NO: 137822 - DNA, 691 bp, Cannabis sativa
  modified_base (538)..(551): a, c, t, g, unknown or other
aattaatgtaacctatacggtagaggcaacattgctcataccaggtacccataactaaactgaaaaatacatatttcctaaattctcaactaataataatcaatcaaagatcattccgttatcgtgaaatttcttttttgtgtttggtagagatctgatgatattttcaacatacctaaaaatatacatacctcaagtatattttttgttatattgataatccattggtacaaattaccataccaacttatagtgagtctcccgttgatgaagctaatccatcaacatctaagaccctcgtatatttttcccttcattactactaaggttttattccctagttcatacaccaccattgcttccttgcaatcatcattatcttcatacttggttaactactttaaaacttattctacactcaattatataactcgttgtttaataaacaacttactttgtgatccaacatccaccaatcactcaattacgtgtctattaataataataatatattaataataatattaataaaaatttnnnnnnnnnnnnnnatcttattatttcttagccattaagaaatctctatatttagggtatctggtcaacttcgagtaccttaaaatatcccgatatttcttaaatcaacttatcctaataatctcatcaatatttctaactaaaactgttgtga

SEQ ID NO: 137823 - DNA, 504 bp, Cannabis sativa
aatataatattcataatataaatttatcttatttttctgtttttataatattctctattgataatatatgtatcaattttatattttacattttattatattattaagttattattaataattaaaatatatatacttaaataataattaattttaggtcaaatttatataatcaataattattttcactttgtataatttatataattaagaactatttatattattagatatactacattgatgtgattaaattgtataaaaaatttctatagttaatttttcattttctttgctatcaaatttttggttttatttaaattttacaaataattaataacaatttttagaataacactatataaactttttttactaaatttgtttagtaagaaagaagatacatatactttacataaaatatatagagaggatatgtgaatgtatcattataaaagtgtacaagtaaaacttaaaatttaataaatttttataaatacttaa

SEQ ID NO: 137824 - DNA, 918 bp, Cannabis sativa
  modified_base (164)..(169): a, c, t, g, unknown or other
ttcctacttgctaagtgctaataatttctaaatgtgtatgattttgtattaaaccttacttgatttctatttaatgatatttgtagtacccaatttgactaagaacaaccccatggtgtcactgttgaccgacaacaagctctctggagctaactttgtcaaannnnnngagaacattaatattgctctcataagtgaaaatgccctgtttgtgttgactgcagaggctcctgagcagccaggtgagaatgcgaccaagacagtcaaggaaaagtttgagcgttggcagaatgctaacaacaaagctcgatacttcatgctatctagcatggtcgacaccttgaaaacaaggtttgctaatactctcacggctgtagatatcatgaaccaattaaatgaactgtttgggatggcgtcagatcaacctcgttttgaggtgaccaagaattttatcaatgcgtggatgaaacctcatcagaacgtgcatgatcaccagctccagatgactagttacttccaagaggctgagaataatagagttattatagatcaaacaactcaagtgagtttgatcttgaatagtttgactctagcttttctattttttacatcaaattatgtcatgaacaagttggattttgacttccacaagttaatcaacaaccttcagatatttgaaaatttgattggaggaccacaaaaaggaggaactaaagctcctagttctggcactgctaatacggttaaggctgaggcaaacattgcctctgcttcgaaacccaacaaaaagaagaagaggaaggatagcaagaagcctcttaaagttgttagcacatctaataagaaaaatgctgctaatcccaatgcaaagcaaaaaggaaagtgcttctattgcaacgaaaagggtcactagaaacc

SEQ ID NO: 137825 - DNA, 1260 bp, Cannabis sativa
atgatcccatggttcgcacagaaatcagtgaaggattgactgtcaaattatttgtcattgtctgagactatcttgtatggtagcccgaacagacatattacatttttcaccacaaagtcttgcactttctttgatgtgatggttgccaatggctcaacttctgtccatttagtgaaataatcaactgcgaccactgcgtactgtactccacccttgtctttgggtaattgtccgatcaggtcgattccccaaatggaaaaaggccaaggactttgcatctgagttagttcgttgggcgatgcacaaggtatctttgtaaatctctggcacttatcacattgaaatcttcgatcatcgtcggccagaaataaccttgccttagaattttcttggataaaatatgcacagctacgtggttgtcgcagaatccatcatgtacttcagacaaaagtcatgcagcttcttcttgtgtaacacaccaaagtaatggcatggagaaccctcttctttacatgactcaatctacgatgatgtaccgtatatcctttcttctcatttttcgagcttcgttcctgttatctgggagtattgaggtaggctgctattggatctagtttagagatgtgttaatcatttcaatctccttcgtgccagtgatactaggtttttcaaagaattagatggggattagattagccttatcatttatgttgctactcgcgagtcaggctagtgcatcaacagtcgtgttttcttctcttagaatttgcttgagaacgtagcttttgaattgtgcaagcagatcatgtattttgcttagataggctatcatcttttctccccgagcttcgtactccctagatacatgatttaccactaattgtgagtcactggagatatcaatgtgtttgggatgcaattcccgagcaagttttaggcttacaataagggcttcatattcagcttcattattggatgctttaaacctgaatttgactactctgtgtagacgtcgcccccaaggtgtgacaagggcaatccttgcaccagacagttgatctgtggccaacccatctacatgtaatttccaggttggttcgcctttgctgttgctcggctgaggttcttgtactggctccggattattttttgaagtgctctctgctttactcgtacactcaactacaaaatttactaagtgttgggttttatgccctaaataaaatttcattcaatgtaatctctatcatttaaatatca

SEQ ID NO: 137826 - DNA, 743 bp, Cannabis sativa
atatatatgtatatatgttacatgtttatgagatatgtaacatatgaatttaatattgatattatgtgtatgttacatatgagatgttggttagtaacatacatatatatattatattagttagcatataattattattttgagagttataattcatgcatgtgagttatatattaattttgtatattaatgtacaaattatataatggatatgataataatgtttattactattgatgtagagattattatcatatatattgtgaataaagagaatttaaaattctttttcaatagtaattctgagaaaagaaattgtaacttgtgagaagttacgttctttaagaataaaaagtgataattatctcattttatgatataagaaaagtgaaccatgagagttacacttatgagaattgtcttgtcatagcaagaacaaatgaatcaaaagtggatccaaacttgtgaaattagtcataaattggaagagcaattttggactcaaagttaatgaatcaatgtggattcaaaaattatgaaaagataataaaattggagaatcatgcaattttgaatcttaaataattaaagtggtgaacaaaattgatgagaattttgttaaccttaaagtaatatttgggttaatctcattaaggagataactttaaaataatgaataaaaagaatcacattattttataagtggtgatgtgagtttaatattttagttttgttgagaaaac

SEQ ID NO: 137827 - DNA, 932 bp, Cannabis sativa
tcaatccctgtggagacgatactcgatttatcactttattacttgttacgattgcgtatacttgcgtacacaatttttcacaacacaaaacaatgttgttaagacaaataaaattcttattttcctgcaaatgacctagaacactagaaaacacatatgttagtgcaatattatttgattcctcgtcatcactactttcacagtaagtaatattcataacctttttggttctttttaaaatatttgcacatctcgattatatgtgtccaaaaccacgatattttctacgttgtacaccttttttattgttggatataataaaagattttgaatataagttttctcccaagaatttagacacacttttcttgttgccaacctttgaagaacgagatatagagtcactttttgcaaagaatgacatttcacacaaaacaagtcaaatgaaaaataaccacaagatctcactaagagtttaatgaacctctctaatgccaattgagattctgtattttaatattaccaatatattatttgattaatcaattaattaaatgcggtatatatttttagtttattctacacaatttttttgttgtatatttgtgcatttgttttgttattttttagttatttttagaatatttttttttgtttaacaattattttttagttgttgttttattcatgtatatttttttatggtgtatatttttgcttcctcacaattagtttagatatatattatatttagtttattttttttgacttgacaggttttatttattaaaaaaatataatgaaatgatgataagattttttttatttttttaattgacataatatatagtagtagatattggcacatcaattatatattacacattatattatataccctattttaaaattataagattttattatttcta

SEQ ID NO: 137828 - DNA, 698 bp, Cannabis sativa
  modified_base (42)..(51): a, c, t, g, unknown or other
attcatattaggatgtcaatgaaacatacttgttagtaaatnnnnnnnnnngtaaaataatttccaacaattaatcctctttgtgattggctgaaaagatatcggacgcgggagccatgggtccttgaatgcctaaacttgcgttccatcacagatggatctttgaagaatgtatttaagcaactccattccctagatcaaactcgaccaaatatgagatgaagcatccttttcagtggcctttaggttagagcaatttggaaaatatttatgtttcagaatttgaggaggcaaggaatctgggtatagaaataatctccacacttgtttagccaaaaaagcttgattaaaaagttaaaaatcccaaaatcctagcccacccatcgccttaggctgatataccctttcccatttcacccaaggaatcttcttttgatcaccatatcccacaagaattgtctaacaataaattttaattttccacaagttatcacccaaagcttaaagacactcattgcataagttggaatagctttaagaatatatttgataagtacctctctcccacccgctaaaaagaaactcttccaccttcgaacacgcttcctcaccttctcacagatccccccaaatgcccactttttatttctaccaatcaccgtaggcaaccccaagtacttgtcatgagtagccaatga

SEQ ID NO: 137829 - DNA, 558 bp, Cannabis sativa
agaaccatggagattaaagcaaaaatagtatgatgttttattcttgaaatgtgggtaacttgagaagatccatggaatattagaaacatgtcatgggtatgtttcataagggttatattatcttagaataatctctttccctgacaaagtgtttgtctaaaagtgataatcaaatgtaccactgattaggtaccttaataagtgtggtacgagagaaatattagatacatgttcactggagtatgtagccaggtttcctattagctagccttaactcctatgttgtctggagtagatagtgtgtttcatgtttccatgttgagaaaatatttattaggctcgacctgtattctgagttgtgatgatgttaaacttcagacaaatttattatatgggaaaaatatcttgtccaggttttgggctagaaaaaggaagcgctataaaatgagacaatcccactagttaagaaagtgctatagaaaaaatagcaagatagaagcagcaatttgagagttagaatcataaatatggggctaatatcctgaattgtttaaataa

SEQ ID NO: 137830 - DNA, 681 bp, Cannabis sativa
gaatttatattttgctgacaaaaagaaaaacataaacatgcttcaaataaaaaaaaaataagtattgtttgaataattaatttattatttttaatattaaataaaagaagacaatatgaaatctacttcatttaacatccaaaacaaatgtcaattttcaggttaataaactggcaaaaaaaataaaataaaataaaatacacatattatatgaaaaatacctcaaatacttctatatatttttatccttaattgacactgaacatgaaccttcatgttggctttccgactatttgtctcaatccacttaattctcgccacatacaaaagctttcaagtatccaaaaggtcaagcaatccccataaaataaataaaaataaaaacaaaagataatccaaatattgatcgataaaaaaggaattagaagagaaaataaacacactcgaaagtaaaagagaaataatcataaatttacgaaaataaaagaaataactaagattgtaacttacaattttgtatatacaatcaaatagatcaatttacataaaaataataaaaaaaaaataataaaagatgagagagcggctgagagagagatatgtatacacaatcaaatagattaatttgcacaaaaaaaaaaaaaaaacagaatttgagagagcggttaagagagatagaaa

SEQ ID NO: 137831 - DNA, 1008 bp, Cannabis sativa
ttaggaaaagatctgttagtttatagggttgaaaatggtatgagttttctgtcgaatgtcaaatttttttgggtttttaagaggctgggtccgatggggcctgatgccagtctgatgcccgtccgatggcacacaaaaaacttaaattcttggtttttaaggttggcccatcgaacccgaccttaaaaacccaaaaatttaagtgctttttgtgtgcaatcggacgacatcggacgagcatcggacccaaacttgaaatctcaaaaatttaagtgtgggggttcgcgagatagagagagaaagagagaaagaggggaaagagagacgggtttgaatgagggggttaatgtgagaattaacaaaatattgtcccattttactaatataggatatttagggttaagggaaaaattttcccgtaatgtaagcaaaaaatttcaaatttgccttcagtatttgcttatctaagtaatcattggatataatatacggaaattttcattctttttatgatttttgaggtgcaaatttgtgaaaatatatattttttataacttttttttttttttgtgaaaattctaaataaaaagttaaaatagattggcttatttgtattataggtccataaattatataagatttagtatgttggtctccaaatattattttatgataaattggttcccaaattatatacgtcttaacaaatttatcttcaaattttttttttttttttgataaattagtctccaaacttttattttattagcaacatcaaatctctactcttagatattaatatttttgttcctaaataactacaacaattaggtatactatagtatatagctacggtttttataacacaactctttaaatgtcaattttcaatgagcggaaaaattgagatgcttacttctcttttttattaatctgctgaaaaaatctgtcaagtaattttaacttgtttttttaataaatctctcttcacaaaaaaaaaaaaaaaaa

SEQ ID NO: 137832 - DNA, 631 bp, Cannabis sativa
tactatggatttttttgggtttcagttgtgctttgtgataattaggatttgcttacatcagttgcctatatttttgtttattcattatgttttgttgctgcttgtttttatctttcttgttttagtatgaatgttgtaatttggggttggcttgtatatgaactgcaaagaaattcagaattttgtttaatagtttggtgattgagttttgtggattttgatcatttggagtgtattgataatatttgatttaattgggagtttatatctatattagatataagagttttggtttgctgcatgaattagtgcacgagtaaatagctttcaattgtctttactcttcattttatgacacaacgagtaggtatgatcaacctgaaatgatattcaagtattgctcaaataatctgtttttttttttggggtatgattgttggatctaaggagtggtctgttctttgattcttgggttttcttttgatctgttcttttgattcttgggttttctaaggagtggttttcttttattttttttgtgcagcgatctcaggtgacagtgtttgaagctcgccatggatctcagctcggggtttgttggaatcacgttgtggatctcgactcatggttc

SEQ ID NO: 137833 - DNA, 609 bp, Cannabis sativa
  modified_base (109)..(110): a, c, t, g, unknown or other
gtcttgttctagggtcctggtttagtgattcttgtccaggcgctaattttgggtcccaggtctaggtttgggttcgtatttaggtcttcgtctgggttctggtcctagnntgtgtcccagatctagacaccgactactggtctgttccaggccccattacccaaatcccgagtcaagatctggatcactgtcacgggtttcggtctggttctggttcaggtcctagctcccgtttcggagtttgggttcgggatcgagacaggggtgcggttctaggtcccgaccctagttatgtgtccctagtctggttccaggtttgggtctgagttcaggttcgggttcgggtccccagtcaaggtttgggttgggttccgggttcggctcttaattccggtctaggtctgatttggagtctgggacctggtccggttacggtttttgatctaggtccaatttcatttacgattacaaatccaagtcctagttctagtcacgataaacttccagttttggttcaaattttgggtcacagggtacgagttcgggtccactttttggtttgggactgggttcaagtcttggtgggggttcgggtccagggctgggtcc

SEQ ID NO: 137834 - DNA, 620 bp, Cannabis sativa
ttctgagctaagattatcccttttgaatgaaatatttgtttatcgtttctgctatttgatcaacacaagagcataaatttgaaagaaattcagctgaagtagaagtgattcctccaccactttcaatcaaatcacaaaactcactgaatttactctttacttcactatgatgatggaaaattgaagtttcaccatatatttttttggatacaagacttttttctttagcaatgtggcaaccaaatatgcaatacttacaaactaccagaaccaaatttatggaagaaattctactccaacaatccttggtctttagcatttatatactaataaaagaatatctgtgagagatgcaaatttcagctataaaattgagcctttcatcgaaagttggtcgactagaaaaatcactagaaacatacatcctcttgatcttccccaatgtatcattcatctatcttttgatagctttatgccagagcaatatatcatctattggatgtgaaccagtttcactttcacaacttgctctgattgtttaccttttaatgtggtctaatagtgaaagtagttcatttgtacagaataaattctttgaatatgtattaaagcattttatt

SEQ ID NO: 137835 - DNA, 558 bp, Cannabis sativa
ctatgggaagacttcctgtagctttatccagctaacggtaacaaggcttacaaccctagcgagtcagaagaagtctttgcaagtaagaaccgcgatcgacaccatacatacatcgtcgacctcaaaaaaaagaatggccctagctcgctattgggatcgctataaccaagttaacgctaagacatacaacaattaaagacgtatttaatacacgattgttttcaccaagtaaaagcgggaaaatcacaactatacaattttcaaatcataaaccacatttacactacatgatatctaattcaaatcccatgattttagcgatgattgttttaaacatattctagtcaactttgtaattaactgtccactatgtaattataaatagtgacagacaagctcaaaaaatggacgaaaaatctcatacaagagaggccttaaaaaaacataattagaaatctgaataagattgagtcctagactatgtagaattttaactacaaaaccacgtaaaaaaccctttgttcatatattatttttctatagcttttatttttttct

SEQ ID NO: 137836 - DNA, 596 bp, Cannabis sativa
aattgcaaacagatgagtataaaagaggtataaaaagataatataattatattaacaaagccgacataccatgaagtggcagtccaaggcccttgaaagcatctcctttgggctcctaagattgagaaaatcccaatctaggggaaggagagtttgaagtttgcgccaacaggcgaccccgtatgcctgggaaaatttagacccagcttctccagctgcgaccgacaggctcttgatggcctgactcagagaagcagtagcgggagtcgcctcgggatgaggggcattggcgttgggaacaactgaatgaggaacttgctcttggatctcgttgttcgaaacctcgagatcaataggctcgctcggtaacttcttcttttgagcagtggttttcctttgcttcttgggaggaaccaccttagcggcagtaggaactccagggttggatgtcttcataacccatgtctgcaaaataagacgaggtgttacaaccactataaaaaccgattaaaaaggggaggagtataattttccacctaagggatttaccaaaatcactagaaggcaagctatcactagatgaaggggtagaagga

SEQ ID NO: 137837 - DNA, 550 bp, Cannabis sativa
catctatcaataccataaaatatctgaatggtccacatggtgggcaaatagggccacatatgtcgccctgagttcgttcaagaaatcaagggcattcaattccaacctctactccaacctttactggtgagggcttaatgattaactttccttgagaacaagcagcacatgagaactcactggataatagaatcttctagttcttcaatggatgaccatgtgagttctctattattctacgcatcatgattgaaccgggatggtgtaaccggttatgccaaattaataacaaatgaatttttttggtttgtgaacttctcgctcacaataaaatgagtttctattgtacttatacgtgtaacgtacaaacctgaagacaaactaggtaatttttctaatatgcacttttttcttgaaacaatagacgtaatacaaagatactcaaaactattttcatctattgtctcaatatgatatccattacgacgtatatctttgaaactcaacagattcctttttgatttggtggataataaggcatcatctataa

SEQ ID NO: 137838 - DNA, 508 bp, Cannabis sativa
gccacaatctgcaccaatatatctcatcgtctaatcagacgggtccatacctacgccctatacatattatatgttactgacgcccgtacctacacctgatacgtcgccaggaaaattgcatcacctaatcaggtttgctcgtacctatgctcggtactcatcataaatcattgacacatgtacttacgcctagtacattgctaggaaaattcatcacctaaccaggtaagtttgtacctacgcacggtactcattatatatcagtgatgcccgtacttacgcccagtacgtcgctaggaaaattgcatcacctaactaggtgagctcgtacctatgctcggtactcatcatataaaactgatgcccgtacttacgcccattacgtcgctaggaaaattacatcacctaatcaggtgagtgaatatatcacatgcataatatcattacattatcgatactcaaccaatcattcttttcattatataacaatattaattatatctcaata

SEQ ID NO: 137839 - DNA, 567 bp, Cannabis sativa
aacttgaagcacaatttagcaaaactggtgtatggccggctccaccaccagggttccccgaaggatgtcgtcgttgcaaattaggcatctttaatggtaagcgtggatctttatgcaagtattgcaactctcacccacaagccaaacaattttaatttattagtttatggtttgtggtgagttttatttaatgtttgtttttttttatgaacttttatgttttattttaatgttattttatgttttatgttttgtgttattttatgtttgaatgaactttgatgttattttatgttttatggttttttttcaatttttgagttcaaaatcgacaatacatcgacattgcatcgatatatcgttgacattattggtcgacttaatgtcgacatactattgacaaaatgtcgacagcttctcaaataacttatgcatgttaatttgttttttcattgacatgctatcgacaacatgtcgataatggtcatcactgacctttcttggcagactatcgacatagcatcgatattctatcgataaagcatcgataacatctagaaaacccag

SEQ ID NO: 137840 - DNA, 1398 bp, Cannabis sativa
  modified_base (413)..(419): a, c, t, g, unknown or other
  modified_base (909)..(914): a, c, t, g, unknown or other
aatttggtcactaagcatgagatcatcgccattacactcttgattatcataatcttttggttgtgtcgtcaagacaactgaccagcgtgcatctaatggatctctcatgtaaaatacttgattggcttgggatgctattataaacctatcgaacttgtgtctgattcgattcaagtccaccaacttgaatccaaattcattgtctttaaccccattatcactcctaacccaatcacaaagaaaaatagggattcgaaaactactgtaactaattcccaaatttcttgaattacaccgtaaaaagacatgtcacattcaataggatttttatcttttgaactagatatttagaaagtcttagcaacaatcataacactactattttgtatttttctagatttatcacgggcttnnnnnnnaaattgagtactatttatatagtacgatgggtacttgagtacatcacacgaaggacctcatgatatgcaaagtagtgtgttcgatacattacccgaagattcacgcatttttgcatatacctcgtgagtactattttagtgttagtttatgtataatattttgagtaaattaattgaaataatatatcgtcaaagcaactttttttgtgtagaatactttatttgaaatatcaagatgattgtgttataattaatgcatatatagactgacacaaagataagtgaatattttgctagattgtaaatacatctgtggcaataaatgtgtgacaattataagatatgttgtgtgagaaatatgttagtccaaagattaatctattgtttggcacattattattgtcaatgtttgattgctacatcaagtacatcaagagtaccacttacaattaatattactgtgcaaagacttgatattaatatgtgtttnnnnnnttgagatgagattaactaatttttgaattcattgtttaattatgcatattaatgtgagcttttttatttgttctatattcagctagttcatcttctactacctcagtatctgctaatattaattctatattttcatgcttaatgagaccaatttcaaaaattgaaataggcaagttcggttcacattacatgtaattttaatgctacgcatctatgattgatctatgttatttggctatatttttatatgtgatcattgatgggtttagtcatggttgatatgacgaaaactgctttgatcctatacgggtatagttgatggacgagattattgtgaatatctttacataataataaattttgagctcatatggttataaggtaacatatgttgtcaaagtgggagataattgggttaaaatcttattgtgggtacatatgtacaatatatatgttattataaagtgtgatacaaaattaagtg

SEQ ID NO: 137841 - DNA, 652 bp, Cannabis sativa
attgaagaatagcgaggcatcaagtacattacgtctagaaagacgaaagcgaaacatgtcaactgcaagcgaggtgcctatctcgctatgggaaggcttcctataacttcactcagttaacttcagacattttctcagtaaggcttacaatccctacgagtcaaaagctaacattcaaacaagcctcaaagaactctttgtaaataaaaaccacggtcgtcacaagacatgcatcgtcgaccttagaaggaaaaatggtccaagctcgctattgtcactactataaaaagtactattcacgtcggtcaacgctactgttcattgcgttgaccgacgtgaatagtatagggaaacgttggggcgtcgttttcaaactgaagaaaaaaattattaattagcgttatttactaaaacgtcgctaatataatacccgacgctaatatcgaattttctaaaaaaaaagttactttcacatcagtttaaaattgaagctaattttcctagcttcattcctaaactgatggtaaaaggatttgattctatgatacgccgacactaatgttctataattaccctaactcccatatcgatttacatggactcttcacttcgtcttcaaccaccgaatcctctcctccgctctggcgattac

SEQ ID NO: 137842 - DNA, 612 bp, Cannabis sativa
atgccccccagtatcgcggataactttccatcctcgattacccgcgaaactttggtcgcttctgtcatgaatctgctaatgtatgccaggagtgcctcgcctggtcgttgctttacttcgaccaagtctcccaaatgcaatgggagctgacgtgaggaggagaattgcgcatggaattccgaagagaaggttttccatcagctaaactttccaagagccaacttgaaataccattgttgaggggctttcgacagagtggcagggaagattctacaacatacatccccccgtactccttgtaaatccatttgtatctcaaagtacttgagatgggaaagaggatcttctctcctagtatgcatcttccacgttggcattttgaacttgtgaggcagtggcaggagattcatctctggtgagaagggagttctgcatgctcggtctaactcaagatcattattacgctgtccagccatgccatgaagcatatttttcaattcgtcatgttgtgcctgtacggctgggctaacctgctcggcattctagtggatttggattacgtcagcgtctttctaagcggggatttgagtacgagctccaggctgcacgatc

SEQ ID NO: 137843 - DNA, 602 bp, Cannabis sativa
ttttctgaaagttttgctgacactttatcatattttgtttaatctccaaagtagcagccttcaaagagttgctcatatcaataagagcacgttctagatctcgtgataatacaggaggatagtaagaagttggttgaacatattgattaattccattgtaggaagtgctagaataatctccccattgttgattgtatgtgtaagtgtcatagtagggattatattgatacacttaaggcgaggtataataaggatcatagtattgttgattgtacatcgccatgtttctaaaggaagatctgaaaattaaaaccacaactagaagcacaagttagtaacaaaaattaaaaaaaaaaatagaaaaaaaaaattctaataaatttttctttaaatatctatcttttattttgatttcttaaaaaaaaaaatctaataatttattcttctaattttttttaaagaaaaaattaaaaatactaaaaattaattatgaataataaaataaaacaatagtccccagcaacggcctcaaaaatttgatgcgtgtcgtaagccacaacaaatttactatttttttttaattccaatactttcaattattt

SEQ ID NO: 137844 - DNA, 525 bp, Cannabis sativa
  modified_base (92)..(108): a, c, t, g, unknown or other
ccgactgagtgtttttctctccactgaacccaaccaatactgtggacttgccgacgatggtggccttgtcgatccccatctcccttagagcnnnnnnnnnnnnnnnnntagcagagctaccgttatcaatcagtacacgtttagtagaacaattcgaaataaataaagaaatgactaaagcatcatggtgaggattaagcaaatctgaagcttcgtcgtccacaaagctgatggtttggccgtataggtctggttgtttctttggtctaccctgtgtcccgactatttcacatgcatgcctcttagcggctgagtatgttatgtcgctgacctctgaccctctagagatgacattacatgtccgagtgtactaaggtgcctctgttggtgttgtcggcctcttgtctacttccgtcacggtcgttttttccttgtctgataaaaaatctcgcaattgacctttgctatgcactctggagtggtatgtccgtggtcattatgaaattcacaccactttgtcgtgtc

SEQ ID NO: 137845 - DNA, 523 bp, Cannabis sativa
  modified_base (488)..(498): a, c, t, g, unknown or other
aatattatttataatgatttaagtgttttaaaggtaaaacattaatttgtctccacacgtctatggataattcatagcatctctttattaaatatataaagcgttttatgtaattaatagtgtgattttgaatttatagtggagtcagtaggaattaataagttaagaaatttactcgataaatttcaaatttgcttattagaagattgatttcatagtctgatctgatggtctccacattatctgagataatatcaccttgtagactcaattaattgatttgataagttaattagaattcaaaattagactgtcttatttgagaattttcacttagtttgggtcaatttcagaaaaaaaaagagacataggagttaatttactaattaagacactttgtggatctaatttataaatatatttaaattaaatttttgtttgataattatttataattattaaaataaaaattgttgggttttatgccnnnnnnnnnnntccatttcaatgtaatccattttat

SEQ ID NO: 137846 - DNA, 649 bp, Cannabis sativa
tatgaagaacagccagttcagatcctcaatacaaaggaaaaggttctttaaaacaataccataacattggtcaaagtactctggaggaacagtaaggtggaggaagtcacctgggaattggagtccggcatgagggctcaatatccagagttattcaggttagatttcagggacgaaatctttttaacgggggataattgtaatgactgcatgactagagtatgaattcgtagggcaattagaattaatttcttttattttattattatatttgaatatgtatgttgtgggctccatttttagaaaatgggcattagagttataatttctcaattttggaaattttattaaactctaagtgtattaattatgccatatgtgaaatttagaattttttataatttttgggtctttgagttagtctagaggtccaattaggctatagacaagatcaaggctcagatgctttctttgcatagcagaaagaaaggttatattgatcctaagcgcagaaccattgagtttcaagtgggagaacatgttttcctgcaagtctcaccaatgaagggtgtaaagtgctttgggaaaagggaaaagttaagccctaggttcataggaccattcaagatactcaagaaggttgggcagg

SEQ ID NO: 137847 - DNA, 1097 bp, Cannabis sativa
atgtatgttggcttttgtactatctgacaatatcacatcggtacgcctagagtacgactagcgtaccgagtataggctgatatggtcgatagtactatactttttgacagtatcacatcggtacagctaaactatgacaagtgtactaagtataggctgttactatgtcaaaagtacagtcgtacgaacgttctagactcagtaccgtgtgggacatggggattagggttatgattgggggtatgggcgtccaatcataatccaggttattattatatgcttttcttactgagtttttttgactcagagtgttatttccatgtgtaggtaaagggaaggctaaagttgaggaaccgtgatagcgagcagatgaagattgtacatgtcggggcggttaagcctggagcgtacgatctttgggacatcatgaatcatgactttttctgtttgtgtttggtctttggtcgttggtcgctaggcgacaaatcttttgtatatgagtagtaaacttttgtaaatgtatttcgtaacgggatcctggggttatatatttgtattactttaagtttttaattaaataagaaaactttaattaatcacgttttccaataacctcgttgattagcaacgagctgcacagtacgtttaaaatcacgctaacatgcctgagatagttagggtgttacaatttggtatcagagccactaggttgtcttccaaagatcgtcacgacatgtgcaattatcatcagcagccagctcgtttcacggttctgtaagcttttattgctttaggagtttattttttaatagtatgatttaagaaaagcttgtaggatgcatgttagtagcctgatagtagactatgcgcatgtttttaatttccgaataagtggcattagtaagtttttctttgatcacgatctgaccagactagctcttggttacacaggctgttcaaattagtatggacgccaggcgaaacaccaggagccacgacaattcggttggatcaagtggttgtcagggagctaagatttcccgtaatattcgtggccgaggtagaggtcccacgggtagggcacgtggtcggggtga

SEQ ID NO: 137848 - DNA, 844 bp, Cannabis sativa
tgattgattgtcacagagaacatctattgggccttcaagtttgattttaagttcatcgagaagacgtttcaggcacattccttcacaaattacatgtgctaaggcataaaattctgattctgcactgctgtgagctaccatttgttgcttcttgcttcaccaagatacgagatttccccaaacgtaggaatagtacctagaagttgatcttcggttagtgagagaactagcccaatcagcatctgcgtatattttaagatctttgttgagatttttcttgatcattaactattttcctggtgttcccttaaggtacctaaaaatctggtagacgacatccatgtgttcctcaaagggattattgagaaattggctaacaacactcatagtgaagcttatgttaggccaagtgtgagttaggtatattagttttcccacaagacgttgataccttcctcgataaacttttgttccatctatctgtacttcaagtttgatattagggtccatcagagtttcacttggcttgcatccgatcatcccagtttcctgtaagagatcaatgatatatttccactgagtgactgagataccttgtttggatcttgcaacttccatccccagaaaatatcttaattggcctagatctttaatctcaaattttctagagaaaagctgcttgagatgagaaatttcttccacgaaattatctgtaaacacaatatcatcgacataaataatcaatgttgttaattttctaccaactgagtgtttttttaaacaaagtatgatctgattggcactgggtgtaaccatctcctttcaacacttttgtaaacctgtc

SEQ ID NO: 137849 - DNA, 831 bp, Cannabis sativa
tggtaaaataatttccaacaaggcattcctgctgccacgtgttacaatcccaatttatgagggatattggtatttaagctctttgatacgaaatgattttctcattttatctctcattcttaacttcttcttcccctttttatttgaaatattagagatcctcgtccgtcttccacccagatttactttttcttcctgaatctataagatttcagaagagatcgaaaccaattacagggaacaatcagaaaagctaaaggttagtttctaatccacttgtgtatttagttttttgaaaaaaaatgaaaactatctttctgggtttttgacattttgagaagtttgaatatgtatgttcgtagggaatacacattgggctgtatttttctgtttagaactgcgtaattttagaagaaaaataaacctgaaatttgtataactgtgaactttaggaagaacattttgaatattcgcaccttccttacttgtttatttctggaatactcgcgggtattcggatgaacacttcgaatactcgcatatctgtctcctttaggttttcccagagacttttatcatttttacccgttgtttagaacttagggttttattctgttgtgggaatactggttaagtctttcaaatggtgggtgtgtcaccgtattctaatgttcatgcgtgtgatcacgtgttccttgaagtactgtgatacacccagccatttgcgacatacgtcagtgttctcagttcccatataaccatattcttcgactagtagatttgctcgaaatggtgggtgtttcccagtaacttcagggtcatgctcgaaaa

SEQ ID NO: 137850 - DNA, 604 bp, Cannabis sativa
agcacacatcaatagctaaagggagttcactacttggtgtgtttcagagatcagattagcaagatggattacaaaaggttgcggcaaatcacagatggagtctaaatttgtttaagtcatttgcttttgtaatctttgatgctttactaattgatttaattctctgggcgtggccccgtggactagtagtgtttgaaagaacagtgataccacgtacaaatctcttgtgtcaagtgatttaattttctgcaattatttttatattctgccaattctggtttgtttctgcaaaattattttctgcagtaacagaatgacattctactgctacaggcgtatacagttttatatttttgtaatatatattgatatttgcgaaaatcagtttctcaattgttatcagagcaggaaactaaactcttagtgtgatcctcttaacgttttcgtatatttttgcaatatgtttccctttgtagaaggaacatctattgtttgcccaccacttctcaatgattcaaactatccttattggaaggttagaatgagagcctttatcaagtctcaaaatgagaaagcatggaggatggttctttcaggatggtct

SEQ ID NO: 137851 - DNA, 684 bp, Cannabis sativa
tatttcttgcgagcaggtacatagggttgattccacgtgtgaccatcgtgtgattccatgtcagagtgcaaaaatttggataacacacctgctgccaagaaggaggctgctggcagcctcacacgcgctcgcacaagtggtgcgatgacactcaatgcatctgatttttcaaaacaccataactctctcattttttatcagaatcgcatttcgtaaaaaccaaaatagcttaatttttcacaaggaatccaaataaataatttttagaacgaaaataaaattgttttcatggaaaaattttgtaaaacacattcaatcatcaagtaacacattgttatcccaatttttgcagtctgacgcggcatcccataatggtgacacgtggaatcaatttggagtatctgctctgagggtacattccgaacaggatgcctcgatggcatgcccagagcaaagcaatcagcgatccgcccagagcaagcaacacttagcgaattcagctttcgcattgtgagtcatcgaagaaatccttataacttggggatcagattacagagatatgacatgctgcccaaatcacatgatcagtgtatcctgcatttatcatgcaatctttctgcttatatccattgtaacgagaagggaaacacttcctctccaagttcacagccctataaatagtga

SEQ ID NO: 137852 - DNA, 904 bp, Cannabis sativa
ttctaataggaccctataaaaattacaaacaaaattaatgatatgagtacaagaatatgatatagacaagacaatgtttatcttattattacaaaatatatgatatattaaaatcataaaaaaaaattcaagacataagtcacataactttaaaaataaaagggaactactaaaaatgagttttttttttcttttgcaaataaaatttttatgtatatcaatatatgagcaatgttttgaaaatcaaatggtgatcatttttttttatgtgaattgatttgtgactatgagtgaatcaatagtgaaattgagctaggaaaataaaatccagtattcattttagtttatctttaatatttatacaacatcaacaacaacaacaataacaatatataaatactaaaatacacaaaacgctatactactacaaaaatttcaaagcaaacaaaacaataattaaaaaagaaatgaattaattaagaagcccactcactaacactttcctactaatatatagaaatatatgataacaatgtacaagataataagtaaataacaacaagtaaataaattttaatttaaataaatatagcaattgatcataaaaattaataaaatattaactttgaaaaagtaaaagcttaccattacaatacaaggagatagaaattgaaaagattgcttttttcttataatattgtatattgatagttgatgagtgatgtggattgaggattgaggatgaggaggattaggatagttcgtaaattgtaaattgtaaaggtaatttttttttgagagattggaaatttagagtcttgagaagagaaagaattttagagaaagagagagagttggtggagcttggtgggaaagaatggaatattgagagagagagagagag

SEQ ID NO: 137853 - DNA, 944 bp, Cannabis sativa
aggcaaaaagataaaagttttgcagacagattgggggggggggagtttagatccttcactgaacctttgaaacaaataggcatccttcatagacatcctcgtccaaccacacatgagcaaaatggtcttgttgaacgaaaacatagacaaatagttgaacatggtcttagtcttcttgctcatgcctcactacccttaaaattctgggatgaggcattcagatctgctgtgtatttacataacagattacctactcctgtattacatcagcattctcccattgagatgctattcaatatcaaacctgagtactccaacttaagaacttttggatgtctgtgttatccaaatataaggccttataacagacacaagttggcttttagatcatctccctgcacttttgttgggtacagtttgaaccataaagggtataagtgtatagatagctctggtcgtgtttatatatctcgagatgtgatctttgatgagtccaaatttccttttaaatctcaggctatttctcacctgttgctccagataatactgatactttaccatctgctaccattcccacctcaacctacacccctgagtttttattccctgatgatcactcacagtcttcacaccaaactcctatcttttaccctgctaacatagccctgcctcagctctctgtatccacttctactcaacctgtgcatgcccctgactctctttcacagcctaaccttgattctgttcaacagcctcctgtgtctgcaacttcacctgctcctctctcaattcccaccacagttgtttccaagccttctgaacttcctcaggtacctgtaaccaacaaacattcaatgaaaacaagagcaaaatctggcatattcaaacctaaggcttacttggctcttcaagaaccaacaagtgtcaaaatggccatgaagcaa

SEQ ID NO: 137854 - DNA, 575 bp, Cannabis sativa
aaaaagaatgaacgaaaaagaacacgtgtcagcaaaataatggcaaaggaaaaataacccatgcaagcaaaaaagacgtagatgatatataaagaatgatcacgtaaaagaaaagggattaggaactgaaaaaaaaaagaagaacccttaaaaagaaatcttgactgttttccggccaaaacagggaccttaaggttcaagatttcccatgccaccgtctttggatcaaatctcagaccaagagaatgaaacttgtcactgattatgacaagaaaattgccaaaaagatagtaagtacatattaatcgttgatttagtactaataatgagttaatatatataaatcatatactaattgcttgaatacatgcattaggctcaactagaggagcaagttagtcagggacaagttcaagtctgtggccaaaatgacattctggcgtaggcgctcgggacaccagagcctgtcagggctgctaggtatgcttgtaatatcccgataagcctaatggtaaatattaaggtttatatttatattatgggttaatcaggcaataagtgggattatgatccta

SEQ ID NO: 137855 - DNA, 1402 bp, Cannabis sativa
  modified_base (862)..(863): a, c, t, g, unknown or other
gtgttgtaatcttcttcttctaccattcatatatatatgcaatatatattatatatatatgttgttgtaatatttatttaatctctttgttggtccttatattatattacaatagtgttgtaatgtcttaattttcttctattgtaataaaatctctaacaattaaaagctttttttttcctactttgcttcaatggaaggtaagaaattaacttgtaataatacaagggtaagaattgtgatattttgtgatttacaattttttatatagtaaaatatatattaacatattttcttgtgttgtgatatgggtttttttatgttattatatctaagatatatataatatataacgtgtatatgagttatatatattatatatgttgaacatatgataatatatatttatgatgagaatatttatgtatgtgatacatatataatatatattatgtggagataatatatattatgatatgtatgcatgttaaaatacatatcttatatatatatatatatgggtggactcttaatgggtattactcatgaatgggtaatattaaaaaaatttgagtttttatgcgtaatttttctattaaattagaaaaatctctcattttttcattatatgggctgaggttaatccatcggctaaaaaaaattcggcaaaaaaatgatagaaaaatattgagtgtttttaatatttttcatataaatttatatttgatatagtgtaaaaagatgtatttttgatattttttttaattaagtagttaatttaagcgtagaaattcaaatttatcttttatttttcgccatcggatcaaaatctaatgacttgatatttttaaaattaatattnntagttaaatttatttagtacccatcaatgggtctacccattaaaaaatgttccatatatatatatatgagatatgtaacatatgtatttgtgaatttaatattgatattatgtgtatgttacatatgagattatattaatatatgagttatatagtatgataataatattgatagtaatataatattaatattatttgttattattgatgtgaaaattatttttaatattttgtgaataaagaatagttttaaattcttttttaatttggtggtgaatatctcacttttatgagataataaaagatccattttgaaaagttacatcttttattggattataagagataataatctcatatttgagataaggaaatatggattatgggcgttacacttttattggacttgcattgtcataagcaagaacaatgatctagtggatctaaacttgtgaaatgagtcataaattagaagagtaattttagactcaagtaaagtgaatcaatgtggattcaaattatgaaaagataacaaaatt

SEQ ID NO: 137856 - DNA, 933 bp, Cannabis sativa
cacaccacaatcggcggtggagcccctcgaaccaggatagctcattgtctaaccgaatggcatgttttgccaaaccatgagatgcggaaagaaaaacgcaagccacataggacaaaaatgcccccggaaatatagacaataaagctataaagtatttgaacactaccccatcaccttgaaaaacacattctctttattaatagttgtcgccagagttagcgagactaaaaaaacatcacaacaccaaaccaaaaaacacagttatattagaatgacaatctttaaaataaaatctaagatacaaacttaaaatttaacacacaacccaaatgactagctcgaaattactaaaaagctaaaaaaccaacaaaatttcaagaataactagccaatggtattaccctttggctagtaacaacaaactaacacccttattaaaattgctaaaaatcaataacaaacagattatatttaaaattaaagcttatcgacaaattctctataaatataggccctccacaaaacaacctacaaaataacaaaaataaaacttcattaccaaataatataatgataaagagtatccgaaagaaatgatggtaaatcaatccatattaaaattaagagcttaaaaagacttaaaatacttatctgataaagtgaaaatgtttttgaagtagaaaacgagagcacaaaatggatcaaatatcttgtccatcatatcacaaacctatcctaaacaagtaggaacaagccataaaatggcacaaaaacaataaaaggtacaaaaactataaaaaaaacatcaaaaacatcaaaatattattcattctattatgaaatattagtattatgtaatattataatttagaaaaagaaaatagagaagagatgagaattttctgagtgttttattccaataggtgatctcct

SEQ ID NO: 137857 - DNA, 694 bp, Cannabis sativa
ctgtcctttttccatacaaacgacttcaaaataataataccatagtgtcgaggtttgtattttgcccagtctttttataagggaaatagtcattggatttgggtacctgaactatctactcaaagtaataatgcatgtaactgtgattttacactagaatgctatgagtaattatatcttgaatattattagtttcgtttctttctggtatctgattgttcctcttcctctctccattactttcctctcgtgtgacgtgttcttaaaactaaacttctttcaggtctaatatgttaatcttatatagtctttaacattgctcagatggttcggaactttagagaacctcttctagagctacttgaatcagggaatgtagacctttgctttgccaatgaggatgaagctacagagctgataaggtaactatttactttatattatgtattgacatgctaagcttagtttggtggaggtgggagtggtgatgggaatcacataagagtttaagatccattgtttttcatctcaaaatgttggtgctccttatgatagataggctttgtttttttttttttttttgtggggattgggagattaagagcatgtttggtattgttttctgtttttcgttttcaaaaaattgtttttagaaatgagaacaaaaaacactttttgaagtttttaaaacaca

SEQ ID NO: 137858 - DNA, 634 bp, Cannabis sativa
  modified_base (603)..(603): a, c, t, g, unknown or other
acaaacaaagcgacttatataagactaaattattttggaaatttagacaaaataacttgagaccactttcaagaggcatctgatgtaaacaacccaatagaccaaaaatacctacaaaataaataaatatagagaagtagattgcacactatataatgataatgctgtaaatttttaaattaagaataaaatgcaaatatgattttaacaagaaaaacttatctttgaagcatgatgtcaccattgaaactaataagttatgtgcaattattaaagctaagtcttccaaagtagaaacaaactagctactataacttgcaccatgcataaaattggaaaaattaatcaaacttaataaattaaatcccaattaaaattgattattttttaaaagagataacaaaactaaactagctaacaaataaatgatacaaaaataatgatataaataatagaatgaaaatttctccaaaattattaaaatataattaaaagtaagatttaaaacttatctgtgactctttgagatcgcctccatattagaatatttttattatggaaattattttctaattaagaaaatgattttctatttaaggaaanaaataaataattgattttctgataaatgaat

SEQ ID NO: 137859 - DNA, 680 bp, Cannabis sativa
ctgaaaattgaattagaattaaaatttttaatttcaatatatatacacacttaaattatactattcaaaatataactgttaatttagtggtcaacagaatatggatacttattaataataataagaataataaaaattgattataataaaataaacatataataaacaactagttacggataacaaaactaataaatagaaccggttctaaaaattaataattatctggttttataaattaattaaatcaaaaatcaatttcaaaaataaataattcaataaaagtcattagtatcgaaaaagttgctgaaaaaattaccgacattgaaaaagtcaccggagttagatgtctcaaatataaacgaaaataaaatcaattctatcacataataaataaatgaaaataataataaataactcaaaccggttataattcaaatagagccagttttataacataatcaataaaaaaatagcactaaataattcaaactaattataattaaaatagatcggttatataacagtcttataataaataaaaacaaataacatcaaataactcaaactggttataattaaaaaaagacggttctataacagtcttataataaataaaaataaataataccgaataactcaaaccggttataattaaaaaaaaaacggttctataacat

SEQ ID NO: 137860 - DNA, 717 bp, Cannabis sativa
ggtacatctaagcaaacatttgagagtggttcatcttctaaaaagtctgattcagaggacattgaattgttgaaatctaagttggagctgctcatttcgaatcaataatccttggctgaagacttcatttctttgaggtgttttgttgaccttaatttcaagtctgtcatgactgtaattaaggatatacaaaaaaaggttaatgtcattcatcgtcgaccttttgatgaggtatttatttatattgttcttgttttagttttttactactgttattattagtttttttcatgttttattttagttgcaatactgttgtttgattcagggtaagtcatctgatgagttggtaatccaagattctgatgatgatgatgctaaggatgatgacaagggattacctgatccagagaatattgattccgactccaatgatggtgatgagttgggtaaagatggtggtgatgctgctggagttgataaggttgttagtgatgttcctgctgctgatgtgaatcaatctaaggctgttgcaggcaatgaagagatggctaaggatgttgcgaatgttaaggccaaagagtctagtttaaaggggcatgcttttttttgattgtttaagccagcttgaaattgatgatgagcaagttgtgttggctggtttagaggctgttgaagtcatagttgaatacctgttgtgtttgttgtggtatcttg

SEQ ID NO: 137861 - DNA, 761 bp, Cannabis sativa
aaatctaaaaagtaagaattgagaatgctaaaatttggataacctaggtttatgtgaaacgaaggtatttggatgacttatgtgacaatttagattataattccttaatgcagatttcaggtgattctaattaagagattaattagagagcatgtgatttagaacctaaaagatctgaaaagagctaggttaatttgaataatctatcattcacaataggaattgggcatagtaatcaggcattaacaattgggtaaacctatcaacatgattctcttccctctttgctcattttgattaatttgtttttgtgtatttaagcttcttgaatttttattctgttcttaattttcaaaaatatagatttgccaaatagaatcatagatttagtctagtggtattcaatccaattccttgtgggtcgacctcacctgtgtgagcttactacttgattacgtgcacttgcgtactatttacaacattcgtaataagtttttggcaccttagccggggaattgtttaaagattgatattacataagattatattaaattctactttagtttatttttcttgctaattgctaatctgcttctttcaatattgtctttgtctatttcaggaatataaggtgtatgcgtcgtcaaggacaaggagtcctcgtgttagttgatcctgaaatcgagaaaacttgtaggagaaatagaaggaacaagaggcaagaaagagtttcagcaactgctgaaacacaagaaatcatg

SEQ ID NO: 137862 - DNA, 592 bp, Cannabis sativa
ttttttttttttaaaaatctgccctgaaaacgacacgtcgttttttagctatatgaaaaactacatgtcattttttctacaaagaaggctgcccacaatgacgtaaaacgacacgtcgttttcaatgaaggttggctgctcacacgggaaaacgacacgtcgttttatgaatctgaaggctgcctcacaagacgaaaaacgacatgtcgttttccatagggggaaaatgacatgtcgtttgaacaaacgacagcaacaacattacctgaaaaacgacacgtcattttacacaagggaaaaacaacatgtcgtttgagcaaacaacagcagccaaaaaacttaaaaacgacatgtcgtttgtgagaaacgacacgtcgtttgggtcatcttcttcagccaacccgggtcattttgacccgtttttctgcatgtgggtccgacgaacccgacccaaacctgatcgaaaaagatatttccgacgaccaaaaaggctcaaatcaattccaaatgaatctaaatgcaaaaattaagacattcatatagatttcatgcatcgaaaacacgtaaaacaaagactttaaaatcaccaaaa

SEQ ID NO: 137863 - DNA, 578 bp, Cannabis sativa
tatatagaatattacgcaattaattttgtccagattcaataaatataaaatattaatttatcacaaaatcaattctttattttatgccttaattagaaatactctaatattatatttcaccatacatctgcttcttcaaaatatatcactaaaattctacttttttcaaattttaatatattttattcatttcaaacatataatatttatatttacacatatcatcatataaaagaacatcaaaatcccaaataattaataaaatatgtttagaccaataaataatattctataaatataaagcataatagcactgaggaggagtctctttatattagaaattctctaaatcttttagctaaatatgataaaaaagactttcatgagctcctttaaatcatatatgtataataaatagagatgcactcaaattaatacagcttgctctatatgtaatgaatagtgcttcttctctaaatctattttaatagtatacaaataatattttatttatgtatattgtatatatgtttaaaaattattattttaatagtgtagaaaataaaaataatattaat

SEQ ID NO: 137864 - DNA, 948 bp, Cannabis sativa
  modified_base (911)..(915): a, c, t, g, unknown or other
attatattgaaatgcgttttatttagggcacaaaacccaacatcttggccttttgcgaaaggaaagaattataatccttttgaaccctcacaagcttttctcgacattctttctcctggacatgaagtaggggatcaagaggatgaagttgaatctggttttggatagcctccaaatcagatttagcttcatctacctgctgcaataagttgcagaatccttccttgttcagaattcgaattttactcttgaacagtttcattttggtgacaacctggaacatcttgctctccatacatttcaagttccaaacttctttgagttgaacatcatatttaggatgagatttccacatcctaaaatatttaaaaggtttctttcccctatcattgcagggtgtagagctaaaatagatggaaaatgatcgaacaatccgtcattcaaaaatactgcttcatcaaactcatatctattaatccaagattgattagccataatcctatcaatcttggagaatattctatcagatccaggctgcttgtgagtccacgtgaaaaagttcccactagcctttacatcttcaagtttacaaaatcgcacacaattcagaaaatcagagtccggatatgaccttactctatgcccaactctttcttctttggccaatatgtcattaaaatcccccattcggaaccaattctcatccgagtacaaatcgcaaatgtccttccagagagtcctcctttctccacgattattagaagcataaacaattgtaagaaagctattaaattccttaactattgaaaccctcaaatgcattagttggctagtacatttgatgatatcaatagtaaaacgaaaaggattccaagcaataacaatcttacctctgttggaaattattttannnnnatctagatttactatcatgtatgttggattaac

SEQ ID NO: 137865 - DNA, 617 bp, Cannabis sativa
caattagcattaacaattgggtaagcatatcaacaggattctcttccctatcttctcattttgattaatttctattgtctacttaagcttcttggattttaattcgttttttaatcttgaaaaaaatatcggttttccaaatagaatcataaatttagtctaatggtattcaatccaattccctgtggttcgacttcacctgtgtgagtttactacttgattacgtacacttgcgtattgttcacaattttcgtaacaacactagaggagcgttaggctcaattacagttgtaaacattactaacaaaaaaataaaatctctcgtacaccccatcattacctcatcattacaattacaacggtaaaatctacctaaggatcaacactattaaggggtgttcattagaccacatccaatatttttaggcattatccaaattcgatccaattatatattttatgttaaattttatcatctgacccgatccaattagtttcaatcatccgatcgatctaatatccattggatcagttctatttattggatgtatcatatatatttattggtttaatttgggtttatctaatatttaagacttagtattttttggatcgga

SEQ ID NO: 137866 - DNA, 805 bp, Cannabis sativa
aataaaatttttaaatttttaatatatatgatataaatatatatttcaaaacttaaatgtatattccattcttatatataaagaaaatataatctaaaataaaataaaacatttcttttaaaatttattttttttcttcattgcaatttgttatttttattttatttatttcaattggttgttaaaggtgtaaaataacaattaatttattttattttgttgttagttatgtgaaaaaatatatatattttaatattaaataatttaaaattaaaaagtaactaatctaaaataaccgatccaatacactcaattagaaattagactcgattattagaatattttattcacactatatataatcaattaaatataattgattgatttagtatatcaaattaatattctatttatggacaaaatattaagattgatagtcattgttatcccaaatttggtctacctaacgtggcatgtccacgtaagccaaagacagagtacatgtggagtacagccctgctgttatacctaaaattcggctgccatctcagtggaggacacatgtcaagataaggagaatatagatcgatgcaatcgctttatatggaataacttattgattatgtgagtatcggagtatatttgtaacctgcagactgtaaggccttaggcgaagaatcaatatacaaaatggtgattaatatattagggagaaaccatatgttactgaatgcgaatagcaagccatcaaggacagtacacattggaatacgaaagcgacatatatcaattgtgaaagccctta

SEQ ID NO: 137867 - DNA, 588 bp, Cannabis sativa
tgtagacttcatccgagctgcttctgcctttggatggggacacgtgtcgggcgcgactgtccgagactggatgtgaggctgaatgggcctcccttcagtttttggctaacaaatgctttgacaattaatatttcgaaattcaattatctctcaccacggttgatggctgcacttgattatttttcatttcccatattttcttttaagggtgaaccaaggcgtctgaggtttctttggaatgattacctcttttcgtgacttgcctataaatatcaaccagcattgacatataaactcattttcactatccttctttgctaagtgagttcagagcgaaaagagaggtttttggcttcaagtttgttgaagtgccttcattgaaactgctcgttggattgacgttgcttgaaccctgacatctgactcttgagtaagttcttgatttcctttatgcttacttttgcatgtttatatttcaaatgtaccttagactatactgtagaaaaatatttaggaaaccctaggttcaaaaactctgtgattgttctatgtcatggtttcatgcgattttacagtccatgatgcttg

SEQ ID NO: 137868 - DNA, 946 bp, Cannabis sativa
aaataagagactcgaaactcttcatttcagagtgagctagaaatgagaaatggaaagttgtgaaattgacttctctgacttcatagatctctattattttgagaaactagacgaatggtcgaaactacatctaattcggataagcaaaacccaacacaccagaccatttgtcaaccttcgcgctgggtacttactcccgagctctcgggattttttttttgatacttccaaggcttttgaacttgaggatgaggtctcctatcccattttgacaattttggattcaatggtcgcataagatttggcatttgagcaattgaaggcagcgtcctaggttgattgtcaacctttgcgttgggcccaacaccagttcaaccttggtgctgggccctatttctaggggcttgagattgtggttttatctccaagttttcttgaatcatcattgttttcgatgatagaaaaaaatttccaaaacactttatgatgaacttgatcggaaacagcccaggttaacaatgttaacctgggcgatgggtcctagttttggccctccagaaattctgtttggtcctcaaaaatagttgagtcttaatattttctaaaaattaagaaggtactcagaagtgttataaaaatactccaattaaaatggcctaggttgacagaatataaacctaggttcagggtcagccccagatgtcaatttcggcgttgggccctatttttgttgcccaaaaattgttgtttcttctttgaaaggacatatttgcctatttttgatgaagacgaaaagatgcaaaggttagatcttagatcagattcatggaaggtgctcagaatgacagattgtcaacctagacgctaggtgctcagggccccaggtgctcaaaaatcaacttgctccgattctaattttgatgcctcaaatatgtttgtggtatat

SEQ ID NO: 137869 - DNA, 738 bp, Cannabis sativa
gttgggttgttaaaaaaaattaaatagtttacagcttattcaaaccgcaatcattgagttggcctattaaaatatctttaacccagccaacccaacctaggtgtacccctaattcaaaccttattaattttctaatcattgttaatttattattaaaaagacattctatttagtatttacctagtgttagggtgagattgcctttatttgaattgtatctagatttcaatgggctattgtgcgcactatagtagaaatttcaattttctttgtatgatatacatattagacatactacacatttaaaaaatttctcaacaattatattgtagtttcaaaatgtttgtctttcattcatttttatagtaaaattatttagccattattttcatcactctaaactataaattattgtacacttactcatctttattatataaatatatatactatagattatatgaacatacatttttacacaatttttcatactaattttacatcatttgattaaaaatatttaataattaagactaaaataagataatattaattagtaaaaaaataaaacttaaacattagacctatatagattatgaagagaaaaaaaggattatttcaaaaaaatagaaaaacacaaaaaacaacaaagtttaattataaaaataagattgttcagaattttaaatattttcacagtttttaaaattttatttacataaaatatggtcttttaat

SEQ ID NO: 137870 - DNA, 721 bp, Cannabis sativa
tttttaagtttctttaatttattgtatatataaatttaggattataccggtacaatagttataattgtagagaatgatgagtagaattgtctgtattattcatgtaaataatatatatttacaaaaccttagagaaactaaattaggaaagtaggtgagaaaataggaaatgaaatatgttataccatgattttgcaaaattagcaaagaaaatgataaaaaattacttaggtggtgataccatctccaatcacctaggcacctaggtggtcacatcatgtctaatcacctccccatggcaaacgtcttcataggcaaacctcatcactttatcacctcaatactattttgagaatctcatcatcacttacactatgtttggtagaggggagagaaggagggacagggagggatggagggattggaaaatcttcttgtttggcaagagggagagaagaagggagaggagagatagaaggagagggtctccttccaaacacattatttttaattcctcttaacatgggagaattcaagaaaaagacaaaaagattatacaaaatatcttttctactcttgaaaaaaataatatataattatattaaaaatgacaaaacagtaattttaatatttattttactctctatccttccccatatactcctaacaccaaacaacacaaaggagaacaaatatcctctccatcctttctacactctcc

SEQ ID NO: 137871 - DNA, 543 bp, Cannabis sativa
  modified_base (27)..(27): a, c, t, g, unknown or other
aaaaaaaaaaaaaacataacaaaacangacatcatgcatagttcaaaatatcataaactagtctagtaaaacaatttcatgggactagctatgaagcgcaactagtagttgtggtagtggtctctgttcctgtgcttgtaatacatgattcctctagaagaaaaataaaattaaaatatattagaaaaaaattatttgtaagataagaatattaaactatatatatatatatatgaaatgataaatttattttacccaattcaactagtttagagatctccaaattttcaactttattcatgtattgtctcaacacaacaggagcatcattctcacaagtcaaccaattttttgagcaaattaatgcttcacctgtctttggagacaaagaacttctaaatggatcaagtatccatcctccggtaaaaaaagctgattcagaagcaacactagatatttgaacagccaaaacatctttagcaatgtgagagacaataggatacttactactattccttttccaccaatctagaatgtcaaaat

SEQ ID NO: 137872 - DNA, 2240 bp, Cannabis sativa
  modified_base (34)..(72): a, c, t, g, unknown or other
  modified_base (783)..(786): a, c, t, g, unknown or other
  modified_base (1531)..(1532): a, c, t, g, unknown or other
  modified_base (2013)..(2016): a, c, t, g, unknown or other
  modified_base (2074)..(2074): a, c, t, g, unknown or other
acaacactgtaatcattaacaaatacatatgttnnnnnnnnnnnnnnnnnnnnnnnnnnnnnnnnnnnnnnntgaaccatgcaacataaattgttatgtgtgatctttattaaattgtaaatctgattttattgaaatgggttttatttggggcacaaaacccaacagtatgatacaaaaaatccattatactcaggtggaaggctattgagaatgaattgagcgcattgctcgtttgataattcaatttccaacaaatttgctttctggaacttcagattcatcatgatgaagtgtgaattaatgctcttgccaggagacattttcacactataaagttcatttgcaaaggcatgtaaaaggtgaggattgggggtggattgttcattttggcactacaaatatcaataaacataaataaatcatttggttcaattaaattcatacacaagttcagaaaataacaagtaactaaacatgattgcaaaaataccaaaataaaacatattcaattattttccaaggtttttaacaaactaatatagtgcttcgttttagtcgagagtcaaacatatcatccatttaatagactagtcaactcatctaaaatggaaactattctaacagccttttattcgatcgaaaagacgttgcttcgttttagtcgagagtctaggtcattcttatttcatgagcttctaccattgtttcataccttataagtcttactcttagcagccactattcgaatggtcgtgactaagaataaaacacttacaatannnnttatctttcgagattctacgatgttaaattgctaatgaacgtccatctattagggatgaatctcactaaaacaagaactatgtagaaccaacaatgtagatcgaatatctctttgattaaagctcattatttaaatgtatttttaattaatcacttattttagtctttgtattttaataatgaaaaatacttaattgcagctggtccaaaattaattaaaattaatttttaactttaatttaattttcaaaacttaattttgaaaatctatttataaataaatataaaattttgaaaattatattaaaatataataaaataaattcctgaaaaaatatctaatttaagttgttctaaatttaaaaaaaattcaacttaaatattttttcaaaatttaattaaacaacaaattaagtatcttgaactaatcaccttaatttgaaaaatatccctatttaagttgatctaaaattaacaaatttttaacttaaaaatattttaaagcatatccgaataactaattttctagaaaattctatgtaattattaatttcaaaatattttaatttaagttgatccaaaattagtttgagtagctgattttcaatttaaatatattttctatgaaaattcaaataattaagtatctagaaaaatctaattagtaataacttcttaatttaattaaaaataggaaaatatatatagcgtaccttgaatatattttattaaactaagtgtgttnntcttaaattaatttcaaaaaatctgataaaaaattaattccatatattttgaaattaattatgttgctaatcaattttattagattatactagtgtaattaaccctactacatctattcaaataaggcaaatgagccttcacaattggggttattcatgtgagggagggctgggttcagtatgtcgtacccacaactaatggccccctaactctcacacaaggcccaaaggagaggaataccttaattaaacaacttttattcattgaataagtccaatactagttggacctaaataaaatctataaaagtgacaattttattgtagcaacctagtccattttaattacaaaaattaaatgggccccctatatgcatctaggaccaaagcgaacatataggcacaggcacacactgatttggatggatcctatcatgttactaggtttatacacacatgaaagaagattacaaaatttacnnnntacaaattatttatttgacctattaataattgaactattggttaaaatcagatcattngatctgtcaacaagttaaccatatcaatttagatcaaacaataataggtttcataaaacatgtattaataataaataatatatataaagcacacacatgcaacaaactagatagatggatatagaatttatttaatttaaattaattaaataattaaatttatttc

SEQ ID NO: 137873 - DNA, 1255 bp, Cannabis sativa
  modified_base (53)..(57): a, c, t, g, unknown or other
caagactcgatgtgaggttgactgagcatcccttcagttttcggctaattaannnnntgacaattaatatttcgaaattcgacttctctcaccacggttgacggatgcacttgattattttttattttgcatattggctttttagagggaaacgaggcatccaagggcttttgaaatgattacctcttttcgtgacctgactataaataccaaggaccattggcacataaactcattttcaccatctttcttttctaagtgagttcagagcgaaaagagatgtttttggcttcaagtttgctgaagtaccttcatcgaaacttctcgttggtttgacgttgcttgaatccaaatatctgactcttgagtaagttttcgatttcctttatgcttatttttgcatgtttacatttcgaatgcacttttgacttcgctgtagaacattcataggaaaccctaggtttagaaactctacgattcttctttgtcatggtttcatgctattttatagtccataatgcttgctttctgaactgcataatgtcggtctttcctcttgcttattctaagcttcatgaaatttttgccctaactcgagaaaatttcaaacttcttgagttttgacttttctttgaacattcttattctttaatctctggagtactcctggtcggcatattttctttctttatcgttcgatattctgaccaaacactcatcgatattctgaacccaggtgagttttgggagagcgaacatcgaatcgaccaggacctgcttcaactttttcacgaggatcatcctcgtctttgctctagcccaccttcttcgagtgaagtagattctccctcaaatcttttgcccagcaatagaatgatcgctcgtaccaagaaaacaacgcgtatggtcgacgcgtctgatcctgaagtttcttggcacaccactttgcccagtgccgaacaggatccaaccgtccaggaggagggggatcatgaaggggacactgaggtccaggagattgaggggcatgacgacattcgtcctcgcagttcctccaaggcagaggaagaggaggaggttgaacctccaaactacagggagtacaatgaggctggggagccaatcgacgttgacgaagacatcctggttgagggcgtggactacgtcagtgaggaacttactgttgcggttcctcacaggaggcaaagttccttggacgccaagtgggtgagtcctccgtccagggttactgagg

SEQ ID NO: 137874 - DNA, 1088 bp, Cannabis sativa
  modified_base (130)..(145): a, c, t, g, unknown or other
  modified_base (356)..(358): a, c, t, g, unknown or other
actcagacccaaacatggaaccagactagggacataaaacaagggtggggacatagaatcctaccccagtctcgatctcgaacccaaacttagaaatgggacctaggacctgaaccataactagaccgannnnnnnnnnnnnnnnccagatcttgactcgagattcggctaacagggcctggaactcaaattagaacctgaacaagaatagccgaaccaggaacctagaataagagtaggaccgtgaccaggaccaggacacagacatagaaccgaacacaaacctagccttagacccaaactgagacaggaactcgggccttgactcgatcccgaacacagacttggacctagannngatcttgatacgaacctggactcggaccaagacgcagactaggatcgaaatgttggacctagatctggagcgagatcctgacccagacccaaacttggacccgcattcaggacccgaacttggacctggacccaaacctcgacccagataggggtccagacctggacacaaacccggacacagaatcagacccgaactcaaacccacacctagaataagacacaaagctaggatcggacccggactcaaactcgaaccaagaccaggataagaacaaaggacttagagccagaactgaatccaaactcagatcgggattggaacttggcactcgaaccacacgtagaccaagacctaggactcgaaaccacactcggagcctgatctagacctagactgaaatccgaacccaaacccaaactcagaccatgactcgaactccgacccaaactcaaaccttaacacgaactcagaatcgcaaattgaagtagaaccgaactaggactaggacaaggacctggacctaaactcaaacatgaaccctgatgaaaacctagatagagaccaaaacctgaaccgagacaaggactcaaacccgaactgagactaggactcgaacctgaacctagaccaggacccaaacccatacaataatcggtaccttgacctagaattaagatagggacctggaacacagaactaggaccgggacctagaacccgacccagac

SEQ ID NO: 137875 - DNA, 784 bp, Cannabis sativa
gttcagatgcttataggttgaagttaagggtaatcataatacacaactagatcttagaaagtgaaaactatggttcaatggtaattgaatcacacccggggaaagaattgaatgagtgagttaatttcagaattcaccatggaattttagtttgtgtaataattataatacgagcgaaaggttaggtgtcctcaaatagcacgaagtaatttgtttaaggaccctccttgtgaaacaaatgagtatatattttaactatttgtttaggcggaaattgttgtcattggaatctagtaactaattgaccttctttgtcatttatacttattgtgctggttttgtcaaggaaaagtttattctgttttatgctcaatgcaactatgcttagggcatcaatgcaaacaaagtactcttacaaaatgcagatgatgtactgtatttgagggtgttaactcagtgtagccatgactcatgtgtacaagtataacttactttttggctaacaaaaagagaaatgtgtagattttttatggcaggatcatctttttgtcctagctttcctcttcttagatttcttggctcctaagatttgcttattttcctcttcttagatttcttaatcaagtgttttttcaccttgaattaggtatctagccaacatttgtaggaccccttgatgtcgttttcttttttctcatttttttggtaaattgtaattttttttaaacatagcatttatcaaattactaaaatcttatcatagggttttggcttggtagctgtt

SEQ ID NO: 137876 - DNA, 995 bp, Cannabis sativa
  modified_base (359)..(369): a, c, t, g, unknown or other
catgagtcgagcttatctctgacgatgttgtacatgttcagctggtctacaggaattttaaaagccttgatgctctgataccaaactgtaattccctaatgtttaggcacgctacccaagtcgattaagaaaccctaatcccctaaacgggactactaataaaataagcgtggaaattaaactttaagcgaaaatggaatgaaaataaacttgtaattattttaaccttacaaacaaaagttacatgttttgggatcccaaaaatagttttacaaaatattataagtcttttccattagccgacctaagcgacaaaatagagttacaaaagttttaacactggtagaccccaacccgcnnnnnnnnnnntggcccgaacatgtacattcatcgtccagctccctcactcatggctgattagaaacagatttaccctttcctacacagtggagcactcatgagccaagcccagcaagacagtaaaatatatcgataatcataattaacacatcacataaatatgaatgccatttcctttttatttgtatgacacagacacacgtgttacgctcacatgcctatttatctctatgtgggatagacctacgtgttacactcacacgtctatttacattaaggccttagaacggttcatctcgattctagttacccagtccaacctgattatgccttgaacacataaccctttacttcaatatacatttatatacatcttggcataacaattacatattagcaattcacttgagtaataaccctaagccaatgttgttgcaggaattttacaacaccaaaaatagattataatgataatagtaaacatgtaataagtgcgagtactcgacccagaacagcgagtattcaaaccaggagcacaaatacttagtaaaagactggaaaataatgagcacaagaggaatatagtggttcagtcagatctcggcctgcttagtccactgttgcaaagattctgt

SEQ ID NO: 137877 - DNA, 623 bp, Cannabis sativa
atttgcggtcctcccattgcaccaagtaaaaccatcgtcttccggcttgatttctcgcaaccaacaatccgaaagtgcatttcgaaaattcctcatgagataatcgggtttaggtccccctccctttttttctttgctattaacaatctcattgaagtctccgccacacacccaagctccattgaacattgacttaagccgtttcaaaagcttccaactttctaatcttcctcccgggtcggggctgccataaaagcctgtaaatcgccaagtaaaacccaagtcattttcaacaagagcatcaatatgagatcccgtgaaggattttatttgaaccatgtagtcatccgaccaaagaagcgccaaacctcgacttttacccttagcatcaaccgagaaacaaccaacataacccaattggattctaatatactccatctgaacactattcagccgcgtttccaataagaaaatcatcccgggatgatagtctttgacatgggatttgagggtgtttaaagtccaagggttcccaagcccttggacattccaaaataaggctatcattgctctcggcgactcagttccactgagttcgccgcttttaattccgtgccaaaggt

SEQ ID NO: 137878 - DNA, 1063 bp, Cannabis sativa
ttaaaataacaaaataaaccaattataaaatagatatggttaggcaattattattttaggagtaaaataataaacaaagaataattatccaaattatatgtcaaaatatctcaaattaagccttttttttttttaaatttttacaaaaatatctaggttatttaaatatttaaaatattatttataaatgtctcataagaaaaatgatttccaacttatgatttataaacaattaaacatttcacaaaataacctatttttgaattagaaaatattatggttagaatatctaggttaattttaaatttattaattatttaatttatcatataaattaattttaatattatattttaaattaaaagggataatgctatcttttaatttaaaacatatctaatattaaaatatctaatattataattaaattatatattaatattaagaaaattaataaattttaaaatctgaccataatccaaaaataaaataatcaatttttaaatttaaacctcaaaatattaaaaattaataataatctattaaaaaaatatattaatttgcaaaattgaaatttaagtttaaatataataaaaaataatattttatttttatttttaaggtttgaaattggaaaaattcaaaatttgtggaaaaaatctgcaaaaattgcattttggggtgaaaacacgcttgctgtcgagaaacaggttggcaagcagcctgtttcgcgtgcgcagggtgatacttgcagggttagctgctgagaaagctcagcgaatgcagggtctggacatgcacatgggcgagctgtgcgtgtctgaatgtgcagcatcaacgagtttcagacaaaaattatcccctttccgctcgcgtatttagtgtcttgtccgagatgctggtgtgggtaagcacccaatctcgataccattgaaccccgaaattcaaaccttcataactttttcattttttttatcggaatcgagttccgtaaaaaccaaaattacttaatttttcacaagaaatccaaacaaaatactttcagaatgaaaataaaattatt

SEQ ID NO: 137879 - DNA, 699 bp, Cannabis sativa
attcctataacaccaaccagcgatggctgcattcttttatcatcatcgtcatacttttaatttgaagtaactaggtggaatttattttataggttcatcaaatgaaaaggtctttacaaatgtcatttttggaaagttgttcactcacggatgcaactcccaaaaggagtcttgtggtatgatagttaagtctggaagggtgttcccagatgacaatcatgtctactgcgggtctagtctttaggattgctagcctcactctgggatagagttcttgttagctagttgtccctcctagaatggtagttccagatagtcgactccagcaggcgaaatcctatctagaagcatcatcaatgagtgtccttggttcgtgagtctgaaagctcgtacatgttctcggaggctttgatcagacatggagacttcagtcaaagaggagttagttaagttagttatttctaactaacttaaccatcttgtttcatgcagccatcgactttaggatcttaatcctaagcctataaataccaccttgattagttattttagatgacacaaaattgagacgagatagctcaattcagattagaattgagagtttgagagagaaaagattgagaggtaaaaagagaggtatatagaaaagagaaagactaggtgattgttatcccaattttggcactctgacgtggcatc

SEQ ID NO: 137880 - DNA, 713 bp, Cannabis sativa
tgacctacaatttgataggcttttcgtatcagcacggtagcctgccgactacggttttcgatctcttcatggtgagcccttagtgcctcaatctctctatctctccattcatcgaacatgcacctttgttcgtcgaatgtgagatttactgcagcacgcagttcgtcctgatcatgatgcagggtgttgttatgattctgcatgagtccaagagcgtcacagagattttttaattcagtggcatctcccgtagtcgtctgggtgttggttccaggcggaacagttgtgttatggatgccctagttgggtgcggaactgttactcccagtatcttgcacaccaggcacaattccatctatagaaactttttcaccattccccacgctcgccatctgtccaggattaacagccagtggaacccttgtgtttcctggattctgcaaggcaggatccaccgtctgtgaattttctggatcagtcaaacctctacgagtttgcaccatcgtatatgtggtaagattttgaatagagagagattcttgattcttctctcaatgaaagtaccaaaatgttgacttcgcttctagctaacgataatgagtctgttttataagcgataagtgatacataataacagatatacgataaagcaataaagagacacaggaattttatagagattcaggcccgagcagtttggtaatagcctaatc

SEQ ID NO: 137881 - DNA, 535 bp, Cannabis sativa
aacttcaaatatttacttaagttaatacttaaaagttatattttaagaaattcaataagtaattaccgttaagtgtcaagttaatggtcacacggtagttctgattggtctaggttatgaaatttttattttttatttaaaaataaatttgaatatatcaataagagaatcacacgtgaatattgatttcacacctaacgaccatctatcttcagaaactccaaaaatataacttaaatactattttcgtcaaaatttaaatttagatatttatcttcataagagttagacttagctatttacgtcacacactgttatatttttacagaactttattaaattaactcgtgaacaacataatacaaatataaaacaagtcaaaaacaattatccctatttttataaaatgaaaaaaaaaaatttactcataaaaatggtataaaactgctgattaattttttaggtatttatgaaaatacccaacgaaggcccaataaggcccaatgaggactgaaccaagtccaagcccaagccc

SEQ ID NO: 137882 - DNA, 825 bp, Cannabis sativa
  modified_base (635)..(635): a, c, t, g, unknown or other
actccgacatcctgctgattcacaggcttggaaaaaagtaaattatttgaatccagacttcgcagctgaaccaagacatctacgccttggtctatctgccaatggagtaaattcacatagatctcttagcagtcaacagagttcatggcccgtgtttcttgttatgtccaactttcctcctaggttggtgatgaaaaggaaatttacgatgctattgctaatgattttagggcctaaatagcctggacacgatatcgatgtttatttgccactgttagttgatgacttgaaagagttgtacgaagatggtgttgatgcatatgatggttttaagaaagaagtttgtaagttgaaggctgtcctattagggactgttaatgatttctctgcgtatagtaatctatctgagttgagcagcaaaggctatgaatgttgtcctatttgttgtaccaatacacgagcttgtcggttgttaaatggatacaaaatgtgttacatgggccatagacaatattttcccctaagacaccctaacagaaataaaaaccaagcatttgacggtactctagaaatgagaagttgcacctttgccacctttagggtgacaaattcttgaagaagttgagaaaataganttcaagtatggaaagggcaagaaaaagagaaaccccgatggatattttcaatggaaattgattttcttccatcttccatactggaaagatttacttgttagacattgtttggatgtcatgaaaatagaaaagaattgtctatgaaagcattgtcggtacgttacttgacatccctggtaaaagtaaagat

SEQ ID NO: 137883 - DNA, 682 bp, Cannabis sativa
caataagagattttggacagaaagatcaactatatcagtcctctaagttaatttgtttaagcggcagagcatcttagattttgttttgattgaaacacaaacacatgacttttcactggcttggactatttattgatttcttctcataaataaactcattagagtgactgcatattattatttgttgtgagtgaagaattaagttcatgaaagtacaagacagaaagtgacttttattttttgatttattctcataaataaactcattacatccttaaaacaatattcattagagttgaatagacatttctcttgttccattttttatatagattcctacccttccctttggaactcagattttagggaggggaaattagaggagttttagaggtttttattttcttttgttttgattcaaattaaaaattagagactgttagtaaccaaaaataaaaaataaaaattaaatagagattataatttttaaattaaacaaattagtgttaaattattgtaatatatgcaagaaagtaaaagaattcacagcttgacaaaatgttcttatagagtcttgagatataacggtatttataacataaataatgaactgtaattagcagctttgtaacaaaaaaaacaaattgcaaaatattgagaattatgggattccatctcaaaa

SEQ ID NO: 137884 - DNA, 556 bp, Cannabis sativa
tgcaacaaagaaagctttttactgctcagaagaaaataaccgagttgactaaggatctttaggcttctgaccgacttgaggagaccatcgaaaccttatctgcagaggtgaatagcctttatgatgaaaggacgtctcttcgagctgtcctccgtcgagtggaagaggagaagaagtctaaggaggaggagcttacagccaaggtggagaagctgggagaaaaggtccatgccttagagacagccggcctcgagctcttttatgacttttggaaggctaaccctcaagcaaactttgattacttgggtgaagctaaaggcatgtatctcgagttctgcgcttcccaagtggcttatggtgagcttgatgcgactacttcttcctccagccaaaatgttgatgttcctcccgttcaaacaacaaatcccccaactcctaccggcccaaaagatccaaaccaagagcctgggactccaactgtttaaatacttcttcttttatccttctctttttatgtatcttattcggccacaaggtcttttttaagacatcatga

SEQ ID NO: 137885 - DNA, 860 bp, Cannabis sativa
ggtaaaataattccaacagaaggatcatcaatgttgattcttttcgccaggagacctctaatgggaatggcatttgacaagatactccaccataggaccttatgtcgctccaggattttggaactccaaagtctgttccatcgtcctggagcaacgacaatgtcaggggctctttccaaagcttgaaccagatacgccgatttggttgtgaaatgtccatttggctcctttgtccacacccatctatcacctcctactcccgcaggtttacctcctttgattatgtcacgaacccttacaaatatatatatatatatttatatataatgataattttgtcttttaacatatatatataatgaaaattttgtttaaaatatattttacaaaataattgtcatatgttatagtttaagtcaaaaggataatttaaccaatttaagcatttgattacgttttttgataaagtaaacaaggtacatcattattaaattatttaattttcaaacaattttagtaaacaacatattacaaatattaatttcaattattcttcatttattctgttacatttttctattaatttattccgattctgaatattgtgtagtaaacgtgctataaattccattaagataatttgatttttatcatggaataggtgaattctcagtcctccacaaaagaggaggaagccacagagggaaccattcccattccgtaaggtcaatgcttacagggtgaaaattcctgtcataaaaaaacattatgaaactagtacttggtctttaaaatctctggcaaccgccccactgttgcaagttccttgctcatggttaataccttcatccacattttta

SEQ ID NO: 137886 - DNA, 1044 bp, Cannabis sativa
gttgttaaagtatatttgtgttattcttgttagttgttaggtttgagttcgaaagaatcgagtttatgaactcaaggtccactcaagcatggtgattctgtattttgaagtattactgcattttgaacgtttgaatattttgtttttatgttattggtatgttctggaaggtttcattaggtttggaggagttttggttcggttttggggcaaaaactaagttttcctgtttctgcagtagggaaaaccggtaaagtggtttcacaggtactgtgaaactggttaaccggtttttgtagcagtggaagaaaacttttgtttttagcctcgaaaccagttttgttcggggtgtttttcagatcttagatttaggtgatttagtaacgtataagctattttgaactagtggagagttagaaatttgtccggctatggagatagggttggtttggaaaatagatgacttgtttatcgaatttctttgtcgtgacataggacccgggatcatcgtcctttattccattcaggtcgacccgcatacttaatttgttgactgaggtaagaaaagtattatgcactgtttatggtcaacaattatagttgtgatagtgtcgatcatgatcgagatctcgatatgtattagtggtgactcgattatgatcgagggaaataataggaaatgattatcatggttgtgactttattataggaaatgattatcatcattgtgacttgattatgatcgagggaaataatatgaaacgattatcatcgtagtgactcgattattatcgagtaaaagaaacggtcattaccgttatgagtaattactcctaaaaccgcggataggtttcttacttatcattcgttgtattaggcaacggaagtgacataagtagcttgtggtaatgagttgtaagggtattttatgaagtaccgaaattgtgtagttacgatgttgtgaaatggattaagtgtgttattatgtgatgagttgtaattgaatacatttttgttatagtttgattaaatggatgttatact

SEQ ID NO: 137887 - DNA, 1057 bp, Cannabis sativa
atgatcttagttattgtgaaaaaatagacggacagtcaaaacagaattagaatcagacaagaagaacccagcgcaccaggccatttgtcaacatgggccctgggtaccccattttcgagctcttaggttgttgttttgatacttccaaggttcttgaacttaacaataatgtctcttaccctatttttgacaatttcaaatttaatggtcgaattagatttgacatttgaatgatcaaaactagtgcactaggttgattgttaacctgggaactgggcccaacaccaggtcaacttgggcgctgggccctgtatccaggggctcgcgtttgtagttttctccccgagtttgcttgaatctttattatttctgatgacgaaaaaaatggctagaaaacttttttaagaacttaattagaaaaactcaagttgacaatatgttaaccatggcactgggcctagtgccaggtgtcaacctgggctctgggttatagttatggtccttcaaaagtttcgtttggtcccaaaaaatagttgaaacttaatcttttctgaaaatggagaagatactaggaagatttctcacaaaacaccatcgaaatcggtccaggttgacaaaatgtcaacttaggcgccgggccttgcttctggcaccctataaagtgttgtttcttccccaaaagtacatatttccccatttttgatgaagacgaagatgatgcaaaattcggattgtcaatctgacacttggaaggtgcccaaattgacaaactgtgaacttgggccctgggtgcccggctagagggtgctccagttgctcaaaaatgaacttgcttcgaatatgattctgatgcctcaaatatgtctgtggtatgtctagttgatgtctcaatgcaaagtttgacccatttgtactacgacagtcccgaaaacttaaaccctagattagaatgtaaacttgggcgacgggtgaaaccctaaggtggcgtttggttgggaggaatgaaaagataggaataggaatgggaatgggaatggaaataggaataggaatggaa

SEQ ID NO: 137888 - DNA, 989 bp, Cannabis sativa
tttaatcccggtttttatttttaaggcattttatggcattttatcccttttatcccggttttcccggttttcgctaaaatgaaaaccgggatgtatggcagtgggataaaaagtctttaaaaaaccgtgataaaaaatatactttttatcccggtttttatgtaaaaactgggataaaaagtacccttttatcccacttttttcataaaaaccgggacaaaaaggtaccttttatcccggtttttatgagaaaagtgagataaaaggcacccttttatcccagtttttatgagaaaagtgggataaaagagtactttttatcccacttttttaataaaaaatgggataaaaagtacccttttattttaatttattttttaaaaaaatgggataaaatgtaaccttttattccacattttgcaaataaatatgtatgttttcagaattttttttcttttaagtttattacatttcattcatttttttacaataaataataaatctaatttttatttttataattatatggaatacgtatataaagagttaactaaaaaataaatgattaatataatttttaaaaccaatagtaacttgaattaataaccaatactttacattgtgtacaaatatctaaaatactaaacaaaatgtctaaaagaaatacaatagaatactactgattatttataaatcaaaggaaacaattgacttaaaccactattgtcgaagcgataagagatgttcttccttacaatattgggataggtcatcaacctgtcaaattaaaaaattaaaattaattaaaaagaaagtattcttatatgttgtatttatagtaaagattatatacttacttttacttttatgacttcaatatgagttaaaagttaaagtataccacgaatgtaagttagcatataataactacataattctataattattttggacaagtaaaagtatgtattcgcggtccccttatgcca

SEQ ID NO: 137889 - DNA, 500 bp, Cannabis sativa
ttttgtgaagccgatggggttaggcgaaatctcgaagatgaattttgattttacgtcattttggatatcgatcaacaatgtccctctagcttgtatgaccgaattatttgcatgggaatgggggggaaaggattgggaagcttgaagacataaagcttgtcaatggcacaatgaaggtaggggtgcgtattaacatcaccgagccacttaaacggggcttacgagtggcggtggatgatcaaggtaatgaggtttctctaatctttcaatatgaacacttacctgatttttgttttgattgtgggataattgggcataaagccatggattgtccattaagagattttacgggagataatccacaccttgaccgagggagattcgtttcgtggatgtgtgctcctagttccccacctcatgatcgatttcaggttcaacgcaaccgtgagaactctccttcgaatagaccgattatgactatgggtgaagcttcacggatt

SEQ ID NO: 137890 - DNA, 700 bp, Cannabis sativa
tggtaatagttcatgtgaaggctctagatgctgtcattgcaatttttaaaatttaacaatgatttatcgatatgttctcgatgtattgtccatggtttgtgcagtcccttacaaaatttagtaaatatgttctatgatggtttctcgatgggaataaatgtgttatcgatgatttttttgataatatttcatatgaaagctcaacattttgttattacaatttttaaaatttaactttgataacaaaaaaaacttacactaattgtctctaaatgtataaaattatacaaaatattttctaatacaaagatgttgttattttaatttgctcaactacttttttaggctggctttcaaaaatagtagggtcatgggcgtcatattcatgatgtgtctcataatcactttcttaacatcattgtatgtgattgtcctagcatacgcgtcttcatcttggtgagaaaataattctctcacaacaattagttactgttgaagaaagaaaacaaaacaaatgttagaatcctatgaaaaatatatcgacaacaaatcgaaaacctattaacaaatagacagaacacaacatagggaaaaaacacaacttatcaatggtatcaacaaaagttaaacaatacaataataatagaaataaaatgcaaacgtaaaataaaaaatgcaatactaaatcctattgagaacc

SEQ ID NO: 137891 - DNA, 653 bp, Cannabis sativa
  modified_base (198)..(211): a, c, t, g, unknown or other
  modified_base (397)..(397): a, c, t, g, unknown or other
tcaatccttgcactaaccatttcagaagctagttgaggggctatcataacagtggtggagatctgcccgggacctcttctactcaatgcatcatccataacattggctttcctaggatgatacaaaatctcgcaattgtagtccttaacaagttctagccacctcctctgtctcatatttaaatctttctgggtgaannnnnnnnnnnnnntcttatgatcagtataaatctcgcacttttcacgataaagatagtctcgccatatctttagagcaaaaaccacagcagcaagctctaggtcatgagttgggtagcgctgctcataatccttcaatcgacgagatgcataagctatgactctgtcatcttgtatcagaacacatcccagaccctgtntggatgcatcacaataaacaacgaatttttcttgatctgatggtaaagctaacaccggagctattatcaaacgttgcttcaactcctaaaaacttgcttcacatttgtctgaccacacgaatcgttgattcttcttagtcaactcggtcaggggcatagagattttagaaaatctctcaacgaaatgtcgataataccctgctaaactgagaaaactttgaacttctgtcattgattttggcctcggccaattttt

SEQ ID NO: 137892 - DNA, 549 bp, Cannabis sativa
aaaataaattccaacagttataactttttaattttcctttctcgtctgacaggtttaaataaaaaagttatggtagtttgatccctttctcatcagaaaggtttgataaaaaactttaaaaattttaaaagttatgggtttgcattatataatgtatttctagaggaatcccagttaatcatacacaaatgtcccttaagtaattttaaagagtaaagctttgcaattacttaaataacagaaatgattctctttttattcataactgaagttaaaatattacatcagcaatgtgagttacatcatttatttattggtagtagggtcgcaaatgttccatgttctattagttcttcattagcaagccatttagccgagctaatttgtaaactccaattccaactattgctttgattacatatggaccctcctagttcaagttgaaaactcctgtagatgcatctctcgtgtttgtaaatactcgccttagcaccaagtctccaacattgaatagtcttttcttgactcttttgttgaagtatcttgtaa

SEQ ID NO: 137893 - DNA, 598 bp, Cannabis sativa
gaaaacgaagtgttcgggaatcctgccaaaaccggtttaccggtttgacatgtactggtaaaaccggtaaaccggttttataccaatttccccaaaaattcaccaatttgctcaaaacttatccaattgccaccaaactttctagagtacgtatacaatgcatacacaacatattcccaccagaaaatcacagaaaaacccaatgaaactcaacttgccattaaagacaaaagcttgagtacctaggttcaagcttgcataaatttaatcccaaacatcaaaataagctgctaggggctaaatataactcaaatcaaacttgaatttcaaattgtaacataacctaacccctaatagcccctaataacgaaaatcactactcaaaccaagtaaaaacttaaagaattcaataacaaaagcttctagggtttacctcagttaagagatcctctaatccctgctgaaaacacacaaaaaccagcaaaaattctctggttccaagctggttcgaaaagggaagagaaaggaaagagagcaattctatttttttttttggcttttctttgatttttcttttcatttccctaagtgaaatata

SEQ ID NO: 137894 - DNA, 641 bp, Cannabis sativa
  modified_base (433)..(433): a, c, t, g, unknown or other
  modified_base (517)..(526): a, c, t, g, unknown or other
ttaccgccaaaaatttaatttttactacttagttaggtatttatctgcaactttgatttaaacctaagtatttacgccgcaaattactctttagtaaatagagttggataggattcatccaattgaatcgaaccaattcaattcaattacaaaaaaatgaatatcgaattacaattagattgaattagatgtctaattagattggatcaattattggatgttaatttcgaaattcaattaaaaacaagtccaatccaattacaattaaaatatattaaaatattatttatatataataaacatattaaaaataaaaaaattaatagtttagttatattttttagactttctatttatctaccaatatatttaattaaggataatttttattatatatctattctatataaaatgtggctatgtaacagaattnttggtttaacgatactttttgggtttctatgttaactttaacagaatatcctattaattaacagaatattctttattaattttnnnnnnnnnntatatatatttaaaaataaaattaggcttttttcaatttcaactgttatcccaaattttgcactctgacgtggcatcatgagaatggtgacacgtggagtccacttagagcatct

SEQ ID NO: 137895 - DNA, 961 bp, Cannabis sativa
tggtcaaagaatacaaaactcataatccatacattaatatatagtttggatctattgacagaaaatggattttaaacttgtgaaagttgtactgtaatgttcactgcattcttgaaaactgaaattaaatttctatttagaatctaaaatttaaagtcaaagacttacatttataccaaatttttcttgagaaatgattatttcttggaccaccactactaatctaactctatgtttaggttgcctatagtaagcatattcaagtaggagatttctaagattgaggatttatatcatttcaggatagaatgtctagaatatagtcatctgcgccattcaatttcatagaagaaaatagaatgacatcataagcaaatgatttatagaccatctatccaatgatatactatctaagtaaattcataaatgaaaatgctaagaggaaaaactaaaggataatttgattaaaataagaatctaacgatgttccgttaggcgagagtcaaagttattcttattttataaacttcctcattgtttcatattgtagacactagcctaagttgtcatctttggatgtacaactagatatcgcatttacaaatatttatttgaaaaaatctaacactattatgtttgtctaacgaatgacaatcctttgggattcgttccattaaacaacaagttaagttagaccaacaatgaagatttgaaattaaaactacaacaattaataccagaaaacaacatgaaggttcaatataaattcatacacattcaaaaattatcatacatttagcaagtaagaaagacatgtgaaaatacaaaacaaacacatcttaaataatttccaagaattttaagaaactgatacagtatctcggtaggcgagagtcaaaaatatcattcattgaatagagtagtcaactcatctaaaatagacaccattctagcaaccttt

SEQ ID NO: 137896 - DNA, 537 bp, Cannabis sativa
  modified_base (49)..(49): a, c, t, g, unknown or other
taaccacctctagcgtccaatgcgcactagaaaattatattggaatatnagcaagatagtataaaaataatttaaagtcacaatatagaaatgaacaatcagcactaaagaattaaattgagtttacccgatattccaaggaataaagaacatttggtgattgttattcatcaatgataaccaatcaacaaatcgtcttgtcgcattgttaaaagactgactcttctcttcatcggttttcccaatcactatgagaagctctgggtcgtaaaacttgaaaaaatttctcataccattgatgctctcccagatgtacctaccaaaaagattgttaagtattagtgtcttataataatttgactagaatttgatatataaagttaattagattaaagaagagtatacctcattccaaacagcattcattggtttccgatgtagtcacacgtagcaacctgctgcaaatcctctccagataacgtgatctgggtacgcggtgcaatgaatcctcgggggacaggaattgtgattatatca

SEQ ID NO: 137897 - DNA, 758 bp, Cannabis sativa
atcttgatgctatcactatgcggaggacaccaatgctcatttccatctcctgcttggaaagcagagtaagatgtatcggaatccgattgacgagcatttttccatttatcaagatacttttttgcaaacacaacaatgttatcaggaataacagctttcccattccaaactaggtcatttcgggctccccaaacagcccagcaaatagtcgccattaagcataattgatccgaggtagcatgtagaaacacaccccagcaccagtccaaaaaaccagattcaggagtcaccatcgtgccaataccaacccgattccaacacagtttgacaacacggcaaatcaccaaacagtgtagtacactctcatcttcttccagacagatgggacaaagtagattaacatctactctcttggttttgagttgaaccaaagtaggcagacactgtgtacacgcccgccataacagattactaaacttagagggaagtttcaacttccaaagtttactcaagaaagaagcaatttcttcatcaaaccagttacttttttgcttctacaaggaattatatgctgactttaccgagtactcgcctgaaattttaaaagaccaaaacagatggtcagatgcagcagtgtcggatagaggtataccatgaatgagagactagtccctagcctcaaacaggtcagcaatgatctccaaatcccatcctaacccatccatagtaagcaggtttgccacagtgacatcaacaag

SEQ ID NO: 137898 - DNA, 1009 bp, Cannabis sativa
  modified_base (244)..(245): a, c, t, g, unknown or other
  modified_base (566)..(574): a, c, t, g, unknown or other
  modified_base (943)..(945): a, c, t, g, unknown or other
cttcatcttcatcttggattatctccacccatctgtccaaccatccgattcaactcgctaggatagcacccgagttcaagcagctggagattgtctctttgctagaaacttagggcattggggtttccagtggcccttttcattgcaatagaagcattttccttttggcttatcaccaggagtagcagcctttttcttgttaactgttttcacagcttgaacaggcttcttgctattattccanntcttcttgttcttgggtttggaagtaaaggcaaagtttgcctcatccctagccgccccattagcattcccagaattatgagctttagatcctcctttctgtggtcctccaataaaattttcaaatgtctgaaggtcgtttaccaactcgtgaaagtcttgttccttcttgttcatgaaataatttgaagtataaggtagaaaggctggagtcaaactttcaggatcagactcacttgagttgtctgatccataacagctccatgattttgagcttcctggaagtaactcgtcatttggagaaggtgatcacgcacgttctnnnnnnnnntcatccgtgcattgataaaattccttctcgcctcaaagcgagattgaattgatgccatccagaatagttcagtcaactggttcatgatttatgcagccgtgagagtgttagcaaacctagtttttaaggtgtcaaccatcctagaaagcatgaagtatcgagctttgttgttggcattctgccaacgctcgtacttctcctttactgctttggtttcattctcacccgactacttaggagacggttcagttaacacaaacaggggattttcaccaatgagagcaatgttaatgttctatttctatttgggaaagtttgatccattcagctaattatcagtcaacagtgacgccatggggttggtcattnnnatgttggatactacaaataacaataaatagaaatcaagtaaggttcaacgcaaaatctcattca

SEQ ID NO: 137899 - DNA, 1662 bp, Cannabis sativa
  modified_base (329)..(329): a, c, t, g, unknown or other
tttattttattatatataataaaataaaaattaaatatcatcttaaataaatgatatactataaacaacaaaacatatatacctacaataaaaaataaaataattatatattatttaaaataattatatataccatattaataaaattatatacaatcataaattaattatactatacttacaaaattatatatgatatttatatataataaaataaaaagtaaacatgcatgatctaaaataaaatgatatactatataataaaatttatataccatataacaaaaaaatatagcttaccatcaaaatatatataataacaacaaatnaaaataaaaatatataagatgctaataaaattatatatcatgtcaacaaaactataatagaaaatagaacttaaatattattttaaaaaatgatataccgtataacaaaaaatacaaataccattcatcaaaatatatatactaacaataataaaaatatatatatattactaatatatatactatactaaccaaattatatgccacaactaaaatatatataccatgacaacaaaattatacaccactattatatataattaaatagaaactaattaaatattatttaaaatagatatatatatcataaaatatataaaaataataattaaatatatgtagcatgtcaataaaattatatacatactgttaacgcagattttcattaaccaataataagccttttcgtaataaatataacacagaaataataagaaataaatatgaaaattagacatgacttggttattactacaaatgaggcaacttcatatgcagagatggttgaaaaggctctgcgagctgagggtgcggctaagtttcttcaggagccccgtgggacttcgagtgttggtcgaaccccaactcttcctactcctatttatggtagggatggtggtgattccaccactgatcagaaaagaaaggttaccccggcatctagtggctcgggacagagcaagcggttccatgggaaccaaggtagaggtggacgctaggtttactcttaccctgagtgcccacattgtaagaaacatcatccaggtgagtgcaaccaaaagacatgttttcattgcggcatggtggggaatttcaagaaagattgccctcagacaaagaaagaagagcagaagccagaggccaaacccgtacctgctggggtgtttgccatcactcaaactgatgctgcagccagtccttctatggtgacaggtcagcttcctgtcaacaactccttttataatgtgttattttactcgggggctacacattcatatgtggcaacacgagtaattgatcttttgggtaggccatgtgattttatcgagagagggtttggaaccctattgcttagcggggtgttggttttctccaataggcgtactaggtctatgacagttaggatcgatgatagcttaatagagttggaattaacagaatttgatatcatacttgggatggattttctgtccaagtattcggccagcattgattgcaagcggaaaatggtaacttttcaacaaagggtgaagatccatttgtttatgttagatcggttcaggggtctcgaatcctgactatttcagtgttgagggctagagatttactacac

SEQ ID NO: 137900 - DNA, 1112 bp, Cannabis sativa
tatttagacaaaacatataaagaatatatattttttaaagaatatacccatgtctctcttgcaatgtcagtcacccatcatttgccgtacttatgacgagtggtctgtcaagcatcaggaatcggtgctaatcacccaaactctagatcacgatgtgacatagatgttttttttttctttctattctaaataataacaacaaccaaaaatgataattatattaaaaatatatatgtatatatactcttttataacacaaatcaggaagagattgagatcctcctattagaagttattttaccaggatttagatttactaatatgtatattgattatagaaatataatctaacatcctaaatatgaatttcttaaaaaattaaaataaacacatataaagttatagaaaatcttaccttggtagtagcagaatataatgactcattccattcagatttctaacccttgatcctttctatgacagagtattacaaaagtctaaacttggtttttccttagatgatggaattcttcacaatcttccatactatgaatgagtattgaattaaaatgtgtggacaagtactcttttcactatagggcacaaattatagaggagagaagattaggattttgaaataattaggagtctctattattttttctgaaattaggttatcaacttataaaaataagagcatataattatctatttatatgattcttattagggttaggttaggatttcaaaaaaaagaagataaaatggctttaaaattgaaccttatggccgaatcccttgtgggccctatgggttttaattttgccactttattaaataacttatttttctgtctaaattaccatattttaactctaattctataaatgccatttttatctatttaacaattataattaaatattaaataaaattatcatttatttattaatcaaacttatcaaagtctcttaattaataactaaaccctaaaatttcttttcttctcaattaagcccttgcttagtgaaaatttataactaagacataccttaatttaaaattctaattgattaattaaaactaattaactaagtctacaagccaatatt

SEQ ID NO: 137901 - DNA, 760 bp, Cannabis sativa
aggtgctctggaggaacagtaaaattctctctagggattgggactgctttttgcttgcagcaatgtcccactctggttcagtaatttatcgtccagaagttttagtatttataaatatgttataatcatctttagtttttatatacatttataataggtttatcgtagatatatttgagtactacaatgttaaattcttttgatattctctgttatatctacaagctatttatgtcaatatctattttagctttcagttttaaatcgatgttcaattattctatttatatagttttgtttggttctcagttattgttgtgttgtgccttagttgagttgctagtttcctttgttttatgttgttttgatgtttgaactttgtagcttctttgtgtaccccttttaatacagtagttaattgattttttattggaggtaagtctctcatacatatatatgtgatatgggctgcaattgcattagtttctttacttatataagattatcatttagcaattgataatgtcaattgatagggcacatcaatatgtatcatgtaacttttagcctcatgttgtcactatatagatgacatggtaaatctttattgcaacaacatgtgttggtggtaattagctattgttattgtcattattgttgttgttgggttgtagtagtgtggtggtgcgatattgttcatttttataaaaaatttcttttgcttcggttcataaacgaagcaaaaaatcaattagtgtcg

SEQ ID NO: 137902 - DNA, 835 bp, Cannabis sativa
gccttggaagaactccatgaattctttcccaatgagctcccttttggttatccacacattgtctttattgaggatgctttcaatggcttttattctacctttgatagacgccgtcaggaaaaagaatttggtgcatttgccccttccttcatccaggaaattctagccctttgtttccaatacacttctttcctagctcgggcctcatttagagagaatcgaagctccttttccatttcccaatctctagatcccacaggcagcttctgaacactatccagtcttctttcgagatcacggatttggacatctaaattaccaaactgggatctattccaatgcataagagcaacccgagtagccccaatcttcttaaagatcctggccggtgcccaaggaaaggagacagacttccaagcaaaatcaaccacaagtttacttcgctcatccctagtccaggcttcctcaaacctaaaatttcttctgacgttctcccccaaaccaccagaatatagacacagagggcggtgatccgaattggcagtctggacagaacaaaggacagccttcgggaaaagcctaacccaatcaccattagcgagccctttatccaagccgacttaacatgattagacccaaaacggtggttgtcccaggtcaacctgtctccctggatgggaagagaaataagcccccgggcattcaccagatttgagattacagggataaactggtctctaccttttgatccctctcgttcagaactactaaggacaaagttagtgtcccccaaaataagccacgaaccaccgaacctatcccctaccttcattag

SEQ ID NO: 137903 - DNA, 916 bp, Cannabis sativa
tgaaattttcgcgagttagggcaagaaaatctcatgaagcttagaataagcaggatgaaagacaggcattatgcagttcaaaagataagcagcacggacgatgaaattgcatgaaccgtgactaaggaaaatcgcagagttcctaaacttacgttttctacatctcttctacagcgaaattgaaagtgcattaagaaagtaattgtgcatagctaacataaaggaaatcgagaacttactcaacgaatcaagcgtctagtttcaagtttcgtcaagccaaaagagcagttttgatgaaagcacttcagcaagcttgaagccaaaaatcgcagagttcttacttagcaaggttggtgaaaatgagtttgtggacaaatgctcactggtatttataggcaaataacgaaaaggggtaatcatttcaaaaaaaccttggacgcctcggttctgccctaaaagtgaatatgggaaatcaaaagtaatcaagtgtagctgtcaatcgtggtgagagaaaatcaaattttgaaatattaattgtcagagcatttattagcggaaaactgaagggacgcccagtcagtttcacatcgagtcgcgaacagacgtgcttgacacgtgtcacacatccaaatgcaaaagcagcttggatgaagtctatacgcaacctcgaaaatctcgtacaagcttggggggaaaatgttaacccaatttttgcactctgacgtggcatcacatgatgttgacacgtggaatcgactctgagtatctacctacaagatatagtccgaacggggtacctcttatgtatgctcgaggcagagcaatcaccaatccgcacagagcaaccaacacttagcaaattcagctttcgcatcgtgagtcatcaaagaagtccctataacttaaggatcagatt

SEQ ID NO: 137904 - DNA, 1131 bp, Cannabis sativa
tcgtttcaacttcaacaggtttttcttcttcggcagaaggatcttaataaaaaaaataaaaccagtttcataataacgaaaaaaaaaacaacaaacacaattattaaaagtcggtttcaatacaaacataaaacacactttagctttacgtgaagttttttttggtcggcctttagccttcgtagcaggctcaaccttttcaacaacagatgggactttcaattctgattcactcacaaaataaacattagacacaaacaacatatcaatcatgataattaacatgaaaaccagtttcacacaaaatcaaaacaaagcaacaaaaaaacataacgacaatttctgcatcagtaaataactaaacattaaaactaatagtccagccagaaagagtcccactcaaagatccaagcattttgcaacctcaaccttaaaaccacccacacacccaatatcacagaatgcacaaataacatatatatctagaaaataaatcaaactccagaaattggtttttgacatgtttcgaaattatgtatgatcaaaaaggtttttaaaaaggtatgataaagttgaaaaaaatagattttcaaaatgtgcattattttgcaacctgaacattaaaacccctcacacacccaatatccgaggatcccaaacaacccctgcatcatttctaacccatttttaaaactgttaccaagatctagaaactggtttttcaaatgagatttgttttgcaacctcaaacctcaaatccactcacacacccaaaaaaggccataatgaatcatcagcactgataacaccaccataaacaacaaaaactcaaccatgaaaactattaaaaccaatttcaaaaacaacaaaaaaaaaacacgaactatgtgctaaagaggaaaacttaaaataaagagtacatatgaaactttaataacaatttttttgtaaaaaaaaaaaaaacacagaatgaaatgtccaataataaaccaacaatgaactcacgaaaaccctaaaaatcaaaactactaaaatcaacaaataaaacacacaccaaaaaccaatttctataaattaaacaaaatttataactgctcaaacacaacaacaatttcttcatgcaaaataaaa

SEQ ID NO: 137905 - DNA, 553 bp, Cannabis sativa
gtaccattttggtatacaacagttctccaaggtctttcagtttaaatctattattgagtctgatttttaaagcttcaaggtctttgatgttattactagcaagaaaaacatcatccacatatactagtaacaagatcaagctagatccattttgtctaatgaataaagaatgatctgaggcagaatgtttgaacccttcttcaataagagctgaagaaaatttttcgaaccactgtcttgaagcttgcatgtttaaggccatatattgacttttgaagcttgcaaacagcccttggtggaagctcccccttaggactatacccttgaggtatagtcatatacacttcttcatgtaaatccacatgcaataaggcattgttcacatctaattgatgtaagaaccacccttgaatagcaacaagagctagaattaatttaacataaactaacttggccacaggtgcaaaagtgtcattgtagtcaacaccctcttgttgactatagccctttgctactaaccttgctttatatctttcaacacttccatcagcat

SEQ ID NO: 137906 - DNA, 829 bp, Cannabis sativa
agacattcgcagtgtaaattcaagatcgtttatgatcgttcagatcaaattcaaattctttgaaattggctaaagaccataaaagaccatgatagtcgcataatgtaaattcaagtcgtttatggtcgttcaaagcaaatttaagtttttaaaaattggttgaaggacataaaagactattatggtcgcatagtgtaaattcaaggtcgtttatgaccgttcagatcaaattcaagttctttaaaattggttgaagaccataaaagaccatgatggtcacttaatgtaaattcaaggtcgtctatggtcgttcagatcaagttcaagctctttaaaattgattgaagaccataaaagaccatgatggtcgcataatgtaaattcaaggtcgtttatggtcgttcagagcaaattcaagttctttaaaattggttgaagaacataaaagaccatgatggtcgcataatgtaaatttaaggtcgtttatggtcgttcagagaaaattcaagttctttaaagttagttgaagaacataaaagactatgatggtcgcacagtgtaaattcaaggtcgtttatggttattcagagcaaaatttaagatcgtttatggttattcaaagcaaattcaaggtcttttatccataaaattataaaaattcatagtataatccaaaagactataataatatatatatatgttaccttttcgtgttcattgggtggtgtagatattgttaggggtgtgcataaattgatccaatccaatgacaaccgaccgatccaatcacaacagaccaccgaacattggatatccaattgtgatcgga

SEQ ID NO: 137907 - DNA, 730 bp, Cannabis sativa
  modified_base (154)..(167): a, c, t, g, unknown or other
  modified_base (406)..(408): a, c, t, g, unknown or other
tactcctctagggatactagattctttactttgggcaactacttctgtgttagtcagggagtaacactagtagttaataaattgttggtgcaatgccaaaaactttatcgaactttccatagactgaataagtatatttcctgcaactttaacnnnnnnnnnnnnnngtagagttagagacttcagatagggttttacacctttaaaatcactactccgctccaagagtaatcaccatctcatcagtagactgtctagcataaatgcaagtttataaacctaatttggtgtagtctaagagtattaaataccacccttatcgactaacatatgttgctcttcttaatcttaagattcacttgattgtcttccaatatttccttgctggattaatctgatacctacnnntttctcccactcaacaacaggtgtctggtctaatgcatagcaaagcatatatgagacctctcactgttgatcctaaggaattccttcatgacttttatcttttttggaatagttaaaatttttcttagataaataaaatctatatctagaagtcaagaagcttctatagatgtaccattagaaaaaaaatactccagcatcttactaaagtaagtcacttgcactagactaagtaaatcacccggcataccacaagccataagtttagataaactcaaacctacaataatactagaatcaagaagttttgttaagtccattg

SEQ ID NO: 137908 - DNA, 615 bp, Cannabis sativa
ctcaagaaagaaatccttgatgaaactcataccacaccttattcactgcatccgggaaccaccacaatgtatcaggatctaaaaccctacttttggtggtataagatgaaaagagatgtggtagactacgtgtccaagtgcttaacctgccaacaaatcaaagctaaacatcaaaggccagcagggttattgaaaccattatctcttcttgagtggaagtgggaggatattgagatggatttcgtaactggttttcctagaaccacaggaatgtatgattcggtatgggtcatagtggacagattcacaaaatcagctcactttctgctagtgaaagttacttatgcagtggatcagcacgctgaactgtatgtaaaggagatagttcgtctccatggagctcctaaatccattgtttcagatagagatccaaagtttacatcaaagttttgggtgagtcttcagagaactatgggtacaaagctgaagtttagcacagcttttcacccttaaactgatgggcaatcaaaaggaacaattcaaatactggaagatttattgcgagcctgtgtcatggactttgagggttcatggagtaagttcttgcctctaatt

SEQ ID NO: 137909 - DNA, 878 bp, Cannabis sativa
acatattgtcctccccatgcagtttagtaattgttttatttttaatgcatacaatctaaacttcccaacattcttgaaaaacctcgacgttcactaatgtggagtagtcttgcaacatcatgagcgttgggtgatcggagatattgggctccaaacaattcaacaacagcatgacaaaataaattgcttcaagctttctaaagtaatagattctcctattttgatgtattcatcggtagcatctgccggcacatcgtatgctagtattcaaaatacaattattactttttgcaagcctgataacttgagttttcccattctatccctttgttggaagaagtaattttcatgtctttgtatagcatccaaaatacgaaagaataaaggatgacccattcgaaatcttcggtgaaacatcaaattggtaaattgaggattctctataaaattgtcgttgaaaagattacgatcagtattttctcagtcacagttaataactatataaccaagaatcgagccccgacgtgagccttggtttttttcgtgttgagcgatataaaaattattattagcagtgatttgacataccacttgcatttctatatcatcataatattaattttctaaagaagacgatgataaataagatgaactaccaggataagaattcatatttttttaaagttaaactgtatatatttttggtgtaccttatatcatgtatcatatccatattttatagtgtaaacatccttatcttctgaatctaaaattagaagataagaaatctcgcagtttaatcttagtcgctgaaataatttgaccacaatctcaactattgcagtgtgttgttacatcacatccttatcttctgaatc

SEQ ID NO: 137910 - DNA, 724 bp, Cannabis sativa
ttgagtccctacctctcccaagtcattaaactttgtccaaaagacaatcttaagctctcaagtcccaaactccaattgtttagtctaatcttatgtattattctcacctacaccatcaaatggttaaataattatcttcatcgaactctacattcaaaatcgagtccaacgacatagaatatgactatatttaaaatttgggattccgaagcctcacctaagcggtgcacattaacaatcaatggcggtaaaaatcattgtaccgaaaacattgccaaaaataggggtagtatatataaaatcgaccacctcgacgagtagatcatacccataccgaccgtttgtcataacagtacacgacgtcgccggagaggggcggagctacaaaaatgtcactcgaaaaagtagcgagttgggcaaaatagcttagtgtgggctgttctcctcgtcgagctgagtttagtggtgaagatgactcgtcaaacggacaccggaggtgaccggaaaatccaatcaatgtttgaaccgccaaactttgacttgcgatatcctgagctaacgacggccaaagaagcggggccgcttgggggtgaggtcgtcggtacctagagttttgattggttcggcgtgtggggccagatggtggccggagattggtctccgaatgtagtggtgatggtggtttgtgggtttccttttgttttttgaagagagagagagagag

SEQ ID NO: 137911 - DNA, 1061 bp, Cannabis sativa
  modified_base (462)..(464): a, c, t, g, unknown or other
ggcattgaagcaaaccctaaaaaagtctaggctttgatagacatgccatcaccaacaaagtctaaggaagtacaagccctaacaggaaggatggctggacctgatagattcattttgaagtcaactgataagtgtttgccattcttcaatgtatagcgaggctacaagaaattgaagtggacagaagagtgtgaggtggcctttcaagaatattaaaaggcaattggcgacacctccagttttggcgaaaccaataactggagaaatgttacttctctatctagctatctcagaagacgcgattagtgtggctatagtacgagaagagggaaagcaccaacaacctgtttactatgtcagtaaaaggttactggggcaaagacgaggtacccccgtcttgaaaaacttcctttatgccttatccacgcctctcgcaagttacggccttacttctaggcacannnaataaaagtgttaattgatcaaccccagagacaagttttatcaaaaccagaaggttctagaagattgataaaatggtcaattgaacaagggcagtttgacataacttatcaacctcaaacatccatcaagggccaagctttggcagacttcttaatagaaggataactctagaagaaaatctgcctgttcaccgagacacgaactcttggaagttatacgtggatggtgcatccaacgagtagggttcgggtgtagaggtaatattaatttcaccagaaggctttaagtttcattatacttttagatttgaattcaacgcgtcagacaacgatgttgagtatgaagccttgatcgctggcttgaggatagctgaggtgttgaaggtcaagaatctcatatgtcatagtgactcaaaactaattataaatcaggtactcgaggaataccaggctaagggcctgaaaatggctaagtatctagagaaggttcagaagaacttggaaagattcgataactttaaaattgagaaaattttaagagaacaaaactctaacgttgatgccttagtaaaactggcctcacagaacgacttggat

SEQ ID NO: 137912 - DNA, 737 bp, Cannabis sativa
  modified_base (674)..(675): a, c, t, g, unknown or other
ttgtcttgatgacaagaagtctacgtctggaattgtatttactcttcgggtggagtagttatttggagaagtgtcaaccaatctgcaatatcaaactctaccatggaggttgaatacatagcagccgcagaggctactaaggaattggtttggttaagaaagttcttcacaaaacttggtgttgttcttggaaaggaaaaactaatggttttactttgtgacaacactagtgatatatccaatagttaagagccttgaagccataagaggagaaaacacattgagaggaagcacaacatcatcgcagaatatgtggtaagaggagacgtactagtggaaaggttgataactaagacaacctagctgatccattcaccaagattatgcagttactacatttgaaaagcacagagagaatctaggattaattgaaatttactgattgttttatgttagtgcaagtggcagtttgttgggttttgtgctctaaataaaactctatttcactataatcttgaatattcatttatcaataaagaaatagatttatttcattacttgtttaatgtattaattggttcacatgtttgtttcatgatcatttgtttgatttataaattcatccaaatccttatcacattgatatatttgattattgtgttgtcaacatagtnnaaagtaatcaagattatgtgattaaatgaattcctataatttatcactacacagggtttaac

SEQ ID NO: 137913 - DNA, 605 bp, Cannabis sativa
actaacagatttcacacaaaattgcaacatattattctatttcatgaatttaagcaccaaaaattaaaggaaaaaattgaaaaaaaaataattaccttagacattttgggcagtcggcgtgggtgatgtgggttgagggggtggtcggtcgtgggtcatgtaggttggtcggctgcgtgggtggtctgccgtggttggtctgcgtgtgtgggtgcagcgaggagaggcgatgccgagcgagagagaaagagagaaagaaaggcgaaagagagagggcagatttcaaatggggcgggggaaataatgtgggaattaagtaaatgttgtcccattttaccaataccctctattttaggtttaggaaaaaaattaccccctaatgtatgcataaaaattcaaattttcctataaaaattttattatttataagtagtaggttgatgttatacgtgcaataattagttttctttttaattaagtttaattaagtaatgttaagtataatacatatatatttaattttttcaatcgggtaatgtatttttatttttttaatttttgaaataggatttgagattttgatctttgagaattttttttagcta

SEQ ID NO: 137914 - DNA, 1820 bp, Cannabis sativa
  modified_base (1297)..(1313): a, c, t, g, unknown or other
  modified_base (1388)..(1390): a, c, t, g, unknown or other
ttttatattctgtctgttctgttttgtcgctgcaaaactggtttctgcagtaacagaattacattctccttctgcaaacgtatacaaaatttatattttcgtatttattattggcatttacaaaaattcatggctgaacctatagctttattgaaagctctacaatggtgtgagacagtaaacttccaatttttgaaatggaaatagattcacaagaggttcaaaggaaagttaattcctctttctctaatgtatcagtagtgtcgtctgatgttattagcagtattagatgctctttaacctcattcccgaacgtttctctcgtatatataaaaaggactaataaaatgacacatgtcattactaggggagcagagcttggcttggtaatgagttggtatggaaccgttatgttcctagcttttaattctaaaaaaaaacatgattacagtactttatctttccagcaaatcctcaaaatgggaaaaagtggtactttcttaataagaatatatggttactgagagaacgtttttaaaagaaggcaatcaacaaatctagcaaaaaattattttctatatcaaagcttgacaagtgtaaagtgatatcctttctgttctcacatgctctcatgtgaatccacatattttacctttaatgtattcttttgtcaatacaaatatgatacagaacaacccattttcaactcttacatacttaagcatacatgaatgattcactcactttatatataatattgaacttatttaatattgctcaacttcgaatattgtgattctaaaagactatcatgtagagtacttttggttaattagttcatcttcaccaaatgttttggtttgttaatctagatatataggtgcactcttaaaaggtattatccatgaatgagtaatattaaaaaaaaaaaaatgagtttttatgcttactttttctattttattacaaaaatttctcactttttcattatatgagctgacattgttccatgaaagaaaataataataataaaaaatcagcaaaaaaatgataaaaaattattgagttttattttaatatttttcatataaacttatttttaataaagtataaaaatatgtattttttgatattctctttaattaagtagctaatttaagcgtagattttcaaatttttcttttattattcgccatcagatcaaactctaatgacttaatattttaaaaattaatatttatagttaaatttatttattacccaccaataggtaatacctattaagaagtgttccatnnnnnnnnnnnnnnnnntataaaagaaaagtatgaggcagtgacgtgccggtctaaaattattttattaaagcataaatctacaaattgatnnnttactattattttaataattttttataaaagaaagtataaatatacaaattgatattttactattattttaatttttttcaataaaaatacaaaatatttttaaaaagttaaaaaaataaaaaataaattccaaataaaatattgaaacttaaatcaaatataattaattgtaaatttcatttatatacatacataaaatatcaatcaatatgcatatatatataaatatatatacgggtgcacttttaatgggtattacccatgaatgggtaaaattagaaaattttgtgtttttatgcttaatttttctacataattaaaaaattttctcatttttatatcatatgggctaagattgttccatcggtaaaaaaaaaattataaaaaaaaagttttttagcaagaaaaataagaaaagaaaaagttgag

SEQ ID NO: 137915 - DNA, 517 bp, Cannabis sativa
tataatagtttttagggagtatcgctagccaatcgcaacgcgacatatcgcaaaggtgctaggcaccactggtgcctaatagcaatgctctttttagaatgacactgataattgagtaactagtcattaaattacggagtgtttgaaataggttaatgttagtaagtgaatggtaatgttaaacattaccttgtttgtttggaaggtttaatcttaaaatgtcattcccacccttgaaagggtaatgttgatacattaaaaaaaggtgggattagttattctcttccattatattaatttaaataatatttttaaattaataaataaatttaaataccattaatattatgatttataataaataaaatattacgatacatatattttgtccgtaagatcgatttttctataactgagttatttttatgttattagcaataacatatatatgcattatacataaattttatgagaatggtatacataaatgacatagcgaacaaaaataaataacata

SEQ ID NO: 137916 - DNA, 898 bp, Cannabis sativa
tataaattctcctactaaataatattataaaaaataaataaacccccttctattctttcaaatttatatttattttttattaaaattatttagtaagataataatatttttatacaaaaaaaaaggagaattctatagaggattaaaaatagaattaaaaatatatgcataataataataataataataataataatatgccgtttttcagttttcagaattgtgtttttaaaagtgagaatagaaaaaagttttttgtcatttaaaaatttaatagtgtttggtacaagttttataaaattatttttaaattttttattactaataccatgacatgaacccatcctaccccggactcaactcgaacctgcaccctagctcgaacccaaactcggaccccgaaccctagacctagacccaaaccttagaccctagattagacccagacccggacccatgaccctgaacctcggaccctaaccctggactcgggctcgaactcgaacttgaatccaaaactcgaggctaggtccgaggtccttggtcgggtccgtattcggtatgggtgttcatcaaactgctcacatcgcacaaacctcccgcactgcaccacatcacataaaaagtggagtttaaaatcttttgcggtgcggttgcggttttgaatttaataattgcggttcaaaccgtagtgtactatatattacaaagttataaatttttatagtttgagttttattcttttttcatataagaacaaatatatgtatacattacaatattttttagaggcaatttaatataataactaatgattagtatatatgttatgatgttaaaactttaataagatttttttttgtattgttaaaattttataggttgatttttaaatttt

SEQ ID NO: 137917 - DNA, 1038 bp, Cannabis sativa
tccagctcctcaaagagcctagcactactggcatggaatagatcgaaatgattgacacttccccaaactggatgacaccaacagcagcctacctcaacactggggaacacccacataattaaaataaagctcgaaagatgaggaggatggctgtacggtatatcataatagagggaattatgtacagacaagggttctccatgtcgttgctcagatgcactcaagaagaagctgcacgaattttatttgaggtgcacgatggattccgtggaaatcatgccgccaggcagagtttatctaagaaaattctatggcaaggttatttctcgacgacaataattgaagattcaaaggcctatgttaaaaaatgtgacaaatgccagagatttttgaagataccccgagcttttgcccaacgagttagctcaaatgcaaagtccgtggccttttgccatttggggaattgacttgatcggacaattacccaaaggcaaaggaggagtgcagtacgcagtggttgcggttgattacttcactaagtggacggaagctgaaccacttgcaaccattacatttaagaaagttcaagacacttttttgttgtgaagaacgaacataattttccggtttggattactactgtacaaaatagtttcggacaatggcaaacagtttggcagccagtctttcaccaatttttgtgcgaaccatggtatcatcaaaagtttctccgcggtggcgcatccccaagcaatgaagcagtcaacaagaccccgaaggatacactaaagaaaagactcgaggatgctgaaggaaactgtccaaaggagcttcctaaagttttatggtcgtaccgaacaactgaaaaaatggaaacaggacagattccatttgctatggcatatggatatgaagctttgctgcccgtagatctcgagccaccatcccactgaagattgacatacaaccaagaagcaaatcacatactcctggccgaatcacttgataaaattgaagaaaagcgaaccacatcaaact

SEQ ID NO: 137918 - DNA, 701 bp, Cannabis sativa
  modified_base (27)..(35): a, c, t, g, unknown or other
taggatgttaatcaaacatacttggtnnnnnnnnnagatcctggtaaaatatttccgacactaagccatgtgctcttttagttttctgaatgccttctcgcattcttcagtccattcaaatttttccatttctttaaaatattaaaaaagggatgcactcgtcggatgatagggaaatgaatcgacttaaggcagcaacctttccgatcaagctttgcacatctttgagcttcttgggggaaggtatgtttagtaaggcttgaatcttttcggggtttgcctctattcccctttggctgacgatgaatcccaaaaatttccctgatttgacaccgaaagtgcacttcttcgagttaagtttcattccatatctctggactactttgaagcattctgcgagatcgtccgagtggcttatgcatgcttaatcccaaaaatttccctgacttgaccccaaaagtgcacttcttcgggttaagtttcattccatatctctggactactttgaagcattctgcgagatcgtccccgtggcttacgcatgctttggatttgactagcatatcgtccacgtaaacttccatattttgtcctagaagtcctttgaacattcggttcaccattctttgatatgttgcaccaccattttttaatccgaaaggcatgaccaggtagcagtatacccccttgtcggtcctgaa

SEQ ID NO: 137919 - DNA, 553 bp, Cannabis sativa
aaactcatcaaataaaaatgattcaaaagttattgatgagacattttcttataatgtggcatgcaatatagtcaatgaaatagatgatcaagaaccaaaatctgtttttgaatgtcaaaatagatatgattgggataaatggaaagatgctatgcaagttgagttagagtcattaaacaaaagaaatgttgttagacctattgttctcacacctgaagatgtgaaaccagtaggattcaaatgggtcttcattcgaaaacgaaatgagaaaaatgaaattgtaagatacaaagctaggcttgttgctcaaggtttttctcaaaaacctggaattgattatgaagaaacatactctcctgtaatggatgcaatcacaaatcgatatttgatcagtctaacagtttctgaaaacttaaaaatgcatcttatggatgtagtgatagcttacttagacgaatcgcttgataatgatatttatatgaaaatccctgaaggttttaagatgcctgaagcactaacctttaagcctaaagagatatgttcgataaagtta

SEQ ID NO: 137920 - DNA, 1110 bp, Cannabis sativa
tatctcaaattattattttgagattaagaatatgaataagatatataattttaattaattagagagtaaccacaacatttctcattaaataaaactatgtattatttattttatctcatgttatttttatctctaaaatgatcaggaatgagaataaattaaaaaaaaaaattatttgtttctattcttagaagcctaatgtatacctaagagtgtgaataagattttcattgtatttgttttaggattgttaagtatcagaataattaaatttaagaccattttattttttcaaactaatgaggtgtctttaagatactaaagaaaattatattcatacatattttattaagataaactgatatagaaatttagttaaccactttagttatgacttcactggttatattaattcatgtaaatcaacatttgattatgtctttaagattaccagtaagttgtatcgtggagaatcttaattgttatttccattctagaagtcagattcatctattattttaaggatacatcccgtatggtatattgtagagtttcatactaggcctaaagttcagtatttagtcataaagaagcataattagtcattaagcacgcaacactgaattaggtgatcgcaatatccttaactaaatgcatgccacaacacaaattcaaggatcatataaagtaaatatgagatttagtaatgcagtttgttgtacaactaaaattattcatgaaactcttattttgatgttctctcatatttataggcatattaattttacatttgagaaaattttagagaactagaataaacataaggtttatgatttattcgcttaggtacattgacacgtaaaatacatgattatataataaatatattgtaatacatgaaagataatactcatcatataatgaggcctatcactatgattcatatgtttattatgtaatgagaaatattgagtttaaatggtaaatcaaaatactagaaagtgagagtatattagaatatttctatttaatattagaatatttctaatattggtacaaaattatttaaattgattttactttatattgctaagtatttgctgacggtat

SEQ ID NO: 137921 - DNA, 670 bp, Cannabis sativa
ttgggagcttaataaaataagtggttggaaacatgttatacaatagtataatccaagctttcctaacggatcgaatattagttcctttatagtgttaactctacgagtataataagttatagattaattgttcacattgaagtaatggtacataaagaataaagagataattagaaaggtaaaatagtattttgaccaactttaattatgaactaataattggagggtgaactgcttatattgattatatcaatagactataagaattctgtaaatataattctatattgtcaaagagtgtaattccattatagtggagtaataatgaaattaataaacttaattattctattgatgagattgatgataactatgggtttattggagcttcgaaatataggtccatggtccccgagtcacctccttacaacactgtacagggaaatattttatttgatgaatgaatttcgagtaagaattattttttatgagaaataaattcttaagggcaaagtagtaatttatgaaattattttttttgattaattatgctaattgtgaattgtataatctatagtatttaactatttaattttattagataaaaatatattaattaattaaatataatattattgttaaatattattaaagggagaaatatattatt

SEQ ID NO: 137922 - DNA, 515 bp, Cannabis sativa
caatgggaggcgccaatggagggtcctcccttggaggcaagggtagattgctcagatttatcgggatgtttgtgtcaccctagccagctataatggccagattcgtagtgcttgtcgagatggtaggttgaccacatctgcggtgttcatagaaattctagtcgtggttggaacatggaaactaggatctacagtcagaggatcttgaggaaaatctgacgatgctgatggtgtagctggagttctcctcgtgttaactatggtgtttgatcaaatatgatatcaactcgctctcaatgaaagaaccaaactgctgacctcagatttggccaaccgatagcggagtcatattaatgttgatgctggccacgtgttacacaataagaacaagaaagtaaaagaacacatgattttatagaggtttgacccctttagttagtgggtaatgacctactcccatttggttgtattgataactagagataatactattcagattactataggtgggatct

SEQ ID NO: 137923 - DNA, 789 bp, Cannabis sativa
  modified_base (29)..(47): a, c, t, g, unknown or other
tattgatatttaaatgatagagattacannnnnnnnnnnnnnnnnnnagggcataaaacccaacagctcgacgtaacgctccatctgacaatcacagttcttggtgataaggtgaacttcagcagtcaacatcatttgaatgtgggcttctatctgagagagctgacttgacagagcagtggatcttattgaaagatgtcaggagctaattagtgaaggtaccatgagtatgtcttcctatagcgagatggacgcctcgttattcgttgttcagattcattcaactgttatgcttagtttgtataatgtatattatacgctaagggttttaacagtcaacatgtctcgtctacatctcttcatatgtagcgagattggagtctcgctttgtattactgatgttgttcttatgatcgtgtattcacatatgaaatagtttctcatcaatatgtgaattaatagtttgtacatccgtgtctcgcttaagactttacagtcaacgagttatagatatactctatcatctctgcatttaatgatttattccattttaatatattctaatataattgtcattatattcgttgatttgtattctcctaggttgacacgtgtcctcctctgaagtaccagccgaattttaggtataacaattgcccttataaagttatttttaatgaaaagtgcattttaaatgattacagagggtatttttgtcataatcccttttgaaattatggatgcctttgattttggcagttttatggttccaatgcacatcaatagcat

SEQ ID NO: 137924 - DNA, 508 bp, Cannabis sativa
ttagttgcttttgagtatttttttagttgcactccagcaattatgtcaacttgtgtattattagttcgttatatttgcaatcaattaaaatgaattgcctacgagtttcataatttgcttaattaatttcttcatcaaactgtgcattgcaaaatatgaggaatagaattgcgtctttttcttgagagtaaaagtttgagtattgttagtcaacttcaagacaactgtaatgaaactgtaaagcaacagttatatctgttacgagccaactaacataaaatcacaaaacaactaataaattcacatatttaatacaaaagaatattacaacaatcgtgttttatctatttaggtcacgtatttgacaattacgaaccctgtttatataatactatgatattgtagaagtaaaagtattatccaactaacgtgtaacttaattccaactagaaatgattacttgaggctagctcaagtggccatagggggtgcgtgtgtattggaggtc

SEQ ID NO: 137925 - DNA, 1034 bp, Cannabis sativa
  modified_base (855)..(867): a, c, t, g, unknown or other
tctttcattcattatataccataggacattaaaataatataccacaatcttaaactaatatactacctttcagttttttttaatatactattgtacataaaaacaaaataccattgtgcaaaataactataccaaaatactttaaaatattataccacaaattaaaaatactatacaacttttaaaagttttttatttctatatatatcatagcacataataaagatataccataatacaaaattaaatataccaaaaacttaaactaatattccattcgtagtttttatgttctttctttcattcaagtattccatatcacataaaaataatgtaccttagaaaaatattaatatacaaaaaaaaactaaactaatgcactttatttttttatttccttcatgatatactgtgtcgagagagaaaaagaaaaaaaatagctagggtcaattattcaaggttataattgtaatttcattattaaatttttaactaaatggacattttgttaatattttataaaaaaggacatttattaacttaattgttagatttagggtcattttgcatgttaggtctaatttaaaaggaacaaaataatttgggctcatatatataataagaattttttcaatattatacctaaaattaattttatttacaaaaatacctttaagaaaattatttacacaaataccgttgttccgtgtcagcatacataccaaaatttaaaataattaccgaaaatagtaaaaattggaaaattctcgtttctagaaatttttgatttttaggagttttgaaaaaagtaaccattgaattacttttgatgtgaataagatatcaattagttannnnnnnnnnnnnaaatttatttcagaattttacacatacataaataataaaataactattttaatatatgagaaatatatatttttctatctccaaaatgacgactaatattaattttttatttttttttttatattttaaggatatgttatgttattttattgtttaagatacattga

SEQ ID NO: 137926 - DNA, 897 bp, Cannabis sativa
aagatcatcatttggctccagtaggcctgaatagaaattagcacagaattaattagtgtgattcttccaacaaacgagagattcctggaactcgaggttttaattctggatgtcattctttctgctagtaattcacattctttcccagatatctttttcccacaaatgggaatccccaagtaagtgaaaggtagatcttgtttggtgaagctcgagagatgtataatacgatttaccaccacctgctgcatgttactgtaataaattgtagttctagatgcatttggatataaacaagatgcaagggagaatgttttaagttcctgcaacatgtaaagaatactcctgaaatctccatggcaaaacaaaagcacatcatcagcaaatgctaggtgattaagtttaagatcttgacacctatcataaaatttgaaatgctctctttctccaaccttcctcatgagtctagacagatactccatgcccaatacaaacaagaggggagacataggatccccttgtctaattcccctcttagcttcaaagaagccatgtaaggatccattaaacatcaaagaaaatttgggagtagtaacacaattcattaccagttggatgaacttcttaggaaagtttagccttgttagcatctcttccaggaaaccccattcaattgtgtcataggccttttgaagatctagtttgatcatgcatctaggtttattagcctttctagtataatgccttaccaaatcctgacaaatcaaaatattatgccctataaaccttcctttgataaagccaccttgagactgtgaaattatctcaggaaggatgttatttattctagaactcaatagcttggttgcaatcttgtaaattacattacaacaagct

SEQ ID NO: 137927 - DNA, 988 bp, Cannabis sativa
agaattaaggagaaaagagaaaaataatttttaaataattttatatgaattaaaaattaaaaaaattaaaaaattaaagagagaaaagaaaattaactttaaagcaattttagagaatcatgtcaccgttttatgtctctgctttatatatattgattgttatttatgtatgtatatataaacaaaattcaccattaattatatttgatttaagttttaatatttttttttggtatttaatttttattttctaacttttataaaatattttatatttttatagaaaattaaaataataataaaatatcaatttgtagagttatactttttttatagaaaaattattaaaaaaatagtaaaatattaatttgtaaatttatgctttaataaaatattaaaattgagagaattaaggagagaagagaaaaatagttttggagtgattttagaatgtcatgttaccgcctcatacttctcctttatatatatacttgaaaataaactgcactttgcatatggttgtattttgtttagtgatcattaagtcataatataaaattttaaattttaacatttttaatataatttcttttaataataattagaataattattctactaggtagaaaaacaaattgatgttgtagaaaaattatcatacaattctttcttaaaataaaaataaaaaagagatattttaaaaggttataattaaaaaaattgaagaatcttcatataaaatagaaatctaaaaaaaataattgataaatttataaaaaaaaactcatcatataatttcaaaatcattatcattgccatgctaggtttgccctcaacataaaataaatcaaataatgagttatcattgccatgcataaaagaaaagtattatgtcactaccttatgtctcaatcattatgagttaactactatgcaatgagttaaaaaaaaatagataaaaatatttaaaataaatttaaagaaaaaa

SEQ ID NO: 137928 - DNA, 661 bp, Cannabis sativa
  modified_base (343)..(349): a, c, t, g, unknown or other
aaaaggaaaaacaaatggtttgcaaatcattttcaaatatgaaagtacctgatggttactcgtctaacatcaaaaacttggtaaatgaagctttattgaaactaatgggtatgaaatcacaagattgtcatatgcgttaatgcaacatctgcttctaatttcaattaggtaactcttgccaaaaaatattcgagagtgtttgacacatgtttgcattttctttaataagttatgtgggatggaattttaaatggataaattagaagcattacatgaacatgtagtcaaaacattgtgtaacctcgaaatgttttttctgccatcttttttcaacatcatgatnnnnnnnatggttcatctagtgagagaagtaatgttgtgtgggccggttagggcgagatagatgtatccatttgaaagaaatatgaaggtacttataaggtatgtgcgtaaccactatcgaacaaaagcatctatggttgagtgctacatatctaaagaggctgtgaaattttattcacaatacatggctggagttgaggtaattggaattaccaaaccaagaactgaccaagatgaggttgatagaggattaagaggaaaggaacaacggtaacagtgtccaagcttgaactagatcaagctcaattagtcgtgatga

SEQ ID NO: 137929 - DNA, 540 bp, Cannabis sativa
attttgcccctagggccatataaccttcacttaagcatacaagggcaaaaatgacatttcatgcacaattcaaacccaattaatttcatattattctcactaataatcaaaataccaataattaaatcccaattgcattttgggcccgaaccccgttcggcccgaaatacccggctttgacaataccgcgccaatctgttagaacacacctgaagacaacacagacatactatataataacatagtcccataagcactttaataaattaatttcactattttacccttcccgcgtcaaaatcactaaaatgcccctgactcatcaatggggtcttaacatatcataaatcatataaattcacatataataaattatataataatataatttttcaataatacgtaattatctaattagggttttgctaatccaatctcataattctagggtattaaaacatccatgattaatctatgtcatttggctatatttgtatatgtgaccattgatgggtttagtcatgattgatatgatgaaaa

SEQ ID NO: 137930 - DNA, 584 bp, Cannabis sativa
taataataaacatggtaatggttcgattaaaaaaaaaacataataatcaaagtaatgaaataaatctgaacgaaaagctattttttttaaataattaaataataattaaaaaaaattgaaattattaaaaaaaaattaaacatattgaaaacaactgctatcttcgtaaactatattaaaaaaaaactaaataataagtattgaaaatgtggtttaatattatattgatgatatttattttaattagggttatataagtaatatttataattattaaaaaaaatggctgcaaatacctctgaaaagaatgatcaacactattagaagttatatctagtaacacatatttttatttttttttctgggaaaacactactagtaatacgtatttgtttaacagttattgttattatatcatacagtggtaaaaagaaaaataaataaataaagaaaagggcatacatacgtagtttatataatgtgactaaataatgttcatgagttagttcattgtgttaatttttatttttatttttctgaaaagagttcatcgtgttaattatttctatacatatatataatta

SEQ ID NO: 137931 - DNA, 1402 bp, Cannabis sativa
aattattctaaatttatcaaaattttgtaggttatcttaaatatctataacgtacatgaatatgaaaaaaaaaaaagactaaaaaaatctcttgtatacctaaatagatatgggtatattttaatttacacaataaattaaatattaattttataaatagaaataattatataatatatataaaaaagattggatgtcgatgtacactgccacaacatatatgcaactgtagccacaccacaaatttaagcttcaaaatgaagtttcattggaggcatatataacaccaaatttggcttatgcattctccttagagctcttagtagtaaaatattccaaggttatgttaattttaatattcagttaggaggaataaaaatataaaaataaaaataaaaataaaatagaatcaaatttaaaagtataaaaataattaataaaaaaattaggggaatcaccttatgcacggtatttcttagtttattttctgtttttatgtgatttattatgttagtttatttatatatatatatttatttttctagttttacgttaataattattgtacattttatttatacggttttttatccaaacatgcattttttattcttgttaattattttttccttctactttccacgcatatttattgggacaaagttttaatacatggatcaaattttgattaaatagaacagataatatccttttattgactattttttaaataattaaaacaatagactaactaatttatgagttaaagtgtaacaatcataaaaactaaaaataaagaagaaaaattattcaactagttaatttttctcttgactcttgcttgtttgatttttaaagttattaaaatttgaagcatatgaaaacaaaagttctttgcttaagaactattagtatggaatgaaattctttaaatcattatcttttgaatgaaatttctaagaataatatgtattgcctgaaactttaagagtaatatatattaatataaaattttataaaatcaattttgtgatcaagcctattctagtaaacctcaaaactccttttggtaaaataaatagaataattattattaatgcagcagttagttgatcatgtttcctttagttgtataggattatttattatttttatagtttgaggcttaacgtgcactatagcaaatcctatatagacaatttataatcaatctcatacaataataattttagcaagccatagagtaaataataattcatcaatctcatactgcaatcatttaaacaatccttacaatcatcatattagaaacccttgcaacaattttatctcataaaacaaccatattagcaacccaatctcaaatatataacaacaatgttagcaaccaaatcatagacaa

SEQ ID NO: 137932 - DNA, 638 bp, Cannabis sativa
gcgggctttcggtgcttccagaggccaagaaagctagagagatgcttgcctattacatgaaccgattggttccttaggtaagtgagtagctagccggtgctataacgagtcttccctggagttgctgatgagaggagtcttgaaggaatttaccagggtaagcctttgttgattgtttcctttaattcttctttatttggttcagaccttaaagttttttctctgtgtaggctggtctgaagttggcttacacctactcccgaactaaatctgatgcgtccaaaaatgctgccatgtccaacaccatgagggcggaggtggacttggctaggaaagatgctgataacgccagggtagaacttggagctgtccagatggagttgggctccagcagaacttaaagaattaaaaatttagcttcaggggttgctttacctagggttttcatggcctagtgtgtcaccatgaggagctccggtgttatttgtcaagaagaaagatggatctttacatatgtgtattgattaccgggaactgaacaaactgacagtcaagaagaagtatccttttcctaggatcgatgatcttttcgaccagcttcagggaagacggtcttttcaaagattgatctccgattg

SEQ ID NO: 137933 - DNA, 699 bp, Cannabis sativa
acagctttccctttaccgaaaacgagagggaatggctgagcaggtgaaatgggctcccttatgcgaatggcgtgttcaacaggcttgggcggggccgaaagtttcttcttcctcttgagcaaaatcacctgcctagcccttgcacctcccttcaacttagcttcacgtttgagttgaatgagttcatgctctggatgagctccttcagtccgtccaggaccagatttcctcttcttccccgtcacggacttaggaacaaagtccttgggatagagcccgtacttcacaaaattatcctcataggtcaactggataataatatggtcttctcgcagcaattgagcaagcttttgagctctatccctaagaccaagagtgaggggagggcggtgatatgtcagaatctactggaaccgagtgcgagtgatgcccgtgccatccaccatgaagtactcatcagcaaaacgcccaatcttaatgatggccgagtcatccatgcttgtcaaccacttgtagcctggttgagagaaattgaagtacctctacctgccttgcttgggggtggacttcaaatcaaagaaacagacaaattcgtgaggagaagcgtaccccactcctgggaaaggtagaggacgaagagggcagacagatatttaattcccttaggagtgaactgggtcgggcagaggccgaagaagt

SEQ ID NO: 137934 - DNA, 658 bp, Cannabis sativa
ttacagtgctatctttgctaatcatagaacttactcaaaaatcaagtcaaattaaaatttttatattaaatattaaactttataactttacaaaatcatttacaagttctgggatcccatttttaaacttttatacgaaatacacaaaatacataaccaggtcgcacagcgactacaaaataataaccctagatgtcccgaaattgaacactccaggtcgcgccaccacgacatgtacaacctcatctcagcccaggctcactcctgttcagctttttcctttcctttacctacacatggaagcagaattgtgagtcgacaaactcggtaagaaaaacatataacatatcatataataccgacttgtatctaagcgcccatacacctatttacaaggcttaacagatgagtaaaaatgttccatactagggtacaaccactataccacatacactacgtaccttactgtacgggtgttggtagggtttgtttcgtactctgagtaccactaagtgatataccacagacaccttgtacttttacatacttgtgttagtatcactgtaatgtattcttaaacaatatacactataccaatgcactttgtaccataactttaagtgttggtagtgtaataaacatataagcatgcatatac

SEQ ID NO: 137935 - DNA, 737 bp, Cannabis sativa
  modified_base (634)..(638): a, c, t, g, unknown or other
caatcaatgtaaggtttcttaaactttatatgtatttatttcattgttttagaaattcatattaggatgttaatgaaacctacttgttagtaaatctagatcctggtaaaataattccaactccttggtatgaagcaagacgccacaaacggtggtggaaatccgtttgataagtcaggttgaatgccacaaggaatactccttgataaggtcgaatagttctctcaagatctcaagaagaaaacctctcaaaaatttattccaaaatattctgatttttcaaagtgtttgcaaggctttatatagccaacttacaaccaagaaaaaaggaaactaaaagaaagacaactttccaaataaaacaaagacaaaataaaggaaacaaaaataaaaagaaaagctgccaattgccttggaaaacatgatcatcttaatttgggactaaattgagtcaactttgatgagaaacacaaatttttgctctccttcagtgttgaccacggtctcctcttgtttcaaaattctattgactaagttgttgtgttcttctttgaatttcttggctctagccctcgtcaccgagcccacaggagctttacttgtttcttcagccttagtgttctcatcattcccnnnnnttgaaaaggatttgtcctcaaatcttcacttgcatcaaaagggctcaaatcagaaacattaaaagtagcactaacattatattctccaggtaaatcgag

SEQ ID NO: 137936 - DNA, 554 bp, Cannabis sativa
agttcgggaggagagagagagagaaggaggtcgttacggagaaagcaaagcctgtttctctcacctgccagtcactcgtctccttgcaaagcccgaaatgaaccgttctaatgaattcacttggggttgatttggcactcatcaattggctctttagaccataaataattccaaatgttttaaacccaatcacaatcgcccatatggatcctcaacgtattctagtcgggatatacagtcataccttcaatattattatattctaggttttttccctcacgtacgtactctttttttttttttttttcttttttaatgaaatatgatattttattggcggtaataaaataaaatatgatattttaatgaaatatgatatttccctcctccgtaacttaaggttgatacagattaatccctaagctcaaaaattggcagtaatagttcccaaggtgacattttctgtaagtccgttggtccccaaattaactgatccgttaaacccaaactaaatgccacctgtcaattttttattggtccaaaaaataatttta

SEQ ID NO: 137937 - DNA, 647 bp, Cannabis sativa
ctttaataaaataaatcattcccatgatcatacttttagatacaatctaaattaaaaaaaaaaaactttaaataaaattaatatttacgtgccgaggcatgtaacttttaactatatatatatatttgtaagtaaatatacttatggaaaaataattgaaatatatattaattatgtgaagtaaaattaaagcttgttttgtccttgtatattaactcttctgtgttacttttaacattaacatatttatagaagataactctatttattgatgtgtacaattttaattataattcgtaaattcaactagacaaaatatataaattccattcacattatgtagttttattatgctatagtaaattccattaatattattcactagtgtgttggagatgagaagaccttttcaaattattccatgtacgttaataaaaaaaatattattccatgtacactttcacgtgtcaaaatatcaaaacagaatgggttaaaataggaaaatttcatcattgatgcacaataaaacaccccatatcaaatttgactccccttactaatttttaccaaataattcctttgattacatgaacatcccattatatacccttttttaaaattaaaaaatatataaaaaactgaaaacc

SEQ ID NO: 137938 - DNA, 649 bp, Cannabis sativa
atatatatttatatatatattggtgaccgatctcaaattttatggtaattgtatagaatttggttttagtttttggcaaaggcagtggattgattttgggttccaagaacacgtcgatagtcgtggcttgtttgaagtattggaatattgtctattttctttttgtgtataaagaaatgtactctttttttacaagaaagataaataaatgaataaataagaagaagtcattgtagaaattcttttattggcaaaagaattcatatttagagtatattatattattttattgataaaagaatttatatttagaatatattatattgggtatgatgattaataaaagctaattgtttagttaattaattttatttattaatttctatatatactaattacatatagttttactttctatatatttaaaacaataaataatggtataatttataaattttatatttaattaatatattattatatttaattatatttatatatataattaattaaattattatttataatatataaaattttaattaaaagtattaaatattattttttttttagaaaaaatactaatatatagtggcattttttgttggtcactatatcccaaaaataataataaaaaatataaaaaaaa

SEQ ID NO: 137939 - DNA, 658 bp, Cannabis sativa
ttttcaataggtcaacaagtgttggtgattcattcaaaattcaaatctttgacaagtaacgttatctcaagatggaaaaatcattttaaagtcaaagaggtacttccttgtggccttgtaagtattaaaagtgagaaaggtgagattctaaagattcacagcgtaaactgaaggcatgcactaatgagcttcgacgatcatatcgaccacctaggggtcatgatgacattccacctgctatatattgatggcgatgttacagttatggacccgtagtcctaactgctatggtttgttttctctcctttaattttattgcacagtggggacactttttagtttaagtttgggaatgggaagataattttcatgtttttaatttttttgcttttttttttaaaaaaaaattatttttggtttttatgggtagatttaaggctttatttattattgttggatgcctgtattaatgttaacttatgacctatgggaattcgatgatgaacttatgcttaactctttgatattatttattatgtgtgaaaaacttttggatcgtgtgcttaatctattatgctttcttttgatattgtgatatgagttatgtgttgttctacttgttctatatattgtaattttatgtgcctatgtagacttg

SEQ ID NO: 137940 - DNA, 1379 bp, Cannabis sativa
ggtacataattgcgattatggaattaactgttggttgcctttttaaatattaattggcttttgttgtctaaaaaatttacttgttagacggttgcatcatcattaaaagtaaaatttacattcaaatgtaaatttacttgatcgacaattgcttcttctttgaaggttacataataacgttcatgtattgaaatttacatgtgacgctttaaaagtttacttgatagacggttgtctcttctttaaaggttatatagttgcgattatggaattagctggttgtcttttcaaataataaaattgacttttgttgtctaaaaaatttacttgatagacggttgccacatcattcaaagtaaaatttatattcaagtgtaaatttacttgatcaacaattgcctttctttaaaggttacataattacgatcatgtattgaaatttacatgtgaagccttaaaattttacttgatagacagatgcctcttctttaaagattacataattgcgattatggaacaagctgctggttgcctttttaaataataaaattggcttttgttgtctaaaaaatttacttgatagacggttgcctcatgtttaaaagtaaaatttacattcaaatgtaaattttttactatttgaattaaggaaataaataattgggagtaaaatatattgctatgtataaataatagtttacttgattgatagctgcttcttccattgttacaaaatgaaaaatacatttgaattttgtcttatggtactaagggaccttgtgaagtattagaattgacttatgccataaaaatttacttgatagagagttacataataactattatgcaattagctgctggttgcctttttaaataataaaattggcttttgttgtctgaataatttacttgatagaaatgtgcattgaaatgttatctttccccactgttaatgagatttgtattgtttatttttaaataatttcgaacgacaaagaataattgttgtttggaaatttattgttggttgctttttcaaaagttaaaattaacttttgttaatgtttccttagatgttttaaaattttaaagatattgaatgttgcctttagccactgtgagattttgtattgtttgtccaaacggttttggatccaccgacggttgttttttgaagtattaaaattgacttttcatgactttaaaatttagttgatagatagttgactcctctataaagaagccatagttactatttcagaatttgttgttggtttctactttaaataattaagttggtttttgttactataaaaatttactagatagacagttgcttcatacttactcttttggaatttgtcgctgcttcccatttg

SEQ ID NO: 137941 - DNA, 714 bp, Cannabis sativa
  modified_base (655)..(668): a, c, t, g, unknown or other
tcaaagaaacccgaacaaacttgaccacatctgtcccaactattccccaatgcttttggtaaaaagctggtgtcataccatcgggccccggtgacttgtcaggatgcatctgaaagagggcatttctaacttcttcctcagaaattgttctcaagagatcttcattctgctcacggctaacagttggccgaataccatccaaaaccgaacccaagttaacactagatgtagagaacaaatcatgaaaatagctagtgataacattggccaagcccgcctcccatgtaacccaatctccattgctatcttgaagacgggaaatactattgtttctcttcatggaattagcaattgagtgaaaatacttactgttcttatcacccgaattgagccagaattgcttcgatctttgcttccaaaatatttctttttgagccagcacttccgccaacttgtccttcccttctttgtgttgttggatggaaataggatctttaccccacttagaatttcggatttgactcttgcattcattgatacgctttcgaaaattcccagttatgtcccgtccccatctccccaagacttcgccacaatgatgaattttctcttgaatagtgactgaactcgaactcctgttggaaattattttacnnnnnnnnnnnnnntactcacaagtatgtttattaacgccctaaatatgaactttctaaa

SEQ ID NO: 137942 - DNA, 562 bp, Cannabis sativa
acaagtccaagaagcatggagttgttaatgttgcatatgactatgagtcatcaaatgcacttatggtgtctagttcgagggagatgaaaaatggtcattcaagaagtgcacgattagtagagatgttgtcttcaaggaagatgaaatggccatgaaaaccaagagcacttccaaagacaatgaacatgtatcagatgagaatgtttagattgaggtgcagcaaactgctcgtccagcaccaactaacgttgtttaagatggaactgaggtaacagaagaagaagaaaatgaaggttgccaaggattgagtagttatcgattagctagagatagagaaagaagacagagaaaagccttcatatatttggttatgctgaattcatggcatatgcacttatgattgcagaagaggttgacaattctgaacccactagctttcatgaagctatgagaagtaaagatgttgcagcatagttgcaggtcattcaagaagagatgcagtctctcataaagaataaaacatggatatttgtgaagaaaccagagttctacaagctggtag

SEQ ID NO: 137943 - DNA, 752 bp, Cannabis sativa
agagagagagagagaaagagaaggaaaaaaaaagaattatatgggtaatttaagaaaataatagtattaatgggtataaattagttaagggggtaaattttgaaagagtattttattatgtattggtattgaaattactcataatcatgatttttttccaacaattttgttgattaagagattataataggaggttgtaattagcactttgaggagtgctactgccaacctcttgttacaacgtcttagtcaacctccacgccaaaaacatatgtcgaaatattttttttaatttttttttcacgggggtgttcttattgcttacaacatcatctctgtaaatttttgaaaaatttcaaatagtttacagtgtcgaaaatacgcttgaagttttttgaacgcgcgtggtaaactggaatatcaggaactttgttttcagtattgtaaaatattcaaaatctttcaaaaatttacagggatgataccataaatataacgaataccgctattaaaaaaatatgaaaaaaatatttcgatatgtgatttcaaacgtaaaaattgactaagaaattgtaataggaggttgtaattagcactcctcattttgtaaatagcattgtctcatttctttctaaagggaaatttgcggcaaaagtccccaaaaagttcagtttaatacagataagtccccaacctccaaaaatagcagcaatagtcctcaaggtcaagttttttatttgtccgttggtctc

SEQ ID NO: 137944 - DNA, 788 bp, Cannabis sativa
tccacattattagattcccaaaacggaagttgtaagaattatcttatctgagaaactttaacaagtgaattaaagaaactaataacatgaacaagatttcatgattactcatgatttagattaatataccattgatcatcattatgatacgaattaggtctttatagtaatcaacatgtttgataaagacaacttaattacatatcgtttcttgtcatatataatttctatttaatgagtcaatcaaagaaactaataacatgaacaagattttataattacccaggatttatgtcgatctaccattgatcatcactataatataaattaggtctttctagtaaataacatgtttgataaggacaacttaattaaatatcagtcattgtcatatataatatctattatatataacaccttcacttagatgccatgctacattagtaatccgaattgagattacttacaccgaataatggacatcagtgaacctcactagtaaccattgataaagattcctaaacttagtatgttgcttactattttattcatatagctaagtgatcttaatcctctgtacaatacaagtcgcaatctcatgtatgaataaagaattttttttatatttatatataaattatttaatattaaatattaataacttaacaatcatgcatatatccgaatgttcaattcttattcataattagaaatgtctttacagaattttcatggcataaacactaatattttattttgacaaccatttaatttcttaagctcttctt

SEQ ID NO: 137945 - DNA, 550 bp, Cannabis sativa
tcactaaaaatttatagcgtcggttttaaaatgacatataaattgctgaaatacttttatttttaacttattgcgtcatttataaaatgaagcataaatgtatgtaagaaaaaattgcaaatttcatgcattttttcctcgctgcattttcaaattttagaatgattttatataatagtaaatacatgatacaaaaaaaattaaaataacgtttataaaacttatatatataaaattagtaattgattctattaactaattacataataccaaaattgttaatagaaacgatcctaaaatttatattttatgtatcataaaaactaactataaactaattacataatgcaaaagtaaatagcaacaatcataaaatatatataacaaaaagtagtaaccttgtacttaatcaataatcaaaggctccgtgtcaataaaaaataagctaattaggaattttgtccccaaaactttgacatgtaccatatcatgtctcatgaacttttaaggtcgttaaaaatgctcctgactattgagattgttgaattta

SEQ ID NO: 137946 - DNA, 1116 bp, Cannabis sativa
gttattgtatttatcgacaacatccttgtgtactcttaatcggaagaggagcatgagaaacttctctggatggttctgcaacaacttcgagaacataagttatatgccaaattcaagaagtgcgaattttgactatctcaggtgtccttccttcggcacattgttagcaaagacaggatcaaggtgggtccaggaaagagtgaacccatcagggattggccgagacggaaaacaattacagaagttagaagcttcttgggtctggctggttactatcgtcgattcgtataagggttttccaaaatttcaacacccttaatcgagctcactaaaaagaatcagcgttttatatggatagagaaatgtgaagcaagtttttaggagctgaaacagagattaatcacagctccagtgttagccctaccttctgacaaagggaagttcgtggtgtattgtgatgcatctagacagggtctggggtgtgtactgatgcaggacgatcgggttattgcctatgcctcccgtcagtggaaagattatgaacagcgatacctgactcatgacctagaacttgtcgcggtagtatttgccttgaagatttggtggcattatctttacggggagagatgcgaaatttacattgaccataaaagccttaaatatttctttactaagaaagatttgaatatgagacagaggcattgtttagagttggttaaggattatgattgtaagatcctttaccatcctgggaaagccaatgtagtggtcgatgccctaagtgggaagggacccaggcaggtaactagtatagttcagatttcacctcaattagctgaagacatggtcagatcaagcatcgagtttgttgtaggcatacttcataacttgacgctccatcctgatctgttggagtgaattaaagttgctcaattaactgatccagatttagtaaatcagagaagaggtttcagctggtcaagccagagactttacagtgtaagatagtgggattctgttgttcaagaccagggtttgtgttcctagtagtgtggaaattagaaatgaaattcttgaagaggctcataccattccatattccttgcatcccggcac

SEQ ID NO: 137947 - DNA, 730 bp, Cannabis sativa
  modified_base (53)..(56): a, c, t, g, unknown or other
tgaagtattgatgcaaaggcatcaatgccccttgctgaccatgggcacccgannnngtgcacatccccttttcagggtttttggcacgatttttgtgggcgggaatgtagcaatcaagttcacccaggtatccgtcctggtcgagagtttgaaggcgtgccttagtaaccctggacggagggcttacccacttggcgcccaaggcaccttgccttctatgaggaatcgcagtagcaagttcctcactgacgtaatccacgccctcaaccaggacgtctccgtcaacatcgactactcgccaacctcgttttactcttcgtagtttgggcgttcaacctctgccacttcctccgcctcggaggaactgccaggacgtacatcgtcctgctcctcgatctgctggacctcagcatccccttcatgatccccctccatctggacgactagatttttttcggcgctggggaaagtggcgtgccgagccacttgagggtcagatgcgtcagctagatgcgttgttttctttgtacgagccatcattctatggctgggtacagggtttggagaatgttcttcactagaggaacgtgggctagaacgaagacgatgatgatcctcgtgcaaaagttgaagcaggtcctggtcgatccgttgtccgttcttccaagactcacttgagctcatctacaaaagacaacatacaagatgagtgtttggtcggaatatcgaa

SEQ ID NO: 137948 - DNA, 588 bp, Cannabis sativa
aaaaaaaattaagtcattttgctgcatataccgtacaaccaaatgaatgtaacggacccaaaaagtatatatatatacttttacttcagacgcaccattgaaaacaaaagaaggaccgtaggtcctagcagccatgcacatgctgactcgacgtcgcactgtggaggaggggcacggaacccgagaccagcggtggttggtcatgcatagctggagaataattctcgagctcacatggatgtgattttgacgtgcatggtcggcttcgaagattagaaactgagcttacatgatatgaatattacataggtacaatttttacgtaaaataatttcatatataaattacataaaaattttatgccccaaattggcttcattattttttaaaaaaataatattaacaaaacctacacccaattatatcatataattaacgattcatcacttctcatacattcacaatagtataactatccgttcacatacataacacgtatatataaatgcataaaatccacacaacatttaatgtatacacattcatggaactgctcttaacacgaattattggttttatggtactaaa

SEQ ID NO: 137949 - DNA, 796 bp, Cannabis sativa
taattcacaattatgaaagtatttataccgaatcataaaaataaagcccaccaaatcatgaaaacacaccctgccatttttgtttcaagtttttcttgtttccttttatgtttttttttgtttatcattatatatattctcttttctattcatttttctaaaaaaaacatattaattacactaaataaaaaaaaaaaaatactattataatttactttttgagacaattatttggatatgtggaaaaaaaatatatttgttatgacaaaaaaaatatatattaataaaaagtataatatttttatgtatatttatatatttgagcattgatattacgtaccactcagagctgatcctaagctaagacaggttaggcatgtgtctaaaattcaattctattaggggtcaaatgataaaatatcatttattaactcaggacttgccctggtactagtagtaccaatacgtaccgtgagatgacttttttttttgttaatgattagtgatattttataaaaattattaaattaaaatctttaagaccctatttttaattgcaataatagtatgacacctcagctcgtactagtggttaaaaattactaccatttctttttatattacgttaatcgaagaataaataaactgttaatttaagtaaaaatagtttaattattataccaactaacttcacaaattattatattttattattacattctttttgtaactatcgttacctttaaacatgtgtgataaaattacagaattgtgataaagtatacttaatatcaaa

SEQ ID NO: 137950 - DNA, 703 bp, Cannabis sativa
aaaataaataacataattataaaatatatagaaatgttcattttaattaataaaaaatacaataaaatttaatatatactaattaataaaaatatttctttaatgactaattattttatttttatgtataactaacattattatctcgtgcgagaaaggaggaattttgtctcgtgcgggaaaggaggtattgctgaaatctattgctcaagcattgccaaattatgctatgaatgtatttctcttgcctttagacacttgtaaggagttagagcggcttatggctaagttttggtggcattcacattcgagtagtgttaaaggtattaattggatgagttgggagcggttgtgtcaccataaacatgcagggggactgggttttcgaagcttgagagactttaatttggctcttctggggaaacaatattggtgattgttggttaatgatgactctttggttagtaggctctataaggcaaaatattatgcttatggtaatttattttctgctgaattgggagataatcctagcttcatctggcgaagtattcttgaagctaaagatctagtacattcacgtgctcaaagaacaatcactaagggggaaatgtatccattcttgcagatccttggcttccacatagttctaacagctatgtcgttacaaggcaccctgctcttgtgaacaaatcggtcagct

SEQ ID NO: 137951 - DNA, 921 bp, Cannabis sativa
atcatgcaaaaaagtattttggacattctttgcaaattggaaattattttcccactgtcattttttgacataatggttcacttggtgatgcatttacctaaagaattgatacttgggggaccagcgcactacaggtggatgtatccaattgaatgagccatgttcgtgtacaaacaatatgaaaaaaattgatctcaacagaaaggatctatttgtgaagcttatgcagttaatgaggcattacgcttgtgttccatgtacttccaagaagttgaaacttggtttaaccgaccagatcaaaatagtgatgtccttccacataagcctgaaaggaaattctctgtattcaagcatgttggggacccatttgtaagaggaccattgtttctttaccaatgcaagaaaagcttaaggtagagtggtacattttgaacaattgtaatgaagtggagaagtatatcaactaagatactttttgcattcttaatttagttttcctcactcatgaccttctcttacaaaaatctatttatatgcagtgagcataggaacgagctacaacttaggggtgatcaaaatcttgatgcagttcaagagaataagtttcctagttggttcaagtatcgagtaagtattattttctactgattttttcattcaaatacagtttcttgtactagtattgattgcatttttcaatcaattatagatcaatcaactctgagcgaataaccctggggaagtatcagatgaattgtatatcatcgcaaattcctctaatttagcatgctattgctatcttggatgtatttttaacggtcttaaagtcctagttgaggatcggaatgacaatcataacacccaaaacaatggtattttggtgctggagaaggtggtaaaattttttatggcgtactcaaa

SEQ ID NO: 137952 - DNA, 1349 bp, Cannabis sativa
  modified_base (1192)..(1198): a, c, t, g, unknown or other
ggatccgatccgatcaggataagtcgggtcggattcgatccgatccgaataagtcgggtcggatcagatccgatcagaataagtcgggtcggattagatctgatccgaataagtcgggtcgcatctgatccgatccgagtatttgatctagcggggcgaggggcagatccttacataatctggatcaggtcggatcatagccggatcagatccgacccgacccatttacactcctacatatttatacacaatacaagtgtatacaagtgttaaatcattaccatggctctgaggctagttgttagaatatattttactgggatctagatttactaataagtatgttgattaacactctaaatatgaattttctaaaacaatatacttaaacacatataaagtttaagtaactttacattagtggcagagaaataatatgtctcctcccactcagatctctaacctttgttcctttctgtcgtagagtattatcaagatctgagtctgattctcttttaagtattggattcttcacagtcttacacattatgattgagtacttgacttgctatgggtgggcatatactctttcactataggcttgaaaaatatgaagaaagagaaagaggatttcgaaatttagtgaaggaaaggaggctctcaaaaactctaatttagtgaaggaaaggaggctctcaaaaactctaattgtctgacagaatgaaaactaagttattaggttggatgagagtgagagcatcctattccttttatattatttcacttagggttagaatttaaattatatggaataaaaaataataaaataataacaaaattaaggctatagtggtcgaccatatagatgggccccattagttataattttgccatttttcaaccatttatcgtttatttcactaatgccatattttctaattttactcttataaatgtcgaaactatttatttaataattataattaattatcgaataattattatttaacttatttattaagtagactttacaaagtctcttaattatcaaataaaccctaaaatctcttttctttacaattaagtcattgcttagtgaaaatttataaataagacataatctaattttaaaattataattgattgattaaaactaattaattgagtcttacaagtagtattatctcaactnnnnnnnggaccatgggcctatataatcaagtttccaataataagtagctctagaatataccaaataaaatctctaacttattaattcatccttgcgccactatagatttggaattgcactcttaattataagaaacgttctatatgttccacgatat

SEQ ID NO: 137953 - DNA, 663 bp, Cannabis sativa
aatattgtgatcttattggtatatgtcgatgacatattaattacaggtcccaacacaactctcatctccaaacttatctcagatttgaataaatccttctccttgaaagatcttggtcctatacattattttttaggagttgaggtttatagagatcactctggtatgtacctgtctcaaacgaagtatatcactgacttgctggtgaaattgcacatggagggagccaaagcaagtcctaatcctactagcacaagtgttaaattgtccttagcagagggggaaccatttgaagacaccaaactttacagaagcaccctaggtgccctgcaatatctgtctcttacccgtcctgatgtggcgttcatagtcaataagcttagccaatttcttcatgctcctacatcaacccattgggaggcatgtaagaaactgctaaggtatttgaaaggtactataaaagatggtctttggctcaaaccatcatctgctatgactctccaagtgtattcggatgctgattgggcgagttgcttggatgatcgtcgatctactggaggatacttagtgttcctaggggacaatctagtgagttggtcggctaagaaacaacaagtagtagccaggtctagtacagagagtgagtttagagcattggctaat

SEQ ID NO: 137954 - DNA, 605 bp, Cannabis sativa
aatatcagaaattaataataatctattacaaaataaatattattaattaaaattgatatttaagtttaactatattaaaaataatatattaaaattggaaaaattcaaattggatgaaaaatcccaaaaaaatcggattttgggtacatagcacatttctattcacacacaggctgcgtgcagcctcatctacgcgtgcaggaggctacattgcagccttcgtgtgcgtgcttgctcggtgtgacgtgcatggcttcagaaaacattgagccttcagacacgtgtattgtccctagcatctgcgcacgtatggcttccttgtccgaagcctagtgcatgcgattgagcactatgtgcatccattcaacccgaaacttggaaaattcataactttttcaatttttatcagaattgagttccgtaaaaattaaaattgcttaatatttcacaaggaatacaaataaaatattttcagaacgatagtaaaaatattatcatggaaaattcgtaaatcacatacagtcatcaaataacacataaaccaatatgaaaacatccaaatcaatacaataaacattcatagttttaaatccatatttcatgaa

SEQ ID NO: 137955 - DNA, 971 bp, Cannabis sativa
ttggaataaacaaaacattgtctacaataaaaaatttattcagaaacttgaggtgagctttttctctagcttggaccgatattaatttgtcattcccaattttgagcttcaactcccctggatttaagtaatcccaagtttcaagcagctgcaatgaagagcgaacatggttagtagatccagaatcaataatccaaatggatttgtcattctctaaaacacatgattcgaaaacaaaagcgttaccttcgttcttatggttcagaagtttgggacatgttgctttaaaatgtcctttctctccacagtgagaacatagaagaatacatttgctagttgttctttgattgtctctattgccagttcaatttgaattctagctcttaaaattgaactcgaagaagcatcattgtcggaggtatcatcctcaatatcttcagctttccttctgcccttatctgcaactctagagcgagctctccttgacagtgacgagttcgctcataagcacgcatttcaacttctagcttatccaggcagacgagttaaagttgttgatcatgtaagatacaacaaatttgttatactcaggtgaaaggctgttgaatatgaactgaacccatttctcttttgataaaacaattcccagcaagtttgctttctgaatttagttcatcaaaagtaagtgtgaagtgacgctttgactaggagacatctttgcactatagagtttatttgcaaaggcatataatagttgaggattggggtgatggtcgttcattttgacactacaaatatcaataaacagaaataaattacttggttcaaataaattcatacacaaattaaaaaaataacaagtaaaaaaatatgttcgcaaaaatacaaaaaaataaaacatattcaattattttccaaggtttctaataagctgatacaatgtcccatttaggcgagagtcaaagatatca

SEQ ID NO: 137956 - DNA, 530 bp, Cannabis sativa
ccctttatcataactatcatgtggtctatccaatttaccgaaaatcctagttaccacataagagtgggtggccccagagtcaaataatatagagaagcaagagttagtaaccgagagctgacctgttacaactgaagggctagctttcgtatctgcatgagttaaagcaaacacccttgctggagcaggttttgcaggtgtcttctgctcttctttcttaagctgcgggtagtctcttttataatgtcctagcaacccacactggaaaaatccttgtcctctacactcacccatatgatgctttttaaaactgggacactccactgggacactccctggttccctcccctggttccctcaaggttccctcaaaacctcttgttctgacctgagccaccgggtgcaaatggtgcttttcatttcttatcagtggtcgagccactaccacccctaccataaccagaagtaggaggagtaggggctccaccagcaacctgagtctttcaagactcctcagtacactcaactgc

SEQ ID NO: 137957 - DNA, 841 bp, Cannabis sativa
tttacaagtactggtaaaaccggtaaaccggttttatacttgtctccccaaaaattaaccaatttgctcaaaacttgtccaattgccaccaaactttcgagagtacctaaataatgcatattcaacatactccaaccagtaattctcagaaaagtacactaaatcaaattacactagagacctaaacgtgagtttcaaagatcaagcttgctcaattctatcaccatagctcaaaactaacatctaaaacctaaaatcaacctaaacaaagctcacaaattgaatcaaacactgaccgaaccctaacaacccttaaaacccaaaatcacaatttcaagtcaacaccaaagcttggaaaactaagagcaatagatataggaattacctcaacttgatttcccctttaattccctgctaaaaataccaaaattcagtaaccaattcccctgttctaggctggttcgaagagagaggaaaagctagagagcttttcttcaatttagtcttttcttgatttttctctaactgactaaaggattttttttttaattaatcctttgctgaaaaaggaaagggcaggtgtcatcaacttaggcagccaccaaatcatacatttggttaattactaaaatgccttttaacttaaaattagggtattttcaaaactaggggtaaaatggtcaaattccataacctcgctcaacctcgatattttattttctcaaatatatttctcactaagatataatgttctaaacttacccatgtgattaaactagccatccatcgtattttttgttgtcgtagagcaaaaattacaaaaatagcatatttcacatat

SEQ ID NO: 137958 - DNA, 527 bp, Cannabis sativa
atatggtgggtaaggcactgcgagctgagggcatagtggagtgcaccttagagtctcgagggactccggttgttggtggggctcctagtcctcatacattaggctttggtaggggaggtagtggttcggccattgatcagaaaagaaaggcacctactgcatccagtagctcaggtcagaacaagaggttctgtgggaaccagggtcgaggtaatcgccagggtggcttcgaaacccgatacacttacccagagtgctccagatgtaaaaagcatcatctaggggagtgtaaagggcaggggtgtttccaatgtggtatgtcggggcattacaaaagggattgtccctaactcaagactgaagcacctatggtaaaacccactccagcaagggtgttcgcgataactcaggctgatgcagaagtcagcccttcaatggttacaggtcagctctcagtcaacaactcttatttctctgtgttgtttgactctgggaccactcaatcctatgtggcagccagaattttt

SEQ ID NO: 137959 - DNA, 1423 bp, Cannabis sativa
aaaatatactaaacttaatctaaaattaatactaaaaataacctaacagaccccgattaacgagattagcatattttaatattagcacgtggcgttcctctagacgttacaatatttatttttctgaaatatagtttatttttaaactctcgtccacgtgtcgtgaccatatttgttgctcgaaatatgtgcataataactttttatgatttttttcgcacataaataataaaatagcctattaaaatatatatatatatttttaaaataagaaaattattttaaagttattagttcttaactaaaatttttaagaaaaataactacaccattagccctcaaaataaaaaagaaaaaaatatttaataaataaataaccttttacaatttattttattttattatgttatgtgcgtaaatatatatttttccggtattattttcatcaaataataataattataatattagattgtttaggatcaaaattctgttgcacctatacaataacaatggtcatattttccattattatgttgctataaaaaatttatatactatatttatttatatagttttacaaattcacatatttatttatattctaagcagtatatacatatattaaaacattattttttatatatatttttcaaatagtgtaggctttttttactttataattaaacattattcaatcatttttctatataaaaattgttatatattttattttttagaatcttcatccttattatttatttaaaaaaaataaaacattactaattatatttatattaatataacatacatttttatcaaaaaattatttaatttagtatttaattgaatatattttagttcatttattttttgtaatttatatcgtgattgatttaacaaatgaagaaaaaaaattgaatacctcctatagattatttacagtatcaattaaatatataataatttttataattttgtaattagcacataaataacaatgcatagtaatataaaataaattaaataattaagtttaaataaaaaattattttaataggtaagagttttaagaaaaataactatattatcattaatcctcaaaataattaaaaaaattaaaaaaaaaaattaagtttttaatacaatttttttattgggaagagtgtatactgtagataagtttttacaactttgttattattattttttatttaatatatgttttttttttcaaaaataaaaataaaaattgttatcaatgacatcaaaacatctttacaaggaaaatgcaagcttagccataaagtagggaagcaattgttggaattattttaccaggatcttagatctactctcatataaagtgtgagaaaccttacattggatgcaatggaataatatgtctcctttcactcagatc

SEQ ID NO: 137960 - DNA, 539 bp, Cannabis sativa
ataatcatatacaaaataatcacattttcaaatagaaaaaacaacaaaaatggaaaaataatctgatttaaaaaaacttacctaagatgcaaaaaaaatggaaagtttatctaaaaaaaaaacgaaataacaatttcttacctgagatgccgtctgcttcgccggtctctgcccacacctcgcaccggtctccgcccggacctcgcaccggtctctgtctgctgcgccgatctcagctggggaaaattttagggtgcttgatgcttaagatggtatcatgagagagagagtgctggggtatacagagggtatcgtgagagagagagagagtggctagggtagttgaagagtatttagggctgaaatatatatatatttaaataaaatcgtatagtgacatgccacgcgtgtgaccaaagaggtatccccacactctttgcgcgtcgctatagccacgtatagcgacgcgcaaagagcgtggggatccctctttggtcacacgcgtggcatgtcaccataggccttgctttttttttttt

SEQ ID NO: 137961 - DNA, 938 bp, Cannabis sativa
attcttaagtttagaagccttggaagtatgaaaaacaaaatcttaagagctcgggagtacgtacccagcgccaatgttgacaaatggcttggtgtgttgggttttgcttattcgaatctaatgctatttcgaccgtctgtctagtttttcacaatgacaaacatctatgaagttagagaagtcaaattcacaactttacatttttcatttccagatgacctggaaatggagagtttcgagtctctcatttctacaaaatagcaacatctctgagaactagtgaccagctttgccaaaacacataaataggctaagtggtgtcaaaatttcacttaggcatcttaaagtacatcccttgggccctgggtcatgaactggcttctgtaaaacaatcataactcactcaatttttatccaattgacgtaatttgacttgccttttgaacctaatttaatgacctatcaagttttctcacactctagttgcaattttgaaatctatcattgtcaaaattcaccgaaagggagttataaaaataagctccaagttatcgccagcgggactcgccaggctccaaaaaattgctcatcactactagaagctaattttcattgttagatcatcatcaacagtcaaaaatatcttatttgtatttttctctatttttgtgggcctccttcacctataaaaagaaaactccataagctcatttttcacattcataaaactacccacaaggtcagagcttctctctttagtttctctctataaaaactggagcttctgagacatagcctttttctgtaataccatctagtgagcatcttcctctattttatctcactagaaacttgagctaaaacacttagtgtttttctataattctcattagaaataaaaactcaaagtagacgtagctctattaccatcgcgacat

SEQ ID NO: 137962 - DNA, 1530 bp, Cannabis sativa
  modified_base (100)..(104): a, c, t, g, unknown or other
  modified_base (494)..(495): a, c, t, g, unknown or other
taaaaatcgagcttgatgttctgaccatttgtttgccaagccatgaaaacgccatcgtcgaagcgcttggtgcaatgcttgcagacaacaggggctaggnnnnnatctcttttagccttcttcaaggcgtgatctttgaagtccctgagctcattcacctctatggttaaattgaacgtcgactacaagtctgctgatgcagctcctccattgactttagcctggcagtcagctcctccacagcctccttggcttctctcagctcgcgcttggccttagccacagccttgccctgaaccttcagctcctcccggtgcctctcctccacatgtgcctcgctctgctgggcctcctcccaaaatgctttcctctcggccgccaagtctctgagactctttatggcctcgtccatgcccccaaattcggacatgacgtacccatgatctatcagggtctttgagaggcgaccagtctctgcagcgatctggaaaagnnaacaagttaagtatgagagatcaaatgccataggataaagcacaggcaaaaagggaaaaacgaataacaaaaactcaccgcgatcatggtagtgctgatatcctgaacctgataaatagcgttcgtggaggcgcaggctgcgtatcttttggccgagagttaggtcatatgggaaacaaactggctcgtcagttcagaggcaaagggagcaagagcagggtcgacgaagcggttgaaccagtccatcaggggatccatgttcaggtcccaggcatttttgaaggcctcctcgcgtaaagaattttgttgagcttcctgcaagaccttcttcagggcttccacctcatcattccccctgctgtactcatctatagcataattgtgtttgccaattctaacttgctgcctctcctcatcagcggggatcggagtaaggaatccctgaatctgagctgacggccgggtgtcctttcttctgagcttcttggaagactcaacctcaaccattttacccttgcgcttacggtcgaggggagccagaatcttgccttcctcctcctcctcgtcctctccatcctcgtcgatcaagacgattgtgcctacgggggcactggaggatgacctccctggggtcaccatttgggcaggcgccggaggaagagaagagtacgtgctgtaggtttcagcaagggttgctaagagatcttccattggcctagctccttcaaaaagaaacatacaaagtgttagaatggctataagaaagcatgcgcctgaaaacaaaacaataaagctagtcctaccctgaccatctaactcagccctacaaaagtcttgaactacaatgctagcttcatcatccccaagaaagctgtctgaggggagaaaccagctagaagacaagtaagctgagtgatccagaggcatgggtgcaggatgtccgaaacccatccgggaccggcctaagaaatgacctaaatgggaaaagtaaaaggccttggcatgatccccccaccgagtggagggcatcctaaa

SEQ ID NO: 137963 - DNA, 551 bp, Cannabis sativa
attagtgcatcatacatgtcatgaaaatggtggtccattgagaaaacccctttttagggtgagcccaatgggaatgatcggggtcggtttgtttttgattgagcttgatggggaaactggctgtgaagaactcttttggccaacttgagccttttttaacttggcactgtttgtggtggcctaggcggacatagccttcacatgtgaataaggagattaacctaaagaaacagacaagttagaaaagctacaaatcataatctaaataaaaatgtatataatgaataaagattaccttcgtgatttcatgcagcaagttgtcggccagaagctccatgagaagcatgttcaaccccttcagtttctcgttcagcacaagttggatgtggttgtaatgactgcatacttagaatatggaattagtaaggtaattagcattaattaactaaattatatgattatatttgattcttttatattgtgggttctattttcaagaaataggcattaggattataatttttcaattttggagatttaattaaactcta

SEQ ID NO: 137964 - DNA, 891 bp, Cannabis sativa
  modified_base (816)..(842): a, c, t, g, unknown or other
tcttattcctggagaaaaatcaccgagaatggacatagatgtatttttaagacccttggtggatgagttgaaggagttgtgggttaacggagttgatacgagagataatcgaaccaacagtatgttcaagttgcgcgcagctcttctgtggacagttaatgattttccagctcgtagttatttgtctggttggagtggtcagggatacaaagcttttcccacttgtaatgaagatacctcttccaatcgggtaattggcaagacatcttacgcaggtcatagaagatttttaccaaataaccatcgaatgagaaggatactcaattcgacggacacattgagagaagacctcctcctagacgtttcacttgtgaggaagtattagaacaagtaaacaaactcccaccccatctcttgggaaatcatgagctatttagtggtgtgaagcgtaggcgagttgcagaaaatcaaaattggaggaaaaaaaagcatcttctacgagcttgactattggtgttcaaacattctaaaacacaatattgatgtcatgcatgttgagaagaatatttgagatagtttattgggcacaatcttagacaatgataaatctaatgacactaccaatgcaagacacgatttgaagaagttaggagtcagagaatggttgtggatttatgaagatgagagggggaagctgttgaaacctcatgcaccttacgttcttaaacctgatgataggctccaattttgtaaatttattaaagatgtgaaatatcctgatggcttttgtgttggaagttattttaccaggaactnnnnnnnnnnnnnnnnnnnnnnnnnnnaacaacctaaatatgaacttctaacacgatatgaaattaaacacataag

SEQ ID NO: 137965 - DNA, 1278 bp, Cannabis sativa
  modified_base (1087)..(1093): a, c, t, g, unknown or other
agtgtaaaaatgaaaaagccctaataaataatacaacaaaatatggaaacaaaaaataattaaagtttaaagtaggggtgtttgttagtcaatttggtcgggttataacatatttttattaacacaatataaatatcgattgtaaatatttaatcgtaacccgcccaattaaaaattagaaaaagttcaacccgcccaatgattttgtcgatttggtcgggtttgttcttcacttttttataattattattgttagtttctactattcaaataattagatttaaaaaaataaaaatatattatttacatttcaagcttaaaaaaggttatagtttaaattaattttaacaactttaatataagatatatatataattgagtaaacataaaataattgaataaaataataataaaaaaagtaataagacggtataaattttaaacttcaacttcaatatccaaatacaataaaaattattaagtataaactctaaattttaagttaaacactaaaatatccaaactttaaatacaaaattgtgtgactaatacatgtaatttatgtaatataatatatatacttttattaaaaatatatatatatataaatcggtttaactcggtttattcgggttcattgggcagtttagaataatttgtaaaccacccaatatatttattgggcggtttgaatttttattgtattttttgtcggtttattcggtttggtttgggcagtttgtaaattttgttgaacacccctagtttaaaatatgaaaaacaaaaaaaagaccataaataaatttgataaaacttctaataataagtatttccgaaaagtcgccggaaaagttgtcgtcactggaaaattcattggtgtcgaaaaatttaccgaaaaagttattaccaccgaaaagtcactgaaccggaaaagtccccagaaaagtcactggagttgtcattaacgtcagaaaaattaccagagttagatgtctcaaatataagttaatatagaactggttttataatataatgaataaaaacaaataacacataataactcaaaccagttataattaaagtagannnnnnnctataacataatgaataaaaaaaataacacaaaatgactcaaactaattataattaaaatagaactagttttataacagtattataatgataacaaggtcataagaagaaagactgcccacaacgacaacaaagatttcaagcatctcacggaggacccatagggagctatgtagagtctactcc

SEQ ID NO: 137966 - DNA, 714 bp, Cannabis sativa
aaaaagtgatcaaccgacagtgaggtcatatgaatctgatgtttgccacgtgtttgcataaaaaataatgaaaagaaataaacaacaggtttgttatagaggtacgacccccttgtgataacggataatgacctacttcctttttagttatatttataccgagagttaaaactattcagatcactatatgtgggatctgctatagcatccttaggaataaaaggtatgaatcaataatggcaaaactcaagtgttaagatgatgctagggtaggcgtgtgagagaggaagtgaggaagagagaattatcaaacttagacttaaagcttggaggcaggtttcaggcttagaggcaacttaggtttctaggctaaggttaaggcctttatataggaggtcgaaaaccctaggttacaatttagatccctagatattttcatagtttgttaaataattataaaagaccaaagtgcccttgattctagatattattcagctattatgttgggcttttaaggcccaatttgtagcccatgagttatagtccacgtgtagaagtgcccaggaaagcctgctgagcacatcttggtcggccaagtctctgtggaggccaggctagctggtcgtggtgcagtcccggccatgtgtagtcccaaggctggccggccagctcctgagagggagctagtccgtcacttgatccctgttttagtgc

SEQ ID NO: 137967 - DNA, 1109 bp, Cannabis sativa
agatacaatgcaccctttagatgggactaattttttattcaattttttttttcatattatttaaaatattttatcaacaaatttaaaataatttacaatataaaaaataatatttaaataatatagtccacatgcgtataaaataaaataatcacgcgtataatacatattttgaattctatttttggcgtattaaaattttttaaattttttaaaattttacaagatgtcttaaaaaattataacatacatgagcatgagaaaaaatttaactaaaaaattattttagataccaaaatacataaaggtacatcaatacatttttttaaggagagccttgtaaaattttccagttttatttacactcggtaaagttatacatttcacaatgcgtccccttaaaagggatgtattgatacaccctctacctgtttcgacatctagaagaatattttagtcaatttttttcatattcgtataggttatagttatttaaaatatctgacaaaaatttaagaaatttagaataatttacaatatagaaagtaatgtttaaaccgtctatttcacacgcgtataaaataaaatagtcacgtgtgcaatacaatatttaaatcatatttttgacgtgttaaattttttaaaatttttaaaattttacaggatgtctttaataactataaagtatatgaccatgaaaaaaaattaagtaaaaaattatttcggataacaaaatagatagggatgcatcagtcaatcatttttaagaatgtgcatgtatacactccaatattaaaaaaattaaacttaaaataattttaaaaatcacttttaatatttttttcaaaatttatgttttacattattttctcttaatataatacttattttaattttattttcacattttttaaatcatgaataattttttatatttttcaaataaaattttatttaatattttattttaaaattttcttaatatttaaaatatattttatttttaatctataaatatatttttaaagaatacatgagcatattggtaaatttgatgctaaaagtgatgttggtgttttcattggatattccttaaacagtagagctta

SEQ ID NO: 137968 - DNA, 885 bp, Cannabis sativa
gaagttttgtttgtattacatatgtgcattattagttattttaaggtttaattatcccatagttgacttacaatgcttaaattttcaaattgtcaggaaaagatgccattctgtttctcatattttgcaatggaaagtttgatcaaacaatgaataatgtaaattacgaagctactggccaatacatttcaacagattggaaacatgaagaactagtagacaagctaaaacgggtgctagaatgcaaccaagaaaatactcaactgcaattgaaatgccaagtgaaagaaggataccaacttatgaagataaatgatgatctaagcctatttttctacatacaatttaaagaaccttacttcacaagctatctattacgtgtgaacatggtcagcaatacaataataaccaacaacacctccttctttgcaatgagcaactcattagttgcagaacaactattttaaggttgtatgccatatccaaaatattaacagaaacataaagtattatcactatcatatttgatacattaatgtgaagtctcaaaacttttcttattacattgactattctgttgaatctttaaaagtttcttattactaaaatagtgcaatttttaccatggggactcgaactccgaagaacaaccaaatgagaaaccttatgcaaagcattccagccaactacaccacacactcagtggtaaaaattaatcagtcatttaaaaaataaaaaataatcagtactttggtattaaaaaaaataaaacttgtaatccttagagatatttaaaaatagaataaatctgacttttgcctccttaagaaattagtaataagaaaaattagggcaaaacgataaagaaactacaaagaaaccttc

SEQ ID NO: 137969 - DNA, 1235 bp, Cannabis sativa
ttcgactacctgatatggtccttctcagttaggtccgagtacacctgtcgtactgtctttggtgtttagaaatactcttcttaggaccatatatcccacaaagaatgtttgagccttcacttttttgtgcattctaccacaaagtctgctaaggcctggcctttaattgctgtttggggttggaaagtaatttcgtactgacccagttctactgcccacttgagtaaccatccaaaggcatctggcttttgcagtacttggcgttacggtaggtgagtgtacacccgaacaagatgagcttgaaaatagggccttaattttcttgttgctagaatcaggcagtaagtgagtttctctatcaatgggtatcggctctcggcctcaatgagtcttttactaatgtaatagaccaggtgatgtatgttgttttcctctctcatcagcacgacactcacagcatgctctttgaaagctaagtatatcccaagttcttctctgtccagaggttttgagagtacaggaggctttgcaagttgcgtttttagctcctgaaaatctttttcacattcctctgtccactcaaatcgcttgtttccccgcaggatgttgaagaattgaacacacttgtctgttgattttgaaacaaatctgctgagtgcggtgatccgaccagtcaaactttgtacttccttggttcttgttggagatttcatatccaagagggcttgaatcttctctagattggcttcaattcctcgagcatggacaataaagcccagaatcttacccgagctgactccaaaggagcactttaagggattgagtttcatgttgtatttcctaaggactttgaagcattcgtccagatcatctatgtgccccccagccttcctggatttgacaagcatgtcatccacatatacttccatgtttcgtctgatccggtctttaaacatcttgtttaccaatatttggtatgtggctacagcgtttttgagaccaaatggcatgactttgtagcaatatagacccatatctgttcgaaaacttgtatgttcttggtccggtggatgcatttcttgtttggctttggggcatgccttattgaggtctgtgaaatcaatacaaactcgccatttcatgtttggcttgggtactagtacgggattagcaatccaaaccgggtagaaaggttcaattatgaagttattattttgtagcttctctacctcttc

SEQ ID NO: 137970 - DNA, 538 bp, Cannabis sativa
  modified_base (59)..(63): a, c, t, g, unknown or other
ctttatatgtgtttattttatagtcgttttagaagtttatatttagggtgttaatcaannnnnttgtgagtagatctatgatcctggtaaaataatttccaacattagtgggtttcgccggtaatagtacaaaataggaaaattattgttctattagcggtggaatctggtggtaaaagtccaccgctaattattttcaaagttaaaaaaaagcgagaattttcctgcacaaaccacattgcccattaccggcgagacattctgccggtaataattactgtccaccgctattgttcatttaattaaaaaaataatttgtactactccaccggtaataagcccattaataggggcggacatgctccgccggtaatgtgtctgctcctatttctaataaatgttgtagtgataatatagattaaaatatttaaatatgataaattatatattaatatgatattaatatatattatgtgttagaggttatattatatcatatatagtataataatacacataaaaattgtaacatatgagg

SEQ ID NO: 137971 - DNA, 654 bp, Cannabis sativa
  modified_base (580)..(605): a, c, t, g, unknown or other
ataaacagagctatctctatttttaaattcctcttcatttttttcttctcaatatttttgaaccatgtagtgtatgagttattgcccacacaattcaagtcgatactcaagatagtgtagaagattgtggagtgttttgtcacctgaaggagaaactatatttagatcttgatcatactctgcaacagaaagaccattaagggttaaaaatctgaacggaatgagtcatttattttgctgccatcaatgtaatgttttctataactttatgtgtttagttccatgtttttagaaaattcatatttaggatgttaaattacagatttataatcaaacatatctgttagtaaatctaaatcctgataacatatttctaataatatatatatatatataaattatacctgactaattgatagaaggatgaaaataggaggatttctcggaggtggtggtggtgctctgaatagaagttaaaatattaaaatttttttaggcggagggtcatcataccatgagattaaacaatagaaagggaagaaccaaaggtctgttggaaattattttaccagaatcttannnnnnnnnnnnnnnnnnnnnnnnnncaccctaaatatgaacttctaaaatgattataaataaacacatataaag

SEQ ID NO: 137972 - DNA, 804 bp, Cannabis sativa
aagaaaccttcaaaccagaaaaccttcaaacaccataggtttcttactagccttccttcactattgtcagtcaacgtttcagcgtcgatcaacaacgacacttacctctacagccttatgtaagtttttcgcatcccgtactttattgttcgtgttcattgcatgcttcactgttcatctgctttttctgggtttgatgcttgaagtttctaggaatttttgtcgtgagtttctgcgtaatacgttagattccccttttctggtttttgagttatttttattttgcgtactgtatatttttccaaaggcccatcttttcttcacgtaatgactttcaagggtttagagaagactttgtctttctcgatttttacccctttttttcttttcttttctttgcttattcataatgtcaccatctgtgagattctggcacccgaattttgtccaggaaagccttctaaggctttcttgttgacaactgtccggagggggcctctttccagcggttaggggacccccattcccttttttgacttagggtttggtatggggcctgactgctagaattttaaatctttttcagaaccaaaatgtctacatccggttccaaatcttctaagaaaggaggaaagcgcctggccaccctggaggaggtgatgagaggtccgtcgcccaggaagggtataagcctcgtgccacggggtgggaagcagccgagcttcactcaaacctaacttgccctcatcagctggagcacattgtgctggtggccggcatcaagcccgcgacctccgggactta

SEQ ID NO: 137973 - DNA, 572 bp, Cannabis sativa
ctcagacccgtcctacattctgagttatgaagcattggaacttcagccagatctttcttacgaggaacaactagcgcaagtacttggtaggagagaaaaagtcttgagaaacaagacaatttcactgataaaaatatcatggaggaattgtaaagttgaagaggccacctgggaactcgagcggatatgcagcagaaatatccagagttgttcaggtaaattttgggacgaaatttctatgaagggataattgtaatgccctaagattaacaaatctgattagtaaaattttaactagttaaatgtgtatttatatggaattatattattatataatttattatatgtgaattaattgagaaatgacatgttaagaccccgttggtgagctaggggcatttttgtaattttcatctgagaacaataaaactgtaattttaatattattgcatgtttttggactatattattaaatagaacacttgttttgtccttctgcatgtattttttgacaagtcaacgtggtatagtcacaatcgggtattttgggccgaaccgggttcggggctgaa

SEQ ID NO: 137974 - DNA, 874 bp, Cannabis sativa
actaagtggtatttttgtaataaagcaaacatggtaagtaaaaaagttgatataggcgtgtatgagtatttttgtaataaattgtgtaaaatggatttttcatgtaaaaatttctttaaaataagtttagttttctattttaaataaaatgggttctatctttacaaatgagatgatacttttcattttaatgatagtaattttcataacagctcaaacttgcaaccttcatcataaaaatatcaattttttatttcattgtgtaataacaatgactcctcatagatttacaaaaaacatatataaaaataaagtactgactttttttttaaaaaaagatatgaagtatagacgtgtgtgcaaatatatcagagtgcatgagagagaggttgtgtggattagtaagaaacactaaaaagaaaaatgttgaaaccgtaaatgtgttaaaatattttattaaaatgaaaacaaaaatataaaaacataaaactgaaaaaaatacaagaagttacgtatacatgataatttcccaatactttatttaattaattaatatttattaacttaataaaaaattagaaaaaaatgagagaattaagaagagaagagatagtactatttgaagtgattttagaccgccacgtcaccgcctcatacttctctactttatatatatatttatagggagccaatacaataggtattgtaatttttacctatcaatagggatattaatttatagcccttgatttaatccaatagttcaaatcaactcttaaaaactacaccaaaataatatatatatatatattttctttataattactttaatattattaatggtaggttcaactaacaaactccaaacctaact

SEQ ID NO: 137975 - DNA, 536 bp, Cannabis sativa
tatgaaaaatttagttttagacgtccacgatcaaaaatgaaaagattactgaaaattatgaatataaaaccggtttctaaatacattatatattttaactaacagtttttagaatgatattatgtgttaaacataaacaaatataaagtaatgttggaaaccagtttctgaaatatatagtgaaacaaacacatataatttcgaaacaaataaaaacaaaaaaaacagaaaccggtttctaaatacattataaattttaactaatagttttcaaaatgatattacctgttaaaaataaacaaatatacagtaatgttggaaaccagtttttcaaatatatactgaaaaaaaaacatataattttaaaataaataataaaaaaaaagaaaccggtttcttaatacattgtaatttgtaactaatagttttcaaatactgtacaggaatggactcaataatgtgtgtggtcaaatatggagggcaatggaaagaggataaaaagtatgaagactacataatgactggactactaatac

SEQ ID NO: 137976 - DNA, 560 bp, Cannabis sativa
ccagggagttcaagggttccaccactgtcaatcttggacagacgggaagcgtggtgaatggtgggacaactcctgttactaaaactgggcctggtgtgcaagagactgggaataacggtaccacacacaaccagggcgttcataacatgactattccaccaggcatcaacacccagacgaccatcagagacgtaatcgaattgcaaaacctctgcgttgcgctcggactcatgtagggtcatagtaatgcactgcatcacgatcaggaggaactacgtgccgtattaaacctcgtgtttgacgaacagaggcgtatgttcgccgagtggagggacaaagagatggaggcattgagggctcaccatgcagaaatcgaagatcgtagtcggcaagccactgtgctgatacgaagaacctatcagactgtacgccaacaaacaccgagcgtcattcccctgggggaagcagaggatgacccgacagtgaataactcccagaaaaccaacggtcagccgtccaatccccgatcacgagttccactcgtgggccaagaggtaggc

SEQ ID NO: 137977 - DNA, 501 bp, Cannabis sativa
gattcagagaacaagtgaggcagttaataaaatccgagtgcgaatgcttgcggctcaaagcagacctaagagttatggagatccaaagtgacaagatattgaattttaggtcggggacatggtatttctctgaatatcaccgatgaaaggcactaaacgttttggtaagaaagggaaaacttagcccgaggttctttagaccttttgaaatccatcaaaggttagggaaagtagcgtataggtcggctatgcccccagtgctggtagctgtacatgatgtgttccatgtttcaatgcctcagatgtaagttttagattcgtcccatattctgagttatgaagcatacgaacttcagccagatttatcataccaggaacaaccggtgcaagtacttgacagaaggaacaaggtcttcagaacaagaaaatttcactggtaaaggtattatggaggaacaggaaagttgaagaggcaaccttggaactcgagacggatatgca

SEQ ID NO: 137978 - DNA, 914 bp, Cannabis sativa
  modified_base (262)..(269): a, c, t, g, unknown or other
  modified_base (336)..(340): a, c, t, g, unknown or other
cttggatatttttcaataaagaagtatttgattgtctttatcttattaaattgttttatatggactatcctatgtgacatctcgggaaatcggggtgttacatttgtgatttcaaaccaccttcattgttcttcacctattcgaacccatagtgaaagagtgtcatgcccacacatagcaagtcatagtgagtaagacggtggtaaccaaacccaaaggagagaaagagattcaggtttagatcttgataatgctctactannnnnnnnaatcaagggctagagatcttaaaacgatgaattatgtttattgtttttgtgttgatttggatgtgtnnnnnttggtttatgtgttatttgatgaaaatgttttacaaaaattttccatgaaaataattttattttcaatctgaaaatattttatttgaattccttgtgaaaaatcaagtaattttggtttttacagaattcgatttcgataaaaattgagaaagttatgaaggtttgaaattttgggtgcacatggctcaatcacacacacacgagtccttcggacaaggtgatacgcggccggatggcgggcaaatcgtgtctgaagacaagtgcacgcttggttcggacaggggacacccatacctagaggttgcaaacgcccgtgtcctgatgctgcgcccaccgagattgcctgctcatgcacctcctcgtcggcaccaggtgctcatgcaccaaaaatctgaattaagtgggattttttttttccatttttcgaatttttccaaattcaaaccctaaaaattaaaataaaatattatttttaataataatatcaattaataatatttaattataattattttttaatagattattattaattttatgatattttgaggtttaaatttaaaaattgattat

SEQ ID NO: 137979 - DNA, 1087 bp, Cannabis sativa
  modified_base (1038)..(1056): a, c, t, g, unknown or other
tatatatatatatttgaatttttaagaaaatacctcattaaaatctcttgagcatctgaatataggaaaaacttgaaaaatatatcaataaagattgacatgcaaagaaaaactaatacaatcagattagccaggtaccactcacagtaatcattgaaaaaaagattaaattttgctaacagtgagccacactattttttttttaatataataaccaattttattgcaaagagtcaaacaatacattagttattaaacaatgagaaatttcttctaaccaagaaatctcattttctatttatagtgcaatactcaccatgctgtgatattaccatttcgcataaaatgttgaaggcatacacccgaaaagacagataacaagaatctaaaagatctaacaacatccccacttaaagacaccctcctcaaaaaaaagaatggataaaaaacacaacaccttcagaaacaatctctaatagaaaaaaaaaaaaaaaaaatcaacaacgaaaaactctaggcgagaggggatcgtctaagcaaaatgaaggagaagagtttgtgctcatgagaattgacttcctcgaagagagaaaaaaaaattaactgtaaataaagaaaatatacattagtagtgaaaaaatcaaataataatcataataaataaataaatattattgaaaattttacaatatattttcactacaaaataaataattatattgaaaattattaaatatatccgttctatataaaaggagaaaacttatcttgtcaaatgcagttgatgccggcattaatagatcctagacacagattacttcaaacaatttaaaaacttaaataactcaataactttacaactttattaataaccaaaaactaaaattctataataactaataccactaatagttataataaaatctccctcatatataattgataaataatatagtttaatatgagaatttaaaaactaacattatataataagttaatacaacaaaaattaacacttttaataataataataataannnnnnnnnnnnnnnnnnnaataataataataatttatttttgccaactc

SEQ ID NO: 137980 - DNA, 2929 bp, Cannabis sativa
  modified_base (51)..(57): a, c, t, g, unknown or other
ccaccatgaaatgacaactacgaaactcttgcaacagtggactaagcagannnnnnnctgactgaaccactatactcctttgtcttcttgatatttccagttttaattaagtacttacgttccaagtttgagtactcaccgttttaggttgaatactcgcaattgttcctcatataatttcttcttcttattattattattattattcacttttggtgttgcgaaatttgctcgacaacaaaatgaatctgttaagtgcagccattcttcctgtcaaggcttgtacttccttaggctttgtcggtgatggcatgtctattaatgccttgatctttttaggatttgcctcaatacccctcgcgttaactatgaattctaaaaattttcctgaggaaactccaaaggaacatttttttggatttagtttcatgttatacttctttaatatcttaaagcgttccgcgagatctgaagtatgatccttactttttattgattttaccaacatatcatcgatgtaaacttccatattcctccctatttggtttgtgaacatttcgtttaccaattgttgatacgttgccccagcgttctttagttcgaacgacatgactttataacaatagagtctcatgttggttacgaagcttgtatgttcttgatctaggacatacatttttatctggttatatccaaaacatgcgtccataaatgacataagctcgtgcccagcagttgcatccattaactgatcgatcctaggaagtgggaaatagtcttttgggcacgccttattcagatcagagaagtcaatacaagttctccaagttctgttgggtttcaggacaagaataggattgtctatccacgagggataaaatacctcgcgtataacattgttggctaacaacttgtcagcttcgctgggtggtttggatcgatatttaagtggtgacagataatattagggtcgatccctatcatatctccatggctccaggcaaactgatcccggttcacctttagaaagcttattagctgatatttgagctgctcgtccaggttcttcccaatgtatacaccctttgctggatttcctgggtcgagaatgaccacttccgattcctcgattggttttagaaggtctttctcatcttgaactcaggggtcaagatcttcgtcattctgttcagtttcttctgtgtagatcgccaacaactgatgacgacttttctatgctgcagctctatacgatagtaatcgcgagcctgcatctggtcgccaagcaccactcccacgccatctggtgtttggaatttcaaggataggtgcttgatcgaactgactgcccctaatccgatcagtgctggatgacccaacaatatgttgtaagccaagggcaagtcgacaactaagaagtcttgcataacagtagcagataaaggtgcctcgcctaaggttaatgcaagctcgattatgccaaggctagcgatgctgtctccggtaaattcgaaaaggtttaccatacagggccttaatttggcttttttgagccccattttctttagagtctccttataaaggatatttactgagctcccattgtctattaacaatctcttgatccttttattggcgagttgaatggttatcaccaatggatcgacgtgaggttacctcacatttttctcatcctcctctgtgaatacaatgggaggttcctcagttttctccttcttggaaggttctggggcaaaggccgactggttgtcctttatctctttcacatatcttttctgggcgttatttccttaccttgcgatatgtggccctcctgaaataaccaggatgtcctctccttccacaggaataggttgtaacctagttgtttgggttattgggcaaagtgggcttgttgtaaccttggccctgtcttttcatgtactatttaaaatggcatcgggcgatgagactttctatctcatctttcaattggggacatttatcggtcgtatgcccaatatccttatagaatttacaatatttgttatgatctgtttacttctcgaaatcctcataggctcgggcttgccgaaggccaccttctgctcatgtgcgaggtaaatattctcccgagtttcattaagctcggtataaatggtatacactggcacgtatttgtcttgcttttttctgtttctttttatccttcgaccgttccttaactccgtcctttctcttcgaactagaagcccccaagttatcaattctcgtggaaacggttcctattgaagtattgctgggtttgcctcccgagctttttttcaatagattcatttcctttcatgcttcttccttctaaacgaacacctaagccctttgggcgaacttagtgatgcttctcactggccgtccttgtaaatcatcccgcaactcacaccctttggttaacggatcagtagagatccccgcctgaagggctgtaagttgcgtgctgtcgtccaaatttctaaccctagtcgcagccgtgctaaaacaacttaagtaggccttaagtgtctcgccaggctacttctttatattggttagcgagactgctttgggtcgcctatccttagcagcctgaaattgctttttgaaatccctagacagttgctcccaggaagttattgaatgataagtaaacttgttaaactagctactcgctgctcaagcaagtgaggtggggaacaaaatacaacgtaaattgttcgtcacattactctctcagattattgtattaaagttattcaaatgcgagaccaaatctgtggttaagatgagacatgcgggtttttgaatcccaaaggaaaaggggtattcataatatctgggtgatatggctcaagctcctcgtcagaatcgtatttccctaattcccccacttgat

SEQ ID NO: 137981 - DNA, 555 bp, Cannabis sativa
catcttttcatcttgttttctaaaaattcagctaagaatcaaagagtaattggagtagccagtaggtaagctctagaacttttaatcttgatttttaaagatttgaatttggtttgagtatgaaactttgagatataggggctgttaaggtttggttatgttggaatttattttctaagcttattttgagtttaattgtttatctagttgctggttttggggtgtggggttgtggatgaacaagtttgagtttaaaaactcaaccttggttcatccatgtcatgtttctatttggtaagttttttttttaattctattggttgaaaaatattgtgtaagctcattttaggtactctcaaaagtttggtagcatttagataaattttgagcaagtttagagttgtttggggaaacttggtgcaaatcggttaactgatttgccagggcctgtaaaaccagttaaccggttttgacagattcgccaaacaactcgttttctcgattcatgtttgtaacgactggatttcatagtatggattagcaagggcaattagc

SEQ ID NO: 137982 - DNA, 660 bp, Cannabis sativa
tcaaacgggtactcaaacgttttcgaccgccttgatgacgattcaatccaactgttggatctatggaattcgaatcgattgctatcccaaccgttcgatggtggctgatcattgatgtctcactcgtgctctggcctataaaagcaaaccttcttacttcatttggttacttttagcattttgccaaaattttctcagagtttcccagagcgaaaagaaacctcaaacaccatagatttcctactcttgttccttcgtcgttgccagtcaaccttttaccggcgatcaacaccaacacccagcttccacactttatgtatgttccttgtaccttgtacactagttcactgtttgttcatatagcatgctttactgtttatttttgtttttggggtggatgttgaatttctgggaattttggtttgagtttctacacaacgccgtggattcttcttcttttgcgtttagaatacttcttttcaccatattttggtcgaggacccattttcgtcgcacgtaatgacacttaagggtttagagtagacttcgtcttctcgatttgacccttttttctttttccctccttactttttgtaatgtcactatctgtgggattcttgcacccgactcttgtcaagggaaaccttttgaggctttctt

SEQ ID NO: 137983 - DNA, 773 bp, Cannabis sativa
gaaatgtattttacaaaatcatattcaattaatttttcttgtgccctcctcctaattcattctttgtaactagacttagtgctttttatttttaccaactagataatgacaagtcatagtgatctgctgagttggatgtaaagtttgctaccacggaccatccatgaaatgtaccatgaaatgacatgaatgacttgttttggtttgggcttaaagtgaaatatcacttggctgagacttattggctggtgagtttacttttcatgccccaaggcattaatagactcacaggttcctcatattctcccatctaatctaatctcactttcctgcgtggattttaacacttatgtctcccaaccaataccatacacaacacaattatctcaatgttatctttcatataatattttaaaaggttatgttttagatatactaatatttctaaatctatatataattctcaaatctcaatccattcaccaaaaaaaaaatacctataaagggaaagagtgtgcaacatctttatgataaaaggagatcgaactagtaaaccatcaagcactctcgtgagagtatttactttattattcaaaataccactttaaaattttattcttttaattttactacacatttacattacactatatattaacttttttatatttttatcaacattattaaaataatatattttaaataatatatattaataaaaatatattaagaacgtaaaaatcaatgaggtagttacaaaaaaaaaaaaaaaa

SEQ ID NO: 137984 - DNA, 588 bp, Cannabis sativa
  modified_base (50)..(50): a, c, t, g, unknown or other
ccatttatttttgtttggttaaacaattagcatgtaaaattcatgcaaanataaatcacttcaaatttcttatattgataactaatcaaattgtaaagagttttatttagggcataaaacccaacagaggctacattatcaatcatgcttctggccaccattttattggctatctggacctccatgaccagcgggtcgttgtgtggaaatctaattttgatagcgtcttcatcgttgaaggttatggtgggccatcctgctcgtggaatttcgggcttcttttcttccacggccaggataacttcctcttgttcgtgctgtgcttttcgggcatacctctcccgagctttgcccgaatctccagcaatatgcggacctccaacgataacttgcagatgtccatctaccagtggaggtagtaagtcttggttattgtagtttccctaaccctgatcggtcttgacatacttttgcaggtgtgtgttgtttttccatatcaagaattcaatttcccgcttcaagttgttgcattcattagtgtcgtggccgtagtctctgtggaatcgacaaaactttgtcatgtctctc

SEQ ID NO: 137985 - DNA, 945 bp, Cannabis sativa
aagctcccggacctgatggtatgagccccggcttttaccaaaaacattgggatacggttggttctgatattactcaacttgtcattgattttttcaataatgagtatatgccaacaggactcaatgacactcatctagtgttgataccaaaaaagaagaatttctccaatatgggtgacctgcgtcctattgctctctgcaatgtatcctacaaggttctttctaaggttcttgctaatagaatgagagttttgattgatcatattatctctcctactcagagtgcgtttattccaggcagacttatctcagataacataatgattgtctttgaaattatgcactatctcaagcgaaaaacaaagggcaaaaaaggtttcatggctatgaaactagatatgagcaaggcttacaatcgagttgaatgggactttgtttgcggtcatgcatcgtatgggttttgctggtaaatggatcaatcttatcatgaaatgtgtaacttctgttcgttactctatttttcatgatggtcacttgctggggccgataactccttcccggggaatccgccaaggtgatcctttatcgacttacttgttcattatttgtgctgaaagtttttcttccttgatcagaaaagtgtgaagctgaccatgtcattcaagggtgccgtgttgctaaaggtgctcctcccataactcacatgttgtttgctgacgacagctacctcttctgccaagcaaatcctaatacagctgctaacatcaagcaaatgcttcattcttttgaattagcatctggtcagaaggtgaatgtatcaaagtcctctattttcttcagccccaacaatgaagcaaatgttcgaaatcaaatatgcattgttcttggcatgacagaagctactgatggctctctttatttgggattaccaaacattattggaag

SEQ ID NO: 137986 - DNA, 752 bp, Cannabis sativa
gtgcttggtcgggtgctcacactatgcaaggggcaatggtgcctttgcacccgtacttcaagagggtggcagactatttctgcctttgtccgacccagttcactcccaagggcattaattacctgtctaccctctttgtcccctacggcattcaaggatggggtgtgtcgtctccacacaaggtcaattggttctttgacttgaagtctacccccaagcaaagcaagtcagggtacttctacttctctcagccagacttcaagtggctaacaggcaccgtggacagggatgttagtcagattaggggtttggttgacgagtactatttcgtggaaggcatggattccacctatactcagtttcaacagatcccgatatattaccgtccacccctcacattggcacttagagacagggctcaaaggattgttcatctaccggatgctctcggaatatcactttgttgacatcagaggccaactttgtacaagctttatccgacagactttatactccagcctatgaaggggagagagaagaagtccagtgcttgccgagatgacggagctgagcaagagaaggagctcattcaacttaagcgtgaggctaagttgaagggtgatgcatgagccaagcagtatgctaaggaatattttaagcattggaaggaggctcaggaatatttagagcaggagaggccgctcgggaagaagaaaaccctcccgaccgggcagaggcccattgaacatact

SEQ ID NO: 137987 - DNA, 804 bp, Cannabis sativa
agagagagagagagagaggtgtttaaatcgtttctaaagcccaaaatgtcagtttaaaactgacacaaagcataacattagtcctaatccgacacaaaattttaaaatagtcgttttacatcagttatgatcgttgacagacgtgttaaccaacactagtaccttattttatagtagtatcaacaaactcgccatataaaaatatttagacatttcatttgctggtcatgttcaacttattcaatccactttgattggtcttagaaactactggatgagagtctttcttcttcctcagagtgtgataaaggagattgagaagttttgtcgtggttttttgtggggtctaaaggacaatcggcccaagatccatttggctagctgggagaaggtgtgtctccctaaagctcttggaggtcttggtttcaaagatggctctcgttggaataaagcctcccttgccagatttatctgggacataatgaacaaaaaggacttgttgtgggtgaaatgggttaatgcagtgtatctcaagggtgccagtttatggacttacaacttaaaagcagacactagctggtattggaagaagttatacaggctgagaatggattacactcaacaggaaatcgattctgctggtgtgaggggaacttttagagtttttaaactctataatttgtcctttaatcaacttatagaccatgctgccaaagcgatctggtgcagccttaaagttccgaagcatggtttcattctttggtaggcggttcattcgaaccttctcactagagacatgcttag

SEQ ID NO: 137988 - DNA, 560 bp, Cannabis sativa
  modified_base (65)..(69): a, c, t, g, unknown or other
caataaatcccagccagtatttcatagaaaaaaccattacaactcaagttgccattaaagctcannnnnttgaactcaaagctcaaagttgcacaacacccaatcaaataatcaaaaccagctacaataggctaataccaactcaaattaagcctagaattcgaatcataactcaacctaaccctaacagccactaaatcacaaaatcacaaactcaacctaaagttaaattcaagaactagggcaaggagttgctagagcttacctttgcttgatttcttcttgaatcccttgctgaaacactcaaaaaccagcagctaatcccctgtcctgagctggttcaaaaagagaaagaaaggaagagaaagcttcttgattttttttgtattttcattatgttttttctaaaatgaataaaggattgactaagttaatccttgctgaacaaatagagtgctaggtgtcacaaacctaggctcccacttaactctgaccaaaggaaatgactaaaatgccctttaagtcaaaacttaggtattttcaaaagctaggggtaaaat

SEQ ID NO: 137989 - DNA, 1045 bp, Cannabis sativa
  modified_base (992)..(1004): a, c, t, g, unknown or other
catttggccatgtcagtgctcgcaactggcacaagacaacataaactaccttcagtaaaatgagcataactctctcaatttttatccaaatggcttggttgaacttgcattggaaagataatttcaacatggatctaagtgtttttgatagttatagctcaattctgaagttatcgagtccaaaattagctcacaagagagtttggtatattttactcgggaattgaatagtgtagttaagtgaggggtgttggaggacactaccacaacccatgtgacattatatgcgaacactgacatcccaaatcacatggtttcaatactcatcactaatatcatgaagtcctagctgagaggtgacatcccttgtcaccccattttaaattggtaaatcctcaaccgaaaataatcatttcccaatgtttgtgggattttggccaagaaacaatgagatttttatagatatttattttcttgtcattttttttcattaaaaaagatgatatacgagatttgttagtaagacacccctacatgtgagggattacttacaaaccctacaacctatataatgagaggtaagagactgaagtagaggatcctttttttgaaacccttctttgagacctacttgacgacagccaagaacaccatacttactcttcatctttttcattgagtccaccatacttagtcgacactaagacctcaaacaccatgatacacatctcttttttatactttattggcttattgttcccaagaactatacaaccaccaatattgatcagatttgtgaatattaagtctcccatgagtcttgcgttcataaatctcgatacgaattttatctagaaattcattgttgtattattgtccacacactcttgagaacataactgtggtgtgctggatctaatcaataaaaatacaagtagatatagccccattactaggggtgtacatcaaatcgctcaaaccgctcaaaccgnnnnnnnnnnnnnaaaaatacggtttgaaattcttcgcggtgcggttgcggttt

SEQ ID NO: 137990 - DNA, 1432 bp, Cannabis sativa
  modified_base (52)..(53): a, c, t, g, unknown or other
  modified_base (676)..(680): a, c, t, g, unknown or other
ctgttactttattgatattgagtaatctggattacattgaaatagagttttnnttagggcataaaacccaacaagcgtgccttaccattagggcgttacattttcctttgataatatctaagtagttaattatctactatgtgcgcaagaaatttattatctgccatgcttttgatctgcgagcagttattaattctacctcgtaataacagttataatctatttcaagcaaacgtgaatatacttttaatgatttatcactttgtatatttttgattgcttatatgaatagttaaatcgtctattcatacactaggtttaagtacttttttaagacaccttgatgtctcgtttaatactttcctatacaatgcgagccgttagtattcagcttcacatgggagttatgagttatatctcatttataacttttgatttttctttctcgtcagacagatttttaatcaaaaagttattcataatagtttgatcctcctttctcgtcagataggtttgatcaacaagaactttaaaaaaaaaattaaaaaaaatttaaagttggtgggtttgcactatatcatgtatttccagataaatttcggttaatcatacacatatgcccttcaagtaattttaaagagtaaaactttgtaattacttgaaaaaagaaatgatnnnnnttattcataactgaagttcaaaatattacatcatagatgtgagttacaatcatcagtttactagtagtagggtcgcaaatgtccacgttctagtagttctttatcagcgagctattcagccgagccaatttgtttaccctggttcctactattgcttcaatcacataaggaccctcccagttcaggttgaatactctgctgatgcgtctcttgtatttgcaaatactcgccttagcaccaaatctccaacattgaatagcttctttttgatccttttgttgaagtattttgttactcggtgttggtatgctgcattagtaatcagtacgttttcatcaagcagatccaaggaaaattttaagagttcttggttttcttcttgattataaaactctcgtctatgagtcgagatgtttacttccacatgtaatagtgcttctgagccaaatgctagcgagaatagagtatgtcatgttgctgtcttctcagtagttttatgagcccaaagtacttaaggtagttcgccgacccatctacctttggcagcgtctgatttcttcttgatagtatccttcaaggttttgttgacatccttcacttgtccattcgcctgaggcctggatactgacgagaagctcttaattattttgtttctctcacataactcattgaataagtcaccatcaaactgagttccgttatcggatactatcttcattggaattccgaacctgcagataatgtttttgaca

SEQ ID NO: 137991 - DNA, 1519 bp, Cannabis sativa
tccacgtgtccctgtccggttggtccacgtatattgggcgaaatcaggggcaacagtaataatattaaaactaaaaatataattttaaaatacataaaaagaatgattttgtgacaaatattaaatggtagaattaacaaaggaattgcatgtatttttataatagaataaagaaaaaagataacagttttttaatttaataaactgagcttgtgactgatgatgttgttgttattaaaatattgtttagacctttttttttactataaagaaacaatttaacatacaatttatgaaagtttttacattttattttgtggtataggtggaacattttctccacaaaagtgaatgtaggatgacaactataaaatacttcgtcataacattatatgtttttaagaactgaaaaataaggattttatataaaaaatattagtgatagaatttttatctatgaaatgtataataagaagattaattttaatgaattatgtgaatgtgttaatttctactttaaatgaaaaggaaagtcatgattcatatgactaattatttctataatggaatgtgtatttgtcttaatattttgtgataattaagatgataagtatgtgataattaagatgataagtaccgtataaatttagttgagcgcttgcttgatcgttataatcattgaaaaataaaatttaatttatgattttttggttatttcagaaattcatatattaagaaggtgttaatatttttactaaataagtaaaatattataattcatttgtttgttattttctatttatttctaaataaaaattgaaataattttttattaaaaaataaaatactcaaaaataattattaaaaatagttgttaataattattaaaaatttaattcttaaaaataaaatattaataaaatatttatatggggtaagacattagtcaatcacccttaaaatatataaaaaaaatcgtagagtaaggaaagaaatttaactaaagtattatttgtaaccaacatagataatacctaaaaactatctaatcgatgtgggactttagtttgtctatgtggattattttacaaacaaaataaggagaatgtgtcataaaattagaaaaataagaagaagaaaaaaaataagatgccacatagattaaaattttaacttttgaacaaataaaaattaagagaaaatattttagttgtaaaaaattaatttaacttaaacaaataataatataagaatattgaatagtacaaattaagttcttaaaataaaattatttatatatatatattgatatgaaactctcacaaatttaaaaaatagaaaaaaaaatacaaaagcacttttattttcctttattgaggtaaaaaagaaaagcacctatttctatctccaatttgaccatttgaataattaaacttacaaaaaaaataacagcaaaaatgctaaaataaaaaaaaaataaggggaattaccctatatattattttgggtaaataccatt

SEQ ID NO: 137992 - DNA, 626 bp, Cannabis sativa
gatctctagcaatccaccccaacccatgactcctctctctagaaaaaagagcaacatcacaattaaccttcaactctcccaaagacggtttaatccacagctcaataccagcaagaagctgaccagaaaaagatgaaactcctccattgttgttttgagcaaatttccaaagttcaaggtacgtaattgcagatgaaacaactttttccacaaaagtaaccttatcattccaaagtaaatcattacgggccccccaaacactccaaagaatcattgccagcttctcaatattcttagccaaatgagtgttacagaaatcctcaaaccagccaccaaactcctcatccccattattaacaagtagacccaaatctcgctccaaacaagctttagtaaaagaacaaccagccataatatgaaaagtggtttcgggttcaaaattacacatacaacaaatattgtaaacatgaacccgcttagttttaagagagactagagttggaagacaattggtaagagccctccaaagcaaattcttaactattggaggaagtttcaagtaccaaaactttctccaaaaaccagaattatcctgcatattccatcttccattacgcacttgtaaa

SEQ ID NO: 137993 - DNA, 768 bp, Cannabis sativa
  modified_base (458)..(461): a, c, t, g, unknown or other
catgaatggaagaattcagggaagttttaaaggtaaaaaaggactccgtcaaggtgatcctctttctcctttactctttgtccttgttatggactatctggcgagattactgcagattactgccaataactccagctatagatttcatccgcgttgcaaaaagctaaggcttatcaatctttgctttgcggatgatctcatcatctttagtaatggttctcaacagtcaatagcagctctaaaacaggttcttgaggagtttagtaaggcttcggggttgcacataaatcatgacatgtctcaaatttttcttggtggagtcaatccgttgaataaacacagcattcttgaagaattaaaacttgttgaaggcagtttcccgatgaaatatcttgggattcccttgagacaaactaagtggaaagccgaggattgtggcataatcatcaagaagatcnnnnagagacttcataattgggcaagtaagcatcttttgtttgctggaaaaattcagttaattcactctgtgttacttggaattcgaaactaatagataagcatatttgtgttacctcaatgtgttactaaggagattgagaggttgtgtaggggttcctttggggtttattgttggtttttgtgccctaaataaaatcaatttcaatataatcaggtttactaattaataaaaatttttattttgcatagttcacgtgatttatttcataatttgtttaatgtatgaattctattaagtccagaacatat

SEQ ID NO: 137994 - DNA, 628 bp, Cannabis sativa
ttttaaaccatgtaggacttttttaacatgactctcatattaccaaaattataaaaaaatattaaaaaatatgaaaaaaaagagaaaaaaagaaaaaaaaaaaaaacaaactcacaatgaatgccatatcatctctctttaaacattccattatatatatagtgattatttaatatatttttgtaatttttcaagtttaaaataattataaataaaattatttaattaatttttcatataaaaattattttcttacaattatttatttaaataaataaaacaatattaatttattattacatgaaattataactaattgagcaagattaaatttatcaatcacccacataaaatttaaattaatatagttttaattatttaaattaataattgtaagaaaataacttttgtatgaaaaaaataagtaaatcattttattaataattatttaaacttaacaaatattgaaaaatacaaaaatatattttgtatttacttaaaaaaattataactaattgggcaaaactatatttatcaatcacccgcataaaaactaaataatattaactttgaaacaaatcaaagcaaaataatagtgattgaaaaatacaaaaatatattttgtatt

SEQ ID NO: 137995 - DNA, 511 bp, Cannabis sativa
catagttaacgcgaggggtattgaggagaatcctgaaaaacaaggcattaataaatatgccatcaccaacgaagcctaaggaagtacaagccttgacaagaagaatggttgcacttaacagattcattttgaagtcaactgataagtgtgtgctgttcttcaacatattgcgagacaacaaaaagtttgagtggacaaaagagtgtgaagaggcctttcagaacataaaaaggcatctcgcaacgcctccggttttggcaaaaccaataactggagagacgttgtttctctatatagccatctcggaagatgcgattagtgcagctatagtgcgagaagatggcaagcaccagcaacctattgactatgtaagtaaaaggttactaggggcagaatcccgatatccccctctaataaaactcgcgttatgcctagtccatgcgtctcgcaaactacggccatactcccaagctcaccccataaaagtgttaaccgatcagcccttgagaca

SEQ ID NO: 137996 - DNA, 1150 bp, Cannabis sativa
attgagtcatcgcatgaacagacttcaagccccaggaagacccaatattggggcccttggcttgagggaccttggataaacaacaattgaccacttcctaactaggttgatgaggatggcgcctaccaacctaaccaaattactaccaatcgttgaattagaaaattgtcatctcaggcatcgattggaggaagtaaaccgatgtaatgctgagttagagcgtgaaatagctgtagtaaaggagcgcgggaggatggtacccaaaataaacctaacttggggagaagagatttacgaggcaaacctcgcgactcactaaccaaggggcaagagatgacccagagatatactcaaaactctcaggagatacaacttgaggaaactgaggaaagtcttggggtacagcctgggatacgtggaacatcaaatgaaaatcgccaacgctctcttcaggttcaacatgaagaaattcgcacaaatccatatagggagaataaggtgaaccaaaatctaagaggaaggtcaaggtccaaccgcagccacaacaggattgatctacgagagtatctgaacttgaaaaagcatgacctttgtcaacaactcggtccaaaactaaaggattcattccatttgcaaatggacgagttggaaaataagttcagaaggcatcaaaccacgaaaattggaagacaaccgggacgtgaaactgttgaggaacttgattcgaaagcctcgggattaaagaaaaaagacgattccaaaaggctgcccaaggataagaaacccaacaactatatatccttctttatgacgaatatatcgagcttaatgaaactcgagaaaatatctacctcgcacatgtacaggaagtcgttttttggggagctaaagcctatgaaacatgtgaggcgtaaaagggatccaactaaacggtgtgaatatcatggagatattggtcataccacggaagaatgtcgtcagctgaaagatgagatagaaggtctcatatcacaaggagctttcaacaatatataaaagggtaggatgatgtccatgattagctcgatctgcctagtaaccacccgagcaacctggggttataacccttctctttaagaggaaggggcacctcagttatctcaaaaaggag

SEQ ID NO: 137997 - DNA, 581 bp, Cannabis sativa
cttttaggtaactttattagcctatataaacacattattattagtgtttttagtacgtttttagagctcaaaaaactcagaaactcttaattaataagcaatcagaaggaacgaaaattggagagctaaagcaatcgagaaggcttttttgatggagtcttcaatattctcttcttctctattttcttcttttattcttaattgatatctgtgaagttgttacaatgaacaaaaatagctaaacaatttattaaggtattgatggatattatttgacatcgattttatgattctaatgtgatttaattttttcttaaatttttacgtatactattttattcgtatttaattacttttaattgtctgatcatcaattaaatgtttatgattttgatgcgacatctgagaagtgagtgtcaattatgctatagtaaaataagaacaaattttgatataggatgagagtacctttgtagtttggatagcttatagaatttttgtgtttaatgccttttcaatatttaatttatcacgagagtagaaaatttacctgtaattgagatttatatatctgagaagac

SEQ ID NO: 137998 - DNA, 884 bp, Cannabis sativa
tgttattcataggatgttaatttaacatacttgttagtaaatctagatcctggtaaaatactcccaacaatattgacctcactggcatgcgtgccaagttgccaggagttgttttgggctggctatatctgctgtgtttaaatgattgtcgtatatatttctttagcaaaacattttacaacagggattcccataacacgctttttatgccgttataatgtccatttttagtgttttattttagttttatttttttaatattatcatgatttttttcataattaataaatccatattagtattaaactagtttataaaatcacacccacgacgtccctataaattagggcgttacagactgcttgaagtctatcctacccctcgtgatgctttcccattgatcttttcaagcacagtctaagcttgaagttttatacaacttcaaccttccttcccgaaagccaaagcttgttccataaaaattcaacatgactctagcatacatgttatttttcgtgcaagaaagatcactaggggtgcgatacgtattcaattctccatcgcgggatggaaggactgcttgaagtctatccaacccttcgtgatgctttcccattgatcttttcaagcgaagtctaagcttgaatttttatacaacttcagccttccttcccggaagctgaagcttgttacataaaaattgaacatgactctcgcatgcacgttgtttttcatgcaagaaagctcactggggtacggtacgtctttaatcctcattcactaaatggaaggactgcttgaagtctatcttacccctcgtgatgctttcccattgtttttttcaagcgaagtctaagcttgaatttttatacaacttcagcctt

SEQ ID NO: 137999 - DNA, 1539 bp, Cannabis sativa
  modified_base (240)..(241): a, c, t, g, unknown or other
  modified_base (839)..(839): a, c, t, g, unknown or other
ccactcaattgaactcccatgttcccaagatgtaagtatccaccagaaccaaaagttagcttccacgaacaactcaaagaacataaataatacaactaagctgaactaaaccatatgacgattaagatccatagacataagatcaaccattgatattgactgagaaagatataacggtaagtttatgatatcttgtctaagatcaatatcggtcccctccaatgtatactccatacatcnnatactagtaaactttgccaataccctagaaaggatataacactttatccaaggtgtaagtatagcttatcgcaaattatcatgccagtctaaacccattgaactgaaaaatcaggggaattaaacttttgaacatataatcatgattatatttgttgacctcacttttagccaacgacagtgagtctaatttttcaagcgacaagtagtttcatacaaatgaaatatagaaaagtaaataacgacacaagaatttatagaggttcagacctgagcagttcggtaatagcctaatcctcgttatttgtattgacttaagaacaaggaaaatggttccgtttcttagagctcttacaacaatatctatgaatatgaattcttacacaaaatcttttgaccctttgcccagtgagtgtgaatcaatatttatggggctataagcttggagaggaagtattccccttctagttacaattgatataagcagaaagattgcatagtaaatacagaatacactaattgtgggatttggaccgcttgccatatctctgtaatctgatcccagagttatagagatttccttgatgactcacgatgcnaaagctgaattcgctaagtgttagcgttctgcgcggattgctcactgctcggcttagagaacttcgtccgagcatatgtgatgtgtcctgttcgacctgtgtcttgcgagaaagtacccagagttgattccacgtgtcaccatcgtgtgatgccacgtcagagtgaaaaaattgggataacatttgccccccaagtctgtacgggacttccgaagttgtgtgtagacttcatctgagctatctttgcatttggatgggtgacacgtgtcaggtgcgtctgttcgcgactcgaggaaaggcgctagagcttcctcccattctcttcctcagagcatcgatcatctgccgagatatgtctgcacagaacaaaaatagtatggttagaaaacaaccatcagaaacacaaggcatgaaaatcaagaagcccaagaacaaaagaaagtaaaatgcaaggtgaccgcccgcacaagacttagatgtccatcatcacctgacatcgatcttatctcagacatgacggatttccctttttcgaacacgagaggagatgggcgaacaggtgaaatgggctcccttatgcgaaaggcatgttcaagaagcctgggcgaggccaggagtttcttcttcctcttcaatggagtcacctgctcttcttcagcttcatcttcaggatttgaaggctcctaagcatattgtttgg

SEQ ID NO: 138000 - DNA, 608 bp, Cannabis sativa
tggttttgttttgtttcatttcgtcgttagttcttctttattcttcgatggctcaccatcaaattactgcttggttggaaataataagttttttacgactgaaggggttgttagtagtacagttacttaccttgagcaatagttgagtgctcaagctacaagtttgaatgagcctgctacaatagtttctactattatatcttctgagcggtagatgaaactgaatataaatgttcttaagtataattgtgatgctacaatctttttcatcttattttatttttagtttattttcgaacgatcccaaaattggtagttgattatttaactcattatgatgtatttctaatagggagatgtttgattggattgtatgctattatttaaactgattgctatataaaattgcatgatttatttcgaaaaaaaaaaattctttattaaaaattatacattttgtcctactaaaatatgatatgtaatttctataagggtgtgtttggaagtaactgtgtaaggtagggtaattattagggtgataattacacaatttagtaattatactatattttaaaatacaaggtgtatttggatatgaggtggtaatt

SEQ ID NO: 138001 - DNA, 1324 bp, Cannabis sativa
  modified_base (27)..(29): a, c, t, g, unknown or other
  modified_base (1267)..(1274): a, c, t, g, unknown or other
ttggtcagggagttataacagttcgannnctctttcgtcaaaaaggtttggtcgagaacctttaaaaagttttcaaaaaaaattttatttttgaagtggtcgatttacattatattatgtatttccagataaatcccggttgatcatgcatatattcccctaaagtaattttaaagggttatgccttataattacttgttgaaggaaatgattacctcattcacaactaaagttcaaaatattacattagcaatgcaatttgcaatcattaatctcataagaactttcccagttcatttgcttattttatcaatcttccaaaagcatctggttttgataaacgggttctgatgttcagggttaatccctaacatattcccacaattatttcaatatccagagtcaatccctgccatatacccaggttttaggtgaattaattctggttttaattatttgtcttaactgctactggttgacgaccagctttctttcgtagcagctctatacggcagccattgcgagctagtatttgcttacttcgtaatacatttacgtattgctttaccagactaactgccccttgtcttcttgtaacatgttccctcccgagataactgaggtatcccttcctcctacagaggaaggttatgatccctagtcgcttgagttattgggtggatcgggctggtcatgagcatattgtcctgcccctttacatattgttgaaagtgtcctcgtggtatgagacctactatctcatccttcaactgacgacattcttctgtggtatgcccaatatcttcatgatattcaaatcgtctggttgggtcctttttacgtctcgcgtgtttcataggttttggttcgctaaaaatgacttcctgttcatgcgcgatgtagatactttcccaagttcattaagttcagtatagttagtataaatgggtacatatttgtagtgtttcttttgtttcttatctttggacaacttttagagttgtctttcttctttgatctggaagcctccgacttgaattcttcaacaggctcgcatcccaattattttcttggttcctcgaattgatgcctgctgaacttgttctccaactcgtctattcgcaaatggattgaatcgttttgctttggaccaagttgttgacgaagatcaagttttttctggttcaagcgttctcgtaggttcaattggccatgacgactggttaatcttgtttcacccacataccgtatgttaggttttatgccnnnnnnnnaactccatttcaatgtaatctattttattcaacatcaataaagaaacaga

SEQ ID NO: 138002 - DNA, 555 bp, Cannabis sativa
catgaatttcttataaaccaaaatttcttataaaccaataattctattataaaccaataattctattatataggcacaattctattatataggcacacttctattatataggcacactttatatagaatagatataatttaaagaagaatagagttaatattgcattactaaaaaaagagtaaatcatatgttatactccataaacaaaaaggaaaagaaagccaaaaaaaacaataaaactaaagaacctaaagaatagtgtgcgaattttgatataaatcatcaatgcaaatgtacccaacataaatttataatcaaaatatattaactaaagtccaaggacgtaaagaaacagaaacagagtgtgaaataaattgctctttcacctaatttatattggacattgatccttaaaaaaataaaaaaattatattggacatgatagctaaatggagatattgaggtgcaacattaaaaccaccaaaatataaatatatatatttattctatataaaatctggctatataatagaattcttggtttatgaaaaatt

SEQ ID NO: 138003 - DNA, 542 bp, Cannabis sativa
cggtgacgttctcagagtacaactggcaacaagagatagagagagagagagagagatgcggttgtacctgtgaggaatttaacgagagagatagtgagaggggactttgagagaggtgggcggaggagaagtcgaaatcgcaggtgggttgagggttttgaagattagtcgaatgtgaatagtgggctccaatttggggtatagtgatacaattataatttgtgtctatggatccgcttagtaattaaaatatgtgtcagttataaaaggtcaaatagaaagtattcgaccttttataaacgacgctaattgtctattatatttttgaaaaaaaaaacttattatctcgtcagttgtctttaatgcgtcattgtctaaacgacgcaaatcacaaatttttactgtcttttacaaaccgacgctgtaattaattgggacactattcacgtcggtcaactctgtgaacagtagtcttgaccgacgtgaatagtgttttttgtagtagtgtcacaatgtcacttgcggtgtttacgggcccggtg

SEQ ID NO: 138004 - DNA, 539 bp, Cannabis sativa
aataagaataagggtaaataacggcttacgtacccaaaattttaagtttgtaagcggcataaactttatatttatttatagcggcataaatactcaatgtttataaaattgtaattttcttttagttttgtcaatacagaattcgttttgaatttattaaaataatatttagaagtaattgatattgcacgtttctgtttagtccaatgacctagaagttagttcttatatatatcatgtaaagataataacaaaatttatacgaaattagagaaaaattataatgtaactatttaacttaataataataataataaaagtcattgaaagtatatattttatggatttaattctgatttttatttatctttcttattttcatgcttttaagcttttaacttttgttcttatattgtgtttaggggtaagttgaaaaatgtctctttttttcatcaattaatcaaatttatctctaattttatatttatttgaaacatatctctttttatatgtattgtacccaaaatacccttacataa

SEQ ID NO: 138005 - DNA, 703 bp, Cannabis sativa
ttatgtattctacttttagttgtcacaaccaactcttctttttttttttctaccacacacttaattaaaacaagacacaattaatgaagaaataaataagatacaaagtgacacttattattaagaaagctagctattatttggttcgcatcattaaatttcttatttttattacaaaaaatacttaataggattgggatacatgatttttttttttttaattatattgttttttaattatattgttaagattgagtaaattattattatttgtttcaaaaaaaaattattattatttgtcaaaaatataggaaaattttatgatgcactatgtctcccttatttattttggcatcttgaaattttttttagtctaatttcttttatgattgtgtatgttctatgttgtaattatttaatatatcttgaaatttgttgagaaatttaaagaaatttaacagacaaagttcaaataatctattacaagcgtgacacttttattttatatccatgtgaaataaaatgtttaaacattgattatatattgtaaattatttcgaatttcttaaaattttgcaacttgtcttgatatcaaaacaaatattagtctacatttttttttggagtacattatagaagcacccaaaatatacagggtaaatatcattttggaccttgtgttttgtaaaaattaccgactgaa

SEQ ID NO: 138006 - DNA, 1072 bp, Cannabis sativa
  modified_base (814)..(814): a, c, t, g, unknown or other
cgctgatattggctgaaagagcaagtttgacaaaagggcgccacttggcgcatgcagaagacagaagacaaaatgcatttttgacttgttgaccatccttggtccctacgtgaaagacaagcccacttgtgtgggtagtgtatgataaacacacttggaccagctgtagaggtgttttacacatgcgcgttgggaagtgaaagggggacaagggctgatggcagctgacggaggggctgattcgcgaatggagaggcgccacgtgtatgggctgtcttttggaggagtaaaaagggctgggtgggcttgatctttgggcctttattttgctcttcaaaaataccaactttcaagtacttgagcctcattttatcatcttttattttttttatttctttctttctttttatcaatgccattttcttaatcaaacacatacaaaattaaatccaaataaaatattttcaacacaaaatatatcacaataatttaaatgaaaatatttatttaagatctaattaatttgtatttctttaaataaaaacaatgcattttcttaatttctttttatttatttctttctcttatttgtgtcataaaatattattttcttacaaaattaactcaacactataatattttcaaataaaaatatataacattaatttcatgaaaatattatatagaattaattttattttgtatttttacactaataaatatacatttttgactacttaacaaagagatctttatacgttatgtcaatagaggaggaaattatcatataatgaaatttttgtcaacaatagangttgaatgtttgtatatgcaataaactaacatgagatagcaaagatcatggtattagatttgtcgagaatcattgacatacatttttttggccaaaatattatgacgcagtccaggcaagtttactcgcataaaattaaaaaagacctgtagggtgtgtaaataaatatttctaatgagaaatttgcatatatgtatttgtacataatgaattgttgtacaaactttgcatagacaagtgtcaatcttgcaaacttat

SEQ ID NO: 138007 - DNA, 1058 bp, Cannabis sativa
agcttcaaattacacacataaacataaaacactgaaactttcacaaattaaaagataaaataacttcaatgacacacaattacataaaaaaaaaaaaacatgtttacaaagatatcaaataactctttactcaagagttatcatttacactcacctaagtgatgcttcttacagttgggacatttcgggtaagtgtatcgagtttcggaaccaccctgacaattgtcacgaccttggttcccttggaacctcttattctaacttgggccaccaagtgcagatggcgcttttcttttttgataagtggtcgagtcactaccacccctaccataactagaggtaagaggagtagtggctccaccaataacctgtgtcccacgggactcctgaatgcactcaactacgccctcagctcgtagtgcttttcccaccatatcaacataggtggtgttatcatctgttgtgatcatcatgtcatgtttgatcttaggattcaatccgtccagatacttttctttcttactgtagtcggtcggcacaattactaagaccagcctagccaacctatcaaactgagttgtatattcggtaacagatatattttctttctgagtcagctaagtaaattcttttctctttgtgctacgaactgcctcattatagtactttgcattgaacaatttttggaactcttcccaagtaatggtagtaacatcccaagaaagagccaccatatcccagcaaaccgaggcatcctcctggaatcggaaagtggcataaaccactctgtcgttgccggtgacacccacaaaattcaagatccatgtaatattcgtcagccactgttcagctttcatcacatttggacctcccagaaagactagaggtgcctatttgtagaacctttcgtatagtggttccatccgattcacagcaacaaccggccctgcctgctgttgttctcaaaagtgagtgttttaatatttatactcgcaagtgcacgaatcgtttcggaatatagtgttcatgtaagtgcaaggtcgaacccatgggagttg

SEQ ID NO: 138008 - DNA, 683 bp, Cannabis sativa
gtatcatgtatgttatatctatgaattaatgagtacattttcttagctactacttgaaatattatagcaaaatgtcaaatatatataactgtaattataacaaatattccatatgttttcaaaaaaaaaaaaattaaaataacttacaatattgtcaatattccatatgtttttaagcaaaaaagtaaaaatattttctaaaaatatatgtccaaaatatttattaaggaaaaaaaaaactatttaaaaaaaaattgaaagtaattttattttatttttaaaattttaattctcaattaaaaagttaaaataatttttaatttctatttaagaaaataaaaaagtacttactatttaagaaaataaataattatgagttcgtttggtatgttgtattacacagtattataatatatagtattatattgaattgtattttacacaatatttttatgtaaaattatatgtgataatacattttatgtaatataatataatacaatataatataatacaatctaatacctaattataaaggagtgctataactatattatataatatagactgttagataaaaaaaaggtaaataccattttggaccatctgttttacaaaagttaccaattggaccatatgttttgttaaatgacaaaatcgaccctgtattttctaaaatagta

SEQ ID NO: 138009 - DNA, 933 bp, Cannabis sativa
  modified_base (48)..(50): a, c, t, g, unknown or other
tgcggagcagtgctaggcttgttctgacactttcgtgccatatgaccnnncttgttacaattgtaacacaaaaactgtgcatggtcattctgtttatgtggaggtggctgccttccatgttggttcctattatggttccaactctgattattgttacgaggagggttgttgcggttagaattagaattcgagttgcggttctgattcttaaaatttttgccattaggcttcagaaccgctggtgtggatttcttagtgttgttgtttgaaacaacaagcacttcatctttctggtcttgttttcttgcttcctcctctatacgaaggcgggtgatcaaactttctaaggaaaattccttagtcttatgcctgagagtacttttgaaatccttccaggaagggggtaacttatcaattaatacagcaacttgaaactgttcatctaaagtcataccttctgagatgatctcatgtgcaattttctgaagctcgtgagattgggcttccacaggtttgtcgtccaccatttgatacttgaggtagcgactgacagcatactttttagttccagcttcttcagtatcgtatttcttttgcagagcatcccatatttcgtttgctgatttatctgaattataatagtcatacagatcgtcagataaaccgttaagaataaaattcttacagaggaagtcattttcgacccaggagtccaaatccttttgttgcttctcgcgttcagcctctttgtccttgtcggtagaagcttcagagacgactggcttcagagcagtgagaacgaaagcaactttcttcatcgtcaggtagaacaacatcttctgtttccatcgcttaaaatgtaatccctcaaaacggaaaggcttgttaatatcgttagaagcagaaccagaaaattcatcggtagcagccata

SEQ ID NO: 138010 - DNA, 505 bp, Cannabis sativa
aattcatattcagagatattattgtaagagctctaagaaaggggatgattttccttttcttaaatcaatacaagctaataggattaggctattacctaactgctcgaggctgaacctctataaaattctcgtgtctttacttgatttattatattacatacacattatactacttgtcacttacaaattagactcactattgttggctaaaagagaggtcaacattttggtgctttcattgagagctgaacctaagatcgttctcaaatctaatcaaaagtacgatggtggtacagactcgtagaggcgtggttgatctggcaaatccacaggcggtggatcctgcactgcagaacccgaggaacacgagggttttgtcaaccacaaatctcaaacaaccctcgatcgtaggtcacggtgtgacaactcctgtgagtggaatcgtgccttgtgtgcaagagactggaaataccaattcagcagcaaaccagggcattcctaacac

SEQ ID NO: 138011 - DNA, 1081 bp, Cannabis sativa
  modified_base (37)..(41): a, c, t, g, unknown or other
attagatttttatttgaaaatttagattctacacaannnnntaccaaaatttgaattttgtttcactgaaaaatgatttttgaataataaaatatcacaaaattaaaattgggcacaaggagtatgcattgcatactccttgcgcgcatgtaaggggagcttgaccgagggaataggctgcatgcagccttgtgtgaacgagtaagctcgacgtgacaaagggctttagatagcccttgtctaagaaaccttagatagggtttgtttgaaggctcggtcatgacctagtgatccatggcttctgtgtgcgcccacgtgtgcaccaaatttggaatatttacatccaaattcaaaaaatcataacaattttataaaaattcaaattgagttctgtaaaagcctaaatttagtaatttttatctacattctagaaaaaatacttttagaatgaaactaaaactatttatcatcgtaaaattgcaattttcatacaatcatcaaatatgtacataaaccagcatgaacacattgaaatcaacacaattatgttttaaatccatatttcatgaaaggaaatcgttaacatggctctaaggccagttgttgacgattattttactaggatctagatttaatatcatgtacgttgtttaacatcgtaaatatgaatttctaaaataatggaatttaaacacataaatttcaagaaatcttacattaattgcagcagaattaaatgaccctgtccgctcagatctctaatcctttttcctttttgttgcaaagtattatcaagatctgagttagattctccttcagttgttggattcttcatagtcttacacactatgattgagtacaaacttgctatgtgtaggcatgtacacaatcactaagaggaacaaaagttgaagaagaaaatagggagaaggattcaaaaattagagagagaaagagaagactcaaatttgactgaaaggccaatgattctaagctgtcagttttgagtctctcactatctctttataggaatcatttgttgggattttataccctaaataaaacccatttcaatctaatc

SEQ ID NO: 138012 - DNA, 925 bp, Cannabis sativa
  modified_base (773)..(794): a, c, t, g, unknown or other
  modified_base (867)..(899): a, c, t, g, unknown or other
tgtggactgtataaatgtttaatgggtcggcccatagtatttttgtaaatttttttttcttttttgtatttttctgtttttttcccaaaaaaattaaggagcgttgatcaattcatgctctcttatatatttcaatttaataagtaatatacaactactccatattagctcaaatagtgataaaaagtattggggtgcttgagtgggaggttcctaataaaatgaaatgtaaggatatgcaatgtaatttacatattatttataataaatgaatagctataccaccttttgtaatattgggaatttaataaggtgtctaataagggatacccagttattattgcagtgatgtgctgctgacaattataatgatacatttcaatttcaagtagttggtgtaaccttttatgttcatatatatatttttatccgagggaggtttatttggcaccacattttacttatttgagttccattataattgaacctccattgttaatatatgacttcttaattatataatcatttcaaaattctgttattatattggttattatatatagtttctcattttatctgtagtgtgtattgaagccaaaataattaataatatagtgtgattgtactaatacattttttttacttatttcagtattcagaataaaaatttagtctaattttattttttatattcatgtacgttatagctatttaagatatcctacaaaattttaaaaaattcgaaataatttataatatagaaaataatgttnnnnnnnnnnnnnnnnnnnnnntataaaataaaatagtcacacgtacaatacattatttgaacgcaattttcgacatgttaaatttttttgaatnnnnnnnnnnnnnnnnnnnnnnnnnnnnnnnnnataatttacatgaccatgagaaaaaa

SEQ ID NO: 138013 - DNA, 556 bp, Cannabis sativa
gtaaatatcctttataacgagactatagaaaatagggcacgaaaaagccaaattaaggccttgtatggtaaacctttgtggattcaccggagacagcattaccagtcttcgcataatcgagctcgcattaaccttaggcgaggcaccattatctgctgacttccattaagggccaagccttggctgacttcttcatagaaggcataacaacagaagaaattccacttgttcagcgagacgcaaaaacctagaagttatacgtggatggtgcatccaacgaatagggttcgggtgtagaggtaataataatatcgctagaaggctttaagtttcactatgttgtgaggttccaatttgacgcattaaataacgacgctgagtacgaagccttgaccggcagcttaaaatagctaaggcattgaaagtcaaaaacctcatttgttgtagtgattcgcagctgattgtaagccaggtcctcagggaataccaggctaaatgcttaaaaatggcgaggtattcagaaaattcgaaagaacttggaaagattcaattactt

SEQ ID NO: 138014 - DNA, 520 bp, Cannabis sativa
tttgacaagtcgtgtaaaaccagttaaccagattgagggcaagtttcccatatcgttcaatgcgtcaattcgtgttatttctagagccttggttggttatttccttgatacttaaggtattgttatattagttgtcaatagtagaacccttagttgggggtttgagtttcccatattagggttttggcgtgttgtttacctgcttatgtaatgtgactagggcatccatccaacacgagattttctgttcaggtcggccaactcacttgaattcagaaataatgtaagaatagcatagaacatattatatatgtaaatatgtgtatgtgggatatatatgcatgcttgttgtgattcacacactaccaataatagtacggtagcggtactgagtgcattggtatagtgtacgatatgttaagagtacattatggtattaccaacactagtatggacagatacgaagtgtgtgtggtacagaacttagtggtactcagggtacaaaacaaaccctaccaac

SEQ ID NO: 138015 - DNA, 1040 bp, Cannabis sativa
  modified_base (350)..(356): a, c, t, g, unknown or other
taaaataatttccaacatattctagatataaccagataaaaatgcatgtcctagatcaggagaatacgagcttcctaattaacatgggactctactgctacaaggtcatgccatttgggctgaagaatactggggaaacatatcaacggctggtgaaagagatgttcgtgaatcagatcagacgaaacagggaagtttatgtcgatgatatgttcgtaaagtcagttaaaagtgggagtcataccacaaacctcgcagaatgcttcaaaatattaaagaagtacaatatgaagttaaacccgaaaaaatgttcttttggagttttctcaggaaaatttttgggattcatnnnnnnngcgaggggcattgaagcaaaccctaaaaaaattaaggctttgatagatatgccatcaccaacaaagcctaaagaagtacaagccctaacaggaaggatggctgcacttaacagattcattttgaagtcaactgataagtgtttgccattcttcaatgtattacgaggtaacgagaaattcgaatggacagaagagtgtgaggaagccttccagaacattataaggcatttagtgacgcctccagttttggtgaaaccaataactggagaaatgttactcctctatcaggctatttcggaagacgcgattagtgcggctatagtgcgagaagagggaaagcaccaacaaccagtttactatgtcagtaaaaggttactaggggcagagtcgaggtatccccctcttgactcgctttgtgcctaatccatgcgtctcgcaagttacggccatacttccaggcacacaccataaaagtgttaacagatcaacccttgagacaaattttatcaaaaccagatgcttctggaagattgataaaatggtcaatcgaactggggcagttggacataacatatcaccctcgaacatccatcaagggccaagccttggcagaattcttaatagaaggaataactctagaagaaaattcgcttgttcactgagacgcggacacttggaggttat

SEQ ID NO: 138016 - DNA, 855 bp, Cannabis sativa
ttcttagataaactctgcccgacagcatgatttctatagaattcatcgtgcacctctaataggagtcgtacagcttcttcttaagtaacacagctgagcaacgacataattccttctactatgatataccgtgcagccttccttctcatattttgagcttcattcttattatttgggagttccccagtgttgaggtaggcggctatcggtgtcatctagtttggggaagtatcaatcatttcgatttcttccgtgcaagtgatgctaggctcttcgaggaattggataggaaccaagtttgccttatcacttacattactgcttgccaatcgaactaacgtgtctgcagttgtgttttcttcccttggaatttgtctgaggccgtagcctttaaattgtgtgagcaagtcatgtatttttctcaaatacgctatcatcttttctccctgagcctcatattctttggatacatgatttaccaccagctatgaatcactacagatttcaatgtgttcggctttcatctctagagctagttttaggccaacgattagagcttcatactcgacttcattattagatgctttaaatccaaacttgagtgcagcgtgcaggtgttgcccatagatgtgacaagggcaattcctgcaccagatagctgatctgtagccgacccgtctacatgtagtttctaagtcggcttatcttcactgttacttggctgaggtgtttgtaccgactcgaggtcactttctagtacgctttcttccttgcctgtgcattctaccacaaagtctgctaaggctaggcctttgattgctgttcggggttttcgtattggcccaactccaccgc

SEQ ID NO: 138017 - DNA, 715 bp, Cannabis sativa
gctattaagaaggtcagagtccctagaagatacgagtattctaggagggtagcgagttagtttgatccaagaaggttgtgacctgatggtcttgaaacctatttggccgtgtctcatctagagctcaaggcaagggttggatatgttctgacactaaatcagatcttgtcccctgcgttagaccatggtagtgcttgtacgtgtctctaaagcttcctttttgaccaaagacttgtctaggcaacaagtttaaaaggtgaaacctttgagcaacacgtgtctatattccgacaaaatgccttacagtaatcgtacaccacacgatgagaaattttcctaccgactaacggttagatcatcatgttgtagtatcagtccttgtggtgtgttgagtaagaaactctaggtgggtaaatggtatgtccttacccacatgtgtgcctattaatacctttatttttcatgcaaaaggtgtgaacaatttcatacttaccaaaattctgctaaaattcctactagctttctttttcaagggaaataacaggaatacattgcttggatttatattgtaaacacttataatattcaaacacacgacaataaggttaatacaatgaactcgtggactagaaattattaatacctaaaccacataaaaattatttatctattatttattgttttacatctttcttaagctctaattaattagttt

SEQ ID NO: 138018 - DNA, 733 bp, Cannabis sativa
  modified_base (450)..(458): a, c, t, g, unknown or other
  modified_base (685)..(690): a, c, t, g, unknown or other
cactttctctttctctcttcattttcttcttctttcctctcttctactttatattattttataacaagtgttactatttttaaattattttaggataagtcgagatatttgtatttattaataaaaaatatcctcatattatattttattaaaatttactaatttttatgagtaggttacttaatatacttttgccttccacttaagtatagcatgtaacttacattaacttaagaagtataatagggatatcatctataaaaatgtgtacatcttaaaaaatatgaaaataaaaattaaaattaaaacaaacaaaataaaataggtctacaatgtaatttcctcaattttatcatagcattagtattagggaaatttacaaaaatactggaatttggattaacttttacaaaaatactgtcacacggaaaagttttcaaaaatactgtnnnnnnnnnaaacactagtaaaacacaaagcaaaataacttaacacagtgaaaacttaacacaatatactgcagtatgaaacttataaaaaaatacagtaaaaaagtgaaaaataccgtatgacaggttttttgtaaaaaaaatagcaaaagttagtataccatgtaaatttcttgagtattaacataattaaagcccaaaacctatttagaatttgggttaatttcacaaatgcnnnnnnacaacaaaaaaacaacaaaaatactgtttcacggaattttaaa

SEQ ID NO: 138019 - DNA, 787 bp, Cannabis sativa
  modified_base (742)..(743): a, c, t, g, unknown or other
aaaaattgcttaaccatattgatgacatcatccttaacaatcggccagcacttctaaaaaaaacccggggtcattccatcaggccctggggatttatctggatgaatttggaactaagcttttcgaacttcttcatctgaaaccggtaacaacagctcaacattctgctgggatgatacatgagtttgcacgctgcatgtgacttctctccagtcggtttgggaagaggaaaaaagctcgtggaaataagaaaccataagatcatccaaaccactatcccagtcaacccatgcacccgaatgatctttaagtttcgcaacaaaattattccttcgtctcgtagttgcagaagcatgaaaatacttgctattattatctccctcttgcaaccacaattgcttcgatctttgatgccaaaaaacttcttgttgcacataacattcgaccaagtgcttcttttcttatttgcaactagctacagagacctcatcccgagccaatttctacttctgcacttcatttttatactttttcaacctttctttaaagtttccattattctccttaccctagacagccaacttgtccccacaacaccgaattttattcataacatcatcagactcacaaatctcccagctatcctttacaatctgataacaaagaggttcccttaaccatgcattttcaaaccgaaattgcttaacaaaattgtggcctgcagcaggaaccatgaccatannaatcggagcatggtctgaagttgaaatttcaagattatggagct

SEQ ID NO: 138020 - DNA, 1889 bp, Cannabis sativa
  modified_base (43)..(55): a, c, t, g, unknown or other
aaagttcatatttagggtgtgtaaacaacatacttgtgagtannnnnnnnnnnnnggtaaaataatttcctacaatatcaactttcaaatactgtacttttgtgataatggattgcctaacagcctataatgtcatcctaggatgacttggtctagttgactttggggctataactgttggaaacttattttaccaggatgacgatttttatgtatgttgattataattctataatctaacatcctaaatatgaaattcctaaaaacgataaataagaacattagggattaataaatccttatagtgatgacaacaaaataatatgactcctttaacccttgattggcagagtatgatcaagatctgaacctagattcttctttttgatgacagttgaactacataatctttctcactatgctgagtattgatttgatatctatgggcatattctcaacaccaaggagcacaaaattttatgaaaaaatccaagagaaaatagcctctaaatttttgaaaataaaagagaagaaaaagtgagcttttttaggatattctagcttacaaaatcatcagacaaagctctcttctctttcttattataggcttcacttagatttaggtttagatgattagggcttggaataaagacttgggttgaatcttactcttagggccaaatatacatatgggcattagagttagattcttgtcactttatttcaactaatgaactaatgtgccttttcctatttttagcacttttctcatctaattatttaaatacttataaacaattatccaatatgatacaatttaaatatatttattaattagaccacaaagtgtattaacaaataaacccttgtttctcttttcttttcaattatattaatgaaattcataaataagacatagtcattatttagaatcctaattaattaaataaatcaattaattgagactacaaaataatattatcccagttagtttggtgaccatgggcctatgtaaccaagctcctaataagtagatccgaaatttaccaagtaaattttctagcttattaattcttcccgactccactatagattcagaattgcactcctgattacatagaacactctatataccaaatatagatacactatgaattatctattgttacaatctaaataatccatcattctctatagatggtctacattgaatatggactaaattaccgttttacccttcaatatattttatccttaaaacactgggctacttgtaaatgatattttgggaaactaatataattatcgaaatgaggcctcaatcatttaaatgcgtttagccaagctctaaagaaaccatcatttcacttctaagtacttgtagaagctatagattccatatctatgaataatgctcccactcaattgaactacagagttcccaagatgtaagtattggaccgatccaattggccagcttgaacgaacaagtaaaagaacccatatagtacaattaagatagaacttaaccatctcaggattgagatcaattgccctaagatcaactaagtgacattgacttagaaattacataaccaaaagtttatgaaatcttttcctctgtcaatattggtccagtccgatgcatagccaatacatctaatactagtttactttgctaatgtcttggaaaagacattttacttatacagtgtaagtaaaacacatcactgattgtcacgttagtgtaaatccagtgcactgataaattgtgagactaaacagtttgaagcatatagtcataattattttccactgtgtagacaacactataatcatgaataactatacattcaagatttaatataatttatatattaaacatataa

SEQ ID NO: 138021 - DNA, 2634 bp, Cannabis sativa
  modified_base (1731)..(1747): a, c, t, g, unknown or other
  modified_base (2419)..(2419): a, c, t, g, unknown or other
  modified_base (2469)..(2472): a, c, t, g, unknown or other
atattctcaaaggaaatttttagagaagtagaagtatcctgacctgccttgcttgggagtagacttcaaatcaaaaaaacagctgacctcatggggagagggcatattccctttctgggaggcgtagagaatgaacagggtagacagatacttgatgcccttgggagtgaattgggtcggaaaaagacggaagaagtctgccacctttctaaagtacgggtgcaaaggcagcagtgccccttgtttagcatgagcacccgaccaagcacacatccccctctgagggttggtagctcgattgttataggcgggaacataacagtctagctcgcccaggtagccgccctggtctagaccccgtaaatgcacctgagtaaccttggacggagggctcacccgcttggcgcccaatgcaccctgcctcaactgagggaccccggcagtaagttcctcggtgacgtaatccacgccctcgaccaagacgtcaccattcgcgtcaactggttccccagcctcattgtatcccccaaaattttgggggtgcagcctcctcctcttcctcctcctcggaaggactaccaggacgaacatcaccctgctcctctctctcctgaacctcagcgtccccttcatgatccccctcctcctacatgggtggatcctatccagtgctgggcaaggtggcgtgctgggccacgtgagggtcagacgcgttgactttacgcattttctgtttagtacgagccatcatcctgtggctggacgagaaatttgaatcaaaatgttcgtcgtttgaagaaggcagactagagcaaagacgaggatggtcctcgtgcaagagttgaagcaggtccgagttgattcgctgttcgcttccccaaaactcacctgggttcatctacaaaagacaatatgcgagatgagtgtttggttgcgatatcaaacattaaacaggcaaatatgccgaccaggattactcaacagattaaagaatgaaaatattcgacgaaaagtcaaaagtcagaagtttgaaattttcttgagttagggaaaaatttcatgaagctttgaataagcaagatgaaagataggcattatgcagttcaaaaagcaagcattatgaatgacgaagtcgcatgaagcgttacaaagaaaaattgcagagtttctaaacctagggttttcaacatatcttctacagcaaggttaaaatcgctttcagaaaataaatgtgcaaagtaaaagaaatcgagaacttactaaagggtcgatgtctgggttgaagttacgcaaagttgaacgagcgattttcgtgaaaattttccagcaaacttgaagttaaaaacctctctttccgctctgaacttgcttagcaaagaaggttggtgaaaaatgagtttgtggacaaatgctcgatggtatttataggcaaaacagcgaaaaggggtaatcatttcagaaacctcaggcgcctcggttcccccaaaagcgaatatgggaaatcaaaagcaatcaagtgcaaccgtcaaacgtggtgagagaaaattggttttcgaagcattaattgcatcagagcatttattagccaaaaaccgaagggacgcccagtcagcttcacatcgagtctcaaacagacgccctcgacacgtgtcacccatccaaacgcaaagacagctcggatgaagtccacacgcaacttcgaaagtcccgtacagacttgggggcaaatgnnnnnnnnnnnnnnnnnctctgacgtggcatcacacgatggtgacacgtgcaatcgactttgtgtatctgctcacaagacacaggccgaacagggcacctcacacatccactcggacgaagtcctctaggccgagcagtgagcaatccgcgcagcatgccaacacttagctaattcagctttcccatcgtgagtcatgaaagaaatccctataactttgggatcagattacaaagatatggcaagctatccaaatcccacgattagtgtattctgtatttactatgcaatctttctgcttatatcaattgtaactagacgggaaatacttcctctttaagcttatagccctataaatagtgattcatattcactagacaaggggtcgagagattttgtctaagaattcatattcagagatactgttgtaagagctctaagaaaaggaacctttttccttgctcttaagtcaatacaaataacgaggattagcctattatcgaactgctcggggctgaacctctataaaattcttgtgtctttgttcgttttattacatttcattcgtattaaactacttgttgcttacaaaattagacacagtgtcattggctaaaagcgaggtcaacaatatatataaataaacttaacattaacttatatatataaataatataataataataatanaatattaataataatattaataaacactttattattaatagttatcttannnnttcttagccattaagaaacttctagttttagggtatttggccaacttcgtgtaccacaaaatatcccgatatttctaaaatcaacttatccaaataatctcatcaatatttctaactaaaatcgttatgacatttttggcctccaatcgggtttctagggtc

SEQ ID NO: 138022 - DNA, 768 bp, Cannabis sativa
  modified_base (68)..(70): a, c, t, g, unknown or other
catgatttgtcagtatactggatttagactgacatgataatcaacgataatgtatacttacaccttgnnnaagtgttatgtcctttccagtgtattgacaaagtatgcgagtatcggatgtacggagaatacatcagattggaccaatatttaacttggataagatatcataaaacttaccattatatctttctaagtaaatatcactggttgatcttaggtctataaatattaattctgagatggttaggttcgatctcaactgtattaattttgttcttaaagttattcgttaaagtctagtcgactaaacacttacatcttgggaacatgatagtccaattgagtggaagtgctaatcatagatatggaatctatagcttctacgagtatttagaagtgaaacgatgatttccttcgagcttggcttaattgagataaatgaataatatctcatttatgtaattatattagtttactgaaatatcacttataggtagctaagtgttttaaggataaaatacatggtagaatagtaattttgtccttattcgatgtagatcatttatagaggatctttgactatttggatttaaacaatagatacttcataatgtatctatatcttggtacatatagagcattctatataattagtagtgtaattctgaatctatattggcgcaaggaggaattaataagttagagaatttacttgataaattctagatctacttattggcacatagtccccacactatttgagat

SEQ ID NO: 138023 - DNA, 1055 bp, Cannabis sativa
ccaaggcggaaatgccagggatccttcaaattacatgtattgtttgcaaaaacagaaatatccgtagtaagaagacgatgatcttgttcaaagaaaaacatatttccaactttcttagttgtcccaatcgtagaagtcagggagggatcctgaatcaaacattgatcaaaagtaaaagtgactttattagcacaatgttcaagataagtattaactgaaaataaattgaatttaaattcaggaatatacaagacattcgttaagataagtttgtcagaaattttaacagttctagttttgttgatgtgaatttgatgaccattaggtaaagtgaccaagttagcaacattatttttatttaaagatgtaaagcaatgaagagagtgaaaaatatgatgagtagccccactatcaacaatccataagaaaagaggaaaaaaattgtcattaccgaagacgttagaaaccacagggaggttttcactggtggaaggggcgccttggatttgttgattgaggagagagatcagctgttgactgagctggagtcgggaagtgccagtcgcggaggggtctggagtgggagtcaccgaggcttgattagcccgagcagtggtggtggtctttttcttgtctccatattcgggaggaaaaccgtggagaaagtagcatttgtcaacaaggtgacccggtttgagatagttagaacaagttggccgaggtttcttgttccgagatggttggttgggatttggtttggcctaagtagcagcaacaacgccattattgcaaagacatcgttgtcgctcttgttgaacgaccatggagaacaccttggatagggagggaagtggctcataaagtaaaatctgagccctaatgccccagtaagattcattgagaccaatcaagaattgaattatctggtctcttgtgcaatagtcttaaaccttttacattgcgctgcaagtacaaccacatgtgcaggggatgttaggttggtattcattgagctcgtcccaaagagcttgcaattgagtaaaataagtggtgac

SEQ ID NO: 138024 - DNA, 682 bp, Cannabis sativa
taagttaaagaaatatatggctatgtgtatttaagctagtacttttaacaacaacaaaaaaatatgactgcaataaaattctaaaataaagtacttttaacgctatttttttttattaaggttacatgtgtaataattacaaaatgttaaggagatttcatgtaaatatcccttattattattgttgttaattttctactatttaattaatgaaggtttaaatataataatgtaaatatatgaggtaaaataaaataaaaaaagtgagtgtcttagtgagctattttaaagtataaagaagagtagcgaattagaatgcttttatattcgggatttagttcctttgattcaaatagtctaattaatgattggattgatctaacagttgtcgaattttattatgtttaggattacatttcttttaatctaaactatatgatatatcttattagtataaagaaatctatcttaaataaatatgattagttaagctatgtatacctgtgcagctaaaagaggaaatgaagaaacaccagcagaacgatcaataaaaggagtaagctttagaagctcaacagtgggcgcacatccaaccaaatcatccataacagattctgtctcagccaccataaaaaggacaccctccaaattacaattgatttcaaggcgaccgccattgtca

SEQ ID NO: 138025 - DNA, 536 bp, Cannabis sativa
gcacaagctttgtcaagttttgctatgtctgtgttcttattgcctttgaaaacttgttcacatctggaaagccttatgtctaagtattggtggagttcgagcggtaggaaagggataagttggtttagttggaggaaactatgcaaaaataagaactctggagggatgggttttcggagtttgcgtgagtataatctgtctttgttgggtaagcaaggttggcggttactgccgtatcaggactcccttgagggccagatatataaggctcaatattttcctaactgtacattcttggaggacgagttgggtgccaatccaagctttatatggcgtagtgtctttgagtcgcaaacgctgctaaaaaatggtgctcgttaaggaataggacctggttcatctactgaggtgcttaacacgccttggcttttgtctgaggataacttgtgtgtggtctctaatcatccggcactgaccaattgtaaagtgtctcaactcataaagccaggtagtagacaatgggacttggagcttat

SEQ ID NO: 138026 - DNA, 1122 bp, Cannabis sativa
  modified_base (537)..(543): a, c, t, g, unknown or other
tttttcactcttcttgcccgtcaaatcataacttttgagttcccttcttcccagttgcatttttctgttgttggtgctacatcaaaacctctgattccaacattcttccctcaatcagttagttctttgtttatttgatgttaggagctttggagggaatcttgaatagtgcaatggtctgcttctgggaatagcagtgtcacttctaggaataatggggtcaaacaataaccctgttttttgttatttttgcttcatattatatgcttaaattaactctagttttcaaacaagaaaatacaaaaattaaccaaaatagagaatgaagttagaagtctggttattaaatattgatataaaatttatatgtttgaactggattttaaagttagtatcatttttaaagtttggttattagacattgtgtatttttttattatgttgttgaggaagctatttttttttttttgcctcttttaataaaatatttagtttactttaatattgatgaaattggtttttaaagttagtatcgtnnnnnnnttataattttttttcatcatcttgttgatgagattattttttttctacttcttttagtgaaattattagtttcttttaatgttggtgaaactgatttttaaagtttgtattatttttagattataattttttgaattgtgtttttttcagtatgatgtagatgaagttttttttttttttttgatgcttttaataaaataattagtttcttttaacattaataaaactggtttttaaatttgatatcgcttttatattattattattattattttattggttttaatttgtgattctcttgaagatatttacctcatattgaattattaaatcaattctgatttttgagcaagcaaataagagattaaatgtcaaaatagagtttgaagttagaaattgggtattaggtattcaaataaatttatatgttagaaactgatttttatagttgatgtcgtttttatttatattttttgcaatgtattttttatttttttcattatgttgttgacgaaactggttttagtttctgattctctttgttatttttaccccattttgtatgcttaaatcaactct

SEQ ID NO: 138027 - DNA, 587 bp, Cannabis sativa
  modified_base (534)..(547): a, c, t, g, unknown or other
ataactaataaacataagtgtgttatataaaatgtttttttttttttttgagcaaaagatgatttattcattcagaaaccttcaacatcaacaatagacataagttcgagaggagcatttcgctcactaaaaatatgatctgaatggaaacaagacgctcgtgcaacacaaaaagcaatcctattagcagaccgtttaacataatttaaagacacatgattaagacaagacaataaataatgacaatcttgaaccaaaaaaccaaattgagatggcatttggattgagccaaggacagcttgcaccaccactagcgcatcgtctcaatctccacctccgtccaccctttgcgtttgatccaactcaaggcctctttcacctcgataaccttagcaatattgccttaattaatttcccattagcaccacgagccacacaaccgaagccatacttgtgctccgccgcaaaaatagcaccatccacattcactttaatggagtttgacaagggttttttgttggaatttattttacnnnnnnnnnnnnnntactcacaagtatgtttattaaaaccctaaatatgaactt

SEQ ID NO: 138028 - DNA, 687 bp, Cannabis sativa
aggaaatgtcattggtatgggaacactcaattttgaaggattaacaaggttgaaaaatgttatgcttattgagggactaaaagctaatttacttagcattagtcagatttgtgatcaagggtataccgtcaattttgataatgatcattgctttgttcttaacagtgataaacagtgcattttacaagggttttaattttgttgataattgctatactctcacatctattcttacttgttattctgcatgtaaaatactagtgttataaatatttccaaaaatcttgtacaacattctcgtacaaaacacattgatataagacatcattttattagggaaattgttgacaaccaaatattgtagttggaatatgttgatactgaaaagcaattggctgatacttttactaaagctctagattcaagttagtttgactccctcaaaaaatctttgagggttttcattatttaattcttttcatttggttctccattttgtacaaaattttgagtagttcttatcttgcatctatccttctttcgtcttggttgattgacaaacaaaacatgtttatgcttttggattataattagcttagtctcttgttctcttcatacttttgaggttgggttaaaagattcaagttacttacatatgtgtggtcaggataaactaaagtattaatg

SEQ ID NO: 138029 - DNA, 1099 bp, Cannabis sativa
gtggccattccacgtgacatgagggaagcatgcatgtgtaaggggtttggttcgagtctaatcggaccagccctccagtggtatactaatttgcctaataattctattaaaacttttgcacaactcactgatacttttgttgagcagtttgccagtagcaggaaattagagaagcaatcagaagacctttacgtcatcgtccaacgacgtggggaagcactgagagattacgtggggcgcttcaataaagaaaaagtgtctatcaccaattgtaaccaacacacagccatctcagctttccgcaaaggacttcgctacgactcagatttatacaaagaactcaccaagtacccctgtaagactatggaagacgtcctcgccaaggcatgggcccaaatcaagtgggaagaagatgaagtcaactactacagatcctctccaagaaaagagactcgcagagattctagagtagacagacggcacaacgacaaacggtctgagccatacccgacttctaacaagtcagagaaccgaagaagggattacaaccggcccactgacacatatcctcgaagtggaccgaagatgcccgagtacaacttgtccatctcacctgctgaggctgttcaagtacttaaggggcttggaagcaaagtaaagtggcctgagaagatgaggactccagctgagcagagggacagaagcaagtggtgtgacttccacaacgaccatggccaccggactgaagagtgcattgccttaagattagaagtaatcaacttgctaaaacggggccacttagtcgaccacctcaccgacaaaggaaagaagacttaccagggtcagagggacacgatagacaaccagagggacataacaccgcccaggccacctgttcatgagagaacggtcaacgtaataacaggtggctcagaagtaagtggagtcacccagtcagctgcaaagaaacatgcacgtcaggctaactggaccaaaggggagaccagcagaacatcttccttaccggagcaaaccatcagcttcacgacatcagaatcaactaggcttcttaaccctcatcatgatgctcttgttattt

SEQ ID NO: 138030 - DNA, 1075 bp, Cannabis sativa
tttgtacttagcagtattttaagacaattttctttcttttgccttgttatgaacaatgtatcctttcggggaaccattttacttttaagactatgtgcgcttttgtcattttccattaaatcttatgtgtttacaattgcaactcgatgcttcaaaacacttagattttcatattcgttaatcgcaattctatctatgcaactatccttcataacttggtgtgacgaacattttgatgttcatattcaaaagtaaaaattcaacaaaatcttctaagtaaaaatatgagagaagtataaaaacctaaaaaattattacttcattagataatcaatattacagtaatacattgtacgattattgtaaagaccgcttaattttaaatatagaaattagcaaataattagggcttaattataaaattagattattagttatgatttatgaattttttttagtgatatacttgaattctagctgtgctaactatgttatacatgaaatttcttgtttttcatattttatacccgacaatattagaaggcaacatgtttttaacagttgtataaatatttgctaacaattatttcttcacatattactattaaggtacaagtaattatccatcagtgacaaaaaaatgctgacaaatagtttcttacatatacacattcacatttaatatttttagttgcaattaggttgcacattagttgaataatgattttgctacgacaatattatagtattatgaaaacaggtcttgaaattgtcaaatacgcgacctgaacagataaaacacgattgttgtaatatttatttgtattaaatatgtagaattattagttgttttgtgatcttatgttagttggcacgcaacagatataactattgcattacagtttcatcacatgttgccttgaaagttgacttcttctttcttctggtcgtcaaagttgaattatttttaggcaaagacaccttcgacttcttcttcactggacgacaatcccttttagccacgggagagcaaaatcagagtcaatattagaaaaaaacttacaaccggccaatt

SEQ ID NO: 138031 - DNA, 521 bp, Cannabis sativa
aatgttgatagggctagatttgtgaatattgaggcacaagagcaatttctgcaacttaaagatagacccttcattgaagataggggcatagatattggtaacccgagccaaactagaaacatccctactgtatttgagcccatcagagagaaaatcataaataggcgttggactaagtttgtggatgtcattgagcgcaataaccaaaccttagctttagaattcttggccaattggccagaaagagaggatgacaaggttaaagttagggggtcagagtgccagtttccacagccgccattcatgctgtctatgacttatcgaccttcaccccagaagaacaaccactaaaacagcaaatttgggcaaagagcttgaattatgaggacatagctgaaaccttaggttatctaggccttaggtttcacgagtatgatggagaaccgtaccagctgtttaggtgtgaactaaacccggtagccaaggcatggctacactttgttagtgcaaggttggtacca

SEQ ID NO: 138032 - DNA, 508 bp, Cannabis sativa
atgtacattaataaaatgaatagaaatcatatttataccttaatggacgttgagatttcacgttttctctgctaaaatcgatggccggagttataccaccaacttttttttaaaataggttcaagtacagtgcaaatgggtgaaaaataaaacttttttagagtatgagattagatattgacaatagaaaattttaaaataaaaatgggatgaaatggtgaagaaatgagggagataggggtttttagtggtggttggcgaggttttgtgggtttttaaggggtctgctatcatggggaagaagaagaagacgaggttaagttacttttataaactctatgccatcggttcctagcaaataaccgatggcataggtgcacacgtgtcaataaagtgtgcacctatcccgtcggttattagctaggaaccgacgacatagggtttattaaaaaccttcaaaattttccaacccctaacacacaacatagggtttattaatatctatacc

SEQ ID NO: 138033 - DNA, 1024 bp, Cannabis sativa
ggtgttaatcaacatacttgtgactagatctaagatcctggtaaaataatttccaacgtagtcaagcccgttaacttggctcactattagaactcaaagctaggtccgtagctttgaagaccaaggacataggtggcttagttaccgaaccttataaaaatcgagagtttacaatttattacccttaaactctttactttacaagcttgattatttgctctccagatttgattgtcatactatttgcatttacttgattaatttaattaattgcatgatattgtgttgaaagtttctatttaccgaaattaacttaaatttctaattcacgcccctcttggacacatatcttgggttaacaattggtatcagaacttgggctcatttatttgattagatttcacaatctagagcatggtgtttctaagtaattcacaaaataatatgttagaaggtttgagcacaaatagagcaccatacttcaatggagtagattttccttattgaaaaattagaatggaaacttaccttaaatctatggattatgatttgtggcatataatgtctaataggggtgttcaaccaaatttacaaactgctcaacccgaataaaactgcctaaaccaaatcgaataaatcaataaaaaatacaacccaaaataatacaatgaaaatccaaaccgcctaatcaatatatattgggtggtttataaattattctaaactgctcaattaacccgaataaatcgaattaaaccgatttatatattttttaataaaagtgtatataacatatcacataaattatatttattagttaaactattttgtatttaaagtttagacattttagtgtttaacttaaaacttggactttatagttaataatttttattatatttggatatagaagttgaagtctaaaatctataccatattattactctttttattattttatttaattattttatgtttactcaattatatttatcttatattaaagttcttaaaattaatttaa

SEQ ID NO: 138034 - DNA, 696 bp, Cannabis sativa
tagggaaaagtatacccattttttcaatagctataactattagtttggaaaacaaatttaggtataaaaaatgcatagaaaatcaaatttccttttagaattggtcccgcgtttagaattctaaaataaaaaaagtttattgttaaaaaatcaataataataataatcttcgttaaaaaaaagattcttttatacaaaagatcccaaatttttaaaattaaaaattttattacatgaaaattaattgaataaaaattaatacaaatgataataactatctctcctactaacttctaagtaccaagtgcacaagtggtgggctacctttactttgtggtaagcaaataaaaaatagggatattaatggtaaaattattttttttttaacacttaactacgtaaattgattttttgaccacaaaacatactaaattcatattttattttgctctttacacttttgtccaaaaatcttagttaagtgtcacagaggactatctacgtgtacacaagtatatacatggcacatttttagtgatccacataatattaattatttatacattataacaaataatttaaaaattataaaaaatgaaaatgaaacaataataattttttttcttttattttttcatttttcttcttcttatctctttctctctctaattgtgaactctctctctctctctctct

SEQ ID NO: 138035 - DNA, 1058 bp, Cannabis sativa
  modified_base (1028)..(1032): a, c, t, g, unknown or other
taataataataaaagattattttattattttttagtcaataagaaatttctaaccctagggtatttggtcaatcttgagtactccaaaataccccggtaattctataatcaacttatctcaataattccatcaacattactaactaataccgttgtgacatttttggcccccgatcgagtctctaaggtcgccaaaccttaaaatatttgtattccacaaatagctcatattacattcacacatgctatataaatttccgtaatttataaattttactttatttatttatttactcaaaatccactaattaactcgtaattagtttaagtaagattataatcttactctaatattcatataattacatatttaataaaatatgtgcaaataaatattgttatattttctgggatattacatccaatatcacattgggcggtatagaagaaattcctgctgggcataccacccaaacacataattgtcaactgtccaatccctgatcacaggttccacctataggccaagtggtaggcggccagaccttatccgacacatctttaggtggagtcatacctaacaactccatttaaactgacagttctggccaacagactggccaacccaaccaatcactgaggcaacttggtgtctcagtattcaatagactgggtacagcccatgatctcagggatgatttgaatagaaagagagggatggatgaacaatatgttcaaccggccactcagcccggtatccgcatccaagacccaactctaagagatcatgatgtgacacgggtcggccaagaggttgaactagttcacccatctgtgcaagcacagttggatgaattgaaaaatatgttccaaggcctggctgaccaaaaactcactgatctcaagttggaccgagcatgtggatcacccttcactcttgagatcaacgttctggagctacccctcaagttcaagatgtcaacctggaagatgtaaacagggaaggagtatctgttgggttttatgcnnnnnataaaactctttacaatctgattagt

SEQ ID NO: 138036 - DNA, 623 bp, Cannabis sativa
  modified_base (35)..(37): a, c, t, g, unknown or other
tgcgggtgcggtttggaaaattagaaaaaccgcannngcgggttggtttgaaaaaatagtaaaaaaccgcaccgcgaacaccctgtttattaagcacaaataaaccaatcttgaaagatgacacttgtcattggatgatggagagagtgcaaaatagagtacatttttgtacaatagagagtctccttagcactcatcttctatctataatgatttttttcttgacaaaatatctatataattaattttaaaaatgaaggatgcataatgaatttctaatagaaatcttgtaaattaatattgggtaagtttatagtacaccattttaaagaggtgttatagtaaactcctatctattttggcatacatagctttttaatctatttgttttcttataaatgtgtatgttgtaattattattattttttttttgtttttttagtgctctgtggcagttaatgtcccatatggattttaccagttttattcatctttttcccagaaaattgcaatttttcttcagttatttatgcagttattgtttttttaactgaattttcttctttctgggttatttccttggtagtgtccttcccctgttcttctctttttcaacttctaat

SEQ ID NO: 138037 - DNA, 742 bp, Cannabis sativa
tgctttagtaaatgggccaactctaaaataaattgggtagaagggacggtttccaatatgggggattgtaaatcgaaatggttctacgcgtttaagatgctaggggttaggattgacttcaatcgctgacctcatacgtcgcgtacttttacacttagtatttattttcattgctttatagacgcttgttcaaagattgaccagctcgatctgtactagacctaattcgtttagaaatcattgaagtcttaagcagccttcttgtgtaagatcgcgactggcgtttgttgtgtactactgtgaaattgcgagagcacaagttcatcccagaggacgctaaatttcagcgagaaccagtgtacaaagagccttctgagaagcaaaaggaaagaatagacaagcgtctatccaagcaaacttcgagaccaacatcaggtaatataatttagtatgttgccgacaatattgtcttaccctttcaagtccttatttgtcattcttctcgcatacatgactttcttgaaacaagctccagttttcaattgcaagtctaaggttggcactgcgacgccatcatctgcgactcctcaaaagaggaaaagtgatgtcgttcctacccatgcggctgacttgtcgaagaagcagcagaaggttgctcaggataagggaaagaaagttgtgatcgatcctgctgtcaaggctcgcaatatcatggctctataggataagttcgtgagcaatg

SEQ ID NO: 138038 - DNA, 564 bp, Cannabis sativa
  modified_base (229)..(234): a, c, t, g, unknown or other
  modified_base (319)..(320): a, c, t, g, unknown or other
gaagaagaggaaatctggtgttggtccgaccgaacgagctcatcaggagaatgaactcattcaacttaagcgcgaagctaagttgaagggagggacatagaacaagcagtatgcttaggagcccttgaatcctgaagatgaggccgaggaagagcaggtgaccccattgaagaggaagaagaaactcctacccctgcccaggcttgttgaacatgcgattcacatcagnnnnnncatttcacctgttcggccatcccctcccgtgttcggaatagggaaacctgttatctctgaaataagatcgatgtcaggtgatganngacttctgagtcttgttcgggcagtcatcttgcattttactttatcttgttttttagcttcttaattttcatgccttatgtttctgatggctgttttctaaccacactattttcattctgtgcatacatgtctcggtatatgctcgacgctctaaggaagagaataggcggaagctctagtgcctctcctccagccaagaagtctaagggcggtgaggggtcctctacaaaggaaaagaggcct

SEQ ID NO: 138039 - DNA, 602 bp, Cannabis sativa
  modified_base (569)..(574): a, c, t, g, unknown or other
ttccaacatatgcagcttttgttaaccatgaacacataggcaatagtagatcttctattgtccctatttgatgcataatcagcatcaacatagccttctaacctcacatctggtgtgtctctttgataaatcagaccatatttgactgtacctttcaagtatctaatcagccactttacagcattccaatgctctaacccagggtttgccatgaacctgctcaaaacacttagagaatgtgatatatcaagtctaatactgaccatgatatacattagacatccaacagccatagcatagggtatacctctcatattttgcctctcagtttcagttttagggcagtactcattagaaaatttgaagtgccctacaaatggtactgcagtggccttggatgaatccaagttaaacttcttgatcaccttctaaatgtagcttccctgtgttagcaccatctttccttcttgcttgctccttatgacttcaattcctaagattttcttgactgcttccaagtccttcatttcaaattcagagttaagtttgttcttaatggcttgtatttnnnnnntgtctttgctgatgatcatcatatcatc

SEQ ID NO: 138040 - DNA, 620 bp, Cannabis sativa
ccaaaagttgaaaataattttttattttatttataaaaagtaatcagataaaaaaaataattgaatgaatatatacatatgtacgaaggtataagcttatagcttattagatgacattctaatatttgaacattctttaattttttttttaatttttcaatcttcattgtttttttcttcattatttgaattttatggaatataatgtcactatttttgtaaatttttttgtctatttaaatattttgttattattttagtttttcataaatttagtttcaattttttaaatagtcaaaattggagaatgaattaagtattttttgtactttggagataataatagtattaatagatggtactgcagttttaaataactaatatggtactgcagttttcactaatatattatatatggtactgcagtttttaacaataatttttgtgtattttattaatacacaaaaattgactgtgatgagtagcaataaaagttataaaaatattaaatattaacaactgcagtaccatatttaaaataccaccaagactcttttgcacttttttttttttatatatatttatatatagatatagattttctatattaaataaaaatt

SEQ ID NO: 138041 - DNA, 908 bp, Cannabis sativa
  modified_base (646)..(648): a, c, t, g, unknown or other
agaatgagtctcttcatgagtcttgggagaggttcaaggatttaatcagaaagtgccctcatcatggtattgagaagtggatgctggttcacaactttttacaacgggctggtgggaaacactagaactcttatagatgctgcagctggtggagcatttatgagaaagagtgcaaatgaggcttatgatctgttggaggagatggccctgaataatcagcagtggccaactgaaagaagtcaaactaagaagatagctggtgtgttggaggtggatgccattacaaagctgacaacccaagtagaagccctaacaaagcttatagctgtgcaagccaaacaagctcaagtggtctgtgagctatgtggaggttctcatcacttttctgagtgccaggaagatgtgaatgatttgccaatggatgaagctaaagccattggaaattattctcaaaacaacaactttgggttcaaccaaggaggtaaccaaaggaatagtgggttctatcaacagagaaatcagaaccagacacaaacccaacaatatactcagcaacaaagctctagtggaaattctggtttgtagaccgacttattgttacaattcatgacagaaactagatcttccattaaagatttgcagactnnnatggggcaactagcaactcaggtagcaacccgttctcagggaaattttcctagtacaactgaagttaatcctaaggaaaactgcaaggcaattaccctgaggagcggcaagaaatatgatgggcctgagatggtacaaccagttgatgaagagatgaaagatcaatcagcaccaactccaatatcaatagaagagaaggctactgatagtcctgcaccacaacaacaatctccacaaatcagtattgatcatcatgtgaa

SEQ ID NO: 138042 - DNA, 531 bp, Cannabis sativa
tgctaataatttctgaatatgattttgtgttaaaccttatttgatttttatttattgttatttgtagtatccaacatgactatgaccaatcccattgtaatgccctaaataattaggcacgctacccaagtcacttattaaaccctaatcccgtaaatgggattactaataaaaatggcgcggaatttaaactttaataacaatttaaatgaaaataaacttgtaatactttaatctttataaactaaaagttacagaggttgggatcccaaaaaaaacatttacaaaatatattacaagtccttttctttcagcgggcctaagcggcaaaacacagtttcaaaaacacaacactgctggaccccaacctgcttggtttgatatggtccggacatgtacattcttcgtcgagctcctgcactcatggctaatcaacaaaagtcttaccatttcctgcacagtagagcacccatgagccaagcccagcaagacagtataaaatataattaacatgtttatcatactatataa

SEQ ID NO: 138043 - DNA, 566 bp, Cannabis sativa
tatgtgtttaatttcatttttttagagatattcatatttatgatattaattcaacatacttgtaactaaatctagatcttggtaaaatattctaataactggtctcagagccaggttatgatttactttcatgaaatatggttttaaaatgatgaatatgttcattttgtttatttgaatgtattcatgttggtttatgtgttatttgatgaatgtatgttgttgacctcgcttttggccaacgacaatgagtcgtaattgtaagcaacaagtgatataatatagatgtaatataatgaaataaataaagacacagtttttatagaggttcgttcctgagcagttcggcaatagcctactcctcttgatttgtattgacttaagaacaaagaatgcaatgattcccctcttagagctcttacaatgatatctctgagtatatactcagagataagtttttttgacgctttgcctagtgagaatagatcactatttatagggccataagctttgaggaaaaagtttcccttctgtttacaatgtctataattggtaagattacacat

SEQ ID NO: 138044 - DNA, 741 bp, Cannabis sativa
  modified_base (704)..(705): a, c, t, g, unknown or other
tcactaaaaatcactcccaactctttagtgacccgcagttttgtgcgtgtcactaaatcgtgtcagtaaaaggctaaattgtagtagtggtgactctcttagatcactattttctctctagagtctctctctaaagcaattctctcgatcccctccatagtgaggctaggtcacattttataaaggcttaatgcatgagggatgatttcccttttgcttacaatgcataaaataggaaattacaatacacgaaatagaaaattggaataggttgccatatttctctgactcaatcccacgattatagggattgtcttcgtgtctgaacattacaagatcattctgaggtaattatctcttgtaagtagtttggcgtaatagacttctacctggtcgaatgacttctttgcaactctgctcagataattgacaattagagatgctgatgaattatgtataggccgttagggacactgacctccacccaaatattagaatatgagacacgtgttacttagtcctcttaccatgtcaatgtgcaaaaaatgttggaattattttaccaggatgatagatttactaacaagtatgtcatttaacatcataaatatgaacttctaagacgatataaaataaatgcatataaagtataagaaaccttacagtggttgcagtggaatataatgtctcattccactcagatnnctaacccttgtatcctttctgtaagatcggaagagc

SEQ ID NO: 138045 - DNA, 767 bp, Cannabis sativa
aagaagaagatgatgatgaagagataaagagaaagtgaatgagaatttctcagctgtttattccaatggggtggacctctatttataaaaaagtattgactaaaggaatggaaaactaaattaatatgtaataaaggaaaatacaatcaagcattaatagtgataattaatatggtgatttggacatccataaataatatttcataataccccccttggatgtccataataattgcctcaataaaaaccttgttgaaaaatttagtcaaaagaaaaagagtatagtgtaaactaactctctctcatttaggcattcgtggagatcttctaatagacgaattttgatcttgtctgtcatcttctcaaatgttgatgttggtagtaactttttgaataagtttgcaagattgacacttgattgaagttcttaaacagtaatatgtattttcttgaaacgtataaagaagaatttggtgaaatgtgttctaattctatctccttcaatggaccctacttttagttgagcgatgcaaacagtattatcttcatagagaactgcttgtgttgatactgttttttaaagtgcaatctatatgtttcctgaatatgatatgtcaatgatctcactcccacacaatctctactttcttcataaaaggcaagtatgttaacatgatttaaagtttccttattaaaattcttgtcaggaaaatctagtgggaaaaaacctgagctaagagaaaaagagtgcaacatgaatatgtctc

SEQ ID NO: 138046 - DNA, 780 bp, Cannabis sativa
atggatggcggaaggtcttttacaacctcaagaaggaagaacaattgaagatgttggagaagactacttgaatgctttaatagcgagatcattttttcaaagaaacacgagaaatgattcttttgtaatgcacgatcttattcatgatcttgctgtgtatgtatctggtcagagttttttatcgtatgatagctacaaaaaagacttgcacaagctaagtagcaagactcatcatctatcttacggttatttcttcaatacaaaagaaattgactttactaaagtgaagaatttgcgcagcctgatttcattaccattaaggtcaattccttcttcatctcttgaaacagttgtgcaagaagttgtgttaaggaatggaggactaagagttctttcttttgttggagagcatattgatttgattacaaatttaaagcatttgaggtacttggatgcatcggacaatgatgtcaaagtgttacctgcttctatttgtgggttgcataatttggaaacactgttgttgagtaagtgctataagctcacccagttgcctgattcgattggaaatctaaagcatttgaggtacttggatgcatcgggcagtaaagtcaaagagttacctgcttctatttgtgagttgcataatttggaaacactattgttgagtgggtgcagaatgctcaccgagttgcctgattcgattggaaatttaaaatatctcaggtacttagatgtatcttacacaaaagtcaaagagttacctgattctgtgtgtct

SEQ ID NO: 138047 - DNA, 653 bp, Cannabis sativa
tttgtgaactcttcaatttacaaacatatagtacttttgttaacttttattcttttttatcatttcacagttcatgtgtagttgtaaattaattacttttctctagaatattgaccactactaaattatgcctcttcttaaaaaaaattaattaaatattttttttctaataattaaaaaaatccaaccaaaaatatattattgttgattcatataagaaatttgcaccttcaattcttatgttttgagaatagcaatttagtatgtaaagaatatgaatatgattggtaaatatgaaaaaaattaaatctaatttgtttaagtgaacttaatttttgaaagaaagaattttaaatatttaatattactttttaaaataataattattagatataatagtattatttttaaaatctaatataatttctaacactaaaagagaatataggcttttaaaaaaaatattcataaatcacaaaacatatatgtgttatcaatttaattatatatacacatatataattttcttttattatattatatgtttgttaatatataggcatggtttcattcaaaatatatatataggtatggttatataaataataattattagtaaaattagcttaaaaaataaagaggcattatttatt

SEQ ID NO: 138048 - DNA, 599 bp, Cannabis sativa
  modified_base (388)..(390): a, c, t, g, unknown or other
ttcattacataaacatgccaaataaaataaacaccttaaagtaaataaataaataataataagggtatgtttggaagtaattgtgtaattactaggtagggtaattactaagtaattatccagtttaataattacactatattttaaaatacaaggtattttttggatataaggttgtaattacatatgaattcctaatatattgtttggcaaaatagttagtaattatatgggaaaataatattttttagtagctaatgtttaatatggaaaatttttactaattacataatgtaattacattcaattctcatgggggctatgagaattggagagtgtaattagaacccctcaattacttccaattacacagttacagtgtaatcannnggtcagacaaacatgccaaattgtgtaattaactctaattacacacaaatctaattacattgtggctttccaaacgcaccttaataataataaaaatataacaagaaaagagactaattgtggacattcccaactccattatcgatattcatgttgctattaatgggatcttcattaaaaaaatctgtaacatctaagtgcgtaatatc

SEQ ID NO: 138049 - DNA, 782 bp, Cannabis sativa
ttaaggagatacaaggaaatatgtcaggaattatgagaactatatgtaggctctgaatatagccttatcacgagaagtagtttcttccatctagtctgacataaaagcagtatacctattttagtaaacaagttatattatattatatatataagtaacatattactaagatagagtaagttcataacatttctttccagctattaccaaaaagaaaaaaagcaaggtgctacaaacttaggttgttgagattccgtgacatctctctgtagccattacgaatagccgggtgctgcaaaattaggctattcagactttacaatatctttctactagccattgcaaggccaacactaccacaaaatcaggctataaagagaaataaagtggtcacacgtaagcttggtacatgaaagtcgaaaaaaaactaaaaagtaaaaaaaaaagaactttcttctaaatatcatcaagagtgagagagtccagtgccaccaaattgatctgataaaggaacttcaaatgtgttgctgaaaaggacaacgcgatcactaggactagggactatcaatgagactggatgttttgcatctaagtaatgactaagacaaacttgaacctcatgttttaggagctctacatccctattgaattgggaatagagaaaatccatatctctcttgtgctctgcgagaatgcaccttagctcagcttcctttctagatattacacacgaagcttggagcaattcagtcctaactgaaatcatttttagagaaaggtca

SEQ ID NO: 138050 - DNA, 571 bp, Cannabis sativa
accttgttcattctaggcatgctcttgatgctgagattaaggatatgggcgaggactgggaggctccagaccgtgagtcagaggaagaggaggacgcagaagggagcaggactgactcagtggacaacactcaactagacgagcccttctcatgcgaggattcgatttcgtgagttaccaaatccgacctaaccacctttacaaggttaaatctgctacgccttagcaccatgcgtcttcgccctaccgagagaccacatctctctttcaccaatcctgcgataatacctacagagaatgtggttgtttctatacccattctccgctgtggtgtatcgcttccttttcacccattcaccgctgctattcttaagcgatatgatgtatccccttttcaactaaccccaaacagttctcgcatagccctcgggttttatgcgatgtgcatggagtacgcacataaggagccttcgatggacgacttcaactatttttatgacataaagaatgtgggccttcacaacgacttctattgtttcagtaaatgggccacttctgaaatcaacggggt

SEQ ID NO: 138051 - DNA, 698 bp, Cannabis sativa
  modified_base (653)..(657): a, c, t, g, unknown or other
acaataaaaatgtaaccattgaaacctcttccatatagatatatctgtttattgtttttctaagtggttatatctgcttattgttttacatttgattttgtgttgttttagtatttttttgttttgagttttttaagattagacctgcaaatataactgttattgcattgggtattgaggctgtgcagaatttttttttacttttttttaaacatgttttcctttcttttgtttgatttgttttacagttgttttacagttatttttccatgattatttatttaacgtggatttcattgtttttttctcaatctcaccggaattaatgattgttttccaattgttctggtgttcctgtggtagttctgttcgtaggtgtggaagatagagaccttattttgttttttttttttttggtatttaaagtattaaagaaaaaaaaaattggccaagacagtaaattttttttttgccgtgtggcagtatttttgtaaaaataggagaaaatgttagtatttttgtaagtttctcaacaaaaaaaatggcttattttttttttgttttttggttgattgaaagctcttaatttgttgggattcttctcggggtaagttgaaaaataccacttttactaatcaattaatcaaatttannnnnaattttatatttaattgaaatatacctcttttatatgtatt

SEQ ID NO: 138052 - DNA, 533 bp, Cannabis sativa
cctacacataaacgatggagtaattaatcatctaatataatcttttaggcataaatgaacatgtcacatttgtcgtcttccccacaattatttacgtacttttaaaccaaattcattgtctctatttctgaactgtttctgaattgttaacgcaatattaacaatttgttgagctttcaatttatggaacttcatccatcctaattcttttccgctttcttgtcatgtcaaaattcatacacacaagttacactactcaatcaattattatgtgtatgctgactttttcttttttcatttaacctatgtcaaaaaggaaaaaaaaaaaagaactatagcaccattaagcttggtcctaaattctataatctaatatgtataatgtataaaatgttggcacggttgctattgtagatatttttttataaaatcatacaaaaaaaaaaaatagcaattgtattttattatggggttaaagcttgccaatcaatatctattcttaggggtgtgcataaatcgatctaatctaatga

SEQ ID NO: 138053 - DNA, 545 bp, Cannabis sativa
tgaggaagcgatgaatctcctatttttgcagcagcaggaggcaaggttgaagcagcatgaggagcattcgagggggttgcatcggtttttaccacctttttgggacgccctaggttctttgttctaaccatggtgatctgaatgagagaatgaagaaaaaacaagcaagaagacaaagaaataggatcgggtaggtggtgagaataaatgacaaaaaattggtttaaataaacatgaaagaatgaagaaaaaaggaaaccaattttgcgtttttgaaaaataaccgccagcccatgaacaaaaaaaaaaactgcccactatcttgcaaaaatatatttttctcctttccctttttttttaaaatagaaataccaacattacttccaaaaatatcccatttaagaaattctttcacaattaaagacacattacaatataagatatcaaattttaaatggaaacatatcaaaataaatcaatgaagaatgaatattgatacttaccaaaaaaaatcacaaattttcttagcccatgaatcaagtcac

SEQ ID NO: 138054 - DNA, 595 bp, Cannabis sativa
  modified_base (72)..(72): a, c, t, g, unknown or other
atctattgacaaagcataggcaatcagatcagcttctacaaaccttgctggtatatggatttctcttttggntctatctctagcaagctggtagtcagaaaaatgtggttgttcctcagtctcatttggagttgtgtctgtactgtcattcttctcactttttggttcaaatcctttgagctcaatttcaaactctgttaaatcttccctcttgccaaatgaatctgcatcaggtaacacactgtctttctcggctctcaagtgaggaaaatcattttcattaaacacaacatttctagaaataatcaccttaggctttccattctggtttatgcaaattctataaccttttgtgcctatagaatatcctagaaatatgcttttgacagatctaacatcaagcttatcatcaggttgatgtacatatgctgcacatccaaacactctcaagtgtttcaggtttggtctcttcccataccacttcttatgaggtgtctttaagtctatgactctattaggactcctattaataaggtaacaagaagtagctaaagcctctccccaataaggctttcccaaccccgaactaagaagt

SEQ ID NO: 138055 - DNA, 545 bp, Cannabis sativa
acttggtgagattgttatagttccaattccatcaattctagaagacgaaccatcagctatgcgaacagtcctttcatgagagcacgcacttagaaaagaaaataggaatctatcacctgtcatatgatcagaagcaccagaatccacaatccaaaggtcatgaggtatttgaataacctgaagtgcatgagtgttgcattgtcttgcgactaaagagatggctcttaaagaattttgttctgccatggagaaagacatcaagacaacacaagtatagaacctaagaggagacaaatagagagagaggacgccggaaaaaacgtcgctggagttggagaagagtctgagatgaagaaacctgagggagacgatgcggaaaaccactgctggagactgccacgcgcatacacgcgccggcgcgtggagattgtcgcgacgtaaggaggtggcgcgtggggcccacgcgcagctcagatggacgtcggacttttgggttttgccgatcggaggtgggacaagctccctgggtcggaggtgagaataga

SEQ ID NO: 138056 - DNA, 583 bp, Cannabis sativa
tctattggagatgctcttacttaattattaaaaaaagaagaagaagaacttgattaaatacagtataaaagaagagtttgttaaaaaaaaagagtataaaagaaatagtaatttgcggcataaatacttaagtttaactcccagttgtaaaaaaaatactaagtttaatttttagcggtaataatacctaagttatatttttggaactaactgttgaatattatgtcattatccacgtgtcattttcttattggtgtatttaaattaattttttttaaaaaaaaaaattaatagcttagaccaatcaagaattgccacgtggaaatttacttaacaattaacagtcaggtacctacaaaagttccagattataacttaggaattattaccgtaaaaaattaaacttagtatttatttgcaactggagttataatctttttatgctacaaattactctaaaagaaaagtaatacttctcccaacaattttctaaggtataattacataagtcactattttctgtaaaaaaaattacatttttacgtttaaataatttttttaatattttacaattttctataga

SEQ ID NO: 138057 - DNA, 615 bp, Cannabis sativa
actaaaactattgtgacatttttgacctccaattgggtctcagggtcgtcgaacttgaaaatatttttatttcacaaataacttacattatatccacacattctaaataaatttttgtaatgaataaattacagttatatattcacttatagtaaactttataatttatgctaaataaggttagtaggatcataatcctactcactactacctaattaaacattaatatatattaaatcctaattattcataattaggtttccaggatattacagaaaagctcctccttctctctagaggtcgaagcccacattgctccatctcttgggatttttttgtcgtttcaacgatccaagtttttcattctcttcgtcaaagatttctcgtagtgggtaagctttctattcctgctatttactttctttagtagattttgccatggtttcatgaatattttctttgctttgaattttttttgattcccacgttagattgtaatatattcggtatttttatcttcatggtagtcttaggatgtatcatgtgtgatttctaaatgaaaaagatctaattctgacctttgttatggttcttggctctttgagtcacgaagaa

SEQ ID NO: 138058 - DNA, 681 bp, Cannabis sativa
atataattttacataaaaatattgaataaaatataatttaatataatattatacaatacaatacggtgtaatatggcgtaccaaacgaaccctaatagaaatatgagtagtgagtggagagatacttgacaaaattacattacacacctcttttacatttatgcttttaatttttatctactctttcaaaatttattatatttatcttctttttttttaattatttttctaattttattcctattatttcacgatagtctctatttttctttaaccaaaattttgtttcaactttctcataaacctacacattcatctccaaagaacacaatctattatgtttgaaattatatcttgattatgtgagtgtgtgagtttaatttggatacaatatttataaaaaatgtatatttgaagtaaaatttatttagatgtaaatttaattaatgtaaaaaaaaaaaaatgtattttcaacttctcattttcctcaccttttgctaactttttacattttttttgagataattacataagacttttttgtaaaaaaaaaaaatacaattttacgtttaaagaattgttttttacatttttactgttttccatataaataacacgaaaacaacaagaaaactacataacagttacatgaaaatatcatctaaataacatcaaaacaac

SEQ ID NO: 138059 - DNA, 1320 bp, Cannabis sativa
  modified_base (549)..(555): a, c, t, g, unknown or other
  modified_base (916)..(922): a, c, t, g, unknown or other
aaaaaaaaaaaaaaaaggggttttttttttttttttttttttgaaattatctaaaataatatgtttttgatttaattgtaaaaaataatttagttaagtttcaataatatttttatttgttttggcatgtttcaatttttatttattgtttctttctctcttttattttttagaagttattctctttctctctttcctagctcttttttcacaaattttaaaaattatttctgaccacgttgttactcggatgaacttaaaaatcctattgcgatctattttctattttttagtgtgaatatattaaaatgtaggaaacatgttttttttttgttattttcaaaaaagaaactatttgattattaatatattgattatttattatttttatgggtgttcatccaattcaatccgcactgttttgctcatagtaaatctgattcacattaagtgagaaattcattttttggatccaatttaatctgcacaatagctcaaatctaattcaatctgcaaaagtgcaaattggattgattactttttaatatnnnnnnntttaatatttataaaaaatatatattttttttttccacataactagcaataaaataatacaaattattgtaattttatgtctctaacaataaataaaataacaaataacaaattcaaagaaagaaaaaaagattgtatgtatagaaagaaatatttagttttgttttaaattatatgtagagaaaataattatatataaaaatataatatccatttgatctataattgtattatatgtattaagacttttaaataattattttttaacattaaaatattatttgtatatataattttttttttaatttttattataaatatgtgtggattggattgaatcggttacttttacatgtcaatnnnnnnncaatccgcacaagtgcagatattcgcactttacggattagattggcttggatcgtgtggattgagttggatcgactattttatgaacactcctaactgttttttttttttttaaaaaaaattttagttaacattcattttaaaattaagttaattgaattgtattatattatacgataactaattatctttcaaaatagcaaaaaggtatatgaaggactttttacagttttaaccaaaaaaagtaataatagtacaaaaatatttccagctggccaaataaacaaatatacagctcaaataaatttctttacacaaatgccacttacacacaccttcaacccaggatccatgcttcctgggcaactatcccgcaatcacgcagcaacccaacgcaac

SEQ ID NO: 138060 - DNA, 596 bp, Cannabis sativa
gttttcctcttgagtaacaaggtgaaagaccctattgatttctggaaggggatccataatcaatatacttccacgaacttgggagaaggaatcagaaagtcccatgagaaaagccattatgtgttccatgtgatggtgttcttgaagtttcttgacaccaccacaagtacacccattgcaaacacaggctggtctatagttggacaattgttcccaaatggtcttcaatttagtacagtacatatttacagtttgattttcttgtttcaagttcatcaaactttttcttaaattgtatatgtgaggaccatttctttgatgaaatcggaccttaagatcagaccatatagcagcagcggattcatcatataaaatgctagatgaaatttctttagacacagaatttaatatccaagaaattacaatgttattattcctaaaccaagcattgtacataacagtttcagaaggagagggtttagggatggtaccgtccaagaagccaagtttatttttgactgaaatagccaagatcatggctctactccaagacatgtaattgtcttgaccagtaagaagttgagacaccagcacat

SEQ ID NO: 138061 - DNA, 909 bp, Cannabis sativa
ttagggatttgggtttagtgtttatggatttagggcttagggtttaggggtaagtgtaaagagtttaggatttaaggtttaaggtttagggtttagggtttaagggttcgctttcagttccgattctgatttcgggtcgcagggtacgatttaaggttcaggtgtgggtctgggtttgagtcctggtcttggtctaggtccgtattttggttcaggtctgagtctttgtcccaaatccaaacaccaccacatgtcgagtctagttcgagttctagtacgggtacgagttttggtgtgggtctgggtttgggtcatggtccaattcccaaatttaaacaccgactgtggggtcacgtccaagcctctggtcttgggtcctgggtcccaggtccaaatccagatcctggtccagatctagctcatgtcttgggttgcagtttgtgtctcaaatcaaggtttaggtctaggtttaggtcttgggtcctgggtcatgggtcccggtcaccaattcaggttaaggtcttaggtccttgtctgggtaagggtcccagtcgtagtgcaggtcccggtccatgttaggtactggtccttgtctcgggtcttggccttgtctcggccttggtcacggttccattctcaggtcctaggtccgagtatcgggtccaatgtcccactcccggtcccgattccaatatgggtttggggtgcggttctaggtcccggccccaattttgtgtcccgagtcttgttctatgtttgggtctgagttcgggtccaggtttggcatcgagtgtaggtcggggttgggatctaggtacgggtttcggttcgggtctaggtctgggttggagtttgggtcctagttcggttacggttccaagtctaggtccaggtctgattacggttcca

SEQ ID NO: 138062 - DNA, 1250 bp, Cannabis sativa
  modified_base (287)..(292): a, c, t, g, unknown or other
  modified_base (577)..(589): a, c, t, g, unknown or other
  modified_base (897)..(897): a, c, t, g, unknown or other
gaaacaaatattttcttatcttatgacaattgaatggtccacccctaaatactttgaatagccattaaacatgcaaacttaagttaaaagttttagtttttcttaaggtcacggttaggtcatacataaatcttttaatggtttaatttatacacacattccatattttcctatcactagggtattcctttagaaagatttaggcaactgctagtaactaatcataaccatatagtatcatcaatatgcaaattgaaattgtagggaggtaagtttggatacaattnnnnnntcaacttaatgatctttgaactgagtctccaaatatttctcaacccctatcagttcgcaacatctttaaccacttaccttaatgtttttcagcattgctaaaatttcttgaaatttctcatacatttcaaatttccttgcataaggtaaaatctagagtgatcactaaaagaatataataaaaactgatatccacccctgaacgtacatccatatttgaatatagatgatcctactttcaatggatataggcatatttctttgcaaagaatgatcttgtcaaaannnnnnnnnnnnngatgcaaatgccatagatatattaaactgtggttgtggtcttttaatggaaaaggcttagttacaataaagagttcatacaatagtcaaagtggatcctggtaacagaatactaaactcatattccatacataaacataaagttttgatccattgacaaaaaatggatattaaaacttgtgaaagtggaactgtattgtattttggaaactgaaataaaaaatttatatttggaatttaaaatttaaattcaaagacttaaatttatactatatatacatgagtaattattctagcttggaccaccantactaatctaactctaagtttaaattgcctaaagtaagcatatacaagtaggagattctaagaacgaggatttatatcatttcgagatagaatgtcgggaatataatcatatgtgacatttgatttcataagagaaattaaagtgacatcatagcagatgatttataaaccatttatctaatgatatattatttaaataaattcgaaatgaataagctaagggaaaacattaaaggataattttaaataagataagaaccaaacgatgtcccagtaggcgagagtcaaagttactcttattttatgaatctcttcattgtttcatattgtaaacactaatctaagttgtcatc

SEQ ID NO: 138063 - DNA, 587 bp, Cannabis sativa
catgtccaatttaaggcccacccacccaattttacccgacttcctatggttaatggcatgaatcatttcctgagcaataaagatgttgtcaaaaatgaggcggacagataaaaacacactctgagtaggagaaataatatcctccataatgggcttaatcctattagcaatagccttcgcaacaattttatacaaagttgtgcaaagactaataggtctgaagtctttaagagaggaagcattagatttttttgggataagtacaatgagagtcttattaatagaagccatattggtattattattaagaatatcaagaactgctgtgcacaaatcctctcctaaagtattccaatttttttggtaaaagtaggcattaagtccatcagaaccaggtgctttatccccagaaagctgaaataaagccaacttgacttcctcagcagtcaaaggagcatcaagcagggtgaattgatgagcagctagccgagaattaacagcagataaaagtaaattagtagcatccctgctactgccgtgagaatggaaaagggttgagaaataacgacagatttcagcttcaatgg

SEQ ID NO: 138064 - DNA, 646 bp, Cannabis sativa
actatgcatatggaatatatatatattgatatatagttaacatcattattatttttatattttcttataaaataaaaactctgcctcaacaattgacacataatatctctaatgctttcatatatatatatattgattatatgataataataatattataactattattttttattaatcacatatttaataattatcacgtatttatagtgactttttttttgtttgaaaagatttagagtgacttttatttttagtaatttaaatcatataatttatatctatttatattatattcatataactgtaaaatattaaaaagtggtgtgacattctctatatctaatttttttttttaaatagctacatctatttttctattttttttaggttatagttttttttttctactttttcatattatttcaatttaatgtaatcaatcaactaattaaattataatttataatacaaaggatacaaacatttatgttttataaaacttatcaacaataattttgttcataaattatgaaacatttttaatgaaactaaaggtccatcttaaaattaattgtttctctatttgcaaatgttgagaatgttcaaagaaatttaaagttagcatgtaataatattaatattg

SEQ ID NO: 138065 - DNA, 599 bp, Cannabis sativa
  modified_base (59)..(59): a, c, t, g, unknown or other
aacaaataaattaggcagcaacaataatggaatgagcggaaagtatcatcatcgagcanaacactaggccacagaaaaactcataaatctctcaatttcaactaacaaacacaagaacgacataaaatgaaagttccaaacacaaaagacaatacacaagtagcacaatacaaactaaaaaaaacgacacataacagaaaaataaaaaaaaaacttaggtattagaaaactccctctactcggagtcctcatggggctcttctgtgttcgaagctgatggtccaccccacgggtctagaacgtgctgagggaagtccgggaacttaggatcaaatcgtggcgtagtcctcttgaacgcacgctccatgactgtgtcgcacttctgctcatagtcccacattgcattcaatcggccacacatttgttgttgcacttgctcaaagtgagcaaagcgatcagcgggaggctccgtggctgaggtcatctctggggcaagcgttgtttttggggctcgaggtggaccaaaactgataggcccccgaggattcagtgcgccttcttccttccacatcggtacacctgcctcgcggcaaagagca

SEQ ID NO: 138066 - DNA, 862 bp, Cannabis sativa
  modified_base (802)..(803): a, c, t, g, unknown or other
atacatgttgggaatgtaggaaaaattaatggccattaaatgtgtaactgtacaggtgaaacgcatgaagggtgtatttgtcgacagaatatcgatactatgccgataatgtgtcgacaacatgcaaatttaatgaaacggcatactaattttttgatactatgtcgatgttatgtcgatagcttatcgataatacacgtgtctgacatgcaacgtggcagttgggaacgtaggtaaaatttattaacattaaatgtgtaaccgtaaaaatgaaacgcatgcaatgtgtatttgtcgagtgaatatcgacacaatgtcaatagcttgtcgatagttgaatggattaattaccattgtacatgtgtctgacatgcaaattgcattggggagtctatgtcgatagtatgtcgatggtgtgccgattatatatcgatgagaactgccaccctcatgtttgataatgttatcgacataatgtcgatagtatgtcgattatttgtcgatgggaactgtcatactttctgttgttgtttttatcgacataatgtcaatggatatcgatgggatgtcgatatttgttaattttttggtattttttcttgtattcaccttgttttgtttgaaattggaggatcgacagtgtttcttgttgtatcgtacgatggtgtttggttatgtgagaattataattggatttacaaagcagacagcagcttgacgttgacagttacaactgacacaaccctacaagagctgcgccaaattttagatgaagagttggaggttgatcctttggcgtatnntttaaagttggagatttgttccttatacatgaagggacaaatggttccgccagaggtta

SEQ ID NO: 138067 - DNA, 573 bp, Cannabis sativa
  modified_base (310)..(312): a, c, t, g, unknown or other
cactagtagtggttcatctggaaaaactcgtaatggaccatacggttgtttcaattgtggtgaacaaggtcataagaagaaagattgcccacaacgacaacaaagatttgaagcatcttacggaggacgcatagggacttatgtagagtctactccttttcatggacagcccagaacaaaccagtctcagtcttcatcctatggtttcacaccccaatcgggccagcagtctcagtatcaacatcagtttaggccacaaggttcagggttcaacatgggatactcacaaggtttccaaactcctactccnnntgggagtcaaagagggtacaatcaaggtggaaggtctggtgcaagtacaagctaacctagtcagggaaagggaaaggcaaaagcaaagtcatccgctcaagcctacgctcttagggttgatgatatgcagggcggtgctgaccagggaattgttgatggtatggttcttatctcacactcttgggctcatgtattatttgatactggtgcatcacattcctttatatctttgatgtttgctagtatgttgggtttgagttg

SEQ ID NO: 138068 - DNA, 691 bp, Cannabis sativa
ttttttttctagagtaactctatttagttataacttcttaattagaatataatttacttagtcccaaatgtattcttaaatagaagttctactgtatatccaatgaataacctttataattgtcaaaagtaatacatcatccctaaatattagagtatctcatgtaagatttaatatcttttcctacaagaagtactttaatagttaataactataaatcaactacaaataaacggtaaaaataatttattatttttattgaaaaggtatttttataaataaaaaaatttaaaaaataaaaataaatttttttctgtgttgaagtatttttgtaattttttttcaaatttttaatttattttgtaaatttttcttagttttatacagcagtttcactctgatttctatttttgtttctgaaaaaaacagtagagtctccacaataatagtaaaagaacaatcaaaactcagttcagcactctcaacaattgacatgctttgatttttaaaagagctattaataaaagccttttcaagttccaacagctgctgtataaaacccacaaccgataaacaacatccatttttttattaagttattttggatcagaaatgttgcagtttgtatgcaaagcaaatcatgaatttcaattataaaaaacctaaaattacataagaaattagttaaacc

SEQ ID NO: 138069 - DNA, 543 bp, Cannabis sativa
caagttcttcttgttttcgaatgcgctcttcttgctcacaaaaccgttgctccacatcagatgtaaggatttgtttctctttccctttgcttgacctaggtcttggggtgttccaaaactgtgtcggggtcacaccaaatcctacacctcgaactcgtcctcgttcctcaggtgtacccaatgcctttgttagcacgtcctcagaaccttgtggttcccactcgcctttttcttgaagctctcgataatggtcctgttaaattataaaaagttaaagatatagaatattaatagtgaatcaacacttatgaaatatttattaatacttacaattttttgtttaatctcttttgcatcttctgaaagctctcctttattgtcagttcttgctcttgaccataaatcagctctatcaaaaccattcaactgatgcccaagttgtttctctaattcagcctcagcccgcacataccctcctcgtccaagtttgtggttatacttattcattgctcgtacatcttgcattttctttcttaatgcaag

SEQ ID NO: 138070 - DNA, 1261 bp, Cannabis sativa
ataagagccattcattccgtgggcgtaaggacccaatggaggcttgaagcggggatgttacaatattcttgaatgtttggttggattcttctttctttagttgagcctaaatgcaagggttttgtagctgtgattgtatacttgctattaaagattaagatgttttgattttgaattttggttcctatgtgagtttgggatttcttgtgtattgcttatgtatttgtgatatatggagtttatgaagtatgtgttttagacatgaaatacttgtggtagattatggttgtttatacttagtattgacctcaaatttggccaaccgacaacaaagtggtaattattactgatgcttgtcatgtgttatacaataagaatagaagagtaaaagagacataagattttatagaggttcggccctctgagttagcgagtaatgacctactctccttttggttgtattaatactagagataataccactcagatcacaatggttgtggaatctaaagtagctctcttaagattataatatatgaatcaagtagacaaatgtcaagttagagagagagagagagccctggggcgtctagaagagatggaaagagagagttaaggtttcaaacttagagtttgagagctttagtgagcttagaaacttagcacttagggaattagggttaggctagtgctttttatatagtagagcttacatgtagattaaaaactaatatcccttaaaaataggtcaataaaactatatttacataattatataataaacttcaaatgagttaatttttcctcaaaaataggtaagttgctgatatcttctcctattttcatgagttgccaaggtccgaaccacaacttggtttgctctccacggatgaaggctacacaccaaaggcctaccaattaaaggcttgccggccatgcacctgccaggtgcaggctagctagccacacaatgtctgtaggccagggtctggccgaccatgtttctgccagggtttggtaggtcatgttcctcctagctttggcaagtgttggccagccttcgcaggtgttggccaacctttgtctttccttatagaggtcaggcttccttggttgaacggacccctccttggtctgaaagtcagttttggccagccaacttgtcctcttgcttattacttgacagttttgccatgccttataaggagactttgtcctactattggcaaggctgtattccacgtgtcctctgtcttggctt

SEQ ID NO: 138071 - DNA, 518 bp, Cannabis sativa
tgactaatagtcacatttagtcacaaaaaattcatgatgtgactagaaagtactcactaaaggtagcaattttttgtagtgactttttaaaattttcaatttcttttaattggataacgtatctgataatgcatatattgtaaaccaaccagaaaaacaatttttttttttttttaaaaaaaattagttaattatgtaaaaaatttcatgatatattgcctattacttatatatatactaggttgatgttacgcgcaatgtatgtataattagtttttttttaattaggttcaattagctgatgttaagtgcaatacatgtttattttttttaattagttaatatattttttttaatttttaaatggaatttgagattttgatctttaagagaaaaaatttagctattgctgcgttggtgtgtcatttggatatgattatgtatatacgtactcattacaaaaaatcttacttttagtcacaataaaatttgttactaaaaataaaaatgttgtgact

SEQ ID NO: 138072 - DNA, 806 bp, Cannabis sativa
ttttggtgcttacattgagagctgtgggaagcattgtttgaaaaacgacaatcaagaatcaaaactataatggtggaaactcgaaacaacacacgccaacctcatcccccataggatcctcagaacccagagggtgaagaggcggcttcacgagtaaatgtgggctctgaggaatgagacgagttgaacgacgaggaatacgaagagaatcccgaaggatatgatgcttatgacgatgataggtacactgagttactggtcctaaggcaaaaagcgactgatcacgaggccaaattggccgcccaaaaagaacagaatagaaggatgcaagaaataatggttgccatgaaaaaagccatggaaatggccggaactcacgtgcatcccaaagccatgcctgcagaactagaggaaatgaaagaagagtcctcgccaagaacccaaaggcccaaaattagggaattaagccccatacgatatccttccgaggaaaaccccaagaaaaatcctactttgatctccgaagaaacaaaaaggttcaagatccgcgaaaggtccgatctgatttcccaaaagggaaaggttcgcagaggggcaagctccctcgagagagtcttggcccacaggaccgagaggactgaaagagtttgtttgtgcttcagtagcccggggaaagagggaggaaaggtcgaaggcataccccatttgatttaagataaaaaattaacgagaaacatggtgacttgagaaaccgcctcgaagagaaatagcacgcgataccagtgtcaggggacgccttgaatgag

SEQ ID NO: 138073 - DNA, 856 bp, Cannabis sativa
  modified_base (797)..(830): a, c, t, g, unknown or other
aaacaaaaaactgaaaaaacaaaataaattatacaaagacattacaggtatatatggattaatgatatataaacattacacgacattttaatgaacaaatataaaaaataaataatcggttaaaacaatgtacaaaatgaagatcaaccatatgaaacacatacataacaggcaaaacaaatatataccataaccaaaataaccagttaaaaatagtaaaaaaataatgagagtcacatttaacaaaacataacaacaaaaaaaaaaaaccggttacaaaaacaatcaaaaacgtgaaaaatagttaaaaacatataacaaaacatacaatcaaaaaataaaaataaaaaaaaccagttagaaaaaataatttttaccaaaacaaacaaaacaacaacacctaaaaccagaaaacaaaccaaaaaaccagttaaaaatctaacttacacaataaaacataaaaattaaatgaaaccagttacattacatttaacaatgctagaagaaaaaaaaaattaaaacagatacaacaatatatataacataaaaaaaaattcagttaaaacttaaaaaacagttaaaaaaactcacctataacattgattctttaaatacaatttaaaaatagccggttccaaatacagaaatataacaatataatattacttttgcataaaagagttaaaaaataaaagagttaaataaagtcacatataacaaaatataacagaaaaaaaccggttaaaagaacaatcaaaaacgtgaatgttggaattattttaccagaatcttagatnnnnnnnnnnnnnnnnnnnnnnnnnnnnnnnnnntgaacttctaaaacgattataagtaa

SEQ ID NO: 138074 - DNA, 523 bp, Cannabis sativa
ttagtcatttacttgaaattattatagtcttctcagtgctaaatagatggtgtataatttagtatagaacattattatcaaacaccaatttttatatatatatatttatatatatatataatcatgttgttaggcttgatgacgtgacggtctctataaaatttcttataattttcttgctctctcattctttctaattttttagacttttgttaatttctttctatttaatatcaatcaatttatatgtattaatataaaaaactgatcataagagtaataacatatataaaaacatttcttttcttacattaatatcatttaaacctataattgtaagttaatcgatctatatttattaatataaaaaactgataagtgtaataacatatataatatatttcttgggtgactattcaatgtgtacatttttattgtaaccatatgattacatttttctttgacctgtaatagcaggttactaataggttgacattcttttttttagaataaattaattata

SEQ ID NO: 138075 - DNA, 638 bp, Cannabis sativa
tgctatcttttaatttaaaatataaccaattataattataaataatataaatatataaatatcaaagacaaagacattgacattaacaaatttttaaaatctgaccataaataaaaataaataatcaatttataaattcaaatctcaaaatatcataaattaataataatctatcaaattaaatattattaatttgcaaaattgatatttaagtttaaatatattaaaaataattttttattttgaaattagggtttgaaatatagaaatattcaaaattgaatgaaaaatcccaagaaaatcaaattttgggtaaagatggtcgagctacccacgaagaggttgcacgccgcctcttccgcgcgcataagctaagggttgcagggtgagatgggcgggatttcacagcgtgtgcagggtcctcacggaatgcggcgtttcgtgtctgaacgctggggctgaccatgtcttcagacacaaatagtccccttccgcacgcgcgtatgtcccttgtgtctgagttcctggtgcgattggcaccatctcgacatccatgtttacctaattttcaaaccttcatatctttttcaatttttatcggaattgagttccgtaaaaactaaaattgcttaattttt

SEQ ID NO: 138076 - DNA, 599 bp, Cannabis sativa
agcatactcttccctggtcaaatttacataatagatttatggaatatcttagttgttataaaatattatttatggatgtctaaattactaaattaattatcaccattaatgctttggttgtattttcctttattacatcagtttagtttctcattcttttagtcatatttttgtataaatatggattcaccccattagaataaacaactaagagattctcattcagtttctttttctctctttatcttcttcttttcttcttatgtattttatattattttataacacgttatcagcatgagtctctgcccaagcttcaaggtagatattttgttgaagttcttgagttgtttcacttaagatttagagagaaaatgtatttgtaaaatgcagctcatcgagcttctgcagagtttatttcattaaatagccgaatggcaatattacaagaacattctagatcaaatgacacatcactacctaaatctgaaaataccctaacaagaatgaggatattctctgacacatataacagaaaggagagagaaaacgtgcataattcaccaatcattacacatgaaaagtactgacagtaaaag

SEQ ID NO: 138077 - DNA, 569 bp, Cannabis sativa
  modified_base (224)..(228): a, c, t, g, unknown or other
tgtaccacatgcactcagtataccatcgtactagtgtaggtaggctatgaatcacaccttgagtactgttaggtattgtaccacagacaccttgtaccttctcgtacaagtgctggtaacaccacgatgtactttttctgaacacgcaagtgcacgtatcgtgacaagtggtaaactcagcaagagtgaggttaatccaacgaggattgtagttaagtacgttnnnnntaaacttttacttctatttggttgaatataacttaaaaaaagattaaaactagaaaataaaaacaatgcaagaaaaagcaattaaactaataaggaaattaactagttaataaaaattagggcttcaacttcaattgttttcattgattatggcctaatatgattatctccctattatcaattcctatgcaatagcaggtttaataaggtaatttatagtcttctcatatatgtaaacctcaattacatgaaaactttctactctcgtgataaatttaacatgcaacaggcattaaatacagttgccctattagctatctaaaccatataggtactctcgt

SEQ ID NO: 138078 - DNA, 543 bp, Cannabis sativa
ttttaagaacaatgtatatttatttttttaaaaaaattgatatgtttcttggatatacacagtcattaaagtaagttcttttgtacatatttttaaatagtcctctttttttcttaactgtagacacaaaataatctatcaattaaaataatttatattaataattaggagcggacccacattgtagcaagtgaggacagtaaaaaaatataggaaaaaaatgtatatatattttatttagttacaacatatatttgtaataaaagattatatttataaacataatagtaggcttggtgtaatggttaagataagttacataattgttagaggtaaaggttcaaattccactaataattttttttttaagtttacttttcctcctattaaaaaaaaaattacactccctcactttaaattctgagtctgtcattattaataataagttaacttattattaaaaaacaattataaatattaaaaataataataataagtaatttaatttgtacagaaaactaatgtacataacactaaaaaaga

SEQ ID NO: 138079 - DNA, 527 bp, Cannabis sativa
atccacataattattaatatttataacaaaaatatatatagtctatttattattgcttcggtattataataacaaatcttgtctatatgtaaattcaaaataattataatctcattttaaaaataaagaaataaatattataattataatctcatctctcatccacctttctctctcctctctctgtttcttcgtttctctcggcagtgacgctgctccggcctccctctcatgaatcgtcaccaggtattttttttatgcttgaatcaatgtttgagtaagtagagtttattattttgtttgagtttgggtttattgatgtaattcgttcagaaagttttagcattgatctgtctaattaaagtttgaagagttttgatttgggtttaggagcattagcaaggatttggcatttgcttccgtttcagaaattttggtactactccaagatccaacaggtattcaattttgattttgagattcattttcccctaatttagagttgtattatattgtatctgttgatt

SEQ ID NO: 138080 - DNA, 671 bp, Cannabis sativa
gagaggccgagtctgaatttgcccaagcatatggagtcgcctgttggcacaaacttcaaactcttcttccccctgattgggattttctcaatcttaagagtccaaaagtgatgctttcaaggtgcttagactgtcacttcatggtacgttggctttgttattatacttatattattctttttataactctttcatattcatctgtttgaaattctctagccttcttttgcttcttttgctttcactcgattactctctgagcagcttgaatacttagagggcgaggtccacaagttattatcataatgcaaggttgtgagtaagtatcgagatgactccaaacaggaaaatacctgcctcaagcaagaagccgagaaagcaaaggaggaagccgagaaggcaaagaaggaagccgagagtgcaaaagaggaagctgagaaggcaaaggaaagccaatgagtttgagaagaagcttactgaaaaagaaatcgaggccatagaacggtgcgacaaagtttgctttcgcactgtatatcgggcctagatttggaaccctaatatggacaccggcaacttggaggagaaggaagaggagactttagctctttgcgagaagaccaggatggaggaagaagatggcgaggtcaaggaagaagaagaagaagatttgt

SEQ ID NO: 138081 - DNA, 819 bp, Cannabis sativa
ttcgaagggaaaagagggctaaggcagggtgatccaatgtctcctctcctatttgttctaggaatggagtacctatcaagaattcttctgaaggtaggttctaacccggagttcaaatttcatgaaagatgtgctgagctgaagctgaatcatctcatgtttggtgatgatgtcattatgttctttcatggagatttcaagagcatatattatgtcctccaaggcctgaagttattttcaagttcttctagactccttctgaatcctcataagtttgcaatttattgttgtggtatggctgagaatgagattcaacgcatcactgactgttctgggtttcgcaaaaaagaggtacctttcaaatacttaggtatccctatttgtgctaaaagaatttcagggaaagaatgtgttgtactagctgagaagatgacagccaggatcaagatatggagtttaaggaatctgtctcttgctggaagggttgtacttgttcaatcggttcttatgtccattcactcatactggagtcaaattatggtgttacctaagaagactattagagatattgaggtaatttgtcgagcctatttgtggaagggtcatcatgtgtcagtgggagcagcccctatagcttgggaatgtctttaccaaccaaagaaagctggggggattggcctaaaaaggattgccgaatggaatacagcagtgatgattaaatatgtttgggcaattgcgaataaagaagataacttgtggattaggtggatacattgtgtgtatatgaaaggagtggattggtggagctatcaagcttct

SEQ ID NO: 138082 - DNA, 1351 bp, Cannabis sativa
taattagagattgccacgtacgtggcaatttacttaaccaagtaccttcagaagtttcaaaattatataacttagctattattaccgctaaaaatttaacttaagtatttataccgcaaattactcatagtaataaattttaaaaaaaatgagctctcaattatatataagtagcatatttgtggtctcatatagacacattcctatatatcgttttccttttctgtattagcctttcagctttcaatggttttatgttatttcatctttaggtgaacaatgatacttgtggcacaaatttaaaaagtaatgattcatatacaatcaagttgtacataaatttttcaatctaaaattaaagaagaaaaattcgctactataaaaaccgacattagtgacgctcgttgagagactctaaaacgttttagtgacactttactgcgtatcactaatgtgggtgactggaaagataatatttagtgtgtgtcactaaacctttttggaaaccctcactatgcgtcactgtaggcttttagagtcacactttattaaactgtaaaagtaacacctacctacgtggcgcgtcactatatctatttatttttttttaaaaaaaaatatgagaacagccacattcaaagtgtgttactatatcttgttttttttttcaaaaaaatatatattaatttttttgatttagattatattgtaaatttatttaattaattatatttgaataataataatagaattaactatatatcaattatgagttaatatatattttaattatgctataaatttattaaaaattcaacataacaaacaaaaataccatacaataagaaaaatatcagccacatttacaacaaaaataccatacataacaaaaatactatacaaatttacaacagtaaaataaatctatacagccaaaaaataaatctccaacaataaaataaaaagagtgcaaacatacatttcaatcaaaactaaaatctttaagtctttgaataaaataaatacaaaaattttgaacagctattcaataccaaactcaaacctacggcgtcgttcgaagctcacactgtcatctgagatgttgtggtgtgaagctcacgtaacaacgataagagaggcagtgggagaggtggagttgtggcccttttccgtcgaagagagagatgaaagttcgagatgagatggcgcggagctcgcgtaacagagatgagagaggttgagggactggcggacaggcaaaactgtcttgtggctcttttccgtcgaggagagagagagacgaaagtaatatacaggagatcaaggagagagaataggctcgagagggaga

SEQ ID NO: 138083 - DNA, 592 bp, Cannabis sativa
tacaaaataggaaatacatgacctatactgtaggtatcttaggggttaggtcgatataatcttttatcccttctggattgatgtgatttctcaaaaagtagtcgcgactagcctcattaatcatagcacaatagctgagaaagggggttacgccatctatcatatcgtttatggtagtttcaatacgtcttcccccatgcagcattaaatgtgaggtgattgttcaatagcgtccagtacctcccggaactccttaatatgtccttggcctccgggaacgtgaagatccttctcatgcctcctccgggaggcaccttcccagaggcactcttctattgtctaagacttagatgatttctttaaaagctggtcctctcagctccacgtgtcatccttatccaggtccacatattttgggcaaactcaagggcaatatttaccccccaagtcttgtttggtggagcacaaacgaggcttgtttgatgcctccgggtggctcatcggtttagcggcacgtgctccaagcgcgtgggctgtatttatggcagtcatcattaatatttatttccttttgcaggcaacgattcgcttc

SEQ ID NO: 138084 - DNA, 630 bp, Cannabis sativa
agccctgctatcaaggcttcgtattcggcctcattgttagaagttgagaagtcaaaccgtagggcttcttggagtcgaagttcgcttaaagatatcattgcgacccccgctccggatccattctcgttggaggctctgtctacaaatactttccacgctgggactgatagtgtgggtatgtttgaggtagcttccgcttcattgcattctgtgatgaaatctgctaacgcttgcccctttatggaaatgcggggaatgtagtgcatgtcaaattggcttaactccattgcccatttgaggagtcttctggatgcttctggcttttgtaggacttgcctgagcggatggttggtcaataccttgattgggtgagcttggaagtagggtctcaactttctcgaggccatcaggacgcaaaaaactagtttttcaattattgggtatcgcgtctccgctcctttcatgcgcttgctgacatagtacacaggatgctgagttttctcttcttcccgaactaaggccacgatgaccgcattctcggagacggccaagtataggaacaagtcttctccgagaatgggctttgataggattggtggcttggcgatgtgctcttttagttttttgaat

SEQ ID NO: 138085 - DNA, 679 bp, Cannabis sativa
  modified_base (129)..(137): a, c, t, g, unknown or other
aaaactgtatagaattttccatagttaaataagtatctttcttgctactttgatattcagtctcactagtagagttagagacttaagattggtttttacactttttcaaaatcactactccacccccannnnnnnnnccatctcatcagtagactttctaacaccaaagcaagtctagaaacttgatttggtgtagtcttaagtattaaaacaccatccttatcgactaacatatagtttctcttcttgaacttacgatttacttgattgtcttccaatgttcctttcctggattaatctgatatctactcattactcccactcaacaatatgtgtctagtctgatgcatactaaagcatatctgagacctctcactgttgatcataaggaattctttttttggccatcatcttttctggaatagttgtaacttttccttagataaataatatgtctagaagtcgagaaacttctatagattgccattagaaaatgcaccagcatcttactagattaagttgctcgcgcaagagtaattaaatcactaggcataccattagccataagtttagataacctcaaacctttaatactaggaacagaaagttttgttaagtccattgaataaacttattttcaaaattcctttcttgtccttgtaatagaaaacatttggtt

SEQ ID NO: 138086 - DNA, 590 bp, Cannabis sativa
agttttcttgaatttcctttgagttgagtgcagcctttacctctgacattgtcaatgtatcttttccataaagaatggtgtctacaaaatgctcataggttttaggtagagaactcagcaaaataattgcttgatcctcttcctcgatcttaacacctatgttgttcaaatcaagaactattctattgaattcatcaaggtgacatcttaattctttgctttcatccattctcattgcatagagctttttctttaggtacaatttgttggctagggatttcttcaagtagatggaagcaagtttaatccacagaccagaggcagtagtttcatctgatacttctctcaggacttcatctccaagacttagtaaaatggcactgtgagcttttgattctgtgtctcttttgatctttacatctgttagttcttcaagttgagtaggttcgatagcttctgaaattccctgatgaacaagtaaagctttcatcttgattctccataagctgaagtcgtttgtccctgtgaacttgtcaacttcgaatcttgctgatgacattttcaggttgtgttctttgagtcttgaaccg

SEQ ID NO: 138087 - DNA, 915 bp, Cannabis sativa
  modified_base (632)..(634): a, c, t, g, unknown or other
ctactacatcttcaccttcccattaaaccaagtactcggttctctggttcttcttgctggctccaagagtgcgatgatcaaggattctcaacaacttcttttcaaattgtttcctcatagtaggcggtgcccttaccccctgttgtcttccttcctctttgtcctcatggtacttcttcaagaaactaacatggaaagtcggatgtagcttgaaacgttcaggcagcttcaatttgtatgctacatcccccactttctggacaacttcgaaaggaccatcgtaattctggaccaagcctttatgataccttttatcggttatctttttccaaatctgtggagtgagtttcagcaacattcgatctccaacagaaaattccaaatccctcctatgcttgtcagcatatttcttcatcctccgtgaagcttttcccaggctctccctggccaattccagcaactcagttctatccctcgcgaaccgataggctgcaggacaaaccccttgagatttcttttttgccacttcgtgtggcgtcagaggttgtcttcccaagataatctccgctggacttattcccgttgcagaagatagttgaatgttgtagcaaaattgggccacatcaagcaannnaacccaatttctctgactagcagtcacatagtgcctcaagtactcttccagtaactgattcattctctatgtttgaccatcagtttggggatggttcgctgttgaaaacttaaggtctgaaccaagcatgttgaacaatgtcgtccaacacttccctgtgaatctggaatcccgatcaattataatgtcttcgggtaacccaaagtacttgaccacattcttcatgataagttctgctgccacatctgctggacacgcatgaggcgtaggaatgaatatgc

SEQ ID NO: 138088 - DNA, 912 bp, Cannabis sativa
tcccgaggccaacctcgccaaatgatcaaattgagttgtgtattcagtaacactcatgttctccttctgagttagctaggtgaattcttttcttttatcacttctaactgccttgttataatacttagcattgaatagttcctcgaacttttcccaagtcataattgtcacatcatgaatcatggacaccatgtcccaccagaccagagcgtcttcttgaaattggaaggtggcacagatcaccctaccattaccggtgacgcccataaaattcaagatcatggtaatcactgttagccattgctcggctttcatgacatcgggacctcccaggaaaactggaggtccctgcttacggaacctttcatacatgggttccattcggttcattgccactacaggttcggcctgcacaccaggttcaggtgccactagtatctctggagtagggatcgtaggagcaccctgctgtgtcaaccgctgaatctcatcatcttattcattgatcctggcttgcatcgttgcaaaccaattttcccaattttgggcatcctgagcagcttaggtagcttgggcagtctgtggcaggttaacatcaccccgacccaatgccctacccttgaatcctctacctcggccacgaatattaaggggaattagagctccctgaccatcactggatccaactgaattgccctggctcctggtgtttcgcctggcgtccatactaattagaacagcctacgtaaccaagagctagtctggtcagaccgtgatcaaagaaaacttactaatgccacttgtttggaaattaaaacatgcacctattctattatcacgctactaacatgcttcctaacatgcttttctaaaattatactataaaaataaactactaaagcaataaaagct

SEQ ID NO: 138089 - DNA, 1089 bp, Cannabis sativa
  modified_base (445)..(456): a, c, t, g, unknown or other
  modified_base (609)..(616): a, c, t, g, unknown or other
aaatttctaaccctagccgcagccttgctaaatgctaaaatgtaagtacaccttaagtgtctcaccgggctgctgctttatattggttagcgaggctgcttcaggttgtctatcccttgcagcctgaaattgtttctggaaatccttggacagctgctcccaggaagttattgaatgatgagtaaacttgttaaacttgctacgcgctgctccaacaagacagtcgggaaacaaaatacaacataaatttttcgtcacgttactggctcgaattattgtattaaagttattcaaatgcaagatcgaatcagtggttccgtcatatgacgagacatgcgagtttttgaatcccgaaggaaaaagggtgctcattatatcggggtgatacggctcaagttcctcgtcagagtcatatccagatagtttccctaattcccccacttgnnnnnnnnnnnncttgtcctccaactcgtttatccgtaattggattagatcctcttgttttggaccaagctgttggcgaaggttaggtttctttcgattcaagtgctctcacagatttggttgagcgtaattgctgacagaccttgtcttactcacagatcgcgnnnnnnnnatagactttgtctttgagtggcttgcggatttactggttcccatactttctcgatcattacctcgttgagtactttctcctcttcgagttgatcgactatgggttcttgaccgcctcgaagtcacgcttgcttcttcacggtctattatttcctcccgagagcagtttgtcgtatttcccccatcagggtccgtacgagtccccgctctatgggtttgagaataacgttgatgatttctagcaggtgacctccgttctttcggttgagttcgaagatcttcctcattctcatgagggatttctcattcatcagtttccggttgtctcccttctagccgttccaactgattttcagagggtgtctcattttttccgggctgttcttcccgggccttttcctgtctcctggttcgtgagccacgaggtctgcctcgtggtcttctcactccaggttcaggttgattttgggtatt

SEQ ID NO: 138090 - DNA, 1236 bp, Cannabis sativa
  modified_base (801)..(806): a, c, t, g, unknown or other
agtccaattccctgtggttcgacctcacctgtgtgagtttaatacttgattgcgtatacttgcgtagtgattataaatttagcatcactactcttttttatgctttttatgtttttatatgttttgctatttatattaggttttgttttcatctatgttttggttatgtatttttttctagttttgttatatgtgaatgtttccatctatatttgtagtttttttttacagttttgaagctttgtgtttataaattagtccttgagattattacacatcaaagtgtgttactacatacacttattctgttattcttaacataaagaatactatttctggtaatttattaaagatattctgagatacacagttcggtcaaattttgaacattccagagtacaaattccatcgccaaactgctcacatccttttattaaaggaggttaatcagcccaatccgaaagaattttgggaaaaaggttgttgcctgttatattcgatttagtgcagaggactcatatttgatatctgcatggtttggaatgttttggtgattgcaataatttgttatttagccaagaatcaaaccagtttgtcaatatatcctttcttggaactaaaactattgactgttgtcaattaaaaacattttctttatcgggtcaagccaaatgccaaataattcataataaaaaaagaaatgttagggctttcaatttcaattatatctattgattatagaataatatggttatctttctattaccaatttttacacaatagcaggtttactaaggtaannnnnngtcttctcagatatataaacctcaattacatgtaaactttcaattctcgtgataaattaaatatgcaacaggcattaaacacagaaaccctataagctatctaaaccatacatgtactctcgtcctatatcgaaatccagttctatttcactatagtataattgacacacttctcagatctcgcatcaaaatcataaacagttaattggtgatcaggcaattaaaagtaattaagtacaaatgaaatagaatacatggaaactgtggaaaataaatcatattataaccataaaataatgtcaataatatccatttaaaccctatataaatatttagctaatcatgttcatggaagcaaaatcacacatgtttaactaaagaaaagagaagaagatagagaagaaaagaatgctgaaaaccctctgaagaa

SEQ ID NO: 138091 - DNA, 850 bp, Cannabis sativa
  modified_base (40)..(54): a, c, t, g, unknown or other
aaaagtaaaaaataccgcctgacaatatttttgtaaaaannnnnnnnnnnnnnntataccatgtaaattttccaaaaattacacgtgaatttgaaccacccccataaccacaaatatgacagttgttatgaggaataaccttacgctgaaataggccaccattcgatggtagaatcttatggaaacctcgccatgcaaattgaagaatttttcgcggaatttttaaaccccagaatttcctccaccatatcgagaacacctcactagaagaggaaggcaaaccctcatctcttttataacttaacaataagttttattgtatggaatagatccctctccctttgtggattggtgcccttaattgttcaaaataattaaaaaaaaaaagataaatattcacacattatactttgtaaaaattaataattagaccttctgttttattaaatgacaaattagaccttatattttctaagatagtattaaataaatagtatcatgaattgattgatttttttttttttgtaaaataaaacttaataataacctaatatagatgtgttatgataacaattgttacgtttttcacttctgttcgtgctaaattgtctttaagttattatattaaaaaaaattatcgagtattgagctcaaaatcctatttgtactattttagaaaatacaatgtctgttttttaatttaagaaatacaaagtttattttgtcaattaataaaacaaaaaatctaatcaataatctttgcaaaatagatagtgatttggtatgggaaatttgattttctatacttaaaaaatcttaatattttattcttaaaccaatacatttcaaa

SEQ ID NO: 138092 - DNA, 738 bp, Cannabis sativa
agtggctggtgtacatattccagagaattgttcattatttgatcttggaaatttgatcaaaaatgaaataaacactacttgggacaatgttgagatctcataccaagtaactaaaagtgagccaccgataaagatgttgactaacaactcggtgcttttttacatagacttgaagaagagttgcaattctatacttgagttaccattgtgcatagaagaatgttattatacttcattccaaaatacggtaacaattaaacatatataattttgaaataatgttatatgttaattaaaagaataactttagtttttgtgacaggttactaatcatgaattgatccaaacacattaccaacattcagaaaaaaatcaagctgcaatacacaacatggggattggttccttggtactacaagcaagaacaataattgaaagtgagatatttgaagatggtacctcaagtaaccataattccagaagacttgctgattatactaatgaagttgctgacttcatcattgaagaaactacaagaaacaaaagaaaaagggaagaagataagacaatcattgaaactcacaagttgcaaacattagtagaaggacaacttttcaaagataaaaaaatgttcaaatctggactttgctactatgccatgatcaacaactttcaatttagaacaaagagatcagaaccaagagagtatgttgtcacttgtgtggatgagaactgtaa

SEQ ID NO: 138093 - DNA, 839 bp, Cannabis sativa
cttgcttggtggtctggtttctcttctcaccctgtctctagcaagttgataggtgctcaaatcagtagtaccttcatttgtgtcagtttctgcattgatttcaggactctcttctgcattttgagtgttagattggtccacctcaagttgcagaccttgaactggtatagcgggttgcatttcagttggagatttggttttcattgccatttcatcctctttgaagacaacatctctacttatgatgcacttcttgaaaccaggttccatacaccaaagtttgtaacctttgactccatcaggataaccaagaaacatgcacttcagtgctcttggttgtaacttatcctgttttatgtgtgcataggcagtgcacccaaatactctaaggtgatcaagtttgggaacatgccctatccacatttcttgtagagtcttgaacttgtttgcaatagatggacatatgttaaccaaatagcagaccgttttgagtgcctcaccccaaaatttcctttctaaaccaacaccaagtagtaggcatctcactctttctaaaccgttttgagtgtcctattcattctctcagccaaactattttgttgaggggttttgatcactgttttgtgtctcatcattccttctctggcacagaaatctttgaacagatttgagcagtactccaggtcattatctgttctcaactcctttaatttcttgccagtttggttctctagcaatgtcctccatttgacaaaggtttcaaatgcttaatctttacttttgagtagatagacccacaccttcctactataatcatctatgatgcttatgaagtaact

SEQ ID NO: 138094 - DNA, 1034 bp, Cannabis sativa
tgcgttgccaaccttttctgcgatgagatatggtccttcccaattgtctccaaagaccccatgtgctgggtttttcgtgtttggcattacctttcgaaggaccaaatctcctactcgcagagttctttccttgaacttagagttgaaatatcgcgcggttcgctgttgataagccgcattttttaggtgagcctgatcgcgcttttcttctagaaggtcgaggtaaagcaactgcttttcttcgttctgttcaatgttgaaaacatctcttcgtagggaacctgccccaatctcgactggtatcatggcctcacatccataagagagcgagaaaggtgtttcaccagtcgtggatcgaggggtcgtgttgtatgaccataaaacttgtgaaagctcgtctggccatacccccttacgttcttcgagttttcctttgatggtgtactttattatcttgttgactgcttcagtttgcccgttactctgtggataggcgactactgagaacgcttttttaattcccaagtcttcgcataactgtcgcatctccttacagtcaaattgctttccgttatctgaaatgagcttataggggacgccaaatcgacagattatcgagttgtagacaaactcgtgcaatttagcggctgtgacggttgctagtgctttggcctcatcccatttcgtaaaatagtcgactgcgactacaacatacttgactccgccttttccttttggtagttcacctatcaagttgatgccccacactgaaaagggccaagggcttgtgatggaatgcaagtggctcggaggttgatgggcatacgtggctattcgctgacatttgtcgcatttctttgcgaagcgtcttgttgcagggtaggccagtactacccccgtcacatgatttttagggcaatggaattaccaccagtataattcccacaaatacccccgtgcacctcgcggagtatgtagtcgcaatcttccccgtcaatacatttgagtatcggctggctgaagcttctgcgata

SEQ ID NO: 138095 - DNA, 862 bp, Cannabis sativa
caagaaaatgactgacattaaggagtgacttgacactcaatttgaaatgaaagatttgggtgaagttgcttatgttcttggtattcaaatcatcataagttggaagaatagatcacttgctctctatctcaaacaacacttacattgataaggtgctagagagattctcaatgacaaacaccaaaggagtagtgataccttttagacctggtattcgtctaactaaagacatgagaagggttacttatgcttcaacagttggaagtctaatgtattcaatgttatgcactaggcttgacatttgctatacagtaggaattgtgagctggtatcagacaaatccaggagaggaacattgggctgcagttaagcatattctgaaatatttgaaagcacaaggcattatgtgttagtctacaagggtggtgctttaaatctcgtaggctataccgacttaaatttctaggattgtcttgatgacagaaagtctacatctaagatggtatttaatcttggagctggagcagttgtttggagaagtgctaagcaagtcgcaacattagactctaccatggaggctgaatacatagctgccactgaggctgctaaagaactagtttggcttataaagtttttcttaggacttggtgttattcttggaatggaaaatactagttttactttgtgataaatgctggtgctatagccaatagtaaagggcctcaaagcctcaattgaagcaaatacatagagaggaaataccacatcatcagggaatatgtggcaagaggggacagactgatggacaaagtggatactgaagacaacttagctgatccattcaccaaaattttgactgtaa

SEQ ID NO: 138096 - DNA, 1064 bp, Cannabis sativa
ttggaatcgtaccaagacccgaacttggaaccacttccaaacaaggacccaaacccaaaattagatccgagaatcgaaataagaataagaattggaataaggatcagggaaccgaaattagaccttgacctaaacagatctagacgcagaaccgaaaaatgagttggacccaagctgggatcaatacccagacccagacccgaacccaaacccagacttgcgccaggacctgcgacccagatcccgtaaccaaagacccgtgacccaggactgggtccagaaccgagacctgtagcagaacccagacgcagacccaaacctagacccaaactaagacccggacccagacacggactgaaacttggacccagacccagactcggactcgtttcagaactcggactcgtacaagaacgcagactcaaacccgggatggggacctagaccgatatcgggtatggggcctagactcgaactaggaccaagacctgaaccaagactaggactagaaccctgattgggaatgggatcgagactctggacctgggaccaagatcgagacctaggaccgagaccgagaccgggaccgggacatgggaccgggactgcgacctgggacccgatactcgaacctaggaccttagaactgaaccatgaccccaacctagaccaagcaaagacccaagacaaggactagtaccgaacacggaccgggacctaggatcctgccctaaatctgcgacctggacccatgactcaggaccaaagacccaaacctagacgcaaacatccacctaacacccgaaccatgaccatagacatgagctagaactagacaaggatttggatttggacctgggacccaggatccaagactcgaggcttagacccaacccataatcggtgtctaaatcagggaatcggacctggcccaagacccagacccggaccagaatctgaatccatacaagaagtcgaactagactaaacatgaggttggagtttggatttgtgaccaagactcggacctgaacccaaacacggacctagacccagacaaggac

SEQ ID NO: 138097 - DNA, 624 bp, Cannabis sativa
ttgatactcgggatcccgatccatatgattattaatatattaattaataaattttgattttggatttattattattaaaatacgggcgttacaacttttttctctttagaaatttgagctatttccttagtcaattctcttgtaattttcgtgagaaataaaaactcgaagtagacgtagctctattaccatcgcgatatgaggagtgaactactataaattatgtgtgtctctctataatatttacttaactcattatttatcttgccaacctagcgagttggtgttggctatttttcagtgtcaacaacatattatagtcccatctaataattgaacggtagaggttttaagacttataaaataagagctcttccatttatgtcgttaagccaagctctaagggaaccatcatttcacttttaaatagttatagaagttatagattatgtatctatgattaacgctcccactcaattgcactaccaaatttacaagatataggtatggactattcctacaggtaagctggtaacgaacaagtaaaagaactcttatagtacaattaagttataacctagccatctcaggattaagattaattaacctaagatcaactaagtg

SEQ ID NO: 138098 - DNA, 837 bp, Cannabis sativa
attaaatgattatattaagcgtaatttattaattacggaggttaaattcggatatgtgagtatcgaggatactatttaaaataaaaatatttttcgggcccgacggctgtggaaatttgagatgtggtcagaaatgtcacgacattaagggttgacttattttgagggtattccggattagttttgaatattagaatgtcggtttaatggattagtaaaattaccaaaatgccactaggttattttaaagttttatttttctttgagggtaaattagtcatactttaaaaaaagagaaaagaagtattatgttttattatgggctttttttttaaaaaaaaaaaagagaagacctttactataaattacttaagaaccaagtaatcactccataatcaacctactccctctccttctcttctctctctcgtgcaagcttagaagccagccatgttgggagaaaccctagctggaattcatccctctctcttgctgaatcattccttagaacactatagaagtttgaggtaagttcttgttgtgttttccctttgtttcttatggttttaagttagctttagttagggttttgagtttttaaggggctgttaactatgttgatgatggaatatgattttagggtatttttttaaggttgtttaaacttgtaatagttagatataggggctggtttgaattgaatgtgtcaaatggaactaaaagtgaaatttttttcacttgagcatgtgattttgagttaaagattgagttgttgtgttttgaagcttggaatatgttgtattatggttattatactgttctgtgaagtttgggaac

SEQ ID NO: 138099 - DNA, 628 bp, Cannabis sativa
ctggctactacatcgagtattcccttgaacggatcaaaagggtatgcaattgcacataccgtacaaactcacagtggtcagccgtccaatctaagggcacaagtccaaactatgggccaaacagtagacgaccagatactacagacggtcctttaggaggaattacacattccaacaacttcactactaccgaagtctgaggccaacctatcggccaaacaagtcagacaccaaggccacctgttacttcagtgtttgataggctgggtaccgcacatgacctcaaaactgatctaaattgtagaaggggcttggacgaataaaatgttccaccaactgtccaaccaggtatttgtacccaagatccaattcaaagagatcccaagtgacacaggccggtcaacaagccgaacaagttcatccacttgtgcaagcacaaatagatcaacttaaaagtatattacaaggcctgaccggcccaaaactcactgatctcgaactcgaccaggcatgcagatcacctttctcgtctgaaatcgaagttcttgaactacccccaaagttcaaaatgccaacctagaaaatatatacaagaaaagaagatcctttatcacacctaaaatatttt

SEQ ID NO: 138100 - DNA, 602 bp, Cannabis sativa
tggaacttggacatcatttgagttgccatgtccttaataaaaggcacctctgataacatccatgattcaatgtttgtcttaatttcacatcattttgggaaaaaaatattggcggtagggtactttgttccagaaattaattctgttacatcatgaaacaactctaatgtatcacacaattgttgagcattttgccaatcaatttccgaaggggcacacctcaaatgcaactcctacagccttgcacgttcaaatactgtcttgcacgataaagttgtgcttagtatcaaaaaagttgaattccacctcgttacacaaacaactgatatctttttagtgtatggtactccaagttgacaagtagtgtattcaaatttttcatgtctttttggtgtccccgaccaataagcaacacggtctccaattttttcaacactatcaccaatgatagataagccttctttgacaattggatttaaattatgtgcgcaacaacgtacatgtagcaactttcccttcaaaataaaactgtcaggctcaaattgtccttttaaaagatcaatcatggcatcattggcagtacagttatcaagagtcactgt

SEQ ID NO: 138101 - DNA, 618 bp, Cannabis sativa
cctccaccaaacctgctcaaaccttccaaaacaatataatatagtaaacatgacataacccaacaactaattcatcacaatttaccaatttgctcaaaatctgaaggaaattaagatgaattccctggtttttggctagctctaggtcacgtgagagagagagagagaggaagaagaaggttggttttcttgccttggaagttttcttcttaaatagggtttttattcatttcatctgatttgattttcatttgattttctttttttttcttttaaataatgggcaacctaaaaaaaatcaaagacacaatttgaatttaccaaaagactaatctacccccttccataattttttttttttaaaaaaaaaaaaaaccctagggcattttggtaatttcactaattccattaaaattaacattctaaaatttctaaactaatccggaaaattctcaaaataattcttccattaacgccgtgacatttctaaccacatcactaaattttcacaattgccgggctcgaaaatattttatttcattaaataaattctcaatagttaccctaagtaagatcataatcttacttcattaccaacatacttacatatttaataaa

SEQ ID NO: 138102 - DNA, 1188 bp, Cannabis sativa
  modified_base (93)..(93): a, c, t, g, unknown or other
  modified_base (124)..(124): a, c, t, g, unknown or other
  modified_base (154)..(154): a, c, t, g, unknown or other
tcctaatagaaaatttagacaaagttaacttagataaatttttgaatatataacatgaataaagttaaaaataataaatttattatatatatntaataaatttattatatatatcgagtaatanatttattatatatatcgagtaatatacctnatgtagcacgtgatgataccttgcccaatctttttgttaaaaataaagtccaagatgtcttacttcgatatatataagtctgacatatctagatcaaatatgtgtctttccatggatactttcatattcgccttgtcaagccatgtcgatataattttataaacctcattcaaataatgacctcttattataggttattgcacttcttgtgacagaggttcacgaatacgacgtgtaggctcttgttgttgttgggttaatggtgttgttgagtgtcttgatttggtaactaaagcatcctgcatattgatttatgaaaattaaaattaaaaaaaaaagtagtttttcttaaatagttagatgacaaataaaccagttgtgtcacctgatcgatccaatcatgaaatacgatcaaatcaaacaagcaaacatttatcaataaaaacagataaaattctaaaaaaaaattggacaacatttcccctataatattaacctaaccatctgttatagcaaacaaataattcaaacaattcaaccaaatgcaataagttttcatccttataccaccgcaacacaatcaaatttttgcagaacctacttcactaagggacacaagttagaaacctttcgttatcaccgcaacacacaattaatatcaaaacctacttcactttggatgaatatttaggatattcaaactcctctaacattggtagaatatcaattaacagaaaaaaattaatatccacacatacctcttctaatttaaaatgatcacgttaactttgtaacgatccttactagtaaccaagacattaacattgaaaaaaaaaaaactattaaaataggtaatagaaatgacaatcatcatgatcaagctaataataataataataataataataataataaaaagtatagttgctctgcttattattctctttcttatgtttgagatttgaaaatgccactagaaaattattattttccaataaagtaatgatttaagagagtagacaacatagtattaa

SEQ ID NO: 138103 - DNA, 762 bp, Cannabis sativa
  modified_base (219)..(225): a, c, t, g, unknown or other
  modified_base (712)..(712): a, c, t, g, unknown or other
agttcattctacgcaatttcatatagaagaaaatagaataacatcataagcatgtgatttataaactatctgtccaatgatatactttctaagaaatttcataatgataaaaactaagaggaaaaataaaggataatttcgattaaaataagaatccaacgatgtcccatttaggcgagagtcaaagttattcttattttataaacttcttcattgttnnnnnnngtaaacactagtctaagttgtcatgtacaactagatgttgcatttattgcatttataaatatttatctgttcagatctaacactattatatttgtctaacggatgacaatcttttggaatttgtcccacttaaacaacaaattaagttagactaacaatgaagactaaaaatttataactacaataattaataacagaaaataacatagtttcaatataaattcacacacattcagaaattatcatacatttagcacgtataaagacatgtaaaaatacaaaaacaaacacatcttaaataacttctaaggtttccaacaaactgatacagtgtctcgtttaggcgagagtcaaagatattattcattgaatagagtagtcaactaatctaaaaaggataccattctagcaaccttttattcatcaagatacgaatccagtgttgtcccgtttaggcgagaatcaaggccattctatcttatgagcntccaccattatttcatactttgtaagccctactcttagtagtcactattg

SEQ ID NO: 138104 - DNA, 870 bp, Cannabis sativa
  modified_base (458)..(463): a, c, t, g, unknown or other
taacctgccaacaaatcaaagctgaacatcaaaggtcggcagggttattgcaaccactagctcttcctgaatggaagtgggaggacattgcaatggatttcgtggttgctttgcctagaacaataggaatgtatgattcggtatgggtcataggggacagattcacaaagtcggctcattttctgctagtaaaaattacctattcagttgatcattacgctgcactatatgtaaaggagatagttcgcctccatggagctcctaaatctattgttccagacagggatccaaagtttacatcaaaattttgggtgactcttcagagggctatgggtaccaagctgaagtttagcaaaacttttcaccctgagactgatgggcaatcagaaagaacaattcagatactggaagatttactgcgagcctgtgtcatgaactttgagggttcatggagtaannnnnngcctttaattgaattctcctacaataataggtactagggtacaatagggatagctccctatgagatgttgtatggtaggaaatgtcgttcccctattcattgggacgaaactggaaaaataaagtacttgggtccgaaattagttcagaagaccaacgaagctatagacaagatcaaggcttggatgcttgcttcccaaaggaggccaaaaagttatgttgatccgaagcgcagagatgttacatttcaggcagcgggaacatgtttttgtacgggtttcaccagtaaagggtattaaacgcttcgggaagaggggtaagttaagtcctaagttaattgggccattttagatactcggtaagttcggacatgtagcgtatcggctagccttaccaccagtactatcg

SEQ ID NO: 138105 - DNA, 670 bp, Cannabis sativa
ttagccgccaatatcccatattttaaatatatgatgttgataatgctttatgtttctgttaatattttggatatggcatatacccttaaaacaatagttatgcaactatgagtttctcatgtaaagaaggaggtgttgttagttgttgtgttactgaccacgttcacacacaatgaatatcttgtgaagtcaggttctttcagttttagttgtatatgtataagaataggcttggatcttcttttatcctcaatggtatccttccttcacctggtatttcacttgtagttcagtgtgctcttggttgtattccagcacttgtttcaacttgtgtactaattcttcagatttgcaattaatagatgaattgaccagaaactttgtgatttgcataattcattcgttgattaaattgtctattaataaatatgaaaaacggaattgtgtttttttcctgacagtttaaaaatttaagtattgtaagtcaactatgggataactgtcataaaactataatgcaacagttatatttgctgtgaggcaaataatattaaaccttaaaacaattaataatgtccctatgtaatacaaataaaacttaccacaatcgagttttctctgtatgagtcgtgtattgctaatttcgatatattgtagtagcactacaaga

SEQ ID NO: 138106 - DNA, 517 bp, Cannabis sativa
tcaaactatgaattcatcatccaacatattgaaaaatgaaaactaaattaattaaacactagtacaaaaaactaacaagttctcccaacaacaaagaagaacctcattttgtaagaatcttaaaattgatcaacacaagaccgtggacgagtcgaattgttggtatttatattgaatctttgaaacaatttcattacgaacaatttggctcttcatactacttgttgtgattagaacagaacaatcacactaaaccaaaatacttatttagcctattttaatcaaagattatcaaagtctctcaaaactaaaaaattgttattcaataagcacacgagtgacatatggacaagtgacgagaaactataagaataatagtgtttttttagctggttgctattgatccaactccaagttttcctataaatctatcttatgatctattatattgtaatttgtctagactagattatcaatttcagtatatatatatatatattctaaattatttaatttt

SEQ ID NO: 138107 - DNA, 1054 bp, Cannabis sativa
cagtctgggcagtgagaatcgcaagttgttgcgcttctaccttctccaatctcttagccaacaagaggtactcagactcattggctgcagtagcggttgacggcacataggcagaggttgggggcacagttgtagatgtggaggggtctggtgcagttttgggtgaggatggtggaataatatatgcacttccaacatactccaccacccgtcttgcttgggtctcgaatgcagtcgaatcttgctccccagcttgtgtttcttcgatctcatccaagcctatttccactgtggggaccgcaccctcacaattggtcttccaatagtcaacctcccaattccgaggatataaaatttgaagaacaaccatctgcaaaaagtgaatatcacgttaaatcttaattatgtcgcatataaatcgcacaataatcgcacaatatcgcccaaaatctaataaactttataagttattgtcaccaaaatcgcataaagatcgcatagtaatcacattacatcgctaaaactctattatacataaatagaaaagtttataagctactctcataaagaatcgcacaaagatcgcacaataatcgcataaagtcgccaaaaatataaaacaattcaagtgaaaatttataagagactgccaacaaaatcgcacaaagatcgcataaagtcgccaaaaatataaaacaatgcaagtaaaaatttatttagagactgccaacaaaatcgcacaaaaatcgctcatgaatcgcataaagtcgccaaaaaacacagattacacttaacaactgaacatttataatgcactgtcacgtaaattgcacaaatatcgcacaacgtcgcatcaaatatcgcatataaacacagattacacttaaatcaaaaaataagtgtgctaaaatagagaaagattcacatacccttttctcaaacagtgcagccacgtcaggtttcttcacattgtgtttcgtgattgagtcgggggtgctccagttcaacattcgagggaatcgagtccctttgcactggccatacttcttcccca

SEQ ID NO: 138108 - DNA, 612 bp, Cannabis sativa
gtgactaattttaatatattttgtaactaaattttagtcatagaaaataacattatttgtgactaaatatattagtcactaaatctcttctacgaccggcattcagcgactaaatggtgactgaaaataattagtcacgaaaaattttgggtgactaaataatgagttttaatgaccaaaaaactagtcggggaaaatgagttttttttgtagtcttaaataaatagttttggcatttaagtggttagcattggaagaatgacatttttgagaaaataaagaaaaattgttaaaagtggcaaaattccaagtgggggcccacatatccatggttgaccacttatagggtattttccatttgatttttccattattttaatgcctaataaatcctaacctaaacctaggtggttgtctataaatatatagtgatggctaacacttaaagatgataaaaattcaccttcagtaaaaatttcctaagccatctttccttctatttttgaatcaccatcctcttttcctctcttcatattttcataccttgagtgatagagtaagtgcccacacacatcaagttgtatctatttcatagtgtgtaaggctgtgaag

SEQ ID NO: 138109 - DNA, 1643 bp, Cannabis sativa
tcattgtcgttggctaaaagcgaagtcaacaataacatagacaatattttcatgttctgcatagcctgtttagagcagtacttacttttatgttctatgcggcctgcggccttttagaacactactttattttcagccttagggccttcatgtttctatctttggccataagccctcagttttttaacactactgttgtttggccctgttgcttttttatcatggattgtgtgaccaaccaagcggtctttaatcttgggtatcttcttatgtccttgacaagtaagggtccgaatttactttgcctagtcgaagtatgcctacaagacttagaggtaggtttagtagcttatattaagcgttaaaatttatctacataagttctttgtgctagttcgttgcgttgtacaatatgggtgccccccaagtgaccatgtatagacaagtctcttaatcactttctattcaccaagtttcacagactttgcctaggttctgtcttgtacaccatatagtacgcatatgtggaactaagagagtaactttaataagttagtctgtgagcaagtgttttaaacatgaataatagaatataaacattgttatttattcattaattggtcattgttgctgtgcaacttagataagttgaatctacaagcttacattatatagatttagcttctagatgtcaagtggctaccctagcgtgcctactattatactcaaaactcggcgagcacatcagaggaagacacgtgccaagctgggaagaatgaagaactcaaacacgcaatcataattacttgaaatagaataactcgttagaagcataattaccagagtatgtttacaagtcggctgactgaacagtcttatgcgagataaaaaattttatactcaaaatttggtgagcacatcagaggaagacacgtgtcgagattggaagaacaaagggctcaaacacgcaatcgcaagtacacttgggatggaacaactcattagtaacataatttgtagagtatgtttataactcggctgactgaatagtattctgcgagacaaaatcatacgaactactaacttatgtatcgatgagaaaccatgagagtgcaagtgtgcatgacaaggttttaacctcactgcgtgaaagagaaacgataacgataaaaacacttagcatatattacatggtatacaaactaattagtataaagagtatgttgaatcaagatgacagatagcgaggtatctctctcactgtaagatggcatgcattcgaggaagattatctcgacactagaaaatatagttgtcagaatgaaaacaatattaatcttgggaagtctgatgactagcaactgctcgtcatcaaagttaatctggctgaatttctagcgaggcatccgcacgagatgacgcttaccatatatccttaaatatgcattcatcttgggccaataaaagcgggatacttatagctgtgtaaattataattaaaaacctcatttacttagcatgatttgtgatcaaatcctatgatttgagggaataattgctgtaacgattacaatcaacttctgtaatttactgcccactatgtaattataaagagtggcagacaagatcaaaagggggggggg

SEQ ID NO: 138110 - DNA, 560 bp, Cannabis sativa
actttaatctatttggcaacatgaaccaagtgtacaatatgtggcttgtagttttggcgaactataatcttctaccttggttacatatgaaagataataattttatgttgaccattcttatttctagagaaaaatcactaggtatggacatagatgtatttttaagacccttggtggatgaattgaaggagttgtgggttaacggagtagatatgagagacagtcaaaccaacactatgttcaagctgtgagcaactcctttgtggatagttaatgatttttcaactcacagttatttgtctggttagagtggatagggatacaaagtttgtcccacttgtaatgaagatacctcttcaattcgagtaattggtaagacatcctatgttggtcatagaagattttttccaaataaccattgaatgagaagggatactcagtttgacggaaaaattgagagaagacctcttccgagacgttttaattgtgaggaaatattagaataagtaaacaaactcccacccctagtcccagaaatcatgagctatttggtggtgtga

SEQ ID NO: 138111 - DNA, 1220 bp, Cannabis sativa
  modified_base (46)..(47): a, c, t, g, unknown or other
  modified_base (1164)..(1175): a, c, t, g, unknown or other
caaatgcattctagatttggtatatctgtctatctaaggaacagtnncccactgatcctcaagagatagagaacatgagaagggttctttatgcttcagcagttgggagtctaatgtatgcaatgtcactactacaaaaaggaacttttgcttcggttttaaagtgacacataaacaatttgcttcggtttgtgtaaccgacgttataaccgtagacgcaaatattgattttttttgcttcaatttcgaaccgaggctaaatgtttttttgcttcagttttgagccgaagcaaaaaaaaaagtttaaaaaatcagtgcaccgacgctaattggtttttttcttcagttatgaatcgaagtaaaagaattttttttaaaaaaaaaaataaaataaaatcttaggtactactctaaacatctatttcatcaatacaatcataagtactactccccttcatacactttatctctattattattattattattattttggaaacattcctccatagtaagtctccttaaactagaaaaaaaaacacaaatattttggaaaatattagtcccacattcagttcaataaccatcattcaaatgatgataagttaggtaaataactccttataagaccaaaatagaaatgttctaaatggaaccaatagagttaggatcaaatattgtcctgcataaacaagaacaaactaatttatcttaatctgaaaataccactaacatagacattaaaataaacaaggaaaaaacaaaactcatcaaataattaaaatactgaaatctgtaacaaacaagattgtaaaataactattgttttggagaagacttgtacaaacgagattacgtggaatttataaataactgtggttgaactcacttgaccaagagaagaaatgatcaatctcagtccagctcaccatagtgagcagagtagaaataataccaatgtcctctgacctgtgaaaatatggaaaaatagcatctatcatttttattttgtatttataaaagcaaattttgtgtcaaaataacgaataatatgatagtgaagccaatcaaacctcttcagccgtgagctaattattttattcttaaaataataattctctaaccacaactatttcaaaatttgtttattttattattttaatnnnnnnnnnnnntaagattagaaaatgatattgaattttttttttcaaatcatttat

SEQ ID NO: 138112 - DNA, 639 bp, Cannabis sativa
  modified_base (611)..(613): a, c, t, g, unknown or other
catggaactcggtgtttggctcagtagaatcacaacttatcatgttagtattgtggggcggttatttagacattgggaatgtcacgattagtcgagaatttagaatttcccaaaaataccctttagtacctttttatgttattttagtgtggaaggacaaaatggtccttttgcccccattgatatttttgtcctttagtggacttggtgttgtgaaaatatttggtttattattgttgtgttggctgaaatgagtaaatgaaacctttttattttcattttgcaaaattgggaaaaattagaaaatcaagaaaaactaagtctttttcctctcaagctctctcttgctctctctcaaaatcctagggggctgctagggttaattgtgttcttcaattcagcaagattttagcaagtgttggtgttattcaaattgaggtaattgttgttcaagctcctctttgttttcttaaaattttgaagaattgaaaatgttgcatgctttgagttttgcttgctgtagttgtttgttgctattttcagagagtttgtgttgagtttttatgttgatcaatgcatgatttaagggttgtgttggaaattattttacnnngatcttagatctacacacaagtatgt

SEQ ID NO: 138113 - DNA, 528 bp, Cannabis sativa
  modified_base (392)..(394): a, c, t, g, unknown or other
tgatattttgaggtttaaatttaaaaattgattattttatttttaaattatggttagattttaaaaatttgttaatgtcttaatatgtatatatgatttaattataagatcagatattttaatattagccatattttaaattaaaagacaactttatccttataatttaaaatattatattaaaattatcttataagataaattaaataatattaaatttgaaattaacctatatatttgtatagatattctaaccataatattttcaaatttataaattggtgattttgttaaatatttaattgtttatagattataagttagaaaaatgatatgttatatcattttacttatcagacatttataaatgatattttaaatatttaaataannnagatatttttgtagaaatttgaaagagacttaatttgggatattttgacatgtaattagaataattattattttattcctaaaataataattatctaaccatatctattttaagattagaaaatgatattgaaa

SEQ ID NO: 138114 - DNA, 1385 bp, Cannabis sativa
ggataattgttgtaagatatcagtaaactatgtaattaactgccctatgatgtaattataaatagaggcaagttatactaaaaaagggatgaaaaaattattaaaaaaggcttgagagttgtatcaaaattctaataagattgactagtggactatccagaattttaactgcaaaaccacgtaaaacctttgtgttcttatcttttctttacgagcttttaatttctgtgcaagtttattactatcttaggctcaaatatagttaacgaaaatcttcattattagtttggtgtttcattgagagccttcatgaaaatagctcagaataaaccctccttacattcaaaaaataattttcttcatggctagcaacgcagagaacgttgatgcaccacatgaagaaacccctcaccatcctaaaaagagccaatgggttccaagaggccttccaactcacaatccaaacggaccactcgctccaggaggacccaacctgagggtggcccgagtacttgcactactcgttccaggaggacccaacctgagggtggcccaaccatgcgaaccactcgctccaggaggactcaacctgagagtggcccaaatacacggaccacacgttcaaggaggactcagcatagagatagcagaaatcctagagtaagggatgaagaacccaatcttggaggtgctcagcccatggatgatggtgcttatgaccctacaaagtacacgcctatcattgaattagaaaattgccatcttaggcgttacttggaggaggtaaactgacagaatgctgaattggagcgtgaggcagccccagccaaggcggcacaggggaatgatactcaaaatcaacttgaccctggagtgagaagaccacgaggcaggcctcgtggctcacgaaccaggaggtaggaaatttcttaggaaaaccctcagaatgcccagggagaacaacctggggaaactgagggactccctgaaaatgagcagcttggggaaactaaggttccccctgaaaacccaaatgatcagcaaaaccatctcatagaattaagaataggaggcgaccagaaaccagggaacaggaaattcctcgtggaaacgaggaaaatcctaggacacaacttgggggacgtaggtcatcagcgaagaaccaccagcgttcttcccagacccatagggaaggggctcgtacaaatcccagtgggggaaacatgacgaaccacgcccaagggggaagagcggggcgtgaagaagtgagtgcaaccttgggccgcacaagaacccacagtcggtaaatgcaaggaggagaaagtactcgtcgcaataatgatcgagaaagcataggtacaagtaagactgtaagtcactcaagg

SEQ ID NO: 138115 - DNA, 604 bp, Cannabis sativa
  modified_base (206)..(225): a, c, t, g, unknown or other
  modified_base (434)..(437): a, c, t, g, unknown or other
tattcttctttcaataataccatatttctaattacaatcttataaatgccaacactatttgtttaacaattataattaattatcaaataaaattgctatttatattatttattaattagaccatgcaaagtctcttaattaatatattaaccccaaaacctcttttttttcacaattaagctcgtgcttagtgaaaattcataaannnnnnnnnnnnnnnnnnnngaattaaaattgattaattaaaatcaattgactgagtttgcaagcagtattatgtcaactagtgattggaccatgggcctatataaccaagctttcaacaagtaaatctagaatttaccaagtaaattttctaacttattaattcatccttgtgccactatagatttggaattaaattgcactctcaattatatagaacgctccatatnnnncaagatatagatacgttttgattatccattgttacaatcctactagtgaaagatcctctaaagatgatctacatcgaaatggacaaacttatcgttctacccttcaatgcattttatccttaaaacacttagctacctataactgatattttagtaaactaatataa

SEQ ID NO: 138116 - DNA, 1799 bp, Cannabis sativa
  modified_base (28)..(28): a, c, t, g, unknown or other
  modified_base (355)..(357): a, c, t, g, unknown or other
aaagtactcataacctcctctggccttnacatttagaggtccacagacatctgaatgcactaaccctagaggttctttggcacactctccctttgtagaaaaagaatgcttagtcattttaccttttaggcaagattcacaaactggtaattcacccaaggtgacattttcaatggaccaccttcggttaacctgtgaagtctatcatatcctatatgaccaagtcataaatgccatagatatgtttcatcattattataaatcttatgatttttatggtttctaggtttagcaatattaaaaaattcgttcataagcgcagttggtatattcgatcttaaaacataaagccctnnntccatgtgagcaacacataattgaatgccatcacgagaaatagtagagatagaactcgaaaaattcaattgataacattgtgtttggaaacatgaaacactaatcaagtttctactaaaatttagaataaacaaaacattgtataaaaacaaaaatttattctaaaactggaggcaaaattttcccttagctttgaccgatactaatttgccattcccaactttgagcttcaactcccctggatttgactaatcccaagtttcaagcagtttcaatgaacacaaaacatggttagtagatcaagaatcaacaatccaaatggacttttcattctctaaaatacatgattcaaaaacaaaagtgttaccttcgttcttatggctcacaagtctgggacatttagttttgaagtgtcccttctctccacagtgagaacataaaagaatacatctgctcaattattctttaattatctttattgccacttcaatctcgattctagttctcaaagttgaactcgaagaagtagcattgtcggaggtatcatcctcaatatcttcaactttcctattgcccttatccgaaattctggaggtagaactccttgcaagtgataaagtcttttcacaagcacgcagtttaatgtccagcttatccatgtcagacgagttaaaattactgatcatgtaagatacaaaaaatttcttatacttagatggaaggcggttgagaatgaattgaacccatttctctcttgatagaaaaattcacatcaaatttgctttctagaactttaagttcatcataagcaagtgtgaattgatgctctaaccaggagacatcttcacacaatagagttcatttgcaaaggcatgtaatagatgagaattggggtgtgggttgtttattttgacgctacaaatatcaataaatagaaataaattgctttgttctaataaattcatacacaaattcagaaaataagaagtaaggaaatatgtttgcaaaaataccaaagtaaaacatattcaattatttgccaaggtttccaacaagctcatatagtgcctcgtttagacaagagtcaaagatatcattcattgaataaagtagtcaccttatctaaaagggacactattcaagcaaccttttattcgatcaaaaaaagaatctgacattgccccgtttaggcgagagtcaaggtcattcatatttcatgagcttctactattgtttcatactttgcaagccctactcttagcagcaactattagggtggacgttactaagaataaaacacttaaactaatacttattttttgagattctacaacattaaattgctaatgaacgaacatttattaaggattgtaatacccggaattaagaaatggattagcaaaactctaattggataattatgaataattgaggaattatat

SEQ ID NO: 138117 - DNA, 651 bp, Cannabis sativa
aggtgtacatagagtttcaccgaggtaccaataaatatatcttaggcaaatcaatagccattagattagcatataaggtatcgctgaagtgcacatagagttgcacagagatgccatatgctaggcctccagagagtatgaattaactgctaccacattagtacgactaaagtactgagtataggctggatttgtagttagtcatactttgtcgagaacattcctgaccccattatcagaccgtgattaagtgtatgggtgcctggttacagtctggatatatgtatatgttttatgattatacttttcttactacatctatcgactcatagttattatttgcatgtataagtaagggcatagctaaggctgagcaggagtgagtgcgagcaattgaagattgtacatgtcggggtggttaggcctgaagcgtatgatctttgggacaacaggttgtattttgtattttcactaggcgacaacttttgtatccaatattttgtaactcagctgtaaaagtttaaaatacgggatcccgacctaatgattacaatcgatgataacaccacctatgatgatatggtgggaaaagcactacgagttgagggcacagttgagtgcatccaagagtccgaagggacacagattgtt

SEQ ID NO: 138118 - DNA, 913 bp, Cannabis sativa
taattagataatatttaaaatagtttttaaactatgtgagctttttaaatttaatttatttgtagaagaaacaatgttcatagttttatgtgtagtttatttttctatatagaacttatagttttcttttaaacaatttaaaaaaacacacaaaattttcaaaatagaatgaaaaaatgtaggatttcaccgaactctttgttttaaaaaaaaattagtcaagatattaatcaatcacctacatattaaaaaatattatgaaaaaataaaaaaaaaaattatttatactttacatgtacaacacctaaaagagtaattaaacaatgtgatatatatatatttttttttttttttgtaaataagaatatttttatttacaaatttaaatatatatatataaatttaaaaaattatgtaaatagtatattaaaagtagtaacatatttatatgtataaaaagtattgaattagttatagtttttattatatatatgtattttgtttttataaattactttattattaaagatatataattatttataagatgaatgataaattatttaattttatatattaaataaaaatttaaaacttattcagtaagacataaataaatgcctttaaaagaaaaatatttattggacattgaaagtaacataataaaagtgttatttataacctacatagataacaccttaagtatttttaaaccaggtgggactctaagtttgtatgtgtggtagttttttcaaaaaaatattatttattaagcctaaaagagtgtttaaacaatatgacacttttttgtgtaaataaaaatatttttatttataaatttaaaaaattgtgtaaataatatattaaaaatagtaacatctttatatgtataaaaaatattgaattaattata

SEQ ID NO: 138119 - DNA, 550 bp, Cannabis sativa
gaaccaagttcgccttatcacttatattactgcttgccaatcgagctaactcgtctgcagttgtgttttcttcctttggaatttgtcagagcccgtaacttttaaattgttcgagcatgtcatgtattttgctcaaatacgctatcatcctttctcccctcgtattccttggatacatgatttaccaccagctatgaatcactgcagatttcaatgtgttcgactttcatctcccgggctagttttagaccagcgattagagcttcctactcgtctttgttattagattctttaaatctaaacttgactgcagcgtgcaggtgtttcccccaggcgtgacaagggcaattcctgcactgaatagctgatctgtagctgacccgtctacatgtaatgtccaagtcagcttatcttcactgttacttggctgagatgttggtaccagctcaggtttgctttctggtatgctttcttccttgcttgcgcattctaccacaaagtctgctaaggcttggcctttgattgatgttcaaggttggaaagtaatttc

SEQ ID NO: 138120 - DNA, 500 bp, Cannabis sativa
catatactctattttaattttttttaaggtacgatttgggttgctctggtagtttttatgtgggtgctatgtggattttaattgcgatttaagttgcttcgttagttggtacgagaatttctatgtgaaactctgtaaaaatgtccaaaaaaaaaaaaactatttataagtatataaatgaaaaaggtctatatttttataagtataatgtatgtattatatttttatggagaataaacataactctcctttaaattgtttgacttttacttataagattatttatttaatacaatatattattttggtaaatttttaaatatcatttgttttaaaaacaaatatttaaatattattcgtaaacttataatgcagtaatatacatatatttttttatctactatagtaactacttaaattttattgatttttaatcttcatttgatttcaaccactacttttggaattatactaaataataacactttctaaatttatta

SEQ ID NO: 138121 - DNA, 2058 bp, Cannabis sativa
atgggtaaaattagaaaaaaaattaagtttttatgcttaatttttctatctaattagaaaaatctcttatttttatatcatatgggttgagattgtttcatcggttgaaacaaaaattaaaaaaaaataataaaaaaaaaatataagtaaaagttgagtttcacttaaatatttttatgttaacatatttttgatatagtataaaaaaaatatattttttgatattttttttttaattaagtcgttaaactaatcatagaaatttaaaattttcttttattattctttattatatcaaaatttataattaaatttgtttagtaatcacattcatggataatagccattaaaaaataatccatatataaaagtaatttgaaaaatatttaatatgtactatctcaaatcaataaatgatacatatgtattttactaatgtttttataacataaaataatttattaaaatagatatggtgatgatgatcatcatagaataataaaggagagtctaaaaagtgagtaagaattctcgtagcactcgtcctcaaataatttaattagtcattggagtgatttcctggattgcctaccaaatataattgagaagttattacaaagataattagtagttgaaaagttaaaaaaattggtggagacactaaatgaaagacattcatcttcaccttcaaccgtagaatatattaaagacacaatagttatgtttgctctctttttcgtggaatataattccgttttgggttttctcataattatattgcattaattttggcgtttgttgttgctgtaagatatttattgtgtgtttatattatatagttcagtgatcttttttcattttaataaacgagcaaaacataaacgagcatctgtttggtttgaatatgacagttaacgcatgatttcgtagtcaatttttaatagtcaaaaaggtggtgcttgtagtttttctttcgtacgtcatacttccattaatatacattgtatattttagataattagtactgaaaatcttaaacttagcaatatttattaatttattcctccgggaaaataatattaataataatgctgaaagcaccaaatttatagaggttgagattaaataatatgtatgagtcatgactagctagagttttcctatttaataaaagatatacgataagaatgggttttaagtttaactatcaaaatatcaaaaaagaaaagaaagagataagcatgagtaaataattctcttattgatctgtgaccgtacacgctgaaaatattgtaaaccatgttatagaaagggtttgctttatgctttggatatgaacaaagaaaattaaaataagcaaaagctactaatctaatggagtcgtaataatggtgatacatacataaaggtgtagaaattaaattaaaaaacagaaagaaaaaaaagaagggatatgcaaatccctaataggcggcaaactttaggtaggcattagagaagagagtcttgatctttagcctttaacgtttagctaaccctaccattaaccaatataaatgaatttataattgaaaatacgataaagaagtcaatatacttttgttattttataaacttgtagggtttaatcatcatgatcatagacttatagaatcctaagtcgttttcatatggtatattttacaaaaaattcaagttctagcaatatatttaagagattttaccataaatattctcattaatcgcttttggcaattaagtttttatgagaaaaacaaaattggcaatcaactaagtcaataaactctcttattaatgtagtctttatatattatttattccacaaaattcttgatttttggatatttatatataaataaatatatatatgggtgatgggtattatccattcatgggtaatattatgaaaaaccctaaaccctaaatgaaagcaccaaacttttgacgcagatttttcactacaagaaaatatagcaataccggcggaattaataccggcggagctaaaccgccggtattaattaggttattaccggc

SEQ ID NO: 138122 - DNA, 1301 bp, Cannabis sativa
ttgcttagatccaacttaagagccctatagccttctttaccaacttgtttccttttcaagtaatgtagatttcgaatgacaccatgatattatcagtaatcaagcgtccaggaataaacgcattttgatttaaggaaatgatctcagttaacaaactcttcattctattggcaagaactttggtgatgatcttagcaataacattgcaaagagatataggccgcaactcacttatctgctctggctttttcttctttgggattaagactatattggtatcattcattccatttggcatgtactcattagtaaaaaaattcctcacagtaagaatcacatcattgcccacaatggaccaatatttttgaaaaaaatttaggattcataccatccagtgtcgcgcgatttgtcaggatgcatctgaaacacagcttcttttatctcttgatcttcaaccgcccgaaaaaggagttcattgtgctcagcacgaaccgtaggggtcacacaatccaaaacttcatcccaggtagacgtaacagcagtgaacaagttggtgtagaattcaagcagtacattatccaaaccattgccccaatgccgagagttcccattgacatctttaagacaaaaaatctggttattccttcttcttgaagacgactttgaatgaaaaaacttgctattctgatctccctcttttaaccacagttgttttgatctttgtttccaaaagatttctctttgattcaacacaacaaacaactcctttttagcatcatagaaaagctttttttccttcttcgtcccttctactttttaatcttttaagctcctgattgcaatgcttgatgcgagttgagaagttcccaaatacatcttttccccactgttgcaacaatcggccccactcagaaattttttcttcaataccgaaacccctcatcctatcccaacaccctttaatgatctcctcacaaccttgatggcttgtccaataattctcaaacttgaaaatcttaatatggtcatgaacgttccccacttgaacttccaacaacaaaggacaatggtctgaaggagagacttctaaattgaaaagtttagccgaaggaaacatgtttaatcaagcttgacttactagagctctatccagacgcgcttcaatccagttagatgagtctctgcttttctcccatgtaaaagggtgcccaagtaactccaaatcacgtaacccacataacgtaacggcttcattgaaaccttcaatcaaccaagaggggtacgggttccctccacgcttc

SEQ ID NO: 138123 - DNA, 650 bp, Cannabis sativa
gtgatttggataagttttggtagtgtttcggtgagtgcgaaaattgggatttttgagttttatagttattgaaaatttctaggatatcaaaaatcgtatttttgtcataactttttacttggggtgtctgtcttggacattctgtataccgttttgaagcttgcaacaagctctacaacatgatgtatgttttagagccaaaatataagttttattttagtgaatttataccgtggagtttggtagaaaactatagattgtcttatgtgaacattaagtagtgttttgggataaacagttattggtttaccgttgttgtgacatagggccgagattatcgcggatatttctccacttcagttggccaaaatgtatgaacttggattgaaggtaagaaatgtatattgtactgcatagtacgttgtatgtaatacaattagtatcgttatgaattgattaatattgagatatagttaatattgttatataatgaaaatgctgattggttgaatattgataatgtgaagttattatgcatgtgatatatgggctctcataattaggtgatgcaatttttgtggtgacatacttggcataagtacgggtgttagtgatatatgatgagtaccgagcgtaggtacgagctcacc

SEQ ID NO: 138124 - DNA, 1666 bp, Cannabis sativa
actctattgttataaagtcatgctgtttggactgaagaatgctggggcaacgtatcagcgattggtaaatgaaatgttcacagaccaaatagggcagaacatggaggtttacgtcgacgatatgttggtaaaatcaataaaaagtagggatcatacttcagatctcgcagaatgctttaagatattaaagaagtataacatgaagctaaactcgaaaaaatattcctttggagttttctcaggaaagtttttgggattcatagttaatgcgaggggtattgaagcaaatcctgaaaaaaaaaataagaaactaatagatatgctgtcaccgacaaagcctaaggaagcacaagccttgacgggaagaatggttgcacttaacagattcattttgaagtcaactgataagtgtgtgccattcttaaatatattgcgaggcaacaaaaagtttgagtggacaaaagagtgtgaagaagccttccaaaacataaaaaggcatctagtgccgcatccagttttggcaaaaccaataactggagaaacactgtctatttagccatcttagaagatgcgattagtgcagctatagtgcgagacgagggcaagcacaagcaacccatttactatgtgagtaaaaggttactagggacagaatcctgatatccccctatagaaaaactcatgttgtgcctagtccatgcgtctcgtaatctacggccatacttccacgctcgccccataaaagtgttaaccgattagcccttgagacaagttttatcaaaaccagatgcttctggacgattgataaaatggtcgattgaactggggcagttcgacaaaacataccatcctcgaacatccatcaagggccaagctttggttgacttcttgatagaaggcataactccagaagaaattccacctgttcagcaagatgcagaaacctggaggttatacgtggatggtgcatccaacgaacagggttcgagtgcaggggtattattaatatcgccagaaggctttaagtttcactatgctctgaggttccaatgtgacgtatcaaataacttggctgagtccgaagccttgatcgtcggcttaaagatagttgaggcgttgaaagtcaaaaacctcatatgtcgtagtgattcacaactgattgtgaaccaagtcctcggggaataccatgctaaaggcttcaaaatggcaaggaatttagggaaagttcagaagaacttggaaagattcgataactttaaaatcgaacaaaactccaacaccgatgcgttagcaaaactagccttgcagaataactttgatgaattgaacttagttccggtagagatgctgagcgagccaagtatatgtgaaactaaagatgttgagattatagacagctctcctacatggatgactcctattatcaattatttactcggcgggaaacttccaaatgagaaaaatgaggcacgaaaactattgtatccagtgcctcgctacacaatgattgaaggaaaactgcgtagaagagggtactcgatgcccctacttcggtgtgttctccctgcagaagcaaatgaaatcatcagagaaattcatgaaggcttctgtggggatcatgcaggctggaaatgtctatctaaaaagtgttggaattattttacca

SEQ ID NO: 138125 - DNA, 841 bp, Cannabis sativa
  modified_base (27)..(67): a, c, t, g, unknown or other
aacataaaatgttatttttgatctttnnnnnnnnnnnnnnnnnnnnnnnnnnnnnnnnnnnnnnnnnagggcataaaacccaacatggtgctccaaccagacatctttgcctacgctgggaagtcattaatggtccataaaatagcatctcgaattgtgatcacactcccgttgtaggcatctcaagcttggacacttgaatcccacaactctctcaattcatcaatcaattgtctcatgaaaacatccatatcttttccaggggcagtgcgccatggcaccaaaagagacaacatactgtaagagttactcatgttaccaaacggattaaacccgtcagtggccaatcccaatctcacatttctaagttcaagtggaaaggatggatggcgtctgtcaatctgcttacactcttctgtatctgcagggtgcttaagcacgccatcctctttgggtctcttagagtagtgccaccacatgtcctctgctgagtttcttgaactgcataatctcttcagactcagaattaaaggaaagtaccgcaaaacttttctagcaactttttttctatctccctttctctttttccaatgactctcgccacaaataggataaagttctttttttttcattctctttccaaaataaggcacaatgatacttgcatacatcaatggtttcataacccaaactaagattacgcaacttcatcttcgactcgtaatggaacttgtgtaattttgtaccctctggaaataactcaatcaatatggcgagtaacatatcaaaagaatggttactccacttattgagaactttgcagtgcatcagcttcaccaaa

SEQ ID NO: 138126 - DNA, 1062 bp, Cannabis sativa
tttttttttcttgttttttttgttctttgtttttttttttttttttagttttgttttagtagtgtttttttatatttttttataggattgggaatccaagtacgccagatcggaatacttccattcgagagttttttttatgtttgttttttatgttcgctatttgattttgttgttttagtagtgttttcttatgtttttttataggattgaaaattcaagtacacccgatcggaatactaccattctaaagttataaactctggttattactctgttattgaagatattaaaaaaagttcttattgaaacccaattaaatatgttttcaaaaactgtattggaagttgcttttgattgcgtagtagctgttaactttctttagtgtttccttgtctttgtatgcctgacctttttcaacttctgggtggtgtttgtctgttattagcttcgcgttgttgatgtcaatttctggatcttcgttttttactgttgttttcatgtttttctactattttttcagcaattagattcgtataatcatctatgtcgaatttgacgttctcaaattctcttctttctgactctcctccttattctaattggtgttcgagtgtgtataattttgttgttgttgtgttattttcaagcatttctgttgttttcaagcattactacattttcttgatatggtgttgttctggatgtgatatttgggattacaacaggtgttgtgttgttgctctgtccgttcccaacgaagaaggagggctcgtttgtctcttgttactgttcacagtacaaaagaaaaaaaataggcctgcgaaatttctaccgtgtggcagtatatataattcattagtggtagtgagtttgggcccctcacttttaaatttgactctgcctctggatagtttggtatagtctgaataccgttcacactcacttttaattgtcttttatagattcaatataagaatattttatttaaggaaatatatttaaatttaaagaaataaatttctatttaaggaaataaataaataattgattttctgataa

SEQ ID NO: 138127 - DNA, 833 bp, Cannabis sativa
  modified_base (45)..(50): a, c, t, g, unknown or other
tcatcgttttagaaagttcatacttagggtgttaatcaacatacnnnnnngtagatctaagatcctggtaaaataatttccaacagaacaggacttggtgctcaacataaaagttttagatctcattcttagctttctgaaacttcttgaatcgtccaaatctaagcaatataaagagagttataaccaaaatactattagtcgttgcaacaggaaatttctgaaaagaaataggcctaaaggggtgagtcctcgtcaggttccaaatttttgggattagcaccaaatttgtagcattaactccctgatacattgaactcgaattgaagaagtccctgattgctgtgcaaaaatcctcaccattgtctaccaataatgattgaggaaaatggctgataattcatcttggcctggcgctttattgttacccatattggaaagggttttacaaatttcatcactatttggttgtttgatgaggtcttcctggtccttaagggatagatgtcgggtattagatagccacaactaagcattggatcgttgttacttttactgaaaaatcccattaaagaactcaataaattattttccaatccacccctgtgaatggagccaggtgtcacttttatgcagaatgctttcaatggcattactctcctgctaagagtagctgagagaaagaaaatttttgaacatttatttccctctttatgccagaagatacgtgtaacaccctaactaacttaggcatgttagcgtaatttttaacgtgctgtgcaacccgttgctaatcaacaagattaacgaaaatgtgattaattaaattttct

SEQ ID NO: 138128 - DNA, 808 bp, Cannabis sativa
  modified_base (742)..(749): a, c, t, g, unknown or other
aatccatagacttgtgtttttaaagcttttactttggttgagtttgtaatttttagttataggggctgttagggtttgatttgtgtatggttcaaattttgagctttatttgagttgatttaaaattttggatgctagatttgatgtattgtgatggaattgaacaagtttgagtttaatggcatattttgattcaatgtgtttttctagtttccattggttggaaaatattgttgaaggttgttttaggtactctagaaggtttggtggcaattggatgagttttgagcaagttgggagttctttggggaaacttggtgcaaaccggttagccggtttgccaggtcctgcaaaacctattaaccgattttcgcagattcctcgaacaacctattttctcaattcttgcccatttcgggtttcccagattagggttttgacatgtgatttacccggttatgttatgtgattagggcatccatctagcccgagactttccattcaggtcggccaactcacttgaatttggaaaggaggtaagaactgtgtataatatgtgatatgaatatgcgaatgtatgtatgtgttaatgtatatgcatggctgttataattgttacactaccaacacttgtacggaaatggttaggagtgcattggtatagtgtgtattattaaggagtacattacattgttaccaatacaagtacggaaaagtacagggtgtgtgtggtatatcactnnnnnnnnctcagggtacgaaacaaaccctaccaacactcgtgcaatgaggtatgtagtgtatgtgg

SEQ ID NO: 138129 - DNA, 528 bp, Cannabis sativa
ctttgattatttaagattcaaaattgcttctccaattttgttatcttttcacaatttttgaatccaccatgattcactttgatttgagtctaaattgctctaccaattatgactcattttacaagtttggatccacttttgatccatttgttcttgctatgacaagacaaatctcataagtgtaactctcgcagctcactttctcatcatataaaatgagataaaaaccactaatggaaaaataattccaaaactctttattctcaaaaaaatgatgaacacaacttttcattatcattactattgttattatcatataaactaaatatgattagttatacatatattattatataccaataatatatataactctcatgcacaaaattatgtatgttactatcatctaacatgcacataatattaatatacatcacaactatatatgttacataactcgcatacatataacatatactcatcataatatatatcattttcacataatatatattatatatgtatcac

SEQ ID NO: 138130 - DNA, 572 bp, Cannabis sativa
  modified_base (540)..(545): a, c, t, g, unknown or other
agaaagattaaaatcccgaaggttgcgaaaacccataccacccttacttttgtgaccacaaaggcgcttccaggacatccaatggatacttgaaggaaaattactagaggactgccaccaatactttgccatcatgctttccatgtctctaatgatctcaaggggaagtaaaaagacactcatggcatagctaggaaggcttgagcctctgttttaataagaatcttcttacctgctctggaaagaaatttagtgccacaagcttggagtcgtttccttaacttttcctttaagtaacccaaagctgctgttttatttctccccatagaactcctttaatattttcttatgaatgacaatttttcttatgataagtacaccttaaaatttaaaaaaaaaaaaaaaaagaataagtttaaaataatttttaaaaaataatcttactctttttttattaaaaaaaaaaagaaaaaagaaaaatctcacattattttatattattttcagtacttattttaattttgttttcataattttttnnnnnnatgtataatttttttttaataaaattt

SEQ ID NO: 138131 - DNA, 844 bp, Cannabis sativa
tcttctgtcatattaattgcgtccctcacatttggggtcactgaagaccaaaatgctttgttgcttgaggaagttacccgtatggaaatcaagaaagctttctttcaaatgcatctcgataaggttcccagtcccaatggaatgatgtggttcggctggttcaagttttctttgctactagtgagtttccttctgttttgaatgaaactagtattgttcttgttccaaaaaagaaaattcctgagcaaatgggtgatcttcgacctatatcgctttgtaatgttctttacaaggtcgtttcaaaagtaattaccaataggatgaagtttattttgccatcagttatctctactaatcaaagtgcatttttgccgggtcgtttaatttccgacaatattatgatctcttatgaggttacgcattcaatgaaacggaaaagaatgggaaaagatggttttatggcagttaagcttgacatgagcaaagcttatgatagggttggttgggcttttcttgaagctatgttggctcaaatggggttcaacttgagattcgttgctcttataatgttttgtgtgacgactatgagatataatgttaccaatggtggaaagactatgggaccgattgtaccaggccgtgggatacgacaaggggaccccatatctctgtacttatttctggtttgtgctgaaggtctgtcttcgcttttaactctttatgagcaacgtagatggttaactggttgtagagtggctaggagtgctcctcgggttttacatatgctatttgctgatgatagctatgtgtactgtaaagcgaatgtgagtgaagctacacatgt

SEQ ID NO: 138132 - DNA, 503 bp, Cannabis sativa
  modified_base (414)..(424): a, c, t, g, unknown or other
tataaaaaaataataattaataatctattaaaaataaatattattaatttaaaaaatgatatttaagtttaaatatataaaaataatattttattttaaaattttgggtttaaaattgggaaaattcagaattcggaaaaaatcccacaaaaatcgggttttggagtgtgctacccatgaggctacaggtgcagccaaatgaggtttcaaatgggccagacgcgcgccgataggagaattgcaacatccttgcgccgagtaacttcggcgtgtgcatggtcttcgtgggcgaggtgcagggtcggtacctgtctgaacaggcgtggcatcgagttttagacaagaggcacgtgcgcgctcggtcgtcttgtccgaagggtctggtacgcatgagctgttgggttttgtgccctnnnnnnnnnnnatttcaatataatcagatttagtagttaataaagatcagaaataacatttcatgttgcatggttcacgtgatttatttc

SEQ ID NO: 138133 - DNA, 791 bp, Cannabis sativa
  modified_base (46)..(61): a, c, t, g, unknown or other
gagacccaagattgggatgcggatcttgacccacgacctagggttnnnnnnnnnnnnnnnncggtgtctagatcttggaatcgtaagaggaccctaacctagaacaatttctaaaccaggacccaaacctagactcggacccgagacccgaaatcggaataagaaccggaataaggaccttagaacaggaattcgaccaggacccaaaactagctcaagacgcgaacccggaccaagacgtgcgccaagacctgcgacccaggaccagtgactcgagacctggaacagatgccagacccgtacaagaacccaaaccaaaacccagacccaaactcaaaccatgacccgaacccaaacactgactgaaacctggacccagacccagacccggactcataccaaaactctgacttgaaagcgagactcagacctgaaccaagatgaggactgggacccagacctggacaaaaaccgagacctgaacttggactaggactagaacccagactgggaccgcgattgggaactgggaacgggaccaggacccgatacttggacctgggacctaagaaccaaatcgtgacccagacccaatcaaggccatgactcgagagaaagaccggtaccgaacaaggaccgggacctctactcgggtgggacgctaacccagaccgagacctagcaccctaacctgaagtggggatccaaacccatacttaggacccaagacccaaacctggacctgagacccgaaccaggacccaagacatgagctagaactagactaggat

SEQ ID NO: 138134 - DNA, 855 bp, Cannabis sativa
  modified_base (60)..(62): a, c, t, g, unknown or other
  modified_base (354)..(354): a, c, t, g, unknown or other
  modified_base (807)..(807): a, c, t, g, unknown or other
atttctgaatccatgctggctgactattgtttctgctctggacttgccattgcctgtttnnnggttaatggatcgtcatcaatatcgtcaccaataatcatattgatttcaccatccaggccatacttagctggttttttagaaaccctcccaccacgacgaggagtcgtgaccttctaaataggaacatcagtggtaattttctcgattgtatcaacttgcattggttcaactgagggactgggatcatcctctatttgagtagaagacgatggaacattacttggagttatatctaaaagcatttcctccaatcatactttactttgcagcttgaagttcttaatatagtcntcttcaaggaaagtggcgtttgtagaaataaatactttatcatccttttgactataaaatagtccacccttagtctcattagaattcccaacaaacatgtaaactttagtttacttttctagtttgccatctttctctcttaagacatgagtagggcaccccaaattctgtaatggcgtaaactggctatacaaccattccataattctaaaggtgtcttagagactgatggaataacatttaaaatgttagtcaccatctaaatagcatatccccaaaaggatgtaggtagagttgaatagctaagcatggaccttatcattttcgaaagcgtacgatttttactctctgcaactccattttgttgtggaatgctaagggcagttagttgagattcaattccaagttcaattaaatgatctttgaacttcatatccatatactctccacccntatcagttcgcaagatctttaatattttacctaattggttttgagcca

SEQ ID NO: 138135 - DNA, 1500 bp, Cannabis sativa
  modified_base (369)..(369): a, c, t, g, unknown or other
taaagatcttgcgaactgatatgcgtagagaaatatttggttatgtaattcaacgatcattaagttgaacttcgaagtatatcctaacataccttcccaagaactcagattggatgttgatgaaaatgaaaggtctatgattagttactagtagttgtctgagtccttctaggaaaataccatagtgattgaaaagagttcagaatgatagaattgttgtaaacttagtacacccaattcctagagttatggatgacctgatcatgaacttaagaaaagctagaactattaattaaggtttgcatctttgatagcaattctaaagatattaggggtggaccatcatatggtcattaagataagaaagtntttgtttcaacaaatactacttctctaataagaatatgactaaatcgaaaaatcaagtagcaaagtagaggagatatttgcaattctaaattgttctatcatcatattctatataagattatctcactgcctctgttgtcttgatacaatcgatgaggacaataccattaatgtttttagatagaaagtaacggtaccttgtcgtagtgggagggtttaaaataactcaacctgttatgacttggaagacacttgtgataaaaatctatttttagtttaaacaagtaagggatcgttagaataaggaactaagaagcaaagccaagaaaactatggttaaaaccattgatatggagtgaccaaaagttttctatttcaagaacaaggaggaaaattttgataataagtctattcaatggacttaacaaaactttttttatcctagtattgttggtttgagtttatctaaagctatggcttatggtatgcctggtaatttacttaatctagtgcaagcaacttactttagtaagatgatggaacattttttttctaatggctaactctatacgaagtctgttggctcctagatatagattttatttatctaaagaacaatttcaactattccacagaagataaaagtcatgaaaataattccttaggatcgacagtgagaggtctcatgtatcatttaaaatacattagaccagacacctttgttgagtgggagtttcaagtgggtattagtttaatctatgaaaagaacattggaagacaatcaaataaatcttaagattaaaagaggaactatatgttagttgataagggtagtgttttaatactctaagactgcaccaaatcagatttctagacttgcttaatgctagaaagtctacttatgagatggtgattactcttggggtggagcagtgattttggaaaagtgtaaaaacctatctaaagtctttaaccctagcatttgattgaatgttaaagttgtaggaaagatacttattcagcctatgaaaagttatatacaattttggtgttgtaccaataatgaattaactactagtgttacttcctaactaacacagatgtagttgccaaatagtaaagaatccagta

SEQ ID NO: 138136 - DNA, 670 bp, Cannabis sativa
aaacccacaaacactcaagctcaaaagcttgagcttcaagccaatatatttctaacatttccagcagccacaaccaaaaataacaaggatttcaatctagagaataccctaaaaatccattcaaagctccacaacataaatcacagcaatattatggaatttacactttaatttatccaaaaccaacacaatctttccacacatgcataagcaagaacatttcaactatttcatgtttttccacaataaattcaacaaggaattaatttaaatttagtagagaaactacctcaacttgaaccaaaagcaaataccaagcttccaccacaaattttaccaacaatcaagctagattttcatcaatttcaagttgaaaataagagagggtttgagagagagagagagggccggccaagaggaagaaaaagaccagaattttctaacttcatttactctcaaaattctacttttattaaattaagaagataaaggtaaaaagaccattttgcccttagggccaaatatcatgcataaacactttcaagggcataattatcattccatacacatttaattccaaataaatttcagattatcaaatatcaaataaaatgccaacatttaatcccaaattgcattttgagctcgaaccccgttcgacccgaaatac

SEQ ID NO: 138137 - DNA, 593 bp, Cannabis sativa
  modified_base (45)..(46): a, c, t, g, unknown or other
  modified_base (76)..(77): a, c, t, g, unknown or other
  modified_base (108)..(109): a, c, t, g, unknown or other
  modified_base (138)..(139): a, c, t, g, unknown or other
  modified_base (166)..(167): a, c, t, g, unknown or other
  modified_base (193)..(194): a, c, t, g, unknown or other
  modified_base (413)..(418): a, c, t, g, unknown or other
tttctgtcgcagagtataattaagctctgagcccaaaactccttnntaagctctgagcccaaaactcctttagttnntctgagcccaaaactcctttagttgtttggnncccaaaactcctttagttgtttggattcnnaaactcctttagttgtttggattcttnnctcctttagttgtttggattcttcanngtcttacacactatgattgaggaataacttgctacgggtggttatgcactcaataactaaagcttgaattttaatggtgaagaacactataggattcaaattagaagagagaaaagaagaagaataagtctcaaactctctagttgtctgacaagaagaaaactaggttaagagtcattagttggactgtaaggccattcttttctttttatactaatnnnnnnagggttaggattgaattatttggaataaaattgataaaataatagcaaaaaatagacttagtggcggaccccattttctcaactatttatctatttttcataaatatcatattttgcaatttcaatcctataaatgccaaaactatttatcaaataattaaattaattatcaaat

SEQ ID NO: 138138 - DNA, 653 bp, Cannabis sativa
aaatattctcaaaagtcatacataccataaaaatctaaaattcatgcaataaaaaatttgacacataaaaaagttcaaaattatacatatagtcatatataaaatatatatataaattaattgtttattataaacggtccagtcagatttaactgttaactatatattacgaaccgcaagcaaaccattacaccgtaaacggtccggattgaccaaaccaccaaaaatggtttctccggttacggtttacagtggttcgaattgtagtggtccagatttaaaccgcggtttttcgatttatatgaacaggcctatctcatataacacccccgtcaatttctatatgcatgcaaagtccgctcaaccatcaaactgattcacacttgcatcacgcccttctggctcccacgatgtactaagttccaatgatgcggccatctgaccttcatgcaaactctagcacgcttcttgactttcgcaggctcacatgactactaagtctcactggcacgaccctctggcctccactaaaactctagcgccatcttaacgcttgcgctcggtcttctttagccctgttggttttgttgatgcattcattccacaactccgcatctctatcgatgcctttgtgtgactcacgccctcttgac

SEQ ID NO: 138139 - DNA, 739 bp, Cannabis sativa
  modified_base (471)..(486): a, c, t, g, unknown or other
ttttcaatctctgtactctgtatgatgagcccttaacgcttccatctctttgtctttccactcggtaaacgtacgcctttgttcctcgaacgcgagatttaccgcagggcggagttcttcctgatcatgatgcagggtattggcatgacactgcatgagtccaagagcaacacagagattttgtaactcagtatcatctccaatggtcgtttgagtgttggtcacgggcggaacggctgtgttatgaatgcactggtttggttctcaactgttattcctagtctcttgcacagcaggcacgatctcatctataggagtcgttacaccgtggcggaactctggttttagcctctcaatgaaagcacaaaaatgttgacctcggttttagccaatgacaatgagtcttatttagtaagcgataagtaatttatagcaattgagatatagtaaagcaatgtaaagacacaagannnnnnnnnnnnnnnngccccgagcagttcggtaatagccgaatcctcgctatttgtattgacttaagaacaaggagaaaggttcttttcttatagctcttacaacaatatctctaaacatgaattcttagataatatctgtagggtaaaatctttcgccctctgctcagtgaacatgtatcactatttatagggctatgaacttggagaggaagtatttcccttctcattacaatggatataaccagaaacattgcatgataaatgca

SEQ ID NO: 138140 - DNA, 828 bp, Cannabis sativa
aaaaaaaaacatttagttttttatgtttataattttatggtttattttcagtttttttatatcatgagttgtttacaacagtaataagtttaagtttcctacgagttgttttttgttttcaggatgaaagttttatttgaagcctgatgaaatgattgagggtaaaatcacggacagactcacatataagcgaggtggggcagtaaccccttaaaaaaaaactggaaaaaaaatacatatgtatcttagttagttgcaacagatatttttaaataaaagatgatacttataagtataatattaattttggtgtaatgattaagctacttagcatataggttagaggggtaaaatcatcttatttcctaatcaagagaacaatatgattaaaaatatcaattccaatttcaatgaagttcaacttaagctttattgtggtacttgctttggtaactttttatatatgcgttgtaacgccctaatgctaaggcacgctatagtgctttttcaattacagtgctacccttgctaatcaaatattttttctcgaaaaatatgtcaaattaaaactttttataataaatattaaactttataatttatataattatttacaaacaccgggatcccgtttctaaacttttatacaaaatgaaccaaaatacaatttccaggtcgcacagcgactacaaaatatacccccagttgtcccgagaccgaaaactctaggtcacactgccatgacatgtacaatctcatcctagccaggctcactcctgttcagctttcgcctttcctttacccacacatggaagtagaactgtgagt

SEQ ID NO: 138141 - DNA, 685 bp, Cannabis sativa
agaatgatggaagttctaaggactctgaatttttttcatcccctataagagaggtaactagtttcttttgtttagtgttttttgattataggtttgttgtttgtggttttattatagtttttttatcattttgttgaaactagtttctgtattgaatgtctttttatattattttacataactgtttgaaacaagtttctgttttgggtttggttgagatacgttttttctgtttattggcactggtttctgggtggggtttaggtctctgttttgtgtttttttttttttttttgtaagaaaccagtttcttgatttatgttgttcttgggttttttttttatattttttttcatcatcttgtttaatgtagtttctgtattggatgtgttatgtatgatttttgactgttagtgaaaacaggtttctgtaggaactggtttctggtctttgtttatgtttgtgtttctgtgttattttctgtaggaaaccagtttctatatttatgttcaaaattttgttttaattaatttatggttcaggcacactatcaggatatatcggaggatggtggtgggttacagttccgttcatactgttcaagctgaggtacaagctttttcacatttatgttttgcattgtttggatgttattgtttgttctaaatattttttcttcaatttt

SEQ ID NO: 138142 - DNA, 759 bp, Cannabis sativa
  modified_base (678)..(683): a, c, t, g, unknown or other
ctaaaagggagtataagtaacagtgtcatcaacttcttcaccagaagcaatgacatctgcctttccaacaacaacatttggattggaatctggaacctgaaatataaatttgaaaataacaaaaagtaaaagttgcaaaactaacataaaactgtcaagcaactaaaaaaaaaaacagacatgctaacacaacctaacaaagaatataaactacacttacattgattttaacaacatcctctaaaccagccaacacaacttgctcatcatcaattttaagctgacttaaaccattgaaaaaatcatctccctttacacaagactctttggccttaacattttcaacatccttagccctctcttcactgcttgcaacaacctcaatttgaatcacatcatcagtaggaacatcacaaacaacatattcaactccagaagcatcaccaccatctttacccaactcatcaccatcatcggaatcagtatcaatattctctagattaggtaatcccttgtcatcatcatcatcatcatcatcatcttgggtgacaaattcatcagatgacttaacctggttcaaaaacagtattgcaactgaaataaaacaggaaaacaactaataataataggagaaaaaaatatgaaacaagacttgtgaaaataaatacctcatcagannnnnnacgatgaatgacattaactttttcttgaatatccttaattacagtcatgacagacttgaaattaaggtcaacaaaa

SEQ ID NO: 138143 - DNA, 679 bp, Cannabis sativa
gtgaggttagagtgtagttattgtactttttattcttaatattgatatttattcttttgtgtttcatctccatatctcatttattaaattgttcttaatcttctaatttttcttcccaaagttaatagtatctttttataagtttagtcatacttttcttacgtaagttaggctattaattattttaatatatttattatattgcatgtcgtttactgcaaactgccaatagtggtattttgtcgatttatgatatataatatgatatgctcttaagttagaagtgatgttcaatttatgcaagattaattaatttgtgcttttaatatatatatatatatcttccagttgtaattaatggtgtagaattgcaactgcgttttgaattaatattcctattagaataggatttgcataattacatttctaccttatcaaactctttatctgatcacttccattagcttaccattttattatttatatttcatttatatttttaccatattttatacatactaatctttagtggtaatttacctctcctggatacgacatattactaccacgaccacagtttaattaattgggcgacatcacatgtgtactgataaatctaggaatacatttaatcacacaatcttaattactttccactatgctgacaacacaataaaca

SEQ ID NO: 138144 - DNA, 739 bp, Cannabis sativa
aggcatgacaagtgattaatcccaatctagtactagcattgttaatcaatgcataattggctaaagtatatgcaactagattagcttccctataaagaaaaaataaaccttttacacaatcatatttaagggaatatctaatctaatgcaataatagatcaacatctctacatctttcatcactagaatatattagatgcatgtattgcttttacaatcagattcaacttaaaattttggaatgttagattttttatttgggtttacattaaattttattggttttattaaaatttgagttgattggatagttctttgctgtgttagctcatattgttggtgattaatagttaacgggcttaacatcagtgtgtaaagtctaggtaaagcaaaagtgtgagctttcctagttaactaaagcctttgatgatcatgccttgtccaactaggattatgtacgtaagtctctaactctataaatatatattgtctcatcacaattgtatatttttaataatcaaataaataaattgcttttgattgaggaagacttagttgataatattacactatcaaattacagtaattactatgaatcaatcaggtacgcatatacacctaattattatatattgtcatggccggctatttaggtgtgcaaacagtgctaatgcacggggcccaaaatttaaaaaggcccaatatgatttttctgattttttttaacccaaccttccat

SEQ ID NO: 138145 - DNA, 759 bp, Cannabis sativa
  modified_base (378)..(382): a, c, t, g, unknown or other
gatgatagatagctcgcctacctggatgacatcgatagttaactatcttctcaacagacaacttccaattgacaaaaacgaggcacgaaaactcctttattcgggaaaattatatataaggggctattcgatgcctctcctatagtgtgttcttcccgtagaagcaaacgacatcattagagaaatccatgaagtcttttgtggggactatgcaggttggcaaagcttgtcaagaaagattattcgacaaggatattactggccaaccacaaataaggacacccatgaatttatcaagaagtttgataagtgtcaaagattctcgcatatacctcgcgtaccaccaacgaaactaagaatgatgacctcgccttaccnnnnngcaatatgggggattgatttgattggggcacttcccacagggcgaggaggagcaaagtacacagtggtggttgtcgacttttttacaaagtggacagatgctgaacctctagtatccataacctgcaaaaaagttctcgactttgtcataaagaacataatttttaggtttggagtacccattaagatagtatctaataacggaactcagttcgatggtgacttattcactgagttctgcgaaaaacaagattattaagagcttctcgccagtatccaagcctcaaacgaatggacaactagaagttgttaataaaaccttgaaggatactattaaaaagaagttagacgctaccaaaggtagatgggtcgatgaac

SEQ ID NO: 138146 - DNA, 544 bp, Cannabis sativa
actagtttttaaggacccttggttgccacggccaaccacttttaggccttattgttctactctagataatccaaatttgttggtacgtgatttgattaacgagtctaggagtggttggaatatgcaaatggtgaggaagttgtttaatgtggctaatcaacagattatttgttctttaccaattagtaaatttttgaaagcggattcttggatgtggcactatacagctaacgtgacttattcagtgaaaagtggatactttgtggcgtcggagttggatcaatttgatcgttccccttcaaagagttggttcgtagtatggtggaaggggtacgtttcggaaaacttctttgcctaagaaagttttaatctttgtttggcgtgggtttcatgatgctctccctacgtatgtggggctctagaaaaggaaagtggctgatcatactaattgtccaatatgtggtttcagtgtggattcgaatagtcatgctgtgttcctatgtcgtggttttaagaaaatttggaaggaattacgtgttactat

SEQ ID NO: 138147 - DNA, 741 bp, Cannabis sativa
  modified_base (40)..(64): a, c, t, g, unknown or other
gcgctaaacatagatttggaatctatagcttctataggtnnnnnnnnnnnnnnnnnnnnnnnnnttcgagcttggcttaatagaggtaaatggaagagttgagagtgatttagtgacatgcaattttgtgcatgtcattatagagttgagagtgatttttagtgacatgcagaattagactctaatcaatctttgttaatctcctacaatgtgggtcactaaatatttgaagtgtcactaaagagtaaaatctatttgtttttaatttttattaaatgaaaaatactgacttatagagacgtgccatgcgcgactgcaaaaacatatcccaacatacatggggtgtcactaaagctaatttataaatttaaatattatttattttatttatttatattaaatatagcccacatcccaaggtgggctgaccataataataattaaattttattcttttttctctaacaatataaaatgtttttttttttttaaaagataaaatgcttaattacattgaaagaaaccctatcatttagcaagaaaatagagaggcagctgttcatctttctccctcttcgaccgtccctcttcttcttctcgttttgggccgcagctattcatctctcctccgacgaacgacgacttagctccacagatttctaatgtctgcgccagtatcctcaagctcatggactctaacctaattccctcagcctcttccagtgattcgaaggtcttcta

SEQ ID NO: 138148 - DNA, 1130 bp, Cannabis sativa
  modified_base (466)..(468): a, c, t, g, unknown or other
  modified_base (968)..(968): a, c, t, g, unknown or other
atatatacctacaatcaaaataaaataataatatattattaaaaataattgtatataccatattaataaaattatatacaactataaaataagtataccatacttacaaaattacatgtcacatttatatataataaaataaaaattaaacttgcataatctaaaataaaatgatatattatacaataaaacttatataccatataacaaaaaaagatatatcttacaatcgaaatatatatgtaatgacaacaaataaaaataaaaatatatagaatgctaataaaattatatatcatgtcaacaaaagtacaatagaaaatagaacttaaatactattttaaaaaaataatatgccgtataacaaaaaatacatataccatttaccaaaatatatataataataataaggggaactaccccatatactatttttttttaacttttttttcaaatttacggtttnnntttctaaagtggttgcagtgctagttccaatagaggtttatgtacgatattctattacaatttaggttgcaccgctagttgcaataggggtttctatataaaatttcgtaaaaatgcaaaaaaaaactagtttaaagtgtaaaaatgaaaaggtcactaataataataataaaagtatatatattgctaatatatatatatactatactgaccaaattatataccacaattaaaatacaccataaaaataaaactatataccactattatatgatattttagaaactaattaaaaattatttaaaataaataatatcataaaatatatagaaataataattaaatatatgtagcatgccaagaaaattatatacatacattaaaatatttgtattatgctaaaaaaaattatataccatttatatacatagcaaaataaaaaataaatatcaaataaaaattttaatatactatacaacaaaatagaattatactgtacncaaaatctatataccaacaacacacaactcatacgaaattaaaaatatcgacataacttttaaatcaaaaagattttaacaaaaataatatagatgtaccataatctttaagtaatttacttctaatacttaaaaaaaatatgaaaaaaaaattattaattt

SEQ ID NO: 138149 - DNA, 609 bp, Cannabis sativa
tgatatatcgtatcactgaaaaattaatataccgtagtaataaaaataaataccacaaagaaattataacaatattaaacctactatattaatactactatattaatactcaaatatattaatactcaaaatatatatatatatatcatgataacatatttatataataccactattaaaatatgtataccatactaaaatatttatatataattatatataataaaataaaaactagaacaacatcttaaataaatgatatattatgcacaataaaaaaaaatatatacctacaataaaaaataaacaaaataatataatataattaaaaaaaattatatataccatattaataaaattatatcttacctattatataaatgtatgtaacagtttttgttatgttttaaccgtgtttgttatgtcttttaacagaagtattaactttaacgaaaaaaacaaatgcttctcagaaaaaagatacttgaatagttgtttatttttgaagtgtatagttctctaaaaaatgcgtgatccaatcaatggttgatcttaatactgatatagttaggttcaacttaattgaattatttatgttcttcaagttgt

SEQ ID NO: 138150 - DNA, 507 bp, Cannabis sativa
  modified_base (340)..(346): a, c, t, g, unknown or other
  modified_base (473)..(474): a, c, t, g, unknown or other
taggttagctcctcatcttttcttcttaaagtttgttaaattttgatgaaaatagtgtaatgcatgcatgataaattgatgttgttgctgctgtgattttgttgttagtttctgagatttaagcatgttcatttgaagttaattaagctacttgtggtgcttgatagttaggttgtttgaagtttgaattttttatgcaaaagcttgagttttcaaagtgaaattgtgagttttggttgctgtgtttgttgaggtcgaattcttatgttttcaaaagcttttatatgcatgtttaagtaggtttgatctgattttggtgcatgttagttgattttaaccnnnnnnnagttttggaactcaaagcttgggctttaatgacactttttgtttctgtgcaatctgggcgagttcgttgtgttgtcgagcaaatttcgcaacaccaaaaagtatgatttaatcgataagacaggganntatttgagagatgacaagtgcgagtattcaacc

SEQ ID NO: 138151 - DNA, 1149 bp, Cannabis sativa
tttttttttaaaaaaaaatatatcgtattgaagatataatggctgagagatgcattggaataattatcttttacttgatcatgcatcatcactctaccacacatgatacattgaagcagtcttctcttatctaaaggtaatcctggcactctataaattatttttattatttctcaaacatgcatgctatttttataacactcctcatttggcttagttttctctcttgcattgttttacttctaagttgaagtgatttgaattactgtacttgaacaccatcctctaactccaactctaacttctactatctaatggaaacaatataagtaaccacgacaacaataacagcagcaataatagcacgtcaaataaatattaatcgttttacatcatcaaaactaacttttcatactccttccagtactattgattgtgaagcggtaatatatataaatataactaaggggtatggaatgaaaatttattgtgtatttcttaataacagtgtcaattagttgttatgtgtatcacaaatttttgtgaatcttcaaaatagtagttttaactacaaaatattttaactattttatataaattaatagatacatatatatatatcacaattatatagatatgtacttgttagttaattttaaaaataattctatttaaaatcaatttatataattatatcactttattagatgaagatgtgtaaacctttttctattttaatttaggctaacttttcattccactttcctctgatatttttttgtctactccaaattattaattagggctttagagatcaagatgaaaagaaaagacttttctaatttaatgtaatttgttcatcttttttttctattatctgcacctgtctacttttgtagagaaagacaaagtatattatataatttttctcatcacaattaaattaaatactaaatttttagtcttcatcaaaccagactaactatttattatattaattggtttaattttttatcctaataattattcaatttttaaattaactttctctaatttattttataaaaacttataacttttatatatatttgcatttctaacttgattaaaggacaacgatgatgtcccgcccagtacaccacccaggga

SEQ ID NO: 138152 - DNA, 804 bp, Cannabis sativa
ttttagaatatatactatatatatgtcattataaattaaacaaattcattttaaaaacagaaaacataaattaaacttttatcccacggtaagttatgtcctcgaacatgaaagacaacaacttcagatagaaggaataagacttataacttctacaataatatctgtaaaagatgataacatagatgaaacatatggtcccgaagagcattagttttgagaagcccaaagaagactagaaaaaggcgataagtggcttcgagaaagcatctagtacattactattcccatctcgaataatagtatcaatacccataacacgagcctgaagattaatagatgcattcacatttagcttcaattcattatcaacggcaggtcttgcttgttggtcatgtaccactctaatcgttcagtccaaatagtccaaattgttctttaatttcgatattggaaatccattagagcagcttcaatgctcgttgctcatcaagcttttgtcagtctaagaaaagcaatcttgattgcttgactactaaagaaaattgtgtgggctactgtcaagcaatggtagttgaattattttttattttttttataatttttctatcaaaaaagtgtattaatataatattaaaagtattaaaagtaatttaataatatattaaataatagagtgtgagtccattctcttaacttttaaaattgcttattattagagtaattttaagagtaaagtggtcaaaaataatgtagataaaagaaaaaataaaatataatattttaaaggggtaagttgaaaaa

SEQ ID NO: 138153 - DNA, 846 bp, Cannabis sativa
caacctatgcctggaaatttgattcctagccaaccctaggctaggtcatgggttctggccgacctctaaggcttagggccctagccatccaaggccaaggctctaagcgggcaactagttttttaccctctgttgacctcatccagggtctcgtgacggccttggaggcatataaaactgtagtcttatgcatggttccccttggaactgtgtataagactcagtagtaagtccattatagtcaattgtataacttaggacttaccctatatctaagtaagtgtacttaagatggtacttggtcgataattgaccttgtacattgtgatttacctagaaggtaccctttggtactattgattaaaatgtgattgtagctttgttaagttgctcacctccccttatctttctctataggtggttctaggttttggatacgggaggtgccaaccgcattggtcccctagtcatcttgtgatcatggcccggatgaaacagacatgtcgtagggcaccaccatgcgatcctcagatttctagggtaggaacaaggggccgagttagagctgtagaggaggctactcagcctcatgttgatgttgatctagagcttaaccaggtagagatgcttgaggccaaccaaggggcagagagtcttaatactaagtctagtcttgaggaggtcgcaccagtcagaagaaggagatacaagacatgtaatgtcctctccaactgtcctttaggtacttatgttgtcaatgaggagcctctaataaaaaattggtgggccttcattgttaggcttggatcatgcttagttcagtcttctgagcacgtagttctttat

SEQ ID NO: 138154 - DNA, 519 bp, Cannabis sativa
tgtaccaagtaattatttagtttccttaaaacataagattaattattactatattgaatatacattaactactaatttaattcttaaaaaggtgtgattaacataattaattttttttttttaaaaaaaatatatatagttattgaattagtagcaaatatatagttaaaaaaatttattaacaaaatatcataacaaatagtgaattttgctactatttaaaattttgttgcaaaataaattaatttgatttatgatttttcagttgaatttaattttaatatttaattttaattactacaacaacaattctggcccctcatcaaacataacatcctttaaatcacaatactattattaatattattattacaattctcttagcatccagatcgcttgaaaagaacataacttttttctatttcagtcaagctggttacaataataacactttgttaatgttacaatttcttaaggataacactttttttttgaagatgtaattgcaacaacccacaa

SEQ ID NO: 138155 - DNA, 894 bp, Cannabis sativa
atgacaatattttaataaaataattaaaatcaagataaggtggcggagttggtgttggtgtcgagcacagtattttcagcagcagtggtggcagtgggcattgagtagcgacacaaaggacacaaatgcttagtctttagccaagaaacaatacagttcttgtgataaagatgagaacatggcatctctactactttcatatcttcaaacaacaagttttcttggcaaatggtacaattattgttggtagcaatatcatcaccctctttaatattcaattcttttagtttattaatggattcttgtgtagcaggaacatttggaatgacaccaagtgcctctctaaatgtactatcaataattctcgattcttgttcttgttctagaccagtgacggtgacaatataaatattgacaataacgtatttaaaggccgcaaaaggaagattgttaatatgaatgtcaatgtaattatttatttgggtagtaagtatggatcctgcaattggatctgtcacacctattccaaatagaataagtcttgtgacgtcagattgatatgaaaaatatgtggcatgactaactatagtggattgatttatgttctgaataatgtgttcagaaggacgtacttcattgcaaaagtttaccttaaacaccaagtacttattatcttgttcaaagtgaaagctttctggtggaagactatttgagcaatctaaatttatacttatattgtaattggtatttgccatcgccattgacataatcaataattgaataaattttggagaagagaatattactatttgttatctaagcgtttatgtggttgtgaagttttacgttttttgtcaaaatgtgtgatatatatatatagatgaaaacataata

SEQ ID NO: 138156 - DNA, 694 bp, Cannabis sativa
aaaaaaaaaaaagaaaaagggggggggggggaaatgagagggaagcttgagaaaatggggtgttaactgaaattttttgaaatgaaaataaccaaccacgatttcgaaactgcctaagaaactaaaagaagaagaagatgaacagtatatgtgggggagtgagataaaataaatgatttaacactttgtttgtatttgaaaataataaataataaataaaaaaaaaaaaagtataaactgtcacaaaaatgttacataaaccgtcaaatccaacctttttaaaaacatttacttttataaaaaacgtggcacaaccccaagaagatacatgtaagccacaaatccatcatatacaatttgaaccaaagcagtatactgccgaaataaaaaaaaaacagtaaaaaagttatattcagcgtgtcgcagtctaaatgaaagaaaattagaaaagtaagtaaagcatgtaaatttccctaatttttttaatgaacccaacttttttaaggagctaacaacttgtcatgattggttacttatatttcaattcccaaagttcattttcaattttattattttttagaaaaaacttaaaaaaaaaaaaacaattatggttatttattactttttttttcaaatcttttatatcttttttctatttttttttttgaattttttacaccaaaaatctattttg

SEQ ID NO: 138157 - DNA, 623 bp, Cannabis sativa
  modified_base (504)..(510): a, c, t, g, unknown or other
tgcttttgtcgccataatctctcgacagagaagatttatatagttcaccattcgagggtcgtcctcgtcctcggtttgggtggaaccagagccaagagcgacgatgggaaagtcacagtaatggcagcgttttcgacagaagggaaggtgaatgtaagcagaagcaggggagagctggtgttgtagaaggatagggtcggccgttggggcattttgtcgaacagttgaaggggtttgtgagaaagaagtaaggatatgttgaaagggctgttttctggttctgacattggagggaaaggctgagaaaaaaggattgaaggttgatttgagcatattattgggtgattattaatagatattgaatgaggaagagattgaagtgagtgcaagttacatatatgtatgtttctgtgctctgtttttctctaatgttttctctcttgaaagaaaaaaatcaaaactattttttatataaagaatgaaaattctttttttttttttaannnnnnnaatatatatatttatatatactattttgctttaaaaataataaataatatctattgacattttttttttgctagcttaataccaaaatacacttccctcaaaaaaaaaaaaaa

SEQ ID NO: 138158 - DNA, 763 bp, Cannabis sativa
  modified_base (352)..(352): a, c, t, g, unknown or other
  modified_base (707)..(708): a, c, t, g, unknown or other
aaaattaaaataaaaattttaaaataagtttgtaatagcatcgtcctcatcactagcatctctaggagcattcgacatctgtgggtagtatggcgtcatttgcgaacttgtcatcatctgagatgtctgctgcccatgtggtgtcggcatcattggagatgtctgctgcccttgtggtgtcggcatcatctaagatgtctgctggccttgttgtgtcggcatcatttgagaagtctgatgtcctagttgtgtcggcatcgtctgagatgtctactgccatggttgtctcggcatcttctgcgatgtgttctgatactgttgcccttgtgtcgacatcatctgaacattttgnggcatctgtgacatttgtggcatccgcatccgaggctgaggctgtgacacatgagacgtctgaggcgactgtgtcatcatattcatcaatacttacgaattgtgttggcgactgtgccaaaaactgcaagtatgactggtacatttgactgtgaaattgttcaggagttaacgatccagacgaaggaagaagaggttgttgtagcagttgctgaaacgaagtaggagtctgctgcggctgcagaaaacccattggctgaaaagatagaccaaatccatctccaagcatttgagagcgagactgttgtggacgcattggttgggttagagctgcatcattcatctcaacatccatnngttcccgacgttcacgtgacatttgttgagtcaacgtctgtatttgtttctgtaa

SEQ ID NO: 138159 - DNA, 821 bp, Cannabis sativa
gaaagacacttagtatataatacacactaagtataatattcgagcgaacccaagcaattaatagcgaggcgtccatctcgccataggaaggcacacttcttgtacctatactaatcagcttcagacatctttcaatgagattcataatcttgtcaagagctgacattcaaatgatgttggctgctgaagttcaccttgtcgctgagaattgtaattgtcagatggaatgttacgaattcaataacataaatgacgaggctcatattgtcaacctcacttagacataggaagatctctagctcaccattggagtcattgtttctatgttcctaacaagatgatcccaagatgatacgtgttacaacttatttaatacatgtttatattgacccagtaaaagcagaccaatcacagctgtatgtttttcagatattaaccacacttattttacgtggaatgtgatcaaatcccatgatttcaggagatacttgttgtaaaatatcagtcaatactgtaattaacggcctaactatgtaattataaatagaggcatgttatactgaaaaagggacgaaaaaattcataaaaaaaagccctagaactgtatcagaaatttaattagattgactcgtggactatgcagaattttaactacaaaaccacgtaaaaaaaacctttgtgttcttacttttttctttactatttctatattctgtgcaaatttatcataactcaggctcaaatatggttaacgaaaatctgcgttaacatttgtaatcttattcttctacctttctcatataatatatataatatatata

SEQ ID NO: 138160 - DNA, 1048 bp, Cannabis sativa
  modified_base (798)..(805): a, c, t, g, unknown or other
aatagagaaagaaactgttggtggaatgactctggatcttcactttgctcctcttgccgctcttcactgcgttttaggtctccaaatcgcttaccctaatttttaatcgcaattttctatttatttctcatttttaggtttcgatggatgaaaattcccccgatcgtacggaccctcaccgcggccactagtggtctcaccgtggcaactagagcttccaaaaatcgtgcctctgttttggactttatggccgcggatggctatctcgccgcggccagaagtgtatctagcctgaatttggcatttttcttggctccacttgtcttttattgcacttttgcatcccatggcctccattactccgagaaacctgaaaacatagaaaacaagcataattccgtcctaaaacatcgaaaagcaaacataaaagtgatctaaaatataggctagaaatagcctaacagggatcctgcagtgtaacgccctcatactaagacaccctacagtgatttttcaatcgaagtgctatctttgttaatcaaagaaattttcttaaaaattgtgtcaaatgaaaattttagaattaactatgaaacttaataaactttatatatatatttacaaaacctgggatcccgttgttaaacattttacataatattccaaaatacaatagtcaggtcgcatagcgactaaaaaatgaaaaccccagatgtctcgagaccgaacactccaagtaatgctgtcatgacatgtacaacatcatcctagcttgaagctcactcctgttcagccttnnnnnnnnctttacctacacatgaaagtagatgtaacgccctaatgctaagggatgctacagtgctttttcaattatagtgcaatctttgctaatcaaagaatttacttgaaaaacgtgtcaaattaaaactttcatattaagttttttaaaaccctaatcccgggaaactcaaaaccaaaaccctaggttctgctatgctcttaatgggttattctaactctggaaatggggaaacacccattcgaggca

SEQ ID NO: 138161 - DNA, 813 bp, Cannabis sativa
aacagttttatcccatgtggctcgcgataagatttttgcagctcatgatttggcaaagtatgcctttcggttagatgatgagctattcttgatttgaggaggtaccgccgtcgattataaattagggtcagcttggcacaactgtgctgtgggaaaaagcagctgtagttgtgctgtgagaaaaagcagctacagaagaattggaaaaaagctaagctgagtgtttggtaaattataaattttaaagtactgtgagttcaatgaattgttaagatttattataacgataatgttataatctagtttattataattgcaaatatataaaaacttattttatatactatttttagtttttatatatttttaagtttaaatttatatacatttgataaaaaataatttataatatttttatattatattttatcaaatgtaaataaaaaaaaaatctaaaactcaagtgtataaaaaaaaaaatctaagttgatatagtttctcaatattaaaataaaatgtaaaatatttttttaaaaaaaattaagaaatttaattattgtgtattttattataattaatttatttttaaatatttttttatactttaatatataatagataagtaaatatggttttagtacaaataaatttattatattattttaattaaaaagtttttcctaaaagttgagttgtaccagcttacgtagcttctccataaattcttcaaaaagttattttttcactgtttactaaacacatttttatcacaacttttttaaaaaatatcttttaacttttttaaaagttatg

SEQ ID NO: 138162 - DNA, 755 bp, Cannabis sativa
aacaacatctacatctcgatctcgctgaggagataagagataagtcggttaaaggaccaagctcgtgtagaaaaattccatgaagctgaaagagcaaaagcgacactcaagattcaagaagaagaaatccagagaagactcgatgctttaactttgtttctccatatggactaaagatcttatgattttgattttaaaactttttttagttttagctttagtttttgatagttttagttttttttttcttttgtttattagccttgaggactaatagtattttgtcatttagaccttttagaattttgactccttttttaggaggaataaataatatatatatatagatatttcttttttattttgtggctgcatccaattttgtttagattgcctacgtacccttttaagggatgaaaccgttcgtagttctttacaatttttttttaggagataaattttttttattttgtgtgtctgggcctagttataaactagattgcctacgtacccgaagtgggatcaagccttacgtagttcattgcacacttgtctcttttttttaagtgcactatctacaccatgggtaaatacctttttgtttaagtgtagaaatttttgatgaacttcccattaacacacagataaattcatcgaccttctgaatttgaaagttcatatgcccctcttaggaagaccttagtgacaacataaggtccttcccattttgcttcaaatttgcctttcatccttct

SEQ ID NO: 138163 - DNA, 1269 bp, Cannabis sativa
tattgatatttaaataataaataaataataaagattacaataataaagattacattgaaatagagttttatttagggtataaaacctaacaatatattggtgctaggttgtcgcacgagctcacctaattaggtgatataattatgtacagggcgtaggtacgagctcgtttgattaggcgatgcgatatatttgtaccaggttgtggcacgggctcacctgattaagtgatgtaattatatgatatatgggtgcatgtctttggtaggactcacttggttaggtgaagaaattaggcaatatatgggtgctacgctatggcacaggattgcatgattaggcaatgcagtgtaggatgatcagattaaagtatcgacttgccagattaggcaatgtgatgtaatgaagatggttactttatgaggtaatatatatataaattatatttttaaatgaatatgattcttagtatttgtataatagttctatattattaaatatctgtatactgatgcttattcatggcagatgtggatttcatcttatgaacaatggataattgtttcattttgattctgtgtaaatgataatatttaaataataaactatatgattattattatttcttttcttgctaagtcttgtgactcacgggtgttatgtagtgcatttaaggacaaggaaaagttagagctgccatgaggtgactgccttctccagctatgtacacattaacctcaccgacctacatgttaggttgtcaagagttgtgtttgggctgtatgttttgtgtattttagttttatgtttttgaggagtcatcgtatatagttctttttttaaaacttttataacacggatccccagaacacactttttatgccgttataatgttcatttttagtattttattttagtcaagttttttaaatttttaatagttaattaatctattagtattaaattgatttataaaatcacacacgtttggtgtccctatagattagggcattacaacttgttattagagcaaccattgtttaaaggtcttgaagactggtcgaatatgtacattttctgctaagacaggttgactcatgatatagtaagtgtttatgttatttgttattcccttacttgcttagacaattatagcgtataatgggaagaaatagcatactgaccatctatactaagattatttgtatggtatacacatattgatattgatatctgtttgagttttaagtgtttggaagatgtggatta

SEQ ID NO: 138164 - DNA, 1054 bp, Cannabis sativa
accgtaaatttgaaaaaaaaaatggttaaaaaagtagtatatggagtaattccccaagatatgcgattacctaaattatatatatggttagatttttttcttcaaaatatctaattcctaaattttctttctatgtattctattttttttacgtgaactacctttctattctattttaaatttaattaaaaataataagcttaacatacatccataataaagaatatattgggttacgtaaattatatatatagttagattttttttcttttttaaaatatctaattcctaaattttcgatgtattcaatttttttaacgtgaactatctttctattttattctaaatttaattaaaaaaataataaatatgaagcttaatatatatccataataaagaatatatgccattacataaattatatatatatggttagatttttttaaaaaaatatctaatttctaaattttctttctatgtattcttttttttttttttttgcgtgaactatctttctattctattttaaatttaattaaaaataataaatatgaagcttaacatacatccatatataggttacgtaaattatatgtatagttagatttttttttcttttttaacatatctaattcctaaattttctttctatgtattctattttttacgtgaactatctttctattctattttaaatttaattaaaaataataaatatgaagcttaacatacatccataataaagaatatatacggttacgtaaattatataggaaaatttgaattaatatgcttacattaccttataatttttcccctaaacttatacttaacataatttgttatatatgacactttttttattttccccataatactcccaattacatctacccacccaaaccctctcttctcatcaatttcacacccttccccacccgaattcctatcttccaccaccacaaaaaaaattttttttcttctcttcactcattaatacactagaagctacaaccttccacactacaagccaccacactagggatcccccaca

SEQ ID NO: 138165 - DNA, 961 bp, Cannabis sativa
aaactctcgtatctccaccattttaccttatttttttaaatatttatttttatacctaaacctatacacctaaaaagttttgttttttcccctatttcactataaatcgaacctatcggaaaaagtggtgggtataactccggccaccgattttagtagaaaaagcgttgaatctcaatgtctattgaagtataaatatgatttctatttattttaataatgtacattgctttattttgtttttgtaaattttttggatatttttccattttattaacattatgttgttgtgtatgtgcatgataactagatttttgtcgaaattggtcgccagattacacttataaggtaaaaatttaaatcttaatatatagtatatatgtatgtattttgtgttttattgaatatgtgtgtatatatatttattgtgtgtatatattgtatattgtgtgtatattttatattgtgtgtgtatatatttttatattgagtgttttaattagtttagaaatgatatttttaaaattttgttagcgtgagatataatttattatatatgtatatataaatttttaaaaaatttgtgtatataatttactaaatagtaactagctactttttttcattcatattcatatattttttactaagtagttactcataaataatatacctagtaagtagttaaataattaaaattttaattttattgtatttcattatattgttggttgtgagctaattttgaaggtgtcggataatttgaagttgatcgaattttaacttgctatacaggtttacacattctctaactttttgttattaattatttatcaatgtttaagctacatttgtttgcacttaatgatgtaactcatctgattcgttcagatttaaacctattggcccgtttggcacagcttttggaaaagataaaagctgctttttgaaaaagctgtga

SEQ ID NO: 138166 - DNA, 687 bp, Cannabis sativa
cacttgactttccagtcgtataaaacaactaatatgattggaagaggatcttatatttgagatttcaacgttccctttccacagtaacattaatcccccgcttagaccattccgtggcacttcatatccctcttcaaaaccgagacattttttcatataatccagttttccttctgctaatttagtctccataaagaagatgacatctgctttatgatacttcaacaacaattttgtttgtcgtaaagctatatcaccattgagtcctcttacattccaactaactatagacattacctacttatcattcaaacaaaaaactaatattaagatattttttaaaattagatggttattaaaattttgattgctcctatctaagattttttattagaaaataaatttgttgtaatttgttattagattttgaaataaaataaaaaatgataatcgaaaagacaaataaaataccaaaactaatacctttttagatgatactccaaaagtcgactcttcctttcttgagaaattcctattattctgcaaagtattttaaaaatgaagcaaaattagaaaaaggtcttcaatactccaaagtttaaaaactgttttattgtagaaacaaaacaatgtgcaaattgttttacacttttctatatatatatatgcttttgtaatttatcacat

SEQ ID NO: 138167 - DNA, 685 bp, Cannabis sativa
cggcccaaagtatttttgtaatttttttttcttttttgtatttttttgtttttttccctattaattaatgtttatatatgtaaagaattagttcaataattaataggttctcagttgtttggtacgtactagcaatattaatatattctaagctactgatttagtgttttgtaaaataaatttaaaagtgttttttttataagagaagaattatattaatcaaaaataccaattacaaacaccaatcacaaaattaaaaaagaaaaaccttacaaaataaattctccatccactctatatcatccttatctgttttctttgcattcaaatactttattctattgcaaacattaatattaatatttctaataacagtaaaaatcaaaagaagttaaaaattccaaaaaatattattgcgagccctccaaatatatattagacacaaactgtaatggtgtaagtataaacttttcttttggtcctgttgtatttgcttcttctaacactacaacagtttctgtagtaccctgcggacacatccgcgggtattaattgcccagatcgccggtaataattaataattggtcactataaatgactattagcggccaaaatagttttccgttggtaataatattaataccgacggattaatagcggtggggtccgccggtattaatgtctg

SEQ ID NO: 138168 - DNA, 1124 bp, Cannabis sativa
aagagaatccaccctaggctccttttgattgggagcagaggtttgctgagatgcatgcttgaatcactcaacaagaggaagagattcgaaggcttagacaacgggatactgttgagcctccctcgcaaccacatactgttgtggttcctgcagtgccaacagaacaacctgttgatggtaaccgtataaagcctttgtacgagaggttcaggaagcaagcacctccaatattcttgggaggtgctgatgttctaaaagcagagcagtgcttgactgtgatcgagaggatactaatttcatgggagtcaccagaaatgacagggtggcatgtgccacgtttcagttccaggaagaagccctggtgtggtgggagatggtgtccctcacaaaggatgtcaccagaatgaccagggaagaattccgggacttatttaatgctaaatattatagtgaggccgtccacagtgcagagcggaaagagtttgttgaactggtactagggatgcaaacggggcaaggaattggcggggagtgctccccccgtccccatccccgttaaggattttaatccctatccccgcttattccacatcgggggatgggatggggaatcccctaatgggggcggggatggggcgggaaatcccttaatagaaaaataaagtttataataaaaattttaatatacaaaaatattaaactacatagaatttaaaatattacacattaattattattaaataaactaattattatccaaaacacaacttaaaattcataaaaaagatactaatatattaaaaaattgcaaatataaattataaattataaaatattactagaaatataagataaaatactaaacgggtccccgtcggtgcggggactgtgatccccgtccccgctccgttccctatttaggcggggaatccccgtgggaaaaatgtgcatccctaactggtacagggtgagaatatgtcaatgactaagtatacgaccaagtttgatcgcttggccaagttagcctcagggattgtgccgacaggctttagtaaaaaggaaaagtacttggcggggttgaatgccaagatcaagcacaatctagttattactaccaaagacac

SEQ ID NO: 138169 - DNA, 521 bp, Cannabis sativa
  modified_base (479)..(489): a, c, t, g, unknown or other
aaaatagaaaaaatggattactcaatccttaagcctccacatcatcaccctaatcactccctaacaatagcattatataaatatatagattggaaaatgtaattgggactccataattatagtgtagttacatggtcaactttaaattgagtaattatcttgaattataccaaaatttaaatagagtggcttttcaaaaacacctttaatttttattaaaaatataaatatatattttattgtattaaaataatataatattaaagaatattacatcttataataactaattaatcataagtgtggtaaataaaagggaaattttcacaaatacattttttttgtatgtttaatcttaaacgttacaatctaaaaatttttatttacaaaaatacgtttgtaaagttttaaaattacaaaatacactttggtcagaaaaaagtaagaaaacaactaaaaaataacgagaaatcaatctnnnnnnnnnnntaaataaactataaaacaaccaaaaaaataat

SEQ ID NO: 138170 - DNA, 823 bp, Cannabis sativa
  modified_base (352)..(359): a, c, t, g, unknown or other
agcttagttaatcgagtttttagtgttagtcttagtcttactcgatggcgagtaagaatctagtttgggggaatttgttaggctacttttagcctacgttttgggtaactttttattgttgttttccgtctttgttattctttttggaatatattatgcttgttttctttggtttcacgtttcacacttggaatatatcaattgatcgaatttcagaaaacaataatctatagaatagagaaaattctgcaagaaaattaagctgaatcttcaagccttaatttgactaggttctgttcaaattttggaaaaagtcaaaacataaaagttttatatttctttttcttctttnnnnnnnntcttgaatcaactcatttggagtttgtatatgaaagttatatatattttactgaaagatgctgaagctgtcaaatttgcttcagtagtcgcgacgaccattttccatggtcacgacccttatttttgtattttgcctatagccgcgactgggctttatgtagtcgcaacaaggggcgaaacacgggattttttgccagtttttgactttcaccattcagaggtagcaaccctaatttctatctaggggctcgtgttttagaacgaagggagggagaaattggaccaaaaagtgaaaaaaggaggtagaggaagcaattgtggcgatccagaatgcaatcgcgaactagttctttctcaaactcttaatttctatgttaatttctattttagttttgattatggatgttattatggattttatgaactaaactcctatttagggagatgataaatgttgattgaa

SEQ ID NO: 138171 - DNA, 643 bp, Cannabis sativa
ttttaagactatctaattgctcttacgttccatatattttgagctattctatctctaaaattaaacatatattgcttgtcatcatttgttggcccatcaccaagttcttcatctggtctgaatcaaaatcaatattgttcaaactgacacaatattgatttgagaaaataggttgatgaatggttggtatattttctttttgattgagagagatggaatatatagagaataggttgatgaaaggttgtatatgagaatatgtgtgtttgatgatcgataggattttcttttttatttgacagatatggaatatatagaaaataggttgatgaaaggttgtatatgggaatgtatacgtgtttgattgatagaaaaagggaaagtcaatacattaaaaataattaaatatcatatcaattaattaaaataatttgaatttatttttttgtatgtaattacacagtgtaattacacccaaatacccaattctcatagggggcatgagaattggagagagtaattgaggtcttccaattacttctaattacacatttactatgtaattacgtggccacacaaacacgccaaactgtgtaattacctccaattacatccaattccaattcctaggtggctttccaaa

SEQ ID NO: 138172 - DNA, 639 bp, Cannabis sativa
  modified_base (604)..(609): a, c, t, g, unknown or other
ttgaagtttttaaaacacaagtcatgtttggttagtattttttaaaaataatattgaccaaaagtgaattgatttttaaaacagaaaataacattttcttgttttcaaattcttattttttgtaactttattttctgaaaactgttttaaaaaaataaggtcaaacaagtcaaattgttttcaaaaaccaactttctgtttttaaaaacaaaaaacagttttttagctatgatgccaaacatgcacttattctctcttcctcaatccttctatcattgaaaggatcaatttttgtgagtttgggtggattcactctccctccacttcttctcctcccttctccaattcttcttaccaaacaaagtaatcgtcttctccctctacacctctctataaatcctccctacgaaacatcttcttatagaaaattattacatatatataaatccttccataacaataaaatatatattataatattacataataaataatttagtaactttaccattaaattttaaatacatatttatttatttcctcctaacaccaaacaatattaaaaaaaataagaataattacataaggcactattttttgtaannnnnntacatttttacgtttaaagaatgttttttt

SEQ ID NO: 138173 - DNA, 960 bp, Cannabis sativa
  modified_base (567)..(574): a, c, t, g, unknown or other
aaaataaatgtgtatttcaacaaaaatccactccataagcttcattatcaaaccattctccactaatataattacacacaatccaaagatcaataggattttatagccttataatgtaaggctagggtgaagggtagatatagaaggttaatttaggctcaaatcacaccatagcatacatatacaacattctctcaaataattcctatttgtattccccaatcacttccctcaacaattcaatcttatatctcttttttttcataaaacttattattctcccacacttaaattgttgcaagtattcaatttttccattgattttttttttttgaaatatttacaattggcaaacattcattctaagggaataatgattttttttctcatcatcacacatacataactgcgaatattttcatcaaaaaaactctcacatctttacataaaacatcaatatactatggtgtgaaaaaggatgaataatgattttctttttaggctcaaaagttattgcaaaggattaaaaaaaacaagatgtcaacatttaggctcaaatcgggtaannnnnnnnatttaacaaatagggtaggcttgaaaagctcaatcgatccgaaaaaaatttcctgtatcatatctcaaaatcacgtgtaatttatcaatttcgcctcaaataattatcaaacaagttctagagtagttgagacttcaaattaaaaatcaaacatgcattcatctttccaaaaattagcaaatatgataattcaattgatatgtaaaaaattttaaaaaaaaaatcaagcttaagcaataattaatcatgagttaagcacacaaatcatgagaatctattgttttcctagaattataactagaatttcatcatcaataaaattattttccctaagaccatgcataagacattaaagtaaaaatacatatcaaacacgagcaatcatt

SEQ ID NO: 138174 - DNA, 611 bp, Cannabis sativa
ttttgtaattttaatttattgtaaaaactaattagctatcatagtataataatgaagttaactaaattctaaaataaatattgactaagattaagaaaaaaagctaactaattagtatatgattagtattatgagtaatcaaatggtttctttgattttcgaaataacgaaaaaatatatgtttccctcatcttacaatgttcacattgaagcgtagatcacaataatatttttttaacgctcaattgagtaacaacgtgatcatcaattctttttaaaatttaaagataagagagagaaagagggaaagagaaaaagataaagagaggggaagatggtaaatataaactgaatctatttatgcttaattccacatgttatacaaataaataaataaacaaaaggaaaaaagaaaaaataaagaaagaaagaaagaaaaaggcatcaccttagtatatcatgcattcatgttttggtaatacaattaaaataacaacggtataaaacacacggtaaaattatcaattaaatgctgtacaatattattgataataagatataaaaaacgactgcacatgtaaatttcccatttaattataaggttagatatt

SEQ ID NO: 138175 - DNA, 830 bp, Cannabis sativa
  modified_base (292)..(295): a, c, t, g, unknown or other
acgtaaaaatctctctcttaatttcttacagctctccaaattattattattttattggttgccgaaaacctcggtcaacattatgtatttatgttaataaaaatttaaataatttgttataggtgtctatcaattaaataatttgtttaaactttaactttatttttaatatatattaggttattgttgtattgtacgtatttttagttttagtttttatttttattatgtgtatttttaaattttataaattaaaaggaaccatttattaattttttaatttttttaaaannnnaatatttaaaattttaaaaatttgaaaaaaaaataaatataaatttaaaaatattaaaattaaacttactcctaatattaaaaataacaataaaaaaattaataatattacaaataatatattagtatttatatatttaaattaatataaaattagtataagttcaatttataaactaaaatatataatattaatatttatgtatatttttttttttgagaaaaacatttatgtatatttaaattaatataaattaaataatattaatatttataaaattaattttactaatactattaaatatggatatttttttatatttttaaaatattttattaaaataacaaaaaaaattattaaatagctacattttacatgtaagagcagctccaaggagactgcaaataagtagcatagtgtgtatatatatatgtttcaaggaggctacatatcatgcaacattttgatgttttatgtacagtgcacggcatagtcacgatattttttttttatataatttagttaatatttatat

SEQ ID NO: 138176 - DNA, 1040 bp, Cannabis sativa
  modified_base (418)..(418): a, c, t, g, unknown or other
cacaatgttcactcaatctagttcccactctcttgctatatgtatgtactatatatatgtattattttttttcaaatcaactagataaagagagagagagagagagagagagagagagaaataacaacgtttttctttgattaggggtggtacactccaaacttagccttaaacttgcccccttttttttttctctcttattttatttaaggaaatttacggcaaaagtccccaaaaagttcagtttgatacagataagtccccaacctccaaaaatagcggcaataatactcaaggtcatgttttttatttgtctgttggtctccaagttaacagatccgttaaactcaattcaaatgccacgtgtcgaaatattattggtccaaattattattttaatttaaaaaaataaaaatanaaataaataaataaataatttctttttttctttttctttttcttttgtttttttttctttttctttcttttcttcttcgttttcttcgttttcttctcatgccagaaacccaaccccaaaccagcacccgtaccaccaacccccttcgaccaccgtccacagtcccctgccattcaacctaccccctcgactagttcccaatcgacccagagcccttcttcttcttcgtcttcttggtctttttttcttcttcttcacacgaaaccccacccaccatcactgtcatgcacatctgagagggagaaaaggagaaacagggagaggcaagggctcgagggtggaaggttagagtttggatttcaatttttctgggttcatttcgagcttggaagaccgagaaccgccagcgtcgagcttgggcgtggctgttcgacgagaagagggaaagacgagagagatagagaaagatggagggtgagcttgattttctgggttcattagatgatgaatgaacgttggtaaaagttagggttattttaattttaggtttttattttattttaaaaaaattattttgggttggtttttggtggtcgattgacaacatcggggctggagtggg

SEQ ID NO: 138177 - DNA, 1053 bp, Cannabis sativa
  modified_base (320)..(322): a, c, t, g, unknown or other
atatttagggtgttattcaacatactttggagtagatctaagatcctggtaaaataatttccaacaacatgcccagtgatgtttcacccattggtcttttaaatcgaagtcatcgcttgaattttagtgcaacttctgccatccttcgcaggagccgaagtctgccacacaaaattcaacatgactctcgcgtgcacgaagtttttttgtgcgtgaaagatcactaggggttcagtatgtcttcaaccctccttttcggaagagaaggattgcttgaagtctgtcacacatccactgatgtttcaccctttggtcttttnnngcaaagtcattgcttgaattttagtgcaacttcagccttccctcgcagaagccgatgtctgccacataaaattcaacatgactctcacgtgcacaaagttttttcatgcgtgatagatcactggggttcgatacgtcttcaaccctccttctcgaaagagaaagatttcttgaagtctatcacacgcccagtgatgtttcaccctatggtattttaaagcgaattcatcgtttgaattttagtgcaacttcagccttccttcacaaaagcagaagtctgtcacataaaattcaacatgactctcgcactcacaaagttttttcgtgcgtagaagacgactggggcttcaatacatctttaacccttcttccttgaagagaaagattgcttgaattctgtcacacgtccagtgatgtttcaccctttggtattttaaagagaagtcatcgcttgaattttagtgtaattttagcctcccctcgtggaagccaaagtctgccacataaaattcaacatgactcttgcgagcacgaagtttttttgtgcgtgaaagatcactagggtttcaatacgtcttcaaccctccttcctagaagataaagattgcttgaattttgccacacactcagtgatatgtatcaaatctataacttctataagtatttagaagtgaaacggtgatttacatcgagcttggcttaatagagagaaatgattgagatctcatttca

SEQ ID NO: 138178 - DNA, 547 bp, Cannabis sativa
taaaataaaattacaaaaatatatcataataaattttttatttttaatctttacatttttttatttacataactaatttttcagtaaaaaaaatatatttttttatattttatagttattgtaaaattgttatttttataattaatttatagttctattatttttactttttttaattttttacgaataaaatttatttctgtaattttaaaatttcacaagaataattttataaataaaaacttcagagtataaaattataaataaaatataacaaaaaatattttgaaaatttctttataatttatagttgctattcttttgtaaaggtaagaaatactattgttttaagctaattaatttgagcttttttagaaaaaaaaaaaaagaattggcttgtacagaatatcagaatattactggttcatttatcttttagcctgtaccatattatttaattatcaatgatattggtgattgcttgaaaaaaaaaaatgttttagcaaaaaaattattctatgttataaatattaataattatgtggat

SEQ ID NO: 138179 - DNA, 730 bp, Cannabis sativa
aactgtgtagtcccatacctacacagtctcaaaatcatcacacttaaccttccctaagcgatgtggcattgcacagcttatcccgtattttcccttatcacggggctactgactgacacaatcaccccctttacaaggtccaacgtcctcgtcaaccacacttctagatgggtcgaggctataatactatttgtaacgtcaccgatttaagcctccattgggcccttacacccacataatgatagatcttatacacgagtatttcactttgtttgcttcctagaatgaagactgaccctacaaatcaacatgagtatttctagcgtgttttatcttcactcggacgcttcttgggaaaaacttcctaggaggtcacccatcttaaaattaccactggtcaagcacacttaattgtggagttcttttgtgatgggctaccaaaaaataagatacaccttgttgatataagtattactaatcaatccatttaagccctcttcaactgtgtagttccatacttatacagtctcataatcatcacacttaaccttccccaagcgatgtgcgatttcacaacttacttggtatttccccttacggatcacgagactactgactgtgataatcacccccttacggggtcaaacgtcctcgttgaccatacttctagttgggtcaaggctctgatacaatttgtaatgtccatgcttcaagcctttattaggccctt

SEQ ID NO: 138180 - DNA, 1628 bp, Cannabis sativa
gtaccccgattggaagacttttgcggctgttctttgtccaccaaagtgtccaccatagggagatgatgacaatgctctaggatgcttgcgacttcctcttccggcacacaacgccgcattattggatctgcacactgcatgtacaagtaaggctcatcccaatagtagaatctcacatcatgaaagaattttttttagttgctacatattcagatcgggaggctgtaacccactcactaagtaatttacaaaatcagcataccaaggagtgtttgcttgggctacaacaagcagctctcatccggaaaagtttcttgaatttgcatttcatcttccttttcaccacctgtttccaatcgagataagtggacagacacttggttctccgtcccttttctatcttggatttctaaatcaaactcttgaagaagtaacacccaacaaatgagtcttggcttcgcatctttcttggcaattaaatacttgatggttgaatggtcgatgtagataatcaccttcgttcccacaagataagatcagaacttgtcaaaagcaaatactatagccagcaactccttttcggtggttgactagtgaatttgagcattgatgagagtcttgcttgcatagtaaatagaatggaaaatctttcctctttgctgtccaagtactacacaaatagtaaaatcactagcatcacacatcaactcaaatggcaaagtccaatccagagctacaataactggggttgtcaccaataccttttccaaagtcacaaaagcctcatgacactccttagtgaactcaaatggtcgattttgttccaacaacaaacaaagaggctttgaaatcttcgaaaaatccttgatgaaccttctaataaaccccgcatgtccaagaaagcttctaatacccttgaccatggtaggaggcggcagcttttcaatgacttccaacttagccttttccacctcaatacccttgtgagaaaccttgtttcccaaaacgatgccttcttttaccataaaatggcatttctcccaattgagtaccaaatttgtttcttcacacctcttcaacactttctctaagttagctaaacaagtgccaaaagattccccaaatactgaaaaattatccatgaagatctcaagattgcttttcgccgtatctgaaaaaattgccatcatgcacctttggaaagtggcgggagcattacatagcgcaaatggcatcctcctaaaggcaaaggtgccatatggacaagtgaaggttcttttctcttggtcctctggagctatagaaatttgattgtagaccgaataaccatcaagaaagcaatagaactctttacccgccaaacgatccaacatttggtcaataaatggcagcgggaaatgatccttcctagtggcattattcaacttccgacagtccatgcacaccctccaaccagtcacggttctagtaggaattaattcattgttcttactagccaccaccgcgattcttcctttcttaggcacacattgaacagggctaacccatgaactatctgaaatcgggtacacaataccataatctggctactttatcacctcttttcgaacaacttccttcatgacagg

SEQ ID NO: 138181 - DNA, 777 bp, Cannabis sativa
  modified_base (747)..(751): a, c, t, g, unknown or other
ctatcggatagccaaatgcttggctcaggaggcaacacgtttgatggcgaccaggaagacagcttcattccgacttcgatctgagaagaggaggttgctactgccggagacacagaattgaatccgctgtcctctgcagacatcgagaggatgatgcaagagctctccgaaccaggaaccatcgagattcgagacagcgagtctacggtgtcggtacgcgatcatcttattcattccaggcacgctcctgacttcgaagtcgaggagatgggtgaagattgggaagttcctgatcgcgagtctgatgaagatggagatgttgaagggagcgagtccgactcggttgacaacacgcaattgaatgagccattctcctgcaaagacttaatctcacgggttaccaaatctgacctgaccaccttttcgaggttaattctactgcgtcttagcaccatgcgtcctcgtcctactcaaaggccacacctcccttttaccaatcctgcgatcataccctcagaagatgtcgtagtgtctatccttattctctgatgcggggtatcaatccccttccatccattcatctccgctattctcaaacagtacaatgtgtcccctttccaactaactcttaacagctatcggatagccttaggcttttatgcgatgtatgtggagtacgtacacatggcaccatcgacagaagagttcagctacttctacgacataaagtgttgggttttatgcccnnnnnaaaactctatttcaatgtaatccaga

SEQ ID NO: 138182 - DNA, 1577 bp, Cannabis sativa
  modified_base (38)..(55): a, c, t, g, unknown or other
aaaataaatattgggtttatgccacttacaaacttaannnnnnnnnnnnnnnnnncgctatttaccctaaaaaaaataattagtatttttgatatacatcgtctcttaaaaaattcctctaaaataagatttgggggtattcacggattaatttggtctgattttttataatttttgaatcaaatcagtataacagttttttcaatattagaaaccaaattagactaataaatttctcaaactaaactattaagaacggtttggtttggttcgaaaccacagtttaagtggaatttataattattcatattttttaaagtaattgtactatttttattaagtttttaattttattttatatttaacatgataagtaatagatctataacaatataaaaatattctcaaaagttaaacataacaaaaaaatctaaaattcatacaataaataaaaatttaacacacaaaaaaattcaaaactatacatataatcatatataaaatatatataaatcaattatttattataaacgatccagtccggtttaaccgttaactatttattacgagccgcaactgaaccattacaccgtaaacggtctggattaaccaaaccaccaaaaatggttccccgattacagtctatagtgattcaaattgtcgcggactggatttaaaccgcggtttttcgatttatatgagcaatcctaataagatctcttcctcaattttttttatggttaaaaattagtatttttgttcatgaataaaaaattaattttaaaaatataatattctattaattttaaaaataataaaaaaattatcaaaaaaattaataaaaatattaaatttactttaaaaattaaaattattcttaaaaaaatattttcaaactttatcaatatatatctataaaagagaagtatgaggtgatggcataacattttaaaatcacttcaaaattatttttctcttctctccttaattctctcaattttaatattttactattattttaataatttttctatataaaaagcataatttttttaataatttttctatgtaatattttaaaaaagttagaaaataaaaaataaatttaaaaaaaaaatattaaaacttaaatcaaatataattaatagtaaattttgtttatatacatacataaaatatcaataaatatatatacaaatctatatctatatttttcttttagcatttctcataactaaaatatcacattctttatatttttttgattaagatatttaaaaaataataatcaattttttaaaacatattaattaataacagaacaaactaataaattttctctaatgatttacaaatattaaaaaaatatttaaaaattgagatgaaatctaaaattaagatatagatttgggaaatacaatagtgacgactacaagtgaactacgataatgataagggatgtgagaaagtgatgacaacgggtgaaatactgtgataaaaataagtgagatacaataagacaacaagtgagatataatagtaataatagttttaaatgatcgagatatgaaaataat

SEQ ID NO: 138183 - DNA, 549 bp, Cannabis sativa
tttttttttttctttttttagacacatcattgtagtttttttttttttttttaataacaatctttttttttttcaaaatagtagtaaattagactgattaaatatatattttttacattctcttttatcttctaatctaattagtaattttagaaagaaattattgtacttatcaatatgaattataaattatttatgaaattatcttagaccattttattgttttaaataccgctacatgcctgccgaaattaaaacttaaccatatatatttttttttttttacattttattcactttcctagttaatatacaatcacctttattttaattttattttttatgtgaataaaggacatagattgtaattattgtcactttctttatttcttatttctttttgtttatttcaaaagtttttgagccacacaatttattagttagacacaaaaattacattgttataatctattttttagggtgatcattttgacatgttagacgcatatatttttctgctaccaaaaaaaaattactgaaattaaaagt

SEQ ID NO: 138184 - DNA, 565 bp, Cannabis sativa
agccagaggcgcctgagttatcaaatcttgtagagacatcactttttgacacattgttgtcgcctcccgagcctattttcaacagattcatctcttttcgagcctcctctttttggacgaacacctgagcccttttgttaaactcagtgatgttctttattagacgaccctttaagtcatcccacagttcaccccctacggttgagggatcagtagaaacccccgcctgaagggctgtaagttgtgtactatcatccagatttctaacccttgcagcagccatactaaaatgacttaataagtatgccttatgtgtttttacgggttgttgctttatattggttagtgcggctgcctcaggtcgtctatcccttgcaggctggaactatttcttgaaatccctggacagatgttcccaggaagttatggaatagtgagtaaacttgttgaaatagctgcttgctgctcaaaactagcgaggtgggaaacaaaatacaacttgaattgtttgtcacattactagcttgcattatagtgttgaagttgttcaaatgcgagaccggat

SEQ ID NO: 138185 - DNA, 1015 bp, Cannabis sativa
aaatatatataataatattaatgataagaagagactgtttgaagaacagctgcgagtattcaacctataatggcgagtactcgagttgggaatatgaatgcttaaaaaaaactggaaaaaatagtaagacaaaggattatagtggctcagtcagatcacggtctgcttagtccactgtagcaagagttttcgtaggtctcatttcacggtggatcactcctttatatacaaagcaagtgtccaattagttataaaaatattacatttattgtcaatccgttcacacattgaattacaataactaaactaattaacgtaaacatcaataaatgaatagcagtttctactcactaaatgcagcaacgtatgcatcttctaacgtgcgagttgactgttcatattctaatgttaagctcgcgggtccaacacttaactaagtttagaatgtttgcgttcttatatagtcccctctttggacatcgtatgacgagctgatagaacctagacatgcgagtttatattggtttatcaaggctgttgggtcatcaggaccgactcgcattatagagaatcgatctctatgcttacgcaggaatatagagaggatactcgcacatatcctgatatatgcgagttagatccattctcatgtcctgcataatacgagttatagttatgcgatcagactttggtcatactcgtaatatctctctgactctatcttgggcgaggtttcaacttcgaggagtctcttacggacatctcagctttcattgaaaatctgagtacacgtgtcctctaaataagagtgtggtctcgcgtttctaggtgagagaaatctcactataacatgtcatataggctatgatagacttcacaggttaaccaaagatggtccattgaaaaatgtgatcatgggtgaattaccagtttgtgaatcttgcatagaagaaaaaatgaccaaacgttctttctctgtaaaggaagagcgtgccaaaaaacctcttgggttagt

SEQ ID NO: 138186 - DNA, 755 bp, Cannabis sativa
atctaaaaataatactaaaaacaacttaacaaagatccatgtagtcagagaagtcaaattcacaacttcgtatttctcatttttgacatgggaaaaatactcggaaatgaagagtttcgagtctctcattttcgtagcacatcaacatctctgagaattggttaccaatttcgctagaacgtagaaaccaattaagtaatgtcaaaatatcacttaggcatcataaagtacatcatctcgacgtttttttcacttaccagcgtccaggtttgacgtcatatgtcaacctgggcgctgggtcatgaactgcctttaatataacaaccataactaactcaatattaatctgattgacgtgattcaacttgcattttgaagatatttcaatgctctatcaaatcatgtctcacacttcaatcacaattttgaagttatcggcctcaaatgtaaccccaagggagttacaaaaataagcttcggcttacctgaagtgggtctcgttgtcgcgactcgggctccaaaaattgacgatcaaccttagaagttattttttattgtcagatgatcatctacggtaaaaaatagccaatttgtatttttttcatcattctattcctgttttcaagggcctccttcacctataaaagctctctaaattcatttttcatatttagaaaactaccacaagatgagagcttctctctttagaaattggaactttgacacttagcctgtttctgtaataccatctcgtg

SEQ ID NO: 138187 - DNA, 1605 bp, Cannabis sativa
tacattattttctaaaaaataataacaacaaaacctacacttaattataccatataattattgattcatcacctctcatacatttataataaaaataacatccattcacatacatatcacatatatataaatgcataaacctacacaacatttaaagtatacacattcatagaactactcttgataccaattgttagttttatggtactaaatcaggtacgcaacggaagagttttgtattatctgattatcattgtaccatagtccctaggatctccatatgtgtgtacattaaatcaaaactttaaaacaataagttaatagtatacctcttgaagcctatcagggtatttctgaaacttctcataagttgtatccttaatcaagatgatgaaaaatttacaatttagactcacaccagtgtcttccaaatccatccacaaaacaaaaggaatggtgtaggctattaggataaagtgtataatattattcttgttaagttctcaacacatgaccaagaacaactgagagaaaaaaaaaattatgttctctatatttcaaaaatattagagtaaaaattatgtcaaagtcttaatctagtttctcaaatcagacttctatgtatagtagttaaatccctttcattaaatcattaattgtttaaataaatatatagttattacttacttttttcattaagatttatgagagaatctctcaaccatttaagagaatatttcaacaatccttaaatatctataattgctttttaaattagatatttacctaattgaacaagaacaacagtaagcgcctagccttgtctatttaggacaaggatggtatcttttatcttgataaatttttctatgacaaatttggtcttaataatttttatcttttttcctatttaattaatttgaaaaaaaaaatatttattttttacaaaaaataattaattgctattttgtcaattcaaaataaatttttccaaaaaactttacaactctttattcctacccttgacagtgtgtcaaggtagcaattcgagaactatagacctataattctaagcttcaataaactagattatttattgaatctcatcaaccaaataatcccttgtttattaattctataattactccactacaattatagaattggattcttagtaattatagaattatatttactgagtttaactgcagtgtgttaaaatattttttcatatggtaacaaatcaaatattttatttgatttgatttataaaatataattaattatttaccgattaattaaatgtccattgatataatcaattcccgtaattagcactccatatgttggttcgtaatttgttttggtcaaaatactattttacccttctaattacttatttacctttagttccattaatttactagtggaagtataattcaagatcccattgaatttacgcgcaactttccagtaccagaattaacacataaaggaaaccaccatttgatctattaggaaagtcaaaattgtataattgtacattatgttcctagtcatccatattattagattcccaaaacagaagttttaagaatcatcttc

SEQ ID NO: 138188 - DNA, 541 bp, Cannabis sativa
catttgcaaaaacgcggtttttcactctcttttgacgatattagatttattcttagtaggagcctttccctatttgggtatgggctcaacaaaatcatcataagaaaaactatcatctaacttccttctccctttccctttaccttttttggagatagatttcaaccctatttctgaagctttagggcttgtaattgaaacttttctacagagggagatggagaagatgaagaacgaattatatatagaaaattgtagaaaaaaaaaagagaaaaaaacatgggctgattcttcaatagcagttgaagatcatgagatttcagtttttttggagatattttttctttaaaccatgtagggaagtttaaatgtgtagctgaaaatgaaaaataaaaaagaagaaattgaaaatataggtcggttgaatatgatggaagaacaatgacattatcattaagggctcgtttggaacatcgtattaggtcgtattatattgtaatgtattatattgaattgtattttatgcaatatttttatgtaa

SEQ ID NO: 138189 - DNA, 677 bp, Cannabis sativa
tcaaataccataaaaaaacttaaatgtgaaaaaatgccataaaagagtggcaaacctataaatgccatatttttgtaattcttttttacaaaatcccatatttcatgtaattttcacaatttacatgcgcaagttcaaaatttgatattagagaattttaacttaagcactatttttttataaaagaattatatttttacgtttaaagaattattttttgcatttttacgattttttatagaaacaacacgaaaataacaaaaaaactacatgaaaataatatcaaaataacaacaaaaaaatcaacaacaatttaacaagagtacaacataaaaagatcgtattttctgtaaaaaaaaaaatcaaaaaattgtaaaaatatttaaaatttcgtgaaatcgtatgttgtaacttctttttgttgttttgtgtatttgtgaaataatccattttaacttttatgttttttataccatgattcactttttttttacttgagggaattttcatttttatgggttttaaggtatgagtttgaaaaaatattgttttttttcaaaaaaattattttacggagtttttttagaaaaaaaattaaaaaaattatagaaaaaaaaagtgaaaattacatgaaatatgggatttcataacaaagttagaaaaatatggcattttta

SEQ ID NO: 138190 - DNA, 556 bp, Cannabis sativa
  modified_base (529)..(531): a, c, t, g, unknown or other
aattttttttttcctttgaatttattatttgttattttatttattttaatgtattgttagagacataaaatgactacaattagtttattttgttgctagttatgtgaaaacaaaaatatttttttttcataaaataatttaatattaaaaagtaaccaatccaaagtaatcgatccaatctgtacttttgcggattagattggatttgagctattgtgcggaatggattggattcaaaaactgaaattctcacttagtgcggatcggatgctttatgagcaaaatagtgtggattggattggataaacacccttcaaaccaatatatctttatatattaaaagtgactatctaaccgtatttgttggtttaacggtattattttaacggagaaatagaagtacaagctaatttaacgattttcaatttactaaattaacgtctgttaagtttttttcaagtaaaaacttttgattctcatttgaaaaattgaaaaagtaaaaacaattttatagaacatgtttttgaannntattttcactttttcaattttaaaa

SEQ ID NO: 138191 - DNA, 579 bp, Cannabis sativa
gaccaaaaagaataagatatatcatttggtttattgttggtattgtcggtctctacagctacagttgagagatcattttctgctatgaatattgttaagaatagcctgcgcaacctaatgggagatcaatggatgaatgataatttaattgtgtacattgagaaacaaaatatgtgatacagtggataatgaactattatgctacgctttcaaagtatgaaggacaattgtaattgactttatttatgataatgtatttttttcttgccccctctccattttgtggctggctccgccactgtagaagatgattagttttttttttaattctttttttcttttgtttttttgatttgtttgagtgttgttttacggttattttgtcataatttatttatttgatgtcgattttactgttcttgctctatgtcgccggaattaatggttattttccagttgttctcgttttatagtggtggatctgtccgtaggtgtggaagatgtaggctataaatatatttcttcttctttctctatggttatttttgtggttttttttactttgattctcctataaat

SEQ ID NO: 138192 - DNA, 1209 bp, Cannabis sativa
  modified_base (642)..(642): a, c, t, g, unknown or other
agtaagatggaagggaatgataaggggtagctgcaatgtgtattctaagcatggcatcatatatcacataaatactttagatgctcacatactgcctaaaatagaaagtggcaaataagtaatcacataaacagttaagcgtttactctcaacacttattgcaccatgagctgagcttgtatctcacgatgattgtacatgttcagccggtctacaagaagtttacaaaccttggcactctgataccaaattgtaccgccctaacaattaggcacgtcacgacacctaattataaaatcctaatcccctaaaccgagattactggaaagataagcgcgtgaaattaaacttttatctaaaacagaatgaaaataaaacttactataactttaaactttacaatcaaaagtgacatattttgggatcccaacaaaaatattttacaaactattacaagtcattttcattagccgacctaagcggcaaaatcagagttacaaaagtacattgctggtagacccaacccgcttggtctagtgtggcctgaacatgtacaagcaccgccaagctctcacactcatggttaatcaaagacagatttaccctttcctacacagtagagcacctgtgagccaagcccancaagacagtataaatatcaataatcataaatatcatatcacatatacaacaatgatatttcactgccattttaaagttgtctatttagcatagacctacgtgttacgctcacatgcctatttatgtctatgtggcatagacctacgtgttacgctcacatgtctatttataataaggccttagaacagttcatctcggttctagttaccgagtgcaacccgattatgccttaaatgcataatccttaatcttaacacatacataacatggcataacatttacacattgataatcactagggtaataaccctaggccattaaactgctcatgttagggtaataaccctaatcccagtttctaattactcataaatttcatattcaatataagcgccaccgtgcataactttacgtgctaactactgtcttacctgatatcccgcaaacatggagattccaaatccctgggtgctcctgaacaagtgtcggtaatcctagtcacaattctcacaattcacaaacagggttaatcccaaaattcaatttcaataatcacataattagcat

SEQ ID NO: 138193 - DNA, 827 bp, Cannabis sativa
atggacaagccaacctggcacttatcagctaaatttggacggaaagagtaaattgctaacagaatacgagttttgggggtttacccgcacaaatttgagtttcgatatatgtgcatttgtataatattattttttttgttttttcttagttatttttttttattttttttcaccataattctttgtttgtttctaatattaattgttaaaaaaaaattgaaattatgcttatctattataaaaatctttaatcaatttttattttaatgtaacaccttctttaattttaaattttatatattttagaaaatttataatacttaaattataatatttaattttttttattcaagtcgtgggttagagtaaataactcattgagaaaataaaaaaaaaaactaataaataaattaagatattatcattacaattggattattgaaataaaaataatttaaaattaattatataaattaaagagcaaaatacaattaatgaggacaaaagatgacctaattagcaaacgataaaaaaaataaacacactaaaaaatgttgaataatataggaaaattctaaggtgcacatccgtgaaaggagtacaccgatacatatctgtttagacattcaagagaattttttgatcaattttaatttcttttatgattgtgtacgttttagttatttaaaacataaaatacaaaattttgggaaatttaaaagaatttaacacgttaaaacaaaccaaataatctgttgcacgcatgattcttttattttgtacgcatgtataaaattaactatttgaatattgtaatctatattata

SEQ ID NO: 138194 - DNA, 762 bp, Cannabis sativa
  modified_base (718)..(737): a, c, t, g, unknown or other
cacaagatttttgtacgtggtttcaacaatccttccagattgttactagcccatgaaggcatgtccagagataagattcattagatagatctcaaaaatacaaagtaattgacttatgcataaatagactccctcttattgtatgccgcaagcttgaggtgttcgaccttctaatcgaatcttgttaaaacttcaagtgctcgaactcccttcgatctccttgaagagtacttgcttcctcccgaggtaagacttgaaaagaaatctttcgaaagcttgtagaaccttctcctaaaggtagcactattgttcttcttctttagcagacttgaatacagactcaagacaatacaaaatacatataaacagagtaagagatgaacactctcttctctacaaacaaagacacacttttctcaagaaatgaatacaattcaaagtctaagaatgaagaatgagatacatgagctagtttctatattctataaggtgtatttataatcaatatacaccatattaaaagctcacacacagtctgaatacaaccacaactcactaaataatttcctaaaatagatcttcaatcagcccaacaatttctgttttcatacccacagaatcgtgagcagtaagtgcgactttcctttatagaaaaggaaagtcttgcttcagttttcttcacacgcaaaatgatcaaattgttgggttttatgccctnnnnnnnnnnnnnnnnnnnntaatcatatttacttattaatatag

SEQ ID NO: 138195 - DNA, 669 bp, Cannabis sativa
tacttgttggcattctaactatagctattttatacacgtggcaaaaatgacatcttcaaatattctaattatttaattctaattatttaagatgggtaatttaaatgtttctatgaattggaaaacaccatgtaattaacttttctctacacagggtgccctgcttgggtctgtagcagttgtgcttttaacggtttttttagaattttaactaccaattcaaactttttttcctgtgtttcctggcagtttttttcatcagcaccgccctttaccctccttcttcctctctctacaccggccaccatagccatgtcctccgacattgaccctctcttacgctccatggattcaactctgaaattaacagatgaagaacgctcagttttcctcctacatgatgatgtgattccgtcctccactgccatccctacccctacactccttgctagagttattacccaaaactatgtccataaaccaacttttatcaaccaaatgtccgaccattggaggggccgttttccagtcacaatcactgagtatagagatgactatttcaagattattttcggctgtgatggtgatcaattcagggtcttgaacaaagaaccatggcacttccaaaatcaccttgtggttttctgcacaccagatgctctgcaaaat

SEQ ID NO: 138196 - DNA, 1110 bp, Cannabis sativa
  modified_base (329)..(350): a, c, t, g, unknown or other
gagtcggagggtttaagccacactgaggtgccgtttatacgtgcaattgattggcttgcatactatctcaacgacatgtcgtttaactgctcaacaaattgttttttaatgggtaaatatcattatagaccctatgttttgcaaaatttataaattggaccctctgttttgttaaatgataaaatgaaccctatattttttaaaattgtacaaatacgactctcaactgattttttgtcaaaataaaacttaataataatttaatctagagatgttatgataaaactggttacattttctatacctgttcgtgttagaaattgtcttannnnnnnnnnnnnnnnnnnnnnaaattattgaaaattgagctcaggatcttatttttacaattttggaaaatttaggatcaattttgttatttaacaaaaacagaatgtctaattggtaacttttgtaaagtacaagatccaaaatagtatttacccttttttaattgggactttttcaataatatactatattatcaaattatttacaaaaataacgttgtttaaatgacttaaacactctgctgtgtcacgtcatcctcatcacaacgtaactttcttattcaatgcatgaaactaataaaagggaaacaatacttaaccagtttgaaacccaagaataccgtgcatggttcacacactaaaacaattacatataaattggaaaccctttactgaaactaataaaaactttactcaccaaaaattacacttaagaccttcgacaaactttattgcagagaaatttcattgtcggaaaagctccattgtcgagacttttcagaccttaaaccttcgacaaaatagcaattattaccacaattatacaaaaatgatacataaaaatacatcaatgaagatccagcactacggatagacacgaacggagcattccaaaattggaaaaaacaaaatttggaaaaagaaatataaaaacagagctaaaaacagattaaggtctcgacaatataatgaatcaaaactagtagcaaaactagatatcaccaaaaatgaaacaaactagtaacaaatagaagaacaataaaaagatttacagaaattg

SEQ ID NO: 138197 - DNA, 608 bp, Cannabis sativa
gcggtgcttgtatatgttcaagccacactagaccaagcgggttggggtctactagtgattgtattttgtaatctcgaattttgccgcttaggtcagcacgtaaattaacttgtaatattttgtgaaagtttttatgggatcccatgtcatgtaactttttggtttgtctataaagttaaaaattgttacaagttatatttttattctgttacagttaaagtttaaattttctgctcttaccctttcagtaatcccgattagtgggattagggtttcattattggttgtcgtaacgtgcctaattgttagggtgttacacctacggagcagaactagacttgttccgacacttgcgtgccatatgacccaatttgttacacagaaaacacaaaaatggtgcttgttcattcttattagggcgttgctgttgtttgttttggttccttagaaaccaattctgattgttattctgagaattattgttccggtttggagtatgcttacgagactgattcttgaaatttttcccagtgggtttcagaatcgcactggatttcttagtgttgttgtttgacacaacaagcacttcttctttctggtcctgttta

SEQ ID NO: 138198 - DNA, 1112 bp, Cannabis sativa
aaatataacccaaaaaataccagcccacaattctttaactgccacctggcgagctccaagctcctctgccagtgtgggtcccatggaaacagatttgtcctgtctcactcgcccacgcgcaagtacttctcactgcttcattctttttctatcagctacctatctatgacgaagaaataagaagtggtacagtagatttctcctatatatatatattatgaactaataagtaatagttaaaatgaatggtatcattattatttgcttagtagaaacatgacttaaaagaaatttatttaaactcactttctaatttcaaataagattaatttcaaattagttttagtttcagagattttataaaatagttataagtcctatttaattatgttatcgatgtgggactcttaaaaattctaattttcatttattcacaataacttttgagtaagacaagagagaataatcccaatttaaatggaactaactttaaaagatagcataattaactaaattgtacaccacagtattggcctcatgaaatacgaagttcatcccacccaccaggagactccctagtgtgttgaatcaattacattactttcctatagtcagtttccacacagaatctctacagccccctttgaattcccatttgaaaatctgctctaatatacatttcaaccatcaatggttgaagttgtacctaaagcaaagtggcagtagcataaaccaattgcctgtgatcatctctgattgcagcgcccaaaccggtccgcgctatcccccgcccttggcatctttcctccatgtttggtatagtttcatattaaccaaagatgccatgtaacaattaaaaatagtgtaggaattttcttggtgaaattccaagaatgccctacaccactcaagcttacaattagaaacgacaaggacaaaattgtcctagaaaattcaatcagaacaatcaattcacacgacaaagaaaactcagtcgttttcacctacacgacaatggaacttgtcgttctcacctacacgacagatcgtttaatccaaaacgatctgtcgttcttctttgaataaaacaagaggaatcagagcaaacccta

SEQ ID NO: 138199 - DNA, 770 bp, Cannabis sativa
  modified_base (566)..(588): a, c, t, g, unknown or other
aatactccaatggaattatgaaatgggacaaaacccagtttgaaagatttttgtattcggggttgtggagctcatattcttaatcccaggattgggaaacttgctcccagaacagaagtgtatgtttgtgggttattcaaaggaaactcaaggtgcatatttctatagtcaaatagaaaataaattatttctatcgaaaattgctacatttctaaaacatgactctatgaaaagtcacaaactatacagtcaagtaattatcgaggaaattagaagggtatgtgaaaccaggggaatgtcaaaaggcatgaaattttttttaaatctatttatgaattgaagcaagcctctacatcatggaatatcacatttaataaaactattaaagagtatgactttgaatagaactaagacaaagcctgtgtatacgaatacattaagggtactgtagttgtattcctagttctttatgttgatgccattctacttatgggaaacaaattagaaagattatcagatgtaaagaaggggttatccaaacaatttcaaatgaaggatttgggagnnnnnnnnnnnnnnnnnnnnnnnaaaatctatagagatagaaagtagagaacattagtactttctcaagaaatttatatatataattctaagaaatgacgttaccatccagacatgcaatttctctatgcaaggatcaatgtccaaagtctcttcaagagatggaggacatgagaaagtacccttatgcatcagcagttgggagc

SEQ ID NO: 138200 - DNA, 595 bp, Cannabis sativa
  modified_base (549)..(552): a, c, t, g, unknown or other
gattgttctgtgaaatgatttgatcaggttttggtggggtttgagaagttgaaactcgaggtttcccgttcttgtgaaaaatggtagaacatttttggagcagaaaaaaataactgtcgcttttggttttttgagaggatcgaattttgtattttgaccataacttttctattgggtgtctattttagacgttctatatacccttttaaatcttgcggcgagctctacaatatggtatatagtttagacctaaagtataagttttactttagggtgtttatactacgaagtttggtagaaatacttatattgttttatgcaagtataggtagtgtttggaataaatacgtatcggtttaccattgttgcaacgtagggataagattattaggaattttctctacagccgacatgcatgaatctagattaaaggtaagaagaatatatatgtaccacatggcatgccagatacgattaagatcgtttatgagttagttgattatgaaagcagcgagacagtcattatgttagaaatttattttaccaggnnnntagatctactcacaagtatatttattaacaccctaaatatgaa

SEQ ID NO: 138201 - DNA, 849 bp, Cannabis sativa
tgttattttttatgtttaaaggtatatcaagtaaattaattaagaactaaaaccaaactaatactgcaggaaaaaaaaaccaaaatatttaattagttagagcatcatattcttatttggcaaataatatgctattaatattagtttataattaaaatatctataattaaaagtatttatgattaattatattatttttttaattataaaaatcaacactaacacattttctaaaaaaaaactaaatatctaattgattaaatttttcaaatacgtaaactatgaatagttaaataattaaaaactaactaatttttgtttgaatagaatgcaattaaattaaatgaaaaaatcaaattctttttgcaattttattatcaatcaataaatatggaagaaatcttggagccatagattacagaatgtaattaaattaaatgaagagaataaatgaagaactcaaattctttttgcaattttataatcaatcaataaaatggtaatgaaacttcaatagtatatgaatgttatgtgtattttgattaagtacctgtttcagccatgttttttagcaggcaatgagtttttcagcaggcaactgaacaccaaaaaaggaagaagatggttgtagggtttttcagtgtagggtttatgtgtattccctttttgtgtttttcactttttcacgaaaataatttggctcatatatataaggtccagtacaactacatattcaaaaatattttaatctattttgtatttattttttcatgattgtgtacaacataacatttagaataaataaagtatcatttaacaaataataattaatacttttcaaaacaaaat

SEQ ID NO: 138202 - DNA, 732 bp, Cannabis sativa
taggtgaatgtaatcttttatccttccttgattaatgtgagtcttcataatggagtcgtcactagattcgtcgattatcgtgtaatcgccgtaaaagaggcttacgccatctgtgaaatcctcttatgatatgtttcccccatgcagcattgaatgcgaagtgactgttcgaacaatctctttccctcccggagatgcattgttacatttccagcctcccggagagtaaaggcgtgttttatgctcctctccgggaggctcactccgtgagatgcacttctctgtctatgacttaaccaatttttgtgagtgggtgttctttgagatctacatgtcgcacacagccgctgccacgtattttgggaaaaatctgaggcaacatttatcccccaagtctcatttagtaaagggtaaatgatttgcttcccgtatattgatagacctgcgcatttaatcctggtgttagagaggtgcgaaaagttttaactgccctttctcctcgttacactgattcatcccatccattggatcatagaatgcgaatcgataccaattcccaccgtacgatggtgtataaacacaactgccttgcaccctttctggcctatacacgccatcattttcctttttgttgaaattgttggaatttattttaccaggatcttagttctactcacaagtatgttgtttaacaccctaaatatgaagtttctaaaacgataattaaacaca

SEQ ID NO: 138203 - DNA, 542 bp, Cannabis sativa
gtgaatccacaaaggtttaccatacaaggccttaatttggctttttcgagccatattttctttagagtctccttataaaggacatttaccgagctctaattgtctattaacactctcttgatccttttattggcgagtttaatggttatcaccaatggatcgacatgaggatacctcacgtttttctcatcttcctccgtgaatacaatgggaggttcctcggttttcaccttcttggaagtttttggggcaaagacctattgcttgttctttatctctttcgcatatcttttttaggcgttattgcattcccctgcgatatgtggccctctcgaaataaccaggatgttctctccttccacaagaataggttatcacccctagttgtttgggttattgggcagagtggactggtggtaaccttggccctgtcttttcatgtactatttaaaatggccacgagcgatgagactttttatctcatctttcaattggcgacattcgtcggtcgtatgcccaatatctttatggaatttacaata

SEQ ID NO: 138204 - DNA, 779 bp, Cannabis sativa
atatcagctaaaagatagctaatgtaacagaatagactaactgaaataacggtaaaaactataactaacaaactgtcagtaacaaactatcagtagcagatggcagtagactaattctgttataattctaatattccccccttaagatggactggatatgtcatatacagacatcttacggatatgagaagcaagaattgtggatggaagacgtttattgaaagcatctggaagttagtattgacaggaatgagtcgaattgcagaggcctttatcttttcgcgtatgaaatggcagtctaatacgatgtgtttggtgcgttcgtgaaaagtggggtggttggcgatgtgaatggcggactgattatcacaatagatgaatgcaggagccttttgaggaatttgtaagtcgttaagcaagtattggacccatgtaacttcactgctagcagcagcgagtgctctgtactctgtttcagcagaactgcgagaaattgttgtttatttcttggttttctaggatatcaaacagtctcctatgaagaggcaaaaacctgatgttgatcgacatgttgtaggtcaggaagcccagtccgagtctgagaatccccgaaggtgtaatgatgaagtagagttgtaaagtaagccttgtctagggcacctcttgaggtactgaagtaagtggtgaatagcctgcatgtgaggagtgcgaggggctgacataaattggctcagggcatttacagtataggtgatatcgggcctagacaatgtgaggta

SEQ ID NO: 138205 - DNA, 931 bp, Cannabis sativa
ggggatagttgtaaagaccgcttagtttaaatttggaaattagcagctaattacgatttaatgatgaaaattatttatgttgatttttttgaattcaaaatgcattttatgtcatatagtgaaattttatatttttgcatattcagtgcccggcaacattggaacacggtgtatggctcagtaaaatcacatcttaatagttttatatagcggggtagtttatttagacattggaaatatcgggattggtcgggaatttagaattttccaaaatacccttagtaccccttttacgttttttttggtggaggtgcaaattggtcaatttgccccatatgtagtttgtcctttagtggtttatgttactcttagtaatgtgattttttaaatttaatcttggctgaaggttttttattaaaaccattttataactctaatttcacaaaaacttagaaaagaagtaaaaatcattttcactctcaaaatctctctttctctctttcggcctagagcagctagggtgtggggattctttgtggtttttctagctgattttagcaaggttcttgtgatctcgagccaaggtataattctttaaacttgttgttgatttcttgagttgtaaggaaaaggtagttttgcatgcttcaggattttgtggctatggttgttgtttgtgtttgttgttgatttctaaagcttaattatgttttaatatgatgattcaagcagagctttgtggttgtttgttgattttaagcaagtatggagttttgaactcaaactttggttttatgagtgaatgttgtttagctgtttgtagcttctgtggttagttgttgttgtattcagaggcttatttatgtttaattgagtggattcgaataggttttgatgcatgttagttggatttagccaagtttgagttttg

SEQ ID NO: 138206 - DNA, 658 bp, Cannabis sativa
aaaatgcacatgctttgcatcatcctctatcttgactcttgcactatgatgggcttatatttaagagcttccattttttggtttgtttgtgcgggaatgacactgaattcagtttgtacctctccgaatttggaaaaactagcatttgcagctggctgcacataagcacttggtctgcaaacggtaggagttgtaaaggcagttaccgaagggaaaattgatggagtagtcatctgcaaagtttgggttgttgttatgtctgtggaaggtgctggaagtactccataggcttgagtataagcttcttctaagtttatgaatccttaggctcttatcaagaaattagtcaaagtatctgctcttttctgttggagatctctccatagcaaggatcatgtggttaatcctgatgtcagagccaccatcttcatatcatctgtaacaccctaactaatataggcgtgttagcgtgattttaaacgtactgtgcagctcgttgctaatcaatgggattatcaaaaaacgtgactaatttaaattttcttattagattaaaaacataaagtaatacatttataaaattctgggatcccgtttacaaaatacatttacaaaagtttactactcatatacgaaagatttgtcgcctagcgaccaa

SEQ ID NO: 138207 - DNA, 898 bp, Cannabis sativa
tatagatataatctacatagccacatcacacgttttatagttcactaaagagcatacattaattgctattttttttttttaaaaaaaagttcataatccaatagatttatatgtgtttaaaaatataataataatgatttaattacaaggctcatacttttggatttgcacccatctaaaaatccaatccatctatagctataaatatatatgaaaaaaaaaaagctttaaagaagttgatgtggcatcacacatgaaattttttctacactttctattttctctatttttttcttcttactatttttatatattaaaacaaaaatttgtaacaaaaaattattcatattcttatatctcttatcatcatttatgtttatatgttaaaaggaaaaaaaaactatttattttctttatataactctttttcatttatggttatatatatatatatatatattaattatcaaaactatttgtattcttctactaaaaacttaaattatatattttcttgcatggtttattatgtttgtatatactactccaaactcaagttgaaattttgtgttcactcatataagttttaagttgttgttatgctctctataaatatatatgttcttttttttttttttttttttattttagttgcaacaattattcgtttttaaattttttgtgatgtttttttttcttctaattcttgatgtttcattatagattacttggcaatggctatgaatttacaagttcttctccaatggaaatattttacaacaaaactattaagtactttttcttttgctttgaaagataatatcactagaactattattatcatacatatgcatttagattcaatttcatttcattatacttttcttcacatcgctca

SEQ ID NO: 138208 - DNA, 1383 bp, Cannabis sativa
  modified_base (981)..(987): a, c, t, g, unknown or other
atttagggcataaaacccaacttactcatcattcaataatttcttgggagcagctgtctagggatttcaagaagcactttcaagccgctagggataagcgacctgaagcgacctcactaaccaatataaagtagtagcctgacgaaacacttaaggcgtacttaagtcattttagcacgactgccgctagggttataaatttggatgacatcacacaacttacagcccttcaggcagggatctccactgatccattaaccgccaggggcgagttgtgggatgatttacaaggacgtccggtaagaagcatcactaagttcaacgagagggcttaggtgtttgtccagaaggaagaaacccgaaaggaaatgaacttattgaaaacaagctcgggaggtaagcccagcaatgtttcaacaggaactacttcgatgagaattggtaactcgggggcttttggtccgaaaagaaaggacggaattagggaaccatcgaaggatagaaagaaacaaaagaagcatgacaaatatgtgccagtgtatactatttataccgagcttaatgaaactcagaaaaatatttacctcgcacacgagcaaaagatagccttcagtaaacccgagcctatgaggaattcgacgagtaaataagagacaaaagaggaagcccctggattccgagaggcaaggggcactaaaataggaagttgacaagttattattcaatgattttatacgcgaggtgttttatccctcgtgaatagccaatcctgttcctttcccaaaaccaaacggaacttggagaacttgtattgatttttctaatcttaataaggcgtgtccaaaggattgtttcccacttccccggattgaccagttagtggatgcaactactagacacgagcttatgtcatttatggacgcatattctggatataatcagataaaaatgtacgtcccagatcaagaacatacaagcttnnnnnnnaacatgggactttattgttataaagtcatgtcgttcgaactgaagaacactggggcaacttatcagcgactagtaaatgaaatgtttgcaagccaagtagggcgaaacatggagatttatgtcgatgatatgttggtgaaatcgataaggatcatacatcagacctcgcggaatgctttaaaatatttttaaaaaaaaagtatagcatgaagctaaacctgaaaaaatgttcctttggagtctcctcaggaaagtttttgggattcatagttaacgcgaggggtattgaggaaaattttgaaaaaatgaaggcattaatagacatgccatccccgacaaagcctaaggaagtacaggccctgacaggaagaatggcggcacttaacaggttcattt

SEQ ID NO: 138209 - DNA, 512 bp, Cannabis sativa
atgaatagtagagatgttatattctaagaaaatatttttcttgtttacctaatgaaaagtatagtgcaggaatggaagatactaaccctgcaggtacaaacccagaagttaaaacaggttcggatcaggtggaacaaaatggagacacgctgggaatggttcaggtggaaccaaaccaaaaccagcagtccgataacaatggtcaaggggaggaactgatgcttaacaagagatcagggatgaagacaccgaagaggaccttacaaactatcagttgacaatggataggactaagaggactttgaagccaaatcagaagtacaactacaacatatggagtgaagaactggcttatgcacttctaacaaatttggaaatggatgacatggaacctgtaacaccccgatttcccgagatgttacacatgatagtctgtataaaacaatttaataagataaagacaataaaatacttctttattgaaaaatatctaagcatgagatctcactgtt

SEQ ID NO: 138210 - DNA, 578 bp, Cannabis sativa
gatcttgatttctctgattttactgcctgtgttgattgtataaaaggaaagttgactgccaagattagaaagagtaagtcagacagatgcgttgatgtgttagagcttattcatactaatatttatgggccttttgttccacctactatgggtggttataaatactttatcaccttcattgatgatttttcccgatatggtcatgttgagctcattcttgaaaaatctaaatctttagatgcctttaagatttacaagatgaatgttgagcttcaaaagagaaagaagattaaagatgtcaattccgatagaggtggagagtattatgggcattatgatgaaactagaaggaacccctggccttttgccaaatacttgctggaatgtggtattgatgcaaaatatacaatgccaaggacaccccagcaaaatggaattattgaaagaaggaatcgcacacttcttgacatggtacgttgtatgttgattcattctagcctgctagaatttttatggggtgaggcattaaggactgctacttatatcttgaatcaagtgcctaacaagtctgtgccaaa

SEQ ID NO: 138211 - DNA, 1974 bp, Cannabis sativa
  modified_base (1714)..(1721): a, c, t, g, unknown or other
  modified_base (1931)..(1935): a, c, t, g, unknown or other
gttcgcctttaaaaagcttattagctgctattttagctgctcgtccaggttcttcccaatgtatacacactttgtaggatttcttgggtcgagaaaaacctcttccaattcctagattggtttcaataggtttctctcttcttgaactcaagggtcaagatctttgtctttcttctcgttttcttctgccaagatcgccatcaactgatgaccggctttcctatgctgcagctcaatccgatagcaattgcgagccagcatctggttgcccgcaccactcccacgccatctagtgtttggaatttcaaagataggtgcttgattgaactgactgcccctagtccgatcagtgttggacgacccaacaatatgttttaagctgaggccaggtcgacaactaagaagtcttgcataacattagcagataaaggtgcctcgcctaaggttaatgcgagctcgattataccaaggctagcgatgctgtcttcggtcaatccgcaaaggttcaccatacaaggccttcatttggcctatttgagccccattttccgtagattctccttaaaaagaatatttactgagctcccattgtctattaacaccctcttgatccttttattgacgattttaatggtaatcaccaatggatcgacatgaggatacctcacgtttttctcgtcttcctccgtgaatacaatgggaggttcctcagttttcaccttcttggaaggttctggggtacaggtagactgctcgttctttatctctttcacatatcttttctgggcgttattgctttcccctgtgatatgtggccctcctgaaataacaggatgtcctctccttcaacaggagaaggttgtaacccctggttgtttgggttattgggcagattgggttggttgtatccctggccctatcatttcacgtactgtttaaaatggcctcgagcgatgagactttctatctcatctttcaattggcaacattcatcggtcgtatgccaaatatccttatggaatttacaatacttgttaggatctctcttaccccttgaattcctcatcgacttgggcttgccgaaggccaccttttgctcatgtgcaaggtaaatattatctcgagtttcattaagctcggtataaatagtatacactggcacgtatttgtcatgcttcttttttttctttccatccttcgacggttccttaattccgtcctttctcttcgaatcggaagcccccgagttatcaattctcctggaaatagtacctgttgaaacattgcaggatttgcttcccgagcttgttttcaacagattcatttcctctcgtgcttcttccttttgaacgaacacctaagcccttttgttgagctcagtgatgcttctcactagatgaccttgtaagtcatcccacaactcgccccccgtggttaatggatcagtagcgatccccggctgaagggttgtaagttgcgtgttgtcatccaaattcctaaccctagtcgcagccgtgctaaaacaacttaagtatgccttatgtgtctcgccgggctgctgctttatattagttagcgaggctgcttcgggtcgcctatccctagcagcctgaaattacttcttgaaatccctagagagctactcccgagaaattattgtatgatgagtaaacttgttaaaccagctactcgctgctccaacaagcgaggtggnnnnnnnnatacaacgtaaattgtttgtcacattactctctcgcattattgtgttaaagttattcaaatgcaagactggatcagtggttccgtcatatgacgagacatgtgggtttttgaatcccaaaggaaaaggggtattcattatgtctggatactatggctcaagctcctcattagagtcgtatctggatagtttccctaattcccccacttgnnnnntcctgaacttgtcctccagctcgtttatccgcaattgga

SEQ ID NO: 138212 - DNA, 580 bp, Cannabis sativa
caacaagatttggtaagcatatatcatatagtatatataatattggatatatatataactatgaagagactaattatattttattaatgtgtttattattatatatagtattgtcaacaacaaaaggttgaggaattaaaagaagtgattagaagagaaatatttgaaaagtaaatttggagttaaggatcaccaaagggactccaagagaatgactccgttggtagagtctgcttactttatgtaagtttttcgtgtgtaaggcctgaccttatttccttttttttgctcttgttagcaagtttttttctgttctagcttgtgcttctttgggtttgcttgggagtctgttcatcgtttttacctagttattgtgaagttatcttctggttagtatgggggaaaagggaaaagagattcaagtggagtttgttgatactgagaaagatgaactattatctagagacagtgctcttgagatggaaatgttagagctttttgaagatattactttggaggatgttgtggttagtaaggcttgtgtgggtaaggtagttgggtgtaaggatatgccggcatc

SEQ ID NO: 138213 - DNA, 587 bp, Cannabis sativa
aattaaataaatctagtaagagtaattataatataggtataaatatttgttaatgataaataagcccctacaaagtaaaaattctgggtccgtcactggtcttaattatgtgtagcatttctcttatttttgtgaagtgggtagtcggtagccttagagcatctccaatagtaacatccttgatgctaaaaatttacgcatctaaaaatataatattttatattattttttctccacataatttttggcattcttacttctaaaaatactccaaagtataacacttttttaaaaatactataattataatctcacatattattatttaatattgtatatcctaatttttagctacaataattttttagcttcaattttttattaaaaaaaataaatagtatcaatgttacaacttagtattcatgtaaatttttagaataacatttttttctctctaataatatagcattttaatattttatcacataatgtgtctatttcaccgagtatcctctaaagtttttaaaacatgtcaagatctttaaagcaaaaactacagcagcgagctctaaatcatgagttgggta

SEQ ID NO: 138214 - DNA, 563 bp, Cannabis sativa
  modified_base (111)..(116): a, c, t, g, unknown or other
aaagtaaaaaagtaaaaaaaaaagatagggcaagtataaatgtttaatattggaaaaaaaaagccacttagtgtaaatttccccccaaaaaatataaatttaaataatttnnnnnnattactcttaatatttttttaaaattttttcctcacattatttatgttaatttcaatacttattttaattttatttttataatttttttaactcatatatatatatactaaataacttaaccgcccttcgtgcagtataaaatcaatgtggtatataatttatgttaatttattaattatattacaattttaaaaactaatattttacattttaatttatatcttgttaattcttcttcttaaataaaaaaataaaaaaaaaatgatttaaataattagtataacaacaaatcaccataatttactttatttttatttccttagttcttttgaataagtgatatgaatgattaaaaataggagcttttatttttacacttcaaaacagttttttatgcatttttacggaattttacatagaaatccatattgcaactagcgctgcaa

SEQ ID NO: 138215 - DNA, 648 bp, Cannabis sativa
tttaaaattaatatttatatttaaatttatttagtaaccattcgggtaatacccattaagaagtgttccacatatatatatagataaaggatgttttaatggttaatattaaataataaatatgtaactataatagctacatttatctttatttgttagattatttttaaacaaattaatttagaaattaaataaatcacctgtaacttgatactaaccttatttgatttatttttttataaataaaaaataaaaagtatttagggatttttttattttcactttaaaactattttcttttatatatttttacaaaaattcacataacaatcaacggtgcaatctaaatcgcaactaaaattcacaaaacaactcacatagaaaccactagagcaactcaaaatgtaaatttttttaaaaaaaggtatatgagataattcttcaaatatttataaacattaattgtaaaaatagtattattaaatactttaattaagaagctaatttattttaagtaaatagttaattataattaatttgagtctgaaaataaatttttacctgttagtagcctgttatattagtgcaagtgggagtttgttagtttttatgccctaaataaaactccatttcaatgtaatctatttt

SEQ ID NO: 138216 - DNA, 1205 bp, Cannabis sativa
ttcatccattggcaaactattcacatctaccgggcattcttcataggtgtgagggccccacaaagctcacaaacaacttgagcctgttttgcctgcacagttatcagtttagttagggcctctacttgggctgtcaatttggtgatggcgtctacctcatgcatatcagccaccttcttcatttgacttctttcagttggccattgctgattattcatggccatttctttagtaaatcataggccttgtttgcattttttctcataaatgccccaccagatgcgacatctataatcgttctggtattaccaatcaacccgttgtagaagttgtggaccaacatccttttttcaataccgtgatgtggacatttcctgatgagatccttgaacctctcccaagcctcatggagagattcattgtccagctgacagaaattattaatctctcctcgcagcttagcagactttgctggaggaaagaacttagacaagaactttgttgccaaatcggtccatgttgtaatggagtttggaggcaaggagatcaaccaactcttggctcgctctctcagcgagaatgggaaaattctcaagcggatggcatcatcactaactccatttactttgaaagtctgacataactccatgaaattagacaagtgcaaattggggtcttcaaaggggagtccaccaaattggattgaagactgcaccatttggagtatggcaagctttatttcaaagttgttagcatctacggcgggtggtcttatacaagactggacccccgtcagagttggaagaatgtagtccctcagactacgaccatttgcttgatcttcaatgacacctccgttattaccgttgctgcctccattattaccgttattagcattctcagccataatttcttctgtttcagcagttgttgaaacttttccttgcctcttatttcttctatttcttctacaggtcttctcaatttcaggatcaaccgtcaaaatgacactctgtccttggcgtcgcatacaccttcaattcctgaaatagacaaagacaatgttgaaagaaacaggttagcagtcagcaagaaaagttaaccaaagtagaatttaatgtaatcttatgcaatatcaatctttaaacaattccccggtaacggcgccaaaaacttgttacgaaaattatgaaaaatacgcaagt

SEQ ID NO: 138217 - DNA, 591 bp, Cannabis sativa
agcattagggcgttacaataatgtttaaaaacattacactaaccctaaagcccaaccaaagaaactcgggatatcatacttaaaacagaacattaaaaactaaaaaacaacgaaaaatacctccaaatttgcttagtgataaaataaaactgaacaacaacaaaaaatgataaattactaagtagaaacaaaataaaaatatgaacgaattaaattaggtcaacattctataatcacaaaaacatacaagggaaaggaaaacaatgcaaaacataaacaaaagaattttttgcataatagaccaaaaatttaacaaaaaaattacaaaaatacgttaacacgaatatttttcttttttatttttatgctttgaatttttttatttacaaaaatacgtactttagtaaaaataataatttttttgttgttttatagtttatttaaagttttattgtagctgccacaaggttattttttgggtgtttttggttattttgtagtttttttatgattgtttcatagttgtcatgatgttgatttcacgttgttttttagttgttttcttactttttgttgagaaaagagtatttt

SEQ ID NO: 138218 - DNA, 506 bp, Cannabis sativa
acgaaacctaacaaaatgactaaatttctataaatataaaagttcatgagagatttttagcaagccgtatattttaagggccaaaatcagtattatcaaaagtctagaggacataattactaatttttttttatcatataactgatgacttttctttttaaaggaacaatagtggtgcctaatatcatttgataatataaaattactaatgtatttaagtatatcactaagaaaatacatttaatgataaatttttagtcacaacataatttttttgtaactaaatgtgatttatagtcacaacaaaaaattacttgtggctaaaatatagtatttaaatacaagttgtcgctaatttagttttattcatcacaagtattgtgactaaaataaatttagtcacaaaaattgtgattcttatagctaatacaatttagtcacggattttttaatcacaacataagaatgatgttttataattagtcacaaattttattgtgactgaa

SEQ ID NO: 138219 - DNA, 826 bp, Cannabis sativa
  modified_base (314)..(315): a, c, t, g, unknown or other
actatgatataccgtgcaaccttccttctcatcttttgagcttcatttcggttatcagggagttccctagtgttaaggtaagctgctattggcgtcatccagtttggggaagtatttatcattttgatctctttcgtgccagtaatgctaggctcttcgaggaactggataggaaccaagttcactttttcatttacattactgcttgccaatcgagctaacgcgtctggagttgtgttttctttccttggaatttgtttgagaccgtagattttgaattgagcgagcaggtcatgtattttgctcagatatgnnatcatcttttctccccgagcctcatattctccagatacatgattaccaccagttgtgaatcactgcagatttcgatgtgttcgactttcatctcttgggctactttttgcaaaatttcaaaatttttttaaaaaattaacacgccgaaaataaaattcaaactttctatcacgtgactcttttgtttagagggatacattgtcaaagcaccttataatatttttttgtgaaaatttaaatgtgaataatataaattatttttatttttaattataatttaaataaaaaattaatataacaataaagaatatttttttagtataatttttaatattgtggttggagtaaaaatactttttgacgtcaaatttagtaatagtgaaacaccaaatggtatagttcccctgtgtaaattatttaataaaagttgcatttccgtaaaaaaaaaaaaaaaaaaattactttaatacataaaaatgaaataataataaaaataaataataatacactt

SEQ ID NO: 138220 - DNA, 675 bp, Cannabis sativa
  modified_base (569)..(587): a, c, t, g, unknown or other
  modified_base (632)..(637): a, c, t, g, unknown or other
gggaaatgtggcgagaagtaggtgttgattttttaatggactcttataggcgatggtttaaaactgtcgcccgtactgtaggtgacggttttaaatcgtcgcctatactttacccgacggtttacaaccgtcggctataagggtccattaaataattgcattttattaaaaaatgtcgtctattttgtttactacgattttaaaccgtctggaatactaaatttttctagatggttttaaatagtaacttaatttttttagcgacggttcccaaaaaaaaatcatttttaggaccgtcgcgaactcggatatttgtagtagtgacgtatatgtatatttgtatgtttattatatgcatgcttcttttatgatttgtatgctaccgacactagtacggtaacggtacggagtgcattggtacaatataaagagtacgatatattgttaccaacactagtactggatgagtacgtagtgcatgtggtaaacactaagtggtactggaggtgcgttttagcactcccaacacttgtatgagaagagtacctagtgttggaatttattttacnnnnnnnnnnnnnnnnnnnacaagtatgttgtttaacatcctagatatgaactttctaaaacgnnnnnnaacacatataaagttaaggaaaccttacattggttgca

SEQ ID NO: 138221 - DNA, 686 bp, Cannabis sativa
  modified_base (69)..(70): a, c, t, g, unknown or other
atgatgtgtgacaggctgcgactattacttcttatggtcaatctagggttctcgccctacaagaggagnncaacaagcaaagagcagcctcactgcaacttgaacttgatgccctccaccaagaacactcccagaagattcatgacctagaaacttttgttgagagggttactgctgagaaggagcgttttaggggtgagcttcaaagcgagaaggaggcttgttccaaacttgccgaggaaaatgaaattaatgtcaaggagcgtgagaagctagctacggaggtgaaacagatcgaaaacctctccaccgatgttttcttcaaattttggctaaacaacaagaaggctgactttagttatctgggtaagaacatggaatgtatgctatcttattgtcgcaatcgtgaggaggcagaagccagggagaaggcgcaggcagcttgcattcaggccgattcatacctcaactttggggctgaggcaaccgatgacagttcccttaatgacttacttgatggttcctattgatgtacttctacttttacagcttttatgcccactagtactctagagagattaatgactgtccggacagtctttaatcctgtaactttacttttgagacatttatgtgtttaatctttttacttggccatagggccttatctttatatatggctttac

SEQ ID NO: 138222 - DNA, 586 bp, Cannabis sativa
atttaccacctgctgtgaatcactgcacatttcgatgtgttcagccatcatctcctgggctagtcttagcccagcgattagagcttcgtactcgacttcgttgttagatgctttgaatctgaacttgactgcaacgtgcaggtgttgccccccaagcgtgacaagggcaattcttgcgccaaatagctgatctgtcgccgacccatccacatgtagtttccaagtcggtttgtcctcattgtgacttggttggggtatttgtacagggtcggggttgctttctggtatgctttcttttttgcctgtgcattctaccacaaagtttgccaaggcttggcctttgattgccgttcggggttggaaagtgatttcgtattggcccaactctaccgcccacttgagtagccgtcaagaagcatcttgtttttgcagtatttggcgtagtggttggtcggtatacaccctaaaaagttgggcttggaaataaggcttcaacttccttgttgctagaatgaggcagtaggcgagtttttctattaacggatatcggccctcggcctcaatgagtcttctactgatgtaatag

SEQ ID NO: 138223 - DNA, 811 bp, Cannabis sativa
  modified_base (444)..(445): a, c, t, g, unknown or other
  modified_base (522)..(530): a, c, t, g, unknown or other
aatcaggaatcggatgcccacatgcgagcgcagacacgagtgatcactcgggtgtcacgcgcattcagacaggggattgtccaaagatgctcgcccatgtgctgtctgaagcccctcctacgcgcgcaaaaatcctagtgtgcagggtctgtgtgcgtgatttctcggcagaaccccatccctgggtgcgcggaaggtatgcatccgtaccaaatgcatttttttttttttttcgttttttcaattttttcatgctttttcaaggaattaatttctaattttttgagtaattttgtatttatatttttattttttcaaatttcaaatctaattatcaaaataaaataaattaattttagatattagtagattttgaacttgaaaaaggataaaatctgatattttgcttaattggttaactttatttttaaaatttgattattnnatcttatttttaaatttaaagttagatattttatatctaaagattatttaattatttttataaaatgaccttatttnnnnnnnnnaataagattattttaatctagaaaatttagaaaaactaacaagatattttgttaactttcaaaattttcttattttatttaagttaaattataaaatcagataaataatattttatttatcattttatttttttattaggtatttaattttatccttttttaaaataacataaaatttgaaatgtttgttagcattttttgaatagatatttaggtttgttaaaaacctaattttttaaatttataggtttaattttgaaattatttatttaatttaattt

SEQ ID NO: 138224 - DNA, 748 bp, Cannabis sativa
tggtcagtgggaccttttgcatgaagccgtaggtgtgcggttgggtcagagggccaatattgagaacttcgcaaaagaaatcttatgtaagagtgcacttggtgctgcattgggtgcagttggcttgcgaacctcgtccaggtgggacacaccaatttttatcctgcgatcagagtgtcttgctcgattgccatcaggaggatggtgcgccatggagttggcgtgtgtagtttcaagagggacttggcttcagtggaagcgtgttctataggttccgttggatacggttggtttgtgaacctcaccccgaggagtgcaccatacttagtccttgtcaaaaagagtatgcattggacgattggcgagtgagctactatcaaaggatgtgttagcttcagggtcagtgttgcaagggctatttgtttgactggagggacgttgtgagggactcggaggagttcatgttgggggagtagtctagtgcggaggcactactccatgggagattctgaatagcgacagtggcacaagttctttgatcgagattaagagtgggcgagagagatcgtcaccaagagggtgaatctatggaggtagagggataagtgcagacttaggattcaggagaagcttggagtaagcttaggagttgagatgaggaagatttgcctgcggtctgtcgacgagggcctcgacatgttgaagtgggggagaatgtaacgtgcgtgccaagatggcacgttacaag

SEQ ID NO: 138225 - DNA, 540 bp, Cannabis sativa
  modified_base (153)..(163): a, c, t, g, unknown or other
  modified_base (319)..(328): a, c, t, g, unknown or other
atgtccttcgaactttgacatgtactaaattatgccccctaaactttcatccatgttaggcttttttactaaaattagaaaaaagtccttaaatccaacaatctcaatagttcattgggcattttcaatgccttaaaagttcagggggcatgnnnnnnnnnnngtcaaagttcaggggacaaaaatcctaattagccatttataaataaaaaatttaacacatcaaaaattgagttcaaagagtttattgtacacttgactcttttattttatacgcgtgtaaaatagatggtttgaacattaatttttatattgtaannnnnnnnnnatttctcaaaattttacagaatattttaaataattataacttaatatacggttataaaaaaaaattagactaaattattttataaatatcaaaataattaaaatttgtattaatttaatagggtgcatagtataaatacctaacaaaaaaagtcactaatgttacagaaatattcgtggattggtttgttattaggggtttttttattttta

SEQ ID NO: 138226 - DNA, 812 bp, Cannabis sativa
aaggttgattgggtagtccatactgtatgcttggtacactaggccaattttctctgagtgacatcgtaagccgcaggaggcacttttgctgaaaaggaagcttgttggcaggggtgtagaagtattgcaggggccgttagattcttgttagtcacgaaagtggtcaagagttgatgaccaagatggttcaaattgggacagacatataatgcttcaattgctacatgcgtgtgtcaagagggacgcacatggagaccaaggggggaaaataccgcaatcgtcaaaggtgatcgtacttgaaggcgtttgcatgtgacttttatttgatccatatggaagcatcgagacagttgagtcggatgtgttggctggtaaaagcgccagtgggcccaagtcacacaaaggcataagaaggaacaagactttcacacgttagttaatgaccttcagacttatgaaaatttgattggaggaccgaagaagaaagggagtaaatctcataattctggaaatggtaatggggcgactaaagctgaggaaaactttgcctctacttcaaaacccagaagaaatggaagaatagaaaaatgcatgttcaagctgtgaaaacagttaaaaagaaaaaggctgctactcctagtgatacaccaaaaggaaaatgcttctattgcaatgaaaagagacactggaaaccccaatgtcctagatttctagcaatgaaacaagatatttcttttcctataaactgatatgttttagtgaattattatccacttggattattaattctggacctactaaccatgtttatt

SEQ ID NO: 138227 - DNA, 597 bp, Cannabis sativa
tctgcagcccgattaagatctcggtaatctacgcatatgcggagttacccatttttcttcatcaaaatgatgatgtttgcaagccaaataggatacttaacctcccgaataaaccatcagtctcttaacttcagtctcttaacttgtccatttctgcatcgactttgggaagtaattctggtcaaattctttattgagattgtttgacaagggtagcgtcctttgatactgctaacctgtgcacaacacctttggaaccctgtcatgtcttgataccttgaagaaaatacatctttgctctcacaaaggacttgtttgtactgtggtaactcttcttcagttaataaagcattgacaaacactggctttggattgtcattagttctaagggttgatctctattaaatcatctacagttacttgtcctccctcttcgaattcttgaggtgctggttgtcagatgtctataaaatcttgtgaagggttagagctcgagccttcatcttctatagtcaaattttcttcaaaagagaggtaattgacttgagcaaaattttcttcatcttcttgtgtttcatgcccctgaatagtaattct

SEQ ID NO: 138228 - DNA, 722 bp, Cannabis sativa
taagcttcaagttgtgaatctttgcatgattttgattttaaagagttgtggttgctgttattgattgttgttgttttctgtgatggtattatgttcagatatggttttttaagcatgaattaggggttgtacataggtttaaccaagctttgagttttagaactcaatcttgaagctttaacggtgaaattcatttttgtgtatggggagttgttttatcaattggattatgtttattggggtgtgaaatgtaggtctggaaagtttggttggatttcgaaatgatttggtgagggtttgaagctttgttggttttctgggtaaaaccagctaaccggttttacactgcttgtaaaactggttacccggattttacagcatggaaaactggtttttcagcttgtcgtttcgtgtatgtttcaggtttctagttggttgattccctgctagtttgggatattaccatattaagttgcagcggatagggttttggttttaaacctaaatctcggttgtgatttagcgagtcacttttgcatgttgttatcgatgtgatttaggaacctataaatcgtcaagcagtcgttccactgctgaattcgaaattgaggtaagattactataatatcatgcatatgttattacttattcagcgtacatgtgttattgcctgttaaattacattgatagcagtaatagtatacatagagttgtattgatta

SEQ ID NO: 138229 - DNA, 556 bp, Cannabis sativa
atattttaaattaaaatggttgtaataagaaattgattgttttttgttttagttatggtaaaccgatttacacactatattttttgtaaagtttgtgaataaaaaatctatatataaacatactcaaatttggttatgagagttttggttaacaacaatatagtaaattataatatatgcattattggatactttacctaattaaaaaaaatttaaaattttaaaaaatatgtatctatataatcacattcaaataacatactaatgtaacaatagctaaaaatttttttaaagatgatcaaaatcttaaactctattttaaaaattaaaaaaaaatacattacttaattaaaaaaaaaattaaacatacatgtattgcacttaacattacttaattgaacttatgttaaaaaaaaataattatatacgtaatatcaacctagtgtatctattctatataaagtgtgcctatataactaaattattggtttatgagaaattcatgggtgtgactttttatttatatttaataaaataataaaatattattaatata

SEQ ID NO: 138230 - DNA, 1258 bp, Cannabis sativa
gcacttagtgcggattggatgttgtttgaccaaaaaagtgcggatttaatcggatgaacagtcttaatatatactatatcacataaaaatgatatatcttacaacaatattaatataccataaaactaatattaatgatgcacttaattttttagttttcttcatgatatattaaatcacgtaaaataaatgtaccaatcatttaaattaatatactagttaataagtttatattttactattttcctcaatattcataaaatacatatactaatttttatttttattttttatttatataaaaatatataccactcttatataccacaattcaaagtagatatagcacatttaaaaattaatatagtattatagtgggaaataaaaataccaaaaaattagtttaatattctacaagttttttttactttcctttactttttcgtataccataaaaaataaaaagaatacacctgaataaaacatatctatacctcaaacttaaattaatatttcacatttttttctctctttagttcttcatatactaatatacttgaatatgaatatattataatatattttatctttcattcttcatataccaccccacaaaaaaaataatataccacattattaaagtaatatactcgaatatgaatatactataatatactttatttttcgttcttcacatatactaccccacaaaaacaatatatcacattattaaagtaatatactcaaatatgaatatactataatatactttctcttttattcttcatataccaccgcacataaaaataatatactgtaatatactgtttttcgttcttcatatataacctcacataaaacaagtcaaaatagttcaaaaattctgacagaaacaaagcttaataatgtcaacaaggctattattaacacagagaaaatatagaaagtataacgaaaacaactccttcacaatccagtcacaccaaatagaaaatatagtatatcattgaactcttttcccgatctttaaaaaataacatataatgggaatgtaaaaatacaaatgttatattaaactaaagaaaatgtagcaaatacaaaggtagaagatctgcgatgaaaactggcaaggggcggtgacaatctacggtggtaatactcaaggggtggcagtcgagcaagtagaggcgagatggtctagacttggtgctgagggagaagaaagagatgagtggtctggacataagaaaatgagaat

SEQ ID NO: 138231 - DNA, 634 bp, Cannabis sativa
ccaagacctatgaaacatgcaaggcgcaagagagattcgaataagcagtgtgaatatcatggggatattgatcatatcacggaagagtgtcgtcatttaaaagatgatatagagatgatatagaaagtctatagaaagtctcatatcggtctcatatcgtaaggacaccttcaacgatatataaaggggcaggaagatgcctatgagcagcttgatctgcccaataactcgagcgacccaagattataaccctcctccgtaagaggaatggacaccttgggtatcttgagagggagaaggtcacgagaatacaaagggcaattactctgataaagaaattttgtaaaataattgcgacatgagtagatatcggcccactgtggttgccatatcaagctaccacgtggaaagttggacgtcaaccagtagcagtcgaagacaagcaactaaaactaggattactttacctgaaaccccggtatatgtcagggattgaccctggatagtgaaataattgtgggagtgtgttggggattgaccctgaacatcaaaacctgttttatcaaaactagatgctcctagaagattgataaaataagcaattgaactggggaagtttttttgagattgatga

SEQ ID NO: 138232 - DNA, 542 bp, Cannabis sativa
actacaactctgttaaggacaaaacatgtaaatgtcagtgattgctgcctattatgcaaattggatcgagagactactttccattgcttagttgaatgtcagtttgccaagctttgttggctgcatactggtattgataccagcaatgtgcaaatggttacttttcctggatggcttgacagcatgttacacaagatagatggggagcaaaagaaagtcttgatcatgacatgttgggctttgtggagaataaggaatgatgttatttggaataataaaattcctacagtggcgggggtttccatcttagctcaatactgtttggagcaatgggagaaggcacaagataaacatctagtgccacgggtggctttcttaactgatgcagatgctgcagaaaaatggtgcaaaccagcagtaggctttctgaaaattaatgtcgatgcaaccctcttcgcaacttcaaacgtgcacagctttgtctgtgtggccagggactcgacaggtacaatggtggaagctgtttcttgttgtcggcctgg

SEQ ID NO: 138233 - DNA, 522 bp, Cannabis sativa
aacaagtttaacaattccgcaatagagtacgcggattggatcggttattttagatcgggggttggcctgcaaggtggtggtggaggtgcgacgggggctgttcaaaaaggcggaggctctgatttccagtcgagaggagagaggaacattaatgtccctgattttcgggatgggcagcaagttgttattcctaaaatggtgggtcaaggattgatgcatgggaatagggatttgattggtggccatgcaataatagtgggagattgtgccgtgcatagtaatggagttgttggagaggttaattaggaaataaaggatttaatgaggtggcatctgatttggatattgatgaggagggaatggtttttcttgaaactaaaagaaaaagattgggataagaaattattggtgggccgaatgggctgttggagaagggtagtgtgaatttgggccaggagaagggaactcaatcaaaaaacgatttaatggcagactcgctcgatcgggttcgccaatcatcat

SEQ ID NO: 138234 - DNA, 1231 bp, Cannabis sativa
  modified_base (60)..(60): a, c, t, g, unknown or other
  modified_base (370)..(372): a, c, t, g, unknown or other
gaagagattcataaaataagaatgactttaactctcgcctaccgggacatcgttggattnttattttaatcgaaattattctttaattttttctcttagcttttacattaagaatttgcttaaatagtgtatcattggatgaatggtttataaatcatctgcttatgatgttactctaatttctcttatgaaattaaatggcgcagatggctatattctcgaaattctatcccgcaatgagataaatcctcgattatataattctcctacttttatatgtttactttaggcaaattagacttagagttagattagtagtggtggttcaagaaagaataattactcatttatatttggtataaatttaagnnnttgactttaaattttagatttcaaatagaaatttttttagtttcctagaatacattggacaatacagttaactttcacaagttttttaatatccattttctgtcagtggatccaaactatatgttaatgtatggaatatgagtttagtattctgtgacacgaatctacttgaactattctaagaactctttattgtaactagacctaagccatcaaaagaccacaaccacattccttatatccatttgcatcttgttattagtgtttttcacaatatcattctctgcaaagaaaaaatatgcctatatcaaattgaaagtaagatcatctatattcgaaaatatagatgtacatttaggggtggatatgagttatcattgaatacttaaaacgattactctagattttaccttatgcaatgaaatttgaaatgtttgagtaatttcatgaatttctagcaatggtgaaaaactattaaggtaagtggttaatgatcttgcaaactgataggtttggagaaatatttggtggatatatagttctaagatcattaagttgatttttcgaattgtatataaacttacctccccaagaaattcagatttcatattaatgaaagtaaaaggtctatgattagttactagttgttgcctaagtctttctagagaaatctttagtgataggaaaatctcagaatgatggaatggttgtgtacttattgtaaaccattactagaatgatggatgtcctgatcgtgaccttgagaaagctagaactgttaactaagggttgcatgtttgatagctattctaagtgattatgggtggaccatcctatggtcattatataagaaagtgtt

SEQ ID NO: 138235 - DNA, 853 bp, Cannabis sativa
  modified_base (51)..(66): a, c, t, g, unknown or other
ttgtgtctaaatggtatgttttagtcacaaataattttttgttgtgactannnnnnnnnnnnnnnnacaaaaaatttatattgtgactataaagttgtcactaataaaggtagcaggtttttgtagtgactttttaattttttatttttttttaattaggtaacgtatctgataatgcatatattgtaatttaccatattcttaaccaaaactcacataaccaaatttcagtgtatttatatataggctggattcgtaaatttgatataaaaattttttattcccaaattttatgaaaaatatggtgtgtgaatcggtttaccacaactaaaatgaaaatcaatattttaaatatttatcccaaaaagccaaaattaaatgtcaaaaatataataaaaaaacccaaaaaaattatattagttccataaaattaaataagaaattgatatacataatcgatatacactcaaaacaaaaattcatttacagattaattaaaaaaaaatacaaaatattttgaactgaactattcccattaatcaataaaattcaatagctcgaatataggtgtggagctcaataaaaacctagaaaattttcataatagttaaaaaataaatataaacaaaataaacgcaaaactatcaacaccacgccgaagtttgttgttcaacgccgtccgactgcacgaaaaaaaagagcaagtgagccacatagaaacagggaagtaaaaatgtaacaccctatcaagcataggcgtgttaacgtgattttaaacttactgtacagctcgttgctaatcaacgaggttattggaaaacgtgattaattaaaattttgcttcttaattaaa

SEQ ID NO: 138236 - DNA, 609 bp, Cannabis sativa
attttcatgcacattcatccacgttcttgaacaatcttggattcaaacgtgttagagtcatttctgggttgaaataagattgtgtttaagcttaagagactcctagaagatgtttggacgtaaagaatgaaagctttaaggccctaaacaaaaatcaccattgttggactccatttttaacagtataccggcaatgaagaagaaaacaacttttgatcgtattctttggtgacttatggtcggcttgagattctaagcactgtaggaagcttcaccaatcaaaataatgcgtgaaaagcaactgtataaggagttggggctcgccgtcgccggagaagaggggttcgccgcgtaactccggcgaccacgatctgggtagttctgaggtgtttttcccatctttttttatagattttgattctacatattattttagggtgtttggtaaagtttcataattttcttgcaattatttgatttattatgaattatttgatttatgtgtttaattaattaggaaaaatacttagattactcagaaaaatctaggtttattttatatgattagttatgagatataaactgttacaaaattgatagatttgaatt

SEQ ID NO: 138237 - DNA, 590 bp, Cannabis sativa
ttagggcggtctttcacaataaatacaattttgctagttggtaaatttttgtatgaataagtataatataaaatacactgttgatatgtgttctggaagatgtatactccttaaatggaaaggatcattcccaaggagtccgtacaatgtgacaaagataaaatttaaacatgcacaaatagaaaaagaaatatatacatgtaaacacatgaaactaacaactaccgagcttggtcacgacttgccaaagcttcatatgcaggtttgagacatctgtagtaagattgattaaaactaatgttaataacaaataggaacaaaactaaaaaatcaatatatgaagaaaattcaaaagatataaagtaaacaaagaaaattgcaaaagaatgaagaaaaaatgcaaagcaaaaaaacttctaatcatccaattaaaatgcaaaatagaataaaaattaagataaattaaaaaattaggaataaattagagaagagccattaggctgccacatcaactcctaaaaacactccttttatttatatatatatatatatattgatgattgattataaataaaaaaaaataaatattt

SEQ ID NO: 138238 - DNA, 822 bp, Cannabis sativa
  modified_base (49)..(53): a, c, t, g, unknown or other
tataataggaggatgttgctaaaccatcattccacttaaatttagctannnnnttattattttggattatattaaatgtataactaagcttaccctaaaattcaatttttaagggtataatcaaaagcccgtattaatgaccatgcccgtctatcctagtatagtgaacactttagaaattttgtctaaaatttcatagaaaacggtcccactcttacattcacataggtaagtctatcaaaaatacttctgtagcttggtactccactctacttggagtatggaactcattaaaagcttctattaactcacaagccttaaattgctttaggatttcatgcttcactttttgaataattatagcatgatttcacttttatcacttcataatttgttattattcattgaatttattttttgggatctccagtctataggtcatgttgctattatgagtgattcatcaatctaaggacatacaatagtcactttccttttgatgttttaagaattttctaaatctttcatcaaaagatcaaccaagttaacaactcctattgagagaaattctctaacagagctgtgcacctgttaaaaaatttatttatatatatatttatatatatatttattggggagagtctattaactttgaaaatgttggattttctttttaagttattttttgcttgactttgttttaatttagtaaactaatacatcaatctacaacttgttcaaatatataaatatagggatatgattttgtcccgtgatgtactttcacggaatgtatttcgtggtacattagatgagtctcag

SEQ ID NO: 138239 - DNA, 573 bp, Cannabis sativa
gcgaaaggcctcggccatctcagcagcttctgccccaagaattgagaaatcaaagtccggaattttggaaaggatagtgtaaatgtagtcagagaccgcctggtcatactgcttcttcccattatccttctcgacctccaagtcgcgagacatctcctcgaccttcgtctgagagttcttggcttcgatctcgacttgcgaaggtcttcgagctccttgtccttgtcagctgcatcctgttttagtttctttatgctctcctgaagctggacattctgcctcttcagcaattcagcttccttagaaccaccagtgacggctctcatgaacatggtcatcgattgcgaagccaactccacagagcgtggaacaagcttttcagaaggaatcctctccaccttggacatgaactcctcgcccgcgaacttctcctgcatagtcagaaagtcgcgggttcggacagctagctcgatcatggccttcttccccttgtcttgcgtgcccttagttggcctcttggaggaatccgcgataggggtgaccaccacgtctgtaatatcctggaaaataaat

SEQ ID NO: 138240 - DNA, 533 bp, Cannabis sativa
gaataagcgtccatgaagcttaatatttcgtgcccggctgttgcatcgacgagctgatcgattcttggaagtgtgaaacagtctttagggcacgctttcttgaggtttgtaaagtcaatacagactcgccatttcatgttcggcttaggcacgagtacaggattcgcgacgcaagccgggtagaaagcttcaatgatgaagttgttgttgcgcagcttttaaacttcgtctttcagggctacagctcgttctttatccatcaatcttcgttattgctgaactggccgtatattaggatcgatattcaggacgtgcgaaataatagaaggatcaattctgaccatctctgcatttgaccaggcgaaaacatccaggtttgctctcagaaattttatcaattatgattttacttcgagcaacaaacctttttcgattttcagctttttggcagggatatctggatcgatctcgatctcttctaattcttccacaggtccaacattgctgcttggggtccccaagtcgaggatcca

SEQ ID NO: 138241 - DNA, 535 bp, Cannabis sativa
actaattaaaatacatatacatttttttctcgattttttttcaggggggcgactgcccccccctcgctacaatgtgggtccgcccctgtatatacatatatatattttgttatacatgaacaatcaaaatgtttcccaaaggacctaaaaaaaaggtagtaaaacacaaaaatttatctcgaaatctaaaatattgtaattatattattctagttggttgatgaatatgaaaggtgggacatttgtgtgtatatataggctaagtttttatgtggttattgaagtgtttagaaataaaaaaaaaatgttcaactttgaaagacttggtggtgtgggaggaaaggtctaagaacaaaaggaaatttcttgtgtgttgccctcaaagagaattagcccacaaaatattaatatataatacatgaaaaaaaaaataagtgtctcttttaccaaacaagcaagaaaagagagaaaaagaactttgtgtattattgattcattgaaaaatgaacatagtacaatgaattggtttatatac

SEQ ID NO: 138242 - DNA, 1472 bp, Cannabis sativa
tatcatagtgagaacctatggacggtgcgagtatcttggctagagagcttcgatgcatggatgcactcatggatgcttgcgagcatgactcagcgggagttgttcgagagttgaaagtgtgcacgaggcacacagtcgcgcgaaaaatgagcccattgttactcggatggttggaaggctaaccttggcttagagaagtcaaggtgccgcatgggtgttccgctgcattaaaaggtgagcccgtgacagttggtatcatagccaagttcatctcagtgagaggtgaacgtggttggcctatcttagggaggatgtaggcgtgtggaaggatgctagaaagacaactaccacgtgcaattgtagagaggtgcaatagaatgtttgaaactcgttggcataaaacaagattgaggggatagtccatactgtatgcttggtacactaggccaagtttgcctgagtgacattgtaagccgcaagtggcgcttttgttgacaaggaagcttgttggcatgggtgtggaagtagtgcagggaccgtcagattcttgttagtcatgacagtggtcgagagttgatgactgagatggttcaaattgggatggacatggaatgcttcagttgctaaattgtgtgtcaagagggatgcacatggagaccaaggggcgaatgccgcaatcatcagaggatggttgtacttggaagtgttcgcatgcgagttttatttgatccatatggaagtgccgagacagttgagtgaaatgtgttggcttgttaaagcgccagagggtgtaagtcacacaaaggcatcgacagagatgcaaagttgtggaataaatgcatcaaagaagccagtagggctaggaagaccgagcgcaagtgttgagatggcgctagagtttgtgtggaagccagagggctgttccagcgagacttagtagtcatgtaagcctacgaaggtcaagaagggtgctagagtttgcatgaaggccagagggctgcatcattggagcttagtacattgggagagccaaaaaggcgtgatgcaagtgtgaatcagctggagggttgagtggttgtgcatgcatatggaaattgacaggggtgctatatgagatagttgactcgagagtcacatcttgcgggatgcacttttagatggcatggtgtgcatgaagagttggggcggtcaggcatttgcgtgtgggcatgttgtcgaggacgccaacatatgaagtgggggagagaccttgacagtttacttaacggactagggattcattacaagcatcgagatgagtatcatagagatcgattattgttcaggatgtaaagtcaagaagactcgggacagaggcagagccagttatctaaggtgaaagtctgtaggactcaggtactaagataacaccgtggcaatgttagcctaaggtgaaagttagcaggacgaaggtactaaggcaacattgaaat

SEQ ID NO: 138243 - DNA, 615 bp, Cannabis sativa
  modified_base (184)..(185): a, c, t, g, unknown or other
ttccaatgttgccgggcaccaaaatatgcaaaattatgaaatttctatatgtgacataaaagtgcattctgaattcaaataaaacatcataaataattcatttcaaaaaaaaaatcataaataattaattcaatttaataaataattttcataacaaagtcctatttatctgctaatttccaanntaaagctaagcggtctttacaccaaacctctataacaaatctttgtgtttattgctttttcattttgtttgtgtaacacgtggcaagcatcagatatatacgacccagctgtcagctgattattttttgaggtcaacaagtaataaatgtaatatatgataagaaaataaataagaaaaacttcactaaaactaataacaaaattatataaataagttaaacactagaaataatatgtatattttagtaaaaaaaaatcaattatttactgtattttgtaatattcagtataaaaaaaatattataaataattatgtatttttactacaataaatttgtaacgccctaatgctaaggcacgctacagtgctttttcaattattgtgcaatctttgctaatcaaagaagtttctcgaaaaacgtgtcaaat

SEQ ID NO: 138244 - DNA, 1601 bp, Cannabis sativa
aagaaaccactttcttggtaatttttccagcgactatgctaattccgattactttttcgaagtttgttgtcgatgccggaaaagttactggagtagctggcagtgtcagttaattcattagaattggcattattacctgaaaaatcactaagaaagtggtttcttcatcaagaaatttatttctttgtgatttttttagtgattttttcagcaacaatgccaattctaacaaattttttagcgtcggcaataactctgacgacttttccagtaccgacagctactctggtgatcttttcgacaccgcagcaaactccggtgacttttccgacaccagtgacaaataaaactacctaaacaaataaaaatattaaatataagatttgaaaacttaatttatatatatggtatatcaaataccatgaaaagaaacatgagatatgaatgcaattaaatgaacatgtccgtacctatctggagactttacttctctctgtgttatgtctcttgctaatttatagcttttcagattatcacttatggaatcatcttctgaatcatcacttctgtgatctagatgtgttttagtctccacccttcttggaggctccacctcaagctcagtttttggagctttatttttatctcagttagtattggcttgacttcaagcaagtttgtgaataaatcccataacacatttattaaaaatcacatcgctactaattatacattttctcattccgggctccaaacatcatagtttatatcctttgaccccttttgaatacaccaagaaaatacactttaaggcccttgcctcaagtttgtcttgcttgatgtgtgcataaaaaacacatccgaataactttgagctttcataacttgtgggcttccctaaccacacctcatcagtcatcttgaaatctagtgttgttgacggatatttgtttataaaataagttgcagtgcacatagctttcgttgagaacactttgggtagtccaacaatcaataacatgtacatgactctttctgggatggtcttgttaaacctctccgtgagtccattttgctaaggattcttcctcacagtcctgtgccttgctattccttctttcttacaaaacacatcaaactcatatgaacagtactccagaccattatcgattcttagctgtttcactttccttctagtttgattctcaatcattatctttgagtgcttaaatttctcatgaacttcagtcttatttttcaaaataaacacccataactttcttgagtaatcatcaactattgaaagaaaatacctgctcccaaagtgtgatgatgtcctcaaggatcctcataagtcactgtgaacgtaatccaatattcccttagtatcccttttgcttgttccaaacttgactcaacaagctttaccaagaacacaatactaaaagaaatccactttctcaagctttacttttctaagtaatctctgcttattcaattcatgcaactctcttttactaacatgactgtaacaccctaactagcataggcgtattacgcgatttttaaacatactgtgcagctcgttgttaatcaacgag

SEQ ID NO: 138245 - DNA, 1403 bp, Cannabis sativa
tgctagttagggtgttacaaggttagtccagttgtgcaggcacagctggacaaactaaagagtatgttccaagacatgccctggcaaagaaacaacgatcttgagctagaccgagcacgtggaacccctttttctcccgagatcaatctcctggcgttaccccacaagtttaaaatgccaacctggaaaatgtacactggaagagaagatcctctctcccacctcaagtatttcgagatgcaaatggatctgcaaggagtacgaggagatgtgtgttgcagaatttttcctgctaccctctcagaagccgctcaacagtggtatttcaagctggcccctggaaagttcaactcatggaaagccttctattcacaattccatgcacaattctcctcctctcgccaacttctattgcatctaggagacatggtcgaagtcaagcaaagaccaggcgagcctctccgggcatacatcagcagattcatgacggaggcgaccaaagtttcacgagtaactgaagatggaatgttgtccgcgatactggggggcattgaagtccttggtgaactttggaaggacataagaaagaaaagcccggtagactcaatgagcaattttgttgaccatgctgaaggcttcatcaagcttgaagaagctattcagcgagcagaaggtgagcaaaagcgtggcaagtcaaaagctccttccactggaacgttcggccaattcccccattacccaaataatttaagctcgaatggtaaacgttccaacaacaacaataggcaaggaaatgggaagaagggaacgttcaccggcaatactgagcaagctccctaggagaatcaagcaaagtacactacatttaccatcttgactgaggatatagaaagtgtctacatggccactcaattgatagccccgtataagaagcccgcacccatgaagaaagatgttagcaagagagacatgaccaaattttgtcgttttcacggagactatggccacgacaccaacgaatgcaacaatctgaggatggaaattgaattcctgataaggaaaaataacccacacttacggaagtatgtaaagaccgatcagagtcagaggaacgacattgaccaagacttgctacctccaccggtagacagacatttgcaaattatcattggaggtccacacatagctggagtaacaagcaaagctcgggagaggtatgcccgaacagcttatcacaagcaacaagaagttatcctggccatagaagaaagttagcccaaaatcccacgggcaagagggcctaccatgaccttcaacgacgaagatgttgtcaaaatcaggtttctgcacaatgacccattggtcgtggaggtatagatagcaaacaagatggtggccataac

SEQ ID NO: 138246 - DNA, 723 bp, Cannabis sativa
gccgacaaaaataggagaaaaaaaatttgatttttttgaccgtagatgatgatccaatggtgaaatttagcttctagtggtgatagccaattttttggtgcctaggcgggacctgctacaggtaactcggagcttatttttgtaactcccttgagaattaattttaagatcgacggcttcagaattgcgattaaaatctgatatgtgacttaatagagcatttacttatcttcaaaacgtaaattgaatcacgtcaattggatcaatattgagtgggttatggttgttttactgaagacagttcatgacccagtgtcaaggttgacatctcagtgcctaagttgacatatgatgtcaactggatgatgggtaagtataaaaatgtccaagagatgtactttaagatgcctaagtggtattttgacatcacatagtttgtttttgtattctagcaaagctagtcactagttctcagagatgttgttcagaagaaatgagagactcgaaactctttatttctgagtgagttcccatgttggaaatgagaaatgcgaagttatgaatctgacttctttgacttcatggatcttaatttattatgaaaaactagacagacggtcaaagcgaaatcagaatcgtataagtagaacccaacacattaggaaattgtgaacctgggcgttgggtactcattcccaagctcttaagatcttgtttttatac

SEQ ID NO: 138247 - DNA, 576 bp, Cannabis sativa
aacatccaatcgccaatacgatggcgcaaactcgtagaggcctgactaatccagaaaattcacagacgctggatcctgcatcgcagaacctaggaaacacgaaggttctgcctgctattaatcctggacagccggcgaacgtggggaatgctgaaacagtccctatagatgaagttgcaccttgtgtgcaagagactgggaataacagttccgcacccaactatataacacaactatttcgcctggaaccaatgcccagacgactatcggagatgccactgaattacaaaatctccgtgacatgcttggactcatgcagggtcataataatacctacatcatgatcaaaacgaactacgctctgcagtaaatctcgcgttcgacgaacaaaggcgtatgttcgccgaatggagagatagagagatggaggcattaagggctcaccatacatagatcgaagattttagtcggcatgctatcgtgctgatacgaagagcctaccaaactgtaggtcagcaatcgtcgaatgtcattcccctgggagagacggacgaggatccaacaatgaatacttcc

SEQ ID NO: 138248 - DNA, 1014 bp, Cannabis sativa
  modified_base (44)..(50): a, c, t, g, unknown or other
  modified_base (966)..(985): a, c, t, g, unknown or other
ggctggcacacctaaattcgaaaacgaggtaagattagtataannnnnnncatatgtgtttacatgtttagcgtacatgttaattaaacttgttagattacattataatagcggtatcagtatatttagtattatattggatatcgataaatgtatgttggcttatgtactactaaacagtatcacatcgatactactagagtacaactagcgtaccgagtataggctgatattgtggttgatagtaccatactacttgacagttgcacatcgataagactagagtatgactagcgtattgagtataggctgatattatggtccatagtactgtcgtttgaacattcttgactaagtatcgtgtaggtagcggggaggggttacggttaggggtatgagtgcctaatcttaatcatgtttacatatttgttatgattatattttcttactgagtctatcgactcacagatattgtttgtatgtgtaggtaagggcaaggctaaggttgagcagccttgacagtgagcgaatgaagattgtacatgtgggaatggttagacctggagcgtatgatctttgagacagcaggaatgatcgctaagcgacatcttttgtattatttacaatttttaataaactcgttgattagcaacaagctgcatagttaatataaaatcacgataacatgcctaaactagtagggtgttacaaaatcaaaatccctgactagccttcggacaaacctctccctttttcaagctcaacaggcctcccagcctgattgacatgtgcggcctgtccccttaccatcaattcgacaatatggggatcagttgaaagaactacatggcgggttcttttcgttttagcctggtttggatcctgaattgaataccacgcaacagtgaagaaaaattcaacttgtaaaggattttcattgaggatgatgttgggttttatgccctnnnnnnnnnnnnnnnnnnnntaatcagatttgcttattaatatagatca

SEQ ID NO: 138249 - DNA, 599 bp, Cannabis sativa
aaagggtaaatctgtcactgatcagccatgagtgcgaaggcttggcgatgcttgtacatgttcaggccacactagaccaagcgagttgggatctatcactgacgtattttgtaatcttattttgccgcttaggtcgacacgtaaaatggacttgtaatattttgtgaaaatatttacgggatcccgaagcatgtatcttttgattgtttgtaaagttaaaaattattacaagtttaattttcatcctgttgtaaataaagtttaaatttttccgtgcttacccttacagtaatcccagtttagaggattagggtttcataatctgttttcgtgacgtgcctaattgttagggcattacttctagggttgtaccctataaagctagcctattcatgtctgagtttggtgaacgtggccaggtcttggctgagtcatgggaccctggccgaccctttcaaggcttaaggaccttagttggcatgggccttggttctaagtgggtagccagttttttgtcctcttttgacttcggcaagaattcatctctgtatgcatataccaccttagtctcatacgtggttcctttggaaactctatat

SEQ ID NO: 138250 - DNA, 706 bp, Cannabis sativa
taagaaaattgaaggtttagagaatttagggctttttttaatataacgaaagagaaatagtattttttttataagatcaacaatatatttttttaagtctaaccgagtattttttcttttaaaaataaataattagattatttattattatttgttgtagatattgatagggtaatttggaacatatttaaaaaaaatagtaaatcaaggagagaaatttaaattaatttaattaatatatatatgcacttattaaaaaattaataaaattagagaattaacgagcagaaaagaatgctatgtcactcttttatacttcttctttatatatatatagattattattagttattctaaaaaaaagtaattattattagtaatctatatttgtatggaaatggtttcccacgtacataatcatttactttttcttatttagtctttctttgtcttaaattcaaaatatttaacgaagaaaaatgtatgttttgcgcagaacaaccaaaacaattgtgtagtgtaaattgtcatataatgatcataaattttattttttgtgatataatttatttataattaaaaaaaatattaatatatattataattaataattacttttactaaatttatttaattttgtgggatttttttctgctaatttaatatacaattatcaaattaaaaaatttacatttaatttttcaaa

SEQ ID NO: 138251 - DNA, 1981 bp, Cannabis sativa
  modified_base (1423)..(1423): a, c, t, g, unknown or other
aaaagcctgttaggaagcatgttagtagcgtgttagtagaataggtacatgtttttaatttccgaattcggggcattagtaagtttttcttgatcacgatttgaccagactagctcttggttacgcacgctattctaattagtatggacgtcaggcgaaacaccaggagccagggcaattcggttggatctaatggttgttagggagctcagaattcccttaaatatttctagccggtggtagaggtcttagaggtagggcacgtggtcggtgtgatgctaacctgccacaggctgcccaagctgcccatgattgggaaaacaggtttgcactgatgcaagccaggatcaatgaacaagatgaagagatttgatggttgagacagcagggtacttctgcaatccttgctccagaaataccattatatcctgcctctgctgtgcaggccgaacctgtggttgcagtgaaccggatggaacccctgtatgaaaggttccgtaagcaggaacctccagttttcctggggggtctcgatgtcatgaaagccgagcaatggctaacgatgatcaccagaatcttgaattttatgggtgtcaccggtaatgatagggtggcctgtgccactttccaatttcaagaagacgatctggtttggtgggacatggtgtctatgattcatgatgttattgcaatgacctgggaaaagttgcaggaactattcaatgccaagtattacaatgaggtagtcagaagtgctaaaagaaaagaattcacccagctgactcagaaagaaaacatgagtgttactaaatacacgactcagtttgatcgcttgacaaggttggcctgaggaatcgtgccaactgatttcagtaagaaatagaaatacctggatgggttgaatgcgaagatcagacacaatttaatgattactactgatgacaacaccacctatgcttatatggtgggtaaggcactgcgagctgagggcgcagtggagtgtaccctagagtctcgagggactccggttgttggcggggctcctactcctcctacatctagctttagtaggggaggtagtgactcgacctctgatcagaaaagaaaagcacatactgcatctagtggctcaggttagaaaaagtggttccgagggaaccagagtcaaggaaatcgtcagggtagctctgaaacccgatacacttacccagagtgccccagttgtacaaagcaccatcttggggagtgtaaagggcaggggtgctttcagtgctgtatgccagggcattataaaagggattatccccaactcaagattgaagcacgaaagactacagcgaaacccactctagccagggtgttcacgataactcaggctgatgtagaagccagcccttcagtggtaacaggtcagctctcggtnaacaactcttatttctctgtgttgtttgactctgggcccactcattcctatgtggctgctagaatttttagtaaattggatagaccgcatgatagttatgaaataggatttggaaccctactgcctggcggagagttagtcatctccaaaaggtggattaggtctatgtcgatcagaattgaggatagggagttgagtgctgatttaatataaatgaatttagcgaattttgatattatactagtaatggatttcttgtccaagtactcagccaatattgattgtaaaaggaagacggtgatcttccaactagaaggaaaagaacaatttgtttttgtcagatcggttcagggatctcgaatctcggtaatggataccactcagcctgactctgtttgttcagaagacatcaatgtggttcaggaatttcttgatgtttttcctgatgaactttctagtttaccaccacagagagaaattgattatgtcattgatttggcacctggagtagaactagtttctatggccccttacagaatggctccagcaggacttaaa

SEQ ID NO: 138252 - DNA, 823 bp, Cannabis sativa
atttaggatgtttaaacaacatacattgtagtaaatctagatcctggtaaaataatccccaacaactagcctcagagccatggtaacgatttactttcatgagatataaatttaaaatgatgtttatgttgatttggatgtgttcatgttgatttatgtgcatatttgatggttgtatggaaatcacaatttatgatgataaaaaattaataaatttaggcttttatagaacttaatttggattttttatgaattagttatgattttttaaagtttgaaaaatatataagctagggtttctagcctacgcgcgcgcatggaggggacatgaccatgtcacgtgcggctcgctcggacatgaggcattcagacaaggccatgtccaaattttttcccctcttgaccgagatttgtcctaagtaggcttctagcagccttcccctcgctcacttgtagcctcatgtgcgcgcgggaagtggctgattgttgtttattaaaggtccgtcaagccagtgaccccaatactgggttttcttggggcttgcaatcttcccatgcgatgactcaataaatccttgaggacttaatggttcttttacggggcgatgattgattccttcttgaggattactatcttcggagtcatccattacttttatgtcaagaggccttttctaggctttttcagagagggtctcaatgaaggcaccaaattgttagcccaggttttcgttaattaaatttgagcctcacagtgataattttacacagaacaaataaaagctgtagaaaagtaaagaatatgaacacagggtttttcacg

SEQ ID NO: 138253 - DNA, 535 bp, Cannabis sativa
taaaataattccaacagataaaccataaacccttataaattgttgattgtggagccactaatcatatttgttcttctatgaagaacttgaatcttcaagggagttggacgatggtgaggtcactatgcacgtggggaatggagcacaagtgttttctaaggtggtttgctaaatcggtctaaaatttaatcataaatttgtgttattgaataatgtttattttattcctaaatgtaccgagaacattatttctttatctcttttgcatgaacattttttttaatatttgttttattaataatgagattattatttccaagaattgtaagcctattagttctgcaaaatagagtaacagactttatgggatcaagcaaagtgagcaattaattttaaataatgaagtgtttagagtagcattggctcaataaaataagacgtaaagggtttcagattatgatgaaacaatctatgacatctatgttggaaattattttaccaggatcttagatctacccacaagtatgttgattaa

SEQ ID NO: 138254 - DNA, 749 bp, Cannabis sativa
  modified_base (525)..(528): a, c, t, g, unknown or other
tgttccaggccccgttacctaaattccgagtcaagatctggatcactgtcacgagtttcggtctggttctagttcaggtcctaggtcctatttcttagttttgtttgggatggagacgggggtgcggttctaggtcccgaccctggttctgtgtccgtagtctggttccatgtttaggtctgagttttggttcgagtttgggtcccgagttcaggtttgggttgggatttgggtcagtctgatttggagtctgggtcctagtccggttacggttctagatctaggtccaatttcagtttgattccaagtccaagtcctagttccagtcccggtcgacttttggttttggttcaaattttgggtcacaaggtacgggttcatgtccccttttgcggttgggactgggtgtaggtgtgggtgtgggttcgggcccttgtcacggttcaggtcaagggctgggtctaaaatctagacaccgactactagttttgtccaagccttgggtctagatccagatcccaatcnnnngtcccagtctagttccatttctagagccgggtcatgagctcggtcttaggttcaggttcaggtcttggtcgggtactaggtccgagtcctagttctgtttcccaggttctatcctgattctgggtccaggttttgcttattgtgttggttttggtcccggtctatgttggggttcgagtcttagtctcagttcgggtttaggtctctgtctgggttttgat

SEQ ID NO: 138255 - DNA, 1079 bp, Cannabis sativa
aaaaaagaataaaagaaacccaaatcttcaattatccatcaacaatacaaaatttatttaataccctaaaacaaatccaaaactttccaagaacataaactttatacaggatcctaaatcaaaatatattacaaacaaaatacaaatgcaacaagtgaaactaaaacccaggtgaagaacagatgtcagacttgtaaacaaacctagaattaaaaactcaaacccaaaaatagaacaaagtccacaaatctaaatgcccaaattcaagctcagacctgtaaacattgagggatttttttaacaaaggtcacattcagataaaggagaagaacccacaaatgacatactaactctaaaaaatttctaaccctgtcgattcactttccaatatggtggtcctcttcggcttgtcgatcctcattcccagcacgatacttgctaaccctttcaaccccgcatgttttgacttcgatcctgtggtcactcgccggtagatctcgagtgatgagagattttgggttttttaattttttacaatttggatatagagaaaaaaaggaagaaaaagaggatgagatgtggtgaaatagggctgttgttgatggtgaggaggaagaagatgatgacgatgggggatgttcgcaggtcgacgctgatgagggtgaagaacgatgatcccctggttcgcaccccttgttcccacaatacgatgagggagaagaaattgacccctgaatcgcagaagagaagggggagaagaacgagattttagtgttctcacttctcaaattttctaggtttgtatttaatttaattttaagtgtttatgtttaattatattgtattctcacggttatataggatttttaatattaatctattttgtaggaattagattttaagtttatgtgttttttaattttgtaatttttttaatttaaaaaataacttttatttttattttttatacatttcaaatatattatttttattttaaaataatttttaaataagttttaatgaattttaaaagggaattttgattttatatacttaaaatattaaaaaaatttattatt

SEQ ID NO: 138256 - DNA, 524 bp, Cannabis sativa
gacaatatcatactaatgttggagtcaagttgaggtggtggctcaacaaggttgaagaatggggcccaacaagtggtatcagagccaaaaaagtttaggagctttcggataatgggctgaatttgcaatgtgtggcagaagtctttaatgtgatgacatcgtaattaaaaatttgtatggtgcattgtatcgtaagtctacctaatattgaggtagtcaggtagcgtgttccgttaatgattacaacggtacaagatggagatcgttgttaggacctatgtcaaaagtcttcctgacaaagttgatgccaaggcagcgagttccattagtgttgattatggcagtgcaaggtggtttcgctagaagggacgccacaagtttgtggtccttaatttgaggggaggattgttgggtgtgcaactaaaattccacattggctagaaataaggatgggcactactccattagtatgagacattttgaagggataagttgaaaactacccatttttattacacattaac

SEQ ID NO: 138257 - DNA, 885 bp, Cannabis sativa
tgtagtgagccagcacctccttgcccttcttgacctcaggcagcacgggcatgggtggagttggtgcctgcacccgttcaggaatcctcctgaccagtttagccccggatgttggtggcccagactccttagacttggcagatatgggagtggaaggatttgcagtagtcagctcctcagaaagatcaatgatctcttcaaaaggcatcttctctgaagacccctctccggccttggacttcttggccgaaggagaagcactagagctttcgctcatcctcttccttaaggcgtccatcctctgctgacacatgtttgcacagagtaaaaacaacatggttagcaaaaaccaacaaaaaatacaaagtatggaagccaagaagctgaaaaaagaagtaaagcgcagagtgaatgtccaaccagaaagtcagaagtccatcatcacctgacatcgactttatttcagccataacaaccttcccttttccagcatagggatgggatggctgaacaggtgaaatgggatcccttatgcgattggcgtgttcaacaggcctgggcgtggctgggagtttcttcttcctcctcaaaggagccaccttctcagcctcagcctcagcctcggcttcatcttcaagattcatagactcctgagcatactgatttgcccgagcacctcccttcaacttagcctccagcttaagttgaatcagctcattctccttatgagctcgttcaggccgagcagcggcagattcccccttcttccccgtcacggacttagaagaaaagtcctctaggtagagcccgtactgcaccagatttgcgtcggaggtcaactggataatatccctgtcttccgccggcaaccgggcaagcttctga

SEQ ID NO: 138258 - DNA, 1011 bp, Cannabis sativa
agggtacttgttcagttttggtgtgtgaatccagagggaaacactacaacagatgggttgttcagtgcgaagacttgcatgattgttgcaaactgcagattgacaatatgtaggggcgtaggctgagatcaagactgggcttgtttgcggcatgtatgggcatgttttgtgtttatggggacgttggtgttggatggaacactgtaaaccgaatggttcattgagcatatgtcgaaaggagagatatcggattgggatgacttcaagttttaagagtaagactgattgttatcaagtttgtcgaaagttatcgagtcatcagaggatgtagggttgattttaggagatggacctgtgacacagtgttagtgagccgacacaagcaggagccatagggcaaattcgtggttttgggtgattgttagatcattgaccacgtgaaagaatctcgaaggagcacgtatgtagtgggttagaggggccttttgcatgaagtcgtgggtgtacgatagggtcggagggccaatgttgagaacttcacaaagagattttgtgcaagagtgcacttggtgctgcattgggtgtagttagcttgcgagcctcgtctaggtgggacgcaccaaattttatcctgcgataggagtgtctagctcgatttccatcaggaggatggtgcaccatggagttggcatgtgaagtttctggagggacttgtctagggggacttagcttcagttgaagcgtgttctataggtgccattggttacggttggtttgcgaacctcaccctgaggggtgcaccatacttagtccttgtcaaaaggagtatgcattggacaattggcgggtgagctactataagaggatgtgttaactttagggtcagtgttgcaaggggtacttggttgactagagggacattgtgatggactaagaggagttcatgttgggggaagtattctagtgcggaggcactactccatgggagatttgttggaattattttaccag

SEQ ID NO: 138259 - DNA, 532 bp, Cannabis sativa
cctgaaatttcacaagagaaactaaaacacagtaacttgaatcgcacaaaagttgcacaaaaaattcataaataaaagaagtgcataaatcgcattaaagtcgcaaaaaaatttaaaaacataataaatttattttgttaagaaataacttacagcatcgtcgagccattctccctgcaccatcagtttgacgaaccaggatcgattggctgggccagtgtgaacatccctaaggcggccgctgtccctcgtgtaagtgatccgcttatagaaaaattttaacagccgcgagtccgccgatttcacagtgtctacttcaactggtccatgtcgttgtttcttattcccctccgtgtagtcctttaagaaaactggcttccgttttctcctaaccctggagaagtgcaccccagcaggtggcccgtccaactgttgcacatcttgagattctgtatcacccaggactatcacaatggcgtttgtaggagtacaaggaaccacatctacgttgggttcccaatcttccagatac

SEQ ID NO: 138260 - DNA, 743 bp, Cannabis sativa
  modified_base (461)..(464): a, c, t, g, unknown or other
taacatgccatttatcataaatatttaattcatatcataacaatgatcaatagtagatcgacctaaatcctgagttatcatgaacttctgatcatgttattagtttcttcaattcactcgttaaagtttcttagagaagatgattcttacaacttctgttttgggaagctaatagtgtggatggctgggagcatgatttacaattatggaatcttgactttcctaaggatcgaatgctggttccctttaagtgttaattttagaaatggaatgttgtgcacaaatttaaatgggatctaaattatacttgcactagtgaattaatggtactaaaagataaagaagtaattagaagggtaaaacgataatttgaccaaaactaattacgaattaaaacatagaagactaatcactagaattgattatatcaatggatacttagtaaatataattctataatnnnnaagagttcaattccatatttttagtggagtaaccatggaattaataaacaagaattatttggttgatgagactcaataaaaaatctagtttattggagcttagaattttaggtctacggtcccgtgaatcgccaccttaaaatactatcaagggtagagataaagggtagtataatattgttcggaaaaatctattttgaattggtaaaatagtaattatttattttttgtaataaataagtaatttttcaaataaattaaataggaaaaagataaaaa

SEQ ID NO: 138261 - DNA, 886 bp, Cannabis sativa
  modified_base (478)..(485): a, c, t, g, unknown or other
  modified_base (833)..(844): a, c, t, g, unknown or other
attaattaaataattaattttaaaattaaacctataaatttgaaaaattgggttttcaacaaacctaaatatctattcaaaagatgctaacaatctttcaattttaatgttattttaaaataaaatttaatatccaataaaataaaatgataaataaatatcatcgatatttaaataaaataacaaaattttgaaaggtagcaaaatattttgttacaatttaaaatttcttaattaaaataatcttattttaaatttcaaataaggtcattttataaaattaattaaatagtttaaaatataaaatatctcactttaaattaaaaaataagataaaataattaaatttttaaaaaataagataaccaactaagcaaaaaaatagattcttacctattttcaaagtaaaaaaaactactaatgtctaaaattaattaaaaaaaattaattaatttaaatctgataattagatttgaannnnnnnnaataaaaatctaaatacaaaattatacaaaaaattcgaaattaattccatgaaaaaccatgaaaaattgtaaaaattgaaaaaaaattgcatttggctcggatggtatgcattgcataccatccgcgcgcatgcatcaggcgcattggggctgaaaagtcgcacaggcatgctgctagcagcatatgcgcgcgcggaaaagggggattcagaccaagtgaaactcggtgtccgtgcgcgtgtgtggtgcacacgatttcagatattttttcaaattttgaaaaattcattgctaattcaaataaaatcgaaattgagttctgtgaaaaagtaaattgcttaatttttnnnnnnnnnnnnaataaaaataatttcagaacgaaaatccaattattttacgta

SEQ ID NO: 138262 - DNA, 658 bp, Cannabis sativa
acaatggataatgattctatataacccaccattgaagaaataaaggcaagtgcaattgtattcatttgtgtcattctttgggaatttttaatgtttggtcactaaggaaaaaatatttatgcagtattgggattagatcatatgtttttacagtgtcattttgtatgctttcaatgaagggttcttcattgaagggaattgtaggaactctcattggatgatcaaattaaaattattgttttagcttgtctaagaagatagtagagacataagaattgagagagatgagagagtctagagagaataagaaattcatatattcttcattcattggctaagtgagccaataattctatttaacaagtcaccactcttactcttcacaccaacaaccaaatatgttcttacactaataaactactaaactaaagagtaatatttgttattattttctgttcttttatattggtttaagacaggggtgtattagcttgacttagcaagtctttgaatgatggctggttcaagagtgagatgtaagaggggtagctcaatgattaggcatgttgtttactcttgtaaggtttgaggcctcatcatctaattgtaaaaaaaaaattaattatttaaaaaatattataaggatagaattttaatt

SEQ ID NO: 138263 - DNA, 575 bp, Cannabis sativa
cctttgactcttcaaaatatccttcatttctctttttcttcacaaaaacttgagaacatcccttgcaatggtgattctagaagggatttcaaatcttggttgcaaggtccgaacaaattctttgaaaccttccccctcgacatgtcggtagggcaactcatcagtcacaatatactttgccaaggcaactctacatgcttctttgttgaaagcaaccgcaactaaacttttttctccttctttaagcggctcgaaacttagcaccttctgcttatcctcatcatttctaaaagggctttgcttacaagtatttcgaaagtggttgtttaagtgactcgtcccgttgctagaagcacaattgaactcattaccacaataaatgcacatacacttaggagcttcattgggatccttaggattaacttttggcaacttttcaaagtgcttccaaacatgtgacgattttctattactttttccacttccactaccactaggtttagccttaggaggcaaaggaggcttttttctatttgttgttgctttctttgttgttttccttttccttgattgat

SEQ ID NO: 138264 - DNA, 633 bp, Cannabis sativa
aagagcttaattgtgaagaaaaagttttaaccttgagttaaaaagtaagacctgctgcccgggttgaaattccttcctaaccagatttctgtcatgccatttctttgttttttccttgtatatctttgcattctcatacgcttcgtttttgaattcttccagctcatctaattgtagcagtctcttctctcctgcagctgctaaatccatgttcagggtcttcattgcctaataggccttttgctctaactccaccgacagatgacaggcttttccatacaccaacctatacggtgacattccgataggtgttttgaatggtgttatgtaggcccacaatgcatcatctagtttccttgaccggtccttcctcgatctttgcactgttttctccaatatcagcatatcttcccgattagaaatctcagcatggccattgctttatggatggtaaggtagagcagtcctatggcggactccatatctgggtagcagagcttcaaactgtttattacaaaaaggactcccttcatcgctaaagattgctcagggagttccaaaccgagtgaaaatgtacttttgaaggaaagacaaaactgtcttaccatcattggcttgtgttgcagcagcttc

SEQ ID NO: 138265 - DNA, 1022 bp, Cannabis sativa
  modified_base (157)..(165): a, c, t, g, unknown or other
atcaagaaaaaaatatctcctctactttgctactctgtttttagacttagtcatattcttagaaaagtagtattttttgaaacaaacactttcttatcttaatgatcgtaggatggtccacccctaatcacttaaaatagctatcaaacatgcaaannnnnnnnnacagttctagcttttcttaaggtcgcgatcaggagacccatgaatctagtaatggtttacactaagtatacaaccattccatcattctaaaattttcctataactagggtatttccctagaaggacttaggcaactattagtaactaatcatagacctttcactatcattaacatgaaaattgaatttatggggaggtaagtttggatacaattcgaaattcaccttaatgatctttgaactacatatccaccaaatatttctccacccctagtagttctcaagatcgccaaccacttaccttaatagtttttcaccattgttagaaatttatgatttttcttaaacatttcaaatttcttggcctaaggtaaaatctagagtgatcgtcttaagaatatgacgataactcatatccacccctgaatgtacatccatattttcgaatatagatgatcttactttcaagtggatatttgcatattttctctttgcaaagaatcatcttgtcaaaactgctatgaacaagatgcaaatgccatatatatcttaatgtgctgtggtcttttgatgacttaggtctagttacaataaagagttcttagaatagtccaagtagattctggtcacagaatacaaaactcatattccatacattaacatacaatttgtatccattgacagaaaatggatattaataacttgtgaaattcatattgtattttctaatgtattctaagaaactgaaataaaaatatagttgcagattagagggacgtccatcagatggtagtaaattattgattgtgtgatagatttgcccttggcttcggaaagtatatattcctttattccttc

SEQ ID NO: 138266 - DNA, 1087 bp, Cannabis sativa
  modified_base (804)..(804): a, c, t, g, unknown or other
aaataaattagtgggatcataatctcacttattatctaattaagccataatataaatataaaccctaattatttaccattagacttattggaatattactgtacatgatacttgaaataatatttcaattattttttaccacgtttaaatttttcattaaaaaatattaattaaattttaacaaaagtctactttacttttttttttaaaaaaatgataactttaatgtcaagtatcacattgttataactaaagagcattattattgggcactagtggtgcccaacacctttgataagtgacaccctacgattggttatcgatatttcctgaatcttattttttaaagttacatggaacctgctacttaattacactaatagtggtatgatactagtaaggatgtttgccttttagcatttctcataattaaaatatcacactttttatattttttctttttttaattaagatattaaaaaataataaatattttttaaaaacatattaattaataataacagaataaactaatgaaatatctcatatgtcttaaaaatattaaaaaaaaaatatttaaaattcgaaatgaaatctaagattaagatataaatttgggaaatataatagaaacgactacaagtgaactacgataatgacaatggatgagatacagtgataacgggtgagatatggtgatgaaaataagtgagatacaataatagtaatagttttgaatgatcgagatataaaaataatttcttttaacaaaataattaaaaatactacatataataaattttnaacttcttaataaataattctaaataataattaataaaattttacatttaatttttaataaataaattattaataataatatgaaataagataacatacttatacttttactatatattagaattatatttttaagtaattatttattataataaaaaaaattaaattagccacgtgaaaagtaattagggaaatttttatatatatacattatatacattaatattacagaaaaaacgttaaatgaaaacaatccatgtgtatgccgtgacacgtcatcaag

SEQ ID NO: 138267 - DNA, 569 bp, Cannabis sativa
tttttttagtgcaaaaacaaaaaaaaaaaaaaaaaaatcttaaataaataaaattgttatgctacgaaatttatctttacacaagaaaattaaatgggtaaaaatttacagcattgaatggcataagtcggaatgttatttgactctatgggcacatttcatgaaatatatatatatatatatatatgtttatgaaaataaaagaattttgataataaaaatggatagtgatgaacaaattatatgtttcactcagtcaaatctctcatatatatatacaccacttccttgataatataaaagaaagagactgagtatatacattgggactaaagagaaatgtatatgaatatatactgataagatggtacttgaatttcatacaagtgcatcggttcggtaagataaaattatatacatattcataacaaactttataaatacattcatatatatatggaacaaacgtgacttttttctgttagaaataattggggtcacaattgtatatatcaaatgtgtgttgggtcatcaaatatataagtcaaatttatgtgagatcggaagag

SEQ ID NO: 138268 - DNA, 655 bp, Cannabis sativa
ttattattgtgattttggtttaagtctcatttattacgactccacgtcggttgactaaaaatccagtcaacatcatgattatattttattgtgctaacgacactataagcatgaaaaattatatatatgtatatgttctggacttaatacaatttatacattaaatataatcatgaaatgaatcatctgaatcatgtcacataaaacgatttttgatctttttttaattagtaaatttgattatattgaaatgagttttatttagggcagacagcctaacaattaattcatggtcaacacatggttttattaattaatgggtcaccctagattaatttatctttttttgagtgttcttttgacaaaacctaagttaattacttatattattaaatgtatattagggctgttcatataaaccaagaaatcgcagtttaatccggaccactacaattcgaaccattgtaaaccgtaaccggagaaactgtttttggtggtttggtcaattcggaccgtttacgtcgtaatggttcggttgcggttcgtaataaataattaagagttacattggaccggactgtttataataaataattaatttatacattttttatatgtgactatatgtataatttagaacttttttgtgtgtcaa

SEQ ID NO: 138269 - DNA, 797 bp, Cannabis sativa
tttgctctcaagtgttgattggtgctttatgtgtctctatgtgctctcttgttcgttctttgcaaattattttggggggcatattttgaaaaaattaaagaaaaaggggggcttttttttcgattctttggtaatgtttttttcttttattttttcttttatggaaacatgtttttattgcattctatatattgtgtttcctttatttttggcgattttttttttgtgttttaggaaacttgttcttaaataattaatttttttgtggtttcctttttggtggcaatttcagttttggttgggattttaattcttagattttgtggggatatgttgtttcttttttacatttaaggtaaccttgaccagtttttgaaaaatctttttggtttccttcttttctctccccacatggtgtctaaggtaaggaagttactttccattttcattttttttttctgattattgggtaattaaatttgaaatgctatatatgttcaacttcccacttacccaggttcacctctattcacacctctctttcaattttttctcaaaagtccaatcttttcaagtgtgagagtgtgtttgctttttagggtttcaaagaagaaatggcaaaagtcaaaaatgctcaaccgtccaagaagcctttcgtggctctgctgctgcatctacttcctcttctgctcctacagaaatgggtgaattcaacttgtgtttgggaagaatggagacaagtcaggccttgcttcttaggaggatggacaacttcatgaaattcttccgatccaatg

SEQ ID NO: 138270 - DNA, 662 bp, Cannabis sativa
gagaaatggacatctatagcttctatttgttagaagtaaaataatggatacatgatagagtgctcatttaaatgattatatttagttcactaaaataacatttatattaattaagtgtttaaggacaaaatacattgaaagggtaaaatggtaattttagttcctactcaatgtaaagtatctacagagaattgttgttgaatttgatagaaaaatgatatcttatatcgtatctatatttagaacattctttgaaattatgagtgtaatgttaaatttatagtggagtcatgagaaattaataagtcaataaatttatcaaagttcaaatctatcttattgggagtctaaattttataggctcgtagcgctcacattatccgtagtaaatatagtaagtcttagtaaatgattattagttaatcaattaaaatttatattatttactttgtcaattaagaaaaattttactcttagtgaaattagaaaaataggagaagagaaataaataaaagggtaattttattagtatttgcattttgctttcaagaaaataaaaatacttaaattattttatttaataatttggtgattattaaattaaaactagtacttaaataaaaaaataaattaattctggtacgtaaaaataaaaaaaaaaa

SEQ ID NO: 138271 - DNA, 542 bp, Cannabis sativa
aaattgatcacgaaagtgaagaagaatcaacatcgaatgcctccataaaaatatattcctcttttgtttctcaagatgggctcgagcaggcctttttcgttgtgaatacaaccaaagggacgacaaataacactatggttatgaacaaggaaaaaatggagaccacacctatgattggttcaaggtgcacccaagatgaggaagacatcaaccccatcttggatatattaatttgggagttcttcacatctcaattgaccaaagaatggccaacaactactacaacactttgttgatagtcaccaagaaggcctcccctattttaaagttgaggagatgttgaatctcctttgttgttaagccgaggagatgacaaaggcctcctccaatgtgaagctgatgagatgatgaaggcctcctctgctgtgaagcaaaggggatgatgaaggcctcgtccattgtaaaactggagagatgaagaaggcttcttctgtggtaaaattgaggagatgaacaagactacctctactgtgaatgcagct

SEQ ID NO: 138272 - DNA, 1303 bp, Cannabis sativa
  modified_base (1163)..(1163): a, c, t, g, unknown or other
gaaaaggtgagcccgtgacactgtccaggccgaacccgttgtcgcaatgaaccagatggaacccttgtatgaaaggtttcgtaagcaggaacctccagttttcttggaaggtcccgatgttatgaaagtcgagcaatggctaactatgatcaccaggatcttgaactttatgggcgtcactggtaatgatatggtggcctgtgccactttccaatttcaagaagacgctctggtatggtgggacatggtgtccatgattcatgacgttactacaatgacttgggagaaattccaggagctgtttaatgccaagtattataacgaggcagtcaaaagtgccaaaagaaaagaattcacacagctgactcagaaagagaacatgagtgttactgaatataccactcagtttgatcgcttggcaaggttggcctccggaattgtgccaaccgattttagtaagaaagagaagtacctgtatgggctaaatgcaaaaatcaggcatgacctaatgattactaccgacgacagaaccacctatgctgaaatggtggataaggcactacgagctgagggcgcagtgggatgcatagttgagtctcatgggaccccggttgttggcgatgctcttacccctcctgcattaggtcttagcaggggaggtagtggctctgccactgatcaaaaaagaaaggcatctactgcaactggtggctcaagttagaataagacattctgagggaaccaaggtcgaggcaatcggcagggtagttacgagacccgatacacttacccagagtgccccaatggtaaaaggcaccatctggggcagtgtagagggtaggggtgcttttggtgtggcatgccagggcattacaaaagaaattgtccccaacacagaactgaagcaccgaagactgcagcgaaacctactccagccaaggtgttcgcaataactcaggctgatgcagaagccagcccttcagtggtaacaggtcagctctcgatcaataactcttatttctctgtgctgtttgactctggggccactcattcttatgtcgcagctagaatttttagtaaattggatagaccgcatgatagttatgaatcacggtttggaaccctattacctggcggtgagttagttatctccaaaaggtggnttaggtctatgccgatcaggattgaagatagggaattgagtgctgactaaataaaaatgagtttagcagatttttatattatactgggaatggatttcttgtccaagtactcagcaagtattgactgtaagaggaagatg

SEQ ID NO: 138273 - DNA, 648 bp, Cannabis sativa
atttcataaattgaagaatactaattagaaagaataaatattcattttcaatagaatttaaaggatacttagagtcaatgcaagagttttttaagttgcacttcaaaaaagtggatttccaaagattgacttttcaactattttcaacaaagaacacatgctacgttgctaaagttatttatttttatttttttttaaaaaaaattctaattagctactttaattggaaaaaatgaaaagtgactcactactttagaaacttcttctattatgggatgttggaggtattcttaataataaaaatgataattagaatttttgtcccctaaactttaatatgtaccaaatgatacccttaaatttttttggctattgaaaattctcattgaactattgcgattgttaactttaaggaattttctctaattttatttaattttactaattcagtgattttttatgtactaaatcatgttctctagactttaatatctaccaaatcatgctcctgaactttgacatataccaaattatgtctcataaacttttatcaatgttaaaccttccttactataaaattggacaaaagtccttaaatctaacaatcttaatacttcagggaggattttcaacaaccttaaaagttta

SEQ ID NO: 138274 - DNA, 712 bp, Cannabis sativa
gacttttaggacaaaggtccttgagccttggtcaagctttttgtgtgttattcttcttcttcttctctagttttcttgtaatcttgatgaaatatttctattgtatttttgagtattttgattgtaatcctcctattctctcttgtaatgagaacgtttccaacagattaaaccataattaaccacattattttatatcacatgacaagttttatgagttgtggatgagctgagtagatgtaattagttatttaattaatttgttacattcactattataaaaatagactttaatgactcactttgagggactctaaaactatttactcaccttttattgtatgtcactaatgggggagactagaaagatagtattattagtgaccctcagtgcgtaaaccctattagagtctctcaacacgtggcaatgtatacttttagagtcaaactatatcaaactgtaaaagtagcagtaacccgcgaagtgcatcactgtatgcttttctttttattattattattttttatatatagttgcactaaaacaattgaacaacctgcgaaaccaagagctagccttgtcagatcgcgatcaagaataatttactaattaccgcttactttagaaaatgaaacatacacatattcaactatcagactactaacatgattcctaataggcttttcttataacatactaataaaataaact

SEQ ID NO: 138275 - DNA, 501 bp, Cannabis sativa
aaatattgattctggttatttttcttttattttgttatatttctccattaatttatttcaattctaaatactgtatagcaaacgtgtcataaaggtagaggatattcaatccaatctaattgaaccgaattacaatatttagaattaaatatttaaataaattagattgtaatatgttgaattcaatccaattcaatctaagtacaaaaaattaattgagaactcacaattaaaattcccttatggcacgtttaccatacagttaaaagttaaaaaaaattaagtacaaaaagggtagaggacattcaatccaattcaatctaagtacaaaaaattaaatatttaattaattacaattggaagttaaaagttaaattctaattggattgtatcgtaattgaatattaaggaaaacttacaaaaatactagaatttgagttaacttttacaaaaatattgtcacacgaatttttttttgaaaatactgtgtttttataaaac

SEQ ID NO: 138276 - DNA, 593 bp, Cannabis sativa
gattgctacaacaagagacaacaagagtaccgctcaagagtaccgcttataccgcttacagttaccgcttacagttaatatttacagttaatattactgtctaaagacttgatattaatagtgtgtttggtatcttgagatgggattgccattatttgaacttattattgtgttatatggattcttttgttaactttgtttattttgttctatttttagctcatgtttatctaccaacataaagttaattatcatgctaatgagataaatttttttaggtaaaggaaagagacaaatatgcagccaaataagctataaagaattaaggaaaacaaaatactatatgttcacttatcaaaaatcaaaaagaagaaacttttggagatcattaagattttttattctgattttataaagtttttagttgtggaatgattttttgtcacatatggctgcaaaattaggaatagtattgaaagctgttaaagatatatgttgtgacaataaattaatcaggttgcattttagtaacagcatgaactctataaggtcaaaagtattgggtgtacatccaaagtcccacattggctaga

SEQ ID NO: 138277 - DNA, 538 bp, Cannabis sativa
gggtacctgggcgagctggactactacattcccgcccacgataatcgtgccacaaaccttgacaaggggatgtgggcctggttgggggcccacggcaagcaaggggcgctgatgcccttgcacaagtacttcaaggatgtggcggacttctttggtctcagcccgacccagatcactcctaagggcattaagtatttatccaccctcttcgtcctctatgcttcccaaggatggggtgctccttctccccacgaggttgcctgattctttgatttgaagtctacccccaaacaaggcaggtcggggtacttctatttcttgcagccaggcttcaagtggttaaccggcacggatgcaaaggccatcaacaaaatagggcattttgctgatgagtacttcatggtgaaggatccgagcattacttggactcaatttcagtagattccgacatataatcgtcctctcctcactcttgctcttagggatagagctcaaaaacttgtccggttgctgggggaagacaggaatatcatccagt

SEQ ID NO: 138278 - DNA, 509 bp, Cannabis sativa
cataaacaactgcgaatttccaaattaactaagcgagctttacagaccctgtttgggaattcaacaggaggagccatacctgacggatccaagcagaataatggtgttattccacctgtcaaccaagtgaatcaatcgctaaggaagccaggctcttctgtgttcgataggctgggagcagcccatgacccaaggaacgatctaaacagaagaaggggaaaagacgggcagaatactacgacaatcgtgcagcctggagcccatactcagatccccgctcagaaagacgctgacgtaatccaagacggccaaaatgccaagcaagtcagcccagccgtacaggcccagcttgacgagttgaagaatatgtttcatggcatggctagacagcgtaacaatgatcttgacttagaccttgctcgcggaactcccttctcaccagagatcaatctcctcccactgcctcacaagttcaaaatgccaacgtggaagatgtatactgggagaga

SEQ ID NO: 138279 - DNA, 923 bp, Cannabis sativa
tggatgaaaataacttatcagaattatgaggataagaaaggagaagtttgcaaagtctattcgaatgacttaggcaaaatccctagtcctcatgaaattttatgtatctctaatgattacttaatcttaagcaagtattgtgttaatactagattgctatgttgatgacttagtctaaaaggaacttacagtttcagactaagataacatgtcacaacaagatgtccctgagaaacaatgtaagaggttaaatgtctttctatgtacaaatttaactagactcctactattgagtgggagccatcttagatgtaatcacaaggaacattaggagacaatcaaggaagatctctgaaagtgaccaatatgttagatgatagggatgtacattagaatccttatatctacaccaactcataacctattcgagatggtggttactcttggggtggaggaattattctagaaggatgtaaaaacccttctataataatttaagctccatcagtgaaaatacataactttgttgcttttgtaaagcactagaaagttattcaactaaagaaagttcttactgtgatatctctattccatttttagatacaattagagatatgtcttctgttttattcagatgcactttataagcagtaaagaattcagtatccctagatgagtaatgcatatagaaagatgatgttgcataatgtcttataaacacaaaggaagtaatggtggagaaagcagtagcttaccacagacttacaattccagtaatttgggtttagtcaaatatactaaacttgatttggatatcaagacaattgattgattgaaatgcactattttctttatgttagtgcaagtgggcgtttgttgggattttatgccctaaataaaacccatttcaatctaatctgatt

SEQ ID NO: 138280 - DNA, 523 bp, Cannabis sativa
tcacgggtgctttgtggtacaggttagggcaaggaaaagttagagttgccatgaggtgattaccttctccagcaatgtacatattggccccactgccctgtgtgtcgagttgtcaggagttattttagactggctgtctctactgtattttgaatttctattgtctatagtcttacgggtaaatctttttataacatggatcccgggaacacagttttactgctattataatgtccatattcagtcttttattttagtcaagtttttaatattctcataatttttaataatcaattaatgtagtagtatttatccagtttataaaattacatgtggtgtccttatggaatagggcgttatagaaaccttccctattatcatcgcatctgcgttagacaaagaacaagaagaaaaattggtacaattttttaagagtcacaaagaagccatagggtggaccatggctgacatcaaaggaattagtccttcagtgtgcatgcatcgaatccatttagaagaaaat

SEQ ID NO: 138281 - DNA, 1827 bp, Cannabis sativa
  modified_base (932)..(932): a, c, t, g, unknown or other
  modified_base (1546)..(1547): a, c, t, g, unknown or other
aatctgattatattgaaatgagtgttatttagggcataaaacccaacaacttcgcctccgcaagtgcctctctctgttgagcctcctcttggaacgcccgcctttcggcagacaaatcctgaaggatcctcacggcctcgtcaatgcccccgagttcagacatgacaaaaccatgatcgatcagggtcttggaaaggcggccggtctcgacagtaatctaaaaaaagaaacaagaatgaggtcagatgccttagacaaaatatcaaagaggggaataaactacaaatactcaccgcggccatagcagagctgatgtcttgcacttggtaaacggagttcaatgaagcgcaagctgcgtatctcttaggcagaaactgagtcaggttggagacaaactagttggtgatctccgaggcaaagggagctaaggtgggcccgacaaagcggttgaaccaatccgtcaatgggtccatgttcaagtcccacagatttcggaaggcgtcctcgtgaagagtgttctgctgctccttccgcaaaatcttctgtaagacctccacctcggcatgcccccgactgtactcgtcaagggcgtagttgtacttggccactcagaggttttgcctctcctcatccgtgggaatcgggctcagtacgattccatgcgacacgatgtattcctccgcctcgaaaggaatcccggagtcgttgttcaccgccggagtatctcccctctgagtccgcctagaagactcagtcacaaccatctggcccttccacttgcgctcaagggcggccgcacctctacctcgccttcctcaacttccccctcctcgtctatcaagacgatcgtgcctaaagaggcactgaatgaggacctcccaggagtcgccaactaggatggagccggaggcagagaggcgtcggggctgtangcctcggcaagagtggctaggagatcttccataggcctggctgctgcaacaaagaaatgagctaagtgttaaaataatcatgaaaaaggcgtgcgcacaacaagaaagcaataaaactagtcctaccctgattccctaattcagcactagcgaagtcttggactacaatgctggcttcatcatccccaagaaaagctgtccgaggggaggaaccagctgaaagaaaaatgggccgaattgtccaggggaataggcgtcggaggtcgagagcccatccaggaccgacccaagaaatgacccaagtgggaaaaataatattccttggcgtgattcccccaccgagtggaaggcattctaaacctataaagatgctcatcgaaccctataggcctacgttgggtatactcttggacaggaggaacatacttaattattaaaggagacttaccagaacctgaagtgctggcgtcgggagcaccagagttgggaactgggaccacaggcttgggtcggagaggactccgctccagaggagcttccagacgaagggttctcccggcagccgcctgggcgttgatgtaagccagctcctgttccctcttaaagaggtactnntggtaccggtcctccgccgaggcgataatgtctacccagagtgccctttccgctgtcggagtcttcatgttcgggcagatcaccttggaaagattgaagtcatccacctgctgattctcgaaaatcatcttggccttctgacagctctccgtcgtaaccaagtccccaacgttgatggccttcctgtcatacgtggagaaagtcttggcctgctggaggaatactagggtaggctcagtccgcatgtaaggagggatcctaacccactccgtgagaagct

SEQ ID NO: 138282 - DNA, 580 bp, Cannabis sativa
  modified_base (33)..(34): a, c, t, g, unknown or other
agtctgaaactgtaagttccttctagactaagnnatcaacatagcaatctagtattaaatgtaaaatacttgcttaagattaagtagtcattaaaggtaccataaaatatttcatgaggattaggaatttagcctaagtcgttcgaatagacttgcaaattctcctatcttatcctcaaaattctgataagttatttctatctatatgaatggttagatttactttctcagttgaatcctaaagttcctttcatgatcataacatagtaatatcacaagtgtcatccaaatgaagatgagcttagaattttaaaattctcccactcaaataaggtactgtgatgctatgtccaagaactttattggatcaatttctattactacagtaatatattaattggaacaaaaataagatcaagaatatgttctaaaaaaattttgctaatttgttcattatattacatccacgtttaatcaaaatgtgtgtgccatagagtactgtggtgtattgagtatagtctagagttcaaattgaactacatatgtcaatagctttatccacccctaagtgatatagaga

SEQ ID NO: 138283 - DNA, 568 bp, Cannabis sativa
atatttttcaaaatcgtgttctatgaaaatattttcacttttcaattttttaattgagaatcaaaattttgaaagcaaaaataattactttcaatatttctttaaacagtttttttaatcaatattttgaactttgactagacccgtactggacacaaatctggccttaaccctgacgccgaacccggcccttgacccaaacccaaattcgatcatagacctagacctggcttaaataaaatataaaaataaatataaaaatgaactttacagaacatacttctgtttttaaaattgaaaaacaaaagtggttagagaacacatttttatttttcaaaaacaaaatttttgaaaacaaaaattttcttttatttctgtgactaaaaaataagaaaacaaaaatattaccaaacaccaccatagtatatatatgtatatatttatattagatcatcttcataatattgaactccaataataagggaaaatttacaaaaatactggaatttaggttaacttttacaaaaatactgtcatatggaaatcttttcaaaaatactgtgttttt

SEQ ID NO: 138284 - DNA, 654 bp, Cannabis sativa
  modified_base (271)..(273): a, c, t, g, unknown or other
  modified_base (609)..(618): a, c, t, g, unknown or other
gaaagccgtcttcggaatgtcctcatctcggattttcaactgatgataacctgatcggagatcaatcttggaaaaggtcgtcttcctgtgaagttgatcgaacagatcatcgatcctaggtaatgcatatttattcttcactgttagcttgtttaattcccgataatcgatgcacattctcatagttccatttttcttcttgacgaacaaaaccggagctccccagggtgacacactaggccgaataaaaaccctatgtcaagcaaccccnnnagctgaatctttaattccttaagctcagccggagccattctatacggagccttggaaactggttccactcctggtgccaaatcaataacgaagtccatctcccgctgaggtggtaaacctggaagttcttcgggaacaacatctagaaattcccgaaccaccttgatgtcctctggccgaatggtatctagccgagtggtgtccatcaccaccgccaaaaaccctaaacaaccgccatgtagcaattccttagctgacatggccgaaatcaccgggatccgagatacccaaactcaaccaacgaatacaaatggttcttcacttttcggttggaannnnnnnnnnttcctcttgcaatcaatactggctgagtatttagat

SEQ ID NO: 138285 - DNA, 719 bp, Cannabis sativa
  modified_base (263)..(263): a, c, t, g, unknown or other
atatatatatatatattaaataaggttaaaggttattataaaattgttggagattttatatataaatgaaagataaattatgaaaaattataactcaattacaaaaataatacaaagactaaaataagaaaagactaaaataagagattgattacataaatgttataacacacatatatataatatgaactcgtttggtacgtcgtattgtattgtattgtgttgtattgtattgtattagtattatctaatacaatactatntttggtattgacttgtattaaaaggttgtacatagttataatatattttcaataaacttgatttcaacaccgactttgggtcccggtccactccggggttcgagtccaggtcaaagattgtggttgacctcggatcctttataaatattataatacaagctaatacggactatttgttatgtattaaataatagaacttacattatattaaaaaatttggtcgtaataattaatacaatacattgcttccagatatagtgttatttattatttaatacaatacgatccttatacgacataccaaatgagccctatatacactatatatctatatgtatacattaaatataagaaaagtagaagagatgaattacaacacatttgatatacaacatatataatataatatgaagaagctatgtatatacactcactcacaactttaagtgtagatta

SEQ ID NO: 138286 - DNA, 598 bp, Cannabis sativa
ttttttttttttttttaaacggaattttatagaaatctctattgcaactagcgatgcaacttaaatcgcaataataaatcgtgtagcaacacacgtaaaaactaccagagaaactactttagaaacccaaactttaaatttgaaaaaaaaaaaagttaaaaaaaattaaagtctgtattttactcgttgtcgtcactatatttaaagttattatcacgactgcatcaattgtagtcatcactatatttaaagctattattattagtagtgtatctcatttataatcgtcactacattcaaattcgttgttattgctgtatcttacttgtaattacactcttttttaaaatacatttatgtatttgatgtggagtacaattacatatgacttcttctttttacgtttaacaaatgagttaataatagtttaataacattaattagctaaaaaaatataatatcttatagttacacaatataattatacatatccaataatcctagtaagactatgagaatttgagaatataattaagactcctcaattactttccattatatatataattgccgtgcaattacttaaacaaatatgtat

SEQ ID NO: 138287 - DNA, 639 bp, Cannabis sativa
  modified_base (42)..(51): a, c, t, g, unknown or other
gatgaagctcagaatcttcttttataatttttgaattaattnnnnnnnnnnatgaacaatttgatttcaattattggtttgggattttactccctatttttcatattatgcagacaattcattttgagaatattaataaagttttctctttcaattatgaattgtgtttatgaattgagcttcatctttttatcttgtgtatgccaataccgattatatttaaatgtttataatgtttgtatgtgtttgtgtaatatcccaaaaaataaatgatatataagtagacatattttattaaatatgtaattattttggtaatgaagtaagattatgttcttacttagggtaattaataagggtttattgaattatcatgaagcgtaatttattaattacggagattatattgggatatgtgtgtatcgagaatactatttttgaaataaaaatattttatcgggcccgacgactgtgaaaagttagcattatggtcagaaatgtcacgacattaattgaagaattattttgaggtattccggactacgttagaatttttagaatgtcagtttaatggattagtaaaattaccaaaatgcccctaggttatttttttagaatttaagtttctttggagggtaa

SEQ ID NO: 138288 - DNA, 2346 bp, Cannabis sativa
  modified_base (50)..(73): a, c, t, g, unknown or other
  modified_base (212)..(213): a, c, t, g, unknown or other
  modified_base (461)..(461): a, c, t, g, unknown or other
  modified_base (2303)..(2305): a, c, t, g, unknown or other
tttcccatttattttttcatttttgaatgccaagtaattcaaccataacnnnnnnnnnnnnnnnnnnnnnnnnaggtaaaggcttcaggttttacacacactttgacgttattttctttcactcaaaacacgtgttgaagctgccactctctctctctctaccttctctgtttttcgaaaccctctaagtgatggagtagtgcccacacacnncaagtaatacctcaatcatagtgacgaaggttgtatagaattcagagtccacaaagaacgacattcgggctcagatcttgattatactctgggacagaaaggaatcaagagttagagatctgagtgggaggagacatatgttccgctgcagccaatgtaaggtttctcatactttttatgtgtttaatttattatcgttttagaagttcaaatttaggttgttaaattaacatacttgtgagtagatntaagatcctggtaaaataattcgaacacataagcccccacgtaataacccacgtccttaacgtcaactcggacatgccaccaatccagcaaaaaagacgccccctcgactcagtaaagatagaagacctggagaaagaggtggacaatctactaaccaacgacatgatccgagacgtgtatgatgtagaatggctggccaatccggtgctagtaccaataccaaatgggacatggcgggtttgtatagattttaccgatgtaaacaaagcctgcccaaaagactgctttcccttgccatgaattgacaaaatggtggatgccacctccggattcaagctattgttcttcatggatgcatacgccgactacaaccagatcaagatgcacatcgtagatcaagactgcactagcttcaggaccgataagggggtatcctactacctggtcatgccttttggggtaaaaaacgctggtgcaacttatcagcgaatggtgaaccggatgtttaaaggcctgctgggacgaaccatggaggtatacgtggacgacatgttggaaaagtcaaaggcacacaccagccatgcggatgacctagaagaatgcttcgaagtggtctggagaaacggaaagaaacttaacccaaagaggtgcacttttggggtcaaatcggggaagtttctgggcttcattatcagtcaccgggggatactggcaaacccagagaaaatccaagttggctgccctgagccgttttatctcccgatccacagacaagtgcattcctttcttcaacatcttgaaaaaatgccagaaatttgaatggtccgacgagtgacgcgataccctgtgatcgagaaactagttttttgccctaatggcctcgagaaagctaagaccttacttccaagctcacccgatcaaagtactaaccaatcacccgctccaacaagtcctacaaaagctagaggcgtctgggtaacttctcaaatgggccatggagctaagccaatttgatctgcactacgttcctcgcacttccataaaagggaaggcgctggcagacttcatcacggagtgccacgaagtagaggctaacgctaacatacccacaccgcaagtcccggagtggaaagtgtttgtagatggcacctccaacgagaatggatccggagcaggggttgcaatgatatctacgagcgaacttcgactccaagcagccctacggtttgaattctcagcttctaacaacgaggctgagtacaaagccctgatagcaggactgagattagcaaaatctgtgggggccaaaagaatagaagtctacagtgattcacaacttgtagtaaacgaggtgtcgggagaatatcagacgcgcggagaaaagatggccgcatatgtggcaatagtccaagaactgctccacgagttcacggactataaagtggaaagaatccctagggaaaagaacgctcatgcggactgtttggctaagttagcttcagacagtgaaattgagaaattgggggtagtacctgtggaacgcatagtggagccaagcatcaaagtcaagaataccatagtaagagttgagcaagagcccagctggatggtccccatcatcgaatacataacgaaaggcgagttgcccaaagagaaggcattatctagaaggatacaatatcaagcgcactgatgtgtgatgatggagagaattctctatcaaagaggactcagcatgccgtatctaaggtgtgtatcggaccctgaagctaagcaaatgatgctagagatccatgaggggttctgtggagatcatacaggaggcccaagtctctcaaagnnnatattgagacaagggtacttctggccaaccatgaaaaaaga

SEQ ID NO: 138289 - DNA, 510 bp, Cannabis sativa
gttaaaggtcaagaattcaaatcccaacaaattcatttttatttttaatatttagtttactttttgccctctcataaaaaaatagagcacggctaattacaacctctcctactacaacctcttagtcaaccttcacgcccgaaatcacatgtgttatcgggcataaaggtttactaagagattgtaataggaggttgacggtggcactcctcttaaaaatctacatatatacagtcatgggcggactcacatagagccgaggggccagtcgctctctgaacaaataaaaaacgacatgtaagttactcgttgattgctatgtgagttgctatgtgaatttcagtaaaatatataaaaaaaataaaaaaaaaaatctcaaaataaaattagaattgttttgttgcacatatatttttttatatttatattttttttctatattataaattgtgtagatcattattcaccgctatgtgttagccacatcaactacgtctttaattttttttt

SEQ ID NO: 138290 - DNA, 525 bp, Cannabis sativa
  modified_base (472)..(482): a, c, t, g, unknown or other
tgagtttccttttcagcttgtcaacctctgactttgctttgctaaagatcaatatatcatcaacatagagtagcaagtaggtttgattattgaaatacacatatgagtcatacttgattttagtgtattcaatattctgcatataggtgtcaaacctcaagttccattgcctaggtgcctacttgaggccataaagagacttcttaagtaggcatacctcatctgggctcccattgtcaaagccctcaggttgttgcatatagatttcttctaattccacatgtaagaaagttgtccttacatccatctgttcaatctctaggtccatgcttgctgcttttgccatcatggctctaattgaagcttgcttgaccactggagagaaaatctcattgtaatcgatgccttccttctgagtgaaccctgtggcaactaaccttgccttgaatctggtaggttcattccctgaacnnnnnnnnnnnttgaaaagccatttacatcctaccagcttgtagaactctggtt

SEQ ID NO: 138291 - DNA, 850 bp, Cannabis sativa
aaaagtgattggggaaatattattttctattttgtattttacaaaaattactgatttttatattgttaaatgataattcaaactcttgtattttaatgtacatattgttttatattattttaaaaaatataaaatttaatttatcatttagaaaaacaagtagtgtaattgattgattcttgttgggattttccagtcctatccctacacaaagtcaactcacacacaaacataaggtcaatcttgacctttcacacttcagcaagtggacacaatctgtccacgtatcacactcaaacttttgacacaaagcattcaattaaacatttaactttaccaaaaacaaaacaatgaaaaattgatcaggtttttcttgcttagtttctagggttttcttttatcaaatatgcatgcaatgttcaaagatgagagtgaatgaatatgcagatgagagttatggtagagaagatgcaaacacagtattttatagaggttcccccttagttgatggggtagtcctcttgagctcgcctcagaacaagctaagcccttgcactatcaaattcaagatccaatacacgattggtgaagcttccagctacagatcaactggtaagtctcaatttcctactgctattattttctttctggtttctacttctttctctctcaagaacaatctctctcttctcacagattctcactctttctctctttttctcaactctgagttcttatctttgacctcagagcaattacaggttctctctttctctctagtattcagatctgcctcaaaattgagaccagaagcagtcttttatactgctgggaaaagagcagagaaact

SEQ ID NO: 138292 - DNA, 516 bp, Cannabis sativa
catttacttcctcattttattaaaaaataaaaaattagacaaagtttgcatttctctctcaagtgctctctctctctctctctttcggccctctttgagcagcaaggaattgggatttttctgtgtttcaagctgattctcaaggttttagtaagctcaaattctgagtaagacttttggtaacttgttcttgatattttcttaagttttaagacaaaaatgatattttgcatgcttagcttttttgttgttgttgctgctgtaattatgtgttgtttttgtagttcaaatgtgtttaatggagtgaaataggataggttttgatgcatgttagttgcttttgttcaaagtttggaattttgactcaaaatcttgattttaatggtgaaatgatgaaatctgttgttgtgcttgttgtagtcgattgctgttgtttttagaggttatattatgcatatttgagtagattcaagtaggttttgatgcatgtattggggtttaaccaagcttgagttt

SEQ ID NO: 138293 - DNA, 825 bp, Cannabis sativa
  modified_base (34)..(41): a, c, t, g, unknown or other
  modified_base (764)..(791): a, c, t, g, unknown or other
gagctgcacaatatgtttaaaaatcacgtaatannnnnnnnctagttagggtgttacaaatatatggtaagtaaacttaataagaaaaaaatatggtatttaaaataaaaaaacttaacatatatgggatgtcatttatactaccataaaaaatattaaaatttctttcatattttttttttttaaaaaaataaaacaaatgaaattacagtaccagaaaagtcaccgaagtttgttgtcggtgctggaaaagtcgccggagtagctgtcggtgtcagttattggagttgctggcggtgctaaaaaggtcgtcagaattgagattatcgccgaaaaaattaccggaaaaatcacttagaaactagtttcttcatcaaaaattggttttgattttataaaagtaaaatttataataaaaaaaacataaattcagttttgaagcaaccccattacagtaaaatagaggtgctcgaaaaaacacaaaaatcaaactactctctccagccacacaagatttttttctctctcctgcgattcaaatttcttagtttcttattgtccgcatttttgtgattgtgacatgtgaattttaatcaagaaaggttaatgaatcattagctgatcaactcccttaaccatggttctaggaaggttcagggtatgatcagccctggctcgcgaaaagggcctccatgattgggacttccctgatagtcagcaatgcgggagatatttaaataattagcagttaattatgattaatnnnnnnnnnnnnnnnnnnnnnnnnnnnnaattatttatgctgttattattgaattctgaaat

SEQ ID NO: 138294 - DNA, 553 bp, Cannabis sativa
tatgggagtttcatgcgtgcgcaaccacggaggaaaaactatttattaagctctcagtatctgcgtacgggtacggaggctgatgagcaaattaaccatacatccctgatgcgtaatgtggaggaggacgatcgaacggccatgcaatctgggaagttaccttgtttggaacttgaaaatcatccgcagtcaaagatggttaatgatatccctgagttggtggatgatgggaatatttctcttaatgagaatgtgcatattaatggcactaggaataatgtttccaagtctagtgccaatgaaagaggaaagtcagtggtgtttggaaatcatgtgccaagtgggagaggtcagccttctctcttcctaggtggaattatcggcccacatggaggacaaggaggccgtgggcttcctgctgagtctaaaagaaggagccaacatgacggagttggtgggcctgaatatgttgatatggatgcagaggatagtgctgatatggatgttaatggactctcaaaaaacgagaggtgggtcctggtttccaggccca

SEQ ID NO: 138295 - DNA, 703 bp, Cannabis sativa
aaggttccaagtgatattagattcttcctcaattctggaatgtgcctcacattatgcagaatcttcacttcaccattgaattgccttatagccaccttactaattccaacaaccctacgagaaccatcactacccattagtattctaccaccattattggtttcttgataatcaaataaagattctaagttgcgacacatatgataagtgcatcctgaatcaaggaaccactctttactgttattattttttgaaatagaaaataattctctatctgaacttccatctccacctactcttagccacagctgcagagtcttttctttgatttccatgatcattagattttgagtactggttatggtttctgttgcatcttttatcatcgtagtttgatctaaaaccagattgtgtcttcaattgattgcagaatcttttaatgtggccaatctttccacattgataacattgtcgattgtctttgatctttaacttcgatttggatggtgactggttgttccttgatgatcctctctttggacttcttcctcttgcaagataggcttcatctttcctagtcttcttcttgagttgcaattcaaagtcctttgattttaatgtcgtatgaacaccctctaactgttgggttttatgccctaaataaaactacatttcaatgtaatccatattattcaatatcaat

SEQ ID NO: 138296 - DNA, 1380 bp, Cannabis sativa
  modified_base (131)..(133): a, c, t, g, unknown or other
ttcccaagaagcgtgcgagtgaggacaaagcacgctagatacacttgtgttggtctgtagggtcagtcgtcagtccataaagcagccagagtagcgtaatcgtgtgtaagagccattagtccgtgggtgtnnnggcccaatggaggcttgaagcttgaagcggggatgttacaatggtccacacctaatcactttagaatagctatcaaacatgcaaaccttagcgaacagttctagcttttattaagtttatgattaggacattcataaatctagtaatggtgtgcactaagtacacaacaattccatcattctgaagttttcctatcactagagtatttctctagaaggactcaggcagctactagtaactaatcatagaccttacattttcatcaatatgcaatccaaatttctggggaggtaagtttgaatacaattcaaagttcaacttaatgatctttgaactgcataactaaatatttctccacccctaccagctcgtaagatctttaacctttaccttaatgttttttaacactgttagaaattcatgaaatttctcaaacatttcaagtttctttgcataaggtaaaatcaagagtgatcgtcttaagaatttaacgataatatccacccctgaatgtacatccatatgttcaaacacagatgatcctactttgaagtggatattgacccattttctttttgcagagactcatcttgtcaaaaccactatgaataagatgcaaatgccatagatatatattatgtggttatggtcttttgatgacttaggtctagttataataaagagttcttagaatagtccaagtggattttggtcacagaataaaaaactcataatctatacattaacatacagttcggatcaattgttataaaatggacattaactacttgtgaaagttatactgcattgtccaatgtattctggaaactgaaatttaaaatttctatttggaatctaaaatttaaagttaaagacttaaatttataccaaatatttttctgagtaattattcttgcttggagcatcactgctaatctaactctaactttaagttacctttagtaagcatatactagtaaagagattttctgagatcagaatttatatcatttcaggatagaacatctgaaatatagtcacctgtgccacttattttataaaaaaaagagagtgacatcataagcagatgatttataatccttcctatccaatgatatactatctgagcaatttcttatgaaatactaagaagaaaaagtaaaggataattttgattaaaataagaatccaacgatgtcacgtttaggcgagaatcaaaattgttcttattttataaactttttcat

SEQ ID NO: 138297 - DNA, 553 bp, Cannabis sativa
ctcagaatcatcccacttgaccatccccaggcggtgtgggattgcacagcttacccggtgtttccccttacggatcacaggactactgactgccacaacttattaatttactattgttagtttaaatccaattagtgttttatgggtttgaattttaatgttgtgatcgtgtttatgtgttgaaactaatttaattttttccattagtcttgtctttagacatggttctttagtctttttctttagttttttcaggttcgattcttgttggttcttgttttctttttttgttttcgggattctgctggttgtggtacgattatggaagacggtacatgggtgcatatagtagaagcattcaagaaggggacgattggttgtattcaactcgaaattgctgagataataggcattaaagaagctttgagttggattgcaactcattggagggatagagacatgttggaaacagatagcttggtgtgtgtccaagcgattcagagcgatatttttatgccttcacagtttggtcttattgttcaagatgttcgaa

SEQ ID NO: 138298 - DNA, 852 bp, Cannabis sativa
  modified_base (135)..(136): a, c, t, g, unknown or other
ataataatctcacctaataactaaaattattttttctataatttttaattgtatcacttttaaataaagtagaaaaaacctagcataaaatttagtatggtaccttgcacaaaactttttgctagtatatatatnnatatatgggtacactcttaatgggtattactcattcatgggtaatattatgaaaaattgagtttttatgcttagttttttaatctaattaaaaaaaattctcatttttatattatatgagttgagattgttccatcgactgaaaaaaaaaattaaaaaaaaaattcaactaaaaaaaaattgaatttggcttaagtattttgtatacaaacatatttttaatatagtgtaaaaagtgatattttatgatttttttcaattaaatagctaaattaagtataaaaatttaaatttctcttttattatttgtcattgcatcaaaatataataatttaatatttcaaaaattaatatttatagttaaattgtttagtaaccatcaatgggtaatactcattaagaagtgttccatatatatatatattagatgctatgtaatttgaatataaataatataagaaataattatatataatttaattataaataatataagaaataattatatataatttaatttattattatggtctgaatgaatttttttaatataaagtgattaagacaataaaaagtaatataactattttgtgaagttatttttatgtatattctattcatgtaaataattaattcttagatgaagaatattctatcattctttataaaaatgtatcttctaatacatataatatgttgtttgccaagtaataaaat

SEQ ID NO: 138299 - DNA, 539 bp, Cannabis sativa
gtctggttccatgtttgggtctgagttcaggttcaagttcgaatcccgagtacaggttttagttgggatctgggtccggctcccaattcgagtctaggtctgatttggagtccgggtcctgatccggttacggttctggatttaggtccaaattaatttatgattcaaagtccaagtcctatttccagtcccattgaacttccggctatggttccaatttgtggtcacagggtacgggttcggtcaacttttgggtttaggactgggttcaggtccgggtgtttgttcggttccttgtcagggttcgggtccaaggctgggtccccaatccaggcagcgactacgggttttgtccaagccctgggtccaaaattggatcacaatcttaggtcccagtcttgttccatttctggtgccgagacacgagctgggtcctatatttaagtttgggtctgggtcgggtattaggtcccggtcctagttctttttcccaggtccctatcctgattctaggtccaggtccaggttattgtgtgggt

SEQ ID NO: 138300 - DNA, 745 bp, Cannabis sativa
ttttgaatgtcaaaacaaatagagggtgcatcagtacatcccttttaaggggtgcattttagaatcaccctaaaataataatatatcttacaaatacaacaaaatttatataccaataacttacaataatttataaaatattaaaaaaaaatcgacatgactttaaaataaataagattttaacaaaactaatatagatatatcataatctataagtaatttattttcaattttaaaaaaaatgaaaaaaaaaatattgatttttttatataacaaaagaccatataaataataaatagtgtataaaaattatttctttttagttttgaaattaggacatttacttacatagtgctatatagtgctatgatttgaggtcatttgctataatttttttttaggaaacttacaaaaatactgattttttccttaatctttacaaaaatactgccacacggtagaaattaggcctaattttttttcttttatactgcccaggtccattttttttttcttttgtactgtgaacagtaacaagggacaaacgacgcctccttcttcgtggggaacgaacagagcaacaacacaacacctgttgtaatcccaaatatcacatccacaacaacaccatattaagaaaatgtggccatgcttgaaaacaacacaccaacaacagaatcatacatactcgaacaccaatcagaagaaggaggagagtaaaaaataagagaatttgagaacgtca

SEQ ID NO: 138301 - DNA, 861 bp, Cannabis sativa
acctgagttgctgttaaattgtgcgtttcctctcccaaattgttgtcgaaaccttctccaagctagattaacctccatcagtgaatccatagcaggatcttgatcacttgaaacaagattcgcactcagatcaatctccttattcgacttttcgattctcgattctgaagccagaagtaatgcctcaatttcaccgacggtatactgctcagttcaagtattagtggatatgacgaaagtatcatattcactaggaagccccttgaaaatcgcagcaacgtgatctcgatcactcaagatttctccaacagaagcaagaagatcaacggtctgctttaccttcaagagatagtcgttgaggctgagattccctttctttaagttctgcaatttagtgcgaaactccagaattttcgaagatacttgcagagtgaaatgcttctccaaagtcgaccagatctgttgtgatgaattgcatcccaccattcgagtgagaagaccttcagtcattaatgacagcaaccaagagaccaagagttgatcttgaacttcccagttaatgtattcttgattaacctctgtattcgatcctctggagttagaaattcagctggaggtggatccttgataaacttcagtagcctattccctttgatcgcagcaagtacctgttgcttccacaacagaaaattgtggtcattcaaacgaattgaaatactatggttgaagtaaacaggttcttgagatcgaggttgtgttgcttgaactccattgacaccagatgtgttggagtttccaccagcagctcctagagtatccatatttgcattgagcggaggaaagtgctctgataccatgtta

SEQ ID NO: 138302 - DNA, 957 bp, Cannabis sativa
caaagcttgctcaaacaacaaaccatccatcaaaacatgcttaattcaacatatctaaacataaataaacattagaagcatacttcaaacagtaacagcaactaatttcacaaatcatgcataaatccatttccttaaaactcaagaaactaaagtgaaggatactagaaacttacctatagcttaagatcacctaacacttgcaggaacaagcttgaaatgctgaagaacaacccaaaccctagctggttctaggtgggctcgaaggagagagagaacttgagagaaaagttgattttttcttatcttttgatattttgtaaaattaaatgaaataaacttgattttactcaactaatatcagcttaaaacacataaaatcagatttaataaaataactcaattcccactaaaggacaaaataaatatagggcaaaatgcccttgcccacactaaaagtcataaacatcacttaggggtatttttgtcaactctaaaattccaactattcctgacattcccaatgtctcactatattgccccgctatactaaaaagactaggatgtgattctaatagccaaacgccgcgttccaatgttgccgagcacaaaacatgaaaaattataaaagtccatatatgacatgtaactctgatgtacttttggggtctatcagtgatgtacttgtgtaactctgattttgccgcttaggtcggctagtgaaaagacttataatattttgtaaaatattttgggatccccaaacatgtaatttttgattgtaaagttaaagttattacaagttttattttcattctgtttttgttttaagtttaaatttctcgcgcttttgtttcttgtaatcccagtttaggggattagggttttataattggttgtcgtgacgtgcctaaatgctaaggcgttacagagtggtatcagagtgccaaggttttt

SEQ ID NO: 138303 - DNA, 703 bp, Cannabis sativa
tagactaagtattggatataggagcagtgattcgaaattacaaagggaagttgttgttgcattatccaaaccaatttagggctatttagaagtgatgaaatggaagcgaaagcacttttttatagtcttaattgggcttttcaacaacaaagcccaatagcacaagttgaaatggatgtttttacgagtttcttctgctttggcctcgtcacatgtacagacttatcttgtttttcggatctaatagatgatgttcgttgtcttttgttttttttttctagagttactgttactcatattcgtaggcatgctaatcaagcagcccacgagttagcaaagtacgctctagaattggatgaagatgttatttggatgggagaaaatccacatcctattttctatatggttgtaaatgatctttgatttataataatagtgaaaatttctaaaaaaataaaaaaataaaacaaataaaataaaaaattcaaatgaaaaaaatgtatgtctataaaaatatttaattttgttgtaaattatatttttgtataaataagaataaaatatattgtgtatatttgttatactaaattttaaaatataatttttttaaaaaatatatatcaattgaattggagggataatttttaattagactgaagaattattttagggaaacttataaaaatactgaaattttggttaa

SEQ ID NO: 138304 - DNA, 525 bp, Cannabis sativa
  modified_base (27)..(47): a, c, t, g, unknown or other
attggtactacctatatcaacaaggtnnnnnnnnnnnnnnnnnnnnncatcacgaaataactccacgattaagcgtgcttgatctgggacaatttaggatgggtgacctcgagtggatctgtaaggccagtcgtcagtccatgaagcagccatagtgacgtactcgtgtataagaatcatcattctgtgggggtatggacccaataaaagcttgaagcgaggacgttacacctataaatttatcacattcttcattttactttcatgcatcgacttttttcttcccatacgctttttgaatacgagttcttttatttggatatatcttttggagtccatcatttatcaccctactttttccataatatgaatcttattagtaaactaaaagaattcctttgtagggctttattgtaccttaataatttgcgaaataaagtatgttgtttggagcagggccggccctgaaacaaagtgggccataggaaaaaaaaaaatttgggcccttatgttagaaaaatgtgg

SEQ ID NO: 138305 - DNA, 2873 bp, Cannabis sativa
  modified_base (544)..(547): a, c, t, g, unknown or other
taactaagcgggctttacaaggtcgttcatcgacccatctacctttagcagtgtgcaacttctttttcatagtatccttcaaggttttattaattgcttctactttcccgtttgcctgaggccgtgacactgacgagaagcttttgataatcttgttcctctcgtagaactcagtgaataattcaccatcgaactgagttccattatcagatactatcttaatggctattccaaacctacaaattatgttcttgactacaaagtcaagaacctttctccatgttatagaaaccagaggtccagcctctatccactttgtaaagaagtcgacagccaccactgcatactttgctcctctttgccctgtggggaatgccccaatcaaatcgatcccccatattgcaaatgggtaaggcaaggtcatcattcttagttccattggtgtacgcgaggtatatgtgagaatctctgacatttatcacatttcttgacaaattcgtgggtgtccttatttatagttggccagtaatatccttgtcgaatnnnnttttttgacaagctttgccaacctgcatggtccctacaaaagccttcatggatttctctgatgatgttgtttgcttctacgggaagaacacatcgtaggagaggcattaaatagcctcttctatataatttgccttctactattgtatagcaaggcaccaaatataggagtttttgttcctcatttttgtcagctagaagttgcccgttgagaagaaagttaactctaggtgtcatccaggtatgcgagctaactatcatctcggcttcttctttctcacatatgcttggctcgtttaacatctccactagaactaagttcaattcatctagttcattgtgtgaggccagttttgccaaggcatcgacattagagttttgttctcttattttcattttataatcaaactttttcaagttcttctgaaccttctttaggtactttgccatttttaagcccttagcctggtattcccctaggacttgttttacaatcaattgtgaatcactatgcatataagatttttaaccttcaacacttcagctatcttcaaaccagcgatcaaggcttcatacttagcctttgttgtttgaagtgtcaaattgaaatcttaaggcatagtgaaacttgaagccttctggcaaaattagtattacccatgcacccaagccatgctcattggatgcaccatccatgtacaacatccaagtatccgcgtcttgctgaacaagtagattttcttctggagttattccttctatcaggaaatctgccaaagcctggcccttgatgaatgctcttgggtgataagttatgtcaaactgccacagttcaattgaccattttattaatctttcagaagaatctggttttgataaaacttgtctcaggggttgatcaattaataccttaatcggatgtgcctataactaaggccatagtttgcgagatgcgtggattaggcataggcaagtttttcaagagggggatacgaccttgattctgcccccagtaattcttacgaacatagtaaacaggttgctggtgctttccctcttctcgcactattgctgcactaatcacatttttcgagacagccaagtagaggagtaatgtctcttcagttattggttttgccaaaactggaggtgttgacatatgtctttttattcttttaaaggcctcctcacattcttctgtccactcaatttttttttcattgcaataccttgaaaaatggtagacacttatcaattgacttcaaaatgaatctgttaagtgctaccattcttcctgttaatgcctgaacttcctttggtttagttggtgatgtcatatctatcaaagccttgatcttctcaaaatttgcttcaatgcccctcgagttgactatgaatcccaaaatttttcttgaggaatctccaatggaacactttttcgggtaaagtttcatattgtactttttcaatatctcaaagcactccgcaaggtctgttgtatgatctccactctttatcgacttcaacatatcatcgacgtaggcttccatatttcttcctatttgtctcgcaaatatttcattcacaggtctctaatatgttgccctagcattttttaaaccaaacggcatgacttgatcagggacatgtatttttatctagttatatctagaatatgcatccatgaacgacataagcttatatctagcgattgcatccactaactggttaatcattggtagtggaaagcaatcctttggacacacctgattaaaatctgagaagttgatacaagttctccaagttccatttggttttgggacgagaacatgattggatatccacaagggatagaacgcctcgtgtatgaagtcgttaactaactacttatccacttcctgcttgagtgccccttgtctcttggaattgaagggtcatcttttttgtctcttagctgggtaatttgggccgacattcaagtggtgacagataatcttagggtcaatccctatcatatatgagtggctccaggtgaactgatcctagtttgccctcaaaaaacttattagttgctatttcagattttcatccaagtttttcccaatgaatacacactttgtgagattttttggatctaaaataacttcttgagttcttcaatcggtttcaataaattccgttcatcttgaatccgaggattaagatcctcatcctacctcttgccctctttagtcatgactgccattagctggtgaccgacttttctattctgtagctctatgcggtagcatttgcgagccaggatttggtcacctcgcactactccc

SEQ ID NO: 138306 - DNA, 720 bp, Cannabis sativa
  modified_base (450)..(450): a, c, t, g, unknown or other
  modified_base (551)..(555): a, c, t, g, unknown or other
gttttgagccaaagcatgaaattcctaaaacttttcaaacgtttgagataggtaaataaaactatatctagagaatcgtcaatgaaagtgacaaaatacttataagctcctctggctttgacatttagaggtccacagacacatgaatgtactaacccaaggggttgtttggcatgctctccctttgcagagaaaaaacgcttggacatttttccttctaggcaagattcacaaactggtaattcacccaagacgatatttttcaatggaccgtctttggttaacctgtgaagtctatcatagcctatatgacctaatcgtaaatgccataaatttgtttcatcattattatcgatctcttttcttttatggtttttaggtttagcaacattgaaaagtttgttgttatgtgtgatttgtatttccagtcttaaaacataaagcccttgntccatgtgagcaacacataattgaaatccattacaagaaattgtgcaaatagaactcaaaaaattcaattgataaaaatgtgtttgtaaacatgaaacacnnnnnaagtttctactaaaattcggaataaacaaaatattgtctaaaactaaaaatttgttctgaaacttgaggtggggttttcctttagcttggaccgatactaatttgccatttccaactttgagcttcaactcccctagatttaaataatcccaagtttcaagcagc

SEQ ID NO: 138307 - DNA, 543 bp, Cannabis sativa
cactaagaaaaaataaataggttagactttacccacccatgtgactcaaatggccatccatcgcattttccgtcgtcgccgaacaaaaccataataattgcagatttcatatataatacaagtaatacccctagagtttaataaaatcttcggaattgagattttataactctaatgcccatttctaaaaatgggacccacaattaaataaattcataaataattataaaaatatcaatgattaacgctaattgcctttactaatccatattctaaaaatgcggtcattacaccatattgcagggaagaccaacaaagccaaaaagcctatgctcggacactccattacgagcccaaaagcgacttcctggtaggcaaagaatgaggctctaagcaaccaaagtttggtgagcccacgatctctttctcaaaaggagatcctattcaagaaattttcctgcacaatgaccccgtggtcgttaccacacaaatcaggaatagaaccacagtaagatactgttggaaattattttaccacgatct

SEQ ID NO: 138308 - DNA, 666 bp, Cannabis sativa
gacaacactattttggtaaataaaaatgttgatgatgctttaaggactgattgtgatgaatcagatttggatgaggattccttgaaagaagcatacaaaagtatgtatggtgagtggttgaacttgaaattgtgttcaaagtatcgtttattgacaaaagatattaaatctctttctcaatgaaatgaagagcttgaactaaatgttaaaaattttgaaaatgagattgttgaaaaaaaaaatgaaattaaatgattgtccaataaacttgagcatattgagaagaattcaacaatgctaaatccaggttcttcaatttttgaagaggttcaggagataggtcaaatcaatcatgttgggttgggatgtgtttaatatcaatctaaattgaacactaaatttgttaaatctataaataccttctggtttttctgatttaacactgcaaaaatctatttctacagctgaaccttatgatcctaaagaaagggagcagtcaggtaagaatgaaaattttcataaaaaatgaaaaaatttattccaacatgtcacttttgtggtgttaagggccatattcgacctaagtgttttaccatgataaatatgactcaatatttttacatttaatccatgtggaaaaatgttgtttaatatctcctcaagatg

SEQ ID NO: 138309 - DNA, 556 bp, Cannabis sativa
ctttcgtccaacccgcttcttcctcgccatggaagacggagcagctggaacgcacgcctagcttttttctgataatgataataaaagtgaatttaaaattttgatatttaagtttaaatattgaaaaattaaatattattaatttaaaattttgatatttaagtttaaatattgaaaaataatattttatttttgaaattaggttcgaaaattgaaaaatctgaaattgggtgaaaagtcacccaaaaatcggattttgggtgaaaaatcacccatgtgcgcactaggtggctgcaagcagccatttacgcgcgcgtacgaggggtttagtgggctgatccacatgcagaagaccctactagcagggtgatgtgcacgtgtgtcccctgtccgagatgtcgagctgaccgagttcagacaagatttgtttgaagcattcgcgcgcacagcctcatcttgtccgagtgcctgtgcatgcgatgctcgacccttgacactcaatggaccccaattttcaaaacaccataacttcctcaatttttatcggaatcgagtt

SEQ ID NO: 138310 - DNA, 2273 bp, Cannabis sativa
ttttgattattgttgtgggatatcaatcggattgtaattatatgccctcctatgtaactataaatagagacaaaaaatcctttagagaaaagaccatacttttgtatcaaagaaatctaataagatagacttgtggactatgcagaattttaactacaaaaccacataaaaagctttgtgttatttctcttcttttactactattatttctgtgcaaatcaatcacgaaataggctttaatatagttaacgaaaatttgtgttaacaagaacaatgcttatattaagtgtggggggagaataactgtcgtgtctatttaatttttttttcttagttgtttagttgtttagttatttatttttttaatcgtttttatagtatatattaatttttttctttaattttagtaagcattgtttgtatgaaattattttaacaatgattgctcatgtttgatgtatgtatttactttgatgtcttatgcgtggtcttgtgaaaaataattgtgttgatgataaaattcttaattatgtgatatttataattctaggaaaatgataaattcacatgatttgtgtgtttaactcatgattaattactactgaaggttgatttttttaagaaaaacttttacacatcagttgaattatcatatttgctaatatttaagagataaatgcatgtttgacttttgatttaaagtctcaacaactctagaacttatttgataattatttgagataaaattcataaattacatatgattttgatatatgatataagtaatttttttttggatcgattgagctttttaagcctaccctatttattgattcccttgttaatttgagcttaattattgaaatcttgttttttcttttaatcctatacatgaatcttttgagccttaaaaaactctcttgttcattcttttttcacaccatagtatattgttgttttatatatttgtaagggtgtgaaaattttgttgaagagaaaatattgatatatggatatgtatcactgatgatgagaaaaatattattattcccttagaattaatgtttgtaagttgtaagtgttgtaagtatttaatcatttaatcaaaaaaaataaaaataaaaaaaataaaaaataaatgaatacttgcaacaatttaagtgtgggggagtaatacgttttatgctgaaacaagaaagataaaagatttaattgttgaggagagcgattgaggaatacaaatgagaattatttgagagaatattatatatgtatgctatggcgtgatttaaccctaaattaaccttcttatctacctttcattctagccttacattataagcttataaagtcctattgatctttagattgtgtgtaattatattagtggagaataatttgataattaagcttatggagtggattttcgttaaaatacacatttattttgagataaaaattaattgctggcatgtataaattaatatgaatgttagtaatatgatgagttgattgaacacacacacacaaaaattgagtttgaaaagtaattatctttagttgaaattttaatgatttaagagtttggattttctttgaattataagttgatgtataatttttgaaactaaaattatttttcaaaaagaccgatttgtttcagtatcattcattttatcattaagttactcgaggacgagcaagagtcaaatgtaggggaatttaataagtcgatattttatcttataaatatagccaatttatgtataaatattcttaaattgatactataaattattgattagtgtgattataatttattaagttattttaaaggctaatcatgcatttagagtcatttggagggatgttagcacattttggtaaagaatagtggaagccggcaagctcggttaaacaaggtgaaacttaattgcaaattttgatgacctttcaagcataattggattggagatgaacagaaaatttgtagatatcgttctcagcttttcgagacatcttgaatcgtcttaatccaagttgcattgaagaagttgtggccaaattactaatctagacacgcgacagaattttttcggcaacaagttgtcgctgcggagagggaaactcgtggccacggtgacgacatgatttctaccaaattttaaattttatctttgtttttgtaaactgagatatttttaggacttttagcgttcatttttagaaatatttaactatgaaattgagagagaaatttagagagagagaga

SEQ ID NO: 138311 - DNA, 607 bp, Cannabis sativa
  modified_base (566)..(580): a, c, t, g, unknown or other
cgaattttatagcacgaaagcacgacacgcaagtacaaaataaaagacgaataaaaattcataaaataattttttatttaataattcgtctactctttcgtataaacatgctttatttatatattttaagactatattttttaaaaaattaaattattttaatacatataatatatatttgttaaaatatcctttttcaggcgaaagttttaaattatgttggcacattttataaataagtgataatagttggcacattttgatatgttaaatatttttttttttattatgttgaatattattgacaactttatgtgaaaaattattaatagactattatattggtgatataattttagttattgaacatgtaattgtaattatagtttttttttttttttgtgattttgaagctcattttaatcaaataatttatatgtgctttaaaattagaaaataatttgaaaagtacaaaaaaaaagggcaattttccataggcccgtttaggggccatttgataaaggggcaagttaaaaaatataatttttattaatcaattaatcaannnnnnnnnnnnnnntatatttaattgaaacatacctctttt

SEQ ID NO: 138312 - DNA, 666 bp, Cannabis sativa
cagaatgttgtcacctcacaagactgtgtatttttatcgtcgtcatgtgttagtgatattgtaacatagcacaggatatatatctatgtttatggtcacttatctcgaggcaagatagacgttgtattcattatcctcttttaacgttcaagattaatggccacgtgtcatgtccatatttatgtctcaaaatatgggcgtaacaagaactattttctgaaataattaaatcaaaaactaagtgagacatagattaaaatagaattgtatctacaacaatatgactaaaaacaaataatacacaataattaaattatttataattaaaaaataaaagggaattaattccaagaaaaagatacaaaattataacaaaactgattccacaataaaatgagtaaaaataaataacacgcaataattcaaaaactggtactaattaaaaaaataagagggtagcaattccaaaaatactgaaacatattatattaaaataaaggttaattagcaatttccccccctcggaattttgacatataccaaattatgctccctgaacttttttggccgttaaaaattctccttgcactattgagattgttaaatttaaggacttttgtctaatttcattcaattttactgtttcaggtactaaatcatgctccc

SEQ ID NO: 138313 - DNA, 509 bp, Cannabis sativa
ttcatgaaatatgaatttaaaacgatgtttgtgttgatttggatggtttcatgatggtttatgtgaaaatttgatgattgtatggaaatcttaatgtatgttataaaatattttgtgttttgttctgaaaatatttttactgaaaattataagaaaaattaatgaatttaggcttttacagaactcaattttgattttttatgaattggttatgtttttttgagtttggatgaaaatatctgacacgcctttgtccgaatttactcagacaagggctgtcctaagcccctcctgaccgaggtttgccctccaagaggctgctaggacccctttcctcacccaaatgcagccttgtgcaatgcatactcccttagtgcaatcttgtttttgtgatatcttttgattcaaaaattatttttcgttgaaacaaaatttaaatttggtagaattttgtgtagaatctaaatttttttgttaaaaatctaattatcaaaataaaattaattttt

SEQ ID NO: 138314 - DNA, 911 bp, Cannabis sativa
tgtgttgcacgcgtaattattttattttatacgcgtgtaaaataaactgtttgaacattattttttatattgtaagttattctgaatttctcaaatcttgtaggttatcttaaataactataacgtacatgaatataaaaaaaaatagactaaattttttttcaagataccgaaacaagtcaagagtgcatcagtacatcccttttaagggagtgcattgtagaatcaccctaaattttatagtatgtgtatttatatattttttaaatttgatagtataacaaaataatatgtatgtattaaatatttttagttaactcaagtttttagtttagaaaaggtattaagaaaataagtgaagactcagtagagtctaagctcaaattaaaggagatatgactcaattaaagtttattttttttaaaaaaaaaagatcgacatacttgtatttgatgatatatgattggaaaattattaagtaatcaaaattaattattaaacacattaagtaataagtttgaatttttctttttaatggtatatgattaagaaactaatattataatcatttttagatatttaaaatgtgtgtaaagaaaatatttgaaattgggaatgaaatctaagattgagattgagatttcagaaggacaataatagcgcctacaaatgagttctggtgataacaatagatgagatgaccatgtgtgaaatacggtaagacaataggtaagatacggtaataacaacgagtgagagacggtgaaactatgagataacaggtgagatacggtgatgacaatacttcaagttttccctataccattctatttatttattttataataatatttttttaacaaaataatttaaaattctatatatatacatagtataaattttaaaatttt

SEQ ID NO: 138315 - DNA, 566 bp, Cannabis sativa
caggtttctcaaaatgtttgatttgtcatttatgttatttttagacccttagttggttatttctttgataattagggtattgttataagaatcaccaatatcagaatccttagtagtgagtttggattcttgaattaggttttttgtgtgttatttacccatttatgttaatgcgacttagggcatccatccaccacgagattttccgtttaagtcagccaactcacttgaattcagaaatgaggtaagaatagcatagaacatgttatatatgtgataatatgtatgtgtgacatatccatgcttattgtgattcgtatactaccaacactagcatggtagcggtactcactgtattggtatagtgtacaatgtttaaagagtacattatggtgttaccaacactagtacaaacaggtacggagtgtatgtggtacaacacttaggggtactcgaggtatggggaaaaccctaccaaccctcgtacagtgacggtacgtggtgcatgttgtatagtggtcgtaccttagtaaagaacgttcttacttatctaataagccttgtgg

SEQ ID NO: 138316 - DNA, 516 bp, Cannabis sativa
  modified_base (27)..(31): a, c, t, g, unknown or other
  modified_base (59)..(63): a, c, t, g, unknown or other
  modified_base (91)..(95): a, c, t, g, unknown or other
  modified_base (127)..(131): a, c, t, g, unknown or other
  modified_base (160)..(164): a, c, t, g, unknown or other
  modified_base (191)..(195): a, c, t, g, unknown or other
ctaagaaataagattctagacttaccnnnnnttctagacttacccatgtcatcaaactnnnnntagacttacccatgtcatcaaactagcnnnnnacttacccatgtcatcaaactagccatccatnnnnncatgtcatcaaactagccatccatcgcannnnntcatcaaactagccatccatcgcattnnnnnttgtcgccgagcaaaaattataaaaataacataatccaaatataattcatataatacacctaaagtttaataaaatctccagaattaagaaattataaatctaatgcccatttctaataatgggacccacaaattattaaagaaataattgtaaaaatactaataattatcacccaagaacatccatcaagggccaagccttggaagatttcttgatagagggggtaactccagatgagaacccacttgttcagcgagaggcaaacacatggaatttgtacgtggatggagcatctaatgaacatggctcgggtgcaaggg

SEQ ID NO: 138317 - DNA, 1386 bp, Cannabis sativa
  modified_base (852)..(863): a, c, t, g, unknown or other
  modified_base (1321)..(1325): a, c, t, g, unknown or other
  modified_base (1351)..(1359): a, c, t, g, unknown or other
aatttttaattgtataactttcaaataacatagaaaaaaattagcataaaatttagtatacgttcctcgcacgtagctttttgctagtatatatatacactagtaaatgataccgggcgaaggtttttgtaacatatttgagaaagcttgttttgtgtttttaaaattataaaacaaaagtggttacagaacacacttttgttttctgtttttaaaatttagaaacaaaaagagttatagaacacatttttgttttttaaaaacaaaattttaaaaataaaaaatctactttcatttttctgtttttaaaatttagaaacaaaagtagttatagaacacatttttattttttaaaaacaaaattttaaaaataaaaaatctactttcatttttctgtttttaaaattagaaaacaaaagtgttatcaaacgccacctataagtttcgtttggtaacacctttgttttctaaatttttaatcacaaaatgaaagtaaaatttttgttttaaaaaatttatttttgaaaaataaaaatgcgttctgtaattacttttgttttttaattttaaaaacagaatacaaaaatgtattctgtaaagtttatttttatttttttattttttatttatttaagtcgggtctaagtctgaggtggaattcgggttcgggtcagaggtcgggttcagcaccaaggccgtggggggatttgggttcgggtctggtcggagtccaaaatattaattaagaaaaaaaactgtttaaaaaaattattgaatgtaacttttttctgtttttaaaattgtgattttcaattaaaaaattaaaaagtgaaaatagttttatagaacatnnnnnnnnnnnntattttcactttttcaattttaaaaatagaaaagtgattaaaaaagtgttaccaaacgtcatcataatttttaagatttttctcaatctctcattactattatttaaagtgattactctattaagccactaaggttagcttagtcgtggaggagggatggaaaaagggagagatcatgcgttcaaactcatgacctttcaagctacaaactatattaattgattataaaaatatcattatgctacactaaaaaaaaagtgattactctgtttaaatttatagttttgatgtaatttaaattattatataaaaaaaaagtcacgtctctaaattattttcaattttaaatattctaataaattattctttgtgatttttttagttgtttataatattaattaagaagtaattagaatttatttattctctcttttaattactgttgcccctgattttgnnnnntatacgtggaccaaccaaacaaggannnnnnnnncaagcaatgtacaatccaaaaatattt

SEQ ID NO: 138318 - DNA, 637 bp, Cannabis sativa
ataacatagaaatgatgatttataattagtcacaattttttacttttagttataaattttattgtaactaaaagtacgtaagacttttgtagtgtagtaaaaataatgacaaaatataataggagaaagtgaaagagaaaaaataatgtgtaaaattataatgaaagagaaagctatgtaagaagattagaaaaaataaaataaatttttttgtgaaaatattaaaaattattattttatttttttgataatcagaatattatttggttgttatctcaaattttttgtttttttttttgaaaaattattaactgaaaacattctaattatattctcataaagtaattttctatttttatatataaattaaaacaattttttttattattatttataatgtcaaacaactctcttttagccacttattttgattttgcttcctaagaaagaaaaacaaaagtagtctttatcaataatatttaaacacgtaaaaacatctatacacacaattcaaaataaataactaatccaataattattagataagacaccctccgcaaggtgttaggcttcccttgagcagtcatttcgcatttaatgtcgcatgggagaaaacgtgttgggactgctacacgca

SEQ ID NO: 138319 - DNA, 669 bp, Cannabis sativa
  modified_base (626)..(629): a, c, t, g, unknown or other
tcccacaaatcgtttgctgatgtagtacattagcttttgaatcttctcctcttcacgcaccaatgcgttgctcaatgcatgctcagttacaaccaagtataggtacaatacctcccccatgaatggtttttccaagagagggggttcaaccaggtgtttcttcaatgattgaaatgcttgttcacactcttctgtccattcaatcctattgcttcctcgcaataagttgaagaatggtaaacatctatcagtggatttggacacaaaccgattgagtgcagctatgcgtcctgtcaggctttggacatccttctttctttttggggaaggcatgtcaataaatgcctttatcttcttggggtttgcctcaataccttttgagttaacgataaagccaaggaacttgcctaatgataccccaaaagagcacttgagtgggttcaacttcatgttgtatcttttcaatatagagaaacactcttccaagtcgtcaacgtggttcttcgaaagtttggacttgacgagcatatcgtccacatacacttccatattgattccaatttgatctgcaaatattttatttacaagtcgctggtaggtggcaccgacattcttcaacccaaagnnnntcacattgtaacaataaagccccatgtcagtagtgaagct

SEQ ID NO: 138320 - DNA, 613 bp, Cannabis sativa
ttccttaaaaagtactttcttcaaactctcatccttctcaacaaagatagattcatcatcattaccatgacatttcaatccagtaatcaaggaaaattcctctattgagaaccttaccatagtctcatttatcttaaaccataaatcaacatcttcagacatcgaatagacatctctcaacatgatgtgatgtactaactgagcttgaaatcactactagaaattaggcttttagtgacaccatatagtgacactcataaaagtgtggatcactaaaaaattaagagtggcttttagtgacacacaacattagactctaaatgttcagtgtttattacgcgaaatgtgtgtcactaaaaatattaagtgtcactaaatactaaaactcaaaatatataattttataaaaataaaataaaaaaaccatggcctatggagacgtgccacgcgtgtcaaaaaacgtggggaaacacgtttgctcacaccctttgggcgtcaccatatacaattttatctaaaaaaaatacatatcagccctaatattatctcatcatatcatcccaatcccttctcccctaaaaacacagctccaccataccaggccactgctccc

SEQ ID NO: 138321 - DNA, 796 bp, Cannabis sativa
ctcgggacccgaacttggacttggacccaaacatagacccagatcggggtccagacctggacacaaacgtagacacagactcgaagcagaactcagacacccacacctagaatcagacccaaagataaacctggaccctaacccaaactcgaacccacaccaggatcagaaccaaggacttagtcccagaactgaatctagactcagataaggattggaacttgggactcggacccaacctagaccaagaccaaggacgcgaacctagacccggagcctgatctggacctagactgatatcccgacccgaacccaaactcagaccatgactcgaactccgaccagaactcaaacccaacatcgaactcaaaatcacaaatggaactagaaccgaactaggactaggaccgtgaccaggacctaaaccaaaacctgaaaccagatcaaaacccagatagagacctaaacccgaaccgatactaggacttgaactcgaacctagaccgggacccaaacccatacaataaccgggacctggacctagaataaggataaggaccttggaaatagaactaggaccgggacctagtaccgaccaagaccttaacttgatcttcggacccagctcgtgacccggcactagaaatggaaccagactgggacccaagatttggatccggatctggaccgagtgcatggaaaaaacccatagtcggtgtctggatttaggacccagccaaggacccgaaccctgacaaggactcgaacccacacccggacctgaacctaatcccaa

SEQ ID NO: 138322 - DNA, 570 bp, Cannabis sativa
tgggtaaataaaaatatagaaagggcactaaagtgccttgtacttctatgatatgacatcttataattacttagcgattctttacaattcttattaaattaaaataagtgggacctgatattgtattgtactaaagccactaagactagcttagtagtgagggagagatgagaaaaaggagaggtcatgggttcaaactcaagacctttaagatacaagctattattaattgattgtaaaatactattacgctacactcaaaaaaaaaagatattgtattgtactaatacccaggcccgaccttaggctaaggcgggctaggcccgtgcctagggcctactcaaaaccaggacctaaattttttatatagtaatattgttttgcattgaaaaaaacggtatttttgaaattttttgtaaaaagaggtaccataatacttacatcttaatttagataaaacacacacttaacaaattttttgggcccattattactcagggccggccctgctaataccgatattacaccccataaaagtgcgagaaaattacattgtatacccattttatt

SEQ ID NO: 138323 - DNA, 585 bp, Cannabis sativa
tcaaatcccatcttactcatcatagctcgaagaaagccccactccacacgatcataagctttactaagatccagtttgagcgccatgtatccttctttgcctttacgctttcttttgagatagtgcataacctcaaacgctatcataatattatcagtgttaaggcgacctgggatgaaagcagattggtttgaagatatgatatgaggcaacacttcttttaaacgatttgcaagcaccttaaacactatcttatataagacgttgcacaaggatataggccgaaggtcacccatcgaagtaggttgtttcttcttcggaatcaaaacaatattcgtatcatttagtgcatcaggaatactaccattcgcaaagaattgacaaacctggttcacaacattgctcttaactatttcccagtatttttggaaaaagtcgggagtcataccatcgagaccaggagatttatgaggatgcatattaaatagagcacttctaacttcttcttccaaaaccggcctaagtaaagacatattctgatccatggtgatcgacggagtcatctcctctaccacagttgagtaa

SEQ ID NO: 138324 - DNA, 924 bp, Cannabis sativa
aactccaaaaacccgtcctcagttcggattgtaggctgcaactcgcctacatgaagccggaatcgctagtaatcgcggtcagccatacggcggtgaattcgttcccgggccttgtacaaaccaccatttgagtctccaacaattattccaataattacaaatccaatcacttctatttttcatttaagatgagaaagaattccccattggtagcaaatggtattcattaagcagggaaatcctagttaaaaagaaaaaatattctgcctttactcttgactcttgcaagaacggactactgcttttcctccgtcgctatcactccacattataccgccgatcaacaccaacccccagctctcgactttcatgtaagtttgctggatactttgtgtctttactgtttatctgcatgctaggataaaactttttggttaagtgttggatttctgggagatagctttggctaagtctattatgcgatgtataggatctcctttatttgtgtttcgttatgttccttccttccattttgcaaccgacccctctgtcgaaagattatttagggtatagggcaatttttcgttcccacattctgtgtttttcactttccctctactttcgctgcttttgagatttttgcaactgatgtttgctaaggaaagtattttgggtttccatctttggcaaacatccggatggggcctcttcccagcggttaggggacccccattccctcttttaactttagggtttggtttgggggctaactgctggattctttctttttttagaaccaaaatgtctactcctgcttctggaaccaaatcttctcggaagggggcagttactctggccaccctggaggaagtcatgaagggcccagttgcccaggagaactatacctgccgctccaacggctgg

SEQ ID NO: 138325 - DNA, 1190 bp, Cannabis sativa
tttgctattcatatacaaaagttttgtcgcctagccactattcagcaaaagccttgacatgtacaatcttcacctgctcgctctcacagctcctcagctttagccttgcctttacctacacatggaaatagcactgtgagtcgatagactccgtaagaaaagcataacatataacatactagtatcccggtttataaccttgcgcctatacacccgatcataaccctatccccgtgtcacggtactgagtctagaacgttcatacgataatactatcgaccgtaatgtcagcctatactcaatatgccagtcatactctagccatattaatgtgacaacatcgatcagtatttcagccagcatacatttatcagcaatcagtacaactctaattataccattactgctatcaatgtaatctaacaggcataaacaacatgtatgctaaacatgtaataatatatgcatgatattatactaatcttacctcacttccgaattcaggtgtgtcggccaacctgagtggagcaatagctcggcaaattacaggctcgtaaatcacatcgataacaacatggataaacaacatgctaaatcacaaccgagacttaggttttaaactaaaaacctttgtactgcaacttaatatatcaataccttaaactagtatggaattaaccaacctgaaactaacgcaaattgacaacctaaatttttcaggaaccccagctgctaaaatcggttaaccggttttacaggtagctgtaaaaccggtacccggttccccagaaaatccaaacaaattcaaagctcaaccaaatcaattccaaacttaaccaaaaattccagacctgcatattacaccctaataaacattttccaagcaatagaacaactacccaagctcaaaattgaaaaacaccattaaagagccaagcttgagttctaaaactcaaagcttgctcaatcaacaaactacctaccaaaacatgctcaaatcaacatatctaaacataatttagcttcagaaaacaaaacaacagcaacaacaacaactaaaatctctatttcatgtaaaaatccattttttaaaattcaagaaaacaagagtagaagtttaaaagactataccttggcttgagatcactaacaactagctgaaaattacttgaattactgggaaaaattcc

SEQ ID NO: 138326 - DNA, 1192 bp, Cannabis sativa
  modified_base (36)..(50): a, c, t, g, unknown or other
  modified_base (1012)..(1022): a, c, t, g, unknown or other
atatttaggttgttaattcaacatacttgtgagtannnnnnnnnnnnnnntaaaataatttccaacagttatgtaatgctcctgttacttttaagtgctgtatgatgagcatcttttcaaactacatagagaacataatcgaagtcttcatggatcattttagtttttatggtgattcattcgataagtgcctgcacaacctcactttgattcttaaacggtgtattgaggccaaccttgtgcttaattgggaaaaatgccattttatggtgaatcaaggcatagtatctcgacatgtgagttcagagaaaggaatagaagtgggcaaggcaaagatcgatttgattggctccctaccacaaccaacaacaaaagaagaagtcagatcgtttcttgggcatgcagaaaataggatattcatgaaaaaattctcaagaatatatacaccattatgccatcttcttcaaaaggatgtcaagtttgattttaatgagaactgcttggtggcttttaactttttaaaagaatcattgcttcagctcctattattcaaccactattgtgctaaaatttgatatacgcaagtgtacgcagtcacaaacaagtaatacagtgataagtaatgagtatcgtctccacaaggactgtaaaaataaaatttatattgcaatagttaattaccaagcaaaaatgcctaaaaagcaaaatgaaatgagtaatgaatcaactaaataaactagaaaacaagtaaatcaactcaaaagttgatgcaagatgaaaataaaattgagttgtaagctttcaaaatgtgaaagggttgaactattgaatccccctatgtttagcaaaaactgtgcgttttgctgcagcaaaatgttagcaaatctttagcaaaaatctcaggttaacaagaactccattaaagtgcacaaaactcttcccaatttaatgcaaccaacccttggacctgttcaaacatattcctatgccaagcaagctcaagaataccatnnnnnnnnnnnttctcaattgttacacaaggatataacatattcatatgttatttcaaatccaacctaaaaaagatttagaacttgtgtcattcaagctaagtccattacatttaacctttccagaattaaatataactcaataatcaagctattgttggccaaacaatatcaagaaacta

SEQ ID NO: 138327 - DNA, 858 bp, Cannabis sativa
tatgcatgagaaaaaactaaaatcttaaaaaaaaacaaatagataaaaacacaaaaaaatactaaaaatagataaagttataataaaaataataatactaaaaataaaagtttatataaaaaaaataactaacactaaagattatatctgcaaattaataatattaaaaataaaaatttataaaaaataataataactaacactaaagattatatctagtaactaataacactatttagctattattattttcatcatcattgagaattatttagttcgtccttctttttttgttgtgagtatcacaataatcttcatcagagtcttctaaatgatttgatatgttattttcagaaatagtgttatttttcatatgggtcaaaaataatcttcatcagagtcttctaaattattgtgatatgttatcacaataatcttcatcagagtcttcttgatcttttttgttgtttttttcattctttgactcatgttcttgttctaatttttcatctgggtcaaaaaaatttgacacagtttaattctcaagcccttctttcaaattgtactcattcaacttcatcttgtaaacaaaatctttcccacaaagtctttgaatctctataggaacatcattgtttatagacaacttgttaaccaatttatttgctaatatttcagctacttcattaaataagaccaaatttgtttcagcagttttgtcattggctttgatatgtattttgaatctatatattagagtgaaaaaagtagagaaaaaaaaattaaatatgaaacaaatttagagagaacacaaataacataataaattagtattttgataaaattaaatataaattt

SEQ ID NO: 138328 - DNA, 1080 bp, Cannabis sativa
gggtagggatcttctcaaaagaggtcttatttggaaggttgggaatggcagatctatctctactattgactcttattggatccctggttagaggtttgtttctttcaaagatggtatcaccccctctgagtttactgtctctttctatattaatgctgatgggtgttgggatagagagaaattggcaatgttttttgatgaggaagtaatccagggtattttgactgttcctcttgctgatacttctttagatgatactcttgtttgggagcatcattcttcgggtttgttcactgttaattcagcctatcatttggccaaatcagttacttctttaccttcctcttctagcagtatttctctggtcaggtggtggaagaccctttggaatttaaaaatacctcccaaaatgaagcatcttatctggagggcttttcaccatagtctgcctactgctctcaatctttcccataagaaaatcttgtcatcctctctttgttctctctgctctaagggtcttgaatctgttactcatgcactagtagagtgttccagagcttcgagagagtggaaagattcaaggtttaaagatttttaccgagttgctaggaattgtgatattagagagtatctgttaagaggttttcatgatttgtctaaagctgatttgaaagttttcattggaattgtttgggaaatttggaatcgtcgaaatataactttgtttaacaagaggagttccttctcttctactgaatttcaggttgaaggaatgcttcaagattatgatgaggcccaaattttcaatagtcaaagctcatttgcagactctcaagaaagttcttgtaacaggttcattccagttcctcctaaggtgggttcttttaagcttcttgttgatgctgccatcagtactcagttgcaaaaagttggaattggggcttcagtttttgataataaaggtgattttgtagccactttgtaaagtcctttttttggaaagttagttgacaaaataatttttccttttatggtaagattcttgtgcattcataaccgatttcttaccttgtttattcg

SEQ ID NO: 138329 - DNA, 636 bp, Cannabis sativa
tgtccaagcttgaactagatcaagctcaattagtcgtgatgaacaataatgcagaggttcaaccatatataacataagtagcttttcctttgattaatattattgaagtcacgatgaacaataacttgatttaccttacttgttttacagtgaccatatggagttgttacaatcaatggttccaagaaatcataaaaataaaaaaaaaatgggttgcaaaccagcatcgtcaaactttcattgcgtggctaaggaataccattaaaacaaagttgaacgaactgaatcatagagtatctgatgtgttgattcatattgcccttggaccaacttttgcggtagcaaagcacaaaccgtacattgtaaggggtaaacgtttcaatacaaaccaagaaatgatgctcaagaggttcaaaatagtgggatacgtatcgtcgtagaaagcataaatgttacaagggcaaaagatagaaaccctattttaggtactatgacgtattatgaaggttattgatgaaatgtgagagctcaattattttgcgtttcaaattccactttttaaatgttgttgggttgacaataatgttggagtaaaaactgacgagcttggttttactttggttgatttaagtaaga

SEQ ID NO: 138330 - DNA, 1007 bp, Cannabis sativa
tttttttttttttgagtttacgcattgtgttgatgtttgtttaatttgcatgtttttgtattatttttacattgcttttagattgtggacaatatttattgatacttagttatttttcttatttaattagaaaaattattgtgtagttgtatttttgtagttttttggttgaccaaaacattcattaaaaaataattttatttttcacaattttgatacaaaataattataataataaataaaattatactatttaaaattaaagtaaatattttaaaatataaataataataaaaacacgcctcctaactaatgaaataatacattaataaataatatttttttaaactagaaataataataataaatgaaattttttattcaaatattttttgaccacataacacatctagtaactagcttatttatagcttttaacaattcaagcaaaataaatatattttgaaaataaaatatcaaatcaaatcatactaaatgagtttgagtaaagctaaagacacacacaaaaaatatatcaaatactttttacacacaacaatgtgtattaaatatgaactatagataatcatatatgaacacgtcatttttataactagtgtgtgtgatttacagaatgcacaaatttgatgtccaatattgatttgtatatttatgtagtgttgtcatttaattgatttttagttgttattaagttgttcaacaaataaaaaattgagtatgtgtttagttcttttatgggcattattgagttgatatacacgtgttttgcagttgtttctaaatttatttcatacatcagtgatgttttttctttttttagagttgatgcaatttgtggagttgtttacatgtcaatgttatttacatattgtaatggagtagttatacagttgtttatttgttgttatttagttgtttattcaatagaaatgaatatatatacatatttttttttttcattcgtgtgttgtttttatttatttttt

SEQ ID NO: 138331 - DNA, 585 bp, Cannabis sativa
tctggaaaggttaaatgtaatggacttagcttggatgacacaagatcttaatcttattagattagatttgagataacataggaatatgttatatccttgtgtaacatttgagagttatgcttgtatgtattcttgagcttgattggaacaggaatatgtttgaataggtctgaaaattgatagcataaaatttggaagagttttgtgcactttattggagttcttgttaacacgagatttctgctaaagatttgctaatgttttgctgcagcaaaacgcacagtttctactaaacatagggggattcaatagttgagacctttcacatttcaaaaacttacaactcatttttattctcatcttgcatccactttttagttaatttacttattttcttgttcatttagttgaatcattaatcgtttcattttggttcttaggcattttgcttggtaattaacttttgcaatagaacttttatttttacaatccttgtggagacgatactcgttacttatcactgtattgcttgtttgtgactacgtgcacttgcgtatatcttattttagcacaacaaaactccag

SEQ ID NO: 138332 - DNA, 696 bp, Cannabis sativa
  modified_base (28)..(29): a, c, t, g, unknown or other
  modified_base (55)..(56): a, c, t, g, unknown or other
gagtacaaattgatgtgagacaataaanncaaattgatgtgagacaataaagttnntggtatttttcctattgctataaggtgtaaaatcaattagctataaataaatatttataataaagagggatgcaaattgcaatatggagagatgcacattatgtcttgtatgtaaggaattactcataaagcatatatttattttgaatagactttcttttggtttgattgaaagactatttcaggacaagcatgacactgactgctcattatggtcttgtgttatgtcaaatgaattactaatgtgtcatttatcaatagtgatattgatgacaaaagttatgtatccaacaagaaaactttgtgtccaaagacccaaagaatatagtttgcaaattaggaaaatccatgtataaactcaagtaagcttctcgtcaatgattacacaattttcattaagtattctcatttggtttttgagataaaagcttttgacgattgtatatatatcacaggttcagtgggagtaagaatatgatcctggtattatattggtaaaaaaaaattacttgccactgatgatatacctatttttgtatttagaattgaagatatgttcttgaattataacaaaagaggtatatcaataaagtattcaaaacttttgtcatgaaatatactataccaggcgaaaggcttg

SEQ ID NO: 138333 - DNA, 503 bp, Cannabis sativa
tgaatcagtgtagtttttagtattttgttcaaaagtataaggacaagagtgatgaaagtagataccatgctcacttactatgtgtgagaaagcttgaaatccaccccctattagttcttagttgcttaattttcttgtcaaattgattttctactagctttttaaattgagcaaaagctggtaaggcatcaatttttttgtttaagtggaactagccatgtatatcggctgtaatcatctaaaaatggatgtaatatctataattggtgtgtgaggtcactggggctggtccccatagattagtgtgtataagttccaaaacttgagaggcatgactagttgatgtgggaaaaggtagagagtgtgcttggccaaattggcaagcatcacaaaaactgtgttttttaaataacattaaatggtacatgggatagttttatcacttgatttaacacataactagatggacgacctaggcgtctatgccaggtatcctttaggga

SEQ ID NO: 138334 - DNA, 881 bp, Cannabis sativa
  modified_base (641)..(644): a, c, t, g, unknown or other
attatttaaatagccataaataatttcataattaatcacaaataactgataatttccaaattaactaagcgggctttgcatgtaaccttccacgtcggcaataaccatctaaaggataaaactaaaaaacaattggacagttatttagtattatctcacgattgatttaaatgaaacgtggggattgtccatgtttcatttacaattatatttaaatctaccctaaaaataataattgccaacctatactcctataaataggggcatattccatgggaaagggaagacaaatttgatagagaatcattattattcaaaatcagaaattgtattctgtattctaaaagtatccctaagaagaactcatggagtatgtagattttaactacaaaaccacataaaaatatctggtgttattatatcttttattacttattaaattctttagaatatttattactgaaaggctaattaattttggttaacaaaaatctgcgttaacaactggtgctatagccaaaagtaaaaagcctcgaagctacaagagaacaaacacatagaaaggaaataccacatcatcagggaatatgtggcaagtggggacatactggtggagaaagttgacactgaagacaacttannnnatccattcaccaaagttttgactataactacatttgaaaagtacagactgaatctaggattaattgaaatatactgattgtttatgttagtgaaaagtgagagtttgttgggcattacccattgggtgaggaagagctaagtatgtggtggtagcagtcgacttcttcactaaatggacggaggccaagcccctcgtctccataacatgcaataaagtccttgattttgtcgtcaag

SEQ ID NO: 138335 - DNA, 832 bp, Cannabis sativa
  modified_base (322)..(322): a, c, t, g, unknown or other
acacaaatcaattcaaaatgaaaccagatttaagaaatattaactcagattattcctctcacccaaattcggtccacacctaaacaaatgtaaatctaatctaaaaataattgccaaattcgttgacctcaaaaagttattgactgacagcggagtcgtatgaatttgatgtttgcctcgtgttacacaacaagaacaatatagtaaataagataagaatttttatagaaatttggcccctttagttaaagattaatgatttactccccttttggttgtattgataactaaagataatactattcagatcactataggtggnatctgatatagctctctataaggttacaaagcatagatcaagtaggtagatcactaatgagagaggtatagccttagaggcatgtgagatagccccttgggcttgtacaagagagagagagcttagggtttcagacttagagtgatttggaggctagaattagacttagagttaaggcctttatataggaaagcctaaactctaatttacaattaaaatccttaaatatttacatattgaattgattaaatactaaagattaaattgccccttgaaagtagataatttccatcagtttgttgagttgttaagggcccaattcgtaagtaatttgcagtccacgtatcaggttgtacaaaatatcttgccaggccaatcctaactggccatacactgtaggatatggtctccccggccatgcaaggtgttgactggatttttagctaaccgacgcggagtcgtaataaatgagatttaaaccaaaatcacaataataaatgcaattaataa

SEQ ID NO: 138336 - DNA, 580 bp, Cannabis sativa
cgccacatttctttaataagctgccattcatatatgagattcttcccggagctcgtctatcagatctagtgcttcttgcaacaaggcttggttcgttgctgggtcgtacgtagatcttctgtgggatgggattagggtttctaccagtaccatggcttcacatccgtacaccattcagaatggagagtgtccggttgtggttcttgtggtggtgtggtaggcccataatactcgtggcagttcctcaggccatttgttcttgcaggccaataattttttctttaggataacctttaatattttattgacggcctctgcctgtccatttgttagtagccttgcaaccacagagaaacttttgatgactctgtgttggttgcagaaatttatgaattcatcgcagtcaaactgctttccattgtctgagactatcttgtggggcagcccgtatcgacacacaatatttttttacaacaaagtccaagtctttcttggcagttatattcttcatgggctctgcctccgtccactttgtataataatccaccaccactatagcatactttaacccaccctttcc

SEQ ID NO: 138337 - DNA, 568 bp, Cannabis sativa
tacacaccaccccggagatatgaacataaaaggtcgccttcgttgtaaaacgtcgtgcacgttcactttcccgagcacaactagccatgcaaaaattttgaccttggacggagctgtgcttttccataaaggtttggaccaagagggcctagctacactttggttggaagtaaaccaaacgaatgccgatttgcttgagaagattccattggcatcaggtttccaaattctgctatcaacattaacgttcagtaatttaacctgttccaattgttgtaacaatcctataaggctaggcaattccctttccaataagttccttctgaacttgaaatcccaacttcccacactttctcccgctgcaccttccacaactacaagatcttttatacttacgtttttagctctagagatcagggctaagtccggataagtgtgtagtaacggtggaccgtttagccactcatcttcccagaaacgaactttgtctccatttccaaccttaaactttactaggcttaaaaattcatcataaagatctgctatgtccttccatggtcccctcggg

SEQ ID NO: 138338 - DNA, 566 bp, Cannabis sativa
aattattttctttccattccattccatttcattacctaaataaaaatttcattcactctcacatcttcttcttctctttgtgttctcaagttctcgcttatcctatttctttctccatatttaatactagataacttagccgccctttgtgcggcaaatttaaataaaaaataatattttaatataataaaaaagaaaagaaagttttattaataaaaattaacttaagaataataattttaatgtataaaatttttgaaatcagattattttttttaagtacaaaatcagaattatataattatgtattattattgattattgattactagattattattatatatatgattaaataacatttaacatttaaatttgaatattagaatatattaattattaatatagatatttcagatattcttacctaaatttaatttggaaacctaattaaatcttcaaattaaaaatctttaagaaagaaccactatttttaaatgtagtttattaaaaatgtattaaaatagtttcgttctttcaaaaaaaaaaaaagtgttaaagtacac

SEQ ID NO: 138339 - DNA, 835 bp, Cannabis sativa
ttaaacaacatacttgtgagtagttctaacatcctggtaaaataaattccaacatttctctcccaagatcaataacctggcgttgccccacaagtttaaactgccaacctgcaaaatgtacaatggaagagaagatcctctttcccacctcaagtatttcgagatgcaaatggatttgcaaggaatacgcggagatgtgtgttgcagaatttttcctgctaccctctcggaagccgctcagcaatggtatttcaagctagcccctggaaaattcaactcatggaaagccttctcttcagaattccatgcacaattctcctcctcttgccaacttccgttgcatctaggagacctagtcgaagtcaagcagagaccaggcgagcctctccgagcatacataaacagattcatgacggaagcgaccaaggtctcacgggtaactgaagatggaaaattgtctgcgatactatggggcattgaggtcctcggtgaactttggaaggacataaggaagaacggcccagtagactcaatgagtgattttctcgatcgtgctgaaggcttcattaagattgaagaagctattcagcgagcagaaggcgagcaaaagcctgacaagtcaaaagctcgttccactggaacgtccgcccaactctccccttacccaaataattcaagctcaaatggtaaacattccaacaacaacaacaggcaagggaatgggaagaaggaaaagttcaccggcgaaaccgagcaagctccccgagagaatcaagcaaagtacactgcatttaccagcttgactgaggatatagaaagtgtttacatggcaact

SEQ ID NO: 138340 - DNA, 951 bp, Cannabis sativa
aacgatttatttacttttgcgcttaaagttctactaatcaccttttgatatctctctatggacaccaccacccatactacactataacaaccgctttgtgaagacacgtttgggcgtaatcaggccacatattgcgggaaagagcaacaatgcccaaaagaggtatgttaaggaagtgaagaacgagcagtctgccttagctccagaaccttcgaagaaggcaaagactgaagaacctcctataatattctcggaggaagatgaaaaagacgtgaggtatcctcacgtcgacccactggtaatcaccatccagctcgccaataagaggataaaaagggtgctggtggacaaagaaagtttagtgaacatcctttatagggaaacactgaagaaaatggggcttgaaaaagctaaattaagaccttgcatggtaaatctttacagatttacaggagacagtgtcgccagtcaaggaataatcgagctcccattaacattgggtgaagcacctttatccactacaataatgcaagactttttggttgtcgacctgccatcaacttacaacatactgctgagtcgaccaacagtaattggactaggggtagttagttcaattaagcacttatccctaaagcttcaaacattgatgggtgtgggagtagtgcgaggtgatcaaatcctggctcgtgaatgctattgcatagagctgcagcatagaaaggctgatcaccagctaatgacagtcttgcttgaagaaggagagaagaaggatgaagatcttgatccacgaattcaagatgaaagaaatttgttgaaaccaattgaggagctagaagaaatttttctagattcaagaaatcccacaaagtgtgtatacattgggaagaacctggatgaacaattgaaatagcagcgaataagctttttgagggcgaaccaggatcagtt

SEQ ID NO: 138341 - DNA, 1172 bp, Cannabis sativa
  modified_base (37)..(40): a, c, t, g, unknown or other
  modified_base (453)..(461): a, c, t, g, unknown or other
gttaaaccaagaaatgccgttagatagacacttttannnnataaagatatatatatgtatatacaatatgcatcattaaatgttgagatattatgcttaaaaatatggtttgattttgtttttttttttgcttctcaattttagatatgtggttcaagttaaaatatggaaaaaattaaaaaaaaaattataaaaatacatcaagaaaaaattttatttttacattttatagttgatttatagttgtcgcgaggttgatttctgattgttttttagttttttttttttattttactttttgttgagtaaaatatatgttaatgcaaattttcgttaaccacatttgagcctaaataatgataaacttgcacagaaaaataaaaatagtaaagactaaagtatgagcacaaaggttttttacgtggttttgtagttaaaattctgcatagtccnnnnnnnnntcttattagatttttgatacagttctagggcttttctcttatgaattttcgtccctttttcagtctaagttgtctctatttataattacatagtcagatagttaagtacaaggttggtatctttacaacgattatctcctggaatcgtgaggtttgattacatatcacgtaatataaatatagttaatatttgaatatcacacaactatgattagtccacttttactgggtcaagataatcgtgtattaaacacattttaaatcataacattctgggatgtctcgacagaaactcagtaccaatgaccttgatagcgagctagagcttttcccctatctctctgaggttgataatgtacacctcgtcacttcttcacttgacaatcgtagttcttagtgacaagggatacttcggcaattaacatcatttgaatgtcagcttctgctcgagagaactaactcgtcaagactataaatctcattgaaagatgtctgaagctgattggtgaaagtatcaggggcatgccttcatatagcgagataggcgcctcgctattagttgcttgggttcacccgactattatacttagtttgtatacttcatattatacgctaagtattttcactgttattatgcctcgcttacgtctacccaggcgtaacgaggttgatgtctcgccttgtgcatccaatgtcgtatggtttctcgtt

SEQ ID NO: 138342 - DNA, 977 bp, Cannabis sativa
  modified_base (425)..(426): a, c, t, g, unknown or other
aatcacattattcgtaaaactggtgagtgacatgctaaatcactttttggggacttaaacttgatactaaaagtttccctatcgacaaataatagggcaataccctaaatattgcaaaaacaggaaaaactagggttcctaaaactgccccaactagtagaccggttccccaactggaaatctggtactgtggggtttcctggggaccaactagaattccggttcctacatgtcccactaaaccggcgaccggttcagtgcaggaaaattttgaaaaattcccaactcactcaaatcaaccccaaatcaaaccaaaccttctagacctgttatttaaaccataaagaacatattcaaggcaacaaaacactacaacatgcacagaaacaaaatccaccattaaagagccaagcttgagttctaannctcaaagcttgctcaaacctaataacagcgcaaaaaaccagcacaaatcaacatttctaaccataattaaaccttagaaacacaattcaaacaatagcaacaactatagaacttaagcactcaactccatgcaaaatttcttacttaaagtttaagaaaactaaagaggatgatgctaagaactgtcctagagcttgagatcacttaaaccttgctgtaaaatacttgaattgatgaagaacaccaaatcctagtttcctagggatttcaagagagagagagagagagagagagagtttgaaagagagagagtttcttccttttcaagaattttctaatttttgtaaaatgaataaaataaaaaggtttattttaagtaatatcaacctaatgtaaaataaatacaaaatattaaacttaactacaaaccactaaaagacaaaaagtcatttaagaaaaatgaccatttttcccttcccataactaaaaggtcataaaatcacttaggggtattttggtcaattctgaaatcctgactattcccgacattc

SEQ ID NO: 138343 - DNA, 604 bp, Cannabis sativa
atcgtcctgctcctcaatttcctgaacctcagcgtccccttcatgatccccctcctcctagacggttggatcttgttcggcgctgggcaaagtggcgtgccgaaccacttgggggtcagatgcatcagccacgcgcgttgtctttttggtgcgagccattattctatggctggacgaaagattcaaggaagaatgtctttcacttgaagaaggtgggatagaacagagatgagggtgatcctcgtgcactattacaaaaagggctttttgcgtcggttaacgcgtctggtcaaagttattgactgacgcaaaagtcaacccttactttattgcttctgtttacaactgacgcaaataaaaattaatttgcatcggttgtaactctgacactaaaataaaaaccgacgctaaagataaaatttaaaataaaaaatatctatatgcactcattttgcttcggttagcgtttgacgcaaacaacctatgcatcaaccaacgctagagtggttagggtcttttgctaactgaagcaatatatctctctttatttaatatataacccatgaaaccccatcacgtctgtcccattgaaaataaaaattag

SEQ ID NO: 138344 - DNA, 1096 bp, Cannabis sativa
ctcctcgaagctctctacgggaaattcaaaggcaagaggatgttcagcgtgactttgtgagttttcttaaagcaacagagcaatgtaacagtagtatttcaaaaggtacgaaccctaatccccctattctgagatctgcaagtgtagtgaggaatttagagaactcttttaaaagttctcagcaagataggaaggtgaagatagatttagaggacatagattaactactggaaaccatctttggtgtgctatgtgcttggttctaatccaccgttgcacaaccttgaaggttttgcaaaacgaaaatggtctgagaaagtggacaaagtaaagctattagcatatggggtgttcttgatcagatttcattctattgagcaaagagatgaagtgttgaatgggggctatattttcttcaataggaaaccggtcattatgaagccatgggacctgaattcaagtgttaagaaagaagatgtgaaactagtgcctatttggatacaattagagggcttagagctcaagtattggggagagaagtcgttgtttaaaattgttgggcaattgggaaagcctatcatggtagatgcgattacaagagaaagagaaaggcttatgttcccaaggattttgattgaggttagcattgaacaagacttgccaggaatgcttgaattggaaagtgaatatggcaacaacactacagtaacagtccagtatgaatggaagccaagtgtgtcaacagtgctatggaatgggccatgtgactgctgaatgtaaaaagaaaactcaggccaagaccgaatgggttgtgaaggcagataatagagcagaacccaggaagaatacacaggatgaagatggttttcaacaggtatcaaaaggaaaaaagatcaggctgcaagaagagcctgtagaaaccgaaatacagaatgtgtttagtattttagatggtactggggaagagcagcaagaggaacaaggaactgagattggggccatacagatcaatacaagaggggggagatccctctcttggaaatggataagttcttttgttggaatgtccgaggggccaacaacactcaaaaacaaa

SEQ ID NO: 138345 - DNA, 693 bp, Cannabis sativa
  modified_base (505)..(508): a, c, t, g, unknown or other
taagtgacaaggcaaacttggttcctatccaattcctcgaagagcctagcatcactggcccggaagaaattgaaatgattgatacatccttaaactggatgacgctaatagcagcctacctcaactctggggaactcccagaaaactaaaacgaagcccagaaaatgagcaggaaagctacacggtatatcatagtacagggagtcatgtacagaagaggattcttgatgccattgctcagatatgtcactcaagatgaagctggacgactcctatttgaagttaacgacgaattctgtggaaatcatgccgccagacagagcttatccaagaaagttctaaggcaaggttacttctggccaacgatgattgaagattcaagagcctatgttaagaagtgcaaaaaatgccaattttcaaagataccaagagctccgcccaacgagttaacacagatgcaaagttcgtggtcgtttgccaaccggagcaggaggatctgttgttnnnncaggaggtgcatcagcggcctgactggaggttgaagctaccgcctcagtttcgccataagccacttgagacacgtgatactcaaggtacatgtccttagcatcgcccaagtagtcgaaattggcccaaggattagccttccaaaaatcaaagaagagctcgagatcggctttctccaaggcattg

SEQ ID NO: 138346 - DNA, 638 bp, Cannabis sativa
tctatatatttgtactatatatgtagtatgaaagtttttgatatgcatgtactcaagctattctatgttttaaataaaatccatatccatgtaattatgatgctatgtaaattggggcgatatctatctaataagattgtaattttttttttttaatattttgtggtatttttagattataaaatgcacaaataaattagtaattaaatgtagtagaattttaaaaaatatatacataaggtttttttaaaagtttttctttatacagctatatttcttttttacaattttaatgcacaaaatagaaatacaattttctctccttcttaatattattattaatctatattttcttagattgaatatttttataattattcttctaaattattatattttgatagttctttcctttaataaatatattgatttaaatatatatatcaataaattagaagaaaaacatccagtagaaaaaattaatcttaatttcatattaattagtggtaaaactaattcaattaattaaaataaaaaaaattgaaaagaaggatagagtgagtagagtgaccttttcatccatgttttttttttctttatttatttgacctttcattcttaaataattattattttta

SEQ ID NO: 138347 - DNA, 724 bp, Cannabis sativa
gtggggctttagagtttgcattcttggagttgggggttttgtaggaggcagagatgggttttgttagaggtggatatttctcagatttaagggtttcgtagaggcgagaggtcgtggtttgacagagctggggttaatcggatttgggcgtttcttagaggcagaagttgtggtttcacagagctaagggttttcgattttggggttttgtaggaggcagagctggatctcgtagttggagactgccgtgcaagaagattgattggcctcagattattttttctttccagatctgattcaagggcttgggggctttttttatttatttaatttgtttattttatttcttttaaataaattatgatgtatatttacttgttgatatttattttttagtggtattcagtatatttgatattaatttattgtgtaataattatattattaacaattaatttatatttaaatttattaatttatatataatttttatagtaaatttatatttaaatttttaatataaataatatataaattatttaatattatttaaaaaaaaataaattaatagtatttcaagtctaataaaattgcactagatatataagtttgagttgtgtgcgactttcactttcaacttagtgggactagaaatatttttctagtctaatattattggactagaaaaataccttttttatgtcccttgatactatgtccaaca

SEQ ID NO: 138348 - DNA, 605 bp, Cannabis sativa
  modified_base (28)..(34): a, c, t, g, unknown or other
atttgccaagtaaattccctaacttatnnnnnnntccttgcaccactatagattcgaaattatactctcaattatatagaacactctacatgtaccaagttatagctacgttatgattatccatttttacagtcaaaatagtcaaagatcctcaatagatgatctacatcgaatagggataaatttactgttctaccattccatgtattttatccttaaaacacttagctaccaataaatgatattattgtaaactaatataattattgaaatgaggcctcaatcatttatctctattaagcaaagctcgaaggaaattatcatttcacttctaaatacttatggaagctatagattccatatctattattagcgctcccactcaattgaactatcatgtttctaagatgtacgtatctgccagaaccattggttagcttgcacgaacaacttgaagaacataaataatacagctaatattgaacattacaatatcatcattaagatctatagacctaagatcaacaagtgatattgacatagaaagatataacgatatatttatgatatcttatccaagatcaacatcggtccaatccaatgta

SEQ ID NO: 138349 - DNA, 648 bp, Cannabis sativa
ggtaggttttacaaaaacctgtagcatctggctgactactgaaataaaccattgaacttggccaatttgatatcacatatcaatcgagaatggccataaagggtcaagcccttgtagactttgtggctgaatgtacaagaacatctcttgaaatctctcaagattcaggagaaaagcaagagctagagaagaagcaagagcaagagcagtagcaaaaacctgaagaatcaacatggaaacttcatgttgatagaagctacattaaccaattgtccagtgcaggcaatgccctcataacacttgggggcaatagctacactgagcaatacaatttagaatcaaagcctcaaacaatgaggctaaatacgaagctctgatcgctggtcttaagctggcgcatgaagtaaccatctggacatatacaacgactctcaactagtcgtgaatcaagtcctaggtgaacacacaactcaaggtgaaagaacaatggcctacttgagtaagatctaagactttcttaatcagctcaaaggctatacaataaggcgaatcccctgagaatagaatgccacatcagatgcacttgcttgtctggcaagcagctgttggaaattattttaccaggatcttagatctactcacaagtat

SEQ ID NO: 138350 - DNA, 863 bp, Cannabis sativa
ggcataaaacccaacaatagtctccatgaaaacgacaaaatttggacatgtctggcttgctgatgtcctttttcatgggagcaggttttttgtacgggactatagactggggccatgtagattgtctctaggtcgtcagttaggacagagaaggcagtgaacttggaaggattttctctaggtgtctgttcggctttgcctacaaactttcccttttttctattaccttgtctgccattgttgttggatcttttactgctcggagtcgagctgctaggatactgtgagttctgagcagatgctcatgccgaggggacctgcggtttgcctgacctgggttcaacatttgctcgatgaatggcctcctcgagcttgatcaacccatctgcttggtccaaaaactctgccatagatcctacagggccacttttcttaatgtctttccacagttctcccagtactttaatgccccccagtattgcggccagcctcccttcttcagttaaccttgctactttcgtagcttctctcatgaatctgcttatataagctctgagaggctctcctggtctttgcttcacttcgaccaaatcttctaaatgtaatgggagttggcgagaagaagagaactgtgcatggaactccgaggagaaggctttccatgaattaaaccttcctggttgtaacttaaaatatcattgctgtgcgacttctaaaagtgtagcagggaatactctacaccacacatcacctcgtaccccttgtaaatccatttgcatttaaaaatacttaagatgtgacaggggatactgtgggaacttattttaccaggatcttaaatatactcacaagtatgtttatta

SEQ ID NO: 138351 - DNA, 504 bp, Cannabis sativa
  modified_base (43)..(60): a, c, t, g, unknown or other
  modified_base (436)..(463): a, c, t, g, unknown or other
attgttttagaattcatatttggatgttaatgaaacatacttnnnnnnnnnnnnnnnnnntggtaaaatatttccaacatattgaacatgcctggtaaaatatttcctgcactaaacccgtcgaccggttcagggagaaaccggtcgaccggttggtccccctaaaaaccccactgaattggaattctagttggggaactggtctaccggtcagggaaattttggaaaccttagttttttctgtttttgagatatttagggtatttccatgttatttatcgatagggaaacttatagtttcaagtttcagtctccgaaaagtaatttagcgtgtcactcacttgttttatgaataatgtgttttaggggcctataattcgtcgagcaggtgtttcaggggcctatagttagttgtggaaattattttaccaggatnnnnnnnnnnnnnnnnnnnnnnnnnnnnaacaccctaaatatgaactttctagaacgatgaaataaaca

SEQ ID NO: 138352 - DNA, 733 bp, Cannabis sativa
gccagtgattcccttaatgttattctcgatctttacaataaagcaacgggtcaattggttaacagagataaatcctctatccttttctcccataacacttctgctgatgctcagcttcaatttcgtcaatcccttcaacttcatggggagggcttcattagtaagtaccttggtgttcctcattgtgttggcagagtttctaattccatgttccattatctcctccaaaaagtctcctccagattaaactcgtggaatgaaaaattcttctctcgggctggcaaggaaactctaataaaagcggtggtccaagccattccttcttttgcaatgtcttgcttcaaagtgcccaaattgatttgccagaaaattcaaagcttgatagctaaattttggtggggatctcagggcactaaaaaaatccattgggaaaattgggatgttatttctgtctcaaagttctttgggggtctgggttttcgtatcttgtcctctcataaccaagctcttctagctaagcaggcttggcgtatttggaatgataggaactcccttctccattctgttcttaaagctcggtatttcaaacattcggatttcctaaatgcccctgctggccacaattcttcttttacttggagaagtatcctttggggtcgccaattgcttcaaaaaggcctggtttggaagattggtactggtgttaatgttcccttatctgctcccaattgga

SEQ ID NO: 138353 - DNA, 802 bp, Cannabis sativa
  modified_base (746)..(748): a, c, t, g, unknown or other
gtgctctgggcccacagaactacccagaaaacaaccacaggacacactcctttctcgctagcatttggctcggaagcaatgctgcctattgaagtgaatatatcgattcatagaagagagtttcataatcaaagaagaaaactaggaacttttaaaattgtccttggatctacttgaggaaaaataaattgagtcgcaaatcaccaatgctgcataccaacaccgagccacgagatacttcaacaaaaagtcaataaaagattgttcaatgttcgagacttggtgttaagacgagtctttacaaatacgagagatgcatctgtaggagtgttcaacccgaattgggagggtccatatgtcatcgaagcagtagttagagtcggagtgtataaattggctcggtctaatggcgtgctaataacaaactactggaacgtagaacatttgcgaccctactatcaataaataaatgatgtaactcgcataactgatgtaacccttaaacttcagttatgaataaagggaatcatttatattaagtaattacaaagtctcattctttaaaattacttaaggggcatttatgaatgactaacttgaattcatctggaaatacattgtataatgcaaatccagcatttcaatttttttttttaaattcaaaggttctcgaccaaacctctttgacaaaagtggagtcgaaccgttataacagcctaaccaaacttttttgacgagaaaggggnnnaatcgttataacaccttgatcaaacctttctgacgaagaagggatcaaacaact

SEQ ID NO: 138354 - DNA, 1613 bp, Cannabis sativa
cttctctttaattttcaaaacttcagaggctattttctcttggatttcttcataaaatttcgcgctccttagtgttgagaacttgcccacatatttcaaagcaatactcaacatagtgaaaatgactatgtagtcactttgtcaccagaaggagaattcaggtttagacattgatcatactctgcaatagaaatgatcaatagaaatgattaagggttagaaaaagggttagaaatctaaatctgaacggaaggagtcatattattccgttgccatcaatataagttttctataacttttacgtattaacttttacgtatttaattcattgttttcattgttttaggaaaattgttttaggaaatttatatttaggatgttagattatagaactataatccaacatacatgttagtaaatctaaatcttggtaaaatattttcaacactctattcttcatccctcctaggctctttcaaaatatagcctaaatattaatccttgtctcttcattttctcctcgtattttacaatttttctcttactagtaatagatattagggttgacaatttgtatttgtgtgtcgataccattaaagtaaacttaaacacaatcatgatgagtttaattagcatatcacacgacacaataatacaactataacataattattaagataaataagatttatttgttagcaaaaaaatatgaaaccttagacaatttactaattttatcttgtcaacacgattatgacacgagatgattatcaaacatatgatataattatgacacgatactattagggttcgtttggtatgcaagactagactgaatttgactgaaaatgattggactagactggacaagattgaattatgctgaaagaaatcttgtgtttggtttaaaaatagactgaactattttatttattttcttttttaaaaaaaaacttaaattaaaaataaaaatatataataataataaatagaaataattaattcgcaacaaagaaataaaaataaataaattataaataaaataatatatcatgtataatcaaatatataataaaataatttatcatatttttatttaataaatattaaaattgtaaaataaaaatacttgaataatataaattatttatgctaaacactaatttaatacaaatattaattttttgaaatattaatataatttttttagtaatttaaaaggaatatataattttattgtcatattgtttcttttagaatcaatttaagtaactattgtttaaataatattattttaaattttgataggttatgtatgataattcaaaattatacatttttaataattttaatgaataagtttttgataaaaaaatttataataaatttgtaataattcttccatttaaattcttattaaatttaaaatatattaacaaaatcaagattaaaaaaaccataaaaaatcttacctgtatggattagggaattttgattatatatacttataaaataaaaaaaatttattattaaaccaaaaacttaaaacctaaaaaaactataccttttttttcaaaactccaaaaatacccccttctctctctgcatcatct

SEQ ID NO: 138355 - DNA, 700 bp, Cannabis sativa
cttctgctatgagtatatgacatagctcttttgctcttatcgggacatcttcagcgtaacgagccaagtacaaaaaacaaggcttcaagtgacgtggtaactcgctgtaactcaaacctaacaccccagaaacactacggtatttcgagtcatgttgttgatcaccttgaccaatgcagcgaattacatttgctttcagttgctcccaatcatatacggtgtgtttcttagatagaagaccagcgagcacaatgatggctaatggcagaccagagcactttctaagcatctctaccgctacttctttcttcctttcttcatcatcatttgagtctgaatttatatatccagtgaaatgcacaaaaagaaatatgatttaagtaatggaacatagtactggattattatcatgtcaaacatatgcataaagtatagtttaattgagctctgcttcttagtctgaatttatatatccagtgaaatgcacaaaaagaattatgatttaagaactaatatgaattagaataatcagcaacaatattcctatcaaactgatcttagtttattgacaagtgcatgtatatataaataaaaacaaagattaaaaaaaaaagaatattatgatgattgagttaaaaagagtgaaatattttacttgatggatctgctccaacacagaagtactttttatgaaacagct

SEQ ID NO: 138356 - DNA, 601 bp, Cannabis sativa
gtaattccaccacgaggacgtcggaccttgagaagaatcacattgatccttatccagcaatctaatagcattctaattgccactcctgatggtatagtcacccgaagaattatagtgccaaatcaaactatcctaacgatgaagagaccatggaatagccaaaatttgaagagcttcatcactagagaataattcatcaatgagactacaattccaattcccattatcaagcataaaatcacttgctataacattcgagtgaccatgaagagagtaaatcaaataggcaaattttttaggaatccacacctcaaaacaaatgttagcattgttcccatcaccaatgagccaacgcgccctccttccacaaagagtactcggccccataaaatggaatcaagatcccctgtccaaatattgtgtcccatattatgtctaaccaatatgatgataacacatcatttaatttatttttgtaaactttactcactaaaactaaaactataggagcaattccattaactacaagctttcattttttaaaatagtttccttttttttttgggctatttttggctgaaaatagtttcttttttttttg

SEQ ID NO: 138357 - DNA, 539 bp, Cannabis sativa
  modified_base (506)..(508): a, c, t, g, unknown or other
aattaatgaataataaagcgtaatttattaattacggaaattgtagtggaatatgtgggtatcgtagataccataatttgaataaaatattttcggacctagcaattgtggatcttgacgggaaggtcgtaaatgtcacgataataagttatggaactgaatggaaattgtatcgaactagtttagaatgttaaattattaatttgacgggattgactaagattaccaaactacccctatgtgtgcttaaggtataaggttatttaagggggttaaaatggtctttttgggaaaataatttattttgttttaaggtttattggcttaattaattaatttatttatctagttagaataatttatttagggtattatttaatggtatatggtaagtaagattaaataaaaaataaaacaaggaaaaaactagaattagaactcattctttttctctctctttcctctcgggtgaaagaaaccaactgaactgtaaagcccgcttagtnnntttggaaattagcagttatttatgttaatca

SEQ ID NO: 138358 - DNA, 989 bp, Cannabis sativa
attaatggagttttttaaaaatatatattttatgatttatttataattttaaggcctaatatttttatttataaagatacgattttaaagttttagaatcataaaaaaaaatatttttcttaataaaaaatgactaaaaaataacgaaaaatcaaccttatataaaatgtatacatcaattataaataaattataaaataactgaaaaagaatatctaacagtttactgaagtttgtatttttgtatataaaaagctcaacccgtaatttttttttccatattaacatgtttttataatttattttttcaaatttttagcctcttatgtaaaaaattttgaattaatattcttcaataattatcaatatatagatgtttattaatatatatttatatgcttaataaaaaaaaaatttaactttccatgcttaatttaactacttaattaaaaaaatctctttttatattatattaaaaatatgttggaataaaatttgactttttatgtttacaaatacttaatattttttccctaaacacataacacgtaatatttgtgggatataacacattttacaatatccataaaatacccccatttacattatcccctatcccctctcttcttctctctttcttcatacccatcgcaccccaattggggtccccatcggacccaaaagtttttccagtacatgcatcggaccccatcgaacctgtcggacccaaaaactaaattttttcgcacatgcattggaccccagcggaccatcgtcttccccaaatcgcagatctgaaccttggacattgttgggcaccgttcgggtctcttctgtgccgaagtgggtctcctccgtgacgcggtgatgagggtcggaatggtgggtctgggtctgggtcggggtggtcaatcgaagcgggttgtgtggggggttgtgcgatgtgggttcgagcgaagggcggtgatgagggtcgggtgggtgtgggt

SEQ ID NO: 138359 - DNA, 2187 bp, Cannabis sativa
taaaatgtgcaaaacagatttttggtgtaaaaatttcttaataaaatatctaaaatatatacattttaaaagaactaaaatatctaatgttaaatttaaatttttattaatttattatctatgtatatgtattatctctctcactctctcacgtttttctttctttttttttttctttctcttttttcttttcttttatgttttagtgcagaatttttctctaattctatattttttttaatttttttttctttcgtttgtttaaagtacctcaaagaataatgagcaatagcaatgatattaatggacaacatcaagaactcgattttctattggtatttctttttctttctatattctatgatatatttttttggtagattactaattattgttaatttgatctgtttattcttaatctctcagtacttatcaaaataattctcgataatttgaagacatatagactttttttgatgtccacaacttcaccatcgtcaataacttcgaattatttatgttttattcattagtttcgatattttgttagtatttattttctctttatattttataatatatttcttagtagattactaattattatcaatattctatctactttactttttctattatatatataatatatattctaaatctttctctcactcatcaaaatatttttcaataattatgagacatacaaactttttttatatcgacaacttcacggtcgttgataacttcgaattattcacgatttgtttattagcataaagtatttgatgtagaaaaagtagatttttttttaataataggcttttgagattcatgaaaaattataaaaaaattattgaaataaagttgaagatggaggttattaaatatatatatttatgtgaaagtagtaaaatagttacttgagaaaatattatatgaaaatactaaaatttgatttatttttatgatttaattatcattaaacaaaatataagcgcatgtgaagcgcagtttatttactatttattcttccctcaaatatctctatttatttacttcttaatctcttatttttctaatgtttttaatctactaaatacctcaatttatttttccttaatttgctcatttttatattaattaatcacacaaatatccagtacaaaaaattgttaccctagtgacaacttcttagtcacaacaaaaaattatttgtgactaaaacatatcatttagacacaagttgtcactattttagttttagttacgtgactaaaaacacatttagtcacaataaattgtaattttttgtgactaatacctttagtcacagactttttagtcacaatattaaaataataatttataattagtcacagtttttttacttttagtcacaaattttgttgggactaaaagtttgattttttgtaatgatcataattccatagctaacttattttttttaaaagaaaatgattaaaattttcaaaattgttactaaaactgtagctaacttttttttttcttaaaataataataataataataaatctacatatgagattcaattaaaaaaatttaaacaattactttctgatttatttataaagttggaagaggaaaaatatttatatacacttataaaatatataagaaaaaattgatgtggaagattttaattttttttttctcggttgaggactccaaatttcaaaaatctcacctcccttatatgttcgagtgcctatgtttcaatttttttgtcaagttttgaattttaagacaagttttgaattttaaaaataactattcaatatgaattgtatggtatgttctctatagatattttattttatgatcagttgtttacaaagttttaaacttttatttgattgtatcacttatttatcttttgtttttaaatttgatattgtatggtgatatttttcttttagattttagaattttagagtatgttttcaatagatatatatatattgacttctttacaaagtttttttttttaattttttaatctatccattcttataacatttgattagatatatatctcatatatttatcgttttactttagaactaaggttttttattgcattttttttttagattttttaatatcactataaccttttattccttaccatatttcttccatttg

SEQ ID NO: 138360 - DNA, 1268 bp, Cannabis sativa
tgtgaaattgattaagcatgttattatgcaacgagttgtaattgaatatattttgttatagtgtaattaaatggattttgtactccttaaggagttagtaacttctctactgagtctctgtgactcatggaatgtaagagtatgggattatgtattggatgaatatccatttggtataacaatgaagtaattgactataagatattatgatttggttatatggcgtaatatatgtgtttctataaatgttaaactatgtatgtatgcatgatgaatatgtatgagtctcaaggatgtgctttatgttgagatgagaatatctgtatttacagtatttttgatctaataacttttcttgctgagtgattgtgactcacgggtgctttatgatgcaggtaagaaagatagaagttatgttcggccatgaatcagaggtctcccaacattgtacatatcgaccgtggtgtcttggcttccgggaagcaggatcgacttcttttcttttgtgtgtgaaagtgtaactttatttttgtataacggttttgcaatttgatataaagaaattttataaacaggggatcccttcactttagtggtattttataaagaagttttattctatttaatcaaaagtttttaattaaaccacacttttcataaactaatagatttgtaataataagtttgtaaaagcacacatgtggcgtccttgagagtcagggcgttacagttattgttatcaaattgaaaaaaaaaaagattaagaaaataggataaaatattacaactttcaattaatacctgtttttttgggtctttccagtatgcgataacctctgcccatacctcaggtgtcaccatatctggacgggatctcctgttcgcttcttcctccccatatttttcaatattctccttccatgccttcttcgtatctgatctccagtcacgtaatacttttgacatagatttggtgatgtaatccacgaacatagtattattggttggcaactcaagcttggtctgaaaaaaaatactaaagtcatataatattgtcttttttatataatgattttgtttgatgtactattaaaaaattagaatgttaccgctattctatcccatatagtctgaatgagtgtatcatcaacgtccccgaactcaaacttgttcataggaatagtattgcgaacaagaaactttatgtaattgttaaacttgttgccaaagtcatctacagggggcccagtcgccatatgaaatctaaa

SEQ ID NO: 138361 - DNA, 893 bp, Cannabis sativa
  modified_base (291)..(294): a, c, t, g, unknown or other
  modified_base (406)..(413): a, c, t, g, unknown or other
  modified_base (740)..(745): a, c, t, g, unknown or other
atggggataaagcaaaagtagtcatatattgcctatggtataacatttaggtttaggaaaataattttagggttttttaagtgtagaaaatcaaatttccttatatttatttctatttttgaccctgtattttgtaaaagttaccaatttgaccatctattttgttaaatgacaaaattgaccatgtattttctaaaatagtacaaataagaccctcaattgattttttatcaaaataaaatttaataataattcgatctaaatgttttatgacaaaactgtttacatttnnnntatctgttcgtgttaggaattgtcttcaagttggttacattgaaaaaaaaagttgtctaaaattaagcttaaggtcctatttttactattttggaaaatacagggtctattnnnnnnnntaacaaaatagagggtccaatctgtaacttttgtaaaacacagggtccaaaatagtatttacccttatttataacagaataaagcatttttagagagaagttttacacttttagaccatctctaatggttacctcaatttgttgttgaatctacaccagtttagtgtaaaatcttttatttttggtgcagcaattccaatgattcacatccaataaacatattttacttagaatgtctcatattttatattaattatattaataatttaaaataactaatttatgttataattatatcatggttactagtaagaatttaaaatcttnnnnnnatttaacaaaataaaatatttattaaatcaattaaatacaaaaaaaaatattgaaattctataattttcttaatatacacgatcattttcaaaataagtaaacaaagattatgcaaaaaaaaaaaaaaactgtaacaccctaactagc

SEQ ID NO: 138362 - DNA, 636 bp, Cannabis sativa
aaaatccatgcagaggcttctgggtttcaaaccaaaaaagcagcaagctaaactcgaattttaggcccaaaaaatgaactaattcaaacaacattcaagttaatcattcaccaaaagtcaagtacctacataggctttaacatatacaattctcatgcctaaattcaacaaaaacacatcacaattcagatttaaacaacataaaattcaaagctccaacttgagccaaaatccaaataaaactatcttaaattcttacgaaatcaaaccaagaactcatgcttcacacaaccaatttttagagctcaataacagaataataacacatgtataatcctccaaatttctatccaaacctaatccaaacaaactcagaagattgaagctcaaagcatgctcaaaataacccaacaacatcaacatgcacctcaaatacataaacacagcccacatcacatttcatgctctttcaacacttaaattcagaaactaaacaaatatcaaagccatagaaagctaccttaaatccaatccaagggcaagctcaaagatccacaacctcaaatcttcaattcaagccaattccaagaaattctcaatttttgaaataggttagggaaagagagagagagagag

SEQ ID NO: 138363 - DNA, 1348 bp, Cannabis sativa
gctaaccaatataaagcagcagtcaggtaagacacttaaggcatacttaagtcgctttagcacggctgcagttagggttaggaacttggatgacagcacacaacttacatcctttcaggcggggatcaatactgatccatcaaccgcagggggcgagctgtgggacgacttacaaggtcgtctagtaaaaaatatcattgagttcaacgaaaaggctcaagtattcgttcggaaggaagaagctcgaaaggaaatgaatttgttaaaaacaagtccgggaagcaaacccaacaacgtttcaataacatctgtttccacgagaattgataactccggggcttctagttcgaagagaacggacgattctaaggaacctcgaaggataaaaagaaatagaagaagcacgataagtacgtgccagtgtatactgattataccgagtttaatgaaagtcgagagaatatttacctcgcacatgagcaaaaggttgccttcggcaagcctgagcccatgaggaatgcgaggagaaaaagagatcctaataggtattgtaaattccataagaatattgggcatacgactaatgaatgtcaccaattcaaagatgagatagaaagtctcatcgttcgaggtcactttaaacagtacgtggaaagacagggccatggatacaaccagcccagtctgcccaataacccaaataaccaggggttacaaccttttcctgctgaaggggaggacatcttggttatttcgaaagggccacatatcgcaggggaaagtaataacgcccagaaccttccaagaaggtgaaaactgaggaacctccaattatattcacggaggaagacgagaaaagcgtgagatatcctcacgttgatccattggtgattaccattcaactcgtcaataaaaggataaagagggtgttaatagacaacaggagctcagtacatatccttcatcaggaaactttaaggaagatggggctcgaaaaggccaaattgaggcctggtatggtgaactttgtgaattcaccgaagacagcatttccagacttcgcataatcgagctcgaattaactttgggcgaggcacccctatctgccactgttatgcaagacttcctagttttcgagctgccatcggcttacaacatattattgggttgtccagcactgattggactaggggaagtcagtttctagctcgtgattgctatcacatagagttgtagcataggaaagttggtcttcagttgatggcgatcttggcagaaaaaaatgaaaagaaagacgaagatcttgatccccgagttcaagatgagagaaatatattaaaaccaattg

SEQ ID NO: 138364 - DNA, 808 bp, Cannabis sativa
ttttaaatagaatttcatgtctattcattctctccacgaaatgatatttgaatattttaaatgtacaataaatttgcaattaaaatatgtgtacaattcacaatattctattcaatagtcaaatataattttaccttgattatatataagtgtgtccattttataggtacgtgttgtggtattttcaacacgcaaatatacgtatcattagcaagttatatatagactcacaaagagtaaggacgatcccacaagaattgtagttaagtactttaaaattaaacttttacttctatttggttatataaaattttaagagaaaattaaaactagaaaataataaaaacagtgaaaataagaagcaggtaaattaataagaaaattaacgatgaataaaagttaggactttcaatttcgattgcatatattgattatggtttaatatgattatattcctattaccaaattctatgcaatagtaggtttactaaggtaatttatagtcttcttaaatatataaagctcaattacatgcaaaatttctaatttcgtgataaattaaacatgtaaaaggcattaaacataaaaatcttataagctatccaaatcatataggtactctcgtcctatatcaaaatttggttctatttaactaaagaataattgacactcacttctcagattttgtatcaaaatcataaataattaattgatggtgagacaattaaaacaaattaagtacgaatgaaattgaacatatagaaattgaggggaaattaaatcatattaaaaccaaaaatcaatgtca

SEQ ID NO: 138365 - DNA, 614 bp, Cannabis sativa
tagtgtttaggatatcaccatttgaaattcaaattcataagtcataacctccatggatgttattgactaaagagatttaactcatgcacaccataacttctatagagatgtaactcatgcacacaccataatttctataccattaaaaatttcaaattaagatgtgtaataccttttacaatcttaatgttggtgataatggtggaggttactcatagtaacaagtaactcccccaaatattacaaaaagatgataattgtcatatgttatatattaatttgttacatatatttaatctatacattatattattaataaataatataacaaacccccactagattaaatattatctctttagtaactgttgcccctgattttgcccaaaatacgtggactaaccggatgatgacacgtaggtggtaagggtttagcgtttaaataattcagctaagtcttcttaagcgtagggatcaaccttagacatgcctctcggagaaggcatgtaaatctcacatactcccgaagagcaaaactacaacaaagcatctccgggaggtgtcagatcctatctgaacagtcatctcgtatttaatgtcgcatgggaggaggc

SEQ ID NO: 138366 - DNA, 2192 bp, Cannabis sativa
ttcatccgagctgcctttgcatttcaatgggtgacacgtgttaggtgcgtctgttcgtgattcgatgtgagactgaccaggtgtctctttagtttttagctaattaatgctctgacttaattagtgcctcgaaacccgatttttctcatcacgttttgacggttacacttgattaattttgatttcccaatatttgcttttgggagggatcgaagcgtctgaggcattttgaaatgattactttttttcaccattttgcctataaataaggttgattcttcctcataagtttacttttactaatttcttcactaaacaaattcaaagcaaaaaagatttttacttcaagtctatcgtgagattcccaccaaaggcatccgagcagctttgtctagactgaacttaggcgtcaaacagtgagtaagtttttcaatcttcttctctttttacttttcatgtttaatttttgggtttcatacatgcattcttgacttgttgtggaagatagatagaaaatctaggctcaaaactttgtgattttctttgtaatagtctgtacggcttcacggtttacgacgtttgcctttaatcacaaattgttcgtctttcacctagctcattcaaagcttcatgaaatttaaccctaaacccaaaaattttaaacttctgggttttgacttgttttttgtacatttttcatccttttaatctgttgagtactcctggtcggcatatttgcctgtttactgttcgatatttcggccaaacactcatctcgtgtgttgtcttttgtagatgaactctggtgagttttggggaagcgaacaccgaatcgaccaggacttgcttcaacttttgtacgaggatcagtcttgtcttcgagctagtctgtcctcttcgagtgacgaactttctaattcgagctttgaagattgggaggtgagtagtgatcgttctcctaatccagaacctgtagtgcaacaccattattactccgagcagatcgctggagaagggtacagccgcttcatttgggaaatgaagaagggttggaaagtcgttggctaacaacttgtcaacctcctgttttagtgccccttgcctctcgaaatccaagagcctccttttctgtctctttgctgggtagtttgaatcaacattaaagtgatggcagataatattagggtcgatccctatcatatctccatggctccaagcaaactgatcctagttcgccttcagtaagcttgttagctactatttgagttgctcgtccaagttcttcccaatgtatacacattttttgggatttcctgggtcgagaatgacttcttccaattccttgattggtttcaataggtttctctcttcttgaacttgggggtcaagatcttcgtctttctgctaagtttcttctgccaagatagccatcaacggatgaccggcttttctatgatgtagctctatgcaatagcaatagcgagctagtatctggtcggcacgcaccactcccacaccatctagcgtttggaatttcaagaataggtgcttgatcaaactgactgcccctagccctaccagtactggacgacccaaaaatatgttgtaagctgagggcaggtcgacaactaagaagtcttgcataacggtagcagttaaaaggtgcctcgcctaaggttaatgcgaactcgattatgccaaggctagcgatgctgtctctggtgaatccacaaaggtttaccatacaaggccttaatttggcttttttgagccccattttctttagagtctccttataaaggatatttactaagctcccattgtctattaacactctcttgatcctcttattggcaagttgaatggtgatcatcaatggatcgacgtgaggatacctcacgtttctctcatcttcctccgtgaatacaatggggaggttcctcgattttcaccttcttggaaggttctgaggcaaaggctgattgctcattctttatttctttcacatatcttttctgggcgttattgctttcccctgtgatatgtggtcctcccaaaataaccaggatgtcctctccttccacaggaataggttgtcaccaatggttgtttgggttattgggcagagtgggctggttgtaaccctggccctgtcttttcacgtactatttaaaatggcctcgagcgatgag

SEQ ID NO: 138367 - DNA, 700 bp, Cannabis sativa
  modified_base (666)..(675): a, c, t, g, unknown or other
agctagaactacgctaaggcattttcgggcgggaaaaagattgcttgaacagtcacttcgcatttaatgccgcatgggggaaaacgtatcagaaactccataaaaggatttgacagatggcgttagctcctatttacggcaattacatagcaaacaacgagtctaatgacggctacattatgaggaatcacattagtcaatagaggataaatgattatatccacctagctcctaaaatacctacgatataggtcatgtatttcctattttggatctaccataaatttgtgccctaatgaggctaacacaaaaagacaagtgatcccttcctagggatctcccagaaaaacactataaataccccatagacataatggaaaaggggtcgatcgattgatttagaaatcaaagagagtaaagaaaagagagagattcaccaagaacattctctgtaataaacactctcataaatacaatagactcgtggactaaggctcgttaatgccccaaccacgtaaaaatctcctgcattaaactttctacagctcttctcatcctactaataaattggttgccgaaaatctcagtcaacataactaataattaatttctctactgagctagtatataatgttggtattaaatttatccaggatcttagatctnnnnnnnnnnatgttgatttaacaacctaatattg

SEQ ID NO: 138368 - DNA, 906 bp, Cannabis sativa
  modified_base (44)..(52): a, c, t, g, unknown or other
  modified_base (367)..(370): a, c, t, g, unknown or other
tttttaattgtatcacttttaaataacatagaaaaaaactagcnnnnnnnnnagtatacgtgcctcgcacgtaatttttgctagtaatataaatacatgtttcaaaaatatattaaaagcgccataagtagtactaatatattattaatttattgaaacatataattttataaattacaattttacaaatataattttagggcaagactatggtaggacctagtaaaaattctctttaactattgattttagatcgtgtggttattataatataaggtgtatactcttacgataagattgtctgtatacaattaaaattttatgcattagaataatatttaattatatatttattttaaaaaataannnnatattaataatttataaaaaaaaaattattaatttttaatttaaattattattatttaaaaaattagtttaatttttttttatataggtatttatttttaaaaaataatcttagttaccaactttgctatcaatatagtgttaaaatttattttgtaaaacagtcagcaaatcgactaacacatactgttgctatggtcgctcaagtctattgtgatcgtagcatttatgagtctaacactacgactactatgttagatatcttatattcggaatgttaaatttaatgaaattgctatattttctaaaaaaaaagtttacttcttaataatatttttataaaattaatgtaaaaaactcaaagttcaaaataacttttaattaaagatttattttgatgatgagcttttatattagatttatataccatattttttcctttctaaataatgcaaattaataatgtattcatttcacttttaaatataatttaaacatagataaataaataccacctacacaactaaattcaaataa

SEQ ID NO: 138369 - DNA, 580 bp, Cannabis sativa
aaaagtaattttagatattagtgtaatttgaatttgaaaacaagttgatgccctcatcgacggaccgcaggcaactcttcctgatctggactcgtaagcttaccccaagcttctccagaatcctaagtgtgcacttgaccctctacctccatcgaaccaccctcttggtgacgatctacctcacccactcttggacttgatcaaagaccccgtgccactgttgctattccgaaccacccatggagtagtgcctccttactagaatacttccccaaaatgaactcctccgagtccatcccaacgtccctccagtgaaccaagtagcccttgcaacactgaccctgaagctagcacatcctctgatagtagctcactcgccaaacgtccactgcctactcctttttgacaaggactaaatatggtgcacccctcggggtgaggttcgcaaaccaactgttgccaacggcacctacagaatatgcttccactgaagccaagtccatctggacaagtccctgttgacacttcacacgccaactctatggcgcaccatcctcctgatggcaatcgagcaagacac

SEQ ID NO: 138370 - DNA, 698 bp, Cannabis sativa
agaatatcactaggtctatcaaactggtcaagaagtcttgatgacacataagatcgagtagcacccgaatcaaataaaacagtataaacaaaactgttgattaaaagctgacctgtaactgctgaagggctggcggcagcatcagcctgagtgatagcaaatacccgggcaggtgcaggcttagcctcaggttttggttcttctttcttcaactgaggacagtctttcttaaggtgtcccattgaaccacactgaaaacaggctctccggttacaagtcccggggtgatgcttcttgcaacgagggcactcaggataggagtaagtctgacgtcctcctttgttctggtttcctcgaaacctttttccttgacctgaacttcccgaagatggaaaagttcttttcttttgttcaaaagtggaatctccactttcttttccaggaccagaaatagggtaagtagtaatcccaccagcattaggaggctctcgagtttcatacaaaaattttactgctccttcagctctaagagccttatcaaccatttcagcataggttgtagtatcactcgttgtaataaccagatcatgcctgatctggcattcaatctagccaagtacttttccttcttactaaaatctgttggtacaattccagaagccagcttagccagacgatcaaacttggttgtgtattca

SEQ ID NO: 138371 - DNA, 858 bp, Cannabis sativa
cttgggcaccaatacgcgatttgcgaccaaagctgggtagaaagcttcaattatgaaattgttgttgcgtaacttttctacttcttcttttaggctagtgctcgctctttgtccaatagccttcgcttttgttgtactggccaaaaattgggatcaatattcagaacgtgcaaaatgatagaaggatcaattccgaccatattcgcatgtgacttggcaaaaacgtctagtttgctctcaaaaattttatcaatgctgattttacttcgagcaacaaaccctttctgatctttagctttctggccgggatatctggatcgatctcgatctcttctaactcttccacaggtccaacattactgcttgggtccccaagtcgacgatccacatcttcatccccgccttgggaagttccatacttggaaatttttttcccttgtctaggctctagttggaggatacttccttcttagccttggcaactaaaaggctataacattcctgagtagtgtgctggtttcctctcagacaccctaccccattctttgttggaaacttcaggcacgaatcgaatatcgatgtgaaagcctttaagtcatacaaggctgatcgccctagcattacgttaaaggctgaaggaacatctaatactaggaattttgccatgatagtcatgctcttcggaggttgtccaatagtgaggggtagacgaatttgacctaaaggtgcgactccttagctggagaaacaatagataggtaggagacatggggctagatccttgagctggagtcccatcttttcataagcagttttgaacaagatattggaagaggctccattatcaatcatggttct

SEQ ID NO: 138372 - DNA, 656 bp, Cannabis sativa
aaaaaaaaataaaataaaacaaaatgcactaaccttcaccttcaccggagaagacggtctgggcggaactgaagagaatgacttctcgttttcttttctctgaattaattttacattttaatcatttttaatactttatgtttagttaagtggaccaatgaattaataattaagggtatatatgaatgcttctatattgaccaaatcaactaaataataataataaagtgtctatcattatatcctactttactaattcaaatccaattttaattcaatagactacaatctacaataactttctaaaatttacctatgtggacaaattatactacatgatagtgaaactattaatgagtctcttttatgggtgtttttatgggtgtctattaaagaattttcctatattatttattaggcactatggttacatttaagaaacaaaaaatatcttcggaatttgaaaaccttatactacatacaatttaaaaataatttttaaaattttatttattattaatgtttgaaaaaaaattgttttatttattattaatatatattatagggtgattctacaatgcacccacttaaaagggatgtatgatgcactctcttcggcatctagaaaatttttttagtctgtttttttttttttt

SEQ ID NO: 138373 - DNA, 621 bp, Cannabis sativa
aataatctggattacattgaaatagagttttatctagggcataaaacccaacatatagctcattatcaaaacctttcctttgttgctagctgttactagagaaagtgaaactgaataaatctctctaattgggttgaaaaaataacattaagaaaaattaagaaaataatgtatggcttgaaaaaaattaaacttatctttgaagcttcttgagaaaaccaaagtaaccatttatcgaagttaaactatttagtctaacttttagatctctcttctaaagcaggaaaatttaagcaataaaactgcctttgatggctctataacctactaactcccaatcaataaatctactcctgtcaaaatgtaataagtacattctattaattgagaagaactcaataaataaataaataaactatattacaaaaaaactcaaattaaacttttaaaggaagacttatctgataaattctatgtgattccttcataagagccttgagagtaggatatgtcaaaatgacataatattttcactaaagatatcaaaggcaacaaatagtattttatatggagcgaataaagtgtcattgatacttcacatcatgttgggttttatgccct

SEQ ID NO: 138374 - DNA, 505 bp, Cannabis sativa
  modified_base (457)..(462): a, c, t, g, unknown or other
ttactgatcttccttcgccgctgtcaatcaactttttaccgccgatcaacaacaacgcccagttctcaagctttatgtaagttcttcgcatctcctactttattgtttgtccacatctcatgctttactattcatcttctttttctgggttggatgtttgaattctctaggaatttctgtcttgagtttttgtgtaatacgttagattcctcttttctggtgttcgggttacttctactctacgtattttttttttcaaggacccatcttttctttacgtaatgaccttcaagggttcagagaggactttgtctttctcgatttttaccttttttttttcttttctttgcttattcataatgtcaccatctgtgggattcttgcacccgacttttgccaaggaggaccttctaaggctttcttgttgacaactgtccagagggggcctctttccagnnnnnnggggacccccattcccttttttaatttagggtttggtatgggg

SEQ ID NO: 138375 - DNA, 1299 bp, Cannabis sativa
  modified_base (717)..(717): a, c, t, g, unknown or other
  modified_base (1051)..(1051): a, c, t, g, unknown or other
attttttaagcatagaaaatcaaatttcccaagtactataaaaagaaaggttgaaatataaaatgaccttaaatttgaaaagtaacttagtaaatatcatttttaaaaaaattaagaaaatagtcaaatataatcaatctatcaatctatatataaaggagaaatatgaggtggtgacgtgacgctctaaaatcactacaaaccaatttttctcttctctccttaattttctcaattttaatattttattaaagcataaatctacaaattgatattttaccattaatttaataattttttttataaaagaaagtataaatctacaaattgatattttttttctataaaaatataaaatatctttaaaaagttggaaaataaaatataaactctaaacaaaatattaaaacttaaatcaaatataattaaatataagttttatttatatacatacataaaatatcaatcaatatatataccttaacgttttcgattttttttttttttaaaaaaataaaatatgtatatatataaaggagaagtatgaggcggcgacgtgaagctttaaaatcactccaaaactatttttctcttctcttcttaattctctcaattttaatattttattaaagcataaatctactaattgatattttactattattttaataatttttttatataaaagaaagtataaatctataaattgatattttnctattattttaatttttttctataaaaatataaaatatttttaaaaagttggaaaataaaaaataaattccaaacgaaatattaaaacttaaatcaaatataattaattgtaaattttatttatatacatacataaaatatcaatcaatacatataccttaaccttttaggttttttttttttttttaaaaaaaaatatatttatatgtataaatgagaagtataaggcggtgacgtagcgctctaaaatcactccaaaactatttttctcttctctccttaattctctcaattttaataatttattaaagcataaatctacaaattaatattntactattattttaattttttttataaaaatataaaatatttttaaaaagttggaaaataaaaaataaattctaaacaaaatattaaaatttaaatcaaatataattaattgtaaattttatttatatacatgcataaaatattaatcaatataacgtttttggcttttttaaaaaaatatatataataataatctatatatatataaaggaaaagtatgaggcggtgacgtgacgctctaaaatcact

SEQ ID NO: 138376 - DNA, 738 bp, Cannabis sativa
catgaattgaattgtttacatatttgaaaacccataaaataaatataaaaaaaacatgaaaataacaacagcaacaacaactaaaccctaaaatgaaataagaacaaaaaaacgaaccaaaaacaaaaataaatgaaatttcaaaattagggataaaactaaaacgaaactacaaacaaaccttaggaagttcatctggtaccttctttcccttctgaccatcagagttagaattttttttcaggaaaagaaacattcgacttcttcttcactggtcgacgatcacctttaacaagggggggagcaaaattatagtcatcatcgtcgatcactgggcgtttcccttttcacttgttagcaactgattgaagacccattttgcaagcttttttaggcaatggagatggagaagtagaggaacaggtaatggccatcatatacacaaaataaaagatacatataaaaaactgaatgagaatggtggaaattggatgaagaatatggagatagatattactcagagtgggttttgatcgtgggttttaatcgtggggaaagaatgagattttttaatgaaaaactgaaaaagaaatggaaagagaaacttaacactaacttaaaactgaaagtaaaattaaaaatgataagaagaaaaaaagaaggaaaagatcatgcattttgaggtgacatgcatatagtgtgtgtaagtgaaagtgtaagaggtattttggtaattaa

SEQ ID NO: 138377 - DNA, 693 bp, Cannabis sativa
tgtttgtttggaattgagtttggatcattttgtggaaattttgaaaaatatgacttgtttcagatttttctttcatgaggaatgtccaacttaggcggctgtgatcgtcaaatagtattaaaaaccaatgtgccccactgatattttgaattttggatgatccccatatatccccgtgaataagtgagaatagatgagagggttgatggggtcttggaatgaaagagtgacaagaatgcttagagaattgacaaatatcacacctgagagactatattgacaaatagagatgggaataagtgtttaagatatacaaaatttagatgacttagaaggtaatgccataacatgatagtattgattttattggactggtttactaaggaaagaaattgaccttgggagaaacaacaacgatttccatggttaaacatggggttgtcgatttttagcaacaagcccttactgaactcagcatagccaatcatcttcccctattccacatcctgaaaaacacaaaacttagcagcaaacttaacttcacaattaagatcactactcaatttgagtacagaaagtaaattacaatcaagctttggaacgtaaaggacagaatttaagacaagacttggtgagattgttatagttccaattccatcaattcttgaacacgaaccatctgctatgcgaaca

SEQ ID NO: 138378 - DNA, 534 bp, Cannabis sativa
tagtgaaattatatcattttaaatagtgacggatcgagaatttttattttgtagaacttatattttattgttaaaaaatatttatacttatattataattattcttattagatttattcaattttataagaatttttttactattttagtctataattattaaatttaaaaaattatatttaattttttaaaaataatatttttatttgtaagagttataatccccatattaatactagtggatctgtctctcattataaaacaccacctttaaatatgctacatacgaaccacttgtaaataatgattttttgagtcttatctacaatatatgtcatggatggtgaggagaatacattttaagtcacgtgggatgcatattttccccatggggatggggtcttgtggggactcgtccctacctgcccctaatggggcgggaattccccgtctaaatgggaaatgggatagggacggggatcaaattttgtccccgaatattaaacggggcggggatggggatgacactccccg

SEQ ID NO: 138379 - DNA, 784 bp, Cannabis sativa
  modified_base (79)..(79): a, c, t, g, unknown or other
cactgttctgatttttaatgtttcgtaacagttgcataaatattttgctaatatttatttcgtctgattgaaaccttcntctaatgcaaccttcggccaactaaccagtaaccttcgtctaattgaaaccttcgtctaatgcaaccttcagctaaccacccagcaaccttcgtttgattgaaacctttatctgacgcaacctttggtcaaccacctaacaactattgtttgattgtgtaagtgatagtgtaagaagtattttggtaattaaaatcacagaaaagatgtaaatgttgtctacaccttatggaggtatttttgtaaataaaatgtcaatttatattttccatgtaataaataaggaaatgagtttttttgagttttaaccaaaaaaagtaacaatattacaaaaatacttccagctggccaaataaacaaatatacagctcaaataaaaaaaattacataaataccacttgcgcacaccttcaacccaggatccatgcttcctgggcaactagtgcgcaaccatcgcgtaaccacgcagcaacctaatgcaaccgaaacgaaaaattcaaccagaaagagaaccaccattaattttggcgacttcacctgagaatacgatcagaatcaatcaaaaaggggctatttcgaactcataaaaaaagtgtagaaaaactactacgaaactaaaattcaaccaaaaatccagtttaatttacataaaactaatactctgactttaatttttagatccatgaaaggcaaatctcaaaaagtt

SEQ ID NO: 138380 - DNA, 651 bp, Cannabis sativa
taacaatctcttttaaaatgcccaggtttaccacagttgtaacaaccattagtttcatcaggatttctagtattagaatttgatctgcctctttgttgtcctcctagtttgcttgaatttctgccttcgcttctccctctgttattccaaggctttcttggacctggtctgcccctactcaaattgacttcaccatttgagtttcctcctttctctgctctcatctctaagtctttagttttagggcagagatcacctcctctggggttattgatgtccttccatacttaatagcagtcttaacttccctataggatttaggcaaagagtttaggataattatggcctggttttcatcacttagagcctcattttccccagaatttgcaagttcaatatgcatccttaagaattcatccaaattctgatcaagggttttggatgaactcatcttaaaaccaaagatcctttccttcaagaaaatcttgttggttaatgatttttgttgaaactgttcttccagtttcttccaaatcttgccaggggtttcttctttgtcaatcagcctgataatggcatctgatagattgaatatcatgataccagttgctatttccaagtattcttcttgttgaatcttggttgtccctt

SEQ ID NO: 138381 - DNA, 504 bp, Cannabis sativa
  modified_base (47)..(57): a, c, t, g, unknown or other
aatgttatttctgatctatattaacaagtaaatctgattatattgannnnnnnnnnntttagggtataaaacccaacacgggtttggggcccaggtcccctatctatgtccggatcctaagtccctgtcaaggtccatgttcagcttcgattttggctcccatgtttgggtccgagtctaggtcccagtatgggttcaagtttgagtctgggtccgggtctcgatctgagtccaagtccatattcgggtccaggtcggggacacgattcgggtcccactcaaggtctagatcccagaccaggttctggtctgggtttgggtccgagtttaggtcttgagtttaggtctaggtttgggtttggatccgggtctgggtctgggtcttgggttccaatctcggtatgggtattggtctaggattgtgtccaagttagggtttagggttttgggtttagtatttagggatttagggtttaggatttagggcttaggtcttaggggtaa

SEQ ID NO: 138382 - DNA, 804 bp, Cannabis sativa
ttcttatagtgtgtaaccttataagcgcttaaactttgctatcataattataggtatttcaaaacaatctcgtccattgattatactaacatagaatcaaagcggctttcgccacatttagcgaggctaaacccttcaatggtcacgtatatcaatataatcaaatgacatagatcaatcatggatgcgtagcatagaaattacatgcaaatatgatcttagcatgcctatttccaattggtcctccttaattgagatcattccttcattaattctttttgccttatacttaaatcccaatagaaagaaaacacttagagtactcaaaacttaagtcaatactttatctgcagaatcaaaccataaatatgtgtcagcttgatagaacattctaaatacaaacttccactaaaccagcataattttaaataataccacatccatatatgagcaacaagcttctgaaaaatattaagtggtatatccttaatgattcggatcacacaaaatatagagtttgtccttattatgttctatagacaccttattactctgaattttatacaattagttcaaagtcaatgtgcctttgaccttatagagttcatgttgttactaaaatgcaacttgattgatttattgtcacaacatatatctttaatagctttcaataccattcttaattttagccatatgtgacaaaaaatttcacaactaaaaactttataagatcagaatcataaatcttaatgatctccaaaattttctgttttttgatttctgataagtgaacatatagtattt

SEQ ID NO: 138383 - DNA, 1587 bp, Cannabis sativa
aatcccacaatcagtgtactctatttatgtaatatctaatcttaccaattatagaaattgtaagaaaagggaaaccttccctcaagcatgtagccctataaatagtgatccattctcactcgaaaagggtaaaaaaaatgaattatctaagagagcatagtcagagatttcattgtaagagctttgagagaagaatcactatattctttgttcttaagtcaatacaaatcaaggggagtaggctattatggaactgctcaaggctgaacctctttaaaaactctctgttctttatttatcttttcatattatatctaaattacatcactcatcgcttacaattaagactcgttgttgttggctaatagagaggtcaacattttggggctttcattgagagcaaaagtcataaattttctctttacttcaaatttaatcataaacacgatggtggtacaaactcgtagaggcatggtcaatcaggtagatccaccagcagtgcatcttgcactgcagaatctaggaaatgcaagggtcctaccagtaaaaaatcttgaacaaccaatcacgcaaccaccaatcgtgggtcatggtgtgatgtatcctttgatggaatctcactcagtgtgtaagagactggaaataccagttcagcagccaatctagctattcccagtactaggattctgccagcaacaaatgtccaaacaaccgttggagatgacactgagatccagaaactccttgatgctcttgggctcatgcaaggccatactaatactctacatcatgataaggaagagctccgtgctacagtgaaccttgcatgtgaagagcaaagtcgtctgtttgctgaatggaaggagaaagaggtggaaacattgagggctcaacaagcagccattgatgaccgaacaagataggccaccatactgatacaaagagcctacaaagttactaatcagcaacgtgcgaccagcatcccgctgggcgagtcagacgaagatccaattgggaacgcttcccaaactctgaacgatcagccgtccaatgcccagtcataggctccacctgtgggccaagtggatgcggccagaccttatctagtgattcgtcagcaggaattatacataataactccacccagactaatggttccagccaagtgattggccaaaccaaccagccattgagacaacctaatgcatatgtatttagtagactaggaacaactcatgatcttagggatgacctgaacagaaggagagggttagacgaacaacatgtctcgctagccactcaacccgggacccatgctcaaaatccagctcaaagagatcctgacgtgaccctggttggccaagaggccgagtaagttcaacctaagttcaaccatccgtgaaggcatagttgaggcatagttggagcatagttggatgaactaaaaaatatgttccaaggtctggccagtcagaagaacaacgatcttgagttggactgagcacgtggatccccttttactctagagatcaatgttctagagttgccccgcaagttcaagatgccgacctggaagatgtatactgg

SEQ ID NO: 138384 - DNA, 940 bp, Cannabis sativa
gacaccctcagcgtccttcttgatcagagagggaaggtgtatacacatacctaaatagaggatgtgtatctaacctccttcgaaggagaaggccagtacaagacgaagcaagttctagcttaggacactcgaggtcttgaggacacaatccatcaggaaggcaaatgcgagaaggaagtagacattgacattatgccgattaagaaagcatgagcaatacgcgaagctatcaatctgagagtaaatcaaagacaagatttgtcagcaattatgagcgaagacaacttgatctttgtaaacatttgaatcgaagacaacccaatctttgcgagcgactaaatcagaatgcacctaacttacgccatcaacttaatgccaaccaacagcaagtggatcccatgcagttgggaatcattgagttggcagataagtttagaaaatatcatgatggggaacatgggaaattacctggctatgattcagttgaggagatcaagccatttcatcctgatattctgaattcttaattccgtcgaggattcaaaaatccacacatctcgcagtatgatgggactacggatccagtcgctcacctgaataactttaataccataatgcgagccaacaacattttgactaatttacagtgtattttattctcaacgtctttaattggggcaccaagtagctggttcgacaagtttactcaccattcaataatgtcttgggaacagctgtccaaggactttaataaacaatttcaaattgcctaaaatagacgacctgatgcatcatccttaactaacataaagaagcaaccaggcgagtcgcctaaggcttacctgagtcgcttcagcacagccgctgtaaaggttagaaacttgaatgacagtattcagcttactactcttcaagcagggatcacaaccgatctttcaac

SEQ ID NO: 138385 - DNA, 1247 bp, Cannabis sativa
tgttatagaaccagttttatttatatttatatatctcatacatatacttctagtgacttttctaatgactttttcaagcgacaatgtctttttcgatgacctttttgacaacgatgacttttttggtgacaataacttttttggtggcttttatggcacagataactttttcaacgacagtaactttttcggcgaaacttattattagaagttttatcaaatttatttattgtcctttttttttatttcccatgttttaaattttaattatttttaatctcatattttttttattatttatttatgctacataaaagtaaattttattaatttttttccccatatttatataaaaaaaaatcaaacataaaattgcctattttcaaaaaaaaaaaaaaaataccatatgtaatctccacttacgaaaatacataagaggaaattacatggtatacccactttactttatttgtttttatttttaccttcattttcatattttgtaagatatacccacttttaaagatgatatcctcattaaaccccttaggttaatgcaaattatatgctagacttaagtagagagtgagggtatattgggcaactcactcaaaaagtgggtatattttaaaaaatatataatatgagggtatttttaattaatagaaacaaaaagaggtattcttcaacttatcccaatacataaagggaaatatacatagattactaacttttcccaatttattacatttatactggcaggcggcatttttatcttttttactatgtatgtttttttttatacggcaagtacaaactttgtggaacaaaggtttttcattttttttacttaccggtatctttataagattttcctacatcaaaatttaaaattttttgttttattagagaagttgattggccgtgggatgtgacaaaagtgacatcttctttacctttttttttaatttaattctttatttattttttaatatttaataattattatataaatcccattttccaatatcttactactcatcttcttattctattttttttccaaccaaaaacttctccaacgcttcaagggcttcacttaaatccttgttctctccttctatttctgcttgattggaagttagaagagggatttggattgtttggctctctgttttcacatgaggctaggcgatgagttagagctttagttaaggtcaaggattgagtatattatatattatata

SEQ ID NO: 138386 - DNA, 693 bp, Cannabis sativa
aattcctatttgaattatataatggatacatgatatatatagcctcttgactgtttattttacgattgaaacacttgtaaacttattgatatatcatcttcaatcgttgttagcagttcataattgtgaaaccattctgcatatacaattcggcgtacacagtaagtcactctatcttttattacttcacttcatgatataaatgtatttatgaaatacataaacatacatactgacacataggcttcggctggtaataaatatgagtgtatatacattgttttggtttctttttttttttaaacatctataaactgccaccattccattatatgtcccaatgtatggctattgtatatatatatatatatattaatttgtatagacatccaaattttccttttgagagttacgaggttgagtttactcttttatattcacaactccattatatatattttttttatgccaggacatctatacttatatatataatttatatatcaatatcatgtgtgtgtttaaatggccatttaggaagagtcagtacacgcatatatatggtcatacaatcccaagtgaaacaaataattaacttaagcatatatttatatatataagatcgtatataacctaaataatagctaggcttacgatatatacatatatttttttagcttgtaaactgactca

SEQ ID NO: 138387 - DNA, 581 bp, Cannabis sativa
aatttgccaataaagggctcaattgtagtttctattgcataagtatggtagtatgtatggtatatatgtgccctatgaagtttggggtggtttggacagttctggtagcatttcggtgagtacgtaaacttggaaaatcacattttttgcctctgacaaaccggccaactggttgggaaccggtcaaccaattctggccaactggtttacagtttcgggcaatctcgggaactcgggaatcgtattttttccatagcatttcactcgagtgttcgtttggacgttccacgtaccatttcaaagcttgcgatgagctttaccatatggtatatgttttagaactaaaatgtaagtttcattttagtgtttttaaactacaaggtttggtaggaaaccgtaggttgtcctttgcaactgttaagcagtgttttgagataaacacttattggtttattatttttatgacatagggcccgggatcattggtcgctctccaagtaggttggccaacatacctaaaccgaaacttgaggtaagaaaagtatattgtactgcatagtacattgtatgtaatacaatta

SEQ ID NO: 138388 - DNA, 2340 bp, Cannabis sativa
agtaaaattaagttaccgaacacatttttcatttgtgttttcaaaattttaattttaaaaacaaaaaaaccatttttaaaatggttaccaaacataccctaaacaagtagtcatttcgccaaaaacaacaaagacataactaaaacaaattcttatttggaccctttggaagagtctcatcttcactatcaacaaaatccacttttttcatgcgaccatacttgaagaacaacacagccagcctatcacggtgtttctcaacatcaaatatggaagaaattggtttcatatcaatgaagtattcagcaaacaatgccacaaaacaaccacagtcactggaaaacaaccaaaaaataacatcaaaaaaaccaaaaaaaaaaaaagaaaatacctagaaaaaaacaaaacaacacttgaaaatatatactttaaaaaacttacttcaaggtttattgaggtaaaccatcaaccttaaccacatgaaaagggtctaaagaaatcggtttgttatcctttttgaactcatcaaacaaagcaaaaaagtggggcaacaacatcaaaaatggctgacaactttcatagcggcactatctttcatagcagtcgacaaggagttgtacatgtacatacgcctttcctcaacattcaaacgaccaagaatctaatgagattcagtctccatatggatgataaacaaaacatgatcgcataaatgccaaggtgcaccacacaaatttttttttacctctgatataatcagcaatggcatgctgagcagttattaaagaattatcttttttctttaccacaaatttttcatacaatgcattaatgattttgttgaataagcaatcagtggttgtaaacttaaccttcatttcctttgcatacttttctttttttcgtagatagtaaaaaatgatatccaaatgctaaacaataaaaaagtaacatatgttaaagctattggtttcttagatttcctcttgtgaagaagaggagtttcttcaacaagaattggatgatcttcaacaacttgaatattagaatcaacaatgacacctgttgtacccatctaataatatatataaaaacaaacaggggaaaaaacataaagtcagtgttaatacaacaagtgttaagcaactggacaaaaatggtaaaacaaccatacctcaacacagacaccatgaccatccgtaggctcaacatttcaatctggaacctggttaccagaatcaccaccaaatccccctgaagacatttgtttttatatcttaaaaaagataattagataaaaatctaaacaatcacaaccattaaacaaccaaaaaaatcaaaaaaaaaaaaacaacactaccataatctcaactgctttcacacccgactgaacagtagcctcaacatctatttgagtggcttcgtcattgaaatcaacaaaattcttgataaaaaaatacaaacaaaaaagcggaaaaaacaaagttattctttttaaaaagagttaaaaaaaccaagaaacaacttcaaaaaaactaaaaaacaatataaaaaacagtaagaaaaaataaaaagatcaagattaaatgaaaacaccataatctataatataaccatcacaaaaacataaggaatacaaattaaaagtaggcatattagtgacaaattaatacaaaaaaaactataaaatataaaaggacataacaacaacatagaagtacaaatctattaactaaatggacttacaacaaaataactaaaacctagttacattgtctaattatctaccttcttctcactatcagtgcattcatcatcattgcccttatcatcttttcctttggactcggaatcttcattatcatcatcatccttctcctctccgtcactaccctcctcctcttcatcaccactaccttcatccaaatctacacctgcagcatcttcttcttcattgtcgtctacttcttcaatgtcctctgaatcaatgtattcttcattatcacttccaccatcatcattggaagagtcactccatttgtcatccaataaaaatataataaaaaaatcagataaacacaactaaaaataaactagaaaaaaaccataaaaaaactaacataccttagcaacagaattaacaaaaacaatagaaaactgtgtctacattgtagccatttgagcagcaaaggaaacacactgtgcagaaacaaactctttcaactcaaccaattcggatgaaattttctgttgggaagtatgcagcaaatcaatcttcatctccaaaccatcaaactttttagaataaccatcaagcttgacagaaatgtcactctcaac

SEQ ID NO: 138389 - DNA, 707 bp, Cannabis sativa
  modified_base (46)..(51): a, c, t, g, unknown or other
ttgctaattatgtgaaaaaatataattttttataaatattaaatannnnnntattaaaaagtaaccaattcaaaataaccgatccaatccgcacttttgtggattggatttgattgaatttgagctatgtgcagattgaattggatctaaaaaaatgaaatccacacttagtgcggatcggatccactatgagaaaaatagtgcggattggattagatgaatacccctaattgattaatgggtaaagacaattttaaactatgtattttgtaaaaattactaattagaccttttttttttcattatttgacaaatcagactttgtattttctgaaataatacaaaaaaaaaaatcttaagctcaatttttattatttttttttatataatcaactgtaaatttttagtataaacatataaaaaaaaaatatataacttatttagtcataacatattcagatacacacttatgtagcaaaaaaaaattaaatcaatcatatttattgaagtcacacctatcaaaaatgtctggccacataaaaaatgcatgtcaaatttgtgtacatatattattaacaatagttttattttaacgaaaaattaacttagaatatttttttatattatttttaaaaggctaattagcaatttttccctccaaactttgacatgtactaaatcatgtctcctgaattattgagattgtt

SEQ ID NO: 138390 - DNA, 649 bp, Cannabis sativa
gaataaaagtaaactttcattaatcggcaaaatcaaccaatacaatattacgcaattcaggacttaactgataattctgaaaagtatgacctggagaaaaacaagagctacgcgccaaaaatagacaggctttgttcacagatcgttcaacaaactgaatagcaacatgactcaaagaagataaagcatttcctgcaatcattaaccaataaaccaaactcaaacagcatatgcaactcactctggatagcctgaacacagaccaaactatcagtttccagcagaacattttgtcaattatgttgttggatccagcttaaagcttccttgatcccgatgatttctgcaatctttggcctaacaattcccctcctgctagtagtgaaggcctcaagaacttggccagcatggttacgggctaagcaacccatcccaaaatggctaacatcattaaatagagctctgtcaacattaactttatctgatcagaaactggtgtagtccaatccacacgcgaagacagccccaccgaactattagacaacgaatttgtcgtccgtgattgtgcaaaaagaaattgattaaggagtgatcttgccgacaaaacaactgatgcagcagtagaagatttttgttgccaaacaacctc

SEQ ID NO: 138391 - DNA, 700 bp, Cannabis sativa
  modified_base (506)..(511): a, c, t, g, unknown or other
ccaaagatcaatctcctgccactaggagagaagatcctttttcccatctcaagtactttgagatgcaaatggatttacaaggagtacagggggatgtataacgcagaatcttccccgccactctgtcggaagtcgcacaacaatggtatctcaagttggatcctggaaagtttagttcaagggaaacaatctcttcggaattccatgcgcaattctcctcctcgcgccagctcccattgcctttggaagatttggtcgaagtaaagcaacgaccaggtgaggcactcaaggcatacatcagaagattcatgacggaagcgaccaaagttttgcgggtaaccgatgatggaaagttatcagtgatactgggggccattgaagtgcttagtgaagtttggaaagatttaaggaagaaagggccggtagactcaatgagtgatttccttgaccgagccgaaggcttcatcaagctcgaagaagacattcaacgagcagaaggtgaacannnnnngggcaagtcgaaggctccttccactgggacatctaccaacttcccaactattccaataattcaagctcatgtggcaagcgttcaagcgacaaccacaagcaaggaaacgggaagaaaggaaagttcactgataaattttgacagactccccgagagaatcatgagaaatacactgcattcactattctg

SEQ ID NO: 138392 - DNA, 735 bp, Cannabis sativa
tcaagatggaccatagatatcatgaatggccatcttggagagatgagaattgaggatggtagaggggagaggcttggtaaaagcatcggcgagttgtagattactgctaacagggataagtctaatggcagacttggtgattttttcacgaatgaagtggcaatctaattcgatatgctttgtgcgttcgtgaaaggttggattattgacgatgtggattgttgattggttgtcacagtagatgaaagcaggtgtaggttgttcgatgtgaaggtcttgtagtaggtattgtatccatgttatctcacttgtggtagaggccaaggtgcggtactctgcttcagctgaacttctagagaccgttggttgtttctttgttttccaagagataaggcaatcgccaataaaaatgcaatatcctgtagtagatcgacgagtgattgagcaagttgccaatctgaatcagaaaatccttggagatggagagatgatgtagaagagtataaaattccttggccaggtgatcctttgaggtagcggagaagatggtgtagagctgtcaaatgtgtagtgcgagggcaagacatgaactagctgagagtgttgacggtaaatgtgatgtcgagccgggagagagtcaagtataggaggcggccaatgagttgtctatagtgagatggattatcgagagggtccccatcttgatcattgagtcttagtctcggatccatggga

SEQ ID NO: 138393 - DNA, 1070 bp, Cannabis sativa
  modified_base (263)..(269): a, c, t, g, unknown or other
  modified_base (655)..(662): a, c, t, g, unknown or other
  modified_base (913)..(918): a, c, t, g, unknown or other
cctgaccgagaaacctcggtcagctgcagggggacgcgcgcagacaaagctccaatcgtgtcagaatgcagtgtctagaggatccttcagacagcatttgtccccgcacatgcgcgcgcatgaggatcttgtccgaagctcctagtgcgtgcgtgcaccaagcttcgacacccatggcatccaattttcaaactaccataactttatcaatttttatcggaatcgagttccgtaaaaacaaaagttgcttaatttttcacaannnnnnnaaataaaatattttcaaaatgaaaataaaattattttcatggaaaaatttcgtaaatcacatacattcatcaagtaacacataaaccaacatgaacacatccaaatcaacacaaataacatattcattagtttaaatccatatttcatgaaagtaaatcattaccatggctctctgaggccagttgttgagaatattttaccaggatctagatttactaacacgtatgttgaattaacatcttaaatatgaatatctctaaaacaataaaattaaacacataagagtttaaaaaactttacattggttgcagcggaatataatagctctttccactcagatctctaacccttgttcctttttatcgcaaagtattatcaagatctnnnnnnnnatctctttctctccttcgggtttggttaccaccgtcttactcaatatgattaagtacttgactttctatgtgtgggcatggtactctttcactaaaacggttcgaatatggtgaagaacaatgaatgaggtgaaatcactatagaaggaactctctcatctactagttgtttgacataaaaaactaggtttgatttggttgaaggtatcaagtggatgagtgagagcatcatgtttcttttatagtgtttnnnnnngggcttagggctgaattatatggattaaaaaagaataaaatattgggcaaaagtcaacactaagttcagccattaaagggaccattctctagttacaattttgtcatttatttcaaccacttattcttctttcaataataccatattttcca

SEQ ID NO: 138394 - DNA, 753 bp, Cannabis sativa
  modified_base (257)..(258): a, c, t, g, unknown or other
ttatacacgagtatgtcactttggctacttcctggatgatgcttctgctagtttacatgacttcgtatggttatctaaaggttcgtatttgacctaacacttaaatatatactaaaactcatatcgaggtcaccttctttaggaatacaaggatcgtatcgttttcattagtttttaatgctccgcttttacatgctggcatgtaggacgtcaaatcacaaatccaattgccactttctgaatactcatccatcctnnacctaatcattgtactattttacaactaactggggatgcatctagtatggtgtaggttgtgcttctgtcatcctctcgaccttaagtttccattgcagtacgttttctccttgtcttcgagcagcaacactaacatagatgctttcttggttacaaattctggccatatcctttgtttcacactctccttgaggttcgtcaatgggtaggctactacatattaggccaaggaagctttcagtctttcttcggtctttgtgcgctgacagctcttgaagactatcacgcttgtacgatcaaccacaagttctgtattaagaattaagcatttttcgaaagccagctctttgaaccagtagctttgatctcctaatcctccagttcagtcaagtgttctaagctcagtttggggtcgtatttaagtatccttaacatcctctcacatgttggagtatggaaaacatcatcaacaacgaattcctccacctaattttt

SEQ ID NO: 138395 - DNA, 785 bp, Cannabis sativa
tagttttgagctatggtgagggaactgagcaagcttaagttttgaaactcaagtttaggaatttaatcgcataagttgatttagcgactttttctgagaatttttgattggattatattgtatatgcattgtacaggtatactggaaaggtttgcaaagtttgggttgattttgaggtcatgggggcatttttcgggttccgagcacagaaccggaattccagttcttggggacctgtagcaaccggtcgaccggttggtcccaggaaccggacttccggttgggaaccggtttgccggatgggaactagtctgctggttggggcagtttttggaaccctagtttttcctattttttttaaatatttagggtattgccatgttatttatcgatagggaaactcttagtttcaatgtttaagtccccggaaagtggtttagcgtgtcactcacctatgttgtgattaatgtgattagggtatccatctagcacgagacatacagttcaggtcggccagcacacttgaattcggaaagaagttaagaactgtatataatgtgtgatatggatatctgagtgtatatatatgttatgtgtatatgcatgcttaaaatgttacttgcactaccaacacttatacagttatggtatagagtgcattggtataatgagtgttctctgagagtaccgagataccagcataagtacggagaggtactgggagtgcgtggtatatcacttagtggtactcagggtatgaaacaaaccctactaacactcgtaca

SEQ ID NO: 138396 - DNA, 530 bp, Cannabis sativa
taaactcttatatgtttattttcattgtttaagatttcatattaggatgttaatcaaacatacttggtagtaaatcttgatcctggtaaaatatttccaacagtatgtggaactctgctgtctccatggctttttgcatcgcgaccatcacctcttgcatctttttgttttgttcttttcgggctgtgatctcaccttcatgatcagcagccttttgccttaagagcagtagctatgtgtaactaactttgtcgtaggcgtcatatttgtcaaagttttcctcgtatttgtcattgttggcctcctctcgttcctcagaatccacgttgattctcgaagccacttcttcgtcttcagggttttgagcgtcatcaggaggacagggctgacgtgtgttgtgagtttccaccattgttgctttagcttataaggttgttgtcgatttgaagacgcttctttcagctctcaatgaaagcaccaaaatgttgaccgaggttttcggcaaccgatttaataatatatataagaaa

SEQ ID NO: 138397 - DNA, 690 bp, Cannabis sativa
cttcttcttctggttcttgtttcagaggccggggccggagcctctgcctcttgccctaggattttcggatccagatttcttattgcccagggattcgtcgatggacgaagaagagaagaaaggtgtttgaattgaaaggggaccatctatttttgagattaatccccgttattttctttttaaatgagttttgattctccaatatttaatatcagttcaaatattaataggatttttttattattattttattaaataaaaattaaaagtgacccatgaatttcttataaaccaagaatttcaattatatagatccactttatatagaatagatacatcaaattataataagaaaatattaatattaggatgagtacacaacatggtatgcgtctattctactagtatatatatatatatatgcaatactctatatgaaaaaaaaaatacatgtaaataccacaaaaaaaagtatttaattacatatataaatatatttgatggtttattggtgtatttatattgataaataatataactataataatcgtaaaaaaaaattattaccctttatatataaataaaagatttaagttgtattaatttttatattgcataatttcttaaaaataaaaaaaaaacttacaatttttatataaatattaattcttatttttttttattttaaaa

SEQ ID NO: 138398 - DNA, 528 bp, Cannabis sativa
gttattaatttttattcattatgttataaaatcggctctattttttgtttatatctgagacatttacttctggtgactttttccagcaaaggtgatttttcaagcaacttctttggcagtggtgacttttccgacaacttttccagtgacttttccgactacactaactttttcgatgactttcccggtgacttttccggtggaccttattattacaatttttatcaaattaatttattgattttttcctatattttaaactttaattattttttaatttctatatttttttgcattatttatgccataaaaaagtaaactctactatatttttccatgaaaacaccccaaaaacttaacttatttgtatatcttaataacgtgcttaatcttttttttctaaataaacgtgcattaataaaccaattagacctcatggtcattacaaaagagtttagtcaggatggattcaacaagaagccatccaaactgcttgtgggtaaaagcctacttagccacattatgggc

SEQ ID NO: 138399 - DNA, 696 bp, Cannabis sativa
tacctcgttttcgaattcaagtgagttggccgacctgaacggaaagtctcgtgctggatggatgccctaatcacataacataatcgggtaaatcacacatcaaataccctaatctgagaaaacccgaacctctaacttaaggttctgctattactaattggaactacaataccctatgaaacaaggaatcatctaaccaaggcactaaaatggacacgaatcgaggaaatgaattgttcgaggaatctaccaaaaccagttaaccggttttacaagtcctggaaaaccggttaaccggtttgcaccaggtttccccaaataattccaaacctactcaaaacatgtccaaatgccaccaaatttttcagaacacctataatgacctcccataaccatttccaagcaataaaacccaaaaaaacactgaaatcaaatataccattgttgagttgctcaacctaagaataaagctccaaaatcattaaatcagacctagaactaattcacaaataactataaaaatactaataatcaatgctaattgcctatactaatccatattttaatgtgcagtcattacaagcgtagtcaactcatctacaatggaaactattctagcaattttttattcgatcaagactagaatccggcattgtcccgttaaggcgagattcaaggccattctatcttatgagc

SEQ ID NO: 138400 - DNA, 1110 bp, Cannabis sativa
ataggaaaattatatttatgttaaaaattaatttattaattaattttagaccaacatgaattagaataatttttaaagatttattttctcttattttaataggattcaaaaatgtattttttaaatacattggatttcaaatttaataatatatatttatagaaaattaaatttgagttgaaaattaattttaattagttttggaccaactcaagttaagtaatttttcataatatttattgaaagttaatactaaggatggaaaaaaaatcttatttattttcaaatctaactaaatatataattgaagtttatatttagatttatctaaattagtaattttaattaaataaatatatgaatattaaaaaaaatagattcaaatagatatcaaatgaaattacaattcattaaataatgagctttagtttaagaatattcgatcttcattgttggctctacatggttcttgttttaatgagattcatccctaatagatgttcattcattagcaattaaatatcgtagaatctcgaaagataattattattgtaaatcttttattctctgtaatgataacccaaatagtgactgctcagagtaggatttacaaagtataaaataatagtagaagctcataaaatgagaatgaccttaactctctcctaaataggacaacgtcagattcttattttgatcaaataaaaggttgctaaaatggtatctattttggatgatgtgaaaactctatttaactaatgatatatttgactctcgcctaaacaagacacttatatgatttagttgaaaaccttagaaattatttaagatgtgttaattttatattttcacatgtctttattacttgctaaatatttactaattttcaaatatgtgtatgaatttatattgaccctgtattgttttctattattgattatgtagtataaattttgaatctttatttttagtctaacttggtttgttgttttaatgggacaatgcccaatagattgtcaatcattagacaacataatagtgttagatctcgtaagataagtattttgtaaatacgacatctagttaactcatccctaaagatgacaactt

SEQ ID NO: 138401 - DNA, 518 bp, Cannabis sativa
ttttgacaatgccttgttgcaccttctcccttaccaagtaaaagtttatttcgatgtgtttggttctctcatgaaaactagggttttcaggtatgtattaagctgacttgttgtcaaagtagagtagtgcagggtcttgatgttcaatctttagttcctttagaatagacaagagccaaaccacttcacatcttgtattggccatagctctatatttagcctttgctgaagatctataaatagtatgttgtttctaactcttccatgaaatgattgaagaaccaatgaagatacaaaaccatgtagttgaccttcttgtacctggacaagctgcttaattagatgtatcttgacctctgtagcagctgcaaagaacaatccttgtcctggattattttaacatattgaagcaccctctgagcaacaattagataccagaggtgttgacaagaattggcttagtttgttaatagagtaggaaaggtgttgctatattttataaacgctacgcaagtata

SEQ ID NO: 138402 - DNA, 911 bp, Cannabis sativa
  modified_base (419)..(419): a, c, t, g, unknown or other
  modified_base (515)..(522): a, c, t, g, unknown or other
tcaaacgtttcagatttcttttgcattaggtaaataaaactatatctagagaaatcgccaatgaaagtgacaaaatactcataacttcccatggccttgacatttagaggtccacaaacatctgaatgcactaacccaaaaggttctttggcacgctctccctagaaagaacgcttagtcattttttcttctatgcaagactcacaaattggtaattcacccacgacgatatttttcaatggaccgtctttggttaacttgtgaagtttatgatagcctatatgacttaatcgtaaatgccatagatatgtttcatcattagtattgatctattttcttttatggtttctaggtttagcaacattgaaaagttcattgttaagcgtgatttgtatggtctcaaaacataaagcccttgntccatgtgagcaacacataattgaaatccattacgagaaatagtgcaaataaaactcgaaaaattaaattgttaaaattgtgtttgtaaacatgannnnnnnntcaagtttctactaaaattcggaacaaacaaaacattgtctaaaactaaaaatttcttctgaaacttgaggcgggcttttcctttagcttggaccgatatcgccatttccaactttgagctttaactccctagatttaaataatcccaagttgcaagcagctgcaatgaagagcaaacatggttagtagatccagaatcaacaatctaaaaggatttgtcattctctaaaacacatgattcaaaaacaaaagcattaccttcattcgaaatgtttcgaagtctgagacatcgttcttcctgatgtcccttctcattacaatttgaacattgaagaatactacaatcaattgtttcatgatttgtactttaagcaagcttctcgctcatg

SEQ ID NO: 138403 - DNA, 552 bp, Cannabis sativa
  modified_base (63)..(67): a, c, t, g, unknown or other
ggataatagccatagatgtatttttgttagctttgtaattaactaccactatgcaattataannnnnggcagataagatcaagaagggggatgaaaaaaaaaacggactcagaaatatgaattagattgactcgtggactatgcaaaattttaactacaaaaccacgtaaaaatttggtgttcatttttttatttttctatagtttttgtgtgttaaatcatatttgtgaggctcaaattcggttaacaaaaatctacattaacaaccacctcctgatccttcgttgttagatgccccgtctacatacaaagtccatccttcgcaaattggtacgtcaagataaattcgctcttctacgataatggctacttcgtcacttggaaattcgagtatgaactttgcaagagcttgtcccttgattgctgatctaggtttgtacctgatgtcaaattggctaaactctattgaccacttcagtaatctacctgaggcctccgattttgccaaaacctcaatgatgtgtgctcggaagtgttgggttttgtgcccta

SEQ ID NO: 138404 - DNA, 638 bp, Cannabis sativa
tatggataactaaagggaatgagcattaattactgacatttttataattatacatgattttattatgagtcattattagaaatgggtattagagctataatttatcaatttggagattttatgaaactcttaatgtattatataaattaaatatgaattatgaaatattttacgatttttgctcggtcacaacagaaaatgtgattgatggtcgttagagttacatgggtaagtctagaacctattttttagtgagataaatatttgagatattcagaataccaagtttgagtgagcttatgaattttgggcattttaccctcaggtttacaattacttcaattaagaggtctagggcattttaaggattttaattattagtataggtggccttgtaggaaactggccattttattttattcagccaatattaacttatggatttaattaagttagaaaaaagccaagaaattaatagaaatttcccctttctctctctcttttgctaggctccaacacaactagaagacaacccagcaaagccttcaatttttttggatttcagcaaggtctcaacaagattggaagtagttcaagccaaaggtaaaccctagaacactacctttgtgttgtttaag

SEQ ID NO: 138405 - DNA, 1326 bp, Cannabis sativa
  modified_base (1101)..(1114): a, c, t, g, unknown or other
agttccaatacgccttctctcatgcggcattaaatgcgaggtgactgttcaaatggggtctggtgcctcccagaggtgctttgctatggctctgacctctgggagtatgtggacccctcatatcttctccgggaggtattttctcgttgatactcttgatctaaaaatacttagtcaaattatttagaaccatattcctcgaatccacgtgtcgcagtcgcattggtccacgtattttgggcaacatttaccccccaagcctagtttggtgggaagtaaacgaggcttgcttaggtgcctccggctgtcttattgactacccggcacgtcctttgggcgcgtgggatgtatttatgacaatcatcattgcagtttttacttttgcaggaaacgattcgtttcccatccattaatgatccgacgcatttaatgggtgtcagtcaaatactcaagcgtttccaacccccttgataaacgcttatcccaaccgttagatcgtagaatgtgaatcgattgctattctcaccgtacgatgatgcttgatcacagctgcttcacacccgttctagcctataaaagcaagccttctcattttatttggttactttcgctagtttgccaaattttctcagagcctttacagagagaaaaaattccagagaccatagattatttgctactcttccttctccgtttccagtcctaattgcatcgacgatcaacaccgacccccagctctcaaacttcatgtatgtttttaggatactttatgcttgtctactgtttgttggtatagcatgattaggatgtctgggttgagtgttgaatttctggggaataactttaactgaatttgctgtgtaatgcgtagaatctctcttatttgtgtccttgctgttttcctttattgcttttttcttttagagttgtccctttcgtcgagataacgcttttagggcatagggcgattctcgtttccaccctcggccttttctcccccttttttttactgtcactacctttgggatttttgcacccaatgcttgttaaggaaagtcctttggagtttccatttttggcaagcatccggagggggcctcnnnnnnnnnnnnnngggacccccattcccttttttaacattagggtttggtttggggcccaactgctggatttcttattttttcagaaaaaatgtctgctcatacctccggaacaaaatcttctaagaaaggggcgtccaccttggccactctggaggaagttatgaagggccctgttgcccaggagaactatacttctcgtgccaacggctgggaagcggatgag

SEQ ID NO: 138406 - DNA, 539 bp, Cannabis sativa
aaaaaggggagtatttgggattttgattttgattgagggggagttgaggtttgtatttgtgttcatctttggtcaaagttagttttttattttggtttaatgttgtgcttttcagggggggttttttatatttgtttcgctaactttattttgtaggtgtttgttaattaaaaatattttgattatctaaagtgtcaaatgaggacattgttaggtcttttttttggcaacttagttgtcaaaatattttttaattaatgtgtatttttattgagcatttaaattatttttattacattgattttgtgcatttaattactcttttcttctaaggatagatttttttttcagctgctctctttttgatttaggaaatttcttttgatttaggaaagttgtctaattttggaaaacttgactttccctttttttaatatttgatttcggttttgcctttattagaacaaatcaagtcagtacgactcagtttgggtaattatagacagactcaccaagtcagcacactttgttccagtaaa

SEQ ID NO: 138407 - DNA, 770 bp, Cannabis sativa
  modified_base (280)..(280): a, c, t, g, unknown or other
  modified_base (307)..(307): a, c, t, g, unknown or other
  modified_base (342)..(342): a, c, t, g, unknown or other
  modified_base (369)..(369): a, c, t, g, unknown or other
  modified_base (397)..(397): a, c, t, g, unknown or other
aaaatgattaaagtaaattttaagtctattctattgtcaatttcttatatattcgaacaatattatacaattgatatatcaagtcatcacttcttcatatttcagttttaaaatttattttagttaaagaatgtggcccgtttctttttttctttctttttttttttatttttaatgtattgaaccaacactacaaaagatgttattttttagtgacaatttttttagttacaacataatttatttatgactaaatgtaatttttaattacaataaaaantaatttttaattacaataaaaagttanatttttaattacaataaaaagttatttgtgactanacaataaaaagttatttgtgactaaanaataaaaagttatttgtgactaaaacanagtatttaaatacaagttgtcactaatttaattttagtcacaatatatattgtgactagaaatacatttagttataataaattataatttttgtgactaatactcttagctatgaattttttagtcacaacacaggaatgatataatttacaattagtcctaactttttcattttataagttacaaattttgttgtaattaaaaataaaaaatttcccagtacaggttcaaaaagtttacttgattcggcataaaaaaaaatttagttaaattttttttatattgatgtacgttatagctattatagcctacaaaattttgagaaatttaaaataatttatgatataggtaacaatgttcaaacagtctattt

SEQ ID NO: 138408 - DNA, 633 bp, Cannabis sativa
tgtgtgcttgactttgaaggatcatgggtaaagtaccctcccctgatcgagttctcgtacaacagcagctaccaggcaacaaccgagatagctccttatgaactttttatatggaagaaaatgtagatcacctattcattggaatgaagtaggtgaaagaaagttctaaagtcctgaagctattcagagaacaagtgaggcagttgataaaatctgaatgcgaatgctcgcggcttagagcagatagaggagttatgcagatccaaagtgtcgggatattgattttcatatcagagatatggtatttctccgagtatcacctatgaagggaattaaatgctttggtaagaaagggattcttagcacgaggttcattggacctttcaagatccttgagaggatagggcaagtagcgtataggttggctatgcctccagcgctggcagctgtacatgatgtgttccacgtttcgatgcttcagaagtatgcctcaaacccgtccataattctgagttaaaaaatattggaacttcaaccagacctatcatacgaggaacaactaatgcaagtactggatagaagagaaaaagtcttgagaaacaagacaaatgcactaataaaggtattatggag

SEQ ID NO: 138409 - DNA, 897 bp, Cannabis sativa
atctgggtccattcaggtgtgggtccttctcccagtttcaatttcaattcagtgtctaggttcgagtttcggtctgggtctgggttggggtatgaatcctggtccaggtctaggtcttggttttggtccagttctagatctcagtctgggtctgggttcaggtcaggtccaagttcgggtcctgggtgcgggtctaggtcttggtttcggtcagagtctcggtccgaatcaagggctcgagtttcaatctcggtctagggcttgttttggtttgagtacaggttcgtgtccagatccctatctaggtccgagtttgggtttgggatcgggtcccaggtttaggtcctggtctgggttctggtccaggtctcggtcccgatctgggtacacgaatgtgtttgggcccgagtttcggtctcagtttgggtctggggctaggtctgagtttggttctaggtttgggtccgggtcgtggtcttgcagttctttttcagtttctagtttagggtcccgaattttggtcagggtctgggtctgggtcctgcttctggtttcggttgcagtttcaattcacatggtacgagttcgggttgagtttgggtctgagtttgggttcgagtctttattttggttcggggggaggctaaggtccgtatttcggtctcggttagggtctgaggttgggtacgattttcggttctgatctgcgtcgaagccccggttcctttcaaagatccccgtccggttccagttcaagtttcagttttggttcccgagtgtgggtctgggtttcgctatgtgtccggttcttggtttgagttcgagtttgggttaggattctattctaattcccagatccaaacactgactacgggtcaggtccaagcatcgagtccc

SEQ ID NO: 138410 - DNA, 824 bp, Cannabis sativa
tttagagtcaaaccttgtcagactataaaagtaacagctactctcaaaaagtgtcactatatctatacttttttatttataaaaaaattaaaattttttaattcaaattacatattataaatttataataataattttattaataattcaatttaaaaatacataaattaataatttgttcctggtatcatacactttcaaatattataattataagaaaaataaaataaataaatatagatcaataattataatttataatttacacaaagttcaaatagaaaaaaagtttacaaaaatttagacataacttttacaaattaatcagatacagaaaaaaaaattacacaaagacaaatgaaataataacacaaaaaaaaattacatagaaattcaacaaattttttagatctgcacagggagcttcttcaaagaggcagattgggttgtgaactcgcagctccgacgagcttcttcacggaggcagaatagcggtggtggcttcgtggcttaagggtgttgcgtttcagaactcggtgaggccacccgtggcctccattttctcctacggtgaccggagtagcaccgtcgtgcattgcaaacaaagaacccgagaaagagttggtttacttcatcatttatattattatcagtaatcgagagattaaaacttacaggttagcgtttgaagagccgttcatcgtctcggtgctgcgattactatgagggtggaaagagagtggtgaggttcatggggtttgccttgggcttggacggcaaaaggtttgtttgttgaaggtctgccgccggggtggccattggga

SEQ ID NO: 138411 - DNA, 730 bp, Cannabis sativa
gtctattaatgccttaatttttttaggatccttaatttttttaggatttgctttttaggatttgcctcaatgatttgcctcaatacccctcgccctcaatacccctcgcgttaactatgaatcccaaaaactttcccgaggagactccgaaggaacatttctttaggtttagtttcatgttacactttttcattattttaaagcattccgcgaggtctgaggtatgatccttactctttatcgacttcaccaacatatttttgacgtaaacctccatgtttcaccctatctgatttgcgaacattttatttactagtcgctgatacgttgccccagcgttcttcagtccgaacgacatgaatttatagcaatagagtcccatgttggttacaaagcttgtatgttcttaatttgggacatacatttttatttggttatatccagaatatgcgtccataaaagacataagctcgtgcccagcagttccatccactaactggccgatcctgggaagtgggaaatagtcttttgggcatgccttattcagtagagaaatcaatacaagttctccaggttctattaggtttcgagacgagaacaggattagctatccacgagggataaaatacctccggtataaaatcgttgaacaacaagttgtcaagttcctattttagtgccccttgcctccggaatccaagggcctccttttttgtctcttcgctgggta

SEQ ID NO: 138412 - DNA, 942 bp, Cannabis sativa
  modified_base (50)..(55): a, c, t, g, unknown or other
gccaggtttgtctaccgaagcttggtaagacatgtacaatcttcatcagnnnnnnctcggttcacggttcagtaagcttgtatctgtttagtactttatgtgaatattaaagcatgttaggaagcatattagattataattattaatttcaagtctgttgcctttaagtccataagagcggtattaagttttatgatcgctatctaacctgcccggcttatgggttcacaggctaagtcctatataaaaatggacgcccaacgaaatacaagaagtcagggtaacatggttgagaccagaggcggtcagagaaatctaaatccccagaatccccgtggtcgcggccgtcgctgtggtagagctcagggtggttgccctgtaaatccaccacaagctcctctagattgggagcagaggtttgcggaaatgcaagatcgaatttgtcaacaagatgaagaaattcagatgttaaggcagcaaggtcttcctgctgtgcctcctcagcaagctgctcaggccattgcagttccagcggtgccagcagaacaacctgttgctggcaaccgtatggagccgttatacgaaaggtttcgcaagcaagcacctccagtgtttctgggaggtcctgatgtaatgaaggttgagcaatggctcacagtaattgagcgaattctaaactttatgggggtgtttggtaatgatcgggtgacctgtgccacatttcaattccaggaggatgctctcgtgtggtgaaaattgataaccctcactcgggacgtcactgttatgacctgggaagaattcctggaattattcaacgccaaatattataatgaagcagtctgcagtgctaagtagagttcaccgagctagtgcaaaccaaggggatgtcggttactgattatactacaaagtttgaccgtctggccaagctcgccgtgg

SEQ ID NO: 138413 - DNA, 756 bp, Cannabis sativa
  modified_base (64)..(66): a, c, t, g, unknown or other
atttgcatgctcatagggtatatggtattgttaagttcattcaataccatcaatgggagaacannntcactggtttcgaagggtacattgaaaacattatcaaagaattctatgctaacttgtctgatgattttcttgatgagaattctagactttttcgaaaagtgtttgttagaggacaatggttttcctatttcccaagccttgcaactgccagaagatgtaccaaatgccataatgtctatggatcgccagttgatgctcattgaaatcactggtgcacgggctgaattgaaatcgggggagactctacgcattacacatcttacctatgctcatgcatctctcatgaggttttctcttagcaattggcttcccaactcaaacaagaccgtggtgtctcaagatgtggcctcattcctctttcgtatcgcctcgggagcatccatcgacctggcctcccacattttgaatcagattatttcttttcaaagaggtaaaaaaagcacctttaagcttgtgtttccgaatctaatctttaagattttgtcctctcagaaaaatgtggctcaatctcatgaaacacttgagcctcccctgactggaacaattttccaaccctcggagtattttgatggagctttcccaaaaaggcctaaagctagtgctggtgctgctgctggtgcaagctcgagttctacttctgcagacgtccaggaggtcaagaatgaggttcagttggtgaacaatcgactt

SEQ ID NO: 138414 - DNA, 969 bp, Cannabis sativa
  modified_base (102)..(109): a, c, t, g, unknown or other
tgacataaaaatgaattctgaattcaaataaatcatcataaataattaattcaatattaataaataatttccataacaaagccctaattatctgctaatttnnnnnnnnaagctaagcggtctttacatccatttcttttatacacccaattaaattcctcaacactttaagcaccatcatacaatacaaccaaaaatacaagcgatctttcaattcaatacaaaccacaaacaactaaatcagaataacaaaaataacaaaaaattacaataatgggaaataatgttgacaaattgtcaagaactaatcgagaacctatagaaaagcaatcaataatcgttgaaaataataatcattcaatcatcgagaaacagctgagaacacgttgagaaattatcaataacatggggcaagaaagtttgaaaacacaactatacacaccatcgaaaaactattgacaaacaatcgagaacacaaagataacatgtcaagaatagttagaattgcaaaatcattttccattttgacaaatagtcgagaacatatcgaaaacccgtcgagaaaggtctttccaaacattgagatattattatcgagaaccgttgaataacatatcgacaacccgtcaagaaaggttttccccgactttgagacattagtgtcgagaatccatcgagaaaaatacgaacacagagaatactccaaacaacaagatcttgtgatttcaacaaaatttatatcaaagccaaaaaaaaaaaaaaataacaaccacatagatctaacgaaaaatatactatacttttataattattttacatttttttttaaaaatactttctcattaatcaactatgagaggaaggtagagaaggggcggtggttggactaatgagagaaggttgggtagctgagtatcctcagcagatgtaggtggtggagctaagggaggaggtttttttttttttttt

SEQ ID NO: 138415 - DNA, 608 bp, Cannabis sativa
aaatatcgaaactagtcccatgactacccgagaacaattctataaggtcagaaccttcataactattctaattcacaaaactcctatacaaaaccagttgttattaaacttaaaacgatattaaaccttaccttaagcttccttgctctgagaattcgctattctgctactaacagatcttagatcgctaggtttcggattgaaaataaaaaaatggatataagaggagaatgttttatcgaaagaatatgaacgagggtttcattcgttcttttttctgcttcagacttatataatataagttataacttatatataatatatatatatacttcacgatcattttaaaagaatattataataattataatactaatataatataataatatagtaataatattaataaaaactttattattaataattatcttatcatttcttagctactaagaaacttctacttctaggacgctacctaaaatctcatattctcttaattatcacaatacttacattattaacttatcataatattcccattaattctatcaattaagccagttatagcatttttggcccccgatcgagtctccaaagtcgccaaa

SEQ ID NO: 138416 - DNA, 622 bp, Cannabis sativa
atccagttttcgtaggcaggattgacaatctgtgagtcagcaccatcaatgctctccataacggttcctgcatcaataaattcagggggacaaatgttagtaccagtgagatagccatctaatctgtggcctctaactatggtggaaaccatagttttccataggctgtagttgtgcctatcgagctttaaggaaaaaggttggtttagggtactgaaatggtgagatactagattttggagctcagtattgttgaggcttgcaccggaaacgtttgatgcagcagtagtgggtgatggttgcgaagggttggtgtttccagggttttgaggatcgttagacattgtgttaaggcacaataaatgctctgatacatagttgaaattcagagaagattgatattgtattgctcagctcaataaatgctgagatattgatttccttatatagagttcagggccataggccgaatacaatgaatgagatgaaattgctctgtacagctggctggaaatcaaaacagaaaaagagaatattctaaatacaatgatttcctaatcattacaaatcaaacggtacaattccacaaaatcagcaatgcactgaatgatgacacctggca

SEQ ID NO: 138417 - DNA, 1501 bp, Cannabis sativa
  modified_base (86)..(86): a, c, t, g, unknown or other
  modified_base (351)..(351): a, c, t, g, unknown or other
  modified_base (1217)..(1219): a, c, t, g, unknown or other
cttgtgtctttatatttgttctaccatatatcgattgttataaatcacttatcgcttactaaataagactcattgtcgttggctanaagcgaggtcaacattttggtacttttattgagagaaggatcaagaattgctcatcaacaaatacgatggtggcgcagactcgtaggggtcaaggggatcctgccaattcgcagacggtggatcctgcaacgcagaacccaagaaacacaagggttccgccagctgttaatccttcacagccagcaaacgtgggtcacggtgtaacgactgctatagatgaaatcgtgcctggcgtgaaggagactgggaataacagttccgcanccaaccagggcattcataacacagacgttccgcccggcacaaatgttcaaacaaccattagagatgctactgagttacaaaatctccgtgacgctcttggactcatgcagggtcataacaataccatacatcatgatcaggaagaactccgcgctgtcgtaaatctcgcgttagaagaacgaaggcgtatgtttgttgagtggaaggacagagattgaaaatcgtagtcggcaagcgaccgtgctgatacaaaaagcctaccaaattgtaggtcagcaacctccgaatgtcattcccctaggtgatatggacgaagatccaacgatgagtacttcccagactataaatggctggatagagaaacaatgatcttgagtttcatcgagcacgcggcacacctttctctcccgagatcaatctcttggcgctgccccacaagtttaaaatgccaacatggaagatgtacacagggagagaagatcctctctcccacctcaagtatttcgaaatgcaaatggatttgtaaggagtacgaggggatgtgtgttgcagaatttttcctactactctgtcagaagccgctcagcaatggtattttaagttggcccctggaaagtttagttcatggaaagccttctcttcggaattccatgcacaattctcctcctcacgccaactcccattgcaattaggagacttggtcaaagttaagcaacaaccaggtgagcttctcctgtcatacataaccaaattcatgatgaaggcgaccaaagtttcacgagtaactgaagatggaaagttatacgcgatactggggggcatcgaagtcctcggtgacctttggaaggatataagaaagaacgggnnngtagactcaatgagtgatttcctcaaccgtgccaaaggcttcatcaagctcgaagaagccattcaacgagcggaatgtgagcaaaagcctagcaagtcaaaggctccttctactggaacatccgcccaacttccccattacccaaaataattcaagctcaagtggtaagcaatccaacaataaccacaggcaaggaaatgggaagaagggaaagttcgccggcaaatccgaacaagctccccaggagaatgaagcaaagtacactgcgttcactatcttgac

SEQ ID NO: 138418 - DNA, 1082 bp, Cannabis sativa
aatcatgccccttgaacttttctaaccgttaaaaatttcccctgaactatttagattattggatttaaggacttttgtccaatttcactcaattttactaattttgtgtttgtttatgtactaaattatgctccctagactatgatatctaccaaatcatgcctctcaaattttgacatgtacctaatcatgcatcctgaactttcatccatgttagactttccttaataaaattagacaaaagtccttaaatcgagcaatctcaatagtttaggaggatttttaaagaccttaaaagtttagggggcgaaattcttaattaccctttattaaaatctgtgataataataaaaatttcaccaaaataaaaccctagtaacagatagtataacgacactaaaactttgttccaaggattcttgttataataattttacaaaaggacaaataaaaaaaaaaacaagtcaaaatacacaattgatacagccaacacaactcctaaaaactcaacacaaaggccgataatgtcaatatgtacattcgccagagaagaccgtcatctcatggctgctctaactttttcttgcccttacccgcactacagagcacctgtgagttacaaggactcaacaagaaaagtaataaagaaaatacatgtaataattaattatccattttactataatagaataatcaaacaataatatttcaaagattatataatataatgaactgtatgtaaggaaataaatagtaaccatatattgcattgcttaatcaggtaagcttgtgccatagtctggaacccatacatcgcatcacaacatcaccgcatcacctaatctggtgagcccgtgccataacctagtactcatgtatcgcatcgcctaatcaggtgagcccgtgccctatcctgcaccaatacgtcgcatcacctaattatcgcatcataattgaaaataaaaataatttatggtattcacatttaaatttacacacaataaattaaaaaggtaattttacaatgcactcctccaataaaagagacgcgtgcaacagacagtttgaattttatttttggc

SEQ ID NO: 138419 - DNA, 532 bp, Cannabis sativa
cgtcaaagtacagaaattgggattatatttgcccccgaagtctgtatggaacttttgaagttgcgtgtagacttcatctgagcaatctttgcgtttagatgggtgacacgtgtaggcgcgtctgttcgcgactcgatgtgaggctgactgggcgtcccatgtgttttcggccaataaatgctgtgacgccattaatgctttgaaatccgattttctctcacctcctttgacggttgcacttgattgcttttgatttcccatatttgcatttcgaggaaccgaggtatcttaggtttctgaaatgattacctcttttcgttgtttgcctataaataccattgagcatttgttcacaaactcattttctccaaccttctttgctaagcaagttcagagcgaaaagagtggtttttagcttcaagtttgatgaagaattttcaccggaactatcgttcagctttgggtaacctgaacccagacgtttgatccttagtaagttctcgatttcttttactttgcacatttattttct

SEQ ID NO: 138420 - DNA, 689 bp, Cannabis sativa
  modified_base (554)..(554): a, c, t, g, unknown or other
  modified_base (645)..(656): a, c, t, g, unknown or other
atgcatgttttgagaaattgagttatgtagctgctgttagtggttgattttgttttcagaagtttatttatgtttagatatgttgatttaagcatgttttgaatgttgttggtagagttaagcaagttttgagttttagaactcaaacttggagctttaatggtgtttttcaattctgagcttggatagttattttattgcttgaaaaatatttattggggtataatatgcaggtctggaaggtttggtaaagtttggaatcgatttggttggggtttgaaattgtttgggttttctggggaaaattggataactggtttttgcagcagggattctcaaaaatttcaagttatcgattcgtgctagtttcaggtttctagttggttaattccctgctagtttagggtattgccatattaagtagtagtagataggttttttggtttaaaacctaagtcctggttgtgatttagcgtgtcacttatccatgttgttattgatgtgatttaggagccagtaattcgtcgagaagttgttccactcaggttggccgncacacctgaattcggaattgagataagattagtaaaatgtcaagcatatgttattacatgtttagcgtacatgttgtttatgcctgttagnnnnnnnnnnnngcagtaatagtatacatagagttgtattgatta

SEQ ID NO: 138421 - DNA, 1104 bp, Cannabis sativa
  modified_base (48)..(52): a, c, t, g, unknown or other
catataatcataattaccttccacagtgttgacatcactgtaattgtnnnnnactatatgttttggatttaacagatgttgtacacattaaaccataaacaaaaaatctacatgtatacataaatgaatcttctattgatgacaaatcagattaaatttaaatgaattttatttaggacataaaatcctaacaactctcactcatccatttgatgccttcaaccaaatcaaacttagttttctatgtcagacaactaatagatgagagacaccttctatagtgattcaaaccctccttccttgttcttcatatttgaaccttgagtgatagagtgtcatgcccacacatagcaagtcaagtagtcaatcatagtgagtaagacagtggtaaccaacccgaaggagagaaagagatccagactcaaatcttgataatactctgcgatagaaaggaacaagtgttagagatctgagcgaaagaagtcattatattctgctgtaaccaatgtaaggttttttatactcttatgtgtttaatttcattgttttagagatattcatatttagggtgttgatcaacatacttattagtaaatatagatcctggtaaaatattcccaacatctggtattagagccatggtaatgatttactttcatgtaatatggatttaaaacgatgaatatgattattgtattgatttggatgtgttcgtgttggtttatgtattatttgatgaatgtatgtgatttacgaaatttttccataaaaatcattttatttttgttctgaaaatattttatttagattccttttgaaaaattaagcaattttggtttttacggaactcaattctgataaaaattgagaaagttatgattgtttgaagatttgagtgctcatgcttgaatcgcacgcatcagtcacttggacaagacgacgtgcgcgcgcgcatggtgcagacaatttcttgtttgaagccatatcttgcccaacccttcaaacatgcaagaccctgcaggcgtcgagggagagtatgtagctgatcgagatttctcggtcaaagaggctgcaaatccttgctccgcgcgcgtattggctgat

SEQ ID NO: 138422 - DNA, 664 bp, Cannabis sativa
  modified_base (600)..(600): a, c, t, g, unknown or other
aaaaagaacaaagtgtgggaatatgtagacgcacctaatgattatcatctaattggatgtaagtgggtctataagaagaaaagaggtgttggtggagaagtcgagacttttaaagatagacttgtcactaagggttatatccaaagagaaggtgtggactatgaggatacttttagtctggtcgccatgctcaaatccattagaattcttctctccatagctaccgttttttattatgaatttcagtaaatggatgtcaagacagcttttcttaacagatttcttgaagaaaccatctatatggagcaaccaaaaggatataagcttccagggcaggaagagagagtttacaaactcaataggtccatttatggactaagcaagtttctcgttcttagaacaaagggtttgatgaaattatcaaaacctatgacttttaacaatatgatgatgaaccttgtgtttaccaactcaaggataattaagtggtagtattcctggtcctttatgttgatggcattttgattattggtaacaatatcaagaaaataactgacatcgaggaatagcttgatactcaatttgaaatgaaagatttgngtgaagctgcttatgttcttggtattcaaatcatcagaattcgaaagaacagatcccttgctct

SEQ ID NO: 138423 - DNA, 507 bp, Cannabis sativa
actgtaattgaaaaagcactgtagtgtgccttagcattagggcgttacaatgtccactttagtgccttggttaggtgatttcctattccctagggtattgtagtccctattagtaataacagaaccttaagttgtaggtttgggtttcccggattagggttttggcgtgtgatttacctagttgtgttatgtgattagggtatccatctagcacaagactttccgttcacgtcagccaactcacttgaatttagaaaagaggtaagaacaatgtataatatgtgatatgaatatgcgaatgtatgtatgtgttaatgcatatgcatgcttatatggttagtgcactaccaacacttgtatggaaaaatggtacagagtggcatttgtatagtgtatgtggttttaagagtacattacagtgttaccaccaaaagtacaggaaagtacagggtgtgcgtggtatatcactgagtggtactcagggtacaaaacaaaccctaccaacac

SEQ ID NO: 138424 - DNA, 899 bp, Cannabis sativa
tggcctcgaccaattcttaactgatttaatctttcttggattgaccataattccatctttcccgacactatgccattggaaggacacttcttataactagaattttcactttttaaactttgcatacaatttatgatctctgactcgtgaatgcctctcactattatttatgatcatgatcaattaacttactcttgttcgcaataccattcatatgaacaagttcaatttttaggacattgacgaggggacattttgtctatttgagacagactagcggtaactttcaaatttttattgcaatagatcaaacaaaactattccacagaaaaaattataaatgactttaatgtttattttttcagacaaagtttgagttttcaaatgacaatcctatgttcatggactgtggtcttaaatcattgtcaaaagggctacgtggttggagagcagacatgaaaaaagacatgtaaggagaatattgaaaaatatggaaaggacatcacgttcagatgtggtcataccaaaggtgtgggtagaagttattgcgtattggaaagacccaaaacaacaagaataaaatgaaagttgtaaaattacaggcaagagtcgaacaaaatgcaaaaataggagcccaaatgaagattcaaggtggatgggggtctaagaccatagtcgacgacatcgtcagtggggtaattattatcgcctaaaaattaatattttttgaataatatatttctaatttttttatgtaaaaaaatgctaatcctgagaaatgagaacttctcagtgttgtggatactttctaaaaatttaactacacaagaacaacaaatggcgcgatgaacacacacacaataattgcatgtaagtaattttatatctttaagaaactc

SEQ ID NO: 138425 - DNA, 559 bp, Cannabis sativa
atttcgttgatgactcacaatgcgaaagctgaattcgctaagcattggttgctctgtgcgaattgctgattgctttgctctgggcatgccagcaaggcaccgttctcagattatgccctccgagcagatactccaagtggattccacgtgtcaccattatatgatgccacattagagtaacaaaattgggataacatttgcccaccaagtttgtatgggacttccgaagttgcatgtagacttcatccgagctgtttctgcctttggatggggacacgcgttaagcgcgactgtctgagactcgatgtgaggctgactaggataataaatgctctgacaattaatatttcaaaattcgattttctctcaccacggctgacggcttgcacttgattatttttgaattcccatatttgcttttaaggagggaaattgaggcgtctgaggttcctttgaaatgattacctcccttcgtgactttcctataaatattgttatcccaaaattgacactctgacgtggcatcacgagaatggtgacactgttggaaattatttta

SEQ ID NO: 138426 - DNA, 576 bp, Cannabis sativa
tggatgtgtttgtagaaaataagcaaaattttcttaatgggttttgatattgagttttgattattgagttgtttcaaggaatatatatgatgatgctttgcttgttcaaaaatattattaaaaaagaaattgaaaaattccacagcagaagatctttaattgcaaaatatctatgcttgggtcgatctaaatgatgttataatttctattcattcttaagtgtttgtgatttaaatatgttgtttcatttcttatgggattattataaaaagcagaacgatcaacaaatcatagcttatgtatgttcccctgtaatatcaaaaagtggctagattctgaatttccctatatgtttttgattcatctccggcaacgtttaagtacatagtactagtaacgcaagtttagtagctgaccttggaatgtaattttgtaaactgtattggttacgacaatctgagtatttgagatccatatacggccttgttctatgatctttgacttttatgaatgaatgtagcattctgacttgtgtgcattttttttatttttttttcagtttgaaatttaattcac

SEQ ID NO: 138427 - DNA, 910 bp, Cannabis sativa
acaatacttgttgtgactaaaactaaattagtgacaacttgtatgtaaatattatgttttagtcacaagtaaatttttgttgtgattaaaatcacatttagttacaaaatattgatgttgtgactaaaagattctcactaaaagtatttttttttgtttagtgatgactactcaaccgagcatgagaaatccactttaacaaccgcgagagagagtgtgtgattgagctcaccacccaatgtaactataatactttttttaaaagcttagagcatttccaacctatacactaaatttggtgtcacactatcaccatagtgtcaaaaactatttctactctaactacaacactacaaattatactaaaaaaattatttcttattattatattaattttttaaaggtacttctaccatgcacccttccaaataaaagagtcacgagtgtaagagacaattttaaccttgttttcgacatattaaatatttttaaaattttacaggatgtcttaaataactataacgtacaagactataaaaaaattagactaatatgttactataattctttttattttaaccacaatactaaaattcacacccaaaaaatacattttttagtattataatattttttgaataaaatataatatatatacaaagaagttataaaataataatatcattaataatctataactatataaaagagagaatgtagttttgggcttcctacattaaattacaaaattatccttatttactttgtttattatcattaaatccaaattaatattgtagtgagttattagtaaaagaaaaaaaaagaattatttgttataaatattaataattatgtgaatgtccaaatcttttatttattaccatgaattgtaatcaacattcctctt

SEQ ID NO: 138428 - DNA, 829 bp, Cannabis sativa
gatcccagacccaaacatggacctaggacaaacctcgggacctaggatctgagactcgatgcttggacccaacccgtagtcggtggctgaatctaggacctagaccagaacctaaacccaaaatcgaactgaaactaggacccagacatatacccagacccagacccacactcgggaaccaaaaccgaaacttaaactggaaccagaccaggatcttggaacgggaccaggacctggacccgaacccgaacccagaactggacccaacctcggaccctaacagagactgaaacccagacctaaaccttgccccggacccaaatcaagacctgaacctagacacggacccaaacttgacccgaacccgtaccccatgacttgaaattagaaccgaaactagaagcggatcgggacccgaatctacacctaaactcagacccgaacatggaacaggacttgggaccctgaattggggtcgagacccagaactataccgtagtctcggtccttgacctagacctagacctagactaggacctaggacatgaactgaaaccatacttggacccatgattgggattcagatcttgtcctgggatccaggaaccagggcttggacaagacccatagtcggtgtcttgatcgaagactcggagaaggacctgaagctggactaggatctagacctagacctagacatgggacccaaaaccaaaactttaatcagaacgttacaaagaccctagaacaggatcagtaccgtgaccagggcctggacctagaccgacacccaaaactagaccataaccatgttggaatttattttacc

SEQ ID NO: 138429 - DNA, 741 bp, Cannabis sativa
atgcaaagctttagaaatacttaagttttaagtaaaggggcaattttgtcattttgtaaagtgaaggttgaggtggctgcctagcttagtgacatttggcaattagtttcagcaaaggattgattagaaatccttttctagttgggaaaattagaagaaatcacggaaaaaaggaaaattagagaaaaacctaaaaatagagaactctctctttctctctttcggctgaagcaaacgagagggattcaccctcaaagcttggtatttttcttgattgaagctaaggaattgagcattctggtggctaaggtaaccctagaaacttttgttatggaattcttcaagtttttacttagtttgagtggtggttttaggttttaagggttgttaaggttagagatgtttaaggttcgaatttttgggttcaattgagttgaatttagttcctagcagctggttttggtgtttggattaggttttatgcgagtttgagctttgagttcaaagctttgatctctaatggcataatttgattcattgagtttttctgtgaaatactagttggaaaatattgtctatgcattgtttaggtactctggaaggtttggtggcatttggtggaaaattgagcaagcagtgaaaagtttagggtgaactggtgcaaatcggctaaccgattttaccagtacctctaaaaccggctagccggttttggcagggtccccaaacgcttcattttct

SEQ ID NO: 138430 - DNA, 948 bp, Cannabis sativa
ttgaattaattatttattttaataacactatctatataaatcatgcatgaactagttagctagtagtacacatatatagttggaaagagttaatgcacattatcctatatcatgttcaagccttgacaccttcatttgataagtttatacaatttactttttgcatatttcattttttaagagttttttttttatcttctctatatcattctcaaatataatggtaattatacaatccattctgcactattttgagcgcattcaatctgtactaagtgcggattttatatttttgattcaatccaatctacataataactcaaatctaatccgcaaaagtacagattagattggttagtttttaatattgaattacttaatattttttttttttacattgttatatattttatgtcgccaacaacaaactaaaataaataaaacaaaaaataacaaacacaagggaagaaaaaattatatgtataaagaaatgtttaattttattttactatgtgtacttgcatagcaaataaattaccattgtgtgtacttacatagaaaataaattttacaacaataaactatatattatatttggatgatattaatgtcttaccacacgttttataattatcgaaagttgtcatagactatcaaatttagatgagatcgacggtaatcaagatcgttaagatattttttagtgcaaaattttttatctatttattattttgcatttttatttgacaaaatttttcatttttttattttattgttcactattatactttatgtaatacaactatcaatatatattaacaaataaaaattgggtaaattgcggtatacatacttaatgcttcagattttatatacttaaatactttacctttatttttacaggtaaaaatactgaatgttacgattctcttacatctgttactacca

SEQ ID NO: 138431 - DNA, 1459 bp, Cannabis sativa
  modified_base (61)..(65): a, c, t, g, unknown or other
  modified_base (410)..(411): a, c, t, g, unknown or other
  modified_base (713)..(716): a, c, t, g, unknown or other
  modified_base (934)..(938): a, c, t, g, unknown or other
  modified_base (1205)..(1208): a, c, t, g, unknown or other
  modified_base (1397)..(1421): a, c, t, g, unknown or other
aataaatattataaatgaaaattttatttgataattaatttaattattaaataaatagttnnnnnatttatagggttgaaattgcaaaaagtagtatttgtgaaaaataggcaaagggttgagaaaaatggcaaaaatctaactagtgttgggcccatataatggccgaccacttaaggtaattttggtccattttttttatcattttttaattctaaataattcaaccctaaccctaagagaagtagtataaaaggaaaagaaagtctcattatccaactactgcttaaaaggcaataaacctagctttctttctctctaggtttttgagacttcttcttcttcctttcttctcttattttcgaatccttagtgttcttcactaaacaaaattcagccattagtgattnngtgcatgcccacacataacaagttagttctcaatcatagtatgtaagactgtgaagagtccaaacaactgaaggagtttcgggctcagatctttgtgatactctgcgacagaaaggatactagggttagagatctaagtagaaggagtcatttaattccgctgcaaccaatgcaaggtttctcataccttttttgtgtttattttcattgttttagaaattcatgtttaggatgttaaaaacatacatgttagtaaatctagatcttggtaaaaaatattccaaaaactggcctcagagccnnnntaattgatttactttcaagaaatatggatctaagattatgtatgtgtgatttagatgtgattcatgttgatctatgtgtttattggtgattgattgatgtttgtaaattttttttatgtaaaataattagaatttcattatgaaattatttttattggatagtatggaaaaaactaagcaatttacttttttacaaaactcaattttgattttatttnnnnnagttatgaatttttaaaaattggaaaaatcataggggtggtgacaccccatgcgcgcgaggacaccacgtgacacacgggtgtcacgcatgttcggacaaccccctgtctgaaagaacacgcacacagtgtctgaacaggggccattccacgcacgaaaatgctactggcagcccccagcgccaaggtttctcggctgtgcacccttagggacacgcgtaccatccgtaccaaatgcaattttttccaattttttcattttttcatnnnntttcatggaattaatttcaaattttttgtgtaattttgtattttagtttttatttttcaaatttcaaattcaattatcagaattacattaattaatttttttaagtaatttaagatattagtagtttttgaaccctgaaaatagataaaaatctttttttttgcttagttggttatcttatttttaaannnnnnnnnnnnnnnnnnnnnnnnnaatttaaggtcaaatattttatattttaaattatttaa

SEQ ID NO: 138432 - DNA, 662 bp, Cannabis sativa
tttagggcataaaattctaacaaactcccagttgcatttatataaaactaaaagtgcatttcaattaatctcaacaccttgatatccagatcaagtgtagcatgtaatattttctttgtaatagaaatcagacaagttgtattcaatacaaccttcctccaccattacatttccttagtcacaaaatcattgatattgtgaaattcctttctatgtgtttactcctcttgggatactagattctttactatttgacaactatatctgtgttaattaagaggtaacactagtagttaatctatcactggaatatcagcaaaaactgtatagaattttccataggctgaataattatctagtagccttctaggccactttaacattcagtctcactggtagagttaacgactccggattggtttttacacttctccaaaaatcattgctccaccccaagagtaatcaccatctcatagactttctagcattaacgcaagtctagaaacctaatttggtgtagtctaagagtattaaaataccacccttatcaattaacatatagttcctcttttgatcttaagatttatttgattgtattccaatgctcctttcttggactaaactaatacctactcataactctcactcaacaacaggtgtct

SEQ ID NO: 138433 - DNA, 661 bp, Cannabis sativa
tagactaggatctagatttggactgtggacaggacccaaggctcgaggcttggacccgacccatagtcggtgtctaaatttgggaattggaccttaacccggacccaaatccggaccagaaccagaactcaaactagactcgacatgtggttggtgtttggattcgggaccaggactcagacctgaacccaaacacggacctagacccagaccaggactcagacccagacccacacccgaaccttaaatcgtacccttaaaccctaaaccgtaaaccttaaaccctaaatcctaaactttttacacttatccctaaaccctaagccctaagccttaaaccctaaattcctaaacactaaaccctaaaaccctaaatacccatactgagattggaacccaagacccagacacagaccataatctagtcctgaacctagacacaaactcaggacctgaacccagacccaaacccagaccacaacgttgtccggcacctagaccttgactgggacacagatcgggaccccgaccctggcccgaacagggacttggacttagaccgggacctgggcccaaactcaaacctgaacacgtactgggacctagacttagacccaaactcgggatccaaacccaaacctgaacttggacctaggccggg

SEQ ID NO: 138434 - DNA, 612 bp, Cannabis sativa
agtgttaagcctcattctaagtctctaagtctaatatctctctctcgctctctctctctctctcatctacacgcccatataacattctcaacactagagatttaccattcttgattcctactttgtatccttaagggagctatatcagatcccacctatattgattgaatagtattatctctcagtatcaatacaactaaaagggaagtaggtcattacccgctaactaagagggtcgaacctttataaaattctttgtgttgtttactttcaagttcttattgtgtaacacgtggcaaacattagattcatatgactccactgtcggttggccacttttcaagatcaacacacacatatgtatatataaaccctatcaatcagattgtcgggttagttcaggttgattgggtgagttgatattattttcaactcgtccaatacaaaaattaagcaggttacattttcgtcgagtttttcagtttacattttttgtcgagatatctcggtttagtttcgacaggttattcgggttatgcactctacaaaagtttatgtacaaccctacagacaatcataaagatttttctctgatggtggtgaacatataca

SEQ ID NO: 138435 - DNA, 522 bp, Cannabis sativa
ttccagttctagttgcaattctgagtttgagtttggattcaagttcatgtcggggttcgagtcttggtctgagtttgggttcgaatttcggtctaggttcggatagagctctgggtgtgggttcgggtccaggtccgggtctgggttcgagtcccaagttccattctcgatttgagtttgggttcagttctgggtctaggtcctgggttccgatcctagtcttggtttgagttcaggtccgggtttaggtctaggtttgggtctgattctaggtctgtgtctgagttcaggtctcgagtcagggtctcatttttggtttgggtcccggttcgggtttaatcctggttcgtgtccaggttcctatcctagtttgggtttgggtaggtttcgggtctgggttcgggtctggcttcagattctcgcgtctaggtcaagtcctagttcgggttcgagtcccggattcccatttgggtctgggttctggggcctaggtcactagtctaggtcccccatctatgtccg

SEQ ID NO: 138436 - DNA, 1062 bp, Cannabis sativa
  modified_base (1017)..(1018): a, c, t, g, unknown or other
aacgagctaacacaaatgcagagtccatggcctttcgctatatggggtatagacttgatcggtcagttgcctaagggcaaaggaggagtgcaatatgaagtagtagcggtcgactgtttcacaaagtagacagaagccgagccactagcaactataacatccaagaaggtgcttgactttgttgtcaagaacattatatgtaggtttgtattaccccataaattagtatctgacaacggtaccaatttgacagtgtcatgttcacaaatttctgcattaaacatggcatagtaaagagcttctcggcagtctcgcacccccagttgaccgggcaagtagaggtggtgaataagaccttgaaggacaccttgaagaaaagactcgaagaggcaaaaggaaactggccagaacatttacgcgaagttttgtggtcgtatagggcgacagaaagaacagggactggtgatacccccttctcccttgcttatgggtatgatgcgatgataccgattgagctagacccacccttccaccgaagaacgacatacaaccaagtcagtaatcaccaactaatgggtgaatcgttggacctgttggagagttgtagggaggcctcaaaaatacggttagcagcataccaacaaaaagtagccagatactttaattccaaagttaaggaaagacccaacagcaggagtattggggccaaattgggaaggttcgtatgaaattacggaagttgtacccctgacatgtataggctcggtcggtatgactctagcatgaaccttataccagtaccccgatattggaacgaccaacacctccgcaaatattatcaataacagtttctcttcagcgacgattcatgctaagggtatgcccgtaagcaacttagaatctttattagtgtttagtcttttcttttagatttgctttagttttaatcatatactgctacgtaatgatgtaataaggcattgtcgccaatttcatttatcaataaaattgcaagtnnttttcatataatgacgcagcttgtatgattgttattgaatcaaa

SEQ ID NO: 138437 - DNA, 503 bp, Cannabis sativa
aagagtctaaaatacttctttacccaaaaggacttgaatatgagacagaggcgttggctagagttggtgaaggattatgactgtgagatcctttatcaccctggtatggacaacgtagttgctgatgccttaagtagaaaagattagagtcagttgagcactatgaagcaaatctcccaatagctagcaaatgagatgacctaagccaagatttagttggttgtagggcagttggctaatattactctgcaatccactcttctagagcgaatcaaggaagtacaaatgcaagattcggaattggtgaaaacccaagctagggttttggctgggaaggctagtaatttctcagcggatgaaacgggaacgttaagattcgggaatcgtgtttatgtgcccatagatgagagtatcaagaaagagattacgaatgagtcccatacgactctttattcagttcatccagggtcaacgaagacgtatcaagacctaaaagccatgtt

SEQ ID NO: 138438 - DNA, 1058 bp, Cannabis sativa
  modified_base (948)..(966): a, c, t, g, unknown or other
tattgaatattaattattgaacaaaaggagttacagcttacaagtacataactaggtaaataatagaatacttaactgtgtaactaacttaactgaaatatattccccttttctcaaagcagagaaagctctgttctttctttaactcaaggctgccgaaggaaacttggttacccaaactcataaacttctttccaataataaaattaggctaattaggatttttacccaccaaactattgtttgatttaaggacttttgtctaattttaataagaaaaatctatcatagatgaaagttcacggacataatttgaaaaatgtaaaaattcgaagggcatgatttagtaaatatcaaagtcataatttggtagataacgaattttgttaattattttattgtttataaattataagttagaaaaatgatataaaatatcattataattatcaaaaatttataaatggtattttaaatatttaaataacttagaaattttttgtaaaaatttaaaaaggcggagatattttgacatataatttggaaattttttatttgtttattattttattcttaaaataataattgtctaaccaaatctattttaaaattagttaattttattattttaattttattaaattataagattagaaaattatattgaaaatatctatttgttattttcaaatcatttatcttattagatatttaatttaattagataaaataatccaaataaacctagatattttgaaattagtttaaatttaatttttttggaaagacatttaaggtttgttttaacaaccctaaatttttaaaatctagttggttagttaaatgataatttaattatatatttaataaatatcttattccacaaattgttacatggatattgtttgctgtatttaaattgcttattcaatttttttttaacaaacnnnnnnnnnnnnnnnnnnnaattgctatgattaacttgttggcagatccaatgatctgatttacatcatactccaattgtcaatagttcatataaataatttgtaacaggt

SEQ ID NO: 138439 - DNA, 2104 bp, Cannabis sativa
  modified_base (27)..(39): a, c, t, g, unknown or other
  modified_base (485)..(499): a, c, t, g, unknown or other
  modified_base (1885)..(1907): a, c, t, g, unknown or other
tattgataactaatcagattgttaagnnnnnnnnnnnnnggcataaaacccaacaaaaagatcatctccccaccagaaactgcggttgtcacattcaaagttaaagtgacaaaacttgcattatcaaccttggaaagacatatgacgagctctagctcgctgtcaggattaactctagtctattcctagcaagacattccaatacgatatggtttacaacatatttaatacacgttcattttgacccaataaaagggggatattcacagctgtgtgaaatttaaataaaaactgcatttacttaacgtgaaatgtaatcagatcccatgatttcaggggataatcgttgtaaagattatagtcaactttgtaaattaactgcctattatgtgattataaatagtggcaagttggataaatagtgggacgaaaattcataagaaagagaggccctgaaaaaactatcagaaatctaataagattgnnnnnnnnnnnnnnnagaattttaactgcaaaaccatgttaaaaaaaaccccttgtgtctgtacctcttactttactgctttcatttagtccgtgtgagattatcactgttaggctcaaatttggttaacgaaatctacgttaatattttcaaaatggaatatgacaaaaataccctcagtaatcatttaaaaagcacatttcattaaaaagggactttttaaggggcaattattatacccgaaattcgactagtacttcagaaggtgacacgtgttagtctcagagaatatgaaccagcaaatataatggcaattatattaaatggaataactcattaaatgcagagtcaatagggtatatttataactcgcagactgcacagtctttagcgagacaaagatgtacgaattattgattcacgtattaacgagaaacctttttgcgtcagaggacatagttgcaaggatgacatcgataatacatagcgaggcatctacctcgcaatatgcagggaggtgttgacaaggaaaatcggttgttagaacacttagcatataatatacattatactaactaagtgtaatagcttgaaggacatagataacgcatagcgagacacctgtctcgctatgtacaggaaggcatactcttggtaggctacagctccctgccagggttattattgctattgagaaccccaaggacatgattgtctagtctacaggccttataatcaaagagcagttcttaaatttgctcagtacactggtgctcatgccaatgctgggagacttatggataaatcaagttgttcatgtaccaagcgagacacctcagcgagatacattttgcaacatgtcgtaatccacgtcagcgttgaccctttaaaaacaatttaaatcacaactgtgtgatttataaataataactgcatttatttacgtggagcataattaaagcccacaattttgggaaaatatcgttgtgggattcaaatttgaatgtacttaagtgccaacctatgttattataaataggggcacattatacaaaaaagggaacaaaaaaatccttgagagaaaaaagaatacactgattgtcaagaaccctagttctgtatttgaaaaatctgaataagattgactcgtggactatgtagagttaactgcaaaatcacgtaaaaaaaccttgtattatatttgtttatgctatttttctttaatctttgataatttctgtgcaacatctattacgaaaataggctcatattcgttaacaaaaatttgcgttaacagttctggacttaatagaatttatatattaaacgtaatcatgaaataaatcatgtgaacccatgtcatataaaagtgatttttgatcttatattaattagtaaatnnnnnnnnnnnnnnnnnnnnnnnatttagggcacaaaacccaaaagtgacacgcagagagcatttcaaagcctcgacgggtggttttcctttagtagtctgtctagagagttttacgtgaacctgattacatttaaacatttagcatgtaacaccccaactaacataggcgtattacgtgctttttaaacatgctgtgcagctcgttgccaatcaacgag

SEQ ID NO: 138440 - DNA, 1119 bp, Cannabis sativa
  modified_base (789)..(789): a, c, t, g, unknown or other
aaatactaaacaggtccccgtcggagcggggagtgtgattctcgtccccgtctcgtttaacatttggagacaaaaattaatcctcgtccccgccccgttccccatttagacggggatccccgccctattagaggcaggttcccgcggggaaatgtgcatccgtagatgcaacatgatagtataatattagtctaatgaaatatttactgcaaaaatgtacattataatgagaattaaatttaagataattatctcatatactagttaatttttttttaaatttacgatctagattgctccgttggtttctggtttctatatcagttgttttgttatatgtatatgaattttagttgcgatttaggttactccgttggttgttatgtggattttaattgcaatttaaggtgttctgttagttgttatgtgagttgctgtgaatttctgtaaaaatacaaagaaaatatatcttaaagtgtaaaaataaaaaaaaatacattgtcaatttctattatacaatgagatttaaaatttaaataaactatttataaaaggaatattggcggctaaacatctgaacatgaaattttttaacacttaataaaaaaaattatttttttgagggcaaaactacctaaactcccattccatttttctcagcgcccctccgtccaaaaatcacagttaagtgtcacagtagactgccaacgtatacacacttatacacgtgacaaatttttagtggcctacgtaatattaatttttaaaaataattataaatatttaaanaattaaaaattaaaaatattttctttttgggatattggcagctaaaccacccaaactttaatttttttaacacttaaccacaaaaatcaaaataattttaatttttttttttacttttttttcttcttctttcttctttttttctcaaactttctgaaaccctaatctctcaaacctccctcccaagccctctcgttttctctctcgtctcaccacccaagacctcaccggagccatttgccctctctttctctctctcaatcttctccttcccagtccctctctttctctttctcatctcatctcatctcttctctctctctctctctc

SEQ ID NO: 138441 - DNA, 549 bp, Cannabis sativa
  modified_base (282)..(292): a, c, t, g, unknown or other
  modified_base (520)..(523): a, c, t, g, unknown or other
tattaattgaataggcccaaacactaaatgggcctatataaaatctatcatggtgtgacattttatttagcaatctagtccattttaataataaaaaaaatgggctacctatatgcatctaggcccaaagtaaacatataggctcacacaggcacatagatttggatgggtcctatcatgttactaggccatacacagatgaaagaagaatgtaaaattcacctgttacaaattattggtttgacctattgacaatcgaaccatgggttaaaatcagatcannnnnnnnnnnaacaagttaaccatggcaatttatatgaagcaataataggttttataaaacttgttttacaatcaaacaatattaaacacatacacctgcaactagttggatagttggatatagggtttatttaattttaaattaatttaatttaatttgaaaaaaaatcgaaaaataaataaataaaaaaatatattttttttcggaatataaataatattaaaaaaaaaattaaannnnaacctataattttgaaaaattaggtt

SEQ ID NO: 138442 - DNA, 772 bp, Cannabis sativa
tatttaattcaaatggtgtctttaattttcaaacaaaatatttttttaaaaaaacaaacgaaaaatataacacaatatatataattttatgaataattcaatgtttatgtcaaatactaaaaaatcaatcaatcatcaatatctatatattaatataaaagaaagcttttctataattttttcttcatatttttttaaatttttttgagagtactatattaatgtacgaagaaaatatgattattcaactaaatttactttttgtaataatcccacattgtttagaaagtatagtggcacattacatatacactataaataaattttttctcatagcattttaatttgtcccaaaatatgtatttttttccttaactaattgattaaattagtcttattcaataattaatttttttttttaatttgtcccaaaatatgtatttttttccttgactaattgattaaattagtttattcatttattgattaaattatcaattctataatctattattacaataatatacattttatattttatataaaaataaaatatatttttcatcttatttttttttttaattttctgagaatgttatattatttttcacatgatttttatatattaatataaaggaaagcacagaagaatgtagatgactttttataatttttttcttcataatttactattttttttgatagtaccgtgttaatgtactaagaaaacatgattattcaatttattttttgtaataatctcacattattt

SEQ ID NO: 138443 - DNA, 612 bp, Cannabis sativa
gaagatgcatcttaagttcaaatatatactttgggacaaattaaaatagcatgagaaaaaattatttatagtgtatatgtaatgtcccactatactttctaaaataatgtgagattattataaaaaagtaaattgaataatcatgttttcttagtacattaataccgtactattaaaaaaatagtaaattatgaagaaaaaaattatagaaagtcacctacactcttgtgtgctttcctttatattaatatatagaaatcatgtgaaaaataatataaaattctcagaaaattaaaaaaaataagatgaaaaatatattttatttttatataaaatataaaatgtatattattgtaataatagattatagaaaagataatttagtcaataaatgaataaactaatttaatcaattagtcaaggaaaaaaatacatattttgggacaaattaaaaaaaaataaatattgaataagactaatttaatcaattagttaaggaaaaaaatacgtattttggaacaaattaaaatgctatgagaaaaaatttatttatagtgtatatgtaatgtgccactatactttctaaacaatgtgggattattacaaaaagta

SEQ ID NO: 138444 - DNA, 729 bp, Cannabis sativa
cttgagcaataaatttcagcaatacctcttttcctgcacgagacaaaatacgcccttaccaaccttgaattctctttcggagtttatccttaagaaagccaaggatagcattcttattcctctcaaccaagcaaggaaggcccagataatagccattttcatctgcctcataaatttccagcatagcacagatagaatcttgcacctcactaccaatattattgctataaaacacaaaagacttagtgaaattaattctttgtcccgaagccgtctcataagtatgcaacaactccttcacattgtacactttctcctcagtggccttacaataaatataactatcatcagcaaatagcatatgagaaattatcggcgcacctcgagcaattttacatctcgtgagtaaaccactttgttcataactacgcaacaaactagagaaaccttcagcacaaaaaataaacagatacgatgataaaggatcaccttgacgtattcctctttgagcaacaatgttccccaactccttccctccgtgtgaaaatgtataggaaacaaaagaaacacattgcataactaagttaatccaacgaccatcaaaacccatccttaccatcatagcacaaaggtaaccccactcaagcttatcatatgctttgctaacatcaagtttaagtgccatataaccatccctccctctttgttttctctttaaatgatgcataa

SEQ ID NO: 138445 - DNA, 541 bp, Cannabis sativa
ggatgattgatcacaatatgcgacagtactaaaatgatcggctacgagatcaccataaccattgatgcaacaacttggttatatagaacaatgaaatgaacacagaagtatggaggactgatcagaatatgcaaaagtatgcactgtaggggatttcattgtccgaatggacataaaaggttcactaagaattcgttggccctactatctagtggaaaaaacctatccttaacacccactggttttggatatcaaaatcgtttaggtgttgatagttgttgagcgcaacataaggtgttcaagctcaccttaacaaagcatggatgatcgatcccaatatgggaaagtgctagattgatcggctacgagatcaccataaccattgacgcaacaacttggttatatggaacaatggaaaggacacagaagtatggaggatggatcagaatatgcaaaagtatgcactgtaggggctttcattgtccgaatggacatggaaggttctctaagaattcgtcggccctactagctagtggaagaa

SEQ ID NO: 138446 - DNA, 584 bp, Cannabis sativa
  modified_base (34)..(62): a, c, t, g, unknown or other
tgtttaattttattattttagagaattcatattnnnnnnnnnnnnnnnnnnnnnnnnnnnnnaatctagatccttgtaaaataagttccaacaaaactgtcaaagcttgaccgatatctggacgatattgactcaactctacgctaccaaatacaaagcaagaattctccaaattcgtggtcttctgcaatccacgaagagaggatcaatttcgatcaacgattacttcttaaagatgaaacattatgcagatgctttagcagtagcaatagatacatcttggcaagataccatgaaaactgatgtttctgaacatgataatttgattttcctttcttttaatagggagaataaagaaacctatcaaaaagtaatggaacaatgtataattattttatcttaagccttaaaatttatagggttagcttgtttggctttcttgctcattatattatcgtgtttcttttgtaaattatatatttggatatcttctaagtataagggttataatcaatttgaattagaatctaattaaccattgaacgtaggattggtctagaattgtattagggaaatttgatttt

SEQ ID NO: 138447 - DNA, 1957 bp, Cannabis sativa
  modified_base (53)..(59): a, c, t, g, unknown or other
  modified_base (268)..(271): a, c, t, g, unknown or other
caccgaatcaggagaaagagtattaagccatgctctagcccgatccctcaagnnnnnnnggaacaacttcaaccttaaagccttttaacttactccttgtagcttgaaatagtcattcacctctaaaaatgagcgaatatggaggtgaagatctttcgttggcaacccactaaattgaccaaccgtttggagcatttgaaacatgacgggcttgagcttaaattgaggtgtttggatttcgggtctcacaatacccgaattaagctcnnnnaacataggggctgcatactctcttattgctcaggctctatcatcggccaaaataataggattgacaccattatgagcacccccaactttaaacccatcggccaaattacaacattttttagtcttttgttcctttctcctttgtctaaaaatgcgttcaattttggggtcaataggagcaagttcaaggtcttcttcttcttcgttcgtgcaataatttacacctgaaaaagaaaaattcagcgcaccaaaataggattaaaacctcaaactagaaaataaattgtaaaattgttgatactacacaatttttagtttcaatccctagtaacggtgccaaaaacttgttgtgaaaattatgtactcaagtatacgtagtcacacaagtaataaagtgataagtaagatcgtctccacaggaattgcaaacaaaatatgatgtaaaaccaactaattacaacttaaagtaagagggaaaaatatgaaaatggttgagcaatgattcaaaattaaaatgacagtgattaaacttgctaaaattaatgctactaatactagaaaattgcttgcaagaagtgtgatatggtaaaaaaaaaatgcttgaatagctattcccctctagttaggtttttctcctagttgttacagcatcgattcagcgttactccagcattcttgcacagagataatagaaattcttctaggcttatgagaattttccaaaactcacaatttaagttctaccatctatattcacatattcttatatcaaaccagatttcagaatactaattaagcatcaattcttaagttatgcaaggtaaatgaaatattcctattgcacttacaaagaaagacctacatctaggatttctcttgctccattcaagtttaactactagatctagcccttaaggaacaagatctagcttagaaaattgttattcatggccaagaaataacaatcaaataaaatgaaaagctcacttgaatgaacagaggcaaaaatgctaaaataagcttaaaaattaatcatacccaacatagaagttcataaccattcaaacctcaaaaatcaagctcatatgcaagtaggaaattaaaatccaaagtaaaaaatattcctccatggctgctgccctttgttcataattaacatagtttttaatatccaagtacaagaaacaagaaaagagaagagaagaaagaaaaataataaatgagagtaaaagaaaatcaaacacaaagcttggttctcctctctttcctccctctgctgtatttttcttctgcaattacttctctttcaaaaatggcagctgctcacgttagagagaagatggtgtgtacttgactttcttttctttttgttgttcggtccatagggtacaaaaatgacaccctaaaaacagaatcccaaatcttttgcactttggccaactaggtttagtcctcctcctagacatcatccagctggtctaatttttagtaacaaacatgctcctgttgatgtggacagctaaatttcgtgttttcacgtcactaccagaatgttgaattcgtttcagcattgcttcagtaatgcttcagcaatttgtcccaatttcagcttttgttcccacttcatccttgcttccttttctttttcctaacaatttaattcttctttttcaacaacaaacaagca

SEQ ID NO: 138448 - DNA, 2600 bp, Cannabis sativa
tattgtcgctttctctttcacgcaccgaggttgaggcctcatcatgagcgtatgcacttacatggtttctcgtcaatacataaattagcagtttgaatatttctgtctcgcaaaaggctattcagccagccgagttataaacctaccctgcgaatcatatttccaacgagttattacatgcttagcgtacttgtcgtttgtgtgtttgagttcgtcccagctcgacacgtgtcctcctctgatgtgcttaccgaacttcgggtataacaattgccccttaaaaagttctttttaataaaaaagagttttttaatgattacaaagggtatttttgtcatgctcctttatttttgaaacgacacattccctctgattttggcagttgtgcggtttcgaggtacatctgaattaaatgaccatcttttcaacttcctcttcgaagcacatccattggatcaaaggttttttgaaatcattatcatgagtataaaataaggaaaaggaaccacctttgcaccatttcagaaagtttgagaaatacccttaaacttcttcattaaggatcaccattaaacccgtttgaagatttgcatgccatccatgtctttgacctttttcctgggaatttcctcccacttcattttttcaaggcaatccttgcttcgttcgaagatttgcagatggatttcccaggcgttgccccaagccctaacttcaaacggtaagttaatttcttcttcctcatgtttattacatagtgtggatcagttgcttgatttgtttgtattgttatcatctcatctggttttgatagttttttagggttaaaactattcatactagggttcaggcaatatgtaggttgttttaagatctccaactcattacgatctagtttgataaaattctctccagggattgggattgcttttgctggtagcgatgtcccactctggttcaggagtttatcatccagaagctttagagtttgagtttcctacagaattagccatcccatataaacacaatccctcaaaacccacctccaaattagagataaacgatgctagggctagagaacacacagtgagaacccaacaggaagatacttctagtcaccacaagcgcttcttgcaagaaatatctgaaggcagacactagttcttgcgagaagcatcctggctagaaccacccagcatgtcctttattcctgtggcaaagcctttgtttttacccaacgtcacaattgcttttgaaccaggtgacttggatttcgatattatgcctcccaaaccacgtacgtccaaaactcctcaagatcccagcatcacctttgaggctaagttaatagaatcgaaggtgcaatgtatctcaggctacacaggcgacatgctgaatacctatggaattacacttgggcaatcatgtcaggttaggtcagtacgagagtgtgaattcagctgctaccccctgcacgctttgccggtagtaaccaaggaactagttgtgagactagtactagtggtttaactagtatgggcgcttggagccttgagcatatttgtccaggggccatcctccctcttccggactactttaaggaatacataaatcacatcggggttgccccattcgagctgaatcccatctcttacatgattcttgctagtttgaaagtcttgtacaaaattatgaattagggttgtcccatgcccgtacagatttagtatctttactcaattaaagccgttccatcgaggaagaatgctagagggggatttttctatcttggcactcaggctagcgagccaaaaattatcgtagacttgccaaataaagtgtcctttaaggatgagttcttttggacgtctggtctctcccctattggcctaaccacatttcgcaaactccgtaagtgattgttctcttctttcttatttacatcattcttcctttttcaagtacttaactaatgtgttgtttattttgagagctcttataacgagacccacccctacccccgagatggttagtagccataggcccttgatgattctcccttacagtcttcgatcatgcaaattccttttgaacgaagtaaacttgcaatcaacgggccttctcgctaacaaagaatacacttgcgattacaagattcccaagtatacttcttggaaacaaataattgttccacctgaagaccaggcctaggatcgcttggcccaagcatataccttcaaagcaccgcccctcgggaatccggtgaaggagcatcccaaggtaatcaatgtgggttgtcacctgctgtacttagggctgagagtaatacagtaattaccttccaagactctcgtcttaattttaatacttggaattccattctcatggaccgcatttctcataagtttgacagttggtaccctagattccatgtctcgatcaactatcacgagtcattttatggtatagccgagaaatatggtaccgtggaagatagggtaggtcacatagatgcgagctgggatttagaaccaatcgagccttttgatatattcaaaattacaggctgtagggattttagcgaatattatggtccttct

SEQ ID NO: 138449 - DNA, 538 bp, Cannabis sativa
aaaaatacttgaagaacacccaaattatcaaaaatagagatcttccaatatttttcctaaaaaacataacaaaagaaaaaccaagcttaagtacaaacaataaagtgataaaaatattaaaacacacactaaaatagactctaaaaatgcataaaaataaaccttatatttaaatctataattatactataaattaactgttctcattaaattaatagtacaaaagatatcaagacataattagaagggtaaaatagtaattttgaccaactctacttatgaattgataattggagaatgaacaacttatttttattatatcaataaactacaagtaagaattatgtaaaaataattctatattgtcaaagagagcaattttgatatttatagtggagtaataatagaattaataaattagattattatattgatgagtttaataataatcaagtatttattggagctgtgaaatataggtccaggtccgcaggttacatcttgttgaccgaggttttcggcaaccgatttaataata

SEQ ID NO: 138450 - DNA, 1144 bp, Cannabis sativa
cataagcaatatgtctgacggcgtaacccctcttttgcagctattacgctatgattaataaggctagtgacgactactttatgagggatcacatcaatcaataagggataaagaattatatccacttaacccctaagatacccacagtataggccatgtatttcttatactgcatcgactaggaatatgtgcccctatcaaacctgcacagaaagacaagtgattcagttctagggatcaccccagaaaaatactataaataccccctaaatggactaagatgggggtcgagaattctgggttcgaaagagagcaactgagaggaatatctaccaagaacattctatgtaataaatactctcataaataagaaagactcgtggactaaggcgcattaatgccccaatcacgtaaaaatctcatgcattaaactttctacagctttcttacatatactattaaattggtcaacatagtggatcagatacttttacatgccaattaacatctaattcccacaagtgcgaatttgaattttctaatccaatctaatccgtacaagtgtggatatccgcactttgcagattggattggattagctattttatgaacacccatattactttttagtgactttttatatttttactgatccacatagattaatgctgaaatttagattctaattgtgtagttcactgtatatctttcttaactctttagtgacctagaattttattcagatcactatagaatatcagtaaaaaggtaaattgtagtagtttaatagatataatctttgtgaagacatacaacttatatacaacatatggtaaggtcacacatatttatgatataaatatttatgatcttattgatgatgatatcacaattgaagttaaaatcatagttgctttaaaaagaaaaatgtaagaaagcaatagataaataaaagcttaattcaaatcataaaaacaacaaaattttatatttatacaaatttagtaggaagtgttataagcaaataagaatattcaactaaagacgtatatgtaatgccctaaataattaggcacgctacccaaaatgattatgaaatcctaatcccctaactgggattactaattaaaaacagcgcagaatt

SEQ ID NO: 138451 - DNA, 619 bp, Cannabis sativa
  modified_base (52)..(54): a, c, t, g, unknown or other
cctataactcagggatcaatttacatggatacggcatacacacgatcccacnnncagtgtattcagcctcaatcccaatgatccttgcatttgggaaatttggtcaaagtaaagcaacgaccaggtgagccacttcgggtatacatcagcagattcatgacggaagcgaccaaagttttgcgggtaaccgaggatggaaagttatctgcgatactggggggcattgaagtcctcggtgaaatttggaaagatataaggaagaacgggacggtagactcaatgagtgatttccttgaccgagccaaaggtttcatcaagctcgaagaagccattcaacgagcagaaggtgaacaaaagtcaggcaagtcgaagattccttccactgggacatccgcccaacttcccaactattccaacaattcaagctcaagtggaaagcgttcaagcaaggacacgggaagaaaggaaaattcactgataaatccggacagactccccgagagaatcatgccaaatacattgcattcactactttgatccgaagatatagagagtgtatatatggcaactcagtcgttaatcccgtagaagaagcccgtgcccatgaagaaagatacca

SEQ ID NO: 138452 - DNA, 1131 bp, Cannabis sativa
ataaatttgacttatttatttgatgatccaacacacattttatatatccaattgtgaccctaataaatttctaacatggatgactaggattttcttgtgtgtatgccatgaattcttaaatgtaaatttggattggttcttgattatgtttgtgttatgatctgggtaagttttgaatatgagattggaattttgggccactctttgtatgttgttgttgttttggtagtttgatgagatgagcatgatgattctagctttgtgttcttgagttttcaaaagcatgatttggtgtaattgaatcttatttgtttaaagtgtttgagcatgtattttagtgtttgtgatgcctagaaatactttagtaaggccttaaatataaaagagatgtgtgaacgtaacacataggtctatgtaatataaagtgacattattatatatgaaataatataatataaagtgcggtggcacagtatatatacataccgacgtactgtatgaagtgtaattattattctaattatcatactatattatgttatttcttgctagaccttggttcatgggtgctatattgtgtaggcaagggtaaggtaatgtcgggtcagccatgatatcaatggctttgaggatgacttgtacttgttccagccaagctagatcatgagagttgggtccaacagagaattgtatagaaattctatttaggtcagcctatataaaataacttgtaatattttgaaaataattttaacgtgatcccaaatatgtaaccttaaattcttttggtttaaagtaaaatgtgtatgcttattgcaagttatttatttaattaagtttattactttcaaattacttggcttatagaccccgattaacaaaattagtagattgtactcatgacatgtgacatttctctaagtaggatgttacaacgtgagtctttattattagttggaactggcggacgtagatttgagcattggtctgcaccaaatgttaacatgatcaaagtaagtgttgatagaacaattttcgctgacttagagagattcaacatgggttgtttggctagggggcatgatgggagggtgaagagagattcaacatgggttgtttggctagggggca

SEQ ID NO: 138453 - DNA, 585 bp, Cannabis sativa
atctagatcgtggtaaaataattccaacatatatatataaaaggtaaaagaaaaaaaatacaatacatgtaatataatacatacatataacaagagaagaatatatatatataatacacttactcacaactttgagtgtagattagtggggatcaacatgacttgaacaaggtattacacttttgtccaaaaacttatttttcctatctctaagcactaaggaaattctcatgaaaatagctttaggaattatcaagcttttaagttttctagcaatgtactttcttgattgaaaatttggtctacttcaaatgagtacattagactcatttatatattattaaggtgatcacacttagaattcaaacacactacctcatttctctctcataaatgaatattaatctattttgtaacaactatattaccatagttttgaattccttaagattctgtttggaaacaactgtgtaattactatgccaaacatgaggtagtaattacactgtatagtaattacattgtattttaaaatacaaggtgtgcttggatgtcaagtggtaattacatgtgaattcctaatat

SEQ ID NO: 138454 - DNA, 1129 bp, Cannabis sativa
ttcagattgtttgatttttttttttcttgttagattttattacactaaaaaattaaaattatattccaagatacattttttttaaaaaaaaatagattgttcagatattttaattttttcattaaaaattgttttctaattttgatatttgttgttaaattataaatttgattttaaaaattcgtacatttgtaatctttaattatcaaaatataagatatcaatttttttaagagaaaacaatcagtttgcaaaaaaaaaaaaattatcaacacttcacacattattttgctttcaatttcataagttcactattattgtgtttaatatattttactaatattttttattttaatttttattctttttttttcaaattactattaagtatttataattatccacctacattaaacattattattttaaaattatatatgatatttaatcgaaaaaaaaaaactaatccaatggctcaagttaattcttgaaaactacaccataattaatatattttttttatttataattaatattgaatattattaattgtaggttcaactaacaaactcgaaacctaactccaaacataattttttttttatctttttattttatttctatttaaaatttaattttaattatatattttttatttcaaatttacataaaaaaaaatatttaattaaatttatttttaaaacaataattatacttataaaaaactataacatattcaacttataataattttataataatcactcttcaaataattaaaatgtcatgagttcaatactttagaagtaatattcccttttcttctctttacttatatttaatttaagattttaattaatttaatagttttaaaattctatcatattatattaattaattttatttttcaaaatacataaacttagataaaagcaatattaagtactatttagaaaaaaaaacatatataattggaaaaagtaaatgcatattacattagaaaatacatgtatatatttatagtagaagaaagttacgtacaagacacgtatacttagttttatgtcaggtgttctataatttaattgagaaagattcaataaataataatataatttaaaatagttta

SEQ ID NO: 138455 - DNA, 1362 bp, Cannabis sativa
tctgtatttccgaatagggacacgtgcaattctaaaagtagtacaactcagttacttcaagcccaacaacaaacccaatcaggataatttactaggtctattaacaaattcatgtcttttggatgctggatagatgacccatctaggcgagataactctccagcatagcgtgtattcggaagaccaagtgttcagagaagtagttcgcaaatccagacatccagctcatggtcatactcattacctgttgctgtgataacaagacttaattcacaagatcttgtttgaggacatatcttctcataatgtaaagatagtgattgaaaatcaagcattaatgtgtttttattatcacaaaagagaacacggttttgacaactatcaacgtgatgtggcatccacatcaacatactgttgattttatggtactaaatcaggtacgcagttgaagagttttgtattatctgattatcactgtatcatatcccaatggatctccaaatgtgtgtacattaaatcaatataataaattacaagtttagaatatacctcttgaagtctatcagggtatcctcgaaatttctcataagttgtatccttcaattcagttgatgaggaaattacaagttggactcacactagtgtcttccaaatcgatccaccacacacaaggaatagtaagggctattaggacaaagtgtataactttgttcttgttgagttttcaacacatgagcaagaacaattgagagaaaactcaatttcctttttctctctataatttcaaaaattatagttcagaaaagagtgttttgatttttcaaattaggctcttatttatagtaattaaatcccttataattaaattattatttaattgtttaaataaataaatatctataatcgaattcggatactgatatttatgagggaatctctcagagagaatgtctcaacaaccttaaaatatctataacgactttaaaattagatatctacctaaatgaattaattaaataattaattagctcaacagacaaactccatagggatatgacaatgttataggcgcctaccatgtctatttaggacaaggtttgtgtcttttatcctgacaactttttcttgacaaatcttgtctcgataaattttatcttaacaatttttgtcttttcctatttaattaatttgaaaaattatatatttattaaaagataaataattactattttgtcaattcaaaatagattttttcgaacatctttatgcaactctttatccccaccattgacagagtttcaaggtggtaatcgcggaccatggacctataattctaagctccaattgttggaatttatttta

SEQ ID NO: 138456 - DNA, 1141 bp, Cannabis sativa
  modified_base (1071)..(1077): a, c, t, g, unknown or other
agaaaagtcagaactcaagaagtttgaaattttctcgagttagggcaaaaaaaattcatgaagcttagaataagcaagatggaagaccggaacaatgcaattcagaaagaaagcattatgaactgtaaatcgcatgaaatcgtggcaaagaagaatcacagagtttctaaacctagggtttcctacgaatgttctacagcaaagccaaaggtgcatctgaaatgtaaacatgcaaaaataagcataaagggaatcgaaaacttactcaagagtcagatattttggttcaagcaacgtgaatccaacgagtagctccgatgaaggcacttcagcagacttgaagcaaaaaacctctcttttcgctctgagctcatgaagggtagtgaaaatgagtttatgtggcaatgctctttggtatttataggtaagtcaagaaaaaggggtactcattttaaagaaacctcaaacgcctcggttcccccctaaaagcgaatatgggaaatcaaaaataatcaagtgcagccgtcaaccgtggtgagagaaaaccatatttcgaaatgttaattgtaagagcattaattagccgaaaactaaagggacgcccagtcagcctcacgtcgagactcggacagacgggcccaacacgtgtccccatccaaaggccatagcatctcggataaagtctacatgcaacttcggaagtcccgtatagacttagggggaaatggtatcccaatttttgcactttgacgtggcatcacacgatggtgacacgcggaatcaaccttgagtatctgctcggagagtatagcccgagcaggatacctcgctggcatatttgaagcaaaccgatcagcgattcgcacagaggaatcaacacttagcgaattcagctttcgcattatgagtcatcaatgaaatcccaataacttggggatgggattacatggatatggcatacacacgatcccacgatcagtgtatactgcgtcaattccatgatctttgtactcagcattaatcccacaatcttttctctttatatccattgtaacgagaagggaaacactnnnnnnncaagtttacagccctataaatagtgatacatgttcactgggcaaagggtcgcaaacagtttagt

SEQ ID NO: 138457 - DNA, 627 bp, Cannabis sativa
gtcttttgatcaaaataatttttttctaaaagttgggttggagcagcttcagcttttagctgtagcttctctaaaaattcttcaaaaaactgttttttttttactatttaccgaacacatttttattacagtttttttaaaaagcaacttttaatttttttaaaaactgtgtcaaatgggcccttaatataaaatatatgaaatattcattttttgaggaaatagtcactaaaaaaatttaaattcaactttattacaatttaaaataaataaatttattattttttggaacaatataattaagttgactttagaaagttttcttattattaattaattatcataataagaatggaattgtgctaggttaattacataattgtacatgaattattgagaaggatgttagagcactctcttatcttttttactccacctctaaaatacattattaaaattttaatttctctattttatatcaaacttttacattataagtacaacatacattaatttttttaaaatacattattaaaacttcacgtttttcaaattttaatatatttattcctttaaaatatataatattaatatatacatatatctatatataaatataaaggaatg

SEQ ID NO: 138458 - DNA, 646 bp, Cannabis sativa
  modified_base (573)..(598): a, c, t, g, unknown or other
aaatgcgaggtgactgttcaaataatgtcatgttccccccggaggtcccttggcgttcctctggtctccgggagtacgtggagcttttacctttcctccgggagtgtatattcttggtgagaatcctgaagctaagagacttagtcgattgatctaagagttgcgcctcttagatccacgtgttgtcgtcatactggtccacgtattttgggcgaaaataggggcaacatttacccccaagccttgtttggtgtgaagcaaacgaggcttgcttaggtgcctccggctgtctcattgatttcctagcacttgcttcaagcgcgtgggctgaatttatgacagttatcattaaaatttattgctttttgcaggcaacattcgtttcccgtccattgatgatgcggcacatttaatgggtgtcaaacaaatactcaagcgtttctacccgcccttgaagagcattcatcccaaccgttagatctgcagaatacaaatcgattcgattcccaccgttcgatgacgccttatcacagctactttgcacccgttctgtgttgggttttgtgccctaannnnnnnnnnnnnnnnnnnnnnnnnntttactagttaataaagatcagatttaacattttatgttgcatggttc

SEQ ID NO: 138459 - DNA, 3329 bp, Cannabis sativa
  modified_base (74)..(74): a, c, t, g, unknown or other
ctatcttcctctacacttgaaaaggtgtttcgctttttgttcaatattcccaaaaggctatcaatttcaaaganaagagttggtcttattatggatggcagaaaatcttgtcacgcgctccaaggagaatagaagaatggaagaagttggcgatgaatattttgatgatttagtgtctatgtcatttttcgtaaaatccaaggatctgagaggtacatcttgttttgtgatgcatgatcttcttgtggaattggctaaaattgtttctggaaagtatagttctttattagagcacaatgatgacattattaagttggagaagaagacacgtcaccttggatgtgtcatggaaatttatattaatagcaagatagctacacgtttgcgaacctttttaaaattgttaggttcaagttcatctgaagtcaatttttctatggaagtagtgcagaatctactatcgaagttgaaatgtttgagagttctatctttttgtggtcttaatatgactgagttccctgactcaattggtgacctaaaacatcttcgttatttagatctttccaagactaagattgtgatgctgcccgaatttgtaactatgttatacaatttgcagacattgaaattagaagactgtgatcatcttcaaactctgcctaaagatatgtatcgtcttgttaatttgagacatcttattattagtggagatagccttgttgagatgccatgtcaaataagtaaattgacgaatctccaaattttgacaacttttgttatggggaagtatagtggcgctaaaatagaagaattggcaaaacttcaaagtctacatggagagctttccattaagaagttagaaaatgtggtcaatattacaaaagcaccagatcaagttattgtcctggagcagaagcaacttgagaaattgaggttggagtggagtgttaatgatgttgttgatcctagacatggagagggtgtgcttgaaatgctttcacctaacacaatgttgaagaagcttaaaattcttaattacccaggcacaaaatttccgaattgggttcggaatgattcgtttagcaacattgctaaagtatgttttgatgggtgtaagcattgctcctatttgccaccctttgggcaacttcctttgctaaaacatctttccatctcacgcttcgattcgatagtgacggtgggcgctgagttttacgggaattgttctgggagaaagccattttcatcattggaaacattaaggttcaggtacatgtcatcatgggaacaatggaattcaatgcaaactgaagaggcaacaacatatgggaagctcaaaacacttgagattgattattgtgataagcttgtcggagatttgccttgcttcctcccttcattgataagtattaaaataacaggtatcgatcatcgtccattattaagtctcccgagattaccacgtgtcacagaaatggaaattttgaatttggagaattcagagttgttgtatgaggcaataaagccaaggaatccttgttccactctcactccactctaccattaccctcctcttcaagagcttcatttggagtcttgtggatcatcgtttagatccctccatatggatttatttcccaatctcaaaactctgtatatttgctccagccattactttgaagctatcacagtgtcagatgggaaatctctggaggaactaacatttttacttatcagtaagtgtgatagttttgtatctttcccaaatggtggactaattgctcccaagctgatttggttggagattaatagatgccctaaattgaagtggttgccagagaagatgacttccctctcatctctagagtttttggtaatcttgtattgtccgttgatagatcttttccctgaaggtgaaggtggtctgcctgttagtttgtctagacttcagatatcgtatgatgaacttttgaggatgaaatggaattggcaaacattaccccatcttacctttcttcgtattaggggagatggaatagaagaagatgtggaatcattcccgaaggaagggctactgcctaccactattacccatcttagtatctatcatttttcacaacttagagggctggacaaaaatgggcttacacaactcacctccttgcaatcacttaaagtctggaactgctttgagttggagactttgtcagaagaagggtttccaacctccctcacctctttgaagatctccaattgtcctctggtgaagaaaaagtactctcgtgggaatgaggagtactggaacaagattagtcacatacaaaatgttgtatttgatgatgatcttgcatttaggacatataatctcaggtttgtttgattaacttattcttaattccattttacttatttttatttatgtatgtataatattataggacctgctctgctcttagtccgtacagttgttgtttttgtttagagtctgccttgccttgtttcttttcaaggaatctctgtttttattaaaatagagattaaatgtttgtaaatatatttgtgaacaagtgttaataattcattggtgaatttgttaataattagaagaatcccctcttttattatggtctattcaatttatgtcttcttaatatccaatgcaggaaggaaggaaggaggtagattccatggcatgacacaaccagtcgttggtgttagatcaatagtattcttggttggtttacacttgttttgtttggtttgtgtttttagtattgtctggttttctctttgaatgtgtaactaattctgttacttagcctatgttgctgtagttttcagttgtaataacgattcttattctttaattttctgttattttcaactgtattttctactgcttctttgggttttttccctataaataaaggctcttatcaaagactctgtagcttttacaagtcttagtttttcactctcatagattgattactggtaggactttgtatagatgagctcattcactcttaatatgttgatgtttgagatgttttttttttatcgatgtgtaatcacggttttcctcaaccataagtgagggctgtgaataaatttgggaggaggtcacttgtggacatgtgaccctcatctcttcctattgcctgcaacaaaagctagcacaagtttgattgatgggattatatttttgttttaatctcttggaggccgtttggtacgcaggattggactggattggactggactggacaagattggattatgctgaaagtaatcctgtgtttggtttaagaataggctggactatttta

SEQ ID NO: 138460 - DNA, 559 bp, Cannabis sativa
  modified_base (285)..(290): a, c, t, g, unknown or other
ttaataagagagttttttttttttttttttataaagtcaactttaatttgttaaaagaaatattaaaaaatttaatagcacgtttgacaactcattttaatcccatacattttcactattgaaccaatcaaaactgagagcaaaagtgatgttatcacttaagaaaaatcttatatatttatttatattagttttcttttaaaaaaaatttcatccaatttatatttttaaaaaatataactattaaattgcttaaaaaaaactattaaataaaaataaattatnnnnnnaatattataacaaaaaaattaaaataaaataaattatataaaattttattaaaaaaaattataccggattaaaaaaataaaagaagtattgaaattaaaacaaaataataaaaataattaagagtgatttttaaaaattattttaagattaattttttcaaaaaaatattggggatgtacttatcattttgtggggtgcaaatagaaactccactattttttttttgttgagagatcggaagagcggttcagcaggaatgccgagaccg

SEQ ID NO: 138461 - DNA, 508 bp, Cannabis sativa
  modified_base (131)..(138): a, c, t, g, unknown or other
tttttatgtttgatttttaaggttggtttttttgggaaaattaaactaaagtggaaaattatcaagatctgaacctgaatctctttctctctttcgggtttggttgctaccgtcttactcactatgattgnnnnnnnnacttgctatgtgtgggcacgtcactcattcactatgggttcgaatatggtgaagaacaatgaagaagactgaaatcattaaggaaggaactctctcgttaactagttgtctcacatagaaaactagttttgatttggttgaaggcatcaagtggatgagtgagagtatcatgttccttttatagtatttcaactaggacttatgattgaattatatggattaaaaaaaataaaatattgggcaaaagataacttaatggccgtacatgaagatgaagaggaccaatttctaattataattttaccactttttccaactacttattcttcttttcaataataccatattttctaattcaaccttataaatg

SEQ ID NO: 138462 - DNA, 2614 bp, Cannabis sativa
  modified_base (37)..(43): a, c, t, g, unknown or other
  modified_base (368)..(369): a, c, t, g, unknown or other
  modified_base (2318)..(2345): a, c, t, g, unknown or other
gttgttgggcagactgggctggttatgtccattgccnnnnnnnttcacatactgcttgaagtggcctcaagcgatgagactttctatctcgtctttcaagtgacggcattcgtctgttgtgtgcccaatgtccgtatggtatttccaatacctggtaggatatcttttgtgcctcgcatgcctcatgggctcgggcttgctgaaggcaaccttgtgctcatgcgcgaggtaaatattttcccgagtttcactaagctcggtataaatagtataaactgacatgtacttatcgtgcttcttttgtttctttttatgctttgacgatttcttagaattgtcctttctctttgagccagaggcccctgagnntcaactctagttgagacagtacttgttgaaacattactggctttgcctcccgaacctgtttttaacaaattcatctctttttgagcttcctctttttggacgaacacctgagcgttgttgaactcaatgatgttcttcactggactaccctgtaagtcgtcccacagttcgcccccagtggttgatggatcagtagtgatccccgtctgaagggcagtaagctgtgtactatcatccaaatttctaacccttgcagcagccgtgctaaaacaacttaagtatgccttaagcgtctcccctggctgttgctttatattggttagcgaggatgcctcgggtcatctatcccttgcggcctggagttgttttttgaagtcgttggacagatgttcccagaaatttatggaatgatgagtaaacttgttgaactagctgcttgttattccaactaggaaggtgggaaacaaaatacaacataaattgtttgtcacattactagctcgcattattgtgttgaagttattcaaatgcgagaccggatcggtggttccatcatacgatgagacatgaggatttttaaatccctggggaaaaggagtgttcatgatatctggatggtacggctcgggctcctcgtcggatccgtatccagattgtctccctaattcccccacttgatatctcctaaacttatcctccaacttgtttatttgcaattggaaaggatcctcttgctttgggccgagttgttggcgaagatcaagtttttttgattcaagtgctctcgcaggtctggttgggagtaattgctaaaagtcctcgttctactcacaaactgtgtcctacttacggacctcattttgctcattgaccttgtcctcaaatgacttgtagatttactatttaccgtgctttctcgatcattagcacaacgagcactctctcctcctcgagttaatcgactgtgagtccttgagcgccccgaggtcacactggcttcttcacgctctgttcttcccccatgagcgtggtttttcgtatttcccccactggggtttgtacgagccctccctctttgggttcgagaagaacgctgatgattcctcaccggtgacctacgttccccgggctgtgtgttaggttcctcaccatttccatgaggaatttcctattcgttggtgtctgggtccctcccattctcatttctatgagagggttttggctgatcatttggatttttagggggaatctcattttccccaggttgttcttcttgagcattttcgtgtctcctagttcgtgagccacaaggtttgcctcgtgatcttctcactccaggttcaggttgatttggagtgttattcccctgtgtcaccctagctgcgactgcatcactctctaattcaacggtctgccgttgtgcctcctacatgcggcgtctaaggtggtagttttccatttcataagtgccctctccaataggctgagcacctccacaattgggtcattcatccctcattccaggattttggctattcccatgctgagttctcctcgaacgtgtcgttcgtgtactggaaccaatgtcaggttgggtcctcctggaacgagtggtccgagtgctggggcgaccctcaggttgagtcctcctagagtgggtggtccatttagactgtgggttggaaggccttctggagcccatgggctcttttacaggacggtgatgagtttcttcatgcggtgtattaatgttttttggattttcagccatgaaggagatggtttttatatatatataaggagggttttttttttagcttttacacaaaggctctcaatgaaaggatttttgttaaccaaatttgagcgtgaatgataaacttgcacagaaaaataaaaaaactaataaagaaaagaaaataaacacaaaggttttttacgtggttttnnnnnnnnnnnnnnnnnnnnnnnnnnnntcaatcttattagatttttgatggtttctaagggccttttttcttatgaatttttcgtccccttttcagtataacttgactctatttataattacatagttaggcagttaattacagagttgactgtaatctttacaacaattctcccctgaaatcgtggggtttgattacacatcacgtagtataaatgtggttattatttgaatatcacacaactgtgattcatcctcttttactgggtcaaaatgatcgtgtattaaacacgtttt

SEQ ID NO: 138463 - DNA, 944 bp, Cannabis sativa
aattcacataattgtacatctaatatcattgtttgcttagaattattctagattaaatatctttatgtgaactttgtccataaaatttattttagtatgatgatgtctaaatttttcatgacactatatattaacacgttaacttaattattgtaattaaaacaaatctcagtacaatttattacgatatataggaactacattatcactacaaaataatatgttctttatctacaaactaagtcaaacccgtgctacacataggtagatccacacctattgaattagagcatcgagttgttctcttaaaatatatttttttttgaacaaaaaagatatatattttaatttacatatatatatatttaaatatatatgtcaatataaattttactaaaattgtttttttttttaatattatttcaacatattttattctctatatttataaatatggaggagatttcaatatttatatcaaatatgtaaccatcatgttagatttattttaaaaattaaaataaaaataaataaatataaaacttgtaacctgatagtaatctggtactttatttccttataaaacattaattgaaattagttatatttaaaattaaattactaataattatcaattaataatttacaatttgttgttactaataaataaaaataatcttttaaaaattaatttttttgcacttaaattattgaaatatttttaataaaacttattataatttaaaattattacacccataacgttaattaataaaaaataataagaatgacatctaattaaatgaaattctacgcttaatcttattatcaatactttaagtctaaaataagtgtgtcaattcaagataggttcaagtgattgaattttttttcaaaaaaataaaaaataaaaaatctaatcacaattataaaattaaagataa

SEQ ID NO: 138464 - DNA, 557 bp, Cannabis sativa
aaaagccttcatgaatttctctaatgattttgtttgcttctgcggggagaacacactgaagtagaggcattgaatattctcttctatatagtttgccttcgatcattgtgtagcgaggtactgaatacaatagttttcacgcctcgtttttgtcatttggaagttgcccgtcgagtaaataattgataataggcgtcagccatgttggagatctatctatcatctcgacgtctttagtttcacatatacttggctcgctcagcatctctaccagaaccagatttagttcatccatgtcattctgcgatgctagctttgctaaggcatccacgttggagttttgttctctcggaatttgttcgattttaaagtaatcgaatctttccaagttctttcgaactttctctaaatacttcgccatttttaagcctttggcctggtattctctgaggacctggttctcaatcagctgcgaatcactatgacaaatgagatttttaactttcaaggcctctgctatctttaagccggcgatcaagggttcatattcagcctcg

SEQ ID NO: 138465 - DNA, 552 bp, Cannabis sativa
cggttaggggattagggtttcataataattttgggtagcgtgcctaattatttagggcgttgcaataactgtagatgagacaagattccaaagcattgctcaataaacatcagaaaatgaagttgtaacacaaaacacaaatattcagaaactggttttacaaataacgaaccagccatcatacgactgtatgcaatataatgatgaaacttcagaaataagcgaggtactagcattaccaaacatatttcaagtagttgatagggttgttgattgtatcattgagaaaacacaagaaaacaaaagaaaaagggacgaagaagaaagagaaataataacagattataaggttttcaaatttaaaaaaggacagatttacaaggacaggaaattattgaagactgcaatgggtttttttgctatgatcaacaatttcttatttaaaactaaaagatctaaaccaagagagtatgtgtggatgaacactgtaactggtttctgagagcttcaaagttcaaaagtacctcaacattcaaagtaagaaaatatgtc

SEQ ID NO: 138466 - DNA, 1497 bp, Cannabis sativa
  modified_base (26)..(29): a, c, t, g, unknown or other
ataaaatgatttctgatctttattannnngtaaatttgattatattgaaatgatttttatttagggtacaaaacccaacacctttatgtaattaatataacatacaaataataagaaataaataaagtataattaacactagatatttttacgtagttttacaattaaatctgcatactctacgagtcaatcttattaaaaatattttctgaatatcagatacaatatacaattgattatatctatttttctctctagaattctccttctctttttctatgggatctgcccctatttataggaatatatattggcagttatttatatttaaattcaaattataactgttgatgaaacgtgagaattgatcacgtttcatttaaatcgtatgttagataatactagataaccacttaactgcatgttattcttatcctcaaagatggtcaatgctgatttagaaaatagcatctcgcttaactcgtcgataattaatgctgatttggacaatcatatcttgcatatttccaagttgttatccttagctattataatgtagaatatacgctaagtgttaacaaatgattcccctcgtcaagtttcttatgaatagcgaggtggatgtctcgctatatgtaacctaaggtcgccttgggtaacttcatttattcttttgaataaataaattatttctttgggctcgtgtgctctgaggttggcatatgtctcgtcgatattggttttaatagttttctatccttatctcgcttaagagtacatagtcagcgagttataaatattttctatgaatcctttatataacgagttattctttttcttcgcattaaatgatataactttattataccaggtggttcatattccaccatatgacacgcgtcatcctctaaagtgtagccgaattttgggtataacaattgcccattaaaaagttcttttttaataaaaaaaagctttataaatgattacaatggtatttttgtcttaatcctaatttaaaaaatttcatgctttgagttttggcggttcatgatttcgagacgcatcattagcattaattacccatcttttccaattctctcttgttcccatccgttagatctttattctttttaatataacggtgatcactctgaaggtataaaacttaagaaaaaccaccatttcgatatttctgcttttcagaactctcaagcttttctgcaaaaaaccattcccgactttccaaacccttgcatgccctctttatcgttaacctattttttgcaaattttttcgaatataatcttcaacctcagaagttctcagaatacaccaagtcactcgtctcatccccagttacagagttcttctttgtgaaaaaatctatctcttaacaataagtagtttactccctttttggtattttaatactaagaataaaacacttacaaataatacttatttttctagattctacggcgttaaattgctaat

SEQ ID NO: 138467 - DNA, 788 bp, Cannabis sativa
ttttttgagtgggttgcctaatatttttcgtctctacttaagtcttaatatataatttacattaagctaaggtatctaatagggatattatctataaaagtgggtatatatatattaaagaatatgaaataaaaagtaaaaattaaaataagtaaagtaaagtgagtatacaatgcaattttcacaattttttttttttactaattcatgcctaggagtagggaaagaggaagcaaaaaagagataaaataaaaatacttataactttatatttattattttgattttttttcttaaaaaacaaataagtttatctgtactgtaggttcctaaattatatatgttttaattttttggcaaattagtccctaaactatataagtttttgcaagttggtcctcaaactttattttttgacaaattagttctcaatcttttattttcttggaaacataaagtcctcccttttaaatgatggtattttattgtttcaaaaaagatgatggtagttcattgcaaaaaaaaaaaaaaaaatgatggtattttatttatttatatatatttgaattaattttaaaaagttttatattaatatattatctaatttaataaatatatttttttaccaaatatgtcaccataactctttacaaacctttttttttagcaacaaacccaagcccaaacccagacatgtgtattgaaatttggagttgaaagtttgtgtttattttatttttaatctattgctgaaagtatgttaattgtacatttatatttttgttgga

SEQ ID NO: 138468 - DNA, 595 bp, Cannabis sativa
cataaatattaccatccttacgtaacaaaaataaaaattgagcctttaaatgaaaaacgccattaacgttcggactaagctttcaaaagttcggaactcgatttttaactcaaaatcacctcaaattcaacgagtaaacatcagaactagtcccatgactacccaagaataatcctataaggtcagaatcttcataactattctaattcacaaaactcctatacgaaacccgaaaccaattgtttttaaatttacaacgaaattaaatcataccttaagctttccccctttaagaatttgctatcccgctactatcagagcttagatcactaggtttcaggttgaaaatcaaagaaaatagatagaaaaagagaaaattttgttgaaggaagaggaagaaggtttctttcgtcgttcttctctactgttatatgttaaaacttaatatatatatatatatatgtaatataaataaaacaaaattgatagctaaaagttagaagtttaatatattaaaataataataatataatatttataatatataataataataaaataataataataatatattaataaaaaatttattatt

SEQ ID NO: 138469 - DNA, 1201 bp, Cannabis sativa
gatccagtctcgcatttgaataacatgaacatgataatgcgagcgagtaacatgacgaacaatttatgctgtattttgttccccacctcgcttgttagagcaacgagtagcaggtttaacaagtttactcgtcattcaataatttcctgagaggagctgtccagggatttcaagaagaaattttaagtcgctagggataggcgacctgaagcggcctcgctaaccaatataaaacaacagcttgatgaaacacttaaggcgtacttaagtcgttttagcacagctgcttctagggttagaaacttggatgacagcacgcaatttatagcccttcaggcggggatctccactgatccattaacaaccgggggcgagttatgggatgattgacaaggacgtccgataggaagcatcactgagttcaacgagagggctgaggtgtttgtctggaaggaagaaccccaaaaggaaatgagcttgttgaaataagctcaagaggtaaacccagtaatgtttaaacatggactgcttccacgagaattaataactcaggggcttctcgtccgaaaagaaaggatgaaattagggaaccgtcgaaggatagaaagaaaccaaagaagcatgacaaatacgtgcaagtgtatactatttataccaagctcaatgaaactcgggaaaatatttacctcgcacatgagcagaaggtagccttcggcaaacccgagcctatgaggaatttgaggagcaaaagagatcataacaaatattgtaaattccataaagttattgggcatacgaccgacaaacgacaccacttgaaagatgagatagagagtctcatcgctcgaggccattaattttaaactgtatgtgaaaagacagggccagggatacaacaagccccgtcagcctaataaccgaaacaaccaggggttacaacctattcctgtggaaggagaggacatcctggttattttgggatgaccacatattgtaggggaaagcaataacgtccagaaaagatatgtgagggagataaagaacaagcagtcgatctttgccccagaaccttccaaaaaggtgaaaaccgaggaacccccaattacagaggaagatgagaagaatgtgagataccctcacgtcgatccgctggtcataaccattcaactcgccaataagaggatcaagagagtgttaatag

SEQ ID NO: 138470 - DNA, 1495 bp, Cannabis sativa
gatatctcctacaagttaataaattattatcaagaattaaaaataaaacaaaataaaatagatattttaacaaacattaataaatatcttgatcaactaaaaaataattcatcgtaaataaaaaactatcaattacaactctttacaaaaattaagaagcatttaaaaagtaagttttaattagtaataaaacttaaaactatcaaaataggatttataaactttgatttccttgccattgctcaaacatttctctagctaaattatccctccaagctgtccaagcatttgatggttcaatatatgtgtaacaatcattatctgcataatcaccatcttcgtcactatcattgccattatcatgatttgtgtgctctaaaggatccatatgcatttctcctctaatcaagttgtgtagatgacaacaagctagaatgatgcgacactgaatttttacaggatagtatgatcgacctctaataatcgcccatcttcccttcaacaacccaaatgctctttcaactacattcctagcagatgaatgtctcatgttaaaaaattctcgagaactatttggagggtgtgtccaatcatttaaatgatagcgatgtcctctataaggtgtcaagaaacgttcaccattaggatacccagcatcacataagtaataatatcctacaatttatcaaatataattgtaagaaatcttatttaagatgagtattaataaataataactaacaaaagagaaaataatttcaccttgtggaactttaaattcgttcctgtttatagcatctcgtaaaactctaaagtcagcagctgaacccttccatccaggcaaaacataaataaatttcatatcttgtgaaactactcctaatacattagtagcaattttgttttttccggttcgatatctaggcctatctaaagctaagtcattaactttaatatatgtcccatctagcgcccctagacaattcttaaaccatttccacctttcatcagtgcaatcatcacgaattgccacaggtttttttagcaatacgccatgaagatgtaacaaagcatttaacaccatattgaaatgtctactaacagtttcaccataacgtgtgaattgacgtctcacaattctatttttaatatcgtgagctattatatgtaaaaaaattgctaccatttcttcaacatccacatttttactcctcttcaatcctctagtggttttgaggtgatgacataaaacagtaaatgttcttctatccgtatgagtactctctatgaatgctaagtcactttcataaatcattctataataatttaattgacgaatttgatgcttacataaagaagttctactcatatttctttttcatttactcggtccttataaatgatcataaaaatgaaaaatatgaacaataatttcatctcatttaagatctctatcaattgtcctaaattcgtaataagtttttttttttttttt

SEQ ID NO: 138471 - DNA, 732 bp, Cannabis sativa
  modified_base (288)..(289): a, c, t, g, unknown or other
ctttttgagaacctcttagattttataccatttgcccaacataaaccctacacatggcatgcatctagcctctccaagtattttctccagccaccactcttagaacaccatgtcatctccacaaatgccaccaaatttaatgaagtaccagctcatctttttctcaagaaatttacaaaatcagctactgacctgtttgctgcagcaaaaacttcacagaatttcagcaaaattaacaacttgtctgacttgctattttctttgccaatttatacacaaaagttattnntttctactaacagcttcaaattacactcatagacataaaacactgaaactttcacaaatcagaagacaaaataactacaatgacacgcaattacataaaaaacatgtttaaagtgatatcaaataactctttactcatgagttatcaaatacccccaaatttacgacattgttcatcctcgagtgatgagaacaaaaccacaacaactagaaaaacatatagcccaacaaaaattcaaaacaaaagaactgaactcaacaaaggtactcaacaaaaataggatgcaatttatcttgtcaatgcacacgcctaagggaaatagctcttgggaataatattttgcaaaaggtaaactgaatgaagatcttgctcaagctttaaaccagaatctttaagtttaaacgttgctgcccaaatttggtataaagtgctcctcccttttt

SEQ ID NO: 138472 - DNA, 1081 bp, Cannabis sativa
  modified_base (27)..(30): a, c, t, g, unknown or other
aaaatagattacattgaaatggagttnnnnttagggcataaaacctaacaccatgatctctggtgggcctcatattggatgaaccaccaggaacgcgttgaagcgttatgatggggccataaagcatgatgaagtgtgggaggtcactcaactcccagcacaaaggcccaagctcatggaccaaccgatgactttcacttaagaagatgcaaaactggtgtgcttccctcaccatgacccttttgttatagaaactcccatcgccaataaggtcgtggcaagaatattggtagataactggagttccgtaaatatattattcaaagaggccttcatggccatagggctcacagacagggacatgttgcccagtgattcacagctcacaggattcaatgggacgacacttatctcaatggggaaagtgaggcttcctgtcaccctatgccttgacactccacagtgcactttcaagtactgcacttttgttatggtagattgtcccaccgcctacaatgccatccttggctgaccgaccttggtcaattttggagcgatcacatccattcgacacttatgccttaagttccctacccgggaagctgtagtgggaacggtgaggggaaaccaaggagaggcgagacaatgttacaatgttgcagttgacttgtcagtgttggtggtacacaggaacgaagagcccattatgacagaacaagacgagttggatccctatgtaggatccgaaacaaccgtagaacctatggaggacgtcgaggaagtaagtgtgtgcgacctcgactccacaaaagttattcgcctaggaaaaaacctagaggcagaggaaagaagcaagatcatagaaatgtcaagggcagccacagatgtcttcgcgtggtgcctgggggatatgaccagaataagcttccatgtgatcacccatgtcttgaatgtcaacccaagcatgcctctggtacagtagaaaagacatcctcttgatccagtaaaggcagacgccttggataaagaggtggataagttgctaaccaatggcctaatccgagatgtatattacccggag

SEQ ID NO: 138473 - DNA, 683 bp, Cannabis sativa
tattgtgcttgttatttacctttgccaatgctttgtaagggtatagttgtcccccaagtgaccgagcaaacttatcactcttggtcacttgcatttcacaagtagggttttcgtctgtttggctctttgggtcgagctgacatttgtacgcatttaatgctaaatttataacttgctaaaacaattgacacaattagaatttaaatagacatctttattcatttcttggtcggaacagtcttgttaccgttgtaacttacattcataaagctattacatgatctaatatgatctttagctgaatttaaacataaaataattgcacttataaaaagaaatcgtacttttaaaggtgttcatccgacctgagtacttaattattttatccaaacctttgggtgggatccgtctagaaggccatctacttaaaagtttttgctttatgtacttaaagtggtcatccgacctggtacatttactgataattctttttcaaatattccccattccaataccttggtactagaacgagctttatatttttgtcataccgcccaagtttgtatgcccttaattttagaacttcgagcacttgatacggtccttcccagtttggtccgagcacaccagccatgttgtcttttgtgttcaggaatactcttctgaggatcatatctcccaca

SEQ ID NO: 138474 - DNA, 854 bp, Cannabis sativa
gcttgctttgccccgaaccaccagatgctggggtaacttttctcttctgatcagattcggagtcactcggggctcctgaaggaattttattgcaccctcggctcgcaaagctttctcaaccatttctgaatatgatgttgctttgttggtagtgattaccagatcatgtctaatcttcacattcaaaccggccaggtacttttctttcttactgaaatctattggcacaatacccactgtgagcttggccaatcgatcaaactgtgtagtatattcagtaattgacatccccttagtttgtactaattcagtgaactctttccgctttgcaccgtgcacagcttcattataatacttagagttgaataactctcggaactcctcccaggtcattacagtgacatcccgggtgagggacaataattcccatcgcactagggcatcttcctggaactgaaaagtggcataggtcacccgatcatttccaaccacgcccataaaatttagaattcgctcaatcaccgtgagccactgctcagccttcatcacatctggacctcctagaaacactggaggtgcttgcttacggaatctttcgtataacgggtccatacggttgccagcaacaggttgttctgctggcaccactggagctacaacgacctgagcttgttgcgaaggtacgacaggaggaccctgctgccttacctcagaatttcttcatcttgttggcggattcgatcttgcatttccgcaaacctctgctcccaatccggaggagcttgtggtagatttataggatgaccaccctgagctctgcgacggccacggccgcgaccacagggattctgggg

SEQ ID NO: 138475 - DNA, 573 bp, Cannabis sativa
ttaaatttagttatatatatttatgtataattagatttgagttgaaaattaatttaaattaattttggaccaattcaacttaagtaattttcataatatttatagaaattaatactaagaatggaaaataagttttatttattttcaaatctacctaagtatatatataattttataaatatgaaattaaaatttatctttagagttatctaaattagtaattttaattaaataatatatgaatattaaattaaatagattaaaatcgatatcaaatgaatatacaatcctttaaaataatgagctttagtttaaggatattcgatttccattactggtcatacatggtgatttttcaatgggacctcgagacgctagactttatctcccttatggatggttatccattaaacttttaacatagtaagatctcgaaagataagtattttgtaaattttcttttctattagacccatccctacagtggctgcatagaattaaatttataaatatgaaataattgtagaacctcataaaaaaagaataaccttgactctcgcctacccggacaac

SEQ ID NO: 138476 - DNA, 746 bp, Cannabis sativa
ttgattttaaaaatctaccaataaaaatagttacacaaatctaattatggtaagtttgactcattaatacatctaatataattaaattaagaatttgtatgattttatgtgaaaatattttaaaatgtatacatctataaaattatttttttttgtacattttttgtaattaattaaaataatgtatacatttatgtaaaatgcccttttatttactttaacttaaaataaataaaaaaattaaattataaatttttaccaatacattattgcactgaaaaaatcttattatgtgataactataagtaggttttgccaacgcaaaaataacttgtcaaaaatcaaatgtctatctattaaaatatatttttgtcggcatattaatgtgttgacaaaagtaatagacttttaccagcacggtaatgtgctggtaccgacgctaatttaccctttttgccagcgcaaaattacgctgacaaaagaagatttcgttttgacaacccaacttttaccagtgcacaacagtctcatttcttgtagtgttgatagaaaattaagtcatctcaatatgagcattttagacatttttatatagtgtttaggatatcactatttgaaattttaactcataatctcctatgcatgctaggggtgtgcataaatcgatccaatccaatgagaactgaccgatccaattacaactgaccgccaaacattggatatccaattgtgatcggatcggattg

SEQ ID NO: 138477 - DNA, 1101 bp, Cannabis sativa
  modified_base (164)..(169): a, c, t, g, unknown or other
atataacactcttctgtatatctctatcatttaaaattattctcattaagtaatgagttaacattattaacttatttttatacaatttttttttgaataataatatgaaaagttagctaggtgtaagagaaatagtttaagatatacatatatataaatatatnnnnnnatatatagagagagagagagtttaattagtaagtgaatatgagttattatttttaaaattatgtgatatttaaaaaaaaaaaaatcgtgtggttttttcttttaaaaaaaaaataagtgattttagagttatcattctttaaattatgtgatatttgggttttttttaaaaaaaaaattgaaagaaaaatgtgagttatcatatttaaataaaatagttaataaagaaaaaaaataatttcaaaaaataaaaaagtaattttagagatattttttaaattacgtgatatttgagttttaaaaaaaatcttcaaaaaaaaaaatgatgtacaatatatatatataattaataaattgaaaaatatttaaaaaagtggtgatagatttagagttattattttttaaaaaaaataaaaaattaagaaaaaaaaatagagatatatatacatatatttataaagctaataaaaaattaaaaaaaattaaaagaattaaggaaataataaataatattaattaaagagattatatatatacatatatagatatagataagtgtataggtttaaatatttataaatataattaaatattaaaaatactgagagaataaatgagaggagaaaaaataattttactacgattttagagcgtcatatcaccgtttcatatagatatatagacatattgataattaataataataataacaatgtaaaattttaaagtgtcatgtcaccgtctcatataaatatatataaatatattgatgattgataataataataataagaagaaaaacgtgtggtatgggtattatgtatagtgttttttttttaagaaaataattaatttataaaatatatttttataaaaaatttgttaaaataataattaaatatcataaatatattggtgattgataataataat

SEQ ID NO: 138478 - DNA, 1068 bp, Cannabis sativa
ctgcctgctcaaacccaacctgatgcctggagatggttaggtgatcctcggggcactttctcggttaaatcagcgtataagttggtgacacactcggcgttgcaagaccaatccacttgggactggaagattctatggaattcaccaatccatggaaggctaaagttcctttggtggcaactaatgcgagatgttctcccaacaaggaataagattggtattgctatacctctacagtctcacgagtgtcctatttgcgaaatgggagaggagactactttacacttgttctgggaatgccactatgcatcggcaatttggtttggaagtcgatctgtggggagtgcgatctgatcaattacactgcactaactggacaagctggatggcttggtttctcgacaagaaccatagaccacaactcctttcgtttgatgagttcatgacaggggccctctgcatcttcaaagtgatctgggaagcacgaaatgaagtgattcacggatcgagtattcgccctataatggaggccatcaatttagtgaatcgactatacaatgatcatcgatccagatggaattccaaagctggaaagagtgtgcataagagaatcactgatgcaggttggtggaactgctgtactgatgtctcaattcaaccaaatcattcgttcggggcagcggtgtttagagatcatatggacagaattgtgttgatttactcggagagattctcggctacggatccaacgcttgcagaagcttccatgctagctagtgctgcagagtatgctatgggaaatctgaagggaaaggtagtcttttactgtgataatgatgtggtggtggcaaattgttctaccatttgcaatacgaatcaggttttggacattaagggagtggctgatcgattcaaaagcgcggttcggttattggaagactcaaagctgagaaaggttgataggaattttaattttttggctcataattccgctaagtgggctgctgcagtcaatgctactggtgttcttgacttgggatccatggatgtcaacattttttcggatgt

SEQ ID NO: 138479 - DNA, 811 bp, Cannabis sativa
  modified_base (655)..(663): a, c, t, g, unknown or other
gttgattttattcaagaaacttaattatttctattttaatgaatttaattaaatagaaaattatatttaagctggaaatttttcaatttcagatcgacttaaattagaataatttatagaatatattttgttttattttaataattattttcccacgtaatttcgaattgcattatttattttaaatgcagattttcaattttgaaaatcagattaaagttgaaaattaattttaattaattttagatcaacttaaatcaagtaatttttatttatgaatttatttaaaataaatagactaaaatatattatattttaattaggaaattagtaattagtgtatgaattatctagatagatattttctaggtagactttttggtatttttctaaatatatttaattaaataagaaaattaatatttaagttgatttgttcaagacacttaagtattcgatatttttcttaagagatttaattaaatagtaaactatatttatgttgataattaatttatttaattttagaccaccataaattagaataatttttctagttttattttattttattttattttatatgaatttcgaaaaatgtatctttatacattggattttgaattcagttttatatttatagaaaattaaattnnnnnnnnnaattaattttttaattaattttggaccaacttaaattaagtacttttcataatatctattgaaaaaataatactaaggatggaaaataatttatatttattttttcaaatcttcctaaagtataattttatgaatattaaattaaaat

SEQ ID NO: 138480 - DNA, 721 bp, Cannabis sativa
ttggtctaattccatttgcaactacggtatgtattcttttacaatataaaaactgctttagaaaaattatataatgcacccctttaaaagggatacaccaatacatttttatttaattcagtatctaaaattatattttagtcaaaaattttctcatggtcataaaaattatagttatttaagacatgctgcaaaattttataaaatttggaaaagtaacacaccaaaaaattgcattcaaacagtgtgttgcacgcgtgattattttattttatacgctgtttgaaaattgttttttatattgtaaactagtcaacagaccgcgttttgcgtgcgactgtctataaatattttaaattatatgtatgaatatttattgaataataaaatcatatcaaataattttaaatttatttttatgtataattttaaatttatatttattaaaaaaatttatataaagaacttcgaagaatttcttttataaaataattcatcatacaatttcttatatacaaaataaaacatcatcaaatgtatattataatgaagaaaaataaaaaattgaatagtaatcacacaaatagatataaaacaaaaagaagaccataaatttattgaaaatttattatataattttaaaaaaactgtcatcaccgtatttcacttatagtccctactacatttaatgatgtcatcactgttgggttttatgccttaa

SEQ ID NO: 138481 - DNA, 565 bp, Cannabis sativa
gcactcgattacttttgatttcccatattcatttttaaggcgggaagctgaggcgtctgatgtttctttgagacaattacctcttttcatgacttgcctataaatgcccataacattggcacttaacattggcacataacatggtggcttgctgactacgaacttcaatctctgcatggtgagcccttaatgcctccatctctttatctctccattcagcgaacatacggctttgttcgtcgaacgcgagatttactgcagtacacagttcgtcctgatcatgatgcagagtgttgttatgaccgtgcattagtctgagcgcgtcacggagattttttaattcggtgtcgtctccgatggtcgtctaggcgtcggttcgaggcgtaacaatcttattatggatgccctggttgggtgcggaactattattcccagtctcttgcacaccaggcgcaattccattaataggaactgtttcaccattccccacgcttcacgtctgtctgagattaacagtaggaggaacccttgtactccctaggttttgtgatgtaggatccagcgt

SEQ ID NO: 138482 - DNA, 911 bp, Cannabis sativa
cactcttaaccagtacgatgcatgtactgctgaaccgacaaaatgattgtgtcgctatgatatcacccaaacatatacaatcatacacacaggatgcatatatataatacatatatacattcgcataaatatcacatattatacacaattcttactttctatccagattcaagtgtgttggccgatctgaatggatagtcttgcgctaaattgatgccctaatcacataatgaaaccgaataaatcacatgattgaaaccttaatccaggaaactcgaacccaccactctaggttttgttatactccctagggattactctaactcgggaaatagggaaacattcaactaaggcactgaaatagacgaaaattgagaaaatagaacattcggggtaccctgccaaaacgggcttaccgattttacaggtaccagtaaaaccggttacccagtttgtaccagttcacccaaaaatttccatttcttgctcaaaactccaccaaatgcaaccaaaccttctagagtacctaattagggtatacacaatataatccaaccagaaaatcccaaaaaaacccactgaattaaaataatgccattaaagatcaaagtttagaagcttaaacttgctcaaatctatgtccatacaccaagactagtatccaaagcttaaaatcaacataaaatgaacttagaaatcagattttacaacaatcaaaccgtaatagctcttattttagaaaatcacataatcaaactaactaaaaccttatgaaatcaataaggaaagagtgtctagggcttacctacaccaattacactttaaattcaagcttcatttccagaaattaagctaaaaagctgctagatcctcctggttttgatgctactcgaagagagagagagagagag

SEQ ID NO: 138483 - DNA, 1343 bp, Cannabis sativa
cttcctcgtggagagtattctgctgctcctccagaagaatcttcttcaaggcctccacctcagcatgcccccgactatactcgtcgagggtgtagttgtgtttggccacccggagattctgcctctcctcatccgcagggaccagggtcaacactatgccatgaggcacagtgtattcctccgcctcggaaggaatcccggagtcattgcttggcaccggagtgtcccccttccgggtccgcttagagggctccacctccaccatcttgccctttcgcttacgctcgagggcagtagcgtccgccacttcaccttcttcaagttcctcctcctcgtccactaagacgatggtgcctgaaggggcattggaggaggacctcccgggagtaaccaactgtgaggcagtcggagatagagaagcatctagactgtaggcctccacaagagttgcgaagagatcgtccatgggcctggctgctgcaaaacagaaataagttaagtgttaggacattcatgagaacagcatacacttagcaagaaagcaataaaactagtcctaccctgattctctaattcggccctagcaaagtctcgaatcatagcactggcttcgtcatccacgagaaagctgtccaagggaagaaaccagctggaagataaatgggctgaatgatccaggggaataggcgccgggggtccagaacctatcgggaccgacctaaataatgacctaagtgggaaaagtaatactccttggcatgattcccccaccgggtagaaggcattctaaacctacgaaggcgctcatcgaatcctataggcctaagacgggtatactcacggacggaaggaacataatgtattgttaaaggggacttaccagaacccgaagtgctggcatcgggagctccagtatttggaaccgggaccacaggcttgggcctgaggctcctccgcttcggcggagcttccagacgaagagtcctcccggcggccgcctgggccttgatgtaggccagctcctgttccctcctgaaaaggtacttctggtacttgtcctccgccatggcaataatgtcgtcccggaacaccttttctgccgccggagtccttgcgttcgggcagatgactttagagagattgaagtcatccaccgactggttccccaaaattagcttggccttccgacagttctctgtcgtgaccaactccccgatatcaagggccttcttgtcataagtggagaaggttttggcccgttgaagaaatatttgggtaggctcggtccgcatataaggagggatcctaacccactccgtgagaagctccgggcgatccatggc

SEQ ID NO: 138484 - DNA, 609 bp, Cannabis sativa
agttttatcgttgaataccttaaacaagattttatgtgttttacttgtatgagctcatgcatctcatttacagtaattccaaaatgatatttataattcatgcttagtaattatgttactttatttatttcaatcatgtctactatgcaaaatcccctcactactttactagcacttgaagaacttaatggtgataacttttataaatggaaatcaaatctaaatttaatgatggtttgtgagaatcacaaatttgtcctaactgaggagcccgctgccaatgcctcgaaatatattcagaacagatgcttggattcaatcaaacaacaaggccaaatatttcatgcttctaagcatggacgatattctacgtaagacgcatatggagattgcatctcaaataatgaattttctacaggccatgtttgggcagaagtctaatcaaacaagacatgatgctactcatagctacatgaattgtaagatgaagaagagtgtccatgtttgatctcatgtaatgcacatgattgagctaatccatgagatagatgttgaccaaaatttaatcacacttttattttgatgataaacaaatatttgattattatt

SEQ ID NO: 138485 - DNA, 829 bp, Cannabis sativa
ttctttatctagtagattttcttgctgagtcactgtgactcacgggtgcttcatggtgcaggtaaagaagttagaagttgtgttcgaccatgagtttgaggttttcccagcaatgtacatgtccaccgtagtgtcttggcttctgggaagcaagatcgaattcttttctctatatttgaaaatgtaaccttgatttcgtaatagtcgttttgtaaattagttgtaaaggaattttattagcaggggatccccatattatgacaatgtttgatatgaaagttttattttagatttagttaaagattttaattaaaccacactttttcctaactaataaactagtaataatgagtttgtaaaagcacacacgtggcgtttctgagagtcagggtgttacatcctggttggcttgttgtaatgatagaagagatgaatgctttagttgcaaatggtacttgggtcttggttaacttacctttaggaaaatgggccatagggtgcaaatgggtgtttacggttaaattcaatcgagatggaacaattgctcgcgtaaaggctgtcttgttgccaagggttacgctcaaacctatgaagtagactattgtgatactttttctcctattgctaaacacacatctgttcgactgtttatttccatggcagctactcatcattggcctttttgcatcaacttgatattgaaaatgcttttctacatggagatcttgaggaagaagtgtatattgagcaacatcctgggtttgttgctcagggggagttagggcgagtttgtcgtcttcgcaaatctttatatggattgaaacaaagc

SEQ ID NO: 138486 - DNA, 1874 bp, Cannabis sativa
  modified_base (395)..(396): a, c, t, g, unknown or other
  modified_base (1070)..(1070): a, c, t, g, unknown or other
tgtatatggtcgagatttttaaagagtttaattgtcattagtagagtctgattgtttatgattgagatttgtaaagactaaacaaaattaaagttatcgcttgtctataaagggtagagctcaattatataggtcgagattcgtaaacattgaacaaaagattagtaaattgttcaattattattagcccgactatatgtggtcgaaatttgtaaacactaaacgaaattcaagttattgcttttctgtaaagtaaagctcaactgtataggtcgagatttgtaaatattgaacaaaagattagtaaataactaaacacaaattactaagggtcctattgttgacaaaaaaatatctactgccaccttccttctgtagaatgccattctatcatnngataggctttcaaagctaagaccacccatatcgaactcaatgaacttaattgcatacaccgaacaatctctcctggtataagaaatttttgaaatcaataatacatatatgtttgcaataaatatcgactaagaaagcatgtatgaatagacttataaatatatttacgttaaattttatggaacatcaagtaatcgtttatatgctcatggattgtgaaggcattgtgctatctcctgaaataggtaattgttttaatttgttctttaagtcgtcaatggtgatgcatgaaggtctttcacgaaagtatctatctttgaatgattttgacttagcttgagattcccaacctttagggtactttaagtattttagtccacatattaatgcatactccatcaatgagaatcagattggtatcccattcacaacaaaccacatctctgaatctttgagtctctgtaacaacttgcttctcgaacgagtaatagccacatcacttggctaaaatgtctatagtagtcaaaaatattgagaaagtgaccgaacggagattctttgaacaattttaagtgagtcggttcattctttagtacatcattaatgttccttgtgatctcgtccatctgacttttcatacttattttgcactcaaaatgttcattttcctttantataagcaccaatcgagaaatcttttccacctgcaataaattaaacataatttgtctattatctgaataacataagaaaaataataataaaataaagtgaacaaattcaaaaaatactggatgtgttttgtctcgtaacattgatgaagcctctaattgttcttctctatcagattcttcttgctattctccatcggaatctacttgttcatctccattagattcaacatgttcttctccatccaattctgtttcttcttgtccacttgagtttgattttttttctccatttgattctaattgttcttcgaaactttccattgaccgatttaaataaaaataggtaatattaaatcaatcgagtacaaacataatagttaagctttacccacaagcagttgagctcaactcaagacaattgagctttatactaacattacaagaatttggagactacatctcgaccatgaatggtcgagctctactccgtatagtcaagctctatactaacatttcaagacttttaagactacattggtcgagctctactaaaagtagtcgaaatttatactaacattttaattataatctcgaccatttatgttcgagctctacgtacaccaatcaagctatataatatatcaaatagactttgaaaatctcaaacatatttggttcgtacaaaatcaattgtcgtttgattggttgttttgaatctataatacttggtattttgcttcatgccattgaattaccaaaatatagtatgttagagttgaacttgggtgattgagcaattacata

SEQ ID NO: 138487 - DNA, 639 bp, Cannabis sativa
tgtatatttataattctgttgttgaaataggtgacgtggaactgtagcttttcaagaaactaatttttttaattttttattatattaaaatttgtttgctctttcttatttattacgaggattaataaattattaatattaataataatgaagattaataagaaaagaaactgttaacaattaatatcattaatattaataatagtatattttttttttttgaaaaatataataatatagattgataagaaaagaaactataataacaaatgttcatttttttaattgagaaagaaaatactttttttctctttttttttttttttatcaatatatatgaaaagatatataatataccttgaaaggtctattaaatgttcattagagaaatttttcccaatttttattaaaaaacaaaatattgaaaggatttataatgaacatattttattatatataaaattaaaaagttaagccatcttcctttatttaaaaagtcatatataaaagaaagtacaacatacatcatttaccattctctatacattatattttatgtaattaactatctttatttattatcaatgttgtatttttcatttttataacactcaccattattattattatatatttttt

SEQ ID NO: 138488 - DNA, 608 bp, Cannabis sativa
tatcattgttttaggatattttagaggttatagaattttttcagggggtttggtaattgaccaatttacccttgagaggttatagttattttagttagatggaggggtaagaaggtcttttggcaaagacttattttgtcttatttgggttatgttaggctgagtataagttaacaatttaaaaaaaaaaaaagaagaagaagaaaaggattatattgcttaaggttgaaggaaaagaaagaaattagacaaaagtgtttaaccctctcttcattctttctctctctctttcgattctcttaaggagcagctagggttgtgttgtttgttcttgattcaaggataattagtaggaatcctcaagctttgatccaaggtaactcttctttcttaactttcttagcttaagttaggttttataggtgaatttagggcttttgttgctgtatgaattatgatggtttgatttggtattctcgagattatttgatgttgtgtgagataatttaaactgaaattatgggttgaattgaggtttgggcaaagtttgagtttatgaactcaaacttagctctctaatggtggattgagattttgtgtgaattgtt

SEQ ID NO: 138489 - DNA, 513 bp, Cannabis sativa
gtttctacgagaagactccggtaaatcattgttttcattcccttaggttgtgaatccctagtgtaacgccctaacaattaggcacgtcacgacaaccaattaagaaacccttatcccctaaatcaggattactagaaagaaaagcgcgtgaaatttaaactttaattgaaaacataatgaaaataaaacttgtaataactttaactttacaatcaaaaattacatgtttcaggatcccaaaaatattttacaaaatattacaagttttttcactagccgacctaagcggcaaaatcagagttacaaaagttcatcacttgtagaccccaacccgcttggtctagtgttgcccgaacatgtacatacatcgcccagatctcgcattcatggctaatcagagacaaatttatcctttcctggacaatagaacacccatgagcccaacccagcaagacagtataaaatatcaataatcataattaacacgtaatataaacattaatgccatttcac

SEQ ID NO: 138490 - DNA, 1063 bp, Cannabis sativa
gttctgtaaagtttatttttatttatttatttatttatattttatttaagtcgagtttacgttcggggtcaaattcaagttcgggtcagaagctagattcagcaacaaggccattggggaaatttgggtccgggactgatcggagttcaaaatattgtttaaaaaaatattaaacgtgatttttttttatttttaaaattttgattctcaattaaaaaatttaaaagtgaaaacaattttatagaacatatttttgaaaaatattttcaaaaaaattgattaaaaaaatgttaccaaaaacttccttaatttttaaatttagtgtcattttcatctaccttcgtctaaaatttcaaataaaaaagagtaagcatgctacaaaacagtgattgggccaaatcaaaggaaaaattacattctgccccatcttttacaattgtttttgcattttataacaaaataattaattacaaatatactttttttaaaaaaaaaaatgtttccaaaacatgtaaaagatttttacaaacatataaaagttgtttacaaaaaattaatctgtatttttataaataaaatttgtacttttgtagtataccgtattttttatcttcttaaaaaagaaaagttcggtattattgaaaactatccaattttaaaggatcatttacaaaaatattggaattcgggttaacttttacaaaaatactatcacacggaaaaaatttcaaaaatactgtatttttacaaaacaccaatagaacacaaaacagattaactcaaaacaacagtagaacaactaaaaaaataccagtagaacaccagtgaaaatttaacacagtatactgcagcataaaacttataaaaaaaacatagtaaaaaagtaaaaaaaaaaataccgcctgacaatatttttataaaaaaatgacaaaagttagtatactatgtaaattttccattataaatagtatttgaactgggataagttagaaaataccgcttttattaatcaattaattaaatttaactctaattttatatttaattgaaacatacctctttt

SEQ ID NO: 138491 - DNA, 672 bp, Cannabis sativa
cataaattagaataatttttccagctttattttattttattttaaggtgattttgaaaaatgtatttttataatacattggatgtcgaattcaattgtatatttgtagaaaattaaatttgagttgaaaattaataatttaattaattttggatcaacttaaatgaagtaattttaataatatttattggaaaattaatactaaggttgtaaaataaattttatttttcagatcttcctagggtataattttataaacattaaattaaaatttatatttagatttatctaaattagtaattttaattaaataaatatatattaaaataaatggattaaaataagtatcaaatgaaaatacaactctttaaaataatgagctttagttataaggatattaaatctccattgttggtcctacatgattaattgtttttaatataacctcgagacgctagattttggcccccttatggatggttattcgttgaaacaattaacaacgtaaagatctcttatgataagtattttgtaagttttcatctccattagactcttccctacggtgactataaatttatgaagtatgaaatattggtagaagctcataaaataagaataaccttgactctcgcctacagggacaacgttggattcttattttgaccgaata

SEQ ID NO: 138492 - DNA, 802 bp, Cannabis sativa
  modified_base (761)..(765): a, c, t, g, unknown or other
gttttggagacattggacacgtctgctccttccaaaatattgctccatagacggttacacattttattaacataagattagatttgtctccagtgccaaatcgtggtagtgcgcgtatgcacccttgagtatgctttttaccccacggcctgggtaaagactatttcacaaaggaaagacctttgtgtgacatgtgtccagagtcgtaccaaagtcctcgtcagccgctgtacaccacacaatgaagaaggttcccaccagccaatggtcagatactcctctcgtagtacagaccttagtagcatgtgggagacgaaaccctaggtaggtaaaggctatgccctttaccccatgtatgcctataaatagtctaattctgcttaggacgaggaggagagaaatttttacatacaatgactttacaaaatttctcatgcaaaagaaacaaaataacctccaatacaatatcatataaccttgaaatatttgcccattgaggctaataatatagactcgtggactaaggatcagtaacgcctgaaccacgtaaaaatctacttgttaattgttatcttctttaatctatcaaaatgtttggttttcaaaaaactcggtaaatagtagggtttaggtgagacaagcccttatccttccttgatttgatgtgatagtacattatgtagccatcacttacatccttaattaacgcgcaattgctaaagaatggtaaatatagatttaaaataaattgattaaaatannnnntagaagaaaatacattttaaatgatgagctttattat

SEQ ID NO: 138493 - DNA, 592 bp, Cannabis sativa
  modified_base (98)..(112): a, c, t, g, unknown or other
gctccaagcctaaccgccccgacaatacaatcttcatctgcccgtcctcacggttcctcaactttagccttgcccttacctcaattctgaattcaggnnnnnnnnnnnnnnngagtggaacaatctgctcggcgaattacaggctcctagagcttaagatctcctaatccctgctggaacaagcttgaaatgcaaaaaaataatcccaaccctagcagcctctaggtggattcgaaagagagagagaaacttgagagaaaatgcaatttttgtctatcttttgatttttcaataaaatgagcaaataatagattttccttgcttaatattgagcataacttaactaaaaatcaggttaataaacttttaaataaaatccacaaaagacaaagtacatatgggcaaaatgaccttgttgccctctcacattaaaatgacataaaagagtacaaagggcatcttaggaaattctaaattcccaactaaactcgacatttctaatgtctaacaataccgccccgctatactaaaataccaagatgtgattctactgagccatacacctcgttccaatgttgtcgggcactgaaca

SEQ ID NO: 138494 - DNA, 527 bp, Cannabis sativa
  modified_base (52)..(80): a, c, t, g, unknown or other
cgaaaaaccagattaacacaagtggggaggttgtttgttgcagctcgccacnnnnnnnnnnnnnnnnnnnnnnnnnnnnncaacccccaaagcttatcccagaagctatgttcggtgttaggacgctgagtttgtttctgcttttggaggagaccgtaggcgcttttcacagagaaatcttcatcattctcatacatccaagaccaggagtcacatgtagcatttaggctgagaggaattcctagtattgcagcagcatccgaagcacagaacatgtccataacaacatcaatgtcccatgctttagaatctgttatgaagagcgagtcaacgtattgattcactaacccaggatgatgcacagatacatacggattcgccaaatttgggagccacggatgttggagtatgttaacatttgtacccgtaccaatggttcttcgaatgccagagcgtaaaagatcttgagaactccaaatgcttcgccaaacgaagctaggattattacccaattcggcagtaaggaa

SEQ ID NO: 138495 - DNA, 521 bp, Cannabis sativa
cgatggtggttgatcacagctgtctcacacctgttctggcctataaaagccagccttcttacttcatttggttactttcagcattttaccaaattttctgaagagttttctcagagagaaaagaagcctcaaacaccatagatttcttgattttattccttcgacgttgccagtcttcgttctaccggcgatcaactccaacctccagccttcaaacttcatgtaagttcttcgtatattgtatacttgcttattgttcatttgtatggcatgttttatgatttctgggttggatgtcgagcttctaggaatgaattcgcctgagtttactgtatgatgcgttaaattcatcttctttgcgtttagattgctccttgttattacgtttctatttgaggaatcatccccatcttgcgtaataatgcctttagggcttagattagatcttgctttttcggattttcccttttttccttttctcttcttttttcttttttcctgtgcaatgtcactgcctttgg

SEQ ID NO: 138496 - DNA, 655 bp, Cannabis sativa
caaaactccaaagcttgctcaaaccactaacagccactaattcaagcataaaacaacataaaaatccatatctgaacctcagagcacaacaacaaatcaccacatcagctacagcaatccaattcatatttcactcataaaaactaaagttttgagtttaaaattccaacttggttaaaaccaactagcatgcatcaaaacctattccaatccactcaatgaaacctttataagctatagaaaacaacaacaaccacaacaccaaacatgcaaaattctcatttcttaaacttcaaaaaagaaaaacaaagaacaagtttaaagaactataccttagcttgagatcacaagaaccttactaagatcagctagaaaactacaaaaaatccccaaaccctagctgctctaggccgaaagagagaaagagagagtttgagagtgaaaaatggttttttgcttctttctttgattttcaacaaaataaatgaaaataggttttccacacttaatattcagcatattataattagaaaaatcaaatttataaactttaattaaaatccacaaaagacaaggcacatatggcaaaatgacctttttgccctcacaccataaaaattataaaaaaggaactaaggggtaatttggaaaattc

SEQ ID NO: 138497 - DNA, 705 bp, Cannabis sativa
ggcttggccttttatggagattcggggaatgtagtgcaagtcaaattgacttaactccatcgcccacttgaggagccttccggacgcctcaggttttttgaggacttgtcggagtcggtggttggttagtatcttgatcggatgtgcttggcagtatggcctcagtttcctcgaggctattaggaggcaaaagaccaacttttcaatgatggggtatctcgtttctgctcctatcatgcgcttactaacgtagtacacgggatgttgagttttctcttcttcccggactagggcagcgctaccgcgtgctcggagacagccaagtataaaaataggtcttccccgagaacgagttttgacaggataggaggcttggccatgtgttcttttagttttttgaatgcctcctcgcactcgtccaaccgctcaaacttttgacacttcttcagtatgttgaagaaggggatgcacttgtttgtagaccgtgagatgaagcggcttagggcaaccacctttccggtcaggattttttccgggtttccctcaattcgggttgagcttcatgccgtatctccggacaacttcgaaacattcctctaagtcgtttgcatggccattgcgtgctttggacttgaccagcatgtcatctacataaacctccatatttcgtcccaggaggcctttgaacatacggttgaccattct

SEQ ID NO: 138498 - DNA, 763 bp, Cannabis sativa
cagttctcttcttttttttcatttttttttttagtttttctaattttcagtcacgcttttgaggaaaaataaaagtatttttttattttgattttcagaactgttcttgtaaatatagctgctgttgcatttgatgttgatgctgtgtagaagatggttagttttttttagttcttttttcttttgttatttttttatttgttttagtattgttttacggttgttttgccatgatttatttatttgacatcaatttcactgttcatgctccatctcaccagaattaatggttgttttctaagtgttctcgtgttaatgtggtggttctatacgtgtgtgtagaagatggagactataaatatatttttttcttccttctatatgactgtttttgtattttttttattccgattctcctataaatacatttgacaagctcattggcaaaaaaatcttgaggggtgtggttcttttatattttttttaagtggttacatttgcttcattgttttacatttgtttttgtgttgttttagtaatttttttattctaatttttcagaattgggctgataaatatagctgctattatatctagtattgaagttgtatagatgatggttagctttttttaatcatttctttttttaatttgtgttagtgttgttttacggttgttttgccatgattatttatttgacgtcgatttctctatttttgttccattttgttggaattaatggttgttttcaagtgttctcgta

SEQ ID NO: 138499 - DNA, 704 bp, Cannabis sativa
attgtttcttctctctgggtccttatatccgggcgtttaggttttgccgacctgttgtatgtgttgatagatctttcttgaaggctaggtatggtgggaaaatgttgtgtgcagtggtactggatgcaggtagccatattttttcgataacttttgctgtagttgacaatgaaaaccacaattcttggacctattttatgagaaaattgaaagaaacaattggtgatgttgacaacttagcctttgtgtcggataggcatcaaagttgttcattctttggatatcgtgttccctgatgcacaccacggtgcatgtggctaccaccacattattatgaacgtcaaccacaagttcaagactgacgtattcacgaatcacatttacacatgtgcctacacgtattcaaaattagagtttcatagagaatttaagaacattcaagcaatgaatgttgtagttgcacaatatcttgaggaaattggatttgaaaaatgggttcggttgtactttctagggatacgttacaatgtaatgatgagtaactgggctgagagcttcaataacataactaaggacgcaagaggcttttcgattactgctgatgtagcattcctaaggtccaaagtccaacagtggtttgctacacgaaaagaaaaggctgacaagtggacgaagaccctagcacaaaaaatggaggaggactt

SEQ ID NO: 138500 - DNA, 868 bp, Cannabis sativa
  modified_base (52)..(58): a, c, t, g, unknown or other
tgtgtactgcgttaagtttttattgtagttctacggttgttttttagttgtnnnnnnnttgttttaattgttctgttttgttattttacggttgttttataaaaatgacatatttttatataaaatttcatgtggcaataaaattataaacttttgtctaaaatttagtatttttgtaaaaactcctataaattacacttacacttaattcatgaagtgaaaaatattgtttaaatgtaatttatagtgtttatattacacttagtagttatcaaacttttattcacaaggttttagtaattggataataatgatgtgatttatcaaaaaaaaacataaattataattatgaataatatcttagaaaatcaatagaagaaaaataaaataacataaatgttaataattattacaaataaacattaatactttaattatgtattttaaaacagcttgcacatcaattaacaaagaattataaaaaaaagtaagtacatattaattaataataataaacaaacactaataacaatagagaaatgtaaaactacaacaataataattagacttctaagcccaatgacaattactttgtaaaaagaaataaaaaagacccaatgacaattggaaattattgacatattttaattgatataagaatgcaagggaaaaaatagtgtaaactgatttttttgtgtggcatgtaaggacaaagcactaaggaatctatactaataatatgatatatatactatagaggaaattaagtagaatatgacattttttctttaaatttcatagatatggaaaaattagagatttacttaacttatggcttttttacaatttaagttagttgtatggaaaa

SEQ ID NO: 138501 - DNA, 578 bp, Cannabis sativa
  modified_base (523)..(529): a, c, t, g, unknown or other
cagctccattagagcttggctctcctgtggagtttctagaattagatcttgaatagttacttttgtagccatttgagttctgattttccttgaattctcttctggggaattttcccttaacaatgagtaatccttccccattggtctcatctttctcatctcccttcttctaaatttctttagaattcaatgaagccttaacctctatcatagtcagagcatctttgccatacaagatcgtatcaacaaagtgcacataaatcttaggaagtgaactcaacagggttatagccaggtcttcattattaattttcaccccaagattatttagattaagaatgattctgttataatcatctagatgttttctcaattcttttgactcatccattcgaagtgtatacaactttttcttgagatacaacttgtttgcaagagattttttcatgtaggttgatgccaacttgtttcagagacccaaggccttgtcttcatctgaaattgttatattattttatataannnnnnntttagattaaataattaagttatacataattaagtgtgacaaagtatta

SEQ ID NO: 138502 - DNA, 1234 bp, Cannabis sativa
atgcccgaagcatgtcttctaagatctgaatagacctcttaaattgtccatccgtctaaggatgaaaggctatgctgaatttcaactaagtacccataggtcgatgtagactctcctagaatcttgatgtgaatttcgaatctcaatcaaaaataatggactttgggactccatgaagacgaacaatttctctaacatataactcagcataatgatcaatggagaacggtctggtagactcaatgagtaattttctcaaccgtgctgaaggcttcatcaaacttgaagaggctattcagcgagcagaaggtgagcaaaagccatgcaagttgaaagctccttccactggaatgtctgcccaactcccccattacccaaataattcaagctcaaacggtaaacattctaataacaacagtagacaagggaatgggaagaaaggaagttcactggaaaaaccgagcaagctcccccagagaatcaagccaattacactgcatttaccatcttgactgaggatatataaagtgtttacatggccactcagtcgctagccccgtataagaagctcgcgcccatgaagaaggatgtcaacaagagagacatgtccaaattttgtcgatttcatggagactgcggccactacaccaatgaatgcgacaatctaaagcgagaaattgaaatcctgattagaaaaaataacccgcatttacagaagtatgtcaaggcggatcagatcagaggaatgataacaaccaagacttgctacctccaccagtagatggacatctgcaagtcatcattagaggcccgcacatagctggagattcgggcaaagcttgggagaggtatgcccgaacagcacagcacgagcaagaagaagcgatcctggcagttgaagaaaggaagcctaaaatcccacgggcaggagggcctaccataaccttgaacgacgaagatgctgtcaaaatcaggtttctgcacaaaaaaccattggtcgtagaggtccagatagccaacaagatggtggccaaaacaatgatagataatggagcctcttccaacatcttattcaagattcctatgaaaagatggggctccagctcaaacatctaactccctatctcctgcctatgcatggtttctccagtcaaggagtcgcacctctagggcaaattcgcctacccctcacagttgggcaacctccaacgagcatgactattatggcacaatt

SEQ ID NO: 138503 - DNA, 1547 bp, Cannabis sativa
  modified_base (119)..(128): a, c, t, g, unknown or other
  modified_base (1492)..(1497): a, c, t, g, unknown or other
tatcagttaaaccctgtgtattaataaatctaggaatatatatttaatcacataatcttgattactttccactgtgatgacgacacaaccaacaacataaatgtgataagggtttggannnnnnnnnnaatcaaataaacaaataaatgatagcatgaaccaaatgacacacaataagtgatgaaaatacttctgtttctttattgatattcaaatgatagagattacattgaagtagagttttatttagggcataaagcccaacaatgtgacagatctatagtatacttcctcaacatagacacatggaacacattatgaacatgtctcaactatcctggtaagtttaatcggtaatacacctccccaatcctctcgataatctcaaaaggtccaatataccttggggctagcttacccttcactccaaatctcgttacgctacacataggagtaactttcaaaaagacataatcaccaatatgaaactcatggttgaatctgcaatactgatttggttaatgcttctccagactacaactcctccaccaagagtaaatactaattaagatgtcgactttcgactatctttatctgattcaaaatagaatcaatatatatagtaggatttaactatccactgtaatatataagaatgagatctctcgttcttcgaagatacttgagaatgtgatttacaataatccaatgttccaaacctggattagattgataacaactaacaatccctacaacgtagcatatgtcaggccttgtacacaacattgtatacatgaagctcccaactgctgatgcataagggtactttctcatgttctcttcctcttaacgagttttttgacattgatccttgcatagaataactccatgtttggacggtaattatccttttttagaattctccattgagaatctttcgagcaccttatctatataagttgcttgagaaagtgttaatgttctctgctttctatctctatagattttgatcccgataacatagcttgcttctcccaaatccttcatttgaaatttattggctaaccacttctttacatctaataacctttatacatgatttccaataagtagaatatcatcaacataaggaactagaaataccactacattacctttaatgtatttgtatacacaggctttgtctttgttttgttcgacgccatactatttaatagtcttattaaaggtgatattccatgatctagaggcctacttcaatccataaatggatttaagcaacttccatgcctttcgatcttcccttggtaacacataccatactggttgttccatataaatgactttatcaagatcatcatttagaaaagtagtcttgacgtccattttccatatctcataatcatatgtggcagctatggaaaaaagaatgcgaatggatttaagcattgccacaggatagaaggttttgtctgttaggttttatgccctnnnnnnaactccatttcaatgtaatctattttattcaacatcaataaagaaacaga

SEQ ID NO: 138504 - DNA, 812 bp, Cannabis sativa
aaataaaacaatcacaattgcatggcaattataaacagagaatgaaattcattaaggatgacagaagcacgtaatattgggattaaaagctgcccaggcagcccattgtccaaaaaatgaaaaataattccaagttaaaagaccgcttgggtggacgtgatgtcttagaaaaggccctgaggccgaataagatatatataaaaaaaaataaaaggggagataaaaagaagtgttcaaatagctggagtcccatgctcttggttcggttcttctaggccaactggagcaggaggatctgttgtttgaacgggagaagcatcagcagcctgaccggaggttgaagcagcttggccagtggttgaagcagccgcctcggttccacaataagccacttgggccgcgcagtactcaaggtacatgtccttagcgttgcccaagtagtcgaagttggcccaggcattggccttccaaaaatcaaaggagagctcgagaccggctgtctccaaggcattgaccttctccttcaacctgtccacctcggccgaaagctccccctccttggcatccttttcctccttcatctgaagaagaactgctcgcagaaaagtcctctcatcttgaagactgtttacctcaacagacaagatctcgatggtctcctcaaaacggtcagcaacctcaagacccttagtcagcacagaggtcttcttatcagtagcaaacaacttcttgttggccttgcccaactccaaccgaacagctccggcttccgccctggcttcttcagtttccttcttggccaagtccgcctc

SEQ ID NO: 138505 - DNA, 1196 bp, Cannabis sativa
agcaacaagaaagttaaggccctatttttaagctcatcttgttcgggtgtacactgaccaacaattacaccaaatattgcaaaagtcgcacccctctggatggctactcaaatgggcggtggagttcggtcagtacaaaattactttccaaccccgaacatcaatcaatggccaagccttagcagacttggtggtagaaagcacaggcaaagaagaaagcgtaccagaaagcgaccccgagcctgtacaaacacctcagccaaataatagtgaatataagccgacttggaaactacacgtagacgggtcggctacagatcaactatctggtacaggaatttctcttgtcatgcctgggaggcaacacctgcacgttgtagtcaagtttggattcaaagcatccaataacgaagccaagtatgaagctctaattgctggcctaaagttagcccgagagatgagagtcgagcacattgaaatctacagtgattcatagctggtggtaaatcacttatccggagaatacgaagctcgaggagaaaagatgatagcatatctgggcaaaatacatgacctgctcgcacaattcaaaagctacgatcttagacaaattccaagggaagaaaacaaaactgcagatgcgttagctcgattggcaaggagtaatgtaagtgataaggcaaactttgttcctatctatttcttcgaagagactaacatcactagcgcgaaagcgatcgaaatgattgatacttccccaaactggatgacaacgatagccgcctacctcaacactggggaactcccaaattatcggaatgaagctcgaaccatgggaaggaaggctgcacggtatatcatagtagagggaattatctatagaagaggattctctatgtccctgctcagatgttacgcaagaagaagctgtacaactcctatctgaggtgcacgacggattctgtagaaatcatgctgtcgggaagagtttatataagaaaattctaaggcaaggttatttctggccaacaatgattgatgatttcaaggcctatgttaagaaatgtgacaaatgctagagattttaaaagatacctcgaggtctgcccaacgacttaactcagatgcaaagatcgtggccctttgcgaaacggttgattacttcactaagtggacggaagccgaaccactcgcaa

SEQ ID NO: 138506 - DNA, 588 bp, Cannabis sativa
cttacaagccccttttctcaggatcgccttagctttgaccacattcttccagaaccacaagtcagaatctttatatttgcagtttagaaaatcttttcctcgaagatatttgacctctagtaatttgcaacataaagattgacaaccatttagaatcttccatccccacttagccaggaaggccaagttcatttctttcgttttttgaaaaccaagacctccaaaagactttggaagacaaagtttatcccaagctcttagatgcaggccatggtttcctttctcaaaaccccaccaaaaatccctgacaagaccatctatccttttaatcatgcgatcagaaagtttggttgtttgcatggcataaatcggaagcgataggctaacagatttaattagggtcgcatgccctgccttggaaagcgtctttgctttccatccctgcaatttagatgcaagtctatcaaggatgaaattgaaatccacatccttttgtcttgatctaaaaagaggcatacccagatatttaatgacaccctcctgagagccaatacccaacacatccttaatgcctcttctcatcccatt

SEQ ID NO: 138507 - DNA, 742 bp, Cannabis sativa
ttatatttaattgttcaaataaataaataaatatctataacttaatttggttacagatatttatgagagaatctctcaaccactttacagaatatctcaacaaccttgaaatatctatgatcattttttaaattagatattaactaattaaattagtatttttaccccctaaactttcggcactacctgattttgccccttaaaatatacgatttgttaaaaattctccctaaaatataaaaatgttacataattatgcctcttctgttaggtttcgtttcatttaccgtcaaaaattagtatttttaccccatgaactttgaccaatacaaattttttccccttttattcaaaaaattaattctaaaaattataatattctataaattttggaaaataaatactaaaaagtattaaaaaatttgatcaaaatattaagtttacttaaaaaacttaaattattactaaaaaaaattttaaactttattttatttataaacacgtaatttaaaaaatcaaactaaaattattgagaatctaataaataatttaaatagactaaattttttgatgaaaaatcaaacttatttatatttataaactcataccttaataaataaagaaaaataattaaaaaattaattaaaatgtaaaaatattctggaaaaaagttagaaattaaactaaaaaaatgttatgtttacttaaacaaatataaatttttttgagaaaaataaaatag

SEQ ID NO: 138508 - DNA, 550 bp, Cannabis sativa
  modified_base (70)..(71): a, c, t, g, unknown or other
ggaggaggagctttcggctgaggtggacaggttgaaggagaaggtcaatgccttggagacagtcggtctnnagctcttctttgatttttggaaggcttatcctcaggccaattttgactgcttgggcaatgataaggacatgtaccttgagttctgcacgtcccaagtggcctacggcgaaaatgaggcgattgcttaaacctccggtcaggctgcggatgcacctcctattcaaacaacaaatcttcctgcactggttggcttagaagaaccgaacaaagagcctgggactcaagctgcttaaatacttctctttttatctctttatttgatatatcttattcggcctaagggccttttctaagacatcatgaccggccaagtggtctttaaacattatttttcatttttcggacaacaagctgatcgggcagcttttaatcccaatgttctgtgcttttgttatccttaatgaatttcattctctgtttataatttttgtggaatcgtgattgttttatttttaccaaatgctttgtacaggtatagg

SEQ ID NO: 138509 - DNA, 759 bp, Cannabis sativa
acaggttggcgctgtatagtcacaaccgggtatttcgggctgaaccgggttcgggcctgaaatgcagtttggaatagaattattggcattttatttattgatgaataatttgaatatatatttggatttatgtgtgtgtgaaatgacttaaatacccttgagtatgtgtgtgcatgctttatagccatatactcttaatttacaaataataaaagaaagaatttttaaggaaaagcaaatttttctggttttgctacccccttacctaaaccccctctccctctcaaaccctctttttgtttcaattctttaattggtgaaaattgcttggaattggcttgaattgaagctttgaggttaaagaactttgagcttggaagtgaggtagttttctactaatttttatttgaattcttgttgagtttaatatgggaaaagcatgttatgggttgtctttcttttgaattgcatgtatgaggaattgtgttgatcttgaaagatttaggtgtgttaattccatgatattgttgtgagtttattgttgattattggatgagattgttgagggttttctaggttaaagtttatgtgttaattggtgttatgctgctggaaattaattgagttgggttggtttggagctcaagttcttgagcttgagttcttgttgattaaggtatgattttgtgttattgtgcaatctgaaattgggggttatatgttggaatttaatgcatgatatatgtatatatatatata

SEQ ID NO: 138510 - DNA, 671 bp, Cannabis sativa
ttgataacaaatcaaattatattgaaatgagttttatttagggtataaaatcctaacaaactcccacttgcactaacatgaaacaagaagtgcatttaaatcattcacattgtcttgatatctagatcaagtgtagtgtattcgactaaacccgaacaataggaactgtaaggttgtggtaagcaataactttatccaccattacttcctttgtgttcataacatattatgcaacatcatatttctatatgcattactcatctagggatattgaattctttattgtttattaagtgaatctgaataagcagaagacacatctctaattttatccaaaatggaatagagataaaatcagttaagaaatttctttagtttgaataactttctagtgattttcgaaacaactaggttatttagcttcaccggtgggactaaattattatagatggatttttacatccttctagaataattcttccaccgccagattaactaccatctctaataagttctgagttggtgtagacaaaagaattctaatatacacccctatcatcttacatattggacactttcataaattctttcttgattgtctcccaatgttccttgtttgattacatcttagatggctcccactcaatagtaggagtctggttaaattcata

SEQ ID NO: 138511 - DNA, 1256 bp, Cannabis sativa
atcacatattaaaactgggtaaatcacatgtccgaaaccctaatctgggaaactcaaatctacaactcaagggtctattattatcactagggactacactagcctaggaaacaataaaaaccccaactaaggcactgaaatgggcaacgattgagaaaatgagttgttcggggaatatgtcaaaaccagttaaccggttttacaaaacctggcaaaccgattaactagtttgcactaggtttcaccaaacaaccaacaacttgttcaaaactcgaccaattgccaccaaactttgcagagtacctaaacaggctataaacaacatattccaaccaatacaacccagaaaaactcactgaatcaaaacatgcccttaaagacctcagcttgagtttcaaagctcaaacttagaaaatttccacacaatacagtcaaatcaacaaccagaacctagaatcaacttaaaatgaacataaaaactgaaccataacctaatcacaccctaacagcccctataactcaaaattacaaattcaaaccaataccaaaacttgaaaaacttagaacaattgacctagggattaccccaacttgaaatcctcttcaattcgttgttgaaaactccaaagatcatcagcaaacccccttatttttggctggttcgaagagagagagaagggaaagagagttgttcttgaattttggctttttcttgatctttctcaaaatgaaataaggtttaacaaaataaaccttggctaaaaataaaataaataggtgttactctcctaggcagccaccaaatcaaccattagacaaattactaaaatgccatttgttttataacttcaacattttaaagataggggtaaaaaaatggtaaaaatccataaccccgctcaaccttggtactctaattcctctaacatacatcccactaagaaataaggttctagacctacccatgtgatcaaactagtcatccatcgtatattccgttgtcgccgagcaaaaattataaaaatagcataattcacatataattcaaataatactcctagagtttaataaaatcttcggaattgagaaattataactctaatgcccatttttaacaatgggacccacaatttaattttacaaataattactaaaataataataattagtgataattgccttttataatccatattatgaaatgtggtcattacaattatcccccccgttacaaggattttgtcctcgaaatctaa

SEQ ID NO: 138512 - DNA, 697 bp, Cannabis sativa
gacccgtaccccacgtaccccagacctcccagacctgccagacctgggtccatgggtccaagtctgagtttgggttcgggaactggaatcagacgaggaccttagacccagacccatatcgagagacgcggacccaaatcaaaactcagaccgggactcgggacccgaacctgaaccctgacacggacatggaccaagacctagacccaggactcggactgagattggagactcagacctagacctagtactagacctagattggggacccaaactcaaaattagaaccagaatcgggaccctgaattgggattgggacccaagacccaaccccggtctcggtcccaaacccagatcccaatacggactgggatccaggatccgaatcgaaacgagacggagacccaagattgggatgcggattttgaaccacgacctagggttggacccaacccgtagttggtgtctagatcttggaatcgtaccaggaccctaacctagaaccgtttgtagaccaggacccaaacccagactcaaacccgagacccaaaatcggaacaagaactgcaataaggaccttggaataagaattggacctcgacccaaaactagctctagatgcgaacccggaccaagacttgcgccaggacgtgcgacctaggacccgtgactcgggacctggaccagatgccagacc

SEQ ID NO: 138513 - DNA, 500 bp, Cannabis sativa
tagtattatttaatataatattatgttttgtattgacttgtattaataaattgtgtaaagttataatatatttttaatagactcgaccacaacaccaactacgggtctgggtcgcgggtctcgggtctagggttcggatcgcaagtctaggtctaagtatgggtccagatccgagttcgggtttgggtcttgggtctgagttcaagtttaggtcctgggtccgggtcaaggtctcgagttcgagtcttaactctgggtccaggtctgggtccaggttcgggtccaggtctcaagtcgcagttctcttgtccggggccaggtctaggtttggggtctaggtccgagttcaggttcgggtcccgggtccgagtcccaagtttaggttctgtttcgggttcaggtccaagtctcgagttcagatcagagattggtattgaccttgaatcctttgtaaatattataatacaagctaatacggactatttgttatgtattaaata

SEQ ID NO: 138514 - DNA, 859 bp, Cannabis sativa
atgaaactaggattgtctcccaatacagtagaaaacagattaccagtagcataatatttagccttataaagcctactaaccaaagaatcaacattaaccaacaaatgccaatattgcttccctaattgagccaaattaaagtctctcaagcttcgaaatcccaatccccctgcatgtttatggcgacacaactgctcccagctcatccaattaatacccttactgctacgtgaatctgagtgccaccagaacttggccataagccgctctaactccttgcaagtgtctgacagtaaaagaaaaacattcatagcataactcggcaagacctgagcaatagatttcagcaatacctcatttcccacacaagataagatacgcccttcccacccttgaattctcttccgaagcttatccttaaggaaaccaagaatagcattcttattccttccaaccgaacatggcagacccaggtaataaccattttcatcggcctcataaatctccaacatagcacaaatggaatcttgcacctcaattctagtattattgctgaaaaacacagaagacttggagaaattgattctttgccctgaagccacctcgtaagtatgcagcaactccttcacactgtacgtttcttcctcggttgccttgcagtaaatgtagctgtcatcagcaaagagcatatgagagattaccggcgcaccttgaacaattttacaccccgtgagtaagccactttgttcataactccgtaacaaactagaaaaacctccagcacaaagaataaacaaatatggtgataaaggatcccttggcgcaaccctctttgagcaacaataggccccaactcctt

SEQ ID NO: 138515 - DNA, 2326 bp, Cannabis sativa
gtcacgttgtcttgtcttaaaaaaggccttatggcaggacaaatataaaatataaaaaataaaaaaaaaaagaaagataaaaagagaagtagtctgggtgttcttggccagtaggagctggaggatctgttgtctgggtgaggggcatgtcaatgttctgaacgaaaagtagaggtggtttcctcggactctccataggccgcctgggaagcacagtgctcaagatacatgtctttggcatcgcccaggtaatcaaaatttgcctgaggattagccttccaaaaggcatagaaaatctagagaccggctgtctctaagtcattcaccttccctttgagcctctttacttcagcgttaagctactcctcctcttcttcttctctgcttccaacctgcgaaagacagttcgaagaacctccctttcttcctggaggtcggtcacttctttggaaaaggaggtcatggcagcctcaagatggtcagaagcctctaaatccttggtcagctcggcaactttcttctaagcagtaagaagctttttgttgacttcacccagttccaatcggacgactccgagttgaaccctggcttcatcaacgtccttcctggccaagtcaacttccgccctcaaggtgtttgacattgcaatgttcttggaggcagcagacttagctcgagaataagtgtaagccatcttcagaccagtctacatagagaaaaaatgttaaaatctgagccaagtaaagaaggattaaaggaaactgtcaaggaaggcttacccacgtaaactccttcaggactcctcccatcaacagctccagggaaagctcattgtcagcttcagccagatgctcattcaactcatggaccgaccgattcatgtagtgggtgagcatctccttgcctctcttagtctctggatgcagtgattgaggtggggtaggagctcggatctgctcagatctgcttttggccagctcagatccgccctttgactacttaggcctgtccgagcttcctccttgagagactttggacttaacagctttcggggaagaagggtccacaacggttagctcctcagaaagatcgataaaaactttggctggtgccctctctctggacggtgttgtctcaccgcccctagacttcttggccggaggagatgagcctgagtttcctcccactctcttcttaagagcttcgagcattttctgagacatgagtgcatgaaataaaagcaacatggttagagaaaagcataataattaagaaggttaaaaacaagacggagtatcttgcgcttcgggagaagcgtttcccgagcaagacttgaaggctcatcatcacctgacaagtctcttatctcctccaggacgaatttcccatttcctactacagaagtggatggctgagcaggtagactgggctccttaattcgaattgcatgttcaacaggcctgttctcggcaagaaacttcttcctccttttgagcggagtcacctactcctcctcaaccttgtcttcatgcttagaatgctcctgagcatactgttttgccccagcacctcccttcaaattagcctcacgcttaagttgaatgagttcattctcctgatgagctccctcagcccgaccagcaccaggtttcctctttttctccttcacaggttggggaatgaaatcctttgggtagagcccgtactccacaaagttgtccttagaagtcaacaaagtgatatttcgggcggcacccggcagctgagcaagcttttgagctctatccctgagggaaagtgtgaagggtgggcggtgatatgtagggatctgctggaaccgagtgtaggtggtgcccatgctagccaccatgtaatactcgttaaccaaatgtctaattttgctaacggtcttgtccccggtgcccgtcaaccacttgtagtctggctaagagaagtagaagtatcccgacctgccttagttgggagtagacttcaaatcaaaaaactagctaacctcatggggagaaggcatgtcccatttctggatggcgtagagaatgaacagggcagacacatacttgatgcccttgggagtgaattgggtcggacagagacggaagaagtctgccaccttcctaaagtactggtgcaaaggcagcaatgccccttgtttaccatgagcacacgaccaggcacacatccccctctcaaggttagtggctcgattgttagaggtgggaatgtaacagtctcactcgcccaaatagccgccctggtcgagatcccgtaagcgtgcctcagtgaccttggacggagggctcaccca

SEQ ID NO: 138516 - DNA, 1477 bp, Cannabis sativa
  modified_base (198)..(203): a, c, t, g, unknown or other
ggaccctccgcaatcatctacaccagagggcgagcaagtagagcatggtgtagaccaaaccaatccatcggcaacgcttgcacctccgcagaactcgagggataatacgggggttggcaatgctaatcctcctactgactggcagtagatgttccatgaaatgcgaggtatcatacttcgtcaagaggaagagttacnnnnnntaaggcaaccggtaccggctgcccctgttgagcaagtgttaccaccagcacctgtgccagtggtgggtaaccaggggtttatgatactgcacagagattccgtgtttgaacggtttgtgaagctgcaacctccgactttttctgaaggtactgacataattaaagctgagcagtggatgagtacaatcacccgtatcctggataatatgggagtgactagaacagagagagtgaattgtgtagctttcatgttacaagatcatgctcgtgtctagtgggatattatgggacagacttgcgacgtcaatgtaatgacttgggatgagtttaagaatctgtttgaagaaaaatttaataatattgttgtgagcacttcacatatggaagattttgtgaagctaactcaggggaaaatgtctgtggctgagtacactctggagtttgatcggctctccaagtttgctggtgatttggtgcccacagatttcaccaggaaacaaaaatatgtgagagaactgaatgccacaatcagttgagacttgaaaattaccactgcacatgacactttgtacaagaaagtggtagagctagacttaattgttgaagaggatgagcagcatgtaacaaaagagcagactggaaaggatgccgccatggcattgaatcctccttcaagtggtaatgtcagtaaggggaccgacggtggtaaccctgatcacaaattgaaggttgatgcttctggatcatcagggggtaacagaaagttttgaggaaacagtggtggccgtgagagccacggatcttcattccgatcttatcctgagtgtccaaaatgtaagaaacaccatcaaggtgaatattgggccaagacttgtttccattgttgcatggtgggccacttcatcgtagattttcctcaagcgaagaaggaggagcctaagaagagtattactcagaacccaggacaactttttaccatgactcaggctgacgcaaatgctagtccgtcagtggtgacatgtcagttatctataaatggttgttcttattctgtattgtttaactcgggagctactcattcctacgtgttgagtagagtaattaaaagtttccataaaccatgtgatatatatgcttcggggtttggtaccctgttaccattaggagaccttatagtatccactaggtggattcgatccttatcttcctggattgacggttgtgaattaaccgccaatctaatagaattgcaattgtctgattttgatataatc

SEQ ID NO: 138517 - DNA, 1219 bp, Cannabis sativa
  modified_base (401)..(411): a, c, t, g, unknown or other
  modified_base (1175)..(1192): a, c, t, g, unknown or other
ataaatgtatattggcttaagtactactcaacagtatcacattgatacgactagagtacgactagcgtaccgagtataggctgatataatggttgatagtattgtactactcaacagtatcacatcggtatgactgaagtatgactaacgtaccgagtatatgctgatattatggtcagtagcactgtcgtacgaatattcttaactcagcaccatgttagacacgtggataggattatagttgggtgtataggcacctgattatattccgggttattgctatgttattgattatacatttcttactgagtttgtcgactcacagatattgtttgcatatggaggtaagggcaaggctaaggttgagtagctgtgagagcgagcggatgaagattgtacannnnnnnnnnnttaggcctagagcgtacggtctttgggacagctgggcatcttttgtatagtcgctaggcaaaaacttttgtactatgcactgtaaaacttttgtaaatattttcgtaacgagatcccagtttgatataagtaaattattttgggtatttataaatagctaaataaagttttaattattcatgatttttaataaactcattgattagcaatgagctgcacaattaagttaaaaagtatgttaacaatcctaaactagtagggtgttacaatatctgccaggttgtctttcaaagatcgtcatgacatgtacaatcatcattagctatcagctcgactcattgttcagtaagcctttattgctttagtagtttatttgattagtatgttataagaaaagcttgatatgaagcatgttagtagcctgatagttgaataggtgtatgtttaaatttcctaaataagcgataattagtaaattattcttgaccgatatctgaccaggctagtcgtggtattttgggctgttctattagaatgaacgccaggcgaaatgcgagaagccaaaaggaatgttcggattcagtggcggtaagggatttcagatttccctgaatgtacgtggccaaggcagggcacgcggttggggagatgttaagctgccacaggctgcccaggaatgggaaaatagggttgtagcaatgcaagccaaaatcaacgaacaagaagaggaaatcatatgcttgaggtgttggaaattattttannnnnnnnnnnnnnnnnntcataagtatgttgattaacaccctaa

SEQ ID NO: 138518 - DNA, 917 bp, Cannabis sativa
attaacaacaaccaaacccggtcctacttcatctactgccatacaaacctccacaaaaggtagacctattgtcaaaccatcttatttgaaaaactatgtttgtcgtgtggcttctactaaatatcctattgaccaattcttgtcttacattaagcttcacccaacatttcggactgctgtccttgcagcctacacacaaaccgagcctcaaaattataatgaggcttcctaattcaaacattggcttgaagcaatggacaatgaaactcaagcattagaaaaaaaacaatacttggatcatcactaaactcccttctgggcacaaaccaattggttgcaaatgggtgtataaacacaaatatactgaagctggtgaaatcataaggttcaaagcacgacttgtcgccaaaggttatagtcaaaaacctggtattgatttctcccaaacttatgcaccggttgccaagttcaacactctcaaagtttttttggctcttgcagccatcaataaatgggacattcaccaagtcgatatcaataatgcttttcttcatggtgacctccatgaagaggtctacatgaaaatacctcctggttacaatgctcctcccaatacagtttgtaaactgaacaagagcatctatggcctcaaacaagcatctcgacaatggtacgcaaaactaagttccacattaatcgaagatggcttcaaacaatccttatcagacaattcattgtttatcaagaaaacgaattatatattcattgttatcttaatgtacgtcgatgacatgattatagctagcaacaacacacttgccataactcaatttactcaaaaacttgataccaagtttaaactcaaagatttaggcaaacttcgattcttccttggccttgaagttggtagaacttcc

SEQ ID NO: 138519 - DNA, 1545 bp, Cannabis sativa
ttttgaaccccccatcgggcccaatcgggcttttatccctgtcatcccacttttatagtacatcgaaccaccatcgggtgggcatcgaaccccatcggaccaggcaaaaaaaagcagaaaccagaaaaaatacagtattcacagacagcaagcattaaaacacacaaaacagcaaataacaacaacaacccacaaataaagcaacaaaaaaacattctaaactatatataacaacaacaaataagattaaaaaaatgatttatttacccattgatgctttatatgtgggagcttgtagtgttgtagcttgtagtgtggtagcttgtagtattgtagtgtagtgtagtagcttgtagtgtaaaaaatgagtgaagagaagaaaaaaaaattgttgtggtagtggagtagaggtcgagtgggaaaggaagaaggaatgggaagagagagggaggtgatgtaaatgggaagctattttggagataacactaaagttattttttatgctacaaatattggtaagtataagtttaggagaatttttttaaggtaatgtaagcatatttagtcaaattcctatttttaatttcttccctccacctcatcccaatcctatccctatacctaacaagcaacttaaaaaccatccccattaaacttgtcctaagggcatctccaatggtaaatatcaaatctggtattaaatcaacacgaaaataatagaattttaacactaatttttttctattccaataacaacactaaaaattacactaaaattatattttttattattacattattttactatattatgaataaacacaaaatatataaatacaaaaagtttccttattatatatattattaaatattcaaaagtaataaaaatatatttggtgtaatctatagtgtcacactaatattagtgggacactacaaacaatgttatatgtagaataggttttagcagagctagccctcagttaaaagggtccataggcaaaaataattttttaggcccttactataaagataaatgatatttttaaaaattattaaaaaaatatgtatagtttttaaaagataattttttttatttgggcccataaaatgagaggccctaggcgcgggcctagctcccctatgcttagggcccaccctgtttacttggtggggcctaaaatcgagtctcatttgggagatgttgaaagtcttctgctccaccaagaatccatattggaaaggattaaagttttgaatatcggtatggttacccacgatggtgatttctagtgaaaaaagcttcagatgcatgggaatatgagtgtagcagtagcctaagctcgagcaagtggtttcggatgacatgttgaattttcactgtagtacaagaggcaatcactggcgatggtatgcttatgtagtgtagtagtcattatagttatcgtgtcacaaccgaaagccatgaacttgttctcagtgtttgagaacgtcatgtagttattcaatgtgatgtttttaggctcagagctttctaccaaaccc

SEQ ID NO: 138520 - DNA, 1349 bp, Cannabis sativa
aatgttctttcatttcgtacttgatatggtcatccgacctggtacttttattggtagtattttcttaagtgtttcccgttccaataccttggtactaaaacaagttgcatctcttcgtcatacttgcccaaattgtatgcccctgattctagaacttcgaccacttgatatgatccttcccagttcaatacgagtacacctgtcgtactgtctttagtgttcaaaaatactcttcttaggaccataactcctataaaaacttttcgtgctctcacttatttgttaaaataccgagctactttttgctgatgggctatcagtttcaagtttgctacggttcgcttttcttcaactttatcaagtgactctaggaggagtacatgattggccttttagctatatgttaatcttctgtgggatggcagttcgagttctgcgggcagcatagcttcatatctatatgtcatgaaaaatggagtctgtccggtcgctgttttctcagttgtgcggtatgaccatagaacttcaggaagttcctccggccaatttcctttagcatcttcaagtttcttctttagggtatccttgagtgtcttgttgactgcttcaacttgaccatttgcttggggctgtgccactgctgagaaactttttatgatcccatggtttgcatagaaatcagtgaaggactgattgtcaaattattttccattgtccgagactatcttgtatggtaatctgaaccgacaaattatgtttttcacaatgaattcttgcacttttttggacttaatggttgccaatggctcagcttccgtccacttggtaaaataatcaactgcaaccactgcgtactgcactccgcctttgcctttgggtaattgttcgatcaggtcaattccccaaatggcgaaaggccaaggactttgcatctgagttagtttgttgggcggtgcccgaggtatcttcaaaaatctctggcatttatcacatttcttaacataggccttggagtcttcaatcatggttggctagaaataaccttgcgttagaatttgcttggacaaactctacccagctgcatggttgccgtagaatccatcatgcacttctgataaaagtcgtgcaacttcttcttgtgtgacacaccagagtaacggcatggagaatcctcttctatacataactccctctacaatgatgtaccgtgcaacctttctcctcattttttgagcttcgtttctgttatttgggagttccccattgttgaggtaggctgctattgacgtcatccagtttggggatgtatcaatctgttagaaataattggggtcacaattgtatatata

SEQ ID NO: 138521 - DNA, 1169 bp, Cannabis sativa
attgttttattttattatagtttgatgcatttacatattatatatacacattcataaaataatacaagttttttaatataacttattaccgtattagtaacacaaataatttaaacaaatttaaaaaaatttattttacattatttatttaactacgaaagttttattcttaaattatatgatatttgatacaatactctaatttttttagttttcaaataattataaaaatttaaaaacttattttttttaaaaaaaaatgaagttcggtttcgtcggtttaaaccgaccaaaccgtggattaaaacggtcagctttgtttacatttgtataatggtcagtcagtttttcggattataaccatgaaaatcgaaaaccgaattttagattttttttgtgtaaaaaaccgaccaaaccgactgttgctcacccctaatgaaaaatacatatttttaatagaaaaatccatgaataatattacacaaacagaaaatcaacatacaaaaataaatcctatctagttatattttgctttattattatcttaataatcttgaaaaaatattagaagcttataactagattgaaataaaaattacaaaaattaaacatacttgacatgttcttcaaaatataaaagtggtagaaagaaaatagtaaaaagaaaatggtagtagtaaagaattggtgtgaaaatgagagagtttagggggtaaaagagaagtggaatgaagagggaagagtgtgtgggtgaagatgtgtttcaaaatagttttacaacactctacttattagacaaatacatgtattgatagattataatttttattctttaggtataatgtagccaagttagttttacttgaatactaatttggttcttatactaggaagtaagaaagttctatcatgaatatggatggatatattattatattaatacaatataaatagagtaatttttttcaatatatataaactttcatttaaagtaatttttcccatcgattactatccgatacccatctgttggaagaaggaggttctgagaggcacagaaatagctagaactaagggcccgtttggttggaggtaatgaaagcaatggaataggaataggaataagaataggaatggtaatggaatggaataagaataggaataggatt

SEQ ID NO: 138522 - DNA, 1824 bp, Cannabis sativa
  modified_base (327)..(332): a, c, t, g, unknown or other
  modified_base (1114)..(1118): a, c, t, g, unknown or other
  modified_base (1308)..(1310): a, c, t, g, unknown or other
acataaactcatttttaccatccttctttgctaagtgagttcagagcaaaaagagaggtttttggcttcaagtttgctgaagtgccttcaccgaaactactcgttggcttgacgttgcttaaatccagatatctgactcttgagtaagttcccaatttcttttatgcttatttttgcatgtttactttttgaattcaccttcgactttgctgtagaaaatacgttggaatccctaggtttagaaactctgtgattctcttttgtcatggcttcttgcgattttacaatccataatgcttttttctgaactgcataatgcctgtcttnnnnnntgcttattctaagcttcatgaaatgtttgccctaactcgagaaaatttcaaacttcctgagttttgacttttctttgaacattcttattcattaatctgttgagtactcctggcggcatatttgcttgtttatcgctcgatataccgaccaaaaactcatcttgcgtgttgtcttttgtagatgaacctaggtgagttttgggatagcaagcatcaaattgaccaggacttgcttcaacttttgcatgaggaccatcctcgtctctgttctagcccaccttcttctagtgaaggacattttccctcaaatcttttatccagtcatagaatgatggctcgtacgtagaagacaacgcgtacggccgacgcatttgatcctcaagtggctcagcatgccactttgcccagcgccgaacaggatctagccgtctaggaggagggcgatcatgaaggggacactgaggtctaggagattgaggagcaggacaacgcacgtcctagcagtccctctgaggcggaggaagaggaggaggttgaacccccaaactacggggggtacaatgaggctggggagccagttgatgctaacggagacgtcctagttaagggcatggactacgtcagtgaggagcttacggctacagttcctcatagaaggcaaggttccttgggtgccaggtgggtgattcctccgtccagggttactgaggcgtgtcttaggactcttgaccaaggtggctacctgggcaaattggactgctacattcccgcccacaataatnnnnncacaaaccctgaaaaggggatgtgtgcctggtcgagcgctcatgcccagcaaggggcactgatacctttgcaccaatactttaagaatgtggcggacttcttcggcctctgcctggcccagttcactcctaagggcattaagtatatgtttgccctcttcctcctttatgcctcccagaagtgggatatnnnttctccccacgaggttagctggttctttgatttgaagtctactcctaagcaaggcaggtcggggtacttctatttctctcaaccagacttcaagtggctgacggccaccgaggattcggccatcaacaaaattgggcgttttgtacatgagtacttcatggtggatggcgcaggcatcacctgtactcggttccaacatattccaacatatcatcaccctccctcactcttactcttagggatagagctcaaaagcttgctcgactgccgagggaacaccagaatatcattcagttgacctccgaggataactttgtgaggtacgggctctatccgaaggatttcatccctaagcgagtgagggagaggaataggaaatctggtgctggacgggctgaacgagctcataaggagaatgaactcattcaacttacgcgtgaagcgaagttgaaaggaggtgcaagggccaagcaatatgctcaggagcccttgaatcctgaagatgaagctaagg

SEQ ID NO: 138523 - DNA, 529 bp, Cannabis sativa
  modified_base (29)..(36): a, c, t, g, unknown or other
acaaagaataataaaatatttttgtcaannnnnnnngccaaaaatggaattaacaattataatcatgtctttcaatcccaaaatattgtgtactattgctgtcatggagtggaaagcttcctcacgatatatattgccttctgatcttagtgaatattgcatgaatatcacttaaatattgtatggaagaagaaaagaaaaaattagattgaaaatttgagactaaaataccaaaatgcaagaccaaaaggaaacagcacaagagatacttcatgaatattaaaattattatcaagatgtagctaaatgctggctagctaatgcattagattgaaaatatcaatgtaaatattgcatgacatttactaaattatgtgccatttctggtctaccattattatattttctcattgaatcaaattcatggttcgcttatacgtcaaaaaaaaaaattcatggttctctgaaaaaacgattgagaagtaggggtgtgcagaaagtcatccaatccaatcccaaccgaccgatc

SEQ ID NO: 138524 - DNA, 842 bp, Cannabis sativa
  modified_base (216)..(221): a, c, t, g, unknown or other
gataaaggatgtggaagacaggtcaatatcactcaagctacaagaagagccaaaatccacgtctaacaaattggaagaaattaatttatcagaaaatcccgaagagaaaaaacttgtgttcatttttgttgacttacctgtagctatacgagctgaattgatggagctattatacaaatatcgaaatgtgtttgcttggacatacgaagatatgcnnnnnntagatcctaaactagtcactcacaaaagcacactacaggaagcgaaactagtaaagcaaacctcaaggaatcacaggccagaggtacaacttcaaatcaaggcagaaattgaaaaattactgaaagcaagatttatttgcacatacaagcattcgatatggttggctgacatagtgctagtaaagaaaaagaatggaaaaatagaatatgtgttgatcattgagatcttgacaaagcttgtccaaaggacgactttccattgccaaatcttgatactttaattgacgcaacaacaaattgtgagatgttttctttcatggatgggtttagtagatataaccaaattagatgtctccagaagatgcagagaaaacaacgttctgaaccccatccagaaacttctactacattgtcatgccatttggtctgtaaaatgctggagccacctatcaaatagcaatgacgacaatattccatgacatgatacatgggaacgtagaagtgtatgttgatcatatcgtcgtcaaatctcaaaataaattcaatcacattcgcgatctcgagagagcatttcaaaggtgtgaaagatacaaacttaaaatgaatcctcttaaatgtacc

SEQ ID NO: 138525 - DNA, 1322 bp, Cannabis sativa
agccatgagagcgagcagatggagattgtacatgtcggggaggttaggcctagagcgtacggtctttgggacattagcaattattttgtataatcgctaggcgacaaacttttgtatatgcatagtgaaacttttgtaaataattttataaataggatcccagttttatataaatatggtatttttatgtttccaattaattaagcaaaatttaaattaatcacgattttcaacaaactcgttgattagcaacgagctacacagttaagtttaaaatcacgttaacatgcctaaaatagttagggtgttacaccaatgatcttccattatgacatccagtgagcaggtgtggttgttgacatattttctaaccttgaaagtttttgtttattttaattttgaagcacgtagaaactagttatatttttcatccacacaagtaaccatgtactcccttggtttggatctctttgttctgatttagaagttctttatcattgcataaaaatattattgtttttagtatgtccttgtcactgtatatttacccttctttgatttcaaggaccatgtaatctgttatgatctccttttcttcatctcttctttttttagttgcttcatttattttctttataataaaatttgtaacttctggagctagttgaaacatgtttggagagcttgttatctgattatactcacttgaattctatccttcattattagattactagttgtatggtacgttgtgtatttgtagaatgaattcttcctctgtcttacttggtccttgcattggttgttcaaaagaaggattttctattatttatatagttatctcttctatagttgtgatgcacaatggagaatcagttactccagcctgtatctttctgagctcagtagttttattggtgttgttctcggtgatatctgatatgatatgtctatgttattgtttgtaatatcccgacaagcctaatggtaataattagggtttctatttatattatgggttaatcagataataagtgggattatgatcctactaatctatttcagcataaaattaaaattttctataagtgagtaaataagcgtaatttacatgtgtgaatgtaatatgagctatatgtagaataaaaatattttcaggtttggcaaccttggagactcgattagggggccaaaaatatcataatgggtttaattaataatttcacaggaatattgtgataagttgatagtataagtattggggtaattaagaatatgtgggattcgacttagcgccatagaagtagagatttcttagtggc

SEQ ID NO: 138526 - DNA, 1001 bp, Cannabis sativa
  modified_base (964)..(970): a, c, t, g, unknown or other
ctgcactaatcgcatcttccgagagggccaaatagagaatcagcatctctccagttattggtttcgccaaaactggaggcgttgctagatgcctttttatgttctgaaaggcctcttcgcactcttttgtccactcgaactttttgttgcctcacaacatattgaagaatgacacacacttatcagttgactacgaaataatatgttaagtgcattcattctttcgttacggcttgtacttcctgatgctttatcactgatggcatgtctattaatgccttaattttttcgggattttcttcaatacccctcgcgttaactatgaatcccaaaaaaattcctaaggaaactccaaaggaacatttttttgggtttagcttcatgttatacttctttaatatcttgaaacattccgcgaggtttgtggtatgatccctactttttattgattttaccaacatatcatcgacataaacttccatgttctgcccaatttggtttgcgaacatttcattaactaatcgctgatatattgccctagcattcttcgatccaaacgacatgactttataataatagagtcccatgttggttacaaagcttgtatgttcctgatctgggacatacatttttatctggttatatctagaatatgcgtccataaatgatataagctcgtgcccaacagttgcatccactaattactcgatcctgggtagtggaaaatagtcttttgggcatgccttattcagatcagagaaataaatacaagctctctaagttccgttaggctttgggacgagaacaggattagctgtccactagggataaaataccttgagtattatgttgttaacaaacaacttatccacttcctgttttagtgcgccttgtctctaggaatccgaaggtctccttttctgcctcttcgctgggtagcttatgatggaaattattttaccannnnnnnagatctactcaccagtatgttgattaacacc

SEQ ID NO: 138527 - DNA, 569 bp, Cannabis sativa
atgttgaaataatagagttcattagtttctaacaataaattagacggtaaatagagaaaattacactatatacttgtttaaattgatgccattaatttttactcaatattttaaaatttattatgtttatctctttttttaatcattctactaattttactcttatcactttacaatagcttttattcttctttaatctaaattttgttccaattttttcacaaacatacacatccatttctaaagaacacaaatctattatgtttgaaattatgtcttagttttgtgaggacgtgacgataatttaggtacaatacttataaaagatgtatatttgaattaaattttatttggaggtaaatttagttaatgtataaaaaaaatcggtatttttcaactttttttgggtaaatactattttggaccttgtgttttataaaagttactaattagactcctgatttgttaaataacaaaatttaccttatattttctaaaataataaaattaggaccctagctcaatttttaatgtaaccaactttaagacaatttctaacacgaagagat

SEQ ID NO: 138528 - DNA, 1527 bp, Cannabis sativa
  modified_base (1016)..(1018): a, c, t, g, unknown or other
  modified_base (1348)..(1357): a, c, t, g, unknown or other
acctcgctatctgttatcttggcttgccatactatctatactcagtttgtctatcgtacaatatacgctaagtatttttagtgttgtcgctttctctttcacacagcaaggttgaggcttcgtcatgagcgtatgcactcacatggtttctcatcaatgcataaattagcatttcgtatgtttttgtctcgcaaaaggctattcagccaaccgagttataaacctaccctgcgaattatatttctaacgagttattccatgctaagcgtacttgtcgtttgtgtgtttgagttcttcccagctcgacacgtgtcctcctcttatgtgcttaccgaacttcgggtataataattaccccttaaaaagttctttttaattaaaaagagctttttaatgattaccaagggtattttcgtcacactcctttgtttttggaaagacgcattccctttgattttggcagttgtgaggtttcgaggtacatcaaaattaaatgaccatcttttccacttccacttgaatcacgtccattggatcaaatcttttttgaaatcattatcatgactataaaataaggaaaaggaacaacctttgcaccatttcagaaagtttgagaaatacccttaaacttcttcattaaggatcaccattaaacctgtctgaagatttgcatgcaatccttgtctttgacctttttcatgtgagtttcctctgacttcattttttcaaggtgatccttgcttcgttcgaaggtttgcagatagatttcccaggcgttgccccaagccctaacttcaaacggtaagttatttcttcttcatcatgtttattacatagtgtggattagttgcttgattcgtttgtatcgttatcatctcatctggtttaggtagttttttagggttaaaactattcatactagggtttatgcaatatgtaggttgttttaagatctccaactcattaccttctagtttgattcaattctctccaaggattgggactgctttttgctnnnagcaatgtcccactctggttcaggagtttatcatccaaaagctttagagtttgagtttcctacagaattggccatcccatataaacacaatccctcaaaacccacctcaaaattagagctaaacgatgctagggctagggaacacatagtgagaacccaacaagaagatatttctagtcgccactgacatttcttacaaagaaatatctaaaggcagacgccggctcttgcgagaagcagcctggccagaacaacccagtgtatcctttattcctgtggtaaagcctttgtttttacccaacgtcacaattgcttttgaaccaggtgacnnnnnnnnnnagattatgcctcccaaaccacgtatgtccaaaactcctcaagatcccagcgtcaacttcgagcctgagttaatagaatcgaaggtgcgatctatctcacgctacacatgcgacatgctgaagacctgtggaattgcactcaggaaatcatgtcaggttaggtcagtacga

SEQ ID NO: 138529 - DNA, 815 bp, Cannabis sativa
caaagctacactctaacctccaccattatttctaaaataattcgaacatttttgtcactaaaatacgtaaaataaaatagtaataagagagaacaaaatgaaaaagtatatttcactactctaaaatttgatgccttttacattggatttgggtcctatttatattgctaatttgctcctccaatatggtatttttgtgtaccatttagtggataagtgccacaaaaagctaaggaaaaagggggacaaaatgtcccattggcgtcaggcagagtggggagacattgggtttgacgtggtacttgcgtctgcagaagaagtccactcgccaatgtgtggagctgataatactaacatatatatatgtttggactttggagacttgggccacgtgaaccatattatgggtcttaggccatgttggtgatgttgatgattaaaagatgagattgcattgtctttatggacctattgaaattaggtttctctattttctttttaccacttttcctgaaaaataacataaaattgaagtaaatttagtatttccaataaaaaaaaactaccatttaaattatggaatatttaatttctcttaattttatatgcataattaaaggattaaaatgtacaaatttaagccttaatcacaacccccaactagcttattgctagtctctagcaattcaagcaaaaaataataatgtcaacattatattttcaggtcaagaatttaaaagtggcacaaatatttaagcaaaatgttagtaataagccaataagaactataaagaattaccttgaataaatctaga

SEQ ID NO: 138530 - DNA, 833 bp, Cannabis sativa
ggcgaggtcatcattctaagttctcttggcgatacgtgaggtatatgtgaaaacctttgacacttatcacatttcttgacaaactcatatgtgtccttattaatcgttggcaagtaatatccttgtctaatgatttttttagactgactttgccaacccgcatgatccccacagaagccttcatgaatttctctaatgatttcgtttgcttctgcatacacaccgaagtaggggcattgaataccctcttctatatagtttgccttcgatcattgtgtagcgaggtactgtgtacaatagttttcgcgcctcgtttttgtcatttggaagttgttcgtcgagttaatatttgataataggtgtcatctacgttggagaactatctatcatcttgatgtcttcggttttacagatactaggctcgttcagaatctctaccgaaactagattgagttcatccaggtcattctgcgaggccagttttgctaaggcatttgcattggagttttgttctctcggaatttgtacgattttaaagtaattgaatctttccaagttcttctgaactttctctaaatacctcgccatttttaagcctttggcctggtattccccaaggacctggttcaatatcagctgcgaatcacaatgacaaatgagatttttaactttcaatgcctctgctatctttaagctggcaatcaaggtctcatattcagccttgttattagatgcgtcaaattggaatctcagagcatagtgaaacttaaagtcttatggcaatatttatattaccccagcacccaaaccctgttcgttggatgcgccatcca

SEQ ID NO: 138531 - DNA, 583 bp, Cannabis sativa
aatccttgtgaaataagagattaatgagaattaataaattattatttattggtaaaataaatgataaatcttatttatgacaaaattgagaaatcaattttgaatcttaatatatggcccacacgtgtaggcccattctacacgtgtaaggtgacatataaaggttcatgattaatttagtttacttattttattaagttaaaataatttaaattaaattaagttaattcacttttaattattaattaaatatattattagataattattgaattaaaaagataattattaaaataaaagacctactgatattttgatatgcaattattaaatatttatatttgaatttgaattatgaattcaaataaaattagatatttatcttttattttaaataaaggattaaaggctttctatataacactatttatagatatatagtaggataaatacaacacagtaaataagccaattaatagagaaacaaaccgacaaaatagagagaaaatagaattagattttctaaccctattctctctctctctctctctctcacgtgtcacactttctctctctctctctc

SEQ ID NO: 138532 - DNA, 893 bp, Cannabis sativa
ccgccaccaccatccaaggccacaaaggctggcccctcagtgtgtatatatatatgtgtatatataatattttatttgaaaaaataaaataagataaaaatatgagatattttgttatgtgtattattcttttattttaatatgttaaaataaataatttttcaaaaagtaattttattattttggatatatgtatttatcatttttcaaataaaaagatatcaagatattttattttttaaaattatattttatcataaaaaggatatatataccagataaaaataattttttttttgaaaagtggttagtgattatttttaaaaatatattaaaataatatttttaaaatttgttataaacctataacatttttttaattaattatttattttgaataaatatgatagtatttatatttatatcattatataataaattaactatttttcttaaaactagttataggttgttataacttatttttacaaatattttataatattattttaaactaacctaaatgcatatttatcttgtcttatagttagttaattaaatgttttaaaatttaactatatgttatatattgtatataatagttaattttaaaaattaattaataattaattatttttgaaatattttaaaatattttaaaatatttctcttaaaataattaaataaattctaactatttaattacaattaataaagagaggtttaaatcaatttaacaaaattaattagtaattaaaaatagtgcttctagttacataatggtaaattaatcgtcaaaggaggatggtgtgaaattcctaaagctacatcaaaaccaaaccggccttctcgctcaaacaaagcgccatcaacattaactttgatcttattta

SEQ ID NO: 138533 - DNA, 1940 bp, Cannabis sativa
ggctaaaaatagcctaacatagacaaatatgatataatttctcaattatagagattttattatattatgtgtgccattgactcaaaaatctggagtaaacttctaagccacacccactcactagattggcaagaatgaaatagttgttaagtaattataagcgtgacacaacaaatttatagtagttcactccctgtattgcgactgtaatggagctacgtctatttcgaatttttatttctcatgagatggtattacagaaaaaggcaaagtgtcagaagctccaatttctatagagagaaactagagagagaagctctgaccttgtgattagttttctgaaactgaaaaataagataagggatctctccttttataggtgaaggagacccacaaaaacaggggaaaaataaaaattagatatttttgatcatagatgattatctaatggtgaaaattagcttttgatggtgatagccatttttcagagctggcagggcctgctactggtaacctagagcttatttttttaactcccttgggatgaaatttggtgcagataacttcataattgtagttgaattgtgagacatgacttgatataacattgaaatagcttcgaaatgcaagtggaatcgtatcaatcggatcaatattgagtgagttatgaatgtttttctgaaggtagttcatgacctaacgcccaggttgacatatgacgtcaacctggatgttggataagtgtaaaaacatacaaagaatgtactttaagattcctaagtgatattttgacatcacttattctgcttacatgttctgacaaagctagtcaccagttctcgaagatattattgttctgtagaaatgagagactcgaaactcttcattttcgagtgaatttctcatgttggaaatgagaaatgcgaatttgtgattttaacttttctgacttcatggatcttagttattgtgaaaaactaaacaaccggttggaacaaaatcagaattggataagtataacccaacgcactaggccatttgtcaacctaggcgctgggtactcattcctgagctcctgggatctcgttttgatacttcaaaggttcttgaacatgaggacgaggtctcctaccttattttttgaccattccaaattcattggttgaattaaatttgacatttgagcaattgaaagcagtgcaccaggttaattatcaacctgggcgctgggccctatttctaggggctcgggtttgtagttttctccctgagtttgcttgaatcttcattatttttgttgacaaaaaaaaaatttccaaaaaacttatttgcgaactttattggaaacaacccaagttgacaatatgtcaacctgggcgctaggtccttattatggcccatttgaaagtttcgtttggtcctcaaaaatagttaaatcttaatcttttttgaaaacgaagaagatgctcagaagagttctcgaaaaactccattggaattggcccagtttgacaaaatgtcaacctgggtgctgggccttacttctggtacccaagaagtgttgtttcttcccccaaaaaagtacatattttcctgtttttgttgaagacagagaagatccaaaattcagatcatcgatctgatacttggaaggtgtccagattgataaattgtcaacttgggtgctagggtgcccggacattgggtgctccgagtgctcaaaaatgaacttgcttcgaatctgattctaatgcatcaaatatgtcagtggtatgtatagttgatgtcccaatacaaagtttgaaccattcacagtaagacggtccttgaaactaaaaacctagttaagaatgtcaacttgggcattgggtgaaaccctaggtgcctaagtttgtttctgagttgcaggttcgtgtaatttcagctctcgaggcttggat

SEQ ID NO: 138534 - DNA, 836 bp, Cannabis sativa
atcaataagagtttccttcatgaatgaaagattaacattctccaatgtttagtagtttcaggcagagcctgaacttcttaccaatgacagctttggtaaacatatcagcagggttttcatgagtgtttatcttcttcactttgaccaatttgctagcaataatgtctctaattaagtgtagtttgatgtcaatatgttttgacctctcatgatacataggattcttcatgagatgaatggcactttggttgtcacaatgaatgaacaggttatcagattttatcccaatttctgatgttaaaccctttagccagatggcttctttcacagcctcagtagcagccatgtactcgacttcagtggaggacaaagcaacaaccttctgtagatttgctttccaactaacacagcctccaaacacagtgaaaacaaacccagataatgaccttcgagtgtccagattcccagcatcatcagcatcaacaaaaccagtaacagagtcaccatagttgctgtcatttccaagaaccagacctgtcttaagtgtgcctttaagatatctcagtatccatttcaaacatttctagtgttcttcaccagggtcactaataaatctgctcacaacactcatgctatgagcaagatcaggtcttgtacacaccatagcatacattaagcatccaactccattagcatagggtatgccttccatatgtttcctctcaacatctgtctttggtgattgatcttgagacagtttgaagtgttgagctaagggggtggttacaggtttggcatctttcatgccaagtttgtcaattaccttcttgagatag

SEQ ID NO: 138535 - DNA, 1818 bp, Cannabis sativa
tatctctgtaatctgatcccaaagttatagggatttccttgatgactcacgatgcgaaagttgaatttgctaagtgttggcattctgtgcagatttatcactactcagtttagaggacttcatccgagcgcatgtgtgaggtatcctgctcggctcgtgtcttgcgagaagatacccggagtcgattccccgtgtcaccatcgagtaatgccatgtgaaattgggataacatgttcccccaagcgggacttccaaagttgcgtgtagacttcatccgagctgtctttgcgtttagataggtgacacgtgtcagtcgcgtctgttcgcgactcgatgtgaggctgactaggcgtcccttctgttttcgactaataaatgctctgacgcaattaatgcttcaaaatctgattttctctcaccacgtttgacggttgcacttgattgcttttgatttcccatattcgcttttggggggaaccgaggcatctgaagtttttcgaaatgattacccgttttcaccatttgcctataaataccatcgagcatttgttcacaaactcattttcaccatccttctctactaagcaagttcagagtgaaaagaaaggtttctagcttcaagtttgctgaaggattttcacgagagtcgttcattcagctttgcgtaacctgaactcagaggttcgatccttgagtaagttctcgatttcttttactttgcacatttattttctgaatgcaactttagctatgctatagaaggtatgtagaaaaccctaagtttagaaactctgcaatttttctttgtaacgattcatgcgacttcatcgttcataatgcttgctttttgaactacgtaatgcctgcctttcatcttacttattctaaacttcatgaaatttttgccctaactcaaaaaaatttcaaacttctgagttgtaactttttcgtcgaatatttttattctttaatctgttaagtactccgagtcgacatatttggctatttaatgttcgatatcctgaccaaacactcatctagtgtgttgtcttttatagatgaacccaggtgagttttggggaagcgaacaccaaatcgaccaggatctactttaactcttgcacgaggatcatctcgtctttgttctagtctgccttcttcaagcgacggacattttgattcaaagttcctatccagtcacggaataatggctcgtattaaacagacaatgtgtaaagttgacgcatctgatcctcacgtggcccagcacgtcactttacccagagccgaataggatccacccgtacaggacgagggggatcacgaagtggacgttgaggtctaggagatagaggagttgggcgatgtccgtcttggtagtcctttcgaggaggaggaagaggaggaggttgcacccccaaactttaggggatacaatgaggctgggtaaccagttgatgcagatggtgacgtcctggtcgagggcgtggattatgataatgaggaacttactgccacggttcctcataggaggcaaggtgctttgggcgccaggtgggtgagccctccgtcctaggttactgaggcacgcttacgggatctcgaccagggcggctatctaggcgagttcgattgctatattcccgcctataacaatcgagccacaaaccctgagagggggatgtgtgcctagtcgggtgctcatgctaaacaaggggaatagctgcctttgcactcacactttaggaaggtggcagatttcttccgcctctgtctgacccaatttactcccaagggcatcaagtatctgtttgccct

SEQ ID NO: 138536 - DNA, 1793 bp, Cannabis sativa
actgatacttatacttttagtgtcagttcatagaaccgacacctattctacagtgacaaaaagtcaattattggtgtcggttctaaaaagacatcattgagtattcgtctcgttttataactgacacttaaagtatacatttatgttttttcttttagtgccgattttaaaccgacaccattgagttttgatctcattttataaacgacacttaaagattctttagtgtcggttataaaatgacaccaaaaaacttattaatgtttttttagtatttttcaagttttttagtgtcggttttaaaacgatacagtattattagcaggatgaaaattactattatttgtcaaattccccatttaaattgtaagatttcaaaattaagagaaaatatcaacaaaaattaaatactaaaatccttatactataaaaatatcaacttcacaaagtacttatactgaaatcagttagtataacaaagtactatgtttatactataattaattacaataacaaaagtatatcttacacaaaaaagttccaaagcttcaatgttgcgttggtttagtgagctcgtactgaatgaattccgcccattcatcccgaagtatatagattttgtcgagtgtgtacggggtatcaatgctatactagtataaaagaaagagaagaattctttaagttaattctaaattaataaaaataacttaaaataacaagttaccaaataattgtatataccttagtgtccaagtgatgtgttggatttggcatagtcatgagtccttgaacagtgcttgcattctcgtgaggcaagacttgaaaagcaatctcccgaaagctttgtaaaacctactcttgaaggtaggactattgttcttctccattgtggacttgattatagttttaagataatacaaaatacatataaagagagtaagagacaaaaaatctcttctctagaaagcaaagacactcttttctaaagatatgaatacaattcaaagtgtacgaaagatatacatgaccaagctgctataaggtgtatttataatcaatacaccttattgacagctcacacactgtctgaacaagaccacaactcactagacaattccctaaaatagatcttcaatcaacccagaaattttcatttctgtacatacagaatcgtgagcagttgtgcgactttccttttatgtaaaaggaaagttttgctttggttttcaccttaagaaatctgatcaaacataataagaaaatcacacaagatcaaatttaacacagctagatagatggaaaagggatgtgtcaccaaacttaccctttataccttattttccataaatagaaaagctagacaattttccttccaaatataaaagtcaaatacgcaagatatggaaaccaatttaaatacctcagtcgaatttaaataataaattttaaaatatttttgtcacattaaagatgccaaaaatggaagtaacaactcctcctttggcacttcgattgaccaaaaattttataagaagaaaacctacatcaagtgttagagtcaaaaataatagagtattgaaaatactccccctgcgtgaaagcacactaacacataaataaataactttttaaacgaaaaagttcacatatcacaaataaagcaaacaacaccccctgagtagttgacaacaagacacataaacacttattttcctttttgtctatcaaagaagccaaggacaaaaggaaagtacttctcccccattagaagatcattcacaatcgagaaaaca

SEQ ID NO: 138537 - DNA, 706 bp, Cannabis sativa
  modified_base (86)..(99): a, c, t, g, unknown or other
tataacaatacagaacaaacaaattaacataaataatacaaaatttatccacccatctgatcgcagtacatgtattcgcagaaccnnnnnnnnnnnnnntgaatatttaagatattcaacctcaactaacatgcattgagaattaattatataataagaaaaagttagttaaagtatatacctataaatgcaagctctcaaatacgatcaacacaaaatcatgccgaacctacaacataaataaatacaacgaaattgcaaaaataattatttcattacttataactagttataaaaaatagtaacaagttacttagtcactaaattatacatacatatatatataatcaattatatctcacaccaattcaattttaaaatttttatttctaaactaattaaatcgttccaatgtcattagcattcacaataaatatatatattttatagaatatatacaatacagtatacaaattgtatttacataaaaattaatatacacacaatatttacacacattatatgcacagatattcaataaaatataaaaatacatatctatactatatactgaggtttaaatttttaccttataaccgcattccgacaagcaattccacaaaaaatccgggcactatgcacatacaacacaacaatattactaaaatgaaaaaacccaaaaaataatttacaaaaacaaaaaata

SEQ ID NO: 138538 - DNA, 709 bp, Cannabis sativa
tggtaaaacaaattccaacaatagggtattttgattctgattttatagtatgctaagatagcagaaggtctacatcaggtacatttttctattagtttggaggagctatatcttggaaaagtgtcaaacagacacttacaacttcatccactatggcaacataatttgtagcatgttatgaagcatcaaattagagaatatggttgagaaactttgtcactaggctgcgtattttagagaatgtagaaagaccactcaagatattttgtggcaataaattagcagtgttgtattccaataataataggagctcacccaactcaaagcatcttcacataaagttcctagttgtgaaagaaagagtgcagagtggacagatatccatagagcacattgggacaaactccatgataatggatttgctcacaaaaagattaccacctaaggtcattcatggacacactactactcatataggtgtattattacttgaggatatcatgatttagtgggagtttatattttatttgctttatgtttatttaagacatttatgtatttggttattctgatcaaaaataaagtcttcaatttattcacgctgttttgttatgtttaagtttgatctaactttggtttaaggatgaccaattagaattaggcatgttcggttgacattgcatgtaatttccatgctacacatccatga

SEQ ID NO: 138539 - DNA, 742 bp, Cannabis sativa
ataactaattagattttttagatacttaattatttgaattttattagaaaatatatttaaattgaaaattaattttttgaaattgatattggattaacttaaattagaatattttttgaaattaataattaagtagatcattctaggaaattagttatttagatatcctttaaaaatatatttaagttaaaaatttgttaattttagatgaacttaaattgattttttttttaaattaaggtaattagttcaagataattaatttattatttaattaaattttgaaaattatttaagttgaaaatttagttattttagaacatcttaaattagatattttcagaattttgttttattatatttttttttgtataattttgaaattatatatattatatatatagatttttgaaattaaattaaagtcaaaaattaattttaattaatttttgatcaatttaaattaagtaatttaatttcattattaaaatatatagtgtaaaataaatgattaattaaacatacattattttaaataatgagtattaatcaaaaaggacatttgttctccattgttggtcttatatgattaattgtttgaatgtatcatcgagatgctagacttcatcccccttatagatgattatccattgaagcattaacactgcaagatctcgtatgataagtattttgtaagtttttatttctattagactctcccctacggtgactacttagaaat

SEQ ID NO: 138540 - DNA, 557 bp, Cannabis sativa
acatgtaaacataaatgatttctaatcttctattgacaacaaatcagattgtattgaaatgggttttatttagggcataaaatcccaacaacgaggttatcaaaaattctgattaattaaaattttgcttatttaataaaaaacacaaagtaacatacatataaaattccaggatcccatttacaaaaacatttacaaaagtttaactatacatatacaaaagtctgttgcctagtgactcacaacaaaagccctaatattataaagatcgtacgctccaggcctaaccgtccggacatgtaaaacctccatttgctcgctctcacggctgctcagccttagtcttgcccttacctacacatgcatggaaatagcaactgtgagtcaacagacttggtaagaaaagcataacataaaacataataatatcccggattataatcaggcgcccatacacccaaccatatccctatccccgtgtcccacacggtactggtttagaacttcatacaacaatactatcgaccataatgtcagcctatactcgatatgctagt

SEQ ID NO: 138541 - DNA, 611 bp, Cannabis sativa
tttggtttaagtattgggtacgaggataaataatagctaacctaacggagatttggagatttggagatttggaacgtcggaggaggaatacaaatttctaccagaaattaaagaggttagtgcttttagttttctgtttgtgttttattttttgtgttttgtgaaattttttgtaaatggtatataaatttatataaatctgtgtgtatggttgatagtgtaaatataagtgtatggtttttttttatatatataatatgtatggatatgtgttgtatgttgatatataatatatgtaatatatataatatatatacagtataatatatttagaaatattgtattttgtgtttggtattttgtatattgtattttgtattttgtatattatatatacagtgtatatacagtttatatactgtatatatagtatatatagtatgtatactgtatatatagtatatataaacaacttataaatatgtacaaaattataaaattgatatataattgactatttttaaaaaaatgtagtaaaaaaattagaataaatttttattattggaaaaaatacagtaaaatatggagtatgcatggagtatgcatcggaa

SEQ ID NO: 138542 - DNA, 560 bp, Cannabis sativa
tgttgattccccggacgttccaacttagaatcctatccattgtttaaaggaggtgctccccctcctctagttaatatctcttcatgcatttcttcaatcacccgatcctcttccttctgcaattcatattcttcctcattctgtagggctgtatactgattcgaggtagatgcttcagcaggaacctgctgatttttaagcttccagcccttcaccacttgctgaaacccatctgcatcttccccaggcagtgcattcacttgttgcttcatccctttcaccacccattcttgcttttttgcctccttcttcctacaatcattcgaactatgtcccattcctttgcaatgtttgcacaaaataggcttccactcataattgacaaccacagaaacatcattaccaaactcattctcaaaacagatcagaccaggaaattcttgctccattgaaacttcaataaggattctaggaaaaagtagcttatccctttccctagtaacctcatcaaccataataggttttcctagctgcccaactattttaaacaatgatttctg

SEQ ID NO: 138543 - DNA, 560 bp, Cannabis sativa
atatagcatggcatcaaggaggcaggatcgttatagcttggaatccaaaccgatttattgttgatattatcaaatgcacaagtcaacttatgcatttgaaaataaaaacaatagatggatcttttcatagtttcttgactgttatttatggcttcaatgaaaggaaagatcgattggatttatggaaggatttacagtccctaaagacagctgaaagttggatactaatgggggattttaatgcaatcactggcaaagatgagagagtgggacacaaggtaaaataccaagctgagcatgagtttatagattgcattcaagactgccagcttgaggacatcaaagctactggtaatttttttacctggacaaataaacagaatggccaagacagaattttttcaaagattgatagaattttggccaaccaaaactggttaactacctacccgacagctgaagctttatttctaaatgagggcacctatgatcataccccgggtattctgtctttgtttcccaaatggaagtgtgggaaaaaaccctttaaatatttcagg

SEQ ID NO: 138544 - DNA, 992 bp, Cannabis sativa
ttaaactaagcgggctttacaccccaagttatcgattctcgcagaaacagttcctattgaaacattactgggttagcttcccgagcttgttttcaaaaagttcatttcctttcgggcttcttccttccgaacgaacacttgagccctttcattgaactcagtgatgcttctcactagacgtccttgcaagtcatcccacaactcgccccctgcagttaatggatcagtagagatccccgcctaaagggctgtaagttgtgtgctgtcatctaaatttttaaccctagccgcagccgtgctaaaacgacttaagtacgccttaagtgtttccccaagttgctgctttatattggttagcgaggccgcttcaggttgtctatccctagcagcctaaaattgtttcttgaaatccctggacagctgctcccaggaagttattgaatgatgagtaaacttattaaaccagctactcgctgctccaacaagcgaggtggggaaaaaatacaacgtaaattgttcgtcacattactcgctcacattattgtgttaaagttattcaaatgcaagatcagattagtggttccgtcatatgatgagacatgcaggtttttgaatcccgaaggaaaaggggtattcataatatctgggtgatacgactcaagctcctcatcagagtcgtacccaaatagtttccctaattccccaacttgatacctcctgaacttgtcctccatgttgtttatccacaattggattggatcctcttgctttggaccaagctgttggcgaaggtaacgtttcttccgattcaagtgctctcgcagattcggttgggagtaattgctggcagatcttgtcttactcatagatcgtgtcttattcattgacttcatctttgagtggctcgcggatttactggttcccatactttcttgatcattagctcattgagtactttctcctcttcgagttgatcgactatgggttctcga

SEQ ID NO: 138545 - DNA, 878 bp, Cannabis sativa
agggacgccacgtgtgtgattttataagctagtttattactaattaagaataataaattattaaaactgttataatataaaaaacttaaataaaataaaatactaaaaacggacattataacggcataaaaagtgtattccagggattcctgttgtaaaaggttttgctaatgaaatatatacaacaaccatttaaacacaaaatcaaaatacacaacagatacaaccagctcaaaataacttttggaaactcggcacgcaggccggtgaggtcaatatgtacattgttagagaagactgtcacctcatggctaatctagcttttcttttcctttacctgcaccacatagcacccatgagtcacaaggactcagcaagaaaagtaataataacaatcatatagcttattattcaagtattgtcatttatgccacgaataaacatcagcaaacagatatttggtaatacaaagccattatattaataatagaattcatattcatttaacataaataatatatatatattacctcataaagtaaccgtcttcataacatcacgttacctaatcaggaaagtcgatgctttaatatgataatcctgtattgcattgcctaatcaggcaagcccgtaccataacctagcaaccatatatcgcataactacatcacctaatcaggtgagcctgtgccaaaaacctgcacccatatatcatataattgcattgcctaatcaggtgagcccatgccacattctagcaccaatatatcgcatcgtctaatcaggcgagcccatacctacgcctgtacttatcatatatcactgacgcctgtacttatgcccaatacttcgcaaggaaaattgcatcacctaatcag

SEQ ID NO: 138546 - DNA, 581 bp, Cannabis sativa
tctactacctcatcccctaccaatttccaattgtcttgaaaaaaggcacttccatacccatctggtcccggggcgttatccctatcaatagcaaagatagcatcttctacttccttccttgtgtattcaaccaatagaatataattgtgaatgcttgttagcttaagtcccaaatccacaattgcttgaacaactttccttctagctagtattgtagaccccaaaagcttttggtagtaatctaggaaggcatgctgaactttaattaaataataattatttatataaattatattaatttataatttacataagttttttaataaaaatttactttatttataattaataacatatcatgaaaataattaaaaaataacaaaaaattattaaaatatttaaatgcaaatttttttattttcaaccactcttattttaaaattatactaattttataattatataaattcattaagattttgtacttattaattaagaataatcacactaaatattcgtataattttttttaatttataattaaaatttttaaactaaacttttttcattttttatttcct

SEQ ID NO: 138547 - DNA, 599 bp, Cannabis sativa
ttttttttttataatattttgatttttctttttctgggattgtatattattctggagttttttttttttttttcaggtctttacaattgcattttaatagagtggtcttgaattcagacttcccaagcaaaggtggtatttcaattgtgtgatacatattttccatttggcaagaggatgctagagccaaggcagcagctagtttgttgtatttatgtttgtaaattctttttcctagtttgttaatgttgattttaggtgaaaaaatggtggatcaaaattgttggtaaatcatttgcactatgtttgtttttgtaatttcaaatagtgtaatttggatcttgtgtaagttttgaatttgtctttaattaattttgattaaagtttttaatttattttatttactgtactttgatttttttttactattaatatatttttttgattgaagtttattttttttagtaaaaaaataaaaaatagatatttcttttaaattgaatatgattatattttacatttatttaatttaaattattattgttatatttaattgtatttgtatataattaatagaaattattatttataatatataa

SEQ ID NO: 138548 - DNA, 674 bp, Cannabis sativa
taatactgaatattataattataatatatatctatttatgtctctcaaatgaaacatttagacgaataaaaaagaaactctatgactgcttataaatacagcaatgatgtcacgtgtaaaggagctcttctctttttctctcggtattaagccaaaaaactgctaaattttagatagagaacttcatcttctctatttctgactcgtgaactaacattattaacgcacaaccacgtaaaatctatagtctccatattatttttcttttctagctctaaatctttatttatttaattagttatcgaaaatctcggtcaacaattatcatttaacaaaatagataaactgattggtaacttttataaaacacaaaacttaaaataatattgacaatttttaaattttaattcatattttaaaaatagaaaataaaataattttagcacacatattttaaaaatacttattactcttttaattaaaaaaataaataaactactaatatttattgcacaaacacatctaaagttttattattattattttacaaaaactttgaatcaaaattatttttaccttgctgaaaaaaaaaaaaaaaagttacttgcggcgaaaatacctaaatttatcttctagttgcagataagtaattttttgacggtaaaaataccttc

SEQ ID NO: 138549 - DNA, 787 bp, Cannabis sativa
ttccttctgataaggaaattacagtagtagtttttgagcttcacccgttgaaagccccggggccagatggattctcgggttgtttttatcgaaaattttggggcatagttgggaaagatgtgtgtgccttagtgaaggattttttcatcagtggagatatgaataaaaagctaaatttcacccatatttgtttgataccgaaaattgaaaatccagagaaggtagagtagtttagacccataagcctatgtaattttgtttacaaaattgtcactaagatcctttctaataggcttagaccattgatggacaaattggtgtctcctgttcaatcgggctttattcctggtcgatggatagcggaatcctctattctgactcaggaactcatccacaagattaagacaaaaaaaggcataggtggcttgatggcgattaaattggatatgcacaaagcatatgataaaatggagtggggattcatttcgaaagtcctgcttgctaatggtttttgcaatagagtggttcacctaattatgcaatgcatttgtactgtgtcttactctgtactccttaatggtagtcccataaaaaagattaccccggagcgtggtttaagacagggtgaccccctctctcctttcatctttatcctttgccaggaagtatcgacgaaactcatatgccaagctgaagagagagggaagatccatggtataaagatttcaaggaatgctccccctatttcacaccttatgtttgccgatgacacaattctctttgctcg

SEQ ID NO: 138550 - DNA, 1703 bp, Cannabis sativa
ccctaatgctaaggcacgctacagtgctttctttgctaatgaaagaatcttctcaaaaaacatgtcaaattaaaacttttatatttaatattaaactttataatttacatagtcatttataaacttcgggatcccgtttctaaacttttatacaagatatacaaaatacaatatccaggtcgcacagtgactacaaaatataaccccagatgtcccgagactgaacactctaggtcgccccgccaccacatgtacaacctcatctcagcccaggctcactcctgttcagctttcgcctttcctttacctatacatggaagcagaactgtgagtcgatagactcagaaagaaaagcatataacatatcatataataccgacttgtatttaggcgcccatacacctatttacaagccttaacagatgagtaagaacgttccatactagggtacaaccactataccacatacactacgtacatacctcattgtacgagtgttggtagggtttttttgaaccccgagtaccactgagtgatataccacacacactttgtactttcctgcacttgtgctagtatcactgtaatatactctttaacaatatacattataccaatgcactctgtaccataaccgtactagtgttggttgtgtaacaaacatataagcatgcatatacacttaacatatacatacactcgcatattgatatcacacattatacacagttcttacctcctttccagattcaagtgtgctggccgacctaaacggaaagtcttgtgctgaatggatgccctaatcacataatgagaccaagtaaattacatattcaaaaccctaatccggaaaacccgaacccacaactctaggtcctgttatactctctaaggattacactaactcaggaaacaaggaaacacccaactatgacattgaaatggacgagaattgagaaaatagaacattcggggaaccctgccaattgccgattttacaggtaaaatctgtaaaccggtttataacagtcctccccaaaaatcccatttcttgctcaaaactccaccaaatgcaactaaactttccagagtacctaaatagggtatatacaacatattacaacccataaatctcagaaaaacatactgaatcaaaacatgccattaaagatcaaagcttgggtttcaaagctcaaggttgctcaaaacaatcccatacaccaaaaccagctactagaagctaaattcaagtcaaattaagcttagaattcgaattacaacataagctaaccctaacagccatatatctcaaaatcactacttgaaatcaaagtaaaatcttcaaaatacaaaaccataggttctagcgttaccttagctccaagtacatctgaattcctagccgaattccaaaaaaatgatcatgatgagcatagtttccttctgctttttgggttggctgagaaaagagagagagaaaggatgagttttcttgatttttctttgattttctctaattgaataaaggttaggaaattaattcctttgctgaaattaaattagtcatgtgtcacttcctagggcagccaccaaaacatttcccttggcaacagactaaaatgcccttaatgcttaactttagcctatttcaaacctaggggtaaaatggtcaaaaaccataaccccgcacaacctcggtattt

SEQ ID NO: 138551 - DNA, 624 bp, Cannabis sativa
ttgaaaaccttagaaattatttaggattgtttatttttgtattttcacttgtcattcctacatgctaagtgcttaatagtttttgaatgtgtatgattttgtattaaaccttacttgatttctatttgttgatatttgtagtacccaatatgactctgaacaaccccatggtgtcactgttgactgacaacaagctttctggagctaactttatcaaatggaaagagaacattaatattgctctcataggtgaaaataccctatttgtgttaactgaagaggctcctgagcagctaggtgagaatgcgaccaaggcagtcaaggaaaagtttgagcattggcagaattctaacaacaaagctcgatactttatgttgtctaacatggttgacactttgaagacaaggtttgcaaatactctcacgactgccgaaatcatgaataagttgactgaactgttcgggatggtgtcagatcaagctcggtttgaggcgaccaacaatttcatcaatgcacggatgaagcctcatcagattgtgtgtgatcacttgctccaaatggcaagttacttctaggaagttgagaatcatggagttattatagatcaggaaactcaagtgagtt

SEQ ID NO: 138552 - DNA, 555 bp, Cannabis sativa
  modified_base (38)..(40): a, c, t, g, unknown or other
tatgttttagtcataagtaacattttgttgtgactaannntcacatttagttacaaaaaaaattatgttgtgactaaaaagttgtcattaaaagtggcagttttttgtagtgttggttggagtgacgtgtaaataaagaaacttatattttatagggtactggccactgatattttatggggaactagcttcatttataaatacaataaaataatctacaaaggacactaaaaataataatttaattaaacgtgtcattgttatcttcacagaattacacaaggctcaagaaatttacatgggtaaaaaaagtagcattaattaaattattgcaatggtgactcgaaattttctatgttgatttctaaggattatctcgttttactcaatgtaatcattccaaagtacacatgcctaatctaaacatttccatggtataaatatgattgacatgtgggattaggtcacccaaatccaaccattataacgttttcttatggagaaagagatgatgatccacaatagaaaattagagttgcagatgaagcataatat

SEQ ID NO: 138553 - DNA, 1145 bp, Cannabis sativa
atacgtgttgttttgctactgcagcagaaagaaaaaactttcattccaaatgttgaagtacttccaagttgattaggatagactttgtgacaatttctatttctttggtagaatgaagtaagttgaccacattgagagtttacaaatgatagtgtgtgtgtgtgtgtgtgtcaaaacacccatgacatgtgtttggtgaaatgcccgaaagaattgaattttcactaacataaagaaataaaacatattctttatattttttcttcttctttaagttgaacttttcatattgttacttgttatttttgttcattttagttttataaattagtcaatttttatttatagatgtttgataattttgttgatatagtgttgtgttaatgttgtttataagttgtttatatgttatttgtgtaaatgctttcaatgattatgttgatatagtgttgcgttagcgttgtttataagatgtttatatgttattttataaatgctttcattttttattttgtttgttttgctattgcagttgaatgcaagaaacttgattttcagtgatgatgtacttcaatgttgatcagaataggtttgtcgtccatttttattcctttagtagaatgaagtgagctgcatacattgaaagtgtacaagaaaagattccaatcttccaagaaagttcaagctattgtgtatgaattagtgattgagaagtgtgcttagttttggttgtgtgctgaagagcactatttttttaagaaactttgtttttgtatatttttttaaaacttttttaattaattttatatgtatttttcacttgatattgaacattataattttatttaatttgtttatatagtttagtacaaaaaaaattattattatatttttaatttatacattaagtatttgtataattatattcttcttttttttttttgagaaaaaagacgataattgttagtagttttttttaactgttgacaatattttgctacgatttaaaattataaaaacaattgtatatgtaatttaagtaacctgcaattttcaactactataatttaacgtacaaacaacgtgaaatcaacatatttaaaaagtaacgaaattaaacaacgtgtttaaaacttgaaaacaac

SEQ ID NO: 138554 - DNA, 805 bp, Cannabis sativa
agttgcagaggcaggcagcaaagattgagcaggaggagcattcgagggggtagaatcggattcttccacccgttttggttgccctaagttctttgttttagccatggtgatctgaaagaagaatgagaaacaaagaagcaagaacacaaagaaataggaatcgggtaggtggtgagaataaatgctaagtaaaaatttgtttaaataaacatgggggagtggaataaaagaggaaattaatttcaaaagaaataacctctagcccacgaacaaaaaagagaaaccgccccaaacttattccaaaattaattttttaacaaaaaataaaaggaaactagaattaccaaatttttttccaaaaatagccaatttaagaaaatctttcaagatcaatgacaaattacaatgaataagatatcaatcttttaaagggaaacatatccaaataaatcagtgtagaataaatgttgaaacttaccaatcaaagcacaaattttcttagcccatgattcaagtcaccaacgcctccctctcttttttatttttttataatttttttttatttttgaacaaccgaaaataatataaagtaaaataaaatatgtacaatagatataaggtaatctaaaccaagcaatttaatcaaaattcatctcaaatgacaataaaataactaattagtatctcaagaacaaatcatacttagtagatgttgaggaaaaagatatgcatgttaataaaaattgtgaaccagaattttttttaatttattttagtagaggagacttacaaacttgtacacact

SEQ ID NO: 138555 - DNA, 597 bp, Cannabis sativa
ttattatgataataacatgtttattgaaacacttacaggatcaagaataagttctattagatttctagttcgtttatttgattactaatcaaaatatgtgtgtcatatcgattttgtggtgtattgagtatagtctagagttaaaagagtttgaactacatataccaataacttcttccatctctaagtgttataaagattctgtggagttttgaatatagtctagagttcaatagatataaaagatctttgaactgcatatattaataattttttccacccctatcaaattaaaagatcttttaatcaaacaaaatcttaataattacttaaaaatgaaaattattcataaatattgaatttaaattctaattgtttatgtggtattatctcttcacaaagattaatatgccatagattttgtatcaataataaaatacaaaacacataaacttgataaatatataaatattatttggttggcatacaagttaaagaatatgaagcttaatttcataaaagcaattcataatgaaaatctctaaaagagaaaattttattaatactctaaataatatcataataaattgtctgcaa

SEQ ID NO: 138556 - DNA, 539 bp, Cannabis sativa
tgatatcattagatatttccttatcctttgcagctagtaaatcatcttccacaattataggaaccccattaacctttgaagatcctatccctgcctcacgttgacccgaagttacctccactatcatcagacccgaccccagcacaccatgattcccctcaaccattgccatcgtcgaccaagacacctcaccacgagccgtggtttttactgcagaatcatcgtccatggcaacattaaactgcttgagccatttagctccaatcatgtggtttctacgtataggtctcactcgcatccattccccatacggcttgattatctgaccctttccaacctcgaaacgctgtggacaaaagctttcagaatgccccataattccacaaataaagcagaaagtggggagatgttcatacttaaagttagtccagaacttgatcctgttagtattgcaaagcttcatacgtctctttaatggtttcgtaacattcaaagtcacacgaacacgaagataatcccaccataagcccatgaaattc

SEQ ID NO: 138557 - DNA, 825 bp, Cannabis sativa
aaaacagtggcccaatcccttcctagttacgcaatgaatgtctttctgttacctgtggagacttgccaggagatggaacaactaatgtgtaagttttggtggcaatcttctactaagaacaataaaggcatacattggaagagttgggacaaacttaccattcacaaatctaaagggggtatgggctttagaaactttagagatttcaatcttagtttattgagtaagcaaggttggcgtctcttatcttttccggaatctttggtaagtagaatttttagagcccggtattacaagaatgggaattttctctcggcggagctaggtggtaacccgagttttgtttggcgcagtattcatgaaactcaagatttggtgcgcaatggggtaagatgtcgcattggtaatgggactaaggtgaacattattcgggatccgtggcttcccgaccctgcaaatccaattgttactttcctctcatccggccttattggataaaaatgttagtgtgttgatggttcctggagagttagcttgggatggagacttggtgcgagatttgtttaacaacagggattctaatttaattcttagcattcccttatcttcaagtcggatatgtgattcctggttttggaacttggaaaagactgggcactttacagttaaatcaacatacagatatttgcaaatgaataaggaagcaggtgttaatttatatagctcaggggtgtggaaactgatttggaaattacgtgttcctcctaaagctaaggatttgttatggcgagcggcttcagattgtcttcccacgaaaacaaggct

SEQ ID NO: 138558 - DNA, 646 bp, Cannabis sativa
gtgagatcaatcgagctagaaatcaaacaataatccaatatattttatgaatatggagaagagtggtgtgaagatgatgatgatctgcatagtagttgttggtcttgtgtttgttccatctactacttttgcaatctctagtgagagagctctgatcagaaacgatcaagtgatcaacagtctagatggaaagatggtgactattatggatcgtgatacccttttcgaggtactattgaaggaaagattgtcacaaaataatcaatgcttgggtaaaggttgtgccccttggagtccttgccaacctggatgtcaatgtgttggagccggtggtattggagtatgcatttaaaattatgaatatctctttatctatcaattgacacctatccctaatacatatatttatatgataaatatatgtattaataatgtcaattgtactttaatgaataataatataatgcatgcatgcattatatgtgttgcttttatgtttacgtacctactaaatagttctatccaacttatcacatatttgtatggatgtaactacttttatcatgtaattatcaatattacgtaaatggtactgttttcttacaatggatattaccattgataattactacaaaaagatatatat

SEQ ID NO: 138559 - DNA, 926 bp, Cannabis sativa
tgtcattctctaaatcttttactttctgatatggctcattgttgtcccaaggctgtatctttttttggtgtggtacaacgaatatactcattattttcaacttctacaaaaaaatagaaagtctttagagatcatgtacctggtctcactgttaagccattattagaaacacgttgggaaagtcgtattgacattattaaagcaataagattccaagctccacaaataaaaggagctttaaaatacttggcaaaaagtaatgaagatgccaaaacaaaaagtgatgctgagactttagcaatatataatattcataattttaagttcttggtgagcatggttatttgatatgatttgttgtttattgttaatactgctagcaagatcctacaaaatagagatatgcaaattgatgttgctatcaaggagttaaagattccactttcattttttcaaaagtatagagaaactggttttgagaatgctttgactaaagctactgagattgcaagtatgatggaagttgaagctatgtttattgaaaaacgaaaagtttgcaggaaaaagcgatttgatgaaagtgtcaatgagggggtgacacaatcagcaacagagtcctttaaaattgactattttcttttcataatcgatcaagctatttcatcattcaaagctaggtatgcatacttctatagtgctttatttaaaattatatttcacttcctaccataataactaataaaaataattattgttcaactaggttcgaacaatttcagaattttggactattgtttgatattgagaaattaaagtttgtagatgatgacactttgaagaatttttgtatcaatcttacaaacttaatgaagcatggtgagatttcagacattgacaatgatgacctataccaagagttatatatg

SEQ ID NO: 138560 - DNA, 736 bp, Cannabis sativa
  modified_base (331)..(339): a, c, t, g, unknown or other
ttggcacgattcccacggcgagcttggccagacggtcaaacttggtagtatattcggtaaccgatatcccctccgtttgcaccaactcagtgaactctttccgcttagcactgcggacagcttcattgtaatatttagagttaaacaaatccttaaattcttcacaggtcataactgtgacatccctagtgagggttattaactcccaccacacgagggcgtcctcctagaactgaaaagtggcacaggtcacctgatcattaccatccactcccataaagtttaaaatacgctcaattactgtgagccactgctcagccttcatcacatnnnnnnnnnccagaaacactggaggtgcctgcttacagaacctttcgtacaacaactccatacggttgccaacaaaaacttgttctgctggcaccgcaggaactacaacggcctgaggaacatgttgaggaggcacgacaggaggactctgctgcctcaacctctgaatcttttcatcctgctgacggatccgatcttgcatttatgcaaatctctactcccaatccgaaggagcttatggtggatttactaaacgaccaccctgtgctctgccacggccacggccgtgaccacggggattctagggatttccctgactgtctccggtctcaaccatgtgaccctgacttcttgtatttcgcggggcgtccatttaataggacttagcctgcgaatccataagcca

SEQ ID NO: 138561 - DNA, 674 bp, Cannabis sativa
  modified_base (26)..(52): a, c, t, g, unknown or other
cttgatttttttataacaaattagannnnnnnnnnnnnnnnnnnnnnnnnnnatagaggttctactgtatatatactaagttattgttatgtgcattacaggtatacttagttatattttttatttttattatgtgtatttttaaaaaattttataaattataaaagaaacttaaaaaaaaaaaaaatataaagtttaagaatattaaaattaaacatactcctaatattagaaaaaaaaaattacaaataatatattaatatttatatatatttattaaactaactctactagtagtgttaaatttaaaataatgttcttttatttttaaagtatattatgttaaaccaataaaaataattaaatagctactttttatatataaagataaaaataacacataagcctaaaaaatctccaatatctaaatataattaaattatttttctctactgttcttttataagttttttatactaccatgtgctacaactacttgtcatcaaacacttattttttttgattttgttgtacaagaagcaaataaaagtgaaaaaagaaacaatacaggattttaaatagcagagtaagtaaaatgctcaaaagggaaggaatttgagtggcgtttggttggaggtagtgaaatggagtgaaaaggaaacaattttcattcc

SEQ ID NO: 138562 - DNA, 1005 bp, Cannabis sativa
gagttactattatgtatatcaaacattatatttatttagaaatcactatcatcaatttaatgatgtgtataatttaaaaggtacatgataacttcataatgttgttgtaatgatcaaatatatataatcatagtatattatttatatttcctcatgtctttctaacaagtggtctaatttattaatagtctattcaacagtttaattatcatgacttgataaattatatatctatatgtacaaccagtacatagataaaaactatatatctaggtacatacaaagatatttaactacttcaagtagtaattatatgtaagacttcttcttcgagaagctttttaaataatcattttgtgattctttatcactatgattatattagattatattgtattgctaacaaattttactataatgttagtaaattatatattcagttttgagaatatgcaaattaaattaaatattaaaaaatgtatatatacatatcttgtaacacaacaatattttaaaactattgatttcaagaaataataatatatgtatatattaatttgcttctaacattaccaatatatgtaaaatttatattctttgaaagagaatttcatgtctattcatccttttcagggaatgatatttaaatattctaaatttacaataaatttgcgatatattaaaatatgtgtacaactcacattctattcaataatcaaatataattttaccttgattgtaaatgtgtccgttttacaggtacgtgaccactattattcacatgatatatagatttcatacagtttgattatgagtgacatttcatcttcttgttgtttcaaatttcaatagtaaataaatttaaaattattgcattcacttctggaaatggtattgaacaagaagaatattattataaattacttaaatacttgttaattcatctataaaaatataagaaattattcggtaatttcttttacaatatttcaaagaatatatgaa

SEQ ID NO: 138563 - DNA, 594 bp, Cannabis sativa
  modified_base (566)..(568): a, c, t, g, unknown or other
ttactgaatagctcctgcttgtcctgactggagtatgaaggcaatcccaaatatcgctcatggcattcagtaataggcatattgagagtatgagcaaagaaattctgtgcagctagagaggtattcggggagaaagacattaccgatttgtcattgttgagtacttgccccgaagccttatggtatatgtcaagggagttcttgatggcaatggcagattgttcattcgattggcaaaataataaactatcatccgcaaatagcaaatgtgacacggtgggagagttgcgtgttagtcgaaggcctgtcaactaaccagcttgttcatttgattgcaataagcgtgagagtccctccgaacaaataagaaataagtatggggaaagaggatccccttgacgtaacccccgcgaaggctgcacattaccaaccatcaccattaagtgagagagagagaaagaactagtggtaatacatctcataatcaatgatgtccatgaatgatcaaatcccatcttaagtgttaattccatttttggcatatttaatgttgggttttatgcccnnnataaaactctttacaatctgattagt

SEQ ID NO: 138564 - DNA, 544 bp, Cannabis sativa
aattgaacctaataaaaaagacaactaattataaactaattatacattaattatacatgcattgcacatgcattgcactgcattgcacgtaacatcaacctaatatatatatatatatatatatatttgagtaagaattaatagctgatagaaattaggtaaataaaaagagaattgagtacatatatatgccatgtaaaagaatgagagaaataattataaatatatatataagagaagacatataggtttagatgaacaatcaagttttattctttgaaggattggattggatggctccaaccaatctaattaataatagatggatccgatatgatatagtaaatattgaatgaaaaaaattagatgaattcgattcaatatagggattcatacattgagttgatccaatccaatccaatgatttattggatcatgttggtttggttttacatatagtattggattggatttgttggagaaatccaacatccaatgtacagattgattggacctggatgggtccaaaaatattagatgtgat

SEQ ID NO: 138565 - DNA, 534 bp, Cannabis sativa
  modified_base (47)..(48): a, c, t, g, unknown or other
  modified_base (133)..(143): a, c, t, g, unknown or other
caacattccaatgttcctatcctgaatttgtctgatacctgctcacnnttcctactgcataacagatgtcaggtttagtgcatagcattgcatacattagactcccacctgcagaagcataaggaacccttcnnnnnnnnnnnatctcttgaggatcagtgggacacgattccttagatagacatatacaaaatatagagggcatagtttcccctttggtgttggtcattgagaatctctctaaaagcttatctatgtaagttgtttgagagagagcaagggatctgttctttcggtttccgataatttgaataccgagcacataggcagcttcacccaaatctttcatttcgacgagaacaccggcgatcacgttttgagcatttataaggtttttttcttagatatttttgtatattttgattttttaatttattctaaggtgattggtgaagtttcataattttttgaatttatttggaattattgtgagttatttagtttatttcataaattaattaggaaaaatactta

SEQ ID NO: 138566 - DNA, 689 bp, Cannabis sativa
  modified_base (655)..(660): a, c, t, g, unknown or other
cctagccacccgacaaccatgaagtcacttcctctcttcatacaatcgaataagagcagacaaaccttctgcatagatgataaacagatacggcgacagtggatctccctgacggatttcctgagatgggataataggccccaaactttctccaccatgaacaatattatacaaaatcgttcgaagacattccataatcatgtcaacccaagctttcacaaagcccatccgtaataaaatagcttgtaagaaagaccattccatcctatcgtaggtcttactcatatcaagttttagagcattacaaccattcttcccctgtttcttacgtctaagataatgtaatatctcaaatgaaacaagaacattatctgtaatgagcctgccaggaataaacgcactctgaaactctgagatgatctttgatagtaagattttgagccgattagccatgactttcgaaatgattttataagatacattgcaaagagaaataagcctcgagatcgcccataatagaaggagacttcttcttcaaaatgagaacaagattagtagcatttagaccccaaggcatgaacttagatcaaaagaaatcctgaatcatcttaacaacatccttacccacgatatgccaacacttctgatagaaagnnnnnntcaatccatcaggcccaggtgacttgtct

SEQ ID NO: 138567 - DNA, 875 bp, Cannabis sativa
ttggaccttttgttcgatgagaataagtcaaagaatgtgacttttgtggatttcagaattgatagtaaagatcgcgggcttcctcaacaagacaatgaccggaattgcagtgtatatgtgatgaagtacatggaggttgtggctaatgaggaagaagtagttgatcaggtatacccctgtttagttagttcagactgtactacccaagtttgattgagattaatgttgtgtaattgaaatttaattccgtgttctactgtcaacttgatcagagttaattacattttgtaagtttttgtttttgtttatgtacttttctacagtttcacccgattgaggcacgtttggaaatcgctgcgaggataataactgatgaacaaaatgaactccgaaccaaagtggttgaagatcgaagggttgtacaaggcagctcatttgcatcatcctcagcccctttgcgtagtccgtcaaagtctccaggcgatcctcagttcagtatggggaagtctcgccacacaaacatgtatcctccctcaaaggcctcccctaggtttcggtctaccaaggctaagatttcatatggtgaatagtccgtaaaaaaacttatgttattattaggttgtgttattattaggttgtgctattattaggttgtttagtttggatttctgaacatttggatttagacatatgtttttattagtttacgtttggaactggttattatgttgacagacttgtgtgtattttagttttcacaacagattaactttcagatagaaccatacttagcaaatctttgtactcattaaagtttaaacttagttctcacaccatattaagtttgacaatgaacccatacttgagaaatattt

SEQ ID NO: 138568 - DNA, 1106 bp, Cannabis sativa
  modified_base (31)..(65): a, c, t, g, unknown or other
atttttggttgcaatttaggttgcagcgctnnnnnnnnnnnnnnnnnnnnnnnnnnnnnnnnnnnaaatacaaaaaaaaaaaatattattttaaagtaaaataaaaaagccccatttatatatatagcatagcaaatattataaaatagttcaaaaattaaaaaaaaaaaatactataaaaaataaccaaatttaaaactgtcatattcaagtaaaaaaacaaaaacaaaaaaacctgtaaattcttcatattaatttattcttcatttggtgaagttatcatttaaaacacttgaagggagcttgcttataaataagataagaggagtaactcaagttaaaaggcttccttgttaacaacattgtagagtacaccaaataatgggccaataggcccagcccacagaaagaaaaggattgaattcgagcctcacattttagaatccaaggatgtcatattggaaagtttagaataatatacatcttttttatctaatttacaataataacattactatatgaaaaaaaaaattgagaaaatagagttgtaacaataaattctatgaaaaaaataatgtaatagtataaaaaaaaaatcaagttgtcaaaactaagtaaaaaaatcgtaatacaaaaatatattaaagagtttatattgttttacttattgcaattaggtcaatattttgttatttattttgttaatttgtagttattttttttgttgttttatagttatttttatattttttgttaagttgttctaggattatttttgagttatttttttattttacagaaacacatgtatttttataattttgaaactttaacataatatttttataaacttagtacagtaaaaatgtaaaaatttctgtatcccaatatttttgtaaactttctcttattttttttaatatttttgtaagttactccaatataaatatatagggtatgattgtgataaacttaaattacacattttttttttttcaatacgatgtgtatatttaagggattattttacaaaaacataaaaacaacaaacaaaaattacaaaaatatggtttcacggaattttacatttttacgatttttttgat

SEQ ID NO: 138569 - DNA, 651 bp, Cannabis sativa
aagagaagtgtgaattttggatgactgaagtcaagttcttgggccatgtacactactagaaaattgggtttcagtgatacaccttgagtaactctaaaactatatagtgacacttcaacgcacgtcactaatgagggtgactggaaagacagtttttagtgacacttcaaatgtgtcactgaacacttttacatttattttttgcgcgtcactataggcgtataaagtcagattttgttagactgaaaaagtaacagccacacacatgaagtgtcactatatccttttattttttttttattttttattaatattttgagagatatagtgacacaaaaagtgccactatacttatttatttattttaataatttttttaatatagggttttatttttttatttttaaaaatatttatttatttatatatttttattgtactgatattaatatttttttttctttgcttatttctgttattggggaaaaatttcaaaacaaccaaataaaaattccaaattccaaattaattattgtaaggtataagcatcattttcattcatcataaataaaaaattcaataaaatttcagagataaacaaatacaatacaaattaaagatctagctaatcccataaaaattaacatatat

SEQ ID NO: 138570 - DNA, 501 bp, Cannabis sativa
tgaaaaatgaaaaataagagaaagttaaaaacctgggttgttgtcgtttgtgagggagaagatgtgtcgtcgttggggagggagaagctgtgtagcttccgtcgctggcgaagattccgtcggtgacttagggaggagatgcccgtcgtcgtcagcgagtaggggagaagatgctgtcgtcgtcaaatcgctgggcagagagcgagtcacagtcgtcgtcgtcaaatctctgggcagcaaagagggatgaaggacagagagagagagagagaggggctgatgagattttagggtttgctttttttttttttttttgaagggaaccccaataatttttaacagcacagcacctttaaaaaaaaaaaaaattacatatttaattttgtgttttttttaaaagaaatttaattttgtgtgaaatgaccaagctagaccatgtaagtacactttcatttacgttttttttaataaacacaccaactactttaaattcaatataat

SEQ ID NO: 138571 - DNA, 681 bp, Cannabis sativa
aaaaaaaagaaaaaagagataaaattatttttaattttttttctgattttaattttttttatattttaaatttattgttttaatatttatattattaatattatgtggactaatgaaattttgcaatgtacactgtggcaatccactttggcacttagcagactaaaatggacggaaggacttcaaagcaaaacgattgtggagtctaggaagtttagcctaatttttcgagtaagaaagttaaaccgtaacaaacataaaaatatagggattttaaccgcaaattacctttaaatttatattaatcacaatcaaatatctttataaatgtagtcttttttgaaaattaggaaacaaaccgctcttcgcgtgcggttgtaataattaagtcataaaactattatattaaaaatttcaaaatttaatattttttatttaattttttttattaataaaaataattattctaataaacttttatttatcttttttctcataaaataaattaatattatgaaaaacaaatcatcatatatcctcaaacgtgaaaaaataaatttatagaaaatttattattatttgatattgactattattatttgatttatttaatattataaagtttaaatttatactatttatatatattacatatataattttgaattattttgttaaaaa

SEQ ID NO: 138572 - DNA, 676 bp, Cannabis sativa
ctacttatctgaaggaagagttagtagtggagcggtaatcaagcgctgcttcaactcgcattgtgcctggtccatgcatcttataagctacgaccatacttccaggctcaccccataaaagtgttaaccgattagcccttgagacaagttttatcaaaaccaaattcttttggaagattgataaaatggtcgattaaactggggcagtttgacataacataccatcctcgaacatccatcaagggctaagctttggttgactccttaatagaaggtataactctagaagaaattccacctgatcagcgaggtgaggaaacctggaggttatacgtgggtggtgcatccaacgagcaaggttcgggtgtagggataatattaatatcgccagaaggctttaagtttcactatgctctaaggttccaatttaacgcatccaataacggggctgagtatgaagccttgattgccggcttaaagatagcagaggcattgaaagtcaaaaatctcatttgtcatagtgactcgcagctgatcgttaactaggtcgtcggggaagaccaggccaaaggtttaaaaatggagaagtatttagagaaagttcagaagaacttggtgttgggttttgtgccctaaataaaacccatttcaatatacaatcagatttactaattaa

SEQ ID NO: 138573 - DNA, 871 bp, Cannabis sativa
  modified_base (169)..(169): a, c, t, g, unknown or other
tagcagcacgggcaaaggaggagtaggtgcctgcacccactcaggagtattcctgaccagttcagacccagccgttggtggtctagactcctaggacttggaagattttggggtagaagagtttgtagcagttagctccttggaaaggtcaatgacctccccagaaggnctcttctccgaggacccctcaccgcccttagacttcttggccggaggtgaggctctagagcttctgcccattctcttccttagagcatcgagcgtctgctgagacatgtctgcacagaacaaaaatagtgtggttagaaaacaaccattagaaaacacaaggcatgaaagtcaagaagctcaaaaaagaattaaaatgcaaggtgtctgcctgcacagagattcagaagtccatcatcacctgacatcgattttatttcagacataagtgggctcccttatgcgaattgcatgttcaaggcctgggcgtggccgggagtttcttcttcctcttcaatggggtcacctgctcagcctcatcctcagcctcagcctcatcatcaggatccaaaggctcttgagcataatgcttggccctggcaccacccttcaacttagcctcccgcttcaattgaatcaactcattctccggatgagttcattcaggccgaccagcaccggacttcctcttcttccccgccacggacttaggagaaaagtcctcagggtaaagcccatgcttcaccagattatcattagaggcaactggatgatattcgtgtcttcctccggcaactgagcaagtttttgagctctatccctaagagcaagggtgaggggaggacggtgataagtcagaacctgctgaaaccgagtccgggtg

SEQ ID NO: 138574 - DNA, 601 bp, Cannabis sativa
agaagatgtaggagttgggatgtttgtgttttacccttatggtggtataatggatgagatttcagaatcagcaattccattccctcatcgagctggaatcatgtatgaaatttggtacatagcttcatgggagaagcaagaagataatgaaaagcatataaactggattcggaatgtttataatttcacgactccttatgtgtcccaaaatccaagaatggcgtatctcaattatagggaccttgatttaggaaaaactaatttcgagagtcctaataattacacacaagcacgtatttggggtgaaaagtattttggtaaaaattttaataggttagtaaaagtaaaaaccaaggttgatcccgataatttctttagaaacgaacaaagcatcccacctcttcccctgcgtcatcattaattatcttaaatagatctatttctcttatcaaattattagtccttataacataaataatgttgggtttttgtgccttaactaaaactctattttaatgttatcttaaattttcacttatcaataaaagaagagaattattgtattgcatgtttaatactcggtccacatgtttgtttcatg

SEQ ID NO: 138575 - DNA, 1803 bp, Cannabis sativa
atcatcataaattaataatttagaattaataactaattttcataattaaactctaattatctgctaattttcaaatttaagctaagcggtttttacaggtacatacctagttggatcataagcatcctcacttttaggtatgtatctagcagaactattggtatcttcattccttctttcttaattttgatctccaccaccatcgtttctccttgaacgtgatgttccagtggtatggggtctttgagatcccattggctctttctcagggcgacgggtagttttctcatgacgatttccatcgttttgattgttatcagccattgaatatggatagatttctttttgtaaagagggatttttctgagttttatcactaaggctctcaatgaaagtaccaaactgttaacgaagatttttgttaacctaaattaaatggcattttagtaatgaatattctacaaaaattaataaataataaaagatacaataactcaagatatttttatgtggttttgtagttaaaatctacatactccaagagtccttattagggatatttattagaatacagaatacactctctaattttgaataataatgattctctatcaaatttgtcgtcctttttttcccatagagtttgtccctatttataggaatataggttggcagttatcttttttaggattgattcatgtataattgttcatgaaatatggacaattcccacgttccatttaaattacatgtgagataaccctaaataactacctaccagttccttagttgtatcctttagatggttattgcttacgtggaaggttatatcttctctgatttgacatatctttcttgtccatcttgataagaaattacgctaagtgttgggaaggttcccacctcgctatatttttttctttttgtgatatttgtaatgcgaggtgatcttctcgttgtatgaaatgtgaggcatcttatgttgatacactcacttcgctcggatggatgaatgtccctttcttttcagtatattctaaggcatgcatatgtctctttaattctcagatcaatagttactattcttgtctcactattgactataaagtcaatgaattttgaatgttatctatttaacctttaattaataaacgagttatttaatatgcatttaatgatgtcattgtatcatttagaattgttttgtattccttctgttggacaggtaataacttctaaagtgtagccaaattttgggtacaacactttgttaatcacatgatcaccaataatacatagaattgtggaacaccctaagtctttgtgtttaacaagacttttatattgaattatagagctgacttgttatgttaaaaataccttttccagaacattggtgtttctttttgtagtacacaactctttcaaaaaaaaattgagtaggcaagtatttgtttaatggaatctaagaaagggatatttatacttacttgtttgaatacctctaaaatgtcatcatactaactacctcttttaatcgggatcaatttttgtgagaatggagcttttagggtgaacgacaaagtttgactcgattcttcaactgagtctttggaatttgaacttcagactgactcttttcattttcttttagtgagtctttgttcatttcagtatcagtttaaggtacataagtgggtttttaaataatttttctatacctaaggatagaaattgatttagcttcttcagtaggtctagatgtacttacctcgtactgactctttggattgggaatgggtt

SEQ ID NO: 138576 - DNA, 633 bp, Cannabis sativa
ttttgagatatttaatatttaattaattagaaaattgaggaatcaaaagacacatatgctctccgtgcacactccttgcgtgtacaaacatttagttcctaaaaaagaaaattttggttcaacaatttaatagttaaatatcaagttaaataatactttatatatggttaaaatattatttttttaataaataaatagattctctcattaattaaaaggtttaattaattaattaatttacttatatatctattctatataaaatgtggctatataacaaaattttttatttatgagaaattattgggtgactttttttaaaaataaaaaaaaataacaaattattagatgttggcaattagttaaacctaaatataattaatccacctaaagtgttgcaattaataataaatttgttttatttttttattaaaaattattttcaaattttgatatttagaattagttaaattttaaatattattttaaattaaatttgaatgttttaacatttaaatattattttaaatatttagaattaatgagtattttcattaattctgaagataaatttaggacgaataataatctttttttttaattactattacaaagtataatagtaatttttat

SEQ ID NO: 138577 - DNA, 692 bp, Cannabis sativa
cacaatttcaggggataattattgtgggaaatcaatctgattataattaactaccctcctatgtaactataaataggagcagaatacactgaaaaattgacgaaaaatcctttagaaaaaaagccctagttttgtatcagacatctaataagatagactcgtggactatgcagaattttaaccgcaaaaccacgtaaaaaaagctttgtgctatttctttttctttcattactattatttctgtgcaactccatcacgaaataggttttgatttagtgaacgaaaatcagcgttaacagtcttatttctattgaatacaccctaacactggcatgttggcagacccataaagaaaaggcttacatatatgtatatttttggagcatgttgctcaaatgggattgttaggaccctatcttgttgagcttagtaggagttttattaatatgtatcaggcatgctagtatcttctatggaatgctaatgacttgtgttttgaacatacataatgatgttgtagtcacttctacttattgttgtcatatgtatccaattatgtgttgtttactgaagtaacgagcacaaaaggagatgaatactcatagtctcaattttgttgtacctcatgcatgtttggtttgattgttaatgattgttattggattaaatgtcttcaaggtcaattcatacat

SEQ ID NO: 138578 - DNA, 755 bp, Cannabis sativa
cagggtcccctcttaacatgtctgccaacacatctgctatttcttcttcgttgttttaaggaagttcaactgcgggctgagaaaaagtctccccgtggaaataccaagggttgtacgaaggttggatcccgctaagaaataaatgaacccttatagtgccaggtgtgtgaaagtttacattcaaacaccgtatacatgggcatcgagctaatccgtcagaattcacgtggttcgttgcaactgcaacaaactcgtcaatgccacttcgaaattctccagagcgtcggtgcgccttcatccaacttcggtcggtagacatcttccactataaagtaattaacaaattttatttaaaacaaacaataaaatgtgcaagtgtcctaatccaccttctcactccattactaaaagggtaaagaatctatcccattgaggtttgtaatatatatatagtacaatctatgctcttaagattattttatttttataaaaatatcggcatcacctccccacagttcttataagttagcaaacttgtaataattaagtttgccgacttacaagaacgtgtaagaagatgatgtaccgaaatatctactaatgaaataatccaataagcaatatagatcatactataagtataaaacacgcctaaactatctatgtggataaacagtcctggataatttggagaagcgtatttaagagtccttacagactcagcctctccgaacgagtctaaagtatttcgtgca

SEQ ID NO: 138579 - DNA, 829 bp, Cannabis sativa
atgttacatataatttatttattacatatatttaatttatatattatattattcataaataatataacaatctccactaaactaaattaaatattatctctttaataacaaatttgcaacttttgtaacataaatttaatcaatcaaaaatattacattaaaatataatatttttctaccttgattgactaaatatacactattatagaagtcttgcttaagtgcattaactaaaatatctttcgactttaattttttttagtgtagttaccaccaaatttaataaatttttagttgtcgtagcattaaatcactattcttttaatacaaattggcaataacccacacccttgctaatgctcacttgagaatgcatgtctcgctcttgtaccgttaatatccatgtgcaaaattctaattcatgaactctctagaaaatacttccaattcttaaaagaggaggcaccgcctctagtctatataggtagaattttagtgtctcactattctttatacacttctaagattaaactccattaaaaaatctttcgattttaaccttcaattttcaccatatgtactcatttatgaatgggacaatttgagtcccaaattcactctattgacttgttattacttattgaacttaagattatatttttactactgttaatatatgttccatcaatgaggaatacaataagagaatttaggtgccatcccaaaaattcatgctttaatcttgtatgaagattaagcgatttgttaactacacacttttgattccaagcgaatcatgctagcaaaatatagtgcccacttttaagta

SEQ ID NO: 138580 - DNA, 1145 bp, Cannabis sativa
aagtcctcatcaagtttcttcttcataaatctttgaggataaggaattggcagtttatacattggaagatcttctttcttcatagacttttcagtaggcttgtcttcaggaatctcttctttggcttctactgtgtcagttgacttgtctcttacaccccatcacgtactttaccaatcctcagtgagatggcattacattgttctttcggattgataactatatcacaaggaaaactattatttttctgcaaagcactcacaacattggccagtcgtcccacttgcacctctatgttcttcatggaatcaatagtattagacaagtgagtctccatgttatctaaccatgtttcattcttgttaaatctcttgttggtctctatcatgaaagtacccagaatttattctaaggacttcttctcttcttgttgttgtgcattaaacccaggaggcggttgcaagacatttttagtgttaccataagaaagattctcatgatttctcaatcctggatggtagtagttaggcattagatttccccagtagttattattataaggtttattggccatatactgtacttgttctatactcatctcaggcccttgtggtgtagatgcagcagcaacattttttacagttgatgtattcttctaataaactaaggctgccacttgattatataaagtaaaaatttgagctgctatatttgtcataggatctacttcatttaaccacgccacctttttgtgagtatttctttcattaggccaattatagctattagtggctatctcctccagtaaattaatggcttcagttgcaggttcagacaataacactcctctagtagtagcatcaataatagtcctagtgggaccattcaacccgttgtagaaaattgaaacttgcatctagctctcatagtcatgttgtgggcaacaacgtaataagtctttgaatcgctcccatgcttcataaagttgctttgaatcaagttgtctgaattgctcaatctcacttctcaactgtgcagactttgatggaggaaagaatttcaccatgaactttctggccattttatcccatgtagttatagaacctggctgcagagattgtaaccaacttcttgctctatccctt

SEQ ID NO: 138581 - DNA, 602 bp, Cannabis sativa
ttcaaagaggaaggataactctaaggagtcatccaaggacaagaaaaagcacaagaagcacgataagtatgtgccaatctacaccatttacactaagcttaatgaaactcgtgaagacatctatctcgcacatgagcttagggttgcattttgtaaacctgagcccatgagccagcgagacatataagagagatgcagccaaattttgcaagtaccacaaagacattgtgcatatgacagatgagtgtcgtcagctgaaggatgagatagaaagcctcatcactcgaggacacttcgagtaatacgtgaaaagacagggcaatggacacaaccagctcaatctgcccaataacctaggcaaccagggattacaacctcctcctcttgaaggagaggatatcctggttatctcgggagacccaaatattgtaggagagagcaataatgcccaaaagaggtatgtgaaggaagtagagaacgagcagtctacctttgctccgaaatcttgcaagaaagcaaagactgaagaacctctgattatattgtcagaggaagatgaaaaagatgtgagatatcctcacgtcaacccattggtaatcacc

SEQ ID NO: 138582 - DNA, 824 bp, Cannabis sativa
  modified_base (400)..(405): a, c, t, g, unknown or other
  modified_base (445)..(450): a, c, t, g, unknown or other
tctgggggtggagaagtgtaaaaattaatccggagtctctaactctaccagtgagactgaatgtaaaagttgcaggaaggatacttattcatcctatgaaaaaatctatacaattttttgcgttgtaccaataatgaattaactactagtgttattttcagactaacacagttgtagtttccaaaaagtaaagaatccagtatccctaaaggagtaaacatatagaaagaaatttcacaatatcaaggattttgtgactaaggagatataatggtagagaaagtttgtattaaatacaatctgtcaaatcccatcacaaagagaatactacatactacacttgatctggatatcaaggtgttgagattatttgaaatgtacttttagttttatattagtnnnnnngggagtttgttggattttgtgcctaaataaaactcatttnnnnnnaatcagatttactaattaataaaatatcataaatcattttatgttccatggttcacatgattatatttaatgtatgaattctattaagtctagaacatatatttattcatgattataaagttgtcaatacaatgtaatataatcatgattatatgtttaaaagtttaagtcccatgattatcagtacactagatttatactgacatgataatcgacgataaggtatacttacaccttggataattgttatgtcctttccaagacattggcaaagtgtggcaatatcagatgtatggagtatacattggatttgaccgatattgatcttggataagatatcataaacttatcgttatatctttctaagtcaatat

SEQ ID NO: 138583 - DNA, 683 bp, Cannabis sativa
aaaattaaatcatgtaaaaacattatagattagtctgtaatgagatttgcacaatctatttaaaattataatcaataaaatcaaaaaacacaaaattaatttcataatgaaattaaataaatcctaaaactttaatctataaattctcttaatttactcaataattttatgcatataaattatcattaagaagagaatttaatgaggaataaaacccttaaagtattaaaatcaatacataaaaatttaacataaaataataacatcattagtatttaatctgataaaattaacatatatcaatcaattattaaataaaattataggttccaaatcatatacaataggcattctaataccacatgttagaaaatcaaataaacccgagatacagatttgcatataatctagaaaaacaataatagatgataataattccgtatacttacttatatctctaatcagaagtagttttatttatctgattatgaaaaagtatacaattgtgatgtgactatatatattaatagagttagactaggtctgctcatcaaatacttcaattaattagaaaaactcacatatatacttcctctaggctttatatgttagacttttatttgggcttacattaaattttattggttttattaaaacttgggttgattggatagttctttgct

SEQ ID NO: 138584 - DNA, 857 bp, Cannabis sativa
ctaaatatcagaagcagtttattttatctgattatcaaaattatataattgtgataggacaatatgtatttataaagttagaaaatgatacataaccctagttggactaggtctatcatcaaaggcttcagttaattaaaaaagctcacacttcagcttcaactaaactttacacacacaaatgctaagttcattaattattaattactaacaatatggactaatacagtaaataactattcaatcaactcatattttgttaaaactaataaaaattaatgtaaacttaaataaaaatctaattacatttgttggaaagagctagctagaatatatatatatagagagactccaaatatcaccactaaccaggcatttcaatatatttttttgtaaggatatttcaatactgtttttatttacattattattgactcttttcagatttggtattgtattgataattgatttgtatgtatatatatatgtacatgataagaaaattattttatagtatactaatgtatttttatctactttgttatttggaataaatttttttagattaaactttttttttatgattgtctatatatattatagttatttaagatatttaaaattttaagaaattttaaaaaatatcacactgaaaaataagattcaaacaatttatttcacacactatattaaataaaagagttacgttcagtattttattgatttaggagcgttgcttgaaaatgttatagctttattgtttaaattttcggaggcagttttgtcccatggggttcgctctaagtttttagcggttcatggttggcaaagcatgctctgcggttagacgatgagct

SEQ ID NO: 138585 - DNA, 796 bp, Cannabis sativa
  modified_base (208)..(209): a, c, t, g, unknown or other
  modified_base (575)..(575): a, c, t, g, unknown or other
tcacattatcttgattactttccactgtgttgacatcacaataaataagaacatcaatgtgaaaaggttttggatgaatttataagtaaaacaagtgatcacatgaaccaaataacacattaaacaagtaataaaataaatctgtttctttattgataaatgaatgttcaagattacattgaaatagggttttatttagggcacaaannccaacaaacttccacttgcactaaaataaaacaatcagtacatttcaattaatcccagattcgttttgtgcttttcaaatgtagtgactgtcaaaattttggtgaatggatcaactaagttgtctttagtatcaactttctccaccagtacatcccctcttcacacatattctaggaacaacactaagttctgtaaagaaatttcttttccgtactagttccttagcagcctcagtggcagctatatattcggcctccatggtagagtttgatattgcaaattgcttcacacttctccaaacaattgctccaaacaatttctttatcttcattttggtgaaagttgtaggttttgattatttcatnaaaccttttgttccaagagtgagaagcctgcttaagtccataaattaacctattgagcttgcaaactttctcttcctatcatggaagcttataaccttctggtttctccatatagattttctcgtcaagatggtgatctatcctcatagtccacaccttctctttgggtataaccctttgacttctccaccaacacctattttcttcttgtagacccattt

SEQ ID NO: 138586 - DNA, 685 bp, Cannabis sativa
ccaacaacatttatgaaagaataagtaccaaacattgaccctggaagataatgcttttcatagctttcccttttaacattaggagcatccagaatctggttatgatagaagtttgcattcgggaaagaacagattgatggatgcattctgtactgagtatttaggagatgtcttgaatggttcagtgagctcaacctttgaaacaaacttcttccaaaactagcttcctcagaaatctgttgaagaaaaaaaaaagcaatgtagataaggaatgatgcattcaaagtaaggatgaaagaaaaaaaaaagagagagaagtaacaattgaaagtgtatacatactttgcttgtaacagtagctggtaactgccactcgtcaccgaaaagaactgcatgctttatacctggaatttgaagaggtatggttgactcacactctttcagttgtgcagcttcatcaatgaccaagacggtcaatggcttgatattcatacggtgaagcttataagaactcgatgcagtggaaaatatcaatgaagctctttgaaaacagaagtctgttattgcttcttcacatctaaaatttggaaatttaagcattttaagggaaccatgaaggtttctcaagatagaaaggcatttatttctgaccgaggacaaggaagagatattgacaaatgaatca

SEQ ID NO: 138587 - DNA, 1307 bp, Cannabis sativa
cttcactcgctacatttttactttcatattgttgttccagctattggtagtgcgggaggtattattttggcctggaaaataggtttcgagtttgaatgcattgcttactcccaaaatcatatctcgggtattgtctattcggatcccctactcatccatggcttttgtcatgtgtatatggtcccccttacttccatgctaataaatccttttgggagagttgtatgaagataggggatagatttggcggtccatggctcatattgggtgacacgaactttgttctgagtgaatctgaacgagttggatctaaaggaagagaccaattcattccggttatttccagtttggtgaattcaaggggtctggtcaacttggccatccagggagactgtctgacctgggataaccaccgcttcggatccaaccacgtcaaatcggccctggataaagggctagcgaatggagcgtggattagtcttttcccaaaggcggctctctgctcttcccagacctcaaattcggatcaccgtcctctgtgcctgttctctgggggtttggaggatacaattcgaaggagttttaagtttgaggaagcctggactagggatgaaaggagtcgactagtggtggactctgcttggaagtctgttagttaccaatgggcgccggcccggatcttcaagaaaattggggctactcgagtcgctctcttacactggaacagatcacaatttggaaaaattgacactctgattcgtgatctggaaaggagactggatcttattcaaaagctcccagtgggctctagatattgggagactgaaataaatttgcggagctctcttaacgaggcccgtgttcggaaggacctgtactggaaacaaagggccagggtctcttggctgaaagaaggtgacaagtgttctaagttcttctttctttctgcctctatcagagggagaagaaatgccattgagtgcattctcaacaaaaataatatgtggatcaataagagacaggatataggcaatgaattcatggaatttttccaaggaattttcacggggctcgagactaacattgagatgaattgcaacgacttaatccatgatagactttctttggagctcattagacgaccctcacgcaaggaaattaaggccactctattttccatgagtaataacaaagcaccggggccagatggaatgtcggtattgttcttcaaacactattggggatctgttgagaatgatttctacgaagcggtcttggattttttccactcaggacgtatgcacaaa

SEQ ID NO: 138588 - DNA, 661 bp, Cannabis sativa
tgaccttttatggaattttgagatcttttttataccattttgcggtatcgacgactcactagtcaactctaagttggttgcctacctacgtatctatctttttataggaatcaagtcaaacatagttccaaaatctttgtgaaaagttaattcactttgaatttttgttgaggtgagtgacctaatttaggaatgctattcaattcattatggctttaaattttagtgcacttttgaattttgaggtaaaattactattttgagatttttgtgaggtaaacaacctctttttcgtgaggtgaatgacatctttaaaattttgtgaggtgaatgacctcttaaataacccaagattaattttgatgaactcatttagaattttatgccattttatatggctttagaattttaccacttttagtgacaaattgagtcttgaaatctttttattgttctttaaaaaacataaaaaaaaaattatttgactgatatgttaattaatttaatataattcctaaaatttaaaaggaaataaataaattaattatttttttatttgataatgtgtaggctaattagtaattttttttttcgaactttgacatatactaaatcgtgccccctaaacttttttggtcgttaaaaattcctccgaactatt

SEQ ID NO: 138589 - DNA, 784 bp, Cannabis sativa
aaaaataaaaaataaagcaaaaaacgtgtgacatagaattagaattattgtttttttaaaaaaaaaaataataaataaaaaataagagaatgaaagaaaataaatatatagattatttaaataaaaaaaagagagaattaaggagagaacaaataaagttaattagagagattttagaccgccacgtcaccggctcatacttcttctttatatatatatactaggatacaaactgcgcttcgcgagcagttatttaaattttttactcacaatattaataaaaattaaataaaagaaaataagtaaaaaaacattgctataatatatcaataatctattaatttatattatgttattatattgatgtataagatttatttaacttatataagacttagggtttaatattatgttattcttaatgtagaaaccttatttaacttatatacttatttttaatctttataaagaaaaaaaaaaaaaaacaccgtatattattttatttccaataatatatatttttagaagttataagaaataaaatattctatagaagactaaagaaatctaaaaaaaatcaaacatgattgataaacactctcgcttataaaattaaattattgttattaccatatctcacttatagtcgtcactatatttaaaacttatatcatcaccgtttctcagtcgtagtttttttttttaaaaaaaatatatatatatcattatatgtgtagtaattttttaacaataattttgttataatataaatatatatattttt

SEQ ID NO: 138590 - DNA, 771 bp, Cannabis sativa
tcaacatgatcaatttaaataacataattttcttattagtcctcaatttcattgatatgatgcttaataaataagtcagtaaaattaaccctacactacttaataaataagtcagtgtctaaataacatgcttaaaaaattaaactactaaaatatcattgtcattaagcaattaaacttaaaagacaataatcacaacaagatatgaactacatgcttcaatttaatcattctcgagaataatataaaacataattaaaagcataaatatccaataataaaaaattattggcccaccaagtagttcataacatcaacaagaaaaatttatataaatgtaatctcaattaatagagctataaactcccactaactcaaagaaacaaaagattacaaaatacctatatcaaaaacacatttattaaaaacaacacgacacttaaccctttggttagaggatctgctaatatcgacttgatcttacaatattctatcacaatatcccctttcttgatcaagtctctaatagtgagaaactttctttctacacgtttggatgcacgactaatcttattattctttaaaaaaaaaacattattattatcataatgaattagtataggagagaaaataaaatcaactagtcgtatctccaaaattaaattcttttaaccagaaggcttgcaaagatgccccataacatgagaaaaatttagtatacatagtaaatgatgtgattaaagtttgtttaacacttttctaagaaatagc

SEQ ID NO: 138591 - DNA, 994 bp, Cannabis sativa
  modified_base (111)..(114): a, c, t, g, unknown or other
aatgtgagatatacactgatcataaaagtctgaaatacttcttcacccaaagagacctgaacatgagatagagacgttgtctagatttggtgaaggattatgattgtgagnnnntttatcaccctggtaaggccaacgttgttgctgatgccttgagtagaaaaggctagggtgagataaatacagtgaaacaaatctcccagcaattagcaaatgagatgacccaagctaaaatcaagttggttgtggggaaattagctaatattaccttgcaatctactcttttggagcgaatcagagaaggatagttgtaagatctagagttagtgaaatcctgagatagggtttcggctgggaagactaataactttgcagtggatgatacggggatgctatgatttataaatcgtgtatgtgtgcctatggatgatgatattaaaagagagatcatgactgagtctcatatgactccttactcggttcatccagggtcaacaaagatgtatcaagaccttaaggtcatgttctggtggctaggcatgaagaatgacattgctgagtatgttgctaagtgtcttacttgttagcaagtgaaggctgaacatcagaggcctgcagggttactgcagccactgaatattccagagtggaaatgggaagacactgctatagactttgtggtgggattgcttagaaccacgggacagtacgactccgtgtgggtcatagtggtcaggtttactaaatcagcccactttttatctgttcgaacgaacttctccattgatcagtatgctgaattatatgttagtgaaattgttcgtcttcatggtgtcccaaagtccattatttcggatagagatccaaaattcacttcaagattctgggagagtctaaatcgagctatgggtactcagttgaagttcagcacagcatttcatcctcagacggatggaaagtccgagaggactattcagatcctagaagacatgct

SEQ ID NO: 138592 - DNA, 554 bp, Cannabis sativa
atgttatgatcttaattctcgtgtacacttacaagatcatacactcctatatgaataggaaatttttcgatatttattaataatttaaacaataattaacgtattcatttataatatattatatttgtatttttgtatttcattatttcataatttcatatattcatatattcaataatatattatccattaattacttgcatttatggcataaatcctaacaaatattggcttaaatgtaaatttacaactgtttttgtctaattaaaaataaagattagtatatttagtagggtttaattcacctcgtgaataaacaagcatataatttcttgttcaccaaaaatacttgagaatgtactttttgttaatgcagattttcattaactaaaataaaatagctttttcgtaataaattcactacaaaaatatatataagtaataaatgatcagacaacactagatatttttgttgggttttgtgccctaaataaaatacatttcaatataattagatttagtaattaataaagatcagaaataatattttatgt

SEQ ID NO: 138593 - DNA, 1510 bp, Cannabis sativa
atatttatatagtattttataaaaacaacatgaaaataataagaaaatcacatgaaaataacagaaaaataatataaaaccaacaacaaaacaacaataaaagaacaagagcacaatataaaaataacataaaaagtaaaaagaccgtatattatgttaatgaaatcttaaaattgttaaaatatttaaaattccgtacaacagtatttttgtaattttttaaaccaaaaatgactagtgtgtatttaaggggctctaatttgaatttaaaatcttaaagtatgttttcaactatatttgtgtagttactttttattggtatatagaattatggtttaatactattttagaccttatgttttgtaaaagttaatgatttaattatttattttgttaaatgacaaattcgatcctgcatttttcaaaatggtaaaaaaaatagtaccctgaactctattttcgataattttttttaatataactaacttgaaggtaatttttagcataaacatatacataaaacgtaaccagtattatcataacacattaaatcatattattattaaatattatattgacaaaaaattagctcaaagtgctatgttttatacaattttaaaaaatattacgtctaatttaaataaaacaaaaaatccaactatatgttgatttaaaagactgaacgataataatatttacttttattgataataatttaattaaattgaattttaatttatttttaataattataatatattttgttattcttaaaataaaataattatttttattattatattttttaatagataattattattattattattattattagaaaaaataaacttcaaatggaattaggaagtagtaaaattaacaacaaaactaagataaaataatatttttactaccaaagcctaaaagctcaagaacaaagcccagtctacaagcccactaaaacccaaggtgacacgtgttccatctgaagtaatctattatagtattataaataaagttgtgaaatattaattaaagaaatttttacatcaaaaatacaaaatgaaatatttattgcactaatatcactacacggctatatcaatttttttactcttattctttattttattactattttaccacatgcacactcattcaaagcatcggtatacgtgctcttatgaccccctatcaatcaaccatccatcgtttctctctttttttcttttttttttttctatttcttttcaattttttttaaaatagtaacatccatagctgaatatttccttctccacgatcctaactctattttttctctttttttttgttcttcaattttatttttttcaactcccattaactgaatctcatgataatcattttctctcttttaatttttctcttaatccatatatagatatgcctgtaacttcttcttcatcaactccttcccctattcaaacaaaaaactctaaaatggagttgaaatctttagctaata

SEQ ID NO: 138594 - DNA, 567 bp, Cannabis sativa
aaatgcgacattatgattttctgcgtttaacgcttgtaaataaaattaatatttttataaaagtatgggcgttacagtttggtatcagagccacaattatatcggtcccgaacatctcacgagttacactcatcggctaaaaagtcttcgcttgttaccaagtaagtctcattttgtatgcttgcattttatgtgtatttgtgttatttccaaatttacattttacttccaaaaaaaaaaaaaaatccttagtaccaatatccaagtttaggtactacccatatgaaataattgtttttaatatcttcatataaatatattttaagaaatttcttagatcaaattttagaacttgattttagttagtaccatatgactcttgaaaaaaaaaatcaaagaaattttttttagtaaaccatataaaaatatgttttattattttttacgtgattataaagattattttgtgaactgttatgttaatagggagaaacttttcttttatagaaaaataattagttgattttatctactaggaatattataaattattcaaatagttaggtt

SEQ ID NO: 138595 - DNA, 561 bp, Cannabis sativa
tgagctatcctggttcgaggagggtccagcgccggtgacgaacgtctgtgtcgtaaattcatgagtgattctaatcactttgtcaaaaaaaataacatttaaaagggtattttttgaaatatgaaattttttttatgtatattaaatgattttttttttcataaaataaaactaaattaaaatattaacatacatatacacacataaatatatacaatgacataaaaacacgttacggatacacatatatatatacgtacacttatactcaaacatacatatatacacatacacatacatacacacatacatacacacatatacacacatatatatacgtatatacacatatacatataccttcacatacacatatacatacatatatacatatatatacatacacctacatacacatacacatacatgcatacatatatacatacacccacatatacatacatacacccacatacacatacatacatacatacatacatacatacatacatacatttatacccacataaatatacatacatattgggttttatgccctaa

SEQ ID NO: 138596 - DNA, 705 bp, Cannabis sativa
agtgtttccttgaacttatctttgagcctaactaagcatttccaatgccagatgccaaccatctcagaattgagatcattgatctaagatcaactaagtaatatttacttagaaagatattacggtaagtttatgatatcttttctatgtgaatagcagtgcaggccaatgtataacaatacatccaatacaagcttattttaccaatgccttgtaaaagacataccaccatcgaagtataagtaaaccacattggtgattatcatataagtggaaatcctgtgtattgataaattgtgggactaaagttgaatcatataatctttattactttccactgtgtagacaacacaataatcataaaaaaataatgtgataagaatttaaataaatttataaatcaaacaaatgatcatgaagcaaacatgtgaactaagcaataaattaaacaagtaataaaataattttattcatttattgataaaaaaatattcaagataacattgaaataaagttttagttagggcacaaaacctaacaaactcctacttgtactaatatgaaacaatcagtacatttcaattaatcctagattctctttatgcttttcaaatgttgtctctgtcaaagtcttggtgaataggtcagctaggttatcttcagtatcaagcttttctacctgtatgtctcctcttgccacatatt

SEQ ID NO: 138597 - DNA, 696 bp, Cannabis sativa
agccacagtgactcacgggatgtaagattacgtatttatagggatgtaaaattagagtgttttacaaggcattgaaaatatgtgattgtgtattgaatgaatatttgattagtgtaatgataaagctattcacggcaagatgctatgatatttttataatgtgtaatacacggttcgtatagacgttatactatatatgcaagctgaatagataatgaatcacgagtatgtatgttatgttctgataagaatacttaagtttttattacttttgatttaatagctattcttgctaagttattgtgactcacaggtgtttcatggtgctggtaaaaagattaaaagttgtgttcagccatgagccagagatcttcctgcagtgtacacatcagtcgtggtgtcttggcttttccgggaagcaagatcaacctattttttttctatgtttggaaatgtaactttatttttgtaatagtaattttgtaacctagtgtaaaagaattttataaacacgggatccccgtattatggcatttagtatgaaagttttattttaacttaatcataagtttttaattaaaccacactttgttttctaaactaatacattacaagaaataagtttgtaaaaacacacacgtggcatcactaagggttagggcgttacactacaaaccaaccttctatgattgatct

SEQ ID NO: 138598 - DNA, 705 bp, Cannabis sativa
ttttataataaatttatcaagagcccctttttgagattgagttaactcctcaattttttttttcttacgcttttcatacccagactcatgttttctattattaggaggcatagtaaaaaaaaaactaatataatatttcaaagaacaattaagagagtaataactaaattaaaagtgaataaaggaaagaatccggtatttgttgctatcacaaattcaatgtcgccaattgaccaatacacaatcaccaagtaaaaaaaaataacaaaccaacaaccaagtgaaagctccaatctgaaaaacaaatatatatatatatatatatatactatagagattagaaaaagagaatacacataaataatatatatacattatgtaacatttatatcatataatatatataaaatatatacatggctttatttatgagaattgatggcagctaaaaactaaaattgatttaaaaaaaaaaatgagaaagggagagaatggtactgattttttttaaaaaaaaataagagaaagaggaagaatgagataaaaatgggcatgtcaattgtgtatttatataataattgtgcataataattgtacataacattaacgttaagggcaactaccaaaaaaaacttttcttattctcaatattaatcaacatccttttatattctcaaaaaaaaaaaaaaaatgggcccctattat

SEQ ID NO: 138599 - DNA, 674 bp, Cannabis sativa
cttgtcatactcgtcaactacaaccccatcaacattataagaacaaattttattctcagctctcctctttttcatgatagaatgaaaatagctagtgttttcatctccaagttttaaccaacaaactttagagttctggtgcaggtaactaatgtactgatttcaggcttctttgaactgagcatgagtctccttttcttttctagctgctgtaggacaaagcgggtttgtggccaaggcttcttgagcttcaatatacctctcacgggcttctttataggtaccagtaacattctcatgtttatttacatagcagttttttaggatatgtttaatcctaaaaagttgttggtgtaaacttttcaaatcagtaatattgtacttattccaagcagtaagcacattctctttgtaaccctctttaagcaaccagtaattgcaaaagcggaaaggtttagtaccacggttactaaccttgatatgctttacaagacaaaaactgtgatctgagagagctccccatctgaaactaacttctgtgttcgggaaacaatctaaccaacttttgttagcgaacactctatccaacttcgaatacacttgactcctctcttcatggttgttagaccaagtaaagaaagagctagaggtcttcaactcttctacctgaccct

SEQ ID NO: 138600 - DNA, 949 bp, Cannabis sativa
  modified_base (782)..(795): a, c, t, g, unknown or other
tagattacattgaaatgaagtttctttattgatgttaaatcattgtatccatcaacattttaagcatagcaatttaaatcaaataaataataggtttattacaaaaaattttaaataaagaattaaataaaaaacatgtaacaaactagaaaagttgtttgtgatatttctatttttaataaataaatattacttaaaaataaatatcataatttttaaatttcaaattagggagttagataatattaaaaatattaaatctaacaatatcttaaaatatctcaattcaaaataaatatccaactaactttcaaatttctagcttatttaaataaattttaatgaattaaataactaataagataaaattatataaaatcttaatttgaaaattaagatatttctaatatcatatttcaaaccttataatttagtaaattaaactaattaaataaatcaaattagaaaattagatatttattgttaggatattatcatttataatgttaaaaaaataaataattataataaaccctaaaatatctcaattttaagtattttcaaataaaaaatttgatattatatgcttaaaattaatttatccactaaaaatatgctaatatattttgcatcattcaaaatatactcacaccatttttctcatccaattttacccctaaacaaatagaaaccaaacatcccatgtctctctctctctctttctctctcgtatctctctattctctctctctctctaggacacacacacacacacacacacnnnnnnnnnnnnnnacacacacacacacacacactataccagtcggaggacgacccatcatcgaaactagtgttcggttgccttacatagaggaaacttgtaaccaaccaaagctctaagaaagtcattcctttaaacaataatgggtatgtaatttctttagtaatt

SEQ ID NO: 138601 - DNA, 756 bp, Cannabis sativa
  modified_base (684)..(697): a, c, t, g, unknown or other
tggggtgatcgttactaagaataaaagacatacaataatacttatttttcaagattctatggcattaaattgctaatgaataaacatctattagggatgatcaaattaaaataagaactatgtagaaccaacaacggagatcgaatgtccttttgattaaagttcattatttaaaataatatatttttagttaatcatttattttaatctatatattttaataataaaaattacttaatataagttggtctaaaattaattttcaagattaatttcaaaaatatttatatgtataattttaaaattaaataaaatataataaaataaatacctgaaatatctaatttaagttgttccagaataactacatttgcaacttatataattttcaaaaaatttcattaaataacaaattaagtatcttgaactaatcaccggaatttaaaaaaaaatcccaatttaaattgatctaaaattaacaacttttcaacttaaatatatttttaaagaatatcttaataactaatttcctagaaaaatttacttaattattaatttaaaaaaaaatattctaatttaagttgatccaaatttaattttcaacttaaatatattttctatgaaaatttaaataactaattatctagaaaagtctaattagttataacttctttatttaattannnnnnnnnnnnnncatatagtttatcttgaattaatttcattaaactcagtgtgtttttcttaaattaattt

SEQ ID NO: 138602 - DNA, 692 bp, Cannabis sativa
  modified_base (38)..(45): a, c, t, g, unknown or other
tatatgtatgtattttgtgttgtattgaatatgtattnnnnnnnnatatattgtgaatgagaaatgtgatataggagagtattttatatagtgtatatgtatattgagtattttaaactaatagttttgttaaatattgtgaatgagaatgagataggagagtattaaaataaatatttagaaagtaatttctaaaaaattagcttagaaacaaaagtttagaaattaactctattttgtatcaatttattttttctattttcaattttattcatgtgtttttatttttttagtagatagtaaatagttagctacatctacttaataagttactaattttcattcatattcatgtatttttattaataactagttactcataaattatataactagtaagtagctaaataaagaaatttgtaattttgtagtatttctttatgttataggttgtaaggtcaatttacaagaatccgacttatttggtgttgatcggtttctaagtagctcgaggtatacatttactaacttttattataaattaattatgaatgcttagtagagtttgaatatcgaagtgaagcagattctacaatatattgtactgtgccggatcgataggtagaatatgcatgttagatgagtttgaatatcttaaatattcatccatagtgaagtaggttctgtgaata

SEQ ID NO: 138603 - DNA, 1028 bp, Cannabis sativa
cattttacataagattaaaataagatcttgttgagcaacctccatgtctttaacatttatagtccttgaacaaatttgcctgaaaaagttgcaaagttcaaaaatggtggtctatatagcgttcggaagaaacttgcgaacaccaacagaaagtaatcgttgcattattacatggtattcgtgtgacttcaatccgatgacatttgttaaattttcatttactttctttttcaaattcgaaaaaaagtcattaggaaatttcacatctctaataaatttacaaaattggagcctattatcaggtttaagcacgtaagatgcatgaggtttcaacagcttccccctctcatcttcataaatccacaaccattctctgactcctagtttcttcaaatcgtgtcttgcattggtagtgtccttggatttatcattttccaggattgtgcccaataaactatcacaaacattcttctcaacatgcacgacatcaatattgtgtttaagaatatttgaacaccaatagtcaagctcgttgaaaaatgtttttttccgccaattatgattttctgcaactcgcctacgcttcacaccaccaaatagctcatgatttctcgggagatggggtgggagttggtttacttgttctaatacttcttcacaagtaaaacgtcttggaggaggtcttctctctttttgtccgtcgatttgagtatcccttctcattcgatggttatttggcaaaaatcttttatgacctatgtaagatgtcttaccaattactcgaatggaagaggtatcttcattgcaagtgggacaagctttgtatccctgaccactccaaccagacaaataattacgattaggaaaataattaactgtccacgaaagagcggcacgcaacttgaagacagtttggttcgacaatctctcatatctactccgttaacccacaactccttcaactcatccaccaagggtcttaaaaatacatctatgtccattcccggtgatttatctccaggaataag

SEQ ID NO: 138604 - DNA, 740 bp, Cannabis sativa
  modified_base (68)..(73): a, c, t, g, unknown or other
tgaatgaaaaatacttttgttactttattgatattgaataatctggattacattgaaatagagttttnnnnnnggcataaaacccaacagttaaaactaacatttctctaatattataatttaattgaataaaatatatttcaaaaactaaaaaatttgaaactttgacatggttagcaaatttgaaacattaactagtttatatctaaattttattattatttttatatcaaaataaaattatttaaaattttaataataaaatattaataataaaatacgtaatatcttatcttcttatcttataattaaaataaataaaataaacaaaaataattaaaaaatttcaaaattaaccattaggctagtttgtgcaaaaatcaaattttcaaattcaaaggctacaaatatctaaagctaattttaaataattaaaaaattataaaaattaattttattctgataattagattttttatttgaaaatttagattttacacaaaattctaccaaaatttgaattttgtttcaatgataaatgatttttgaaagtcaaaatatcacaaaaacaagatttggcatattgcatattgccgagggagaggctgcaatgcagccttgttgaccatgtatagtcggcgtgacatgagcttaagacagcccgtgtgtgagaaacctcgaatagggcttgtcttgtaacgccccgatttcccgaaacgtcacacttactagtccgttta

SEQ ID NO: 138605 - DNA, 688 bp, Cannabis sativa
aaaagtctaccatgatgaaagttcaggagatatgatttggcatatgtcaaagttcgaggggcatagtttagtagtaatcaaagtccgggatgcataatttaataatttagttcatagacacatagacaatcgacaatcaccgaattagtaaaatttaatgaaattagacaaatgtccttaaaccaataatctcaatagtttagaggaaatttataatggccagaaaagtttagggagcatgatttagtacatgttacagttcatgggtaaaaatcttaattaggctatttatttattttaagaggggttagaatgaagaaatttttacataaaaatacaaaaatacactttatttactaaaatactattacaccgtattttaaacttttatacctttttatatactaggttgatgttacgtgcattgcatgtataattagttttctttttaattaggtttaattaggtgatgttaagtacaatatatgtatgtttaattttttttaattaaataatgtatttatttttttaattttttaaatgagatttaagattttaatttttgagattttttttaactattggggcaacattagtgtatatatgcctcctaacaataattagtactttatataatcatgatatatcaagtttgacttaccttacaaatatagtttgacttaaaata

SEQ ID NO: 138606 - DNA, 581 bp, Cannabis sativa
  modified_base (207)..(219): a, c, t, g, unknown or other
gtatttttgtaaaaaaatagcaaaggttagtatatcatgtaaatttccctagtttaattatttaattatagtccaaactgtaaaaactgcataaaccgtaccgaactgcactattttttgtggtgcggttttttagtttcatggtgcggatgcggtttgataaattgaaaaaaccgcatgtacgggttggtttgaaaaaatagtcannnnnnnnnnnnnccgcaccgcgaacacccctatctgtcatcacttaaataaaatttaaaataaaacacattatgctatgtacatgataggagtacataaatttttataaactgccaactcaaacaacccgtccaaactaaatcgagataatcatatgaaaaatacaaaccgaaaaacccgacaaaaatgtaacctgctcaatctttatcttgggcaggttgaaaataacatcaacccgaactaacctgaccaacccaattaagagagggtttatatatatatttttattatatatataatctatatattattgttacgaaaattatgaacaatatgcaagtgcacgtaatcaagtagtaaactcacgcaggtga

SEQ ID NO: 138607 - DNA, 522 bp, Cannabis sativa
atactgcgacaatataaaatgcgaataaaccctttaaagtgcgtctttggagttggctccgagaaattcctcggattcatggttaatcaacgaggaatagaggcaaaccccgcgaaggtcagagcgttggtggagatgccatcaccaactaagccaaaagaagtccaaagccttacaggtaaagtcgccgctttaaatcgctttatatcgcgatcttttggtaaatgcaaagagttttttcagattttaaaaggcaataagaagttccaatggaccaaaaaatgcgaggagacttttcaagccttaaaaacacatttgtggcaactcccaatcctatcaaagcccatgaccggcgaggtcctatccatttacctagcggtgtccgagtatgcgattagttcgctactaatacgcgaagattaaggacgacaatacccggtgtactatgtcagtaaacgcttactagatgctgagacccgctatcctcacatggaaaaattggcattcgccttggtaatatcg

SEQ ID NO: 138608 - DNA, 1055 bp, Cannabis sativa
tggattacctcaggcgtcatagtggcctaagggacagtcacagaggacacaacaagtcctatacctcctccttttcaagggcaacctcctccagcttagattctgcataagaactctcatctcctgagtccatttttggctcacatcaacaaggggttgagcggtctcctccattctaactcgaccccttgttgccaccatgccatgtgtggatcatgcggaggtaccctacacaaattttattttgctctggcaataagtacgaggtaaataagagacctacgcagctatcacctcccctatttaacaccttacactacctacatggaagaaataaggggaggtgagcaacttgacaaagctacaaacatattcaagtcaatggtactcaagggtaccttccaagtaaaatagagtgtgcaaggtcgatcaacgaccaagtactatcttaagtacacttactaagacatatagtaggtcctaagttgtatgattgactataatggactcgctacctagctttatatagagtttccaagagaaaccacgcataaggcagagttgtatattcctccaatgtctttataagaccatagcagaagtcaaaagagggagaaaaactagctacccacttggagccttagccttagccggctaaggttttaggtcctagtggccggctagaccccaagacccactctagtgataggctaggaaccctagttctaggcataggcgggccagcctagggacacaacccctatgctggccagaccccatgaaagccatctatggctggctaggcttcaaacaaagcctcattggctggccatgatctgtgtggattaaaacaggtgttttttcatttcaagaactcaaacatcctcttttctttgttgttcttttgtgactcaaagagccaagaatcacaacaaaggttagattgagttcttttttgtcaagaaatcacacattatctatcctaaggctatcatgcagatcaaaataccgaatggactacaatctaacgtaaaaaaaataaaagcatgttcaaa

SEQ ID NO: 138609 - DNA, 1537 bp, Cannabis sativa
gtaatcttgaagcgggagcatggctccggacatgaggtgggtttggctccaagctccaaaaccaccgtagttgtggttggcatctcttcctctcgaggcagacggtgaaaaaccccagaagcggacggtttgataccagccacggtcacaatcttttccaactagtgggcacaagtcaaggttgagcgaagctcatccgcctcccagccattcgatcgacaagtatagttctcctggacgataggaccctttatcacttcctccagggtagcaagagtaactgcccccttgcgggaagatttggttccagatgcagaagtagacatttagttctgtaaaaggaaaaatccagcaggtagcccataaaccaagccctaatgttaaaagagggaatgggggtcccctaaccgctggaaagaggccccctcaagatgtttgccaaagatggaaattctagagattttcctaggcaaacatcgggtgcaaatatctcaaaagcaacgaaagcagagggaaaatgaaaaacacagaacgtgggaacaaaaactgtctcatatcctaagtaatctttcgacagaggagtcgattgcaaaaatagaagaaaggaagtaataaaacacaaataagaagagggcatatgcaccatgcgaccgttttcgccaaagccatttcccagaaatcaagcacttaaccaaaagttctaccctaacatgcacatgaacaaacaaaaacataaagtacccagaagacttacatgaaggttgaaaaatggaggttggtgttgatcgacggtagaatgcagactgacagcgacggagaaataacaattaaaaatctatggtttctggaattttctctcggaagtgttcttggggtgaaatggcgaagtagtgaaagtaacacagtgaaggaagaaggctggcttttataaaccaggagaggtgcaaggcagctgtgatcaggcgccatggtacagtgggaatcgtaatcgattcgcattctagaaatccaacggttgggatgaatgctcaccagggcggttaaaaacgcttgagtaccttttctaacaccaattaaatgcgtcggatcattaatggacgagaagggaatcgttgcttggaaaaggaaataaatattaatgatgactgacataaatacagcccaggcgcttgaagcacgtgccgctaaaccgatgagccacccggaggcaccaaacaagcctcatttatttcccaccaaacaaggcttgggggtaaatgttacccttcattttgcccaaaatacgtggacctagataaggatgacacatggacctgagaggaccagctttcaaagaaatcaactaagtcttagacaacagaggagcgcctctgggaaggtatctcccagaggagacatgagaaggatccttacgttcccggaggccatggacatactaaggaagctccaggaggtactggactctattgaacaatcacctcgcatttaatgccgcatgggggaagacgtattgaaactaccataaacgatatgacag

SEQ ID NO: 138610 - DNA, 1356 bp, Cannabis sativa
aaaatttaatatacgtgcatcgcacgtagttatttgctagtataaataaatatatgaatttgtaagactatataaataaatacagcatataaacttttttataataacataataatagaaaatttaatcagcattacaatagagttatatttttttttttttgtaaataactcttgttgttgtataagtgcaacagaattttgatcgtgaacaatccaatattataattattattaattaatgaaaatgatacataaattatatagatatatttaatttacccatataacataaaaaaaaaagctgtaaaagttatttcactatttaatgccttttctttttgttaacttatttgacatgtactaaattgtacctcctgaactttcatccatgtccgattgtcattattaaaattgaacaaaagtctttgaatctaacgatctcaatagttcaaagagaatttttaatagcttgaaaaattaaaggaatataatctagtacacgttaaagttcgggggaaaaaattatcaagggctcgtttggtacgccgtataaggatcgtattgtattaaataataaataatactatgtttgcattaagcaatgtattgtattaattattacgactaaattttttaatactatgttgcattatttaatacataataaatgatccatattagcttgtattataatatttacaaataatttggggtcaacaccaatctccgacccggacccggacccggaccccgacctggacccgaacgccggacacgaacctggactccgactccgacccgatactcgggacccggacccggacttggacatgtagttggtgttgggatcaagtgtattaaaaacatattataaatttacacaatcaattaatacaagtcagtaccaaacattgtattgtattcaataatactattacaatacaatacagtactacacaatccaacacaatacaatacaatacattacaatacggcgtaaattgatttttttatcaaaaaaatttaataataatccgatctaaaagtgttatgacaaaattattcacattttctgtatctgttcgtgttaggcattatcttcaagttggttatattaaaaaaaagttgtcaaaaattaagctcaaggtcctatttttaccatttaaaaaaatacagagttcattttgtcattttacaaaacagttagttcaattgataacttttataaaacataaggtctaaaataaatgtatatattttttcaaataattacaaaaaatgtgcaacaaaacacaattttaaaaatgtacacatttgaaaacatatttataaaaattcatacaaattcttaatt

SEQ ID NO: 138611 - DNA, 564 bp, Cannabis sativa
  modified_base (218)..(221): a, c, t, g, unknown or other
aaataattaatttattatgttaattgttggctgaaataaaggttgttatttgcatttcactctcattattcaagatttcaaaacttagaaaattagaaaacttcaagacctctttctctctctttctttcggccaagcttgggagctgctagggctgtgtttctttgcttaattcaagtgatttcaagcaagtttaaagtaattctagtagaggtaannnntgttctagcttcttttctttatttcttggaatttttggaatagtttaatggtctgcatgcttagtttaagttgatgttgttgctgtgattttgttgttgtttctgaagtttaaagcatgttattttgagtagtttagagctagtttgatgaatgtgagttgccttgtttcaagcttggaagtttttactcaaaaatatagttttcaaagaaaaaaaaatgaagaatctgttactgttgtttttgttgatgcttgttgttgatttctgcagtttctacatgcttgattatgtaaatgtaatcaaggtttgatgcatgatagtgttgtttaatcaagtttgagtt

SEQ ID NO: 138612 - DNA, 501 bp, Cannabis sativa
acccatattcttaatttctagtgccacatattcgttatggccataggattagtgtctttctgggctggaatttatacaaagtcacatgatcattttgttaagggtattaactacattataatccaagtgatttttttttttttttttatcacaacacccttaagtgagttttattaggtgcaagacaccattttgacattgatcttttataatcatttctgtaactttgagaaatattcttctttataagggttatttgtggcaaaactccctaaagtagggaggtttttgcaactaacccccaattctaaaaattttgcggtaaaactccctaaactcaagttctattagcacttagccatttccgtcaatttttagctgttaagtgccagattggaatgtccatgcatacacagtgtactcgtggcacaattttattggtccacgtaaataaatattttaaaaaataaaaaataattaaaattaaaaaaaataaaaaaa

SEQ ID NO: 138613 - DNA, 641 bp, Cannabis sativa
gcactgagaacaaatctcagccgaatagtatttgggttccctgaaccaggataataacatctactaaatccaaaagattcgttttattacaatttccagttcacacttaggaatttaatacaatctttacagcaattagtaatgaattaccaacaacaatcaagattcttgattgtacgcacacaatcccttgtgatgcagctaagttcgtcttcgacacttctcttcaacctgaaatcccttcagtctgaactcagcgaaaccaggctctgatctttctgctatagaacatcgtctccaagctatgcaatcagacctgaaaaacaattaacaagcaatacagaataccacacaaactcacacgatataacataactaactcaaaaatgtcaattagctagctaagtcatttacagacaaaattagctatttataggcaatagttcaaccgacctaaccaacaaataaaaccaaccgttaaaacataacagacccactcggactttgacagaaagctggtatgcagttatatcagattagaaacatcagatacgattggacttactattaatataatctgtcaaaataatgacacttacaatatttttatataatactatattaaattttaatttatacta

SEQ ID NO: 138614 - DNA, 1521 bp, Cannabis sativa
aaaatgttcaaagatcagatcggaaaaatatggaagtatacatggatgacatgctcgtcaaatccaggaaggctgggggcatatagatgaccttgacgaatgcttcaagatcctcataaaatacaacatgaaactcaattccttaaagtgctcctttagagtcggctcgggtaagtttcttggtttcattgtcaatgcctaaggtattgaagccaatccagagaaaattcaagccctcctggatatgaaatcgccaataaaactaaagaagttcaaagcttaactggtcggatagccgcagttagtagatttttgtttcaaaatcaacaaacaagtgtgtttttttcttcaacatccttcgaggaaataagaaatttgaatggatggaggaatgcgagaatgcctttcaagaactaaaaagacaacttgcaacacctcctgtactctcaaaacctttggacggagaagaattagaaatatacttagctgttacagaacatgttgtgagtgtcgtgctgatcaaagaagaaaacagcgtccaacatccgatctattacatcagcaaaagacttgttgaagctgaaggacgatattcgctaatagaaaagcttacttactgcctaatcttagcaacaaggaagctaaggccttactttcaaggtcatcctgttcgggtatacactgaccaatcactacgccaaatattacaaaaacccgatgcttctggacggttactcaaatggacagtggaattgggtcaatacgaaataatctttcaaccccgaacagcagtcaaaggacgggctttagcagactttgtagttgagtggaccgacaaagaagaaagcatttcaaaaggcaacccggagccagtacaagagcctcagccgaacaacaatgaagacaaacctacctggaaattacacgtggatgggtcgactacagatcatctatctggtgtagggattgcccttgtcacacctggggggcaacacctacacggggcagtcaaatttggattcgtagcttccaataatgaatcagaatacgaagcctcattgtcagtctaaaacttgctcgggaactacatgttgagcacatcaaaatctgtagtgactcacagttgatagtgaatcatgtgtctagagagtacgaggtccggggggaaaaatgatagcctatttgagcaaaatacatgatctgcttgcacaattcaagagctacaatcttaagcaaattctaagagaagaaaatacaactgctgatgccttagcctgacttgcaagcagcaacatagctgataaggctaatctaatcccaattcaattccttaaagaacccaacatcacctgtacagaagaaattgaaatgattgacgtagctccgaactggatgtcaccaatagcagcctacctcgatactggggaaacttccaaatgacagaaacgaagctcgaaagatgaggagaaaggttgcacggtatatcatcgtagaaggagtcatgtatagaaggggattctc

SEQ ID NO: 138615 - DNA, 527 bp, Cannabis sativa
aaaaatgaagagaggtttccagattaaatttttttttgctcggtttcctttcctttttttttaatgaattcgatttttttttacttgctgatgacacaaaggaaaaaaaaaaaaggaaacgaagtagacaagctttatgaaacaattttggtcaaccaacgagaaacaaaaataaggaaacagatttgtgacacaaatagagaaactagaatttagcaataagaaaattggagtttttttttaaaaaaaattgaatttcaataacaaaaagggaaactaattgacagaaaatttggagacaagaaatcagccaaaaaattaagagttttgaattttcgatttgttttaagaataaaagaaaagcaaagacacgatgtttgacacaagaaaattatcaaaatgtggttctaacagtttttagatttcacaaagaaaaatagaagagatgaagcacgaattgacaagaaaatagaacacaagttaaacaagattatagaacatgaattgaaaagaaaaacacaaaagat

SEQ ID NO: 138616 - DNA, 632 bp, Cannabis sativa
atttgaacttgatatatttgcttgtttgtatttttattcacaactcaaacaattatactttgatcgaatttaaaaatactttgagcatttccattgctcttattttccttaatattgtttaagtagttggtaatctattatgtgcgcgagcagttattgtctgctatgcttttggtttacgagcagttatcagttctgctttgcataaacagttatgacctattttagacaaacttaaacatacttttaataattcatctcgtgaatcactttgtatatttttgattgcccgtgaatagttaagccttctattcacaccttaggttaagtatttttttaaggcatcttggtgcctcgttttaatacattcctataaaatgcgagtcgttaaatattcaaatttgcatgtagcttatcgttgtatttatgagttaaatctcatttacaactgctacttttgactttgcgtcgtccatagatgactttagtcaaccacttaaaaaactttgcaaattttaaaaataaaggtttagggtttgcaatatattatgtattttcaaataatttctagttgatcatacacatatatatatgcccctcaagtaattttaaagaataagactttgtaatta

SEQ ID NO: 138617 - DNA, 844 bp, Cannabis sativa
ggtgaagactatttgctccgagtgaagagttatatagaagcttcaacccgaagacacaaagaacatatacaagttgaggtcggtgttttttatttttgatgtgctttcattagttgagaacaggcacttataagttttgttttctttgtcctgcagcttagcaaaactgatgcaaagttaatgcgaaacgttaatattatggagcagttaaaacttaagctttgctctttgctgtccatgactatcactcaatattattgcctcttgtgaagtcgtacctgagggtttgtattcattaaaaatttataggttgaaactttaactaataattctcttcccctgttttaagatcacattttttcatttattttcgtaatataatatttcctctaaatttttcaaaacaaatatattgatccttttaattttcctcaaaccgagagtaaatgttaaaagtcatatgttgttatgacttatcataaattatttcatcacattaatgataattattatatgagtatgaataaattgagataaacttactgtttattattaataatattgtgtatatcataggtttatatacacaattatgacattcttaacaagtttacttcttaaaacatatcgttacaaacttaccgaatttttaaacaaaaaccactagaacttaaataaaattaatatttacgtggctcgccgcgtaactttcatctagtaatacttatatatagctatatatattgcctatcacactaattttatttatttattttttatacttatatattagggaaaaaaacaggaatattctaaaaatggtaaaatattacaacaatactgt

SEQ ID NO: 138618 - DNA, 865 bp, Cannabis sativa
aataaatggtttagctgaaaaaacattttaaagttttgaaaaaaaaaatatatgtgtatatatataatactgtcacctttatttacacatacaaaaaaaaaaaagttttagctactagctaggccagagaaaaaaacaagaaaagaaaaagcataaaaaacaataaccaaaggtaaatagtttttaatttgagtatgtacatttcaaaaataatataacaattaacggtatttgagacaataaaatgagcaaagagaaattcatcaatattttaaaaatgaagttgataattaaaaataatatacgtaatatttatattaaaataaataacggtatcagtgttattaattttaattttgagtatataattaaaagttctcctatttatttatctaaattttgataaatgtgacgtgacaagtataataacgcgtggcataattaagaatacataagattgagttagtaaagaatatgtaaagtcattatccccaatagacattttgagcatatggggataaaattgagtaactaccttaggggtatgtttcagcaaccacctcttcctagggtgggtatcactacaaaaaaaatagctatttttagtgacaaccttttagtcataacataaattttttgtaattaaatgtgacgcttagttataacaaaaaattatttgtgactaaaatatagtatttagatacaaattatcactaatatagttttagttacaacaagtattgtgactaaaaacacatttaatcacaacaaattttgatttttgtgaataatacgtatctttagggcccgtttggtacgcacgattgtactggactggaatagattggattatgctgaaagtaat

SEQ ID NO: 138619 - DNA, 765 bp, Cannabis sativa
  modified_base (697)..(710): a, c, t, g, unknown or other
gtctaaaagagatacataacctagttgctataaggtgtatttataatcaatatacaccttattgacagctcatatatggtctgaacaagaccacaactcactagaaaaatacctaagaaaatatcttcaatcagcttaggaattttcatttctgtacctacagaattgtgagcagtaagtacgacttttattttatagaaaagaaaagtcttgctttgattttctttacaaaaaatctaatcaaacatttgaggaaactcacaaaagattagatttacaccgttggataaatagaagaataacgagtcatcaaacttaacctttatgccttattttctgtaaatagagcaactagacatattttctttcatatataatccaatcaatataaaaatatggaaaccaaataaacacctcaatcgaaattaatattcagcttatgaaatatttttatcaaattaaagatgccaaaaataaaattacatatgtaaatatataatatttaaacgatataaaggaaaataaaataaagttgatgtatgatgtaatataaatgtgttatataaaataaaaaaaaatagagttttaataaagtattttaaaacataaagcaaaatagctgttgaaagtgcccttataccatagctgctttgatgtgccatagataggcacaaatatagggaaatttacaaaaatnnnnnnnnnnnnnntaacttttacaaaaatactgtcatgcggaaaagttttcaaaaatattgtgttttt

SEQ ID NO: 138620 - DNA, 797 bp, Cannabis sativa
gagattgtctaatgcaggaattgttcgaggattacctaaattaggtaaggagtctttgggaaaatgtggaccatgtcagcttggtaagcaactaaacatttctaataagagtgtccctgatgtgaatacttccaaagttctcgaactcctacacatggacttaatgggtccaatccaggttgaaagcttgaatggtaagaggtatatttttgtgtgtgttgatgatttttctcgattttcttgggtggattttttgagagaaaaatctaatacttttgaggcttttgaatccctgtgtttaaaattgagagttgaaaaagattgtaacattggtaaaattgttcggattaggagtgatcatggaaaaaaatttgaaaatactatatatgatgagttttgtaaatctaacggtatttctcatgaattttctgctcctaaaactcatgaacaaaatggagtggttgaaagaaagaatcgtactctaacagaaacggctaaagtaatgttgaataacaagaagcttacgaggcatctttgggccgaagcaattaacactgcttgtcgtaccatcaacagagtgttcttacgtccaggtactcacaataaaccatatgaaatctggaaggaagaagagattgaagacttgctggaaaagcctgctgacgaggaaaaggaacctgacgaagctgcagaaacttctgtcgaggctgcagtgcaggactctgttgctacagaaacctcaacaacaaaagaattcgagcattcttcaaattcaatcactgatccaattcagaggg

SEQ ID NO: 138621 - DNA, 797 bp, Cannabis sativa
ttagtctttaaaaattacataagaggttgcatacatttgtccggcacaagctcttttacagaatataaaattcgtttttaactattgatagtatttgcggagttggtcagcattctaggccctaggcactgtggttccgtccattctttttagcttataggtaccagagccaatttcattctcaatttcatatggtccttacaaatttggcccaagtacccccactccaggttcttgagtggttggaaagacccgtcttaggactagttcaccaatggttaattttctatctttgaccttggcgttgaagtatttagccacctttctttggtaagctgccattcgcacctaagactcatcccgaagcttgtctatttgatccaacgcttcttgtaataaggctttgttcgttgccggatcatatgtcgcctttctgtgggatgggaacaaggtttctaccgagaccatagcttcacacctgtacaccattgagaatggggagtgtccggttgtagttcttagggtggtccggtaggcccataatactcatggcagttctttaggccagttgttcttgtaggccaacaactttttctttagggtgacttttagtattttgttgacggcttctgcctgtctatttgtttgcggccttgcaaccgcggagaagcttttaacgactctatgttgattgcagaagtttgttaattctttgcagtcaaactgctttccattgtctgagactattttatgaggcaagtcgtatcgacacacgatgtttttgataacaaagtcta

SEQ ID NO: 138622 - DNA, 622 bp, Cannabis sativa
  modified_base (401)..(401): a, c, t, g, unknown or other
atcaaaaggactttcaaggttgtaatgtattggcttaggtaataggtagatgaaaagttatttaggctatattataccataagcacactataaaccatcaagcacacataataaattacatatctcaaattgtgcctgaaaattttaatgattgagaactttacaaatcttagttccaacatcactttatatattcaacattttttttcttttttttttatttttttaatcaacatttttttcagaacgtaaataacattagtgatgttgaaaaaatttaacaattcatacattgtctcaatcacctactttaaataataatttcgtccacacacaattcgtctcccccaaacttatttttaagcttatggtataattcaagggacaaggatagagaattncaagtggattcaaagttagtctcataaagtggctaaaaacaattgaacaggctaagctcaataggcaaactagggagaataaagataaaggtaagcttgaaaggcccaaacgatccaaaaagaatcacctcatcattttccaaacaagcattgtcaaagatttcgcctcaaaaaataattcatgcaagttctatcctattcaatcaatcttaccacaaacc

SEQ ID NO: 138623 - DNA, 1121 bp, Cannabis sativa
tgaggagacttgtggtttgccaagactaatcaagttctatctttccttgcattttttttttaattttcggtatgatttaattttgttttgatcgtttatttcttcttttagttttatttttctaagaatcaatatcatgtcattttgcattcactctctaagtgttctcatttcatgcatttcatgtatataattttaaacaatgaggacattgtctggttttagttgggggtggtaaacatattcaagcatgtttcttcatttttgtcatgttactatttttatggtcaaatttttcaaaaattactcatttattcttgtaaaatattattttcaagtcaatttttactatctttattgcttagaatttttctagagtataaaacgcatcccaaattttgtggtaagatagttgttagcacatatttgcttagaaaatttgccaagtttaagtgttcatatttttgtgagtggcgagatttgagaaaataacttttgaattttcattgattcttagaaatggttataattattttggacatggtactagggtgagattagatattgctttaagggataagttttatatatagacaaatcttattagagaacccttgtgtaattattttcttcatgtgaaaaaatagagaaaagaaagaaaatacaagagcaacatttccatcattatatctaacatgttgcctcttgttccaaaaagaaagaaagaaaatgcaagagcaacatttccatcactatatccaacatgttgtctcttgttaaaaaaaaaaagaaaaaaaaaagtttatagtatttcatttttttatttgttttggctgcaagaataaatgtaaaagactgtctagtttcgttcaaaaatctcgaaaagttgggttgtggtactcttatggtagtttgtccaaattattttacaacctatcttttattttaatgtttattcaattgtttgtcctaaatagatctatccatttccgtttcgcgtgctcacttttcaatttccaactccacgagtgaaatccttagccatgaataaatattttcaacctgtgaggctaatggagttgagacttttacttggtatattatttcaaaagttttatgtg

SEQ ID NO: 138624 - DNA, 783 bp, Cannabis sativa
tcgatcccgaacccaaactcagatatgggacctaggcctaaaccagaaccagaccgagacccgtgacaatgatccagatcttgtctcgggatttgggtaacggggccaagaaaagaccagtaggctatgtctagatctgggacttagactaggaccaaaacccagacgaagaagcaaacccgaaccacgacctagacctggcacccataattagaacctgaacaagaatcgttgaaccaggaccctaaaacaagactaggaccgtgactaggacccggaacaagacctagaaccgaacaaagacctatcctcagaccaaaactaagactggtactcgggaccgaacacaaacctatcctcacatccggacacggtcgtgtacccagactggaactgagacccagactgggatcgaaatgctggacgtagatctggaccgagatcctgaccgagacccaaagttggacccgtactcgggacccgaactttgatctcgacccaaacctagacccagattggggtccttacctggacacaaacccggacacagactcgaacccgaactcaaacgcccacagctagaatcagacccaaagctagacccagacccgaacccaaactcgaacccaaacaaggatcagaaccaaggacttagacacagaactaaatacagactcacctcgatattggaacttgggactcgaacccaatctagaccaagacccatgacgcgaacccacacccagagcctgatttggccctagactgaaatgcagacccgaa

SEQ ID NO: 138625 - DNA, 1235 bp, Cannabis sativa
  modified_base (153)..(155): a, c, t, g, unknown or other
ctcactgttgccctgatatgctatagatttgcgtaacacatatctgatatgttattctgacgacaactaacatgtacgctaaacatgtataaacatatggatgacattataattatcttaccttaattccaaattcaggtgtgccggccaacnnnagtggaacaactgctcggtgaattacaggctcctaattcacatcaatcataacataggtgagtgacacgctaaataactttccggggactttaacttgaaaataaaagtttccctatcgataaataacatggcaatacactaaaaaatgcaaaaatgggaaaaacaagggttcccaaaattgccacaaccggtagaccggttccccaaccgaaattctggttctgggaaaaaatacctgggagccaaccggaattccagttcctacaggcccctctgaactgaaattccggttcagtgcaggaaagaccaaaattttcatatctcaaccaaaacatccccaatccaaaccaaactttccagacctgctatttatacccccaatgaacatatttaaagcaataaaacatcacaacatactcagaaacaaaatccaccattaaagctccaagtttgaattcaaaactcaaaacttggttaaatctaactaacaaccatcaattcaagcttaaaccaacacaatcaaggataattaaacttctgaaaacaacatttaacaactacatcaataacagtagctaaaacaccatttcatgcaaaaatccttctcttaaaattcaagaaaataaaagtaggagttaaaagactataccttggcttgagatcactaacaactagctgagaatgattgaattacacaagaaaaaccctcacccctagctggtttttgaatgcacgaaagagagagagagagaattgagagaaaatgtgacttattttgatgattttctattttttttttgcaaaataaacaaattacattggttttatccaaatagtttagctaagaaattaattaaaaacctgatttaatacatcccacaaaaagacaaaatacaacttagcaaattgaccattttgccccttaaacacgaaaatcactaaacgccactaaaaggtaatttgggaaattctaaaatcccaaccaatcccgacattcccaatgtctaactatatcgccccactatactaaaatactaagatgtgattcaactaacccatacaccacattccaatgttgt

SEQ ID NO: 138626 - DNA, 945 bp, Cannabis sativa
  modified_base (707)..(707): a, c, t, g, unknown or other
aagtttcaagttagatataagttagggttttggtgatttcgggattggggtgttaaactgaagttagaataagtttctaggcttgaattagagtttgtttaagatcgacttggttagaatcagctcagttagggctgagttagaggaatttaggatttctaagcttaaattgtacttgactatgctatattgattaaattgatgaattgttgtgtttgaatgctttgaacatgctgtattcatgttattgaactattctgtgaagtttgagaacaattgcttaggtttggagcaagttttgggactttgaagatctaaaatttttgagttttaggtgtggtgaaccagaactccggatggtacaaggctgcaccaaccggaattctggatggtcaattttcaggaatcgctgatttttgtattttagccataaactttcaatcgggtgtccgttttagacattctatataccgtttcaaagcttatgaagatatctacagtatgagacataaattagagccaaaagatatatttattttagggtgtttttaccataagatttggtagaaaaccttaggttattttatgcgggtcttagacagttttttggaatagatccttattgatttacctttgttgtgacataggactcaaaattatcgagcatcgttccactcaggttagcccacatacttgactttggactngaggtaagaaaagtattaagcactgtttatggttaataatatacttgttatggtctcaattattatgatcgagatcccgatatgtatttgttgtgactcgaccttgatcgagattaataatatgtatttgctttgacttgatggtaatcgaggtaatgatgagaaatagttattgtcgtttgtgaattgtttatgaatgagggaagaacacggttatcaacgttgttgtgaatgaatt

SEQ ID NO: 138627 - DNA, 678 bp, Cannabis sativa
  modified_base (421)..(434): a, c, t, g, unknown or other
acctacactttggtgggctttttgtattagcacggtagcctgccgactacaattttcaatctctgcatggtgagcctttaatgcctccatctctctatccctctactcagtaaacatacgtctttattcttcaaatgcgagatttattgcagtgtggaattcgtcctgatcatgatgtagggtattgttgtgaccgtgcatgagtccaagagcgtcgcagagattttgtaactcattggcatctccgatggtcgtctgggtgttggttccaggcgaaacaggtgtgctatgaatgccctagtttggtgtggaactgttattcctagtctcttgcacaccagatgtgatttcatctacaggagttgttacaccattccccacgttcaatggttgtcgaggattaacagctggtggaaccctnnnnnnnnnnnnnntctgcaatgcaggatccaccgtttgtgaatttgttggatcagtcaggcctctacgagtttgcaccattgttttcgtggttagatgttgaataaagagcgattcgtgatccttctctcaatgaaagcactcaaatgttgaccttacttttagtaaacgacaacaagtcgaatttagtaagcgataagtgatttgtagcaatcgatatatcataaagcaatgtaaagacacaagaattttatacag

SEQ ID NO: 138628 - DNA, 1037 bp, Cannabis sativa
  modified_base (1004)..(1011): a, c, t, g, unknown or other
agatcaaccctaaccctcacctttttttttttttttggatttcaactaaaaattgaagtatttttaagtggaagtaagccatagcaccttgattctctagttacttaagcttgaagtttagtttataattcaattttgagttgtagtggctgttagggtttgaatgaattgtgattcaatttctaagtttaatttgagttaggtttgagttcttgctgctagtttgggggtttggtgtggtggatgcacaagtttgagtttgaaaactcaagcttggttcatctatggcactttttgattctatgtatatttttgaattttattagttggattatgttgtttgaggttattataggcgttcgagaaggtttggtatggattgggcatgttttgagcaagattcaaattgtttgggggaacctagtgcaaaacggttaaccggtttgacaaattctgtaaaccggttaaccggaacagggacatgtttcccgaattgttcgattcgtcaattcgtgctatttttcagagttttagttggtttattccttgataattaagatattattgtattaattaccaatagcagaacccttagttaggggtttggattttctagattagggttttggcgtgtcatttacccgtttatatgattgtgattagggcatccatccaacacgagattttctgttcagggcgactaactcagttgaattcagaaacaaagtaagaatagcatagaaccatattgtatatatgtgaatgtatgtatgtgtgatatatatgcatgcttgttgtgattcgtacactaccaacactagtacagtagcggtgcaaagtgcattagtatagtgtataatgtttaaatagtacgttacagaggtaccagcacaagtacagaaacgtacggcctaataaacatttcaagataatcagatttactaataaagatcagaaataacaaaatggagaatctggcttaagaaggagagaaagagatccannnnnnnntcttgataatgctctgctacaaaaag

SEQ ID NO: 138629 - DNA, 596 bp, Cannabis sativa
aactatagcaagctaaacaacatttcactcataaaatcaaagtttgagttcaaaactccatacttgcttaaaatcaacaaacaaccacgaaacccagcttgaatcatcaaaataaaacataattaagctttagagatcaacactaaacacaaaaaacacccactgccaccaaatcctagagcatgcaaaatttctcaactcttaaactttaagaaaacaaagaacaagttacaaaaagcttaccaagaacttgagcttactaaaaccttgagaaaacaacttgaattacaaaggaaaacaccaaatctctgctgctcaaagaggggcgggaagagagagagcttgaaagaaaatggttttgcttcttttcttttattttttttttccaattttgtaaaatgaaagataaaatggtttttgttacattacttcagccaaaaacaattaaacatattaataaaaattcatttaattaactcacataaagacaaaacacgaaaaggggaaaaaagaccaaaatgcccttgcccacacaaaactaatttaaagggtactaagggtattttgggaaaactctaaattcctgactaatcccg

SEQ ID NO: 138630 - DNA, 580 bp, Cannabis sativa
taaagggtatatatgttgcatttatatgtatattgataatagaaaaaattaagaaattagggattttaaaatcaataaaatagaaatctggagagagagagcaagagactctaagccaaggaaaaggaaaactaaaaaagtatctgttaatttttttaagaaaaataaatagagttttaaaaggtaataaatacactttaatataataataatacacttaataaaaaagtgaaaatgagaaatacaaacacgtgcactactatgctgttaattttgactattggactttttgactttgaaaagcttactatttaatataataaaaatatacattaacaatgtaaagggtatatatgtcaataacattatcacctgatgaagcttattatttaatataataaaaacataagttaacaatgtaaagggtgtatatggtgcatttatatgtatattgataaaagaaaaaattaaggaattagggatttcaaaatcaatataatagaattcatatataaaatcatacttactgttgataaggaagactataattgttggacagtgtggctgcaccatccttact

SEQ ID NO: 138631 - DNA, 839 bp, Cannabis sativa
caatatgcattttcttgaaacgtataaagaagaattttgtgaaatgtgttctaattctgtctccttcaatgtaccctcctttaagttgagcgatataagcagtattatcttcatagagagctacttgtgtgctttatagagtgtaatctatatgtttctcgaatatgttatgtcaatgatctcactctcacacattctctacctgcttcataaaatgcaagtatgttaatatgatttaaacttgtcttattaaaaatcttgttagaaaaactcagtaggacaaaatctgagctaagaaaaaaagagtacaatatatatatttcatattcataattatttgcaagttgcttcattaaaaatcttgctaggaaaatccagtgagacaaaacctgaactaaggaaaaaagagtacaacatgaatatgtctccctctcatgtacatatgatccacaatcattttggtgataatatatctcataaaattattgttatcacttttaaaatatcaccatatactatctatgatcatatatttttgaataattagcatatttgccccctgaactttcggcactacctagttttgcctcttaaaatatacggcttgttaaaaattctccctaaaatataaaatttacataattatgccctttctgttaggttctgtcatctttactgttaaaaattagcatttttactctctaaactttgattaatatgaaattttgtcccttttatataaaaaataattttaaaaattatgatattctattttttggcaattataatattcttttaattttgaaaaaataattaaaattattaaaaaaacttgacaa

SEQ ID NO: 138632 - DNA, 854 bp, Cannabis sativa
taattttagaccaacttaaaataattttttcttagatattaaattagaattaataattaagtttattttattcaagatacttaattatttattttgtattttaataaacttaattaaatagaaaattatatttaagttgaaaatttttaattttagattaacttaaattaaaataattttttgaatatattttattttattttaaaaatattttttttttgtaatttttgaactacattttattttaaatgtagatctttttaaattttttcaaattaaattaaagttcaaaattaatttgttaattatttttagatcaacttaaatcaagtaattttttataaattattttttaaaaataaataggctaaaatatattacattttaattagaaaataaataattaatttatgaaacatctagatcgttattttctaactagactttttgatatttttctagacgtatttaattaaattaaaaattaatatttaggttgatttgttcaagacacttacatatttaatatttttcataggagatttaattaaataggaaaattatatttgtgttgaaaattaattaattaattttagacaaatataaattagaataatttttcatgtttattttcttttatttatttttaatacaatgaattcaaatttaatcatacatgtatttatagaaaatttaatttgagttgaaaatttaattttaattaattttggaccaactcaagtcaagtaattttcataatatttattagaaaattaatagcaaggatgaaaaatagaatttttatttttcagatctatccaagtatgtatataattttataaatattaaattaa

SEQ ID NO: 138633 - DNA, 986 bp, Cannabis sativa
tggagccatcctatatggagctttagaaacaggttcacttccaagtgccaaatcaatcacaaagtcaatttctcgttgcggcggtaatcttggcaactcctcgggatacgtcgagaaaatctttaaccactctgattacattaggctcaaatgcttcgggtctgctggagtctatcaccactgctaaaaatcctacacatccactgtgtagtagatccctagtccttagcatagaaataattgggattcgagacccctgaactgatccaacataaacaaatggatcctcaccttctggctagaaagtcactattttccgtttacagtctatgctggctgaatacttggacagaaaatctatcccaagtatgatgtcaaactccgttaagtcctgttctataaggtcaacactcaactccctatcctcgatcctaactggcatagagctaatgcgtctattggagataattaactccccactaggcattagggttccaaaccctctttcaagaatatcacaaggcttacccaaaagatcaataacccgtgtagccacatatgaacgtgtagctcccgaattaaataacacagtatacaaggagttgttgacaggaagcggacctgtcaccacggaaggactggctgcaacatcagcttgggtgatagcaaacacccaagcaggtacaggttttgcctctaacttcggctcttctttctttgcctgagggtaatctttcttgaaatgccccaccatgccacacagaaaacatgtcttccggttgcactctcccggatgatgtttcttacaacgtgggtactcagggtaagagtaaccctagcgtccacctctaccttggttcccacggaaccgcttactttgccccaaaccaccaaatgctggggtaactttcctcttctgatcagtggtggaatcaccaccatccctaccataggcaggagtaggaaaagtgggcgttccaccaaca

SEQ ID NO: 138634 - DNA, 1137 bp, Cannabis sativa
  modified_base (233)..(235): a, c, t, g, unknown or other
gctttcattgagagcctacgtgaagaaagcttagaaaaaaccctcctgatcaaaagaaaaaactttctgcatggctgataacggagaaaatgttgagactcatcttgaagagactactcaccgtcttggaaaagagctgatggactcacagaggcctcccaattcacgatcaacacggaccactcgttccagaaggacgcaacctgaaggtggccaaaatacacggtccacannntcaaggaggactcagcatgaaaatagctagaacccagaagcagggaatgaagaaaccaatgttggaggtgctcagcctatggaatatgataatgatggtgcctatgatcccacaagatacgtgccaattgtcgagttggaaaatctctatctcaggcatcgcttggaggaggcaaaccgacgaaatgctgagttggaatgggaggaagccacggccagggaggcacaagagaacaatgcaaaaaatcaatctgatcttggagtgaggataccacgaggtagacctcgcggttcacaaactaagaggcaggagatggctcatgagaatccttagaatgcttaggaagaaaaacctggagaaactgagggtccccttgagaatgaacaaccaaatgaccagcaagacccttctcacagaaatgagaacagaaggcgactcgggaccagggaacaggaaatcccccgtgagaacgagtgaaatcctgggactcaacctgggataggtgggtcaccaccgagacatcgttaacgtccttctcgaacaaacaaggaaggggcacgtacaaaccccagcagggggcatgcaacaacccatacccaagggagaaggacgtgacatgacaaggcgagtgttagctcgggatgcacgagaacccatagtggatcaacgcgagaaggggaaagaaatcatcgcaatactgatcaagagagtatatgcacaagtaaaaatgaaagttactcaaggacgaggtccatgagtaggaccaagtccatgagtagcacggggtccatcaacaactataatcggcaacaaccggatcttcgtaatcacttgaaccagaaaaaacctgatcttcgccaacagctcggtcaaaagcaagaggatcctatccaattgcaaat

SEQ ID NO: 138635 - DNA, 683 bp, Cannabis sativa
atagaatttttgatatttctatttctggtgaactcttacatcttttgtatttagaatgctaaattattcaatgaatttgatatttcatctaaaaaaatattttaatttaggaattattttataacaaatcagcataaaaatatttgatgaggcacctaatattttatggaaagtatagtaaatttttaggtaattaaataattacaaaaatatcttcaatcaattatatctatctttatatataataattagctcgatactaaactgaaaaggaaataaaacatagaataatattgaaaatactccttttaattaaatatactcgacttgtattttatactgctgcatatttacaacttttatatgcaaggaaagggagaaagaaagcaatataattggttcgtacagtaacaaaaaaatattatctaaggtctacacacattcatctgatcacagctaatgattttttcaatcaactttcaattttactgattcaaaatccttaattttaacaaaagatgcaaaatcagatttgaaaggtataaattttccaaaatgtttatggtgatactgaaagtcctaattattacaagttcaatttgatgattcttaacagattaattctatgttatgaactagaaattaaaaacgatgaacacagaatttacaagcttcctctgcat

SEQ ID NO: 138636 - DNA, 527 bp, Cannabis sativa
  modified_base (151)..(153): a, c, t, g, unknown or other
ggcataaaacccaacaatagtttcatccaactagtggaagcgagaataacaaccctggcaagtcagtagatttccttatatccatgatccccgtatgttgttaatcttggattgaagaatggttctagctcaccattgggatcactacaannnagtttctgtcgagacatctctagaatcaacaactaaaggtgtgtttaatacacaataattctgaccctgagcagccaggtgtgaatgcgaccaaggcagtcaaggaaaagtttgagcggttgcaaaatgctaacaacaaagcttgataatttatgctttctagcatggtcgacaccttaaaaacaaggttttccaatactctcatggctgtagatatcatgaaccacttgactcaactgtttgggatggtgtcaagttaagctcgttttaaggctacgaagaattttatcaatgcacggatgaaacctcatcagaatgtgcgtgatcacctgctccagatgactagttacttccaagaggctgagaatcatgga

SEQ ID NO: 138637 - DNA, 692 bp, Cannabis sativa
ttttcagaaataaagaaaaaaaaattaagttgtttgattttatggttggaaaaagaaaaaaatgagtagctttattttttccgctctttgttcttcttctaagaattattctgttacatttagtgcttgaattttttgtttggtgctggtaagtaaacgggtgattagtaaaaaaatttaaactggaaaatgttttcatcaatatttatttctacaaattttacataaacttttgtactatctttacttgtttgcttgttgagagagaagaagatcaagctgtgtattatttctttgctctattagtttatgttctctaactatatataaaccaggaaaatagaacagtatgtataaaatatgatcattttgagaaaatggagaaattgacaataactaaaataagtagttgttatattctagtctgacaactattttgaagatttcttctagataatattataatttattttttatatttttgaaagaataattaattaattgaaagcttagagttattttatttaattattaataataaataactaactaaagaaggaaagaaagaaacacgaaaaaagtaggaattaaaattaaaaatttcacttaaaatatatgtaaaatctgttgggttttatgccttaaataaaactccatttcaaagtaatccattttattcaacatcaataaag

SEQ ID NO: 138638 - DNA, 828 bp, Cannabis sativa
tccctaacctggaactcaatatccatacgcttcggatctgcgtaactattctgtctactctgtgaggcaagcacataagctcgaatcttgtcaatggcctcagtagttctttggactgctttgggtccaagatatcttcattcactggcttcatctcaatgaataggtgaacgatactttctcccatgtaacatttcatacggtgccataccaatagtactcttgttatatgaaaactcgatgaaaggaaggtacttgttctaggaaccttctaagtccaatacacatgcatgtagcatatcctcaagtattctgaatagtccttttagactgaccatcatgctgagaatgaaaagatgtactaaactttaatttagtacccatagctcgctataaattctcccaaaacttggatgtaaactttagatctcgatcgaagatgatcaattttggaacaccatgaagtcgaattatctccttaacatatagatcagtgtactgatctactgtatacatagtccactctggtaaaaagtgcactgactttctatatcgatctactattacccaattagaatcatagaatcctgttgtcctttgtaacccaaccacaaagcccatggttatatcctcccattttcactcaggaatcattagaggttgaaataatttcgctggtctctgatgttctgcttgaacttgttgacaagttatatattttgacacgtattccactatatcaccctttaaacctcgccaccagtacagtgctttcacatcttgatacattttagtttgaaaaaccgtgtttttgcaaatgtcagttgt

SEQ ID NO: 138639 - DNA, 542 bp, Cannabis sativa
attattattattattattgttggaggttttttttaagaaattaaaaagtaataagaaaattaaaaaaaaaaatgggagaattaagaagagaatgaatggaggtatttgaaactattttagttgaattttctaaattcaaaaatctaaaaaattatgtaaataaaatacaaaatatctattgtcatttgcttcaactaaatgcctaatgagatattaaataacaatattaaaaacctcaaagaaatcataataaataataatctaaatagatttatataaaatttatattttgtttatgattattggcaaaaaaaaaataaatatataaaaattgaactatgaatgaaaaaagaaagtgaatattataaaataatacaatattggtaaaaaatatttcaaaatagtaaattgaagtggtgttgaacttaaaataatgtatttaaattacacttaacatattgttgaccgaaattttcggcaactatcaaaatatgattatagtagtgagctgtaagaaagcgagatgaggatttttacgtggt

SEQ ID NO: 138640 - DNA, 914 bp, Cannabis sativa
aaaaaaaaaaaaaaaagacacaatgccgtcgctacagtgcacggcatataagccgtgcactgtagacaaatcatcaaaatgcagtaatatatgctgcctccttggagcattaattaccccatttatcaatttttgctgcctccttggaggtgcccttagtgacactatatagtgactcgcaaaaaagtgcgtgtcactaaagagttgagagtaatttttagtgacgtgcacaattagactctaaaaattcagtgttattagtctcttgtaatgtgggtcactaaaaatatagattgtcactaaagagtaaaacctaaaattttctaatttttattaatataaaaagtattggcatatagtgatgcgaaaagcgcgaatggataaatataaccccacccatcttgcgtgtcactatatcataatctaatttttttatacaaaaataatacagctataattaataaataaataaaaaataaaaaatatatttaatactgataaatccttattcacgccagtactctctctttcttaatcaattacaattctcaatcaattaaaaacatttatcaaccaatataaaaaaataaataataaaatataaaataaatataataataaaatgaattattctaaaccctaaacaacaatacacacacgcagccctctctttcaaaaattcaacttttcaactttttctcctctctcttaattacagccgcacaaataggttagggtttcacatgtcttcttctcgttagggtttcacaatagctcgttgtggcctgtttgtgcggcggagatccataacgagcttaatcatctccttcgttttgtctctctgtgtttagccattttaaacctataaccttgtatattaattttttgattgtctctatctctctctctctctc

SEQ ID NO: 138641 - DNA, 503 bp, Cannabis sativa
atgcctcttttttaaaataataaagcaagtgtcattttttactttttaataccgaaatacccttcattatataaaaggtattatattttttattccttataaaaaaaaattatgaaaaacgatgcagagcttgatcaaaacatggagcatgtcttccatcttttccaattaattcagttttgttcaagcttatcattggaatttctatcgtcattcatccaaaaaatgatcaaaggttattctctcatctaatttttctctctagtaaattttttcaattattttctcctactttctcctaatcgaaggtgtgaagaaggtctcctcatttttcgattggatttcacacctcaaacttatagatctaaaattacagaggctgaatcgaaacaacgaccaaagcttcttctctctcaaaattttctgtttactttgcctgaatttttggatcattgcctcccgattcttttctctcctccctttaatttttcaaatttgttcat

SEQ ID NO: 138642 - DNA, 570 bp, Cannabis sativa
  modified_base (177)..(188): a, c, t, g, unknown or other
atttcacttctatgcatttgtagaagctatggattctgcatttataattagggctcccactcaattgaactaccatgttcttaatctgtatgtcacgagaagatccaattggtcgactttgacgaacaaattgaagaacataaataatacatttgaactagaacctaaccatctcannnnnnnnnnnntttgatctaagatcaacttggtgatattgaattaaatatatattatggtaagtttatgatatcttatccaagttcaatatcagtcccatccaatgtatactccatacatccaatataagcttactttaccaataccctagaaaagacataacacttattcaaggtgcaagtaaactacattgtagatttcatatcaatgaaatcttgtgtactgataaatcatagaaatttatttaatcacataatcctgattactttccactatattgataacacaataatcaataatatcaatgtgataagatttggatgaatttataaatcaaacaaataatcatgaaataaatatgtgaaccaaataacacattaaacaagtaaagaa

SEQ ID NO: 138643 - DNA, 679 bp, Cannabis sativa
  modified_base (53)..(56): a, c, t, g, unknown or other
agaaaatatatttatgttgaaaattaatttttcaattaattttagaccaactnnnnttagaatattttcttagatattaattttgaataaataattaagttgattttgttctagatacttaattatttctattttaatgaatttaatcaaatacagaattatatttgttaacgctgatttttgttaactaaattaaaactatttcgtgatggatttccacagaaataatagtagtaaaaggaaaagaattaacacaaagctattttacatgattttgtagttaaaattctgcatagtccatgagtctatcttattagatttctctggtacaaaactagggttctttctctaaaggatttttcctcccttttttagtgtttcctgcccctatttatagttacataggagggcagttaattacaatcagattgatatcccacaataataatctcctaaaattgtgagatatgattacgccccacgtaaaataaacacgattagtaattgaaaatcacacagctgtgttttatctgcttttaccgagtcaatgttgacatggatttagatacattccaaagtgtatcacgttggatcacctcccagggatagcaacaataactctgacattgagctagagcttttcccatgtctttctgaggttgataatgtaaatatcatt

SEQ ID NO: 138644 - DNA, 752 bp, Cannabis sativa
tctcagccacatccaccaaatcaaactgctcttcctcctcaataattcggaggcgttgctcttccctagaataatccgggacagaacacataacattaaaagcatcagcagtggcgggaaccttctttcctcgcacctttacctccccattccggtgctcgggcgaattggcaagaaattcacaggccatagtcacattagcccggccctgagcatccacaaagctacccccatttcatcctctcaatttgggctcgaattgtctcgaaccttggttgacgtctcaaaggattttcagggaattcaataccccgatcttcaatgtaagccctaattttcagcctcataaaacgattctgggcctcctcattgacaaaccgggttctatcgaaacccgtagttggtgggtttgatgacgaaccttcctcaacatgcctagttctcttaggtgccattttttttcttagaaataatatttttttcttttctattagtttttttttttttgttttcaaaataaagctaagaaaaattgggcagcatctccccttaattttctacttccccaaaaattcacaatcactcaaaaactatacaacttatatccctaataactcaacaccacaatacaataccaacaaacccaatattaacaataattttatcacaacacacactattaccacccaaaatctataaaagaataaatcaaattccttaaaatggtaggaagtgatacttacaaacccaaa

SEQ ID NO: 138645 - DNA, 518 bp, Cannabis sativa
  modified_base (35)..(36): a, c, t, g, unknown or other
tttttttaaagaattttaatattaacttataattnnatatccattttaattttatatcaatgggtccgggtcctgggtcaggggtctgaggtccgggtccgggttccggggtttcgttcgggtccgggtcccgggtacgggtccagcttcgggtccgaggtcctagctctgggtccgagtccgggtctgggtcccaggttcggggtcctaggtccgggtccagttcccggtctggggtccgggtccaagtcccgggcgggtccgggtcccaagtcagggtatgggttcgattccgggtcccgggtttgggttcggtccgggtcccgggtttggatccggtctgagtccaagtcccgatccaggtccgggtctgggtcaaggtctggtctaggtccgggtccaggttcgggtccgagtcagggtctgggtttgggtcccgttcccaggtcaaggtcccggtccgagttcgggtccgcgtctgtgttccggggtccgtgtccgggtccgggtccgggtcc

SEQ ID NO: 138646 - DNA, 784 bp, Cannabis sativa
catattctaatatatttcaaaagtgggtattataagtgcactcacataagatgtttcaaaatagaattttttttttcttaaaaaaattaaactaaaaacaccttattcaaactcattttctattttaaatttctttaaaattcattattaatttacatttatagaattatattatttattgctctaaattttattttattggttgcttagggtttatttttttatatgaggatatgtataaatattaatattatatatttgaaataaataaaatatattaaaattgaaaacaaaatataattttaataatgtattttaaataaatatggtgtaatattaaaatttgaagtaaaataaaaaaaaacacacaattctaataagtaatgctgataagagtacttgcaaggtataatggtaaaataatagagaataagttgaggaatacctgttttttgtatccaataattaaaaatactttcatagtatatttattaaaatttatccatttttataagtgagttgtctaatatagctttgccctccacttaatggcatatattgattctcatacaattgtttactaaattttggaaagagagaaagtagtgggacccacataacttaaggagaaaaacaaagggaaaggttctcccctatttttatagagaatacttttcctttatctaacttaatttatttttatttttattttattaattaaaaataaaaaagataaatatgctttttaaaaatctataagcagaaaataattacatgttctaat

SEQ ID NO: 138647 - DNA, 847 bp, Cannabis sativa
  modified_base (771)..(785): a, c, t, g, unknown or other
gtcgcgaccatggtcgcgactagaaggccaagcagggagcatggactttccaatttgcctatggtctccattaggctttatgtagtcgtgaccaggggcgaaagacgagatttttgggcaatttggtaatttcaccattcaaagatatctgcattattttttatataagggttgcgtgttttagaggcaagaggggcagaaattaaaccttagagctcaagaaggaggcaaaggaagcaatagtgcggcgacccggatcaagatcaccaaccagttctttcttctcccttttatgtctttatgttaatttctgtttcaatttttatggatgtagtgaacataaattttttaaactaaattcccaatttaggattataatgaatgttagatgatgtttcttcaatttagttaatgtgattctaatttttcttctatatattgtgtgatttgttcttatttgttataattacatattttagactggccatcttgaatgtgatttataatcctaatatgaaatctgcgaagtgaatattaggaatgctctaataggacaaacataattaattttgatgtaaaactagagtatttacatagcttatgtgatttttagattctgaatttaatgcaaattatatgttaatttacttcagagatgcaattagataatatatgatttaggatcttaatgatctgagaagagtgtaaagaccgcctagtttaatttggaaaattaacatttaattaagatttaattatgaaaattatttnnnnnnnnnnnnnnnattatttatgttgttatatttgaattctgaatgtatttttatgtcatatagtgagatttcat

SEQ ID NO: 138648 - DNA, 922 bp, Cannabis sativa
  modified_base (529)..(532): a, c, t, g, unknown or other
  modified_base (703)..(711): a, c, t, g, unknown or other
ttaatatttgaacttatttgatattcatattaaccgttatatattctgtataaattattagtgcaaggacatatgtacaactcgacgatggtactgatttgctatatgctgtgatgttcggtgatgctgcagaaaacataatctcatgtactgcagttcaattaaaattatattcggatgaggtaaatataaaaaaattaatatgtaaaatttatacattttcttaaatagaaatatattaaatcttattactaattatttttacaaaaaacataggttgtttgtccaaaaaattacggagcaattatcagccaaaaaatggagaattcagttgtatgtagatccaaaacgaacaatgagttcaaagtacaattaattcaccattcaagcagctgaaccaatgaaagattaagaagaagtttcactatactctttttaatttttctaataatattccatattttttttaatacttttttcttctattttaagatctttaaattctgcaaaacttatatcttgttcctcnnnnttttctataagtaaataataagtattattttgttatgacttatatatacccaattttatttgaataaccaattataataatattactttaataaaacaaatcattcgtatgatcatacctttacatacaatctaaataagaaaaaaaaaaaagaactaaactttaaataannnnnnnnnttacgtgcctcggcacgtaacttctaactagtaaattttagaggtaactaaaatatatctcaaattatataatataaaagtaatatttgtttatgaaaaagttacttattggtttattattaacatcataattaactaaaaggttacttttaaaatgcagaaaaattaaaaaaaaaaaatcgggatatttattcaggcatattattttgaa

SEQ ID NO: 138649 - DNA, 968 bp, Cannabis sativa
taaatgtaaggggtattttgggtagaatttgaaaatagtggaattgttttgtataaattagtaaggggtataaaatttgatatgagatatattattaagggtataaaatgaaatttcccttttaaaatcatacctatttagtactttaaatttaaaattatttaataaaatttacaatcaatagtttaaaatttgatgaattttaaattaaaatttatttatttgattacatataactgtgaattgtttggttaattgataaaattgtattgattaaattttattttaagatactaaaatatacaatttaaaaatataaggtaccaattaaatattattgaaaatataagataccaaatatgttttttataaaagcacaaggtattacataagtatattcccttatttgttctactagtaaattgatcgcatttcgcgtgcggctatttatataaattttaaattatatgtgtaaatatttattgaataataaaattgtatcaaataattttaaatttattttatgcataattttaaaaatatatttattgaaaaaattttatatagaaaactctaagaaaataaaataaaaaacttctcatacaatttttcatatacaaaataaatcacacaaaaaaaaattcaaatgtatattatagtaaaaaaaagtttaaaattaaataatactcacacaaaatatagatctaaaacaaaaaaaaaaaaaaaaactttcaaatgcatattataatgaagaaaagttgaaaattaaataatactcacacaaaatataaatctaaaacaaaaaaagagaagtactagggaaactctcttttacaccctcttttacactttcttcctaattgagtgacatgtgtattttatgagatacgtgttagactttttatttgggcttacattaacttttattggttttattaaaacttgggttgattggatagttctttgct

SEQ ID NO: 138650 - DNA, 1670 bp, Cannabis sativa
tcaaccaaatcaaacctagatttcattctcttcaaacctagatttcattctctgacaacctagatttcattctctgacaactatcattctctgacaactagtagatgagagacaccttctatagtgattccaaccttccttcattgttcttcataatcaccctatattgatagagtgctatgaccacacatagcaagttaagtacttaatcatagtgcggaagacggtggtaaccaacccaaagtacacattagatggaactaagtacaaggtaaaagacatacaaagggatatatttgacaattacaaaatcaaaattagttatgagaaggcatagaggtggaaggagaaggcacttacatatgttaggggtacgccaacacaatcttatacgaagttacctttttacttgtacatgttgcaacataagaattcgggtactattacagacattgtcatataggacgacatgttcaagtactaattctggtcactggatgcttataggaggggatttaagttttgtcatcctgtgattagtatcgacgacacattcttgaagacaaagtatggggcacaatgttagttgttgtagcgtacgatgtaaatagccaattgtttcttattgcctttgtaattgttgacagtgagagtcatgacttttggaagtatttattgcagaagttaagggaagcaattggggaggttgaaaacttagtgtttgtataagataggcatcaaagcattaaacaggttgttgaggtcatttttcctaaagcatgccactatgcatgctataaacatattactatgaatgtcgcccacaagttcaagactgatgtatgtcacatgcaaatatggatggccgcttactataacgccctaatgcttatgtgcgctacagtgattttccaattaatgtgccacctttgctaatcaaagggttatccttgaaaattgtgtcaaattaatacttttgatttaattattactttataaactttcatatatttatttacataagtcgggatcccgtatttaaagttttacaaacattatcaaaatacatttataatctagtcgcacaacgactacaaaatacaatcctaggtgtcccaagaccaaacactccaggtcacgtcgcctcgacatgtacaatcaccatccaagctcgaagctcacttctgttcagccttcacctttcctttacctacacatggaagtagcaactgtgattcaacagactcagtaagaaaagcatataacaaataatataatatcgacttgtatctaggcactcatacacctatctacaaggcttaataagtaagaatgttctttactagggtacgaccactacaccacatacactacatactgctattgtacgggtgttggtagggtttgtttcgtaccccgagtaccactaagtgatgtaccacacaagctctatacctgtccgtactagtgctagtaacatcgtaatgtacccttaatatattgtacattataccaatgcactcagtaccactacagtactactgttagtagtgtacgaatcacaacaagtatgcatataaatcacacatacacacattctcatatataatatgttctatgctattcttacctcgtttctgaacttgtaacgtccccgcttcaagcctcca

SEQ ID NO: 138651 - DNA, 557 bp, Cannabis sativa
aataacataaaataacttaaaccaattatagttaaaatagatctggttcgtgttataatgaatacaaactatagcaggaaattttttgaatagacactcttaaaagggcaccagtggtgcctagcatcctcctatgtgtcaatatcgctatcggtctaactaagtatcgagttccatataattaatataatagtttttaaggagtatcgctagccaatcgcaacgcgacatgtcgagaaagtgctaggtaccactggtgcctaataacaatgcccaaaataaatatatcaatacctttattataaagcaatttaattggtgcacgtatggaatgaaaataagtctactatgaatattggtgtattgaatcaatactccattagatgtgatgtattgatattcaccctaatttattgttcaattggttcactttggttgaaaaagctgtaatgtgcttcgttttaagaaaaaagaaaaaaacctcaacattgtaacttcctcctcatcattaaaaataagggctctttttaatattatacctaaaattgattttattt

SEQ ID NO: 138652 - DNA, 548 bp, Cannabis sativa
ttttcttgactcttttgccgaagtatcttgtaagtcggtgttgataagctgcattagtgacttgtgacttagttcattttttatcaagtagatccaaagataactttaggagtacttggttttcttcttgattataaaactctcacctatgagtcgatatgttcacttcaataggtagcattgcttccgagtcaaatgccaacgagaagggagtgtgtctcgttgttgttttttcagtagttttgtgagcccacagtacttgagatagctcgtcagcccactgcccttggcaacatctagcttcttcttgatagtatccttcaaggttttattaacagcttccacttgtccatttgcttgaggtctggatactcacgagaagctcttaattattttgttcctttcgcagagctcagtgaacaagtcaccattaaactaggttccgttgtcagatactatcttcatgggaattccaaacctatagacaatgttcttgacaacaaagttaaggactttcttgtaggttatggaaacaagaggcttgacct

SEQ ID NO: 138653 - DNA, 568 bp, Cannabis sativa
  modified_base (27)..(27): a, c, t, g, unknown or other
accgcctggggaaggtcaagtgggatnattctgagactgtgtaagtatgaaactacacagttgaagatggcttaaatggattaattggtactacatgtatcaacaaggtatatcttgttttttggtatgcccattacgaaagaactccacggttaagcgtgcttaacttggagtaatttcaggatgggtgacctcttggaaagttttctcaagaagtgtatgagtggggacaaagtacgctgaaaacactcgtattggtttgtagggtcagtcaacattccatgaagcagcatgagtgacgtacttgtgcataagtgttatcattccatgagtgtaagagctcaatagagatttgaagcaagggactttacaatcaaactagtatatacatattgtcatatagaagtgagaagaagagggagagaggtagggaaaaaatgggtacttgttttatgaaagaaaataaaacgtgaattgaattttttgtaggggaaaaatgggtacttgtagctaggaatggcaaatggggcgggtctgccccgccccgcttctgacccgccccgccccg

SEQ ID NO: 138654 - DNA, 719 bp, Cannabis sativa
  modified_base (40)..(63): a, c, t, g, unknown or other
actagaacttatataaaattaatatttacgtggctcgccnnnnnnnnnnnnnnnnnnnnnnnnatatatatatatatacattaaaaacgaatacaaaataatatatgtcatgtatatgcactttaattccatgtcattgcccccctatctcataataagttgctaaattgtctatagtctatatttttaatgtgtatactaatactagtcactacctatatgtccactagttatttatttattttgaaaggaagtgcaggaaataaaatcaaagatattaatggtggaatttgtcttaactgtaaactaattattgtgatttctaaaaaaaataaaaactaattattgtgtgaatttaaataatagattttctgttcagtggaaaatgttaaaggccacaaattaattaatattcccattgatcatttatttaatattttctaatacgagtattaaattaattatatttgctgctgggatctcaatatacaccgtattgcttcatgtataaggaaataatatacctatatatagagagcaataattgtagtaagggtgttatttttgcgtctatttgggatatttattggaccacatctaatgtttttaagtatattcggatccgatctaattatatattgaatgttagattttaccatctgatccgatctaattacactacaacaaatattggtattaccggcggagccacccgccgg

SEQ ID NO: 138655 - DNA, 671 bp, Cannabis sativa
  modified_base (303)..(316): a, c, t, g, unknown or other
  modified_base (602)..(626): a, c, t, g, unknown or other
aacccttgtatcctttctatagcatagtatcaccaagatctgagcccgattctccttttcttgaatctggattcttcacagtttacacactataattgaggaccactggatgtgtgtgggcacttactctatcaccatagggttcgaaattgaaggaagaaagagagatagaagaattcgaaattggtagagaagatggctcaagtttttgactgaaggaaagtgtttgcatcatcttttcctttgaggccatcactacctatttataggaatctacctaaggttaggttagaattatttggnnnnnnnnnnnnnnaaaaaataaatggtaaattatccattaaatggccggccatggatatgggccccactttacaattttgccatattttcaactattcatcttattttctcaaaaaatgccattttcaaattcaaccactaaaatgccaaaactaattatttaataattaaaattaattattaaatgaaattgtctaatatatttattaattagactttttaaagtctcttaattaacaaataaaccttaaaatatcttttcttcactattaagccttagcttagtgaaaattcataannnnnnnnnnnnnnnnnnnnnnnnntataattgattaactaaaatcaataaactgagtcttacaagtagt

SEQ ID NO: 138656 - DNA, 979 bp, Cannabis sativa
  modified_base (476)..(477): a, c, t, g, unknown or other
  modified_base (672)..(684): a, c, t, g, unknown or other
ttatttgttatagagtatatatatgtaaacaaaaattctaaaggcactagtaggaaatgttctcatttcaacatttgtagtaaaatgtctttttttagattatttattatttatattgtcttttatcacataaaaaaaatttataattatttttcatatttttttaagaattagaagcaaattacttaaagattatggtatatctatattagttttgttaaaaaaaaatttatttgaaagttatgttgattttttttaaattttttatgagttgttgtgggttgttggtatatagattttgttatacagtgtatttttgttttgttgtatagtatatgattatttttagatggtatttattttttattttgctatgtataataatggtatataatttttttagcataatacaaatattttaatatatgtatataattttattgtaatgctatatatatttaattattatttttatnnattttaattgtatgatatatatttattttaaataatatttaattaatttctatttcttttatataatggtggtattttattatcatggtatatatattttaattgtgatttataatttggttagtgtatacatatatatatattagtaatatatattttttattattattaatagtatatatattttggtgaatnnnnnnnnnnnnntttgttatacggtatattattttttttttttgtaatatttaagttctattttctattatatttttgttgacatgatatataattttattagcatcctatatatttttatttttatttgttcttattatatatatatatatatttttattgtaaggtttatatattttattatatggtatataagttttattgtgtaacatatcattttgttttagatcatgcatgtttaatttttattttattatatataaatgtgatatataattttgtaagtatggtataattattttatggt

SEQ ID NO: 138657 - DNA, 750 bp, Cannabis sativa
ccaccaaaatctactaatagcactctcaattgcttgacaagttcccactagaagaaggaatagattcatagtgtatgctgggagtgcctgtaccaccgccttaattaggacctccttaccggctctagatagaaacttattgtcccaagattgaatccttttttgaaccttgtccaccacaaaactgaacgccgctgttttattccttccaattgagctaggaaggccaagatatttgctattttcttcagcttctctaatacccaatcgatcacaaatggttgctttcatgtgactagttgtattggaactaaaaaaagccgaagactttccaaagttcaccctctgtcccgaagcgttagcaaagatctggagcatctgttgaacattagtaacctctctctcagtagctttgcaataaagaaagcaatcatcagcaaaaagcatatgtgacacaacaggagcaccattagccactttacaccctgaataagcttcctttcctcataagattgaataagagctgacaatccttccgcacaaataagaaacagatacggcgaaataggatcgccttgacgaagcccccgggttggtataataggtccaatagtatatccactactcactatattatattgaaccgaagataggcacccataaacaagccgaacccatttttcactaaaccccaatcgagataacatagctgtcaaaaaattctaatccactcgatcatatgctttactc

SEQ ID NO: 138658 - DNA, 510 bp, Cannabis sativa
aaaataccattacgctacactcaaaaaaaccatgttgaatcgattgatgtacaatgtatgcacatgtgacatgtaacatgattatgttagatatatgagatcggtttgtttattaatgtagttgaaagttggaaaagagcaatgtttagtaatagtactaccatgggcttttttcatagatatagaaaaattaatagagtttattttaatatggcataaatgaataatgaaaaaaatatacaattaaaacagaatcaaagtttaaaatataaaaaagaaaaaaaaaagataataaataaatttgataaaatttgtaataataagtttcgccagaaaaattacccacaccgaaaaagttgctggaaaatcacaagtactggaaaagttatcgaaaaagtcactggaaaaatcgctaaaaaagtcgttgtctctggaaaagtcaccagaagtagatgtcttaaatataaattaaaatagaaccggttctataaaataatgaataaaaacaaa

SEQ ID NO: 138659 - DNA, 628 bp, Cannabis sativa
gcgtacgaaggtccagccaccctccaccgcgtacgaccaaaactgaaatcgccaaggtaagttcgaccgacccgtttttttatttttgttatttttttgagtgattatgaattagagtattgattttagggtttgatttgaacggatttgttagatttaggggttgatttaggctaagatcttggatttggggaaatcggtttgggaagatcatggtccgatggaccccgatgggtccgatgctatggcccgatgtatggatctgatttttttacaaaaaatggatcgggtccgatggcccgatgggaccccgatggtccgatgggccgattatatgtaggcccgatggtctgctgtgaagggtacgatttgggtattttgtaggttatgcgtccgatggggcaggtgtaggcccgatggcccgatgggccaattgtatgtaggcccgatggggccgattgtaggcccgatggggccgattgtaggcccgatgggtaggcatcggacccttttttttggtctttttaattattaattatttagttattgttttaggtattattttatttttaatgatttattaagtatctttgaattaattattgtgttattattattattaattatt

SEQ ID NO: 138660 - DNA, 737 bp, Cannabis sativa
aaaaaaaaaaaaaaggataattgatttttttttcctatatgtatatataaaacttaaaagagcaaaacatccaatgtttaatcaaattttgtatattgaaatatttaattttgcaacttaatatgatattaactcattagtctaataattatacttatgtaaagagaatatagactacttttacgtattgagtgacatgtgtatatagctaaatataaatatatattaggaaatgacattttatgtgtagtttagaatttagattgtcggacaacacatatggtaaaaatcacatatatgttattgtatgttaaaacttaaatgcatgtataataatgttatctgtaatattttcattttttttttaattttttaaatcacaaaaataaaagtttttaaaaaataaaaatatgttttttttttgttttctttatttcaaaaataaaaaataaaaatatgtttagtaattttttatgctagtaaaattatggtcagattaggaatgacaattatacctgcgggtttgggtacccgttggtactcgcccctaatggggtagggatggaggttgacttttggagacgggggcgggtatgaatttaaatattcatattcgagtcagaaacgagggtttgggcgggagaatagatacccaccccgaacccgtcccgatatgatatatgtatatatttaagttttaaaattataactactacaattaaaataacttcatgctt

SEQ ID NO: 138661 - DNA, 1501 bp, Cannabis sativa
tatctatatttataaagttgtaatatttttaataactattaattatgagaaaatgtgttttggtgcacaataagttttacactatgtttggtagaggagagggaaagagggagggagaaggatagaaggattagagaattaatacttttgtttggcaagagagaagaagggagaggagagatggaaggagagaatctcccttcaaaagtccaaacacactatttttaatccctcttaacatgggagaatttaagaaaaagacaaaagaattatataaaatatcttttctacctttaaaaaaataatatataatgtattaaaaatgataaaatggtaattttaatatttattttactctctatcctttcacatatactcctaattaatctcaaacattataaaagagaacaaatatcctctccattccttctattccccatcttttatgatggattgagaataaatttgtattggttttgtttagaatagttgcatatgtggttaatagtttttgtggtaatgtagtgaagtagtgatgttgataagtagttgttgatttagtatatgagaatggtttttacttagaagagagggttgtatgaaaaggtagtaagatttattgatagtttgggttttttggtgttggttacaatttggaaccctcgatggggtatttatagttgctccctgttacactttatggttagaattatttcttctagatccttcttttactagaaggaagtatatctaagcaaatttaaatatttctagagttcaacataactagtatactcaagacttaatctaatctagaattctcttaggttcttagataattttttctacaagtgtgtaaaaatttctaaacttgattgtgtagaaatgtgtagcaaattctaatactccttcttggtacacattacggtaactttgatcatgtctcgtagtagctcgaacttgcctcttggtagtgccattgtgaataagtctgctacttgttcttcagtcttgtagtgcttgagcttgatttctttgtttgcttctgcttccctgataaaatagtacttgatgcttatatgcttagttctaccgtgaaatactggattttttaccattgttatcgcaatatatctttgtagcctccttctctgattctctcatgtcttctagtattctattaagccatatagcttggcttgtagtcattgctgctgcaatgtactctgcttctactgatgattgtgcaactgttgcttgtttctttgatgctcaagaaaatattcctaatccaagtgtgaagacatatcctgacgtgctcttcatgtcgtccatggatcctgcccagtcactatccgtgtagccaaaaaattttgagtcacttgtaatttcgcaccatattctgtagaattttgttccttaagtatctgagaatttgcttggctgttccgtagtgaacttgacttggatcatgcatgaatcttgataggagactaactgc

SEQ ID NO: 138662 - DNA, 642 bp, Cannabis sativa
gtcttttactgaaaatataattttaaactcatacttgtatacgtgtgatattatgagccttttattttagaaaaataattatttaaacctcatatattttgtatagtgtagttaaaaatttcagttttgcccccaaataattaaaatgatttcaaataatatatgtatataaaagctggcaattttatatttcgaccccattaaatttgactaaaagagaatatatatttgtatatatatatatattttatgaactaaaaaaacgaaaaatcttaattagtagctaaagttgttaactactctttaatcagaaaaaaaaaaagttgttaactactcataattttagtgatattttttctttgtaaaaaaaatataatttttgtgatttaacttatatatatgattgtgatagctaaattattttgctaatacaattttataaaaaaatataattaattactataaattatatttattagctaaaaattattcttaacattaattccaacaaagattaaagtaatttctttctgttaaggagaaaagtaataaaaacatagtaatatttacagtttttttttttttctcccatttcctaagaacttatgtatatataaattaattatgcaatgcgtgcaaggt

SEQ ID NO: 138663 - DNA, 2436 bp, Cannabis sativa
  modified_base (70)..(72): a, c, t, g, unknown or other
agttgtatcatttgttagtgtcgtggccgtagtctacgtggaaccgacaaaactttgtcatgtccctttnnntggtatctttcttcatgggtccgggattcttgtacggagccaacgactaggttgccatatatacactttgtatatcttctgtcagaatagtgaatgcagtgtatttggcattactctcccggggagtctttctggattcatcagtgaactttcctttcttctcgttcccttgcttgtggttgttgctggaacgcttgccacttgaacttgaattatttcagtagttgggaagttgggcagatgttccagtgaaaggagcttttgacttgcccagcttttgttcaccttctgctcgttgaatggcttcttcgagcttgatgaagccttcagcttggtcaaggtcaaggaaatcactcattgagtctactggcccgttctttcttatatccttccaaagttcaccaaggagtttgatgccccccagtatcacgaataactttccatcctcggttacctgtgaaactttggtcgcctccgtcatgaatctgctaatgtatgcccagagtggctcgccttgtcgttgcttaacttcgaacaagtctcccaaatgcaatgggagttggcgcgaggaggagaattgcaatggaattccgaagagaaggtttttcgtgaactaaacttttcaggagccaacttgaaataccattgctaagcgacttccgacagagtggcaggaaagattctgcagcatacatctcctcgtaccccttgcaaatcgattggaatttcaaagtacttcagctggcaaaggggatcttctctccccgtgtacattttccacgttggcattttgatctccggcgagaaaggagatctacgtgctcggtctaactccagatcattatttctttttccagccatgccgtgaaacatatttttcagttcgtctagctgaacctgtacggctgggctgacttgctcggcattatggtcaacttggattacgtcagcatctttctgagaggggacttgagtacgagctacgggctgcacgattgccgtaacattctgatcatctgttcccatccttctacttagatcattcattaggtcatgggttgttcctaacctttcgaacacagaagctcctggttgccttagcgatttatttgcttggttgacgggtggaatggcaccgttgatctggttggagccatcacgtatgactcctcctgatgaattaccagacaagttatactcgcctaccgttgggcccacgagcaaaactcatgaccggggattgggcggctgaccatttcccgtctagggagtgttcatagttggatcctcgtccgtttctcctaggggaatgacgttcggcgattgctgacctacagtttggtaggctctttgtatcaacacggtggcttgccgactacgatcttcaatgtctgcatggtgagcccttaatgcttccatctctttatctctccattcggcgaacatacgcctttgttcgtcgaacgcgacatttactgcagcacgcagttcgtcctaatcaggatgcagagtgttgttatgaccatgcatgagtacgagtgcgtcacagagattttgtaatttagtggcatctctgatagtcgtctgggcgtaagttctaggcaaaacagtcggactatgaatgccctggtctgggcgtcagttgttatttccagtctcttgcttaccaggcgcaattccatctataggaactgtttcaccataccccacacttgccagctgtccaggattaacagcaggtagaacccttatgctccctgggttttacgatgtaggatccagcgtttgtgaatttgtcggatcagtcaggcctttatgagtttgcaccatcgtattggcggttggatgttgaataaagagcgattcgtgatcctcctctccatgaaagcaccaaaatattgatctctcttttaagcaacgacaatgaatctattttataagctataaataatttataataacagatatacgataaagcaataataagacacagggattttatagaggtttagccccgatcagttcggtaatagcctaatcctcgttacttgtattttcttaagatcaaagagaaagatttcttttcttatagctcttacaatagtatctttgaatatataattcttagataatagtatagtcttaactcaacaacttttcgaccgatcccctgcccagtgaacatacatcactatttatagggcaggtaagcttggagaggaagagtttcccctctcgttacaatgcatataaacagaaagatcgtgggatcaatgctgaatacaaggatcgtgggactgaggttggatacactgatagtgggatcgtgtgtaggccatatccacgtaaattgatccctgagtt

SEQ ID NO: 138664 - DNA, 750 bp, Cannabis sativa
gacaacaagtgacagaccagctccttcaaaggagctggccagccgcccttgcctctaagggaggaccctccactggttcctcctactaaaggaaggactcatgggcgacaaccctcaggaataacaattgaatctcatctctggtattatgttggagagataggactaggagttggcgagccccatgtggacttgagagaagatctcaagttagccggacttagagaagccatcgaccaagccagcctaactgaataaccatgtgccgctgattgcgttatattcgctcagtagagacgtgaattcttgaggtggatggatgaccaagagtacatccttcgatctcaccaagcagagcttaatcactgcaatagagaggtcaatgacctgataaggtagttcaaccagaaaattgatggaagagaccaagatttcaatagagatccacttaaaggaagactggttgatagatctaggaagatctatcgaaaagctaaccaacttggttcctcagagactaggacatgtcttcccttgacagagggaggacagaccttgccacaaaggccaaatggcgagagcagccagatcccaataaccagcagcatgggtggctagccagggatctcaagctcagcaacaacccccgtcattaggggtgtacagaaagtcatccaattcaattacaaccgaccgatccaatagaatcagatatctaatcataactggatcagatcggatgtaaatttt

SEQ ID NO: 138665 - DNA, 689 bp, Cannabis sativa
ttatctcaaagtaaagcttattaaaaaaaaatcaactagtatcgcaataccttactttttaataacatttagtaacttttaaatataaaattaattttttgcggatagattagtcacacttaaaaatacttttaatatggtacatatttgattttatttgaatttaaaaattttgttatttttttgaacaatttataaaagaaacaaaatgattacttttaatttcaaatatcttcttcggtgatgttaaaaaaaatataggattcttacatatcaaaatgattaaccttaggagtagattgcaataatattattttttaatcaaaaagattaacggtgtagttgttatttttttaaaaattgtaaaaaataggaaatagatataaataaaaagaaaataaaaaaaaagattaatcaccataaataaaagagaaaatgatgaaaaaaaaataaatgtgccacttgagtctaatactaacgacagaaaatatataccatatatttgtttatatatgcagtacaattaccgcttattgtatcattcaaataactaatgttatacttattagggatattggcggctaaaccacctaaattttacggtttgtaacacttaaccacaaaaaccaaaattttggaggctaaactacctaaaccctggttctgttttactctacacacctccgtcc

SEQ ID NO: 138666 - DNA, 845 bp, Cannabis sativa
atttcggtatttatgctgacgtggcaatcggtatttgtgcaaataattttcttaaaggtatttttataaataaaatcaattttaggtataatattgaaaagacccctataaaaaatagtaacggacgagattcatgagttgaccagctcttttttcttaaatccaaattttatatggttatattttttctactttgtttatttatgaaattaaatataacaccttaatctatatgttttagaggaaaaaaaaacgttaatttcaaattcaaagtacaaaagtcaatctaaaatcaaataattaccaaaaattattcattaaacttcatgttcgtgataataaaaactaaagagtctcaaaataaaatgtgaataaaaaatcaaagtctatactccttatgttcattggatcacatctaatgaattttgacccaactgatccaatccaattgtttactagatattgaattttgccatgcaatctattctaatcgaattgagtcatccgatttgatctgatccagtggatgtattggattggatatgttccaaccattaaatgcactaactggcttttattgaattgaattggatccttccaatctattgtagctactatttaagttgattttattaaaatatatatatgaaacataatttaaaacctaataatccaacatatataataaatattaatctagtctaacctaattctcataatcccataataaaatcgcaaaaaaataaaacttattcaatgtgtattgacaattttattagtgtttaggaagatgaaaaataatattttagatttaaaatttttttcgttaatctcatgtgttaaat

SEQ ID NO: 138667 - DNA, 1119 bp, Cannabis sativa
ttaggaaatttacttggtaaattttagatctacttattgggagtttggttacataggcccatggtcccaaattgtctgagataatattgtcttgtagactcaatattaatttgttttaactaattaattagagttctaaataagactatatcttgtttatgaattttcactaagcaagggcttaattgagaggagatagaggatttagggtttatttgttaatcagttttattttataattaattataattattaaataaatagatttgatatttataggattagaattgaaatatgacttttgtgaaagaaaagataagttattaaataaaatggcaaaattaaaatctgtcgaacccacataaggttcggccaacaaggtttaaattaagtcattattttatcttttttaattccatataattcaaatcttaacctagatgaaatcctataaatagaaagagatgtctcttattttctaacctaagcttttatcaaactactttgtcagacaacctagaaaataaagagagcctcttatatattcgaaattctcctcttttcatcttctaattttcgaatgccctatagtgagttgagtgatttcccacacaattcaagccaacactcaggccttttgtggaagattgtgaagaattccaacaacagaaggagatccaaatttagatcttgatcatactctgcgacagaaaggatcaagggttagagatctaaacggaaagagaattatattcaagcctcttataaggttttctataacattatatgtgtttattttattgttttaagaaattcatacttaggatgttagattataatttataatattacatacatgttagtaatgtagatcctgataaaataagttccaacaatgcttccctcagccaaatcccatcatggtgggtaggctcgagttgtctcagttggcttattgagcttttgtctcgtgacaagctccttccatgttcatctccaggggtgtgatattagtagatggtttacattctcaactattttccaatgtctacctctaagcaaatcatcgaggtaaaatacttgcttagcttgggtagcaagtataaatgggtcatcttt

SEQ ID NO: 138668 - DNA, 723 bp, Cannabis sativa
cacaatattttaacactcttactcgtttttggcatcaattagatttgtttgaaacttattcttggaagtgtgcagatgatactgctctatacaggagtattgtagagaaaaggagaactttcaaatttcttcatggtctcaacaaggaacttgatgctgtcaggagtagaatcatgagtatcaagccacttccaactgtcaaagaagcattctcagaggttcgacatgaagaaagcagaaagaaggtcatgatgggggcttctcttcctcctactcaagaatcctctgctcttgctgcaagaggacagcagaagggtcgaccatggtgtgaccactgtcgtaaacccgggcatttcagagatacttgctggaaacttcatggaaagcctgccgattggaagccaaaatcatggaaagacaaagagagtcacgggaacgtcgctgccactctaaatactgctgctgttgtaggaaatggggacacatctgattcatcaccgttcactaaggcgcagttagaggcacttcagaaactcctaagtcagtcacacatcgctgcaaagcctgatactacacctggtacaggacatttggccatgcaaggtaacctttcagtagcttttattgtcaataaaagaactactaacccttggattcttgattcgggggcatcagatcatatgacaggagatgcaaatattttgtctgaatttcacacaagtc

SEQ ID NO: 138669 - DNA, 560 bp, Cannabis sativa
taaataaatttacaaaatatatgtatatattttattaagatgtaattattcttatatagagatatactttgttaatatggaacttaaaaaatgtatactttggtactcaaaataattttttaattaacttttttcccatgatcatgtacgttataattgaaaaattgagtttttgcagatgccaataattatactaaatttcagtaaaaacactgcagtaacagtctgtagcagcagaatgttattctgtcactgcagaacacaattttgcagaaacaaaccagaaataaatagtgcagaatttaaaaacttgacacaagagaatcgtacgtggtatcaatgttctttcaaacactactagtccacgaggccacgcccagagaataaaataaattagtaaagtatcaaaatttacaaaagcaattgacttaaacaaatttagactccctctagtgacttgtcgtaaccctttgtaatctaccttgctaatctgatctctgaaatacaccaagtagtgaactcccttcaactattgatgtgtgcttacttcctcccaaagt

SEQ ID NO: 138670 - DNA, 631 bp, Cannabis sativa
  modified_base (207)..(215): a, c, t, g, unknown or other
ggagtactcaacagattaaagaaccaccatgttcgaagaaaagtcaaaactcaagaagtcagaaagctttcttgagttagggcaaaaaagttcattaaacttagaataagccacatggaagacagacgcaatgcagttcaaaaataagctctacggctgaaagccaacataaggacttggaaaagaagagtcgcagaagtttctaannnnnnnnnttcctaagcattctttctacaacatagcttcatttgaagcgtaaacatgcaaaggaaagcgtaaaggaaatcaaaaacttactcaaagattcaaatgtccgagttcaagcaagccagcaatcgtctgtaggcacttcgacaactttgaagccagaaaactctctcttttcgctctggagtttacttaacaatgaagggtgataaaatgagtaactgcatacaaaagaaccttagacgcctcgacttcctgcctcaaaagtgaatatgggaaatcaaaagtaatcgactgcaaccgtcaaccatggagtgagaaacttggattttcaaaatattaattgtcagagcattcattagccgaaaactaaagggacgcccagtcagcttcacatcgagtctcaaacggtcatgctcgacac

SEQ ID NO: 138671 - DNA, 1194 bp, Cannabis sativa
  modified_base (30)..(65): a, c, t, g, unknown or other
tactttactactttgttttcagacttagtnnnnnnnnnnnnnnnnnnnnnnnnnnnnnnnnnnnnactttcttatcttaatgaccataacatggtaactattctagcttttcttaagttcatgatcaggaaatccatgaatctagtaatggtttacactaagtacacaacgcttaacgcaaatttttgttaactatatttgagcctaaattgtgatagattcgcatgaaaaccaaaagtagtaaagaaaaaaataagaacataaaggtttttacgtggtttcgtagttcaaattctgcatagtccacgagtcaatcttattaaatttcttatgcagttctagggctcttttttctaattagtttttcatccatttttcagtgtaacctgctcttatttataactacatatgacgacagttaattacagagttgactgatatcttacaacaattatccactgaaatcgtgggatttgattacatcacatgtaaaataaatgcagttaatatttgaaaatcacacaactgtgattggtccacttttaccgggtcaatgtaaatgtgtataaaatacattggaacccatatcgttctgggacgtctcactgggaacatagcaacaataatcctggtagcgagctggaacttttcccatgcctttccgaggttgataatgtaaacctcgttgtttctgcgtttcaagacataatgctctaattgacaatcgcagttcttggtgacaaggtgaactttagcagttaacgtcatttgaatgtcagcttctatctgagagagcagactcgacgaagctgtggatctcattgaaagatgtctagagctgattattgaaagtaccatgagcgcgccttcctatagcgagatggatgcctcgctattagttgtttggatttactcgactattatacttagtttgtataacttgtattatacgcttatttccttaacagtcatcatgtctcgtctatgtatcttcatgcgtagcgaggttgatgcctcgccttgcactacaggtgtcgtatggtttctcgttaaagtacgagccaaaagtttatatatttttatcttgcataagaccttatagttagaaagttgtaaatatactctatcagtttcgcatttaatgagttattccattttcaaatataattatcattacatttgttgattcgtatt

SEQ ID NO: 138672 - DNA, 528 bp, Cannabis sativa
ccgctcttccgatctcacaacttttttacttttagtcacaatttttgttgtgactaaaagtaaatttttttgtactgggtacttaaaattaaaatctagctcgggaaacaaaagaagaaaatgaagctatagtaataataatagaatcattattatgataagtaataatataagtaatataagtaatggtaggtcactaatataaaatagattttcgtgtcggtttgagtgacgttttgtttttaaaaatcgacactaaagtctatcctaattttttagtctcggtttataatttacacctataatgactttaagtattagttaatagaccgacactaaaactataactaaaaccaaaaaaagttaaaaaaaaatatgcatacagattaagtataagtgtcggtttataattgacactaaaagatcttttggtatcgcttataaaccgagacttgaaggtacttttttttttaaataataataaaaaaatagaattaaaaaaaaataaatagaatatttgaaaatcct

SEQ ID NO: 138673 - DNA, 1088 bp, Cannabis sativa
  modified_base (897)..(899): a, c, t, g, unknown or other
gcatataacatatcatataatgtcgacttgtatctaggtgcccatacacctattacaaggctcaacagatgagttagaacgatctaactaggatacgaccatgtaccatgtaccacatgcactcagcataccatcgtactagtgtaggtaaggtatgaaccacaccctgagtactgttaagtgttgtaccacagacaccttgtatcttcccgtacaagtgctggtaacaccacgatgtactttcaaacatcatacactttaccaatgcactttgtaccgcaacagtacaagtgttggtagtgtatgaatcacaacatataagcatgtatatacactaaacatatacatacattcgcatatccatataaaaattatattcaattcttaccttccttccagattcaagtgtgttggccgacctgaacggaaagtcttgtgcaaaatggatgtcctaatcacataatgacaccaggtaaatcacatgatcaaaaaccctaatctgggaaacctgaacccacaactgtaggttctgttatacactctagggcttacaataactgaggaagtaaggaaacacccaactatggcactaaaatggacgagaattgacaaaacgagacactcggggaaccctgccaaaactggctaattggtttacaggtacctgtaaaaccggttacccagtttataccagttcacccaagaaatctcatttcttgctcaaaactccaacaaatgcaaccaaaccttccagagtacctaattaaggtataaacaatattttccaaccagtaattcatagaaaaacaccctaaatcaaaacatgccattaaagatcaaagtttaggttttcaaaccaaaacttgcataaatcttgttatcccaatttttgcactnnnacgtggcatcacatgatggtgacacatggaaatcaacttcgagtatctgctcgaagaatacaatccaaacaggatgcctcctacgcatgcttgaagcaaagcgaccagcaatccgcgcagagcgagcaacacttagcaaattcacttttgcatcgtgagtcatcaaagaaatccctataacttggggat

SEQ ID NO: 138674 - DNA, 683 bp, Cannabis sativa
tcaagtgcatgccatgaggttgtttcatcgaattaagtatatccttttggagatagaaaatgattttatgatattaatgtactcatattgatttttcatttattttttttctggtttattattgctttaacactttcttaattataatacgacattgcatgttatctcatatatggtttcattacatatgtcaatatgtatagttttccaatcaaagtactgcgcatgcatatgtaatggatatttttctattaaaacctaattagttgccatttaaatttaatattgatatatagcactatcaagcaataactagatcaatggggaaatatatatatatttatatatataaattgatataatttaacataacaagatcaactaatattatttatcgtagttcaaagcacaacttacatatatgcatttaatattatttatcgtagttcaaagcacaacttacatatatgcattgcggctaactaattaatcttgttcagttgtgggcaagcgctaattatttttgaatcatgacatgaaaaagcaaaaagaaaactaaaatacttctttcattatatatctaatagtttatttatagcctagctttaatgataattatccaattaacattcttttgaacgctcctttggctagctagccaggtagctagacaagtagtccca

SEQ ID NO: 138675 - DNA, 577 bp, Cannabis sativa
ttcaaagagatccaccatttacttatttggtcatttagaaaaaaaaaatagtcaattttcatttatattcgtgcatatttagaataatttataacataaaatatagtatttaaaaaatctcttaaaattttgcaataattataacatatataattataaaaaaaataattaaaaaattatttttaatatcaaaatagataagagtacattcttttttaagaagtatattgtaaaaaaattctataacatattctcaacaaatatttatatattattgttttttaacaaaaataaaagagaatatttcattaaatacaatcattcaaatagtacattctcaaaattagaataaatattaagctcaataaaaatacgaattgcaacaaaaggtatcctgctacgttttgtttgcacaagaacaacacaatctctttcaataaccacgtaggctgaactcttaccttgatttaactaagcgcttctttaattcttaatacttcagtcaccttaggctgaactcttgccttgattcaactaagcgcttctttaattcttaatacttcagtcaccttaggtt

SEQ ID NO: 138676 - DNA, 638 bp, Cannabis sativa
  modified_base (48)..(58): a, c, t, g, unknown or other
gaatcagatatgagagcccagaatccggagttattcaggttagatttnnnnnnnnnnntccttttaaggggggatagttgtaaagaccgcttagtttaaaatttggaaattagcatataatcagtttttagttatgaaaattatttattgatatttaaataattatttaagttgatttatttgaattcagtgtcatatagtgaaatttcataagtttgcattttctgtgcccagcaacatggaacgcggtgtatggctcagtagaatcacaatttagtattttagtatagccgggcgatttggttagacattgggaatgtcgggattggtcaggaatttagaatttcccaaaatacccttagtaccctttttatgccattttagtgtgtaagggcaaaatggtcattttcccatttgtgttttgtcttctagtggggatttaatattgggttttaaatctgatttttgtgattattagctgatattaattcaagttaagccattatttacttcatttcatttatttttcaaaaataagaaaaattgggaaaaaactttctctcttcagacacacactctctctatctctctctctttctctctctctctctctctcgtattttctcacgttggactca

SEQ ID NO: 138677 - DNA, 860 bp, Cannabis sativa
aaacaaatcccattaatatttaaattgatatttgaactgatattaaatattcgagaatcacaacctattaaaaagaaacaaccggagatttgatacggaaaatcatagcaataccctaaaattaaatgggaagtagacttttataaagattaatcgtactttgacgtaaatttgtttttatttttcttcctttgacccctctgatctctcccaacatttatgatatgcgtgcaaaattctatacatatatatacacatggagggtttttgattaaaaagattagaagggacaatgaataatttaacaagtatgttggtcatggtgaggctgctcgagttgggcatggatatagaaccactcataattttatgatctgaatagaattgcaattaaaaatattgtaatgatcagtgtttcaaattcttctatcgttttattgtttttggtagaaaggtatatatcttgtgcctactctacctctgcttattgtttgtgtaaagaattttgtgtacaattatcttttttctcagaattaatatatatacaattatctttcttccatttgcaaaatgggccagcaaagcctcggcgatataagtatttttctcgatgagatcgacaaaaggtgttattctcggcaagataatagaaatcggacaccgagattgtaaagaccgcttagtttaatttggaaattaacagttaattatgtttaattatggaaaattatttatatatatttaaataattatttatgctgttatttttgaattctgaaatgcattctatatcatataatgattttcataatcttgcattttcggtgcccggtaacatggaactcggtgtttggctcagt

SEQ ID NO: 138678 - DNA, 568 bp, Cannabis sativa
gtgcggatcgaatgcactatgagcaaaatagtacggattggattggatgaacacccctaaaattgataggaatattatgataagttgataatatatgtattaaggtaattaggagtatgtgggatgccctaaaaatagagatttcttagtgactaagaaataataagataattatgaataataacgttttggttaatattattaatattaatattattattataacattatttttttcaaataaacttatcagttatgttttatatatattataagcttataacagtaatcctccttctcttatatctattttttcaattttcaatccaaaatttagcgatctaagcttcggtagtaacatgataacaaattcttagagcaggaaagcttaaggtaaggtttattttcattttaagtttaaaacaattggtttcgtatgaggcttttgcgaattagagtagttattaaagttctgaccttatagaattgtcctcgagtagtcatgggactagttctgatattttctttctaaaattgaggtaattttgggttagaaattgagtttaga

SEQ ID NO: 138679 - DNA, 664 bp, Cannabis sativa
atggcgagtattatatttcaagtattacgatgtatttattacataacaatatactttatgtaactatgtactttagcgaataaatcataaactttatatttattctggtcctttgaagatacaattttctcaaataaaattaagttgtgcatgaaggtgagaaaatgtttaaataagcattttattgattatataaatttaattatacaatgacgactgtacaagaaaatctaaatgtcatatttaatttatgatacttaaatttatatctcggcatgccttagtcaaggatactgcgatcattcaattcaatattgcgtgcttaatgatcacttatcacatttcttcatggctaagaattaatgtgatatgctagctttgatcaaaattatttgccatgaatattgtagctaaattgaaaaactcttaatggcctaaaaataaaattttgaactctaggcttggtatgcaatattagattttatggtccatatcagagctaaaaaagcagaatcaaatttaataaaattaatttaatccaatatgaatcataagcctaagaatgtcaatataatatatatgttatacccaaaattcggctggcacttcagaggaggacacgtgtcaaacttggagaatacgaatcaacaaatataatgataat

SEQ ID NO: 138680 - DNA, 513 bp, Cannabis sativa
ttttttttttttttgttgataagtgcaagtactttgagtttgagtcactattttggttacataatcaatctcctctgaaaatggaaacttaataaagaattaaaatgcaactatttattgtaaatagttaggagtgtttatcaaatccaatcaataatattttaattcatagtgcatctgatctgcactaagtgcacatttcattttttggattcaatacaatccgcactataactcaaatccaattcaatccaatctgcaaaagtgcagattgaatcgattattttggattggttactttttaatattaaattatttaatatatatgaaaaaaataactagcaaaaaaattaagttttttatcaaatatctaaaattaaaaaaaatcttttaagatttttatggaataaaaaaatatcttttttatattttttaattttaaattattaattttagttgaatatatattttttgaaaataaagcgtattatagataggaaaattagacctcac

SEQ ID NO: 138681 - DNA, 756 bp, Cannabis sativa
  modified_base (407)..(407): a, c, t, g, unknown or other
tcctaaaacaagtcaagaacaatcgaattttctacaatggaaacccaaaaaattgaagattcaagaataaagggagaaaaagatgagaaaattactcactgtatgaagctttgatgttgttcgaacgaggctgatcaactctttttgctgaattccacgacagatttgagaaagaaaactattttttgatctgagaagggtaaccgtcaaaagcgtgcgagtgaatggcgcgactcaaggtagaattcaatcagagcattaattagccaaaaactgaaggggctcctagtcagagtcacatcaaatcatgagcagacgcatccaacatgtgtcactcattcagatgcgaggtcggcttaggtgaagtctacgcgtgacttcagaaaacccgtgcagacttggggggnaaatgttatcccattttttgcactgtgacatggcaacacatgctggtgacacgtggaccttattccctacatctggttgaagggatgttccgaacaaagctcagcatacacttgcacggataatgtcttcccaaccgagtagtagacaatccgagcagcgtatcaacacttagcaattccaagacttgcatcgtgaagcacaaaagcaatccctataagtttgggatcgtatcatagagatatggaaagcagtccaaatcccacaaatcaagagattttattgtgagagcttcaagagaagaaacactatattctttgttcttagttaatacaaatcaaggggagtagg

SEQ ID NO: 138682 - DNA, 1103 bp, Cannabis sativa
ttgataacagctccggtgttagctttgccatcagatcgagaaaagttcgttgtttattgcgatgaaagcagaaggttctagaatgtgttctgatgcaagctgacaaagttatagcttatgtctcttgtcagctgaaagactatgaatagcgctacccaattcatgacctagagctttccgccgtggtttttgctctaaagatatggcagcattatttttatgatgaaaagtgtgagatttatactaattataaaagtctcaaatacttttttacccagaaagatttaaacatgaggcagagaaggtggctagaactggttaatgactatgactgtgagattctgtatcaccccgagaaagccaatgttgtggctgatgcactaagtagaaggggtcccgggtaggtttcaccactgttatgatagcccctcacctagcttcagagatggttaatgcgggaattgagtttgtagttagaaagttgcataacttgacacttcactctaatttgctagagagaatcagatgggcacaattagaagatcccgagctagtcaggattcgggatgaggtgatggcgctggtcggcctgaagacttttcaatctcgaataatggaatgttactgtataaagctcaagtttgtgttcctagtgttgatgaactcaagaaagaaatccttgatgaagctcacaccacaccttattcactgcatccgggaaccaccaaaatgtatcaggatttaaaaccctacttctggtggtatgggatgaaaggagatgtggtagactacgtgtccaactgcttaacctgccggcaaatcaaagctgaacatcaaggctggcagggctattgcaacctttagcccttcctgagtggaactgggaggacattgcaatggatttcgtaactggtttgcttagaaccacaggaatgtataattcaatatgggtcatagtgtacatattcccaaaattagctcaaatgtcgcttccttatttattgaaacgaaactggagaaaggaagtacttaggtacgaaattagttcagaggaccaatgaagctatagacaagatcaaggctcggatgcttgcttctcaaag

SEQ ID NO: 138683 - DNA, 534 bp, Cannabis sativa
taattaattagcaatttaattagtgtgtaatgtatattattgtgattgtacaataattaattaattgtatattggtactgcagcttgtggcaggtcttttgggtgtgaaagcagggcaagatggtgtgattagagcattgttgtaccagcgtagagatacaagagtagagccatataatataacagtgggggagttcacaaatcgaatttctgagctaaggaacacacttggacgaggtggtgtgaaagaagaagggcttataaacgtcacaacatctttaggggttggcggaattagggtttccaccggaaatgtgttgtctgcaaacattgactcactttcgtatggaaggacgccagctgagatacttcgaattgtttatggaactggtaacgaacgtaggcctggggccttctttcccaatggagctaatggtcgtattgctaccatcttatctgcctagctaataataacattattaatttataaccataaaaataatattccatgttccatatactcctcctcttaaa

SEQ ID NO: 138684 - DNA, 817 bp, Cannabis sativa
tgagtattgagaatgctctaaatggataaacataggttttgatgtgaaacgagagtatttccatagcttgtgtgaccttttagattattgcttaatgcaaattgttgttgtactatctcaaagatgcagtagttgacatgtaatttaggacctttatgatttaaaaagcgtttagattattttataatctgtcatcacataggaggaagaagtatagttaattagtattaatatatcattgggtaatcaaagtaattgaaaacatatccccaatttcacatccatttttaaacctttaatttgtttgttttatttattttttttgcttattttatttaattttaaaatttatctatttgattgtcaattagaaacaagaattcaattgattggtacttagctatattcctcgtgggaatgatctcacttaattacctgagtatcacttgtaaaaacgatatgtatacttacttgttgtatttatcataacaattttttagcgtcgtttatcgagaattgttttagttaatatcaatatagttgaattttattctaatttggttttttttatttaattttactaatattttactgaatatgtttgacctgcaaggtaaatccaaatgctataccttgtgaattttgtccaacaacacaatgagccattctattctgcttgggagagatttaaagagcttggagagagatgttatcccaatttctcaactgggtattttacttggttcttttataacaaacttgatgatgaaacaagaagttgggttgattatggaacagagataacctgtgttaagga

SEQ ID NO: 138685 - DNA, 859 bp, Cannabis sativa
aattaaataggaaatgatatttaagttagaaattttccaatttcaaatcaacttaaattagaataatttttcaaaattatttttttattaaatttcgaaatgcatttaattattaaatgcaaataatattttgaaacaactacttttaaaaaaattagattaaagttgaaaattgttttttttaattaattttagatcaacttaaatcaagtaaattttttattaataatttattaaaataaatagactaaaatatattatattttatttagaaaattattaattagtttatgaaatatctagatagttattttctgagtagaactttttggtatttttctagatatctttaattaaatagaaaattcaagacacttaaatattagatattttcaagtagtttaattaaatagaaaaattatatttatgttgaaaattagttgattaatttcaaaccagcatatattagaataattttttaaagaattattttatgcaaattttgaaaatgtactattttaaatttattagattttgaatttattacatatatttataaaattaaattcgagttcaaaattaattttgattaattttgaactaacttaaattaaataattttcataatatttattgaaaattaatactaaggatgaaaaatgaattttatttatttttcagatctatctaaagtataattttataaatattttattaaaatttatctttagagttatttaaattagtaattttaatttaataaatatatattaaaataaatagattaaaatagatatgaaatgaaaatacatacttaatataatgagctttagtttaaggatattcgatctctattatt

SEQ ID NO: 138686 - DNA, 507 bp, Cannabis sativa
cccctaaagatgaatctttcatcatcacttggcttttagtttcatagataaccttccatagttatacttacataagaaattttacaaaaatttacttattaagtatagttaggtacaataaattaaatcatttataaaacaaaccatagtgaacttattttcattagatatgcctaatgacatacttggaacactttaaccttttgtaaaagtcatagataattctatatctaatatcttttgtactttttttaacagtgttccatatgcaacatactgaattttatctttatccttatcctttattcgaaggaggtagctaaagaagcatgtttgtcccttttctttagttaaaaatttatctcatttagcatgagaattaactttatgttggtagatataactaaaatatgagcttaaaagagaacaaaataaacaaaggttcacaaaagaatccacataacaaaataagttcaaataatggcaaatcccatctcaagataccaa

SEQ ID NO: 138687 - DNA, 825 bp, Cannabis sativa
  modified_base (95)..(133): a, c, t, g, unknown or other
aaaaaactgcctctaaaggctaatattgtagtagtgttcttatactttatatgtgtttatgtcataatcattttagaagttcatatttagggtgnnnnnnnnnnnnnnnnnnnnnnnnnnnnnnnnnnnnnnnaaataatttccaacaggatcatcaaaagttgtggctgaacttgtggcccatgtgcgtaccatgatcgtggaaaagaaaagcagaatcttgaagcttgcaatttgaatttttagagcttcagtttatatcatctgatgccatattagaagtagaattataattgtttaatgagagcaaaataatactgtgtattattgaatgaaccaatggagagttataaatatttataatgttagactataatataataagaacaataaagcatatataaatgatatgtaatgcaaaataaacagtaaacatatcgaaaatgtatgcaatgaaaggatcgaaatatttccagccattgatgtttgagcttcaatccctgcgatagcttcggtataggaaatcgggcttcctcgctctctcaactctctttagattgaattttaatgttttgaacagaatgagtagtgagttcggggaccgatgccctatatttatatagatgagaccttccatcaaggtctctgccacaattaatgtcagaatattttaataattaattctagaaattaaatcgggtaactaaaatatttggtaattaaatctgactataattaaaatattttaattgattagtcactactacaatattagcctttagaggcagttttttcaaccccatttataaaaagggaagctaaagg

SEQ ID NO: 138688 - DNA, 522 bp, Cannabis sativa
ggtttggtgatcatgatgaatctcattcatccgatcacacattgtcgaagtcttcttcttcgaatgagctccaaatgtcgagaaagctataatgactttgcccacagtgagttctggaacaaggtccaaggtatctactcctcaaaaacccaaggtggtccagcccaaaaatgtttccaaagggaaaaaggtaatgacttcatcttcaaaggccaaaaatctcaaagaaaatcccccttcggtctcatcttcggattctaaacctgaagaaggaattgaggaggatcacgaatcagagggtttgtccgactcaagtgaagaattttttcccaaagatccatcatctgttgttgattttgagtctgaaactgaaaagcctgaagctgaacctgtaagtgcagaacctgttgcggtccctgctgcacttccaaagaagggtaaaggaaaaagacccattgtctctccaagtcctgttcttcctcagaaaagaaagaggccctctggtatttctcttgataactt

SEQ ID NO: 138689 - DNA, 628 bp, Cannabis sativa
  modified_base (570)..(591): a, c, t, g, unknown or other
gaattggaataggaatgagaatgggaatgggccttggaatgggaatgggaataggagtgggccagggaatgggaatgcaaagggaatgggaacagaatggggatggggatgggaatgggaatgggaaagggaaagggaattggaatgggaatgggaattggggtttggggtttggggtttgaggtttggggtttgaggtttggggtttaggtttagggtttaggtttttgggttggggttgcggtttaagggttagaggttagggttttgggtagggttgggggtagtggtaggggtagcggtagtcgtttgggatcaggggtgtaggggtcagagttcagggttcagggttcagggtttaggttttaggggaatgtgaataagaattgaataaaataaaatttaaaatgcataaatttttcttattaaaattcatcaaattttttctcatgttacatgataattgtcatttcttccatttcgaaatagaatattcattcactgaaattttctagatagaatgtacgtacaactcgaaggaaattatcatttcacttctatttgctagannnnnnnnnnnnnnnnnnnnnntatgtttagcgctcccactcacttgcactaccatgtt

SEQ ID NO: 138690 - DNA, 3832 bp, Cannabis sativa
gtgcccacacacatcaactggtactcaatcatagtgtgtaaggcagtgaagaatccaaattcaagagaaggagattcagactcagatccatgtgatactctgctacagacaagatacaagggttagagatctgagtcgaaagagccattataattccgctgcacccactgtaaggtttctgaaaatttatgtatttacattgttttagagattcatatttaggatgttaaatagcatacatagttgtaaatctagatcatggtaaaacatattcctacataaccgtcatccccttgggcaaaacagatgaagatccagcgatgaatacctctcctattataaatggtcagccgtcaaacccccggtcacagattccacctgtgggccaagtagtaggtgggcagaccttgtctagtaattcatcaggagaagttatacccaataattccaaccaagttaatggtttcgctcaacaaattggccaaatcaatcagtcgctgaggcagccaggtgttttcgtatttgatagattggggatgactcatgatctaaggaatgatctgaacaggaggagatgagtggacgatcagcttgatgcgccaatcgtgcaactagaaacctatgctctaaatcccgctccaaaagatgctgatgtgactcaggtcggccaagaggccgaacaagttagtccagtcgtgcaggcatagctggacgaactaaaaaatatattccaaggcctggccggtcagaggaacaacgatctcgagttggaccaagcgcgtggaacccctttctcccccgagattatcctggaattaccccagaagtttaagatgccaacctggaagatgtatactacgaaggaagatcccttatcccaccttaagtatttcgagatgcaaatggacctgcaaggagtacgaggtgatgcatgttgcagagtttttcctaccaccctctcagaagccgcccaacaatagtatttcaagttggcgcccggaaagttcaactcatggaaggccttctccttggagttccatgcacaattctcctcctctcgccaactttcattacatctaggagatgtggtcgaagtaaagcaaagatcaggagagcctctccgagcctacatcagcagattcatgatggaggcgactaaggttgcacgggtaactgaggacaaaaaggtgtctgcgatattggggggtattgaagtccttggcgaactttggaacgacataaggaagaacggacgagtagactcgatgagtgattctcttgaccgcgtagaaggttttatcaagcttgaagaggccattcagcgagcaaaaggtgaacaaaagcctagccagtcaaaagctccttctactgggacatccgtccaactcccccattttttgagcaatacaagctcaagtggtaaacggtccaacaacaataataggcaagggaatgggaaaagggaaagtttgctggcaagaccaaacaagctcccgaggagaattctgtgaagtatactgcatttaccgtcctaatggaggacatagaaagtaattatatggctactcagtcattagccccgtacaagaagcctgcacccatgaagaaaaatgtcagcaagagagatatgaccaagttttttcgttttcatggggattacgaccatgatactaatgaatgcaacaatctgaagtggtaaatcgaattcctgataaggaaaaataatctgcacgtacagaagtatgtaaaggccgatcagaaccagagaggggataacacccaagacttgctaccaccaccagtagatggacatctacaagtcatcattggaggaccgcacataacaggagatttaggcaaagcccgggagaggtatgcccaaacagtacagcacgagcaagtttaagtagtcctgactgtagaagagaggaagctgaagatcccacgggaagaggaacccaccataacatttaatgatgaagatgttaacaacattagattcccacacaacgaaccgttggtcgtggaagtccagatagccagcaagatggtggcacgaaccatgatagataatggagcttcttctaacatctcattcaagacaacatacgaaaagatgggactctaactcaaagatttaaccccctgtcttcagcccgtgtatggcttctgcggccaaggagtcgcaccactagggcaaattcgcctacccctcactgttgggaaagctccaacaagcataactataatggcacaatttttggtattggacgttgcatcaacattcaacgtcatattaggccgaccagctttgtatgacttaaaggctgttacatcgatattccattcatgcgttaagttcccaacaaagaatatggtagggtgtctaagaggaaaccaataggttgcttaggagtgttataaccttgccatagccaaggctaagaaggaagtatcctctagctagagctcggacaagggaaaaaacatttctaagtagggaacttcccaaggtatggatgaagatgtggatcctcgactttgggacccaagcaacaatattggacctgtggaagaactagaagagattgagatcgacccagatattccggccaggaaactcaaaattggaaaaagtttgttgctcgaagtaaaatcagcattgataaaatttctgagattggacgtttttgcctggtcacatgaggatatgttcggaatcggtccttctgtaattttgcacgtcctaaatattgatcccaacttttaagcaattcaacaaaagcgaaggttgttggacaaggagcgagccctagccctgaaggaagaggtagtgaagctacgaaataacaacttcataattaaagctttctacccggctcgggttgctaatcctgtactggtacccaagccgaaaaagaagtggcgagtgtgtattgatttcacagacctcaacaaggcgggccccaatgactgttttccacttccaagaatcgatcagcttgtggacgcaacagccagacacgaaatattaagcttcatgggcgcctactcagggtacaataaaatcaaaatgcatccaccagaccaagaacatacaagtttccgaacagatttgggtctctattgctataaagtcatgtcgtttggtctcaaaaatgctggagccacataccaatgattggtaaataagatgtttaaagactagatcagacgaaacatggaggtgtacgtggatgacatgcttgtaaaatccaggaatgttggggggcacatagatgacctggatgaatgctttaaagtcctcaggaaatacaacatgaaactcaatcccttcaagtaatcctttggagtcagctcggggaagtttctcggctttattgtgtatgcccaaggaattgaagccaatgcagagaagattcaagtccttctggatatgaaatcatgaacaagaaccaaggaagtacaaagtttaactgctcggatcactgcactcagcagatttgtttcaaaatcaacagacaagtatgttccattcgtcaaaatcctacgaggaaacaagcaacttgagtggatggaggaatgtgaaaaagcttttcaagagctaaaaacgcaactcgcaaaacctcccgtactctcgaaacctctagacggagaagaacttgggatatacttggctgtcacggaacatgctgtaagtgtcgtgctgaatagagaggtaaacaacatacaacacctggtctattacattagtaaaagactaattgaggccgaaggtcgatacccattgatagagaaactcacttagtgccttattctagcaataagaaag

SEQ ID NO: 138691 - DNA, 588 bp, Cannabis sativa
aattaaattaaagttgaaaaaataagggtctcaaaaaataaaacattaacaagacatatatttaaaagagagcaatcggatagtgatagtgtcatgagttcctaagtaaaaatactaattatttatatattagaaaaaggaaaagagaaaacaaaaagaagggtattttggaatttgtacaacttattatcattaagtgccgtgaagaattaaagggcacctaccataaatcaataaaagtacaaataaataaataaaaaccaaaacccaacaattatcactacccaaacttcaaacaattccagctcaactgaataaaaaataaagcacatcttaaaaaatcgcatccctctttgacgttgttatgattttcaaattatcaaaacaaagcaccgaataaacataaagtgaacaattaaattaaaaaaaaaataccattatccccataatgtacttcataatcatattttaaacttccactaacaattcttaaataaaaaatcttccactaacaatatcacccaaataggcatttttaaatcgattgtcccattaatcacaacactccaaacaaatatctatctatct

SEQ ID NO: 138692 - DNA, 701 bp, Cannabis sativa
gcagaaaacccaacacaccaatcaaacaaactggtagagtcccttgacgaagtagaagaaagaagagaataagctaacctaaagttgcaggcttaccagccaaaggtagaaagacacttcaacaaacacgtcaaggtagaaaattcttcataggagacatggtgctccaaagagttttcctgaacactgaagactcaacagtaggagtgttttgacctaactgggaaggcccttatcaagttacagagataactagtaaaggagcctataagctgggaaggtacaatgaaaacatggagcttgttctcctaccaagatactggaatggagagcaccttcgcaaatactataagtaactagcttatagaactctactccgaagtagcagttctatctactcaacattagagtacaaaaagcgctagcacccacagccctttttgggtgtggtctcccattgctcttcaatagtggcctctgctattctaggcgagcaagggtagccacctgacatctagaagctaattttgtataacataggcttgtagattcaatttatgtaagttgcatagcaaaacagaccaattaatgaataataacatgcgtactatggtaccctcacaagactgaacccaagcaaagtctgtgaaacttgctgaatagcaagtgaccaagagacttgtccacatggtcacttgggg

SEQ ID NO: 138693 - DNA, 883 bp, Cannabis sativa
ggcttcctttcttcgacggccaggaccacttcttttttgcttgtgctatgaggttcgggcataccttatctccagctatgtgtgggcccccaattataacttgcaaatgcccatccaccagtggtggcagtaaatcttgattattgtctgtctgggcagccctctgattttgatcggtcttgacatatttttgcatgtgcgagttattctttcttattaaaaattgaatttcccgcttcaaattgttgcattcgttggtgtcatggccataatatccatgaaatggcaaaacttggacatgtccctcttacttatgtccttttaatgggagcaggtttcttgtacggagctactgaatgagtagccatgtaaatggtctccaaatcttcagtcaagacagagaaagcagtgaacttggaaggattttctctagggacctgtatgtctttgccagcaaatttttcctttttccatttttcccattgccttgcctgttgttgttagaccttttaacacccgagcttgaattgcttgggtactaggggtgctaaacggatgttccaacggagggaacttgagactggcctggcttaagctcgacttttgctcattgaatggcctcttcaagcttgatgaaaccatctgcgcgatcgaggaagtcactcatagaatttactggtctgtctctcttgatgtccttccaaagctccccgagaactctgatgccccccagtattgcggttaatttcccttcttcggttaaccatgcaactttcgtcgcctccatcatgaatctgttgatataagctcggagaggctcccctggcatttgcttcactttgaccaggtcctctaaatgcaatgggagttggcgagaagaaga

SEQ ID NO: 138694 - DNA, 776 bp, Cannabis sativa
attgcacaagtccatatatggccttaaacaatcatcaaggcaatggtatcgcaaactttctgatgcgcttctagatgatggtttccaacaatccaaggctgattataccttgtttactaaaggatcacaagacactttcatcgctctccttgtttacgttgatgatatcatcatcactggacctagcctacatcttctccatcaactacaagaaaatctcaacaacaaattcagcctgaaagctctcggccccttaaaatactttcttggttttgagatagcccgttttaatgaaggactctttctatctcaacgaaagtacactattccgttacttgaagacacgggatacatcggtagtaaacctaccaaaacacccatggatcctagattaaaggctcgatgatgagcaaggagaacctccttgattaacccattcttcatatcgacaattgattggccgacttctctacttgacattgtctagacccgacatcacctatgctgtcaacaatcttagtcagttcatggctaagccacgtactcctcatctacaggctgttcaccatctgatccgataccttaaaggtagtcccggccagggccttctctataccacaaagtcctctttacaccttagaggtttttcttattctgattgggcatcttgccctactactagaagatccaccacgggattctgtgtctttttaggcgattgtctcatctcatggcgcaccaagaagcagcccactatctccaaaagttcagctgaa

SEQ ID NO: 138695 - DNA, 720 bp, Cannabis sativa
agtttagaaataaaatattaaatatatgtaagtatagaaaatcaaatttctctttttattttatttttgctgtggttcatgatagatgaacagctagcatgcaattgaaatcatatagaaatttaatatatttatatagataaattgacccaatcacaaacttaaaaaaatagagtgtacataaattttataaaactaaaataagagattatgtcatttttaattaatattttactatttattgattattttttctgcaaagtatttatttaaatgctttataactgatcagtccaaatcttcttctccttataattgatcaccaaacacacatatatatagtgaatatttaaatatgttgaatagctaaaacacttttttaaataaaattaaaaaaaaaactgattgaaacaaaatcactaaattagtttttgttataaatagctctatgtttccccactcaagacacaataattatatgtaaatctctttatatctataacataaattacatatgaatttctgtgcattaatttactatatatgtcaagaacaaattcttattactcttcttgtttttctctccttatcaccattaacattacgtaatatctctttgttttattaaatcaagtttatggtaataataaatattttggacttgtactcatagttacttgattaaaaaataaaaagtcatagaggctatttgactttata

SEQ ID NO: 138696 - DNA, 1237 bp, Cannabis sativa
  modified_base (734)..(737): a, c, t, g, unknown or other
aattacccacacctatgataaagagttggttgtatgccctggtgcgagctttagaaacatggcaacactatttttggcccaaagaatttgtgatacacacagatcatgaatcccttaaacatttgaaggggcaacacaagctcaataggagacatgcacgataagttgagtacattgaaacatttccatatgtcattcggtataaacatggtaaggagaatgtgcatgttgatgccctttcttgcaggtatgccttaatctctactcttgatgctaaattacttggttttgaacatattaggaactttatcctgatgaccatgattttggggagatttatggagcttgtgaaaaatcttgtgaaggtaagttttataggcatgagggtttcttgtttagggagcataggttgtgtgtgcctaattgttctttacgagatttattagttcgggaatcccatgaaggagggcttatgggacatttatgacttgctaaaaccttagttatattacaagaagacttcttttggccccacgtgaaaagagatgttgagcgaatttgtggtagatgtgtcacttgtaagcaagctaaatcgagggttcagccaaattgtctttacacacccctacctagtacctattcctagttcactatgggttgatatctcaatggattttgtgttgggtttacctaagagtaaacgtgggaaggactcaatttttgtggtggtagannnnttttctaagatggctcattttatcccatgtcataaaactgatgatgattctaatgttgcagatttgtttttcagggagattgtgagattacatggtatgcctagaaccattgtatctgatagggatgctaagttcctaagttacttttggaaaacatttgtggggaaaacttgggacaaaacttttgttttctgctacttgtcatcctcaaaccaatggtcaaacagaagtagttaatagaactttatccactttattgagggcttcataagtaaaaatattaagacttgggaagattgtttaccagatgttgaatttgcttataatcgttctatgcattctgctactaaattttcaccatttgaaattgtttatggtttcaatcctttgactcttttagatctatcaccttcacctgtttctgagcatttgaatttagatggcaaaaagaaagtagaatttgtgaagcaaatccctgagagggcacgactcaacataga

SEQ ID NO: 138697 - DNA, 834 bp, Cannabis sativa
tttactaaaacgatcatatctagagttctagagctcggatttaggtgattacagtggcgttagaaagataattcaaaaatctagatattttgtagaaatagtcatgtcataattcgaaagttaggtcaaaactaagcctaaagttacgaggtacagggcttattacttttaaaattcaaaagttagatatttgttgatttaatgatattttagcattttattattattattattagttaacctaaacatattacaataggaaaatttacatagattactaactttttccaatttattatatttatactgtcatgcggcatttttatcttttttactgtgtatgtgtttttttttatacgacagtatagactttttgtacaaagttttttatattttttacttacccgtatctttataagattttcccacatcaaaatttaaatttttttgttttattagagaagttgattggacgtgggatgtgacaaaagtgacaccttctttacttttttttttaatttaattctttattattttttaatatttaataattattatataaattcgacattccaatatcttactactcatcttcttattctattttttatttccaattagaaacttctccaacccttcaagggcttcacttaaatccttgttctctccttctcttttcgcttgatttgaagttagaagagggatttggattgtttggctctctgttttcacatgaggctatgagatgagttagagctttagttaaggtcaaggattgagtatattatatattatatagatatatagttgttttggagcataaatggctacaac

SEQ ID NO: 138698 - DNA, 644 bp, Cannabis sativa
gaaaaataattccaagtttaaagactgcttggttggtcatgatgtcttaaaaaaggccttatgactaaataagatatataaaaatagatggataaaaagagaagtagttaaacggctggagtcccaggctctcggttcagatcttctgggcaggtaggagttggaggatctgttgtttggacgggaggtacatcgatgttctagccagcggaagaagcagttgaatcgggctaaccataaaccacttgagaagcacaatactcgagatacatgtctttggcctcgcccagttaattaaaatttgcctgagggttagcctttcaaaagtcataaaaaatctcgagagcagctgtctctaaggcatgcaccttttcttcctacgtcgccatcctcgacttgtactcctcaatctgaactataagctcctcctcgatagacttcttctcctcttcctgttgacagaggacagcttgaagagacgtcctttcatcttgaaggctatccacttctgcagacaaggtctcgatggtctcttaaagtcggtcagaagcctcgagatcattagtgaaatcggttattttcttttgagcagtaaaatgcttcttgttgacttcacccagctccatctgaacagctccaagttc

SEQ ID NO: 138699 - DNA, 501 bp, Cannabis sativa
atttcacctatttatagtaattgtaaaattatctaaattatattaaaaagatgtagtaaacgaattaatattgtaatattaagatcaacatatataaatcaccttgaattttttttactgtggtagaagttactatcacaataaaatgaccctcatcttttttatacacatttgtatcaaacatttctgccatcttaccccacagtgtaatttttgttgtgattgaactgtaaaaagaaaatgtaaaattgcattaacatacctaatcccgagaaacccgaacccacaactgtaggttctgttatacaacctaggggttacacaaactcgtgaaatagggaagcacccaatcacggcactgaaatggacgaaaattgagaaaatgaagcattttgggaccctgtcaaaaccggctagctagtttgcaccagttcaccccaaattttttgtttcctgctcaatcctccaccaaatgcaaccaaaacttccagagtacctaat

SEQ ID NO: 138700 - DNA, 828 bp, Cannabis sativa
ttttgacccgagaagggtaaaacagtgaaattaatttatttacgtgcttatggactatattattatatagtatgcttgtgttgtccatttttcggtgtgttataacaagttggcgcagtatagtcacaactaggtatttcaggccgaaccaagttcggggccgaattacaattttgtgtttaatttttggtattttatttatgtgcgaataatctaaaaattaattgagtctatctgtgtgtgcaagtggctattttacccttgaagtgcttatgtgggtgttttatggccttaagggcaattgtgtaattttgccattttagagtaaggttcataaaatggattttaagcaaaattaggatttaatttcttgcatctttcccagccctttggctgaaccccctttcttctcaaaaactccttctaaatctttattttgggttgtgcttgcttgaattcaagctttgggtttgtggcttttgtgatagagattgaaaagagttattttgcattttaaaaaggaaaaattctaggctttttcttctgccatagctgaaccccctctccctttttccttcatatttttattttgctaagtgttagaaaattcatcttgaaaatttagattcttggtgggttttgtgattagctttgtttggagcttgaggtagttcttaaccccttttatttgttgattttatttgttgaaatttattgttcaaaatcatgaaaatagtgtatgatgtttttggtttgcttgtagggagaatcaatattaatcttgagaaatttgggtgttaatttcttggttttgtaatggattatgtt

SEQ ID NO: 138701 - DNA, 761 bp, Cannabis sativa
tgggggctagtatcaacctcatgcccttgtcggtatttaagagactacaactgggagaagcaaaacctacaactgttacactacagctagatgatcgtactttagcccatccaagaggagtaatcgaagatgttcttgtcaaggtggataaatttatatttcctgtagattttatagttcttgacatggaagaagacaacaatgttcctatcatcttggggagacccatcttggcaacagggaaagcactgtttgacgtccagaagggagagttaaagctgagagtactaggagatgaagtcgtatttaacttactctaggcaatgacctatcctacggctagtgacaattgttttttaattgatgtggtggacaagttgctggagtcaaagaagcacattgaagaccctcttaatctgactttggtacaagagcaggtggtggaagaagacggtacagaagcgaatgagtatgctatttggcttgactcttatggaccgttgaaagtctgccccatctattgagaagcctcctcaattagagttaaaactcctaccaaatcatttgaggtacgaatatttgggagagaataagacacttcctatcattgtggcagcttccctttcttctatagagactgataagctgttgcgggttctaaggaagcataagaaagccactgggtggactttggcacacattaaaggaatcagcccctcaactgtaatgcctagaatcctaatggaggaaggattgaagcc

SEQ ID NO: 138702 - DNA, 796 bp, Cannabis sativa
tccaagtactcagccagtatcgattgtaaatggaagatggtaatcttccaaccgaagggtgaggaactgtttgtttttgttggatcgattaagggatcttggatcccagtaatttcagtactaacaaccagggaactgttatgagatggatgtctagggtttctggccatggtaattcataccactcagcttgagtcaattcagccagaagacatcaaggtggttcgggaatttttttagatgtttttcctgatgagcttcccagtttaccacttcaaagggaaattgattttattattgacttagcacctagagcagaactagtttctaaggccccttacagaatggctccagcagaacataaagaaatggaaattcaacttcaggggttgcttgacatagggttttcacgacctagtgtgtcaccctgggaagctcctgtattgtttgttaagaagaaagatgggtctctgcatatgtgcattgactatcgggaattgaataaattgacaatcaagaataagtatcctttacctaggatcgatgatcttttcgatcaacttcaagggaagacggcctttccaaagattgatctctgattgcgctatcatcagttgagaatctgagaagaggacattccaaatacgacttttcacactaggtataggcattatgaatttctggttatgtcttttggactaaccaatggtaccgcagcttttatggacttgatgaatagggtattcaaggatttcctcgatatttttgttattgtatttatcgatgacatccttgt

SEQ ID NO: 138703 - DNA, 892 bp, Cannabis sativa
  modified_base (812)..(816): a, c, t, g, unknown or other
agtaataaagagttaaaatagcatttttttttattttctcattattcaaaaatttcaaagttagaaaaaattagaatttcaaagctctttctctctctctctctctctctttttagatttaggattttccatgattttttttgcaatcttcttgatatatatgtgtatagatattcctatttgggtattactgtgttctttattttcagatatgagaaataataatagttgtgggggaaataatttagggttttcaaatttaagttttgggactgaaattttgtgtatatatttgtttgtgggatttgaatttgtttaaatttggtttgaattttgtttagttttttttgtgtgatatggatttaaaaaataggttgtggtggtagtttcggtagtggtgggtggtggtgtttacggtggttatggatggtggtggtttcggtagtggtgggtggtggtgtttacggtggttaaggatgttcgtggtttcaatagtggtggtggtgtttacggtgactataaatggtggtggtggtggcagtatatagacggaagaaaaagaagaataaaggaaaaatattagagattttttttttcttcagataatatgttatggttgaaaaaaaaatatttttttatttatttttatttttttaatataattatttacatgtgccaataaaattgtgccacgtgtatactgtgtccacgtggacaatccgacctaacagttaacagttaaatttagatagaagttgtaatttgctaacagtgttgttgttttgggagtgttatattattttatataatannnnntttagattaaataattaagtgtgacaaagtattaattttgtcaaattgtaacatacattatggagttacaaaatgt

SEQ ID NO: 138704 - DNA, 704 bp, Cannabis sativa
aagctatccaccatacgcccaacaaggctcgggtggaaagtagtgacaaatttgttatccgaagtagggagccaaggatcttccaggatagaagttgatctaccatttcaaatggaccttataacacctttctgaatcaaatctttagcctccaaaacactacgccaaatgaaactaggattcgatcccaactcagctgttagaaagttacccttaggaaagtatcttgccttatacacccttgccactagcgagttactatcagtaagcaaccgccacccttgcttccccaagaatgccaaattataatctcttagattcctaaagcccaacccgccagcatccttatggcgacaaagctttcgccaactcacccaactaacacctttagatgaattcttagactgagatttccaccaaaacttagccattaacccttcaaggttagagcaaatttccttagtgaaaagaaacacgctcattgcataactaggaagggattgggccacagattttatcaacacttctttcccagcttttgaaaagaatctagtctcccaactttgcatcttcttaatcattttctctttcagatatcccaagatcgcatttttactgcgacccatggtacaaggcaagcccagataagtgctattttcagaagcaggtgccatcccaagaagcccacaaagctgagcccgaac

SEQ ID NO: 138705 - DNA, 791 bp, Cannabis sativa
ttttttttaaaaaaaattttgcgggttcaccagttcgggttcgggcggattgctcgggttcgggtcaaacccgctcaaaatgttcagccctatcttaaataacaatttatcaaacagttaccttaccagaacaaaaacaaaaatcgccaaattataaataaattcaaattccaacacagttacaaatacaacggcggacattgttcaaccaattcaaaacaaactacaaatcatgtacgaataagatcacgacaagaatgttgtagtgactgcatattagaatatgaattagtaaagacaattaacgttattgatatttttataattatgcatgagtgtattatgttatgggtcccattattagaaatgggcattagagttatactttctcgatttcgaagattttattaaactctaagagtattatttaagttaaatatgcattatgtaaattttgaaatttttgttttgcgacgacggaaaatacaatggatggccgttagagtcacatgtgtaactctaaaacctttttcttagtggaataaatatttgtgataaattgaatatcggttttgagcagggttatggcttttgaccattttacccctaggcttgttattgtttaacttatggaataaagggcatttcggtaatctcacaaaagagctttggtggctggtttttttttcgacagctagccacatttagtttcagcatagggtaactaaattttagatttatcatttagagaaaaataaagaaaaatcaagaaaagacttagaacctctcct

SEQ ID NO: 138706 - DNA, 1092 bp, Cannabis sativa
tttaaattataatacttataatatttgtactaaattatttgattagcatcaaagatattcaaatttatatgtttataaatcttaagtaactaaattatttttagaattattttattaatatctataaaataattacaaaaatacggatttgcagtatttttaatatttttaaggactaattttgttattttttttatataaatacgaacaattattttatgggttttttttagcgacatggccagccagagagtggacagccggggcccaggccctaggccccagaaatttggaggccccgaaaaattaaaatttatattatatacataaaaataaaaatataatatatgtatatatataacttttggtttaataattttcataaaaagacttacaacacaattagtagagggaatttatattggatggtaagtactgggttcgattcttgttttccttacatattcggccttttaaaaatttacaggcattgattaaatttattaaaggttatgtagggtttcaatgcattatttaaaaagggggtttttttttaaaaaaaaagtgtacattatttaaaaaagaataaaaattatatttggtaaacaatttttttaaaaaattactcttggtgcaatcaaacggataaaaatatctattataatactattaaataaatcaaatatttgtaaaaaataacaaacaagaatattataacttaaatgaaaagtatatttattaattattatttatcttcttaaatttataaaaaattatagcatatattaaaaaaaaaattaatactattgattttttttttttacaaaagtcttaaaatatataatacttcaaataagttaggttatgtgtgaaaaattatttattatatgaagataaaagagttaattatattgtgtcaaaatttcaataataaataatatctcatagaaaaaaaaattattataattttttgtaaaaaaaaaaggccctatttcaaatttcgccctaggcctgtcaacaccttgagacggccctgtgtagcgataattattttatggttgttctcacgttgttgctacaatatactatgtt

SEQ ID NO: 138707 - DNA, 582 bp, Cannabis sativa
  modified_base (549)..(556): a, c, t, g, unknown or other
gaggcagaattgacaactgctcaaaaatcgaaaagtttggtagattactaactacctaaacaggaatattacgagcaatggaaaaacccaagagaactaaatatttgatcaaaatatagttgtttacattgtgaataaaaatgcaagcaaacacaattgtattaagtttgaatgaaaacagtacaaggcatttaagataagaaaaaacctaaaactggttacaaacttgtctttacaaaaatgccactagaggcaaaccattaagtcatcttcctaaacagaggatgagaggggaagctgatgaactcgaaaaagaccgacttcatatagcctgagaaagacagtctacacgtagctcagaaaaagaacgtctacacatagcttgagaaagaccgggtacatgtagagagccttgatctctgcacagacctcattctcctcatcatcagatcccatttcttgaagccgagatctttttcctagcctcaggaaattcttcgatgctagaaagaggttggcaccaagatcttcttgttgggttttatgccnnnnnnnnaactccatttcaatgtaatctatttt

SEQ ID NO: 138708 - DNA, 751 bp, Cannabis sativa
tccctactcggtgtaaatcatttatagaggatctttgattattagaattcgattgatggttaaattttcatagtatttcaatatcatggaatatatagagcgttctatataattgagagtgcgcgcaattccaaatctatagttgtgcaaggaggaattaataagttaagaaatttacttggtaaattctagatctacttattggatgcttggttattgttatacccaaaatttggctggtactttagaggatgacacgtaacaaccttggagaatacaaatcaacaaatataatgacaattatattaaaggatataaaatggaataactcattcaatgcagagttgatagagcacatacataactcgttgattgtatagtcatgagcgagacaaagatgtatacactatagattcacgtattgacgagaaaccattttgcatcagaggacacagttcaacggaggacaatgataatacatagcgaggcatctacctcgcgatacgagacgtgttggttgttagaacacttagcgtataatatacattatactaactaagtataacatcttgaaggacatgaatagcaattggcgtgacacctatctcgctataggaagacatattcttgctacctgcactaatcagctcaaaacatccttcaatgagatccactgccacgtcgcatcagctctctcagaaagaagctgacattcaaatgatgttggctgttgaagttcgccttgtcacca

SEQ ID NO: 138709 - DNA, 1050 bp, Cannabis sativa
gactgggaataccagttcagcacccaaccagggcattcataacacagccgttttgcctgctaccaacgttcaaacgaccattggaaatgatactgagatctaaaacctctgagctattcttagaatcatgaaaggtcataccaacaccccacatcatgatcaggaggaactccgcgctgcggtgaatcttgtgttcgaggaacagagatgcatgtttgccgaatggagggacaaagagatggaagcgttaagagctcatcatgcagagattgacaatcgtagtcggaaagctattgtgctaatatgaaaggcctatcaaactgttgggcagcaacccccaaatgtcatccccttgggtgaaacagacgaagatccaacgatgaatacttctcagactataaatggtcagccgccaaatctccagtcacaggttctgcttgtgggccaagcagtaggtgggcagaccttgtctagtaattcatcgagagaagtcatacctgatcattccaaccaagttaatggtgccggtcagcacattaaccaaaccattcaatcactaagacagccagatgtatctgtatttgaaaggttggggatgactcatgatctcagaaatgatatgaacagaaggagaggagtagactatcagcttggcacgccgatcgtgcagcccggaacccatgctcaaattcccactcagaaagatgctgacgtgactcatatcgaccaaaatgccgaacaagttagtccagttgtgcaggcataactggatgaactaaagtatatgttccaaggcatcgccggacagagaaataatgatctcgagttggaccgagcacgtggaacccctttctttcccaagatcaatcttcggcgttaccccacaagattaaaatgccaacctggaagatgtacactggaagagaagatcctctttcccacctcaagtatttcgagatgccaatgaatctgcagggggtacgaggtgacgtatgttacagaatttttcctgccaccctctcggaagccacccagcaatggtatttcaag

SEQ ID NO: 138710 - DNA, 560 bp, Cannabis sativa
tttagttcatgttcaaatccataatcattcctaaaacagaatttaacataaaagaaataaaaacgaaggaagaaagaaactgttggtggaatggatctgggccgtcactttgctccttctccatttcttgacagcttttaggtctaaaattcgctcccccctttctctttctcgcagttttcgttatatttttcatccaagatttcaaaagatgaaattggcctccatttgtaaggaacctcgccgcggccatggattacctcaccgcggcgaatgctgctttggccgcggtggtggagtatctcgccgcggctactgggccagtcacaaaaacacttttctgccaaatttttggctgcggctgtaaataaatctgctgcggccaaaagtgaaccaaatcctaatttctcaatttttcttggctcaacttgtcttttatcgtacttttgaaaccttgaacgcccacagctatgggaaacctgaaaacatagaaaacaagcgtaattctgtcctaaaacatcgaaaaatgactctatttgtgacccaaaacataggctaaa

SEQ ID NO: 138711 - DNA, 662 bp, Cannabis sativa
gacccaaccggcctgcaacaaatcaccgcaccaccacctccgacccagtccccctctctcggaccacccaaacgcaccaccacccccatcggctctcatcggacccttgggtttcttttttttttttgttcggtttgagacagaggaagagatagggggcttggtccgatggtcggaccatggggttcgattagtcggaccccatcggaccccctgggttttttttttttggttcggtttgagagagaggaaaagagagaggggcttcgtggaggggtatttgtgcgatattaggaatgtggtcatacatgaccaatattattaagtatgcatttagggaaatttttttaaagttttttaagtatagaaaatcaaatttccctttccatttctctatgattttcgaaaagcaagatgagtaagccaatgacagacggcggaactcgcagctgagggagttgacggtaagctcactacaaaaaaaaaaggatattcagctacaaaaaaattggtagcaaataatgcctatttggtagctattaaactttttgctactaacaatttttggtggctacttcgtagctaatactccgttgctgaaagttttttgctaccaagacaatttgtagcaaatttgctactaatatttttgtagcaaaaaa

SEQ ID NO: 138712 - DNA, 548 bp, Cannabis sativa
tttaaaaaaattgaataatttacagtatcgacaattcttgatattccaatttatcatacatttaaaaataatttaaacatattttctcaagtataaaaattaggataaaatatttatttacaagaatgatattgtactgctataaaaaaaattaaaaaaaatactctaacatgcgtttttggatgcaaagattaactaaaatattgtcttataataaaatgttgtaattagcaagattcatactaaattgagtagagtagaattagtatgtatctatacttatctataatttaagtataggcatcgatgcacattttatctatttcgatatttgagagaatattttagtctaattttattattgccgtctacgttagttatttaagacgttcagtaaaattttgagagattcaaaaaaatttattaacacgctgaaaacagaattaattcaaacaattttttatacgcgagatttttttattttatatatgtgtaaaatagattgtttgaactctattttcaatatgttaattttttctaaatttttt

SEQ ID NO: 138713 - DNA, 851 bp, Cannabis sativa
  modified_base (365)..(373): a, c, t, g, unknown or other
ataataatacaattacaaacccacagaaactccaaaacacaactctatttgtctaatcattgttaactcataggaagagaatatggaggggtgttttcgtcattcgaattgccctgtttgttaaacatttaatttaacaatatatattcacagcttagttggttagggtgtaatatattacctaatatcatagatttgaatccatgacactcatttttaatagggcattttacaattttgtatacaatattttaattaattacaaaatatgtacaaaaaaatttattatcattttctcatacatttttatatataattaaaaactttttttttttcaatttcttttataatatatatggtaatannnnnnnnntattatatatatggtaatattggctatgtttatctttagagaaaattacatcagaaaccgaaagatacaaaaatattatataaataacactagataattaaatactaagggtagcgtcaatcagtgaatcaatgtaagggtgcgcgtataccgatgttaaatttattttttttttcttatcttgaactaagttaagctcattaattttattctatgtctctttcttttttttattttttttttctaaaagtttaaaaaggttttccggtcacaccgataattgttcgagctcaaaaattatattattgaaatctactctttaaggtggtcattttaacatgtgggaagcatatatttctcgccgttaccgaaaaaaccaaaattaaaagtaacttataagtttcttttccaatttaatcaacaaaaataatcaaagtgtcaacttaaataaaatttaatataatctacttaattttat

SEQ ID NO: 138714 - DNA, 812 bp, Cannabis sativa
gcccagcgccgaacaggatccagccgtccagatggaggaggatcatgaaggggatgctgaggttcaggagattgaggggcaggacaatgtacgtcctgagagttcctccgaggaggaggaaggggtagaggttgcaccccaaactatggggagtacagcgaggctggggagccagtcgatgctgacggagacgtcctgcttaagggcgtggactacgtcagtgaggaacttgctgcggcggttcctcataaaaggcagggtgccttgggcacaaggtgggtaagccctccgtccaagattacggaggcgcgccttcgaacccttgagcagggcggataccttggtgagctggacttctacattcccgcccccaacaatcgtgccacaaaccatgaaagggggatgtgcgcctggtcgggtggccattgtcatcaaggagcattgattcccttgcatcaatacttaaaggatgtggtgaacttcttcggcctcagtgcgacccagttcactcccaagggcattaagtatcggtctgccctcttcgtcctctatgcctcctgaaaatggggtatgccctctccccacgaggttgcttggtacttcgatttgaagtccacccctgagcaaggcaggttggcgtacttctactactctcaactaggcttcaagtggttgacgggcacggacgataaggccatcagtaagattgggcgctttgctgatcagtacttcatggtagatggcacgggcattactcggactaggttctagcagattccgacatatcaccgtcctcccctcactcttgctct

SEQ ID NO: 138715 - DNA, 536 bp, Cannabis sativa
gcaagtagcgtacaggttggctatgccccgagcgctggcagctgtacatgatgtgttccatgtttcaatggtttggaagtatgtctcatactcgtctcatgttctgagttatgaagcattggaacttcagccagacttgtcatacaaagaacaactggtgcagatactcgatagaagagagaaagtcttgagaagcaagacagtggcactggtaaaagtactgtggagaaaaaataaagtggaatagacaacctgggaactcgagacagatatgcaacagaaatatccagaattgttcaggtaaatatcgggacaaaatttctataaggagggggtaatggtaataccatagaattaagatatggattagcaaaaccctaattagatgattatgaatattgaggaattatattattatatagttcaatttacgtgaattaatatgatctataatattgtaagacaccgttggtgagccaggggcattttagtaattgtgacccgagaggggtaaaatgatgaaattaatttaatta

SEQ ID NO: 138716 - DNA, 531 bp, Cannabis sativa
ctcataaaccgagaattttgttatctagccacactttatatagaatagatatacaatttttttttttttaatttgaggaagcctatttaatttaacttgataatatatatatatataaaagtttgcaaagttgattgatgacatttatgtcactttcatgtcaaattttttattttctttatttaaatttgaaatttaagtccaactcattcatgtaatcccatctttaaaaatgtatatatgtgctctctttatattagtttaattgattgatggcttatatcatttttctgacaatatttttttttacttaaatttgatattgagcacaacccacccacatgatccctgctcccaagactttatatatgcatttttgtttctctctttatctctttttgtgggtttccccactcttcattgtttcaaaaatttataaaactcactcatttcattcattttcttacttgggttttgagagagaaaagtaagatatatatatagagaaagtttttgtgggtgtgcttcaga

SEQ ID NO: 138717 - DNA, 1074 bp, Cannabis sativa
  modified_base (609)..(627): a, c, t, g, unknown or other
  modified_base (892)..(893): a, c, t, g, unknown or other
  modified_base (920)..(926): a, c, t, g, unknown or other
agactaattttagcctaacacccacctaccaagcaaggaggaaaaaatctccacgacgcgggaagtttccctctcttttttttgggacttttaccggcacatagatgcgccggtaaaagtatgtaagcgccagaataaataaaatgaaaggcggcaaacttttcgcgcctgttggcgcttcatttcctcacttttaccggcgcatattcattattgcgccagcaaaacatagtaatacaggcgcattattgcgccgacaaaagtaaagcataaatacaaatgggatttcagattttgctttacgtcgacaacttttaccggcgcagttgacgaactgcgctggtaaaaaggccttttcttgtagtgtgtggaaggtaagtatggttatatgcttcaaaagataatgtctcatgattcatctttgcactgaatttacactgatgtgatagtcagcgataaagcttacttgcaccttgaattagtgttatgttcttttcagaacattggcaaagtatgctagtatcgaatgtatggagtatacattggactgtcaccgatattgatcttagtaaagatattataattttaccgttgtatctttctaagtcnnnnnnnnnnnnnnnnnnnagatcaaaagatcttaatcctgacgtggttaggttcaatctcaagagtattatttatgttctttgaaatgttagttaaagcctatcatttggttcgggtccacgtacagttgaacatgatcaattgagtgggagtgcttatcatagatatggaatctatagtttctatctggacattgatgtgaaatgatgattttctttgagcttggcttaatagagataaatggaaaagctcttatttcactaattatattagtttactgaannatcatttataggaagctaagtattttnnnnnnnaaatacattgaggggtgaaacggtaaatttatccatactcgatgtaatctaaatctttgattattgggattagaataatggataaaatttcatagcatatatatatcatggaacatatagagctttctatataattgagagtgcaatt

SEQ ID NO: 138718 - DNA, 2017 bp, Cannabis sativa
cattgaatctttctgtctgcccatctgtctgtggatggtagctcgaggagatgttcatttgtgacccaagaagtttaaatagttcagaccagaaggtccctgtaaatcttcgatctcggcacttactatattctggggtactccccaatacgtaactatatgcttgaagaaaagttgagctgtctcttctgccggacactgcttcgacaccgggatgaaggttgcatactttgaaactctgtccacgatcaccaagattgcattcaagtctccagtcttctgcatacttgtaatgaaatcaagcgagacagtctcccatggtctgcttgggaaaaacaaaggttctaacaaccctagtgtcttgtgcctctccactttgtcttgttggcaaacgagataggtccttgtgtattccaccacatcctcccgcatctgtggccaatagtacccatgcttcaaaagggcatgtgtcctatgccacccttgatgacccgcccacaacgtgtcatgacactcactcagtaacgtcctcctcaaatcgcctaccttcggaacaaacaaacgccacctttggtccacaagaggtcatcctctaccctaaactgagttgtctttccttttcttgtgagagccatgatgttctttgcaattgggtccttctccaagttctccttgatacgctccttgattggtgtacccactcggctggctgacatacccgctaacacctttagagccgccaaccctgctttatgactaagggcatcaactgcctgattgagacgtcatgccttgtgctcaaagtaaaagtcaaattctgccaagaattcctgccatcgagcctgcttgggagttagttttggctgcgtgaggaaattactaacaacagtattatcggtcttcactaaaaacttcgaccccaacaagtaatgcctccacgtctgtaaacaatgaataactgccaggagctctttctcctgcgcagtatactgcctttctgcttcagaagcttgcggctctcaaatgccacggggtggccctcctgcatgagtacccctcccaaagcataatctaacgcatccgtctacacttcaaagggtttgcatacatttggcagggctaatacaggatcttcaatcatggcctctttcacacttcaaaaagcttcttcacacttctcagaccacgtccatataacacccttcttcaataactctgtcaggggtgctgttcttctcgaatagccctccacgaatcatttgtagcaattggctaaaccgagaaacgagcgtagttgtttcacattggctggggtcgtccactcttggatcgcctgcaccttttccaaatccatacggatcttctcgtgttccacgacatgggctaggaacttgatactttcttgagcaaacgagccttctctcgtttcacatataactgctctttcctcaacttctgaaacaccgtagccaagtgttcccgatgctctttgaaagtggcgttgtagaccacgatatcatctaggtacaccaccacaaattttttctaagtcttcatggaagacttcattcatgagtgtatagaatgtggctggcgcatttgtcaacccaaacagcatgacacaaaacttgaatgccccatatcgagtaacacaagtagtctttggttcatcccattctacgatctgaacctgatagtagcctgatgtcaagtctaacttcgtgaagtattttgctccacttagctagtcaaacagatcagccatcaagggaaatggggtatctattgtgcacagtcaccttgttgagggcgcggtagtctatgcacagtctcaaggtactgtccttcttgtgaacaacacgggggcaccaaaaggtgcctttgatggtttgatgaatcctgcctccaacatctctgttagccgcctcttcaactccttaacttctaggggagacaatcggtatgctgctttagctggggcctttgtgttggaatttattctaccaggatcttagat

SEQ ID NO: 138719 - DNA, 1123 bp, Cannabis sativa
aaaaaaactacaaatcaacaacatcatcttcgtcatcactgggaggggcagtctgtgaggaggaaccacctgcatggctagaaggctaaaatggtaaaatcagtagaatcggaggcagatccggcatgttaaatcctacaacagcgccgaccaattggatcatttgttgttggaacgcactcatgatctaattctgagtcatcatcatctggtttgtggttggttgttcttctactccttgtacatcctttgttatcgaaggaaagaagtcttctagaatagggatcatttcatcctctaattcattatcgccaaccgctacatcatcaacaacatcctctagctccccgtgataggtccacttctcatatcctttaatgaagcctcgatcaaatacatatgctctaaccctatctattttttcaaacctattatttaaacatctcacacaaggacatctattcttccatcgcaatccttatattctgatgccattgttaaaaaagcttgtaaaccatttcgaaattcatgacaaccacgatttctgattttaatccaacttattgattgtcgccatctacaatgtaggcgacaaatatagtattaatagtttgaatgatttgtaaagtgttatgaaagttttatgaaattttttattggcatgtatatctatcgctcttgtatattgcaaataaagtacataacaattttgttctagactttatttgcaattatacacaagctatgttatattttcaaatataacaaagctatggtatatatttctaagtataccaaagctatgatgtattcttttcaactatttcttattaactatatatgtaaaatattatgaaaattttatgaattactcacatattatttcatcttttaagtatagcaataatattaacaatttctttcttaaaaacttaaataaaataaaagttttattatttaattacaatttatatttaaattaaaaaaaaaaataaacaaattcttctttatgaattattttttaaaacaaactattattatttaagaatttatattatttattaaaatttaaactaaatttttatttaatttctaaaattaaaagtttatctttataaaaaaa

SEQ ID NO: 138720 - DNA, 662 bp, Cannabis sativa
gcttgaaaatagccaaggcgttgaaggtcaagaatctcatatgtcatagtgattcgcaactaattataaataagattctcggacaataccaggctcagggcctaaaaatggctaagtacttagagaaggttctcaaaaaacttagaaaagtttgattactttaaaatcgagcaaatcccgagagaacaaaactctaacgttgatgccttagtaaaactggcctcgcagagggatctggatgaattaaacttgaatcggtagagatgctaaacaaaccaagtatatgtgaaaaagaagatgtcaagatgatagatagctcacctacttggatgactcctataatcaactatctactcaacagacaacttccaactaacaagacgaggcacaaaaactcctatatacagtacctcgctacacgatagtcgaaggtaaattgtacaaaagaggttattccatgcctctacttcggtgttttcttcctacacaagaaaacgagatcattagagaaattcatgaggactttagggatcatgcaggttggcagagcctatcataagacaaggatattgctagccaacgatcaataagtacacccatgagtttgtcaaaaaatgtgataagtgttagagattttcacatacacctcgcgtaccaccaac

SEQ ID NO: 138721 - DNA, 608 bp, Cannabis sativa
attttctatcttctaaacactaagctagaaaatattgagaggcttgtttattccgaaaagtatttctattttattccctaagtgttttttatagggggaaataagcttttgggacgaaggtgtttaaatcttgttcaagcctttggtgatcccccatagcttacttgagttcttcctcatcctctatttttctatttgttttctactctcttctcctctttattttatatatactctatatctctactatatatcatatacatatatatttattatatatatatatattttctcttattgcttttacatttatgtgtatattttgctttgagttgtaattttttcctcatcttttctttctctttatttgtattttgtgctttgggattgtaacatttatttaatctatagtcgttgtaattttgttgcatagagttgtaattttcttggtctctttattcatcttattgctattcttatattgatatgtcatattttcctaataacatccactacctgaggcactggttccttctgaaccaaaatctgtccaagatgctctaaaagatccaagatggtatgcatctatgtgttgggttttgtgccct

SEQ ID NO: 138722 - DNA, 904 bp, Cannabis sativa
taatattattttgtaatatcttatccttatgtttattatattaatgttttaaaaattattaataataaaatatatgagaaaatggtaataagttttttttttgcgcatattttgtaattaattagaataatgtatataaaattgtaaaatgtccttattttaagagttaagtcatttaattataatatttacaatgaaattttatttattttttttataaaaattagacttatttttacacaaattagaattctcttcttgtataataaatttttaaataattgattatttttaaatgatattaaattatttttttacaactagaagaactaagtataatgcctcaagttgaaggctaagttgtatatgttcaaataccattgcactagagtaataattctacctacaatactacactatttttttgcttagtcttaaaacacttttaaacttttggtcaatattatgggtaatactacaccatcggttttcttctccataacccataagctatacaaatgacctcacccaaacctgtactactctctctctccgtctctccagacacttgtaaatgaaggagttgcatatcgaaaaaggttgctcttcctccctaccaagtaaatatccctgataatctcattctagttttaatccattttgtgattgataggcataagggattaccagcgaaaggtcttcaagtgaaagggtcatttaattatgtacaaaacaaggaggagtttttctattagagtttgaggttgcttcgttttgtaggagagctggactttgttttctgactttggtttggttttttgagtaaatgactacttattgaagaagaaaaaaaaaagatggaggagtgtagccattttttttttttttggaaaatacattgaac

SEQ ID NO: 138723 - DNA, 743 bp, Cannabis sativa
cgtgcagcatagggattggtgcgaggaaccacccaatttttgtcaaagcgatagtgacacacgggggcagtatggcctgatctgaggcaaacttgacagatgattctttgagagttgtaacgtgggtagcctcgaccacggcctatggatgtagaagaagtgtcagatgggggattcttggcattagcatatggtcgaacaccacccgatcgaccattaccaaaggtgagattggcttgcatcttaattgcaagatctgttaacgattgatgatgcgcaagtctgctttcatgagtcaagagcagggcttgtacctcctcaattgttaattcatcacttcttgaagttatgcctgagacaacagaatcaaaatctggtccaagaccatttaatagttgtaaaactaaatcttgattactgaccggagagccagctacagaaagagcatcagaaatcgattgaattttatcaacatattcagagatcgagagacttcccttttggatgttgcagaattggcctttcaattggagaagtcgagccttagtttggctggcaaacttttgttccagggcatgccacactgcaaaggagctgtgataatttgctacagaagcaagaatcgactcggtcatcgacgatcttaaccaagaaagaagtagctgatcctttctgcgccacacagcatattcaggattggggtcattgttgacaagcagcttgggtggaggaacaccagtgaa

SEQ ID NO: 138724 - DNA, 663 bp, Cannabis sativa
tataatcaagatttgagcccgacaatacttccgttgtttggattctgtcttacacactatgattgaggactaactttctatgggtgggcatccactcaatcactaaaagcttgaaattacattgtgaagaagactataggattcaaaaattgaataagagaaaagaagaagaagcagtctcaaactctctagttgtctgacacgaagaaaactaagtcaagagtcattagtttgattatgagaccattcttttcttttcatactaattcacttagggttgggattgaattatttggaataaaaaatgataaaataatagcaaaaatatgacctaatggctggccacatgtgggcccatcactagttagatttttgccatttttctcaaccatttatctatttttcacaaataccatattttgttattttaatcccataaatgccaaaactatttatttaataattaaattaattatcaaataaaattgtcatttatataatttatcaattagactccacaaagtctcttaattaataaataaaccctaaaatcctatttcttcacaatcaagtcatatcttagtgaaaattcttagactagacatagtctaattttgaaattataagtgattaattaagattaattaaatgagtcttacaagc

SEQ ID NO: 138725 - DNA, 1579 bp, Cannabis sativa
ttaattcatactcacattaattctctcacattaattcttagtgtcttttaattgatatatgaaaaaattattattattaaaaaaagagtattttcagttaccaagtgtaattattatcatgattattaatattattcagttataaaataaacatgaggagtaaataataggaatattatatacatataagtttatacataatgtaatatatgagttacaatttataaatgagaaaattgaaaagacataaacacatagtaatgaatgaatgtatatatatattcctatcatatactacatctccgtacatgatctaaaattgttagcatttctattcttaagttacaaaaaaagattgttatatcattcacatctaatttactttcactatttcttgctcccaaacaatttttatgtttttgttcttcactctctcatcaagagctcacaacatcatattttttaattatattattacatatagaatgagattatcacaacgatctaatgtacatatctcagttttttttttcaatagacttttttatttttattcagtattttaatactatttttcttattttatttaggatatatattttatatgatacacaaaagaataaattgctgttgtttttcgtttacatgtagtgatatgattttagcttttttattttttttagagtgcattattttctcatctctaatatttttgattattttttttctctttaaaaaaagaaaaataattgtattataattgagatatatattattcaatattttaattttttttatttaaaagaattaaatctttttaaaaataatgtatatttttgaaaaaaaaaatattaatgttttttagatatgtactttcattaaattaaatctttgatatagttttaggtaatcttagaaatgataaagtgttgtaaccactaacagcaataataattcaacttaattatagtaaatgagtaaaaattaatttaaatataccattatttgtttgtttttttcttaaacatataccaaaaatttatcatcatcattaattataataattatcatcgttacaaacttattaattttgcaaatagtttagcaaactattgattttacaatatttttctccaccaactcttaaaaaaagaaattcttctatactctcctatatttattaaataatagtaataacaatagtaattatataatatataaaatttatagtaactatttgactgtagcatttttaataaaaaaaataaataagagatgtattgttaaaatatagtttattttgtaaaaaattaactctaatactgtgttaaagttattgaattatgttcctcgaatacaaagtagaatactacatacaattataatactcaaattaaatttcattaatcaacttttttctattttgtaaaattttaatatttttatatcttttgtattcataaaaaaattctaattttaatacaaatatatatatatacaagtgataaagtgtaataaataataaaatttattaattataactaatcataaatggtaatattttctaattaaacaaaaa

SEQ ID NO: 138726 - DNA, 547 bp, Cannabis sativa
aaataatgtacaaaaatttcctaatagactgtaacgtgttacaccgttattaagtacattttgttatcggtgtcacatattttaatttaataaatgatatagaaaatcgctaaaccaatgcttgtaactttatccatataacaatgaaagttggttgggttggtaaagaagttaataaatcactagaattgaagcttcaacgttctgatgcagttagtataatgggaccaagaggagtaaaggagtgagtcagaaaacaaggacatttttatataatgcactaaggtacatccaaaaacagtggttttattttattactcactgtgcggtgagcatgcgcaaattttagaacactgacttattattgcaagacaaaaaactcagaggaatcgggggtcctgtagtttgaaaacgaacccattttctggaatccccaactgactaaaaattctcaaaaactttgaaagaaaacgacaaatcttaaatgtaaataaaaccccattcattcagctcaagttagcaaccattaccaaacctgacacccctt

SEQ ID NO: 138727 - DNA, 950 bp, Cannabis sativa
catcgtttgctttgttcgagccatcatcctatggctggacggagactggggtgaatgccgagcaaccgtgacgacaggaacagcaatgggaataccaaagttccccgaacttggatggccagcaggcggagtgtcaacaacacctggccggacaacgtatgtccagttggatagcaaatagcgcctccaacctttcttcaactcccaaatgaagcggtcgtatccctctccagcgatctgctcggagtaatagtggtgttgcgtttcaggttctggagtagaagaatgttcactactcacctccagtcttcaaggcttgaattggaaagtccgtcacttgaagaggacggactggcacgaagatgagggtgatcctcgtacagaagttaaagcagatcctggtcgattcggtgttcgcttccccaaaacccactagggttcatctacaaaagaacacacgagatgagtctttggtcaggatatcgaacaaaaaacaggctaatatgccgaccaggagtactcaacagattaaaagaatgaaagtattcaaaaaataagtcaaaaccctgaagtgtgaaattttgtgtttagggcaaaatttcacgaagctctgaataagcaaggtgaaagacaaacaatatgcaatcgaaggccaaagtcatgaaccgcgaagcttcacagattattacaaagaaaattgcaaagttttaaacctagattttctacctatcttctacagcaaggtcaagaacgcatatttgaaacccagatattaaacatgcaaagttaaaagaagaaggagttgaaaacttactcactgttcgacgtctgagttcagtccaaacaaagctgctcggatgctttttgtggaaatctctcgaaaaacttgaagtgaaaacctcttttttgctctaagtttgcttaatagagaaattggtaaaagtgaattt

SEQ ID NO: 138728 - DNA, 662 bp, Cannabis sativa
tgaagaattaccctgagaagcggtaagaagtatgaagggcatgttgggggacaaccagtggaagaagagactcaggatcaaccagcaccgatatcaatagaaaagaagactactgagattcctacaccaaaacaagcatccccaccaatcagtatagatcaccatgtgaaggtccagtatccgcagagacttcagaagactaatcttgacaagcagtttttgaaatttctagaggtctttaaaaggttacacatcaacattccttttgttgaagccttggaacaaatgcctagctatgtgaagtttatgaaggagatcttgtcgaagaagagataaatggaagactatgagacagtggcattgaccgagggttgtagcgccatactgtagaagaaacttcctatcaaactcaaagatcctgggagtttcaccattccttgcaccatcgggagaatagaagggataaatgcattgtgtgacttaggagtcagcattaacttaatacccctgtcggtttttagaagattgcagttgggtgaggcaaagccaactacaattaccttgtaactagctgatcgatcactagctcatccaaggggagtcattgaggatgtattagtaaaagttgataagttcatcatcccagttgactttattgttct

SEQ ID NO: 138729 - DNA, 1510 bp, Cannabis sativa
  modified_base (153)..(155): a, c, t, g, unknown or other
  modified_base (1460)..(1484): a, c, t, g, unknown or other
agatcacctttgtgactctggcctgcccgaaatgatcaggttgtttctatttctgtttatgtttatattttatttgctatttatttcctttgtttttgttttggtttttttagtggatcaatatcgtagctatccatggttgcttgctctccnnntgttctctttccctattcttttaatttttatatctttagacattgaggatactgtctgattttagttgggggtggtgagcatattcaagcatgcttagtaattttttttgtcatattaatattttcatggtcaaatttttcaaaaattactcatttattcttgtaaaatattattttcaagccaatttttgctatctttattacttaaaatttttctagagttacaaaatgcacatgccaaactttgtgaatgcacatgccaaactttgtggtaagatagttgttagtacatatttgcttagaaaagctaccaagtttaagtgttcatgtttttgtgagtggcgtgatttgagaaagcaactttaaaatttttattgattcttagaaatggttataattattttggatatggtactaaggtttgattggatgttgctttaagtgttcatgtttttgtgagtggcgagatttgagaaaacaacttttgaatttttattgattcttagaaatggttataattattttggatatggtactaaggtttgattggatgttgctttaagggataatttttatagacaatcttattagggagcctttttgtaattattttcttgttgtaaaaaaaaaaagaaaaaaaaaaaagaaacaagagatacatttccatcattacatgttgcctcttgttcaaaaacaaaaataaaataaaaaaaaaaaatagaacaaaaaaacaaaacaaaacaaaagaaaaaaagtttgtagtatttcattttttttttggctcctagaataaatgtaaaagattgtctagttttgttcaaaaatcccgaaaagctggtttgtggtattcttatggtggtttgttcaaataattcataaccaatttcgtttcaatgtttattcaaatgtttgtcctaaattgatatatccatttcgagtgctcacttttcaatttccaactccatgagtgaataccttagccatatataaatattttcaatgacctgtgaggctaatggagttgagacttctacttggtacatttttcgaaagcatttatgtgctatggtttgtggtaagaaggtttaagtttggcgcacacactcacaacaactctagatttattcaaggtaattttgtatagttcttattggcttgttattgttactaacattttatttgaataattgtgttatttttcaaaattttgacctagaaaatatcatgttgacattctttttgttcgcttgaatcgttagacgctagcaataagctagttgggggttgtgattaaagctcaaattnnnnnnnnnnnnnnnnnnnnnnnnnaggcataaaattaatttaattaatta

SEQ ID NO: 138730 - DNA, 535 bp, Cannabis sativa
caagaaagatcactgaagatcactgggggtatcactgggggtatgacctgggggtatgacacgtcttcaactcacgtcttcaactctccttcccggaactccttcccggaatggaaggactgcttgaagtctgtcttattccccatgatgctttcacccttcgatcttttcgagcaaagtcattacttgaatttttatgcaacttcaaacttgtctaaaatttcatattcagagatactattgtaagagctctaagaaaagggattattttccttgttcttaagtcaatacaaactaagaggattaggctattatcgaactgctcggggctgaacctctataaaattctcgtttctttatttacgttattatattacacacacattatactacttgtcgcttacaatttagactcactgtcgttggccaaaagcgagattaacacgaaccttaaatcctcaaagaatcaattaaaggtggctctgataccacttgttagtttctttatcactcataaaatatgcaataacaatat

SEQ ID NO: 138731 - DNA, 700 bp, Cannabis sativa
tatatatatatatcaattaagttatggataaagaaacattacttataattaagctacacattctatttttgtggaacaatccctttccaatatcatcaactttaatcatttaataagatttacctatgccttgtctctcaaagagaatcatataattcaaactagatatataatgtatgaaaatttttcaatgcaccttttttttaaagggatctactgatgtatttttatttgttttggtattcgaattaattttttagtcaaatttttcttatggttatgtatgttgtagttatttaagacttcttataaaattttaaaaaattttaaaaaatttaacacgttaaaattagtgtttgaacattatttttttactataaattattccaaatttctcacaatttttgtagaatatcttatataactataacgtacacaaatgtaaaaaaaatttggactaaaaaattcttttagataacgaaacagataaaggatgtatcagtacatctattttaaaagagtacattatagaaacacccatgtgtataatttttttttttatgaaagagcaagctttttcattactccaaaaacaactttacaaacaaatagcaccttcaattaatacctatgtaaataaccactatacaaggaatcttttcttttctttttttttttttacaacttggagaaccatttt

SEQ ID NO: 138732 - DNA, 1055 bp, Cannabis sativa
  modified_base (344)..(346): a, c, t, g, unknown or other
  modified_base (1005)..(1005): a, c, t, g, unknown or other
aacttgtagttgtcattgcccatcacaaccacaaaaataataaatcttctaaaaaaaaaagtttctttcttgctttctgaataaataaacctaagcaatttcataaaccgttcatcaccatttaaattatgttttttttattctttttcatatcagtagccaaataaaaaaaaaaaagaaaaaagaagaaaaattaaattggcctccatttatcaaagtcaatgttagatataagttagttaatttattgattacccacaattattatgataatcggagcactatatattattagatttagatatattagaaagcttagatatataatgctggtgtgaccttgnnncagtagataatttaaatttatttatataacaaaacataaaaatgtattacccacaattattatgataatcggagcactatatattattagatttagatattagaaagcttagatatataatgttggtgtgacctttgagcaatagataatttaaatttatttatataacaaaacataaaaatgtataaaagaattattattatggtggtggatccacatttacatctgacaagaaatgaaattctcatggaagataaacaaattaaaagaaatatgaaaaactcattagttttttcacaaacagctaattttgaataataataatcactacactataggactttgtttccttttcctctcagcttttagagatgagagaaaaaaaagttatggaatgatctgaaaaatatatataaaaaaaatagggtaggtataagagattaagagcttctatcatccctatatggaatgcaattagaaaaaaaattattttctttgacagagttttaatgactttttaaaatgcaaagtttttttttaaaaaaaaaaagaattagaaaagaaactattttctttgacagagtttaaatgacttttttttaaatgcaaagttctttgacaggattttatcaatagataaaacatgataattttaaaangaaatgaaaaactacacaatctatagttttttaatctcattttttgtttt

SEQ ID NO: 138733 - DNA, 612 bp, Cannabis sativa
  modified_base (308)..(308): a, c, t, g, unknown or other
  modified_base (564)..(567): a, c, t, g, unknown or other
aactcgctggggttgttgattacacgagtactagtagtggaccctctttaatcatctagacaacagggcaagttagtagagcctggtgtagacccaaccaatccaccggcactacatccacctctgcaaaatctggggaaataatgcgggggttggcaatgctaatcctcctgctgactagcagcagatgtttcgagaaatgcgaagtgtcatacttcgtcaagaagaagagttacaacgattaaggcaaccagctgccccttgttatcaagtgttaccaccagtacctgtgccagtggtgggtaacnaggggtttgttatgccgcatagagactcagtgtttgagcggttcgtgatgctgcaaccttcaacttttctgggaggtattgacatattaaaagcggagcagtggatgaagagaggactgaatgccacaatcagtggggatttgaaggctaccacttggtgtaatctgaatcagataaagaacatgagttgcatctcagagcggttttgcagcgattgcgagatcataaactctatgctaaattcaagaagtgtgannnntggttatcccgtgtctcatttctagggcacatagtggataaagat

SEQ ID NO: 138734 - DNA, 554 bp, Cannabis sativa
tttggttcttctgtaaaaggaaaaaatctagcagccgttagcccccaaaccaaaccctagtgtcaaaagagggaatggggatcccctaaccgctggaaagaggccccctccggatgtttggcaaagatggaaaccccaaaagattttccttagcaaacaccgggtgcaaaaatctcaaaggcagcgaaagcagatgcaaaatggaaaatgcagaacgtgggaacaaaaactgctccatatcctaaaaaatctctcgacagagggatcgattgcaaagtagaaggaagaaaaataacgaaacacaaatagaggagagtctacacaccacatagcagacttagccaaagctatttcctagaaatcaaacacttaaccaaaaaagttctaccctaccatgcaaatgaacagtaaagacacaaaatatccaggaaacttacatgaaggttcaaaactgggagttggtgttgatcggcggtaaaatgtggattggcaatgacggaggaatagcagtaggaaatctatggtttgtgaaattttttctcaaaggtgttctt

SEQ ID NO: 138735 - DNA, 631 bp, Cannabis sativa
ttaaacagagagaattgtaaaatacaaataaattgttccttttttttttggcaatttgcccatgaccaaattgacaatgttcctacaaaaataattttaagtattttttaaaaacttttgtattatgaaataattaacatgtacattaacaataaataattactaaatagatttaattataaatattaattttaaaaatattaaattattaaattttgatcaaagatgaataataaaagaaaatatttgaattagctacttaattaaaaaattatattttttttacactacattaaaatttaaaatttatatacaatatatctaagttaaattacattttattagggattcctagatgggaactccccgcaaattttctgtccatatccctaattatatactcttcaacatattttttttgtattaatttagaaatatttattttggtaatcaaagttatagaaggtaatctgtatttatgttgagtaattattctttaaagtatatgttttatttaataaaaattccagttatatctaataataatttttatgattttggttatattattatttttaatattaacatttctattacaatttttcaaaaacaaaagtgatatttatgtaaa

SEQ ID NO: 138736 - DNA, 1127 bp, Cannabis sativa
  modified_base (189)..(201): a, c, t, g, unknown or other
  modified_base (992)..(999): a, c, t, g, unknown or other
tatttctagtactagttatttttctaatattaaataggaaaatattttagatcaaaattaattgtttaataattgattttggatcaatctaaatatagtattttttcctagtatatattagaattaataattaagttttcatctatacttaattatttatttcttatatttaatatatttaattaaatnnnnnnnnnnnnntctaagttgatttttatcatgatagttaaatattattattttcatgatatttaattaaatcgaaaattattttgagttggattttttttataacaacttaaatttacataattttcaaaatatattttaattatatcattttttttttgaaattacatttaatatgtacatttaatatgtattttttttttgaaaaatagattaaagttgaaagttaattattaattaactttggaccaacttatatcaataattttttcattcaaatgagtaattaaaatataatataaatcagaagatgaattaattagtcaatgaaaatctagaatatagatattatctgcttgaagtatttttctagtaatatttaattaaatagaaaattaatatttaagttgactttcatgatgatacttaaatatttgattttttctttatatttaattaaataggaaaattatattttagttgaaaattaatttcattaattaatcaacataaaattagttattattttccacgattcattttatttttttaagcattttaaaaattgtatgttatatactttaatttttcgaaatgcaatatatatatggaaaattaaaatttgagttgctaattaatttaaattaatacaacttaaatgaaataattttttaaatatttattgaaaattattgctaagatggaaataattaattttatttcctatccatctaagtataattttgtaaatattgaattagaattttatttatagtttattctaaatttgaaattttaattannnnnnnntatatttaaaataaataaattgaaattaatattagaagaagatacattttaaataatgagctttattgatattatgatattcgatctccattattggttctacatagttagtgttttagtgagtaatc

SEQ ID NO: 138737 - DNA, 701 bp, Cannabis sativa
agatcctgataaaatattcccaacactaattatatggaagggtgtctcactgctaccagaggtgctcgctccttgagcaccctcattacgcactacctccttgaagcggatagtgagttcttcaacctcgcttaggccttttgggaattgtctcctccaatccgccagccattctcgtcagccttcactgccttcagagcctctttagcagtaatgactgtgatggcctccttaacctcgtccgggtccccccattgagcatcctgcattgtttccttcaaagaaagatgagccacgtcctgatgtgaggcaataagacccacttcctggaggttctctgtggtcataagtttctctacatgaaactccttggatgagaaggactggcagaaatttatcatctcttctaactctggagtcagaggcaactggggaaggtagtttagaaaatacaaaaaacaagaaattagaatatatcaaacagaaggaaaaatagagtctcaaaataaaaaggagggaacaaaacttacttgcaatattaaaatctaaacatagggtatgaactctcttcggtgggaagccagggtaaagaagtagtagtccctaaagtcgttgtaacgccctaatgccaaggcacgctacagtgctttttcaataattatgcaatctttgctaaccaaagaaatttctcgaaaaacgtg

SEQ ID NO: 138738 - DNA, 1269 bp, Cannabis sativa
aaggacgaattttatctcaagcaggaaaggaagtgttgcgcaatcgattcccagctatgcgatgagtgtttttttgttacctttggatacttgcaaggagttggagcgtcttatggcaaaattttggtggcaaactgattcttttcggaaagcaggtgttagttggatgagttgggactggttgagccatcataaacatgacggaggccttggcttctgaagcttgtgggatttcaacttagctcttcttggaaagcaatgttggcgtttgctagtcaatgatcgctctttggtgagtaaagttttcaaagcaagatattatgctcatggttccttcttttcgactgagttggtagataacccaagcttcatatggaggagtatttttgaagctaaggggctgttacaagcaagtgtcacttgaaccattggtacgagtgatcaaatctcaatattaagggacccttggcttcctcaccgcaccaatagttttgtctcttaaactcatcatgctcttcaaaaccagtatgttggcagcctttttaagacggacaaccgtgcttgggacgaggagattattagagatctctttaacgttcgagattaggagctgattctatctattcaactaagtacaactggtacaaatgactgctagagttggaaatatgaaagcctcggacagtactcggtcaagagtgcttataaatatttacaagaaatgaaaggggtttggcctaatgatggtggttcgaatttttggaaagagctgtggaatctgtaggttccactaaaagtcagtaattttctatggagggcagcttcggattcacttcctacttgtttttagctgaagcacaagcatgttcctgttaattctacatgtcctttgtgtaacgctttatatgaaacgatctaccatgcttttgtggggtgtgatttgctcgtgtgtgatggcatagaactatggtttcgtgggcagcactttgaacgacactttctgcaattggttactggttttgttcagccgtggtaggcaggaagagatggaggaagttgcgactgttagctagtcaatttggcgtgcccgtaatgactttgtttggcaacaaaggagccgtactgctacaaatgtggttgcttcagtaagaactctgcttgatcaatacaaattcgctcaaaaaataaagggtctttctttgtctgcgtgaattgatggggaccgtgtgcttgagcgttggactacacctgctataaataagatcaaag

SEQ ID NO: 138739 - DNA, 989 bp, Cannabis sativa
ttacacgacaagaacatggcttgaaacatacagcggctcaacatatccggtacacaaccacacaacatgggatgtatcacagaacataaaagatatccttgttcttccaccaaaccagaaaataagatctggaagaccaggaaaagaagatttatagctgattgggatacaaaaaaacagaacaggtgcagcaaatgtggtcaacacagacacaaccgaaagacatgtaacaatcaagcaataaaatgggtacagctgaattatttgaattttttaagtctcttgagaattcacacatgttgatatgttatatttgatatactgttattatttggcaaagtttaaatagtttgctagtagttgcataatagtttcatgacagttttgacacttgttaatgtttaattacgaaaagaattttaatattacaatttttaaaaaagtcatatatgaatttataaaatatgattaataacgataataaagaagttgcataacagcaaggaatacattgaggtaatatacaaattaaaattacaagtatgctgaacattgaaattagtttgtatacagttgcataataatttctataaagttgtgcgactttataaaaaaacataataaattggaaaaacataaaattgatgctgatacaaaacataaaaaaataacatataataatgtttaatgtctaatatcctaaaagtttataaccagatccagaatataaaacaaatataatacatacaaacataaaataactaacaattgtctgaaaagaaaatcaaccaagaacaacaaattttcactaaaaaaaagaccctactttttcaatttagaagccttgaaagacttgctttgcttctcatccttactatcaatactttcatcgttttttctttgcccgtatgagaagaagagggcagcaagtcgagtacgataaacttcaatgtcaaaatcagcaggaacatcttttccatggatgaaga

SEQ ID NO: 138740 - DNA, 948 bp, Cannabis sativa
ttctgaaaactcacacagactgatcaacttgggacttacttcccttttgttccaacttccaaatttttcttttcgttggaaccaccttaagatagataggattcccaactttaaatttaatatctctattcatctattgcataagcaatacacaaatttgaatctttaaactacatcaatatcactttaacagtactctaataactgtcattacataaaaactcatttagaatcttccactcagtatccttatttgactgatacaacaatctggtttatatcataaaatttcctttaaacaaaatcaaaagtcctttgtcaagccggtatcaaacctcctctcgtgcttctaaagttcggagttactccactgagccattttatttctttccaacaaattgaactacaatgtaatattaacaagttctccaatcgcgatctcaattcctattctatttacatccccaacaactgatggtaagatctttttcctttacaaacttctcctggacctctttgatttacaacacctattaccaatttacttcccaaaacggtaaagaaacatatcgttataatcttcaactaaccctaaccattattgcagcttcttacttaaatcctttcaagtgaagatatgtttgaagcccttgtagttcatataaacttcacacttttcatcatataggtactgacgccaaactctcagtgcataaataaccgcgccaacttagtatcatgattagaacaccactatattcacactccttccatattgtctccaggtgcacaggcaataaccctcttaaactgtatcaaaatataatctactccatgtttagaggtgtcgcaataattcataattttcttctcaaggactggtaacgttagcactggtgcaataggtaacttttatttcaattcttttcacttaattccattaaggac

SEQ ID NO: 138741 - DNA, 876 bp, Cannabis sativa
acttgcgtattgttcatagttttcataataagaagtactataatgagtctattcgggcagcaaaggctgaagagtttatacgattgactcaggacaggatggcagtaacataatatgccactaaatttgatcgactgggaaaatttacttcgaatgaagtggctactgaagctgctagaattggtcaacatatcgcacgggatgtgatagtttctgcttgtccgaacttatgctcagatagttgagttggccctagctgctgagggtgcagaagaccagatacgaaagaaaaatattgccagaagagattcatggaagcaaacatctggtgttggttctggaagggcgtactaactctggtaatcgtaagaaaacgcctaatgaaccagcatctgcaggccgaacaaaaggttccagggtaaccaaggttttcgtcgtggtgggaacgaaaactagcagacttttcttgaatgttcgagatgtaaaaggcgccaccagggcgagtgtcagtccgtggcctgttttcactgtggggtagtgggtcacatgaagaggaattgcccacagttgctgcgaccagaacaaaagaaggatgatacacctgctcctgctcaggtgtttgccctgacttaggccgaggctaatgccgccccttccactatgacaggttagctttctattgctggtactttattgactgttctgattgattctagtgcgattcattcttatatttcaagtagaataattgagaaattgaatatgccaagtgatgtacttgctagaggcttcagaactttgctgcctactggggagttggttatctctagcaggtgggtgagtgtaacaccataactagcataggcgtgttgacgt

SEQ ID NO: 138742 - DNA, 627 bp, Cannabis sativa
ttatattaaaattttcatttattagattttttttaaattaaaaaaattattattttattaatatttattctttacatattttaatgttaaaatttcataaaatttttgctgtgaaatttttattattaaaaaattataatttggattttaaaatcttatttaataatttacatgaaaaattttattttttttatattttatattcataaaaattaattatatttatttacatttatatcattcatgttaaaaaatattttacctataagtattttttttcaataatatagatagatttatcttaataatttatttttttttttatttattatatatatttttttttaaaaataatcaattgtatatcaattttatacatatttacaagttgtttattattgtaaaatattaatgacacaaaatttcttgagaaaatttaatactaaactctataaattaaatattttcggttcacaaaatccatatttttttcctggtcagtttcagcaataaccccgaacttttcgccacaacaatctccgaatgtttcgcaacagcaacaatctccgaatttagcacaacaacgacagactcgacaatttgcggagattttatctgctcagcaac

SEQ ID NO: 138743 - DNA, 541 bp, Cannabis sativa
tattattttctcttttgctggactttggctcacaggtgctttattgtctaggcaagagtaaagcaatgtcgagttagccatgagattgaggactttgcggatgatatgtacatgttacaaccaagctagaccacgagagttgagtccaacaaagaattgtttgaaacttcattttgtcgcttaggttagtttgtacaaaatcacttataatattttacaaataaattttacacgattccagatatgtaattttaaattattctagtttattgaaaaataccaatatttattggaagttatttatttaatcaagtttaatattggttttaaatcacttggcttatggaccttgattaacaggattagtagtttgtaatcacgatacttgacgttcctctaagtaagacgttacaagccgctagagcaaaatgagctctatgcaaccgttcaaccttatctcctcaaagacgccttaggtcccacggagtgttatataaattaacaattaacccaagatctatttgtatataacatagaacac

SEQ ID NO: 138744 - DNA, 643 bp, Cannabis sativa
tttaacaaaacagaagatccaatctgtaacttttgcaaaacacaggatctaaaatggtatttacccgaaaaaattagatcaactatgaaatacaaataatgattttattgattcaaaccaatacatttttagtggacattggttcggtttagtttgatcatttaattagttggtttagttttaaattttaaaaaatcgtaatactgatttggtttgaaaaaattgaaaaggagttttcacaaaaatactgaattttgggcaaaagtttacaattttactgccacacgatttttttttataaatatactgccttttataaaacaaccgtaaaacaacaaaacttaacaattaaaacaacagtcgaacaacaaaaacccaactgtggaacaacagtgaaaacttaacacagtatacagtataaaaatacacagtatctttgaaaaaaaaaagggggctattttcaaaaatatgggaaaaattattagggttatgataaataaggcataatgccactaaatatggcattatctaacgtataaaacattaaaatgaaatcggaatttaaaattcataaaaaataaaaacttgattaaattaccataaaaaatattaaaattcccttcatatttattttttttaaaaa

SEQ ID NO: 138745 - DNA, 737 bp, Cannabis sativa
cactacaagaaagcctagttttaccgacgcagttgaccaattgcgccggcaaaagttgtcagcataaatgaaatgctgaacttcatattggattcagctataaattttaccggcgcaataaaatgcgctggtaaaagatgaacaatgaaccgccaaatggcgcgaacacatgtccacttctgtaaggcttttgccggcacaaatttgcgccggtaaaagttacccaaattttggtgggaatcttaaccgccctcgtcaaaatttggggggaaaaaatcccgcgtggaaagtggtggtaggtgggattacttgcgccggtaaaagtgttaagcgaaacggtgcgtttgggtttagggttatatgaccacttttaccggcgcaattcaatgcgccggtaaaagtgtttatatatcccccttcgacaagcaaaagccatttttgttttttttttttagaattttttttttctctcaatccctccttcatccctctctttcaatctcactcattctcactcaatctcactaatctctatcaatttcactcaaaatctcactcattactctcaaaatttttgtttttttttcggaataaaaatcaccaccgccggcagccactcaccaccgtccgtcgggcaccaccaccgtccgccagtagccaccaccgcacaccacccgaagccccacctcctcttatttgtggaaggtattttttaattttttaattttaattttttt

SEQ ID NO: 138746 - DNA, 859 bp, Cannabis sativa
tttcattgttttagatatattcatatttaggatgttaatcagcatacttgttattaaatctagatcctggtaaaatattcccaacagatcaaacacgacctgatgttcacaactaatgataataccacctatgttgacatggtgacaaaagcactgcgagctgagggcacaattgagttgcattcaagaatcttaagggacacaggttgttggtgaagccactactcctcctacctctggttatgttaggagtggtagtgacccgaccattgatcataaaagaaaggcaccatctgcacctaatggcctaagtcaaaacaagagtatctaagagaaccaaggtcatggtaaaccgtcagggtggttttaaaaccggatacacttacccggaatgtcctaactataagaagcatcatcttggtgagtgtaaagggaaaggatgttttcaatgtggtacgcctggacattataaagaagactgtctgcagctcaagaaagaagaatagaagagagaagcaaagcccgctccagcaagggtgtttgctctcactcaggctgatggagaagctattctctcagttgttataggttagctcttggtcaacaacctttacttctctattttatttaattatgtggccactcactcgtatgtggcggccaaaactcttgataaattggttagaccatttgatagttatgataaagggtttggaaccctatttcctagcgaagaattagttatctctaaaaggtaggttaagtctatgctaatcagaactgaggatagagagttgagtgctaatttagtggaattgggcttagcatattttgatatcatacttggaatggatttttt

SEQ ID NO: 138747 - DNA, 1232 bp, Cannabis sativa
  modified_base (465)..(467): a, c, t, g, unknown or other
ttaactttgaactctagagtatacccaatacatcatagtatctctatggcacacatattttgattagacatggatataatataatgaacaaattagcaaattattagaacttaatcttgatcctgtgattattccaattaacatgttactgtagtaatagaaattgatgccaatgaagttcttaaacataatatcacaataccttatcttagtgggagaattttaaaacttcgagcttattattgtttggatgacattagtgatagcttactatgttatgttcaagatagaaactttaaataaaactgaaaaattaaatctatccattcatatggatcgaaataacttattaaaattatgaggataagataggaaattatacaatgtctattcgaatgacttaggcaaaatacctaattcttacgaaaagttttatggtgtctctaatgattacttaatcttaannnagtattttacattaatgttaatactaaaatgctatgttgatgacttcgcaacgtcctcgcttcaagcctccattgggtccttactaggggtatatgttggtcggtttggtcagtttttatgccatatttcattcaacccaatgtaaagatcgagttacaaaaactaagtgcaacccacccaattaaaaaaaatagtaacccgcccaataaaatttgtcagtttggtcaggttaacccgtccaaaccgaccactaatatttttttttacatacaattattatattttagttaattataataatgggacaaatatatatatatagattgaatttaatgttcaaatcaaccaccataaaaaaatatatattagtttgaaatttatatttttaaaatcatctaaattatatgatatataaatatatataaaaaaaactctcttaatcgggttggttgggttagttcgggctaattgggcgggttagtattattttcaacccacctaatataaagattgggcgggttatattttcgtcgaattttttggtttatatttattgtcaggttatctcggtttggtttgggcagattattcgggttgggcggtttacaaaaatttatgtacagccctagtcctttcacacagagaataattgctcttatgcatgagtacgtcgctcaggctgcttactggaatgacgactgaccctagaaactaacatgagtgtttccagcgtgctttgtcctcactcgcacgcttcttgggaa

SEQ ID NO: 138748 - DNA, 770 bp, Cannabis sativa
tcaaagaaggggctaggtggagagttggaaatggtagaaagataaaggtgtgggaggataaatggcttcctagacctcatgaatctaccctttctaaatttcctgatattacacctcataccaagcttcataagtttataacttgggatggagagtggaatatggaagagatgactaaacactttcacgaagatgatttcatttggcctttcacccctaatggtcaatataatgtgaaaagtgggtatcgggttggtagggaattaaatcttaatcctactcgatgttctaacatggctgagattcagaagtggtggaaaaggctatggagtctacaacttcctcctcaatgaagctctttggttggagagtttgccacaactggctgcctgcaaaaactaatctgaaaatatagaggaatggatattaatacttgctgtgatatgtgtggaaggtatgaggaaactcttacacatgccttatggagttgtgatagagttagaaacattgggaaactcttttcttggtataaaaactgttcaagtttgggggaaggaactatgtttgatgttttaatggccattgagcagacaactaccaggtgtgagattgaatatactatcaaagtgatgtgggctatctgggaaaattgaaacaggaaatggaagcaactcccaagtatgattggtcagcaactgataagtcggattttctctgcatatccgaactttctcaaagctgaaaatgatgttgttcaccaagaggctggt

SEQ ID NO: 138749 - DNA, 603 bp, Cannabis sativa
tatttatcttattatttgtttcttaattataatttactttgtgttatctaattaaagtataaaattaaaaagtataataattagtaaaatttaataatcaatccttgtgggttagacaaccgttttagtattaaaactttgctataataatgttgtacgcttgtagtaaaaaattgtgtatcaagtttttggcgtcgttgttggggattgaaaattcttaaattattgctaatattattactaaaagtttttgctttaaattagattttattttgtttgttgctttgtggttcagtttatgcgaaagaatcttgagattgaaacaactctaaagcgattcaaagtgaagaaaaaattaaatttcaccatggcaaccaataacaacaatggccttaataacaaccaaccagaacctactgcagtttatgcacaatcatgggttgttcgtgattagtgcttccatgtggtgaatgaaaatctgactggtattgctaatccaatcattgctgctaataaaaagcatgctttaatcaatatggtgcaacagaatcaatttggtggcttggctactgaagatcccaatatccatctagccatatttct

SEQ ID NO: 138750 - DNA, 919 bp, Cannabis sativa
  modified_base (849)..(866): a, c, t, g, unknown or other
attactgatgaaatattttgaattccagttgtgaataaaataatcatttctttcaaacaagtaattataaagtgtaaaccctttaaaataacttgatgggtatatatgtatgattaaccggaattgatttggaaatacatagtacaatgcaaacccattgtttcaaaaaaaaaaaggcctcgaccaaacttttttgacggaagaggagtcgaatcgttataacgccttgatcaaacctttctgacgagaaagggatcaaacaactgtaatttttttatttttaacctatctgacgagaaacaaaaatcaaaatttatgactagcgcataaagttgaatactaacggctcgcgctaagggaaagtattaaacgaggcatccaaatgtcttgaaaaaatacttaaacccaacacgtgggtagaaattttaactactcatgtaagcaatgaaaatatagataagatgacaagatcattaaaaatatatttgaatgtgcttaaaataagatcatttctgatgatcgcaagatggaattgatgatggctcgcaaattgaggaacaggtagataagctgctcgcacgtaaagtaggaaattaactacttaacgtcggaggaaaggacaatcaatggaaacccctaataaactttatgcatgtgatagtttatattgtgaataaaacgcaagcaaacatccgcataataaagtttacacttaaaagtgcgaggcattaaaaagcaaagttggccgtccaactttgcaaatttgtctttacaaaaaaagtaccactaggggcaaaaccattgtcttgatcaaaggggcatttcctaaaagaaaaaagggagataaannnnnnnnnnnnnnnnnntgggagacttggacagatcttcttcttcctcgacctcgccatcttcttcctcc

SEQ ID NO: 138751 - DNA, 1709 bp, Cannabis sativa
  modified_base (867)..(871): a, c, t, g, unknown or other
atccaggaggaggaggatcatgaattggacgttgaggtccaagagattgacgagcaggacgatgtctgtcctagcagtccctccgaggtgaagcaagaggaggaggttgcacccccaaactatgggggatacaatgaggcgggggagccagttgatgctgatggcgacgtcctggttgagaatgtggactacgccaccgaggaacttactgccgcggttcctcatagaaggcaaggtaccttgggtaccaggtgggttagccctccatccaaggttactgagccgcgcctgcgggatctcaaccaggatggctacctgggcgaattagacagttacattcccacccacaataatcgagtcacaaaccctgaaaagggaatgtgcgcctggtcgggtgctcatgcccaggaaggggtattattgcctttgcacctatactttaggaatgtgacagacttcttccgcgtttgcctaacccaatttactcccaagggcattaaatatttgtccgccctcttcgttctttatgcctcccagaaatgggatacgccatttccccacaaagttagcgggttttttgattaaagtccacccctaagcaaggcagatcggggtacttctatttctctcaaccagacttcaagtggttgacgggcatcggggattcggccatcagcaaaattgggcattttgttgatgagtatgtcatggtggatggcatgggcaccacccacactcggttccagcaaatccccacatatcaccgccctccctttactcttgctcttagagatagagctcaagagcttgctcagctattggggtatgatcaaaatattattcagttgacctccgaggacaactttnnnnngtacgggctctatccaaaggatttcattcctaagacagtgaaggggaggaagaggaaatctggtgctagacgggctgagggaatgagctgattcaactgaagcgtgaggctaagttgaagggaggtgcaagggccaaacagtatgctcatgagcccctgaatcctgaagatgaggctgaggaagagcaggtgactccgttcaaaaggaggaagaaacttccggccaagtccaggcccgttgaacatgcaattcgcattagggagcccagttcacctgcttagccatcttttcccgtgctgggaaaagggaaaatcgtcctggcggaggcgatagacttatcaggtgatggtggactgtcgagtcttgtttggacaatcgccttgtacgatatttcgtcttatttttaaactttttgactatcatgcttaatccttctgatgccttttttcctctaatcatactatttttgtttcgtgcagacatgtctcagaagatgcttgatgccctgaagaacagagttgggggaagtttaagcacttctcctccggccaagaaatctaagggcggtgaggaaacccctttcaaggaaaaggcaccagctggagaggttatcgacctttctgaggagctaactgttgcgaatccttctactctaaaagttactaagtccaaggattcttgagttggccaagagcggatctgagcaggtgcgggctcctactccacctttgcctgtgcttcgagaggccaagaaaggcagagagatgcttgcccattacatgaaccggtttgttcctgaggtaagtgagcagctggccggtgctgataacgagtctt

SEQ ID NO: 138752 - DNA, 523 bp, Cannabis sativa
ggtgctcttttgctcaaagttgctggagcaaggttccaattactgttgtggcgcctgatgcaatgttgttctcgagttggttcgaagctggttttgcatcgtggaacacgggtgaggctcttgaggttggtatggtttgttggtcagtttggactcatcgaaatgatttagtttggaactccaaacaccctgatgcgagtgaggtagtgacaatggcaaaattaaattatgttgaatggtttaatgctcaaaaacataatgtcacagatgcaagtttaaactggccgactgcactacctgtggagcaatggacaacacctgatttcccttttgtcaaagttaatgtcgatggtgcacttttctctatccaagggtggtatggactgggtttgattgcaaggtctgctgcgggtatggtcttgggggccaaaattttatttagagaaggctctttgcaacctcatattgtcgaagctattggtatcaaggaagctcttttttggagtaaagcaaatggatggtc

SEQ ID NO: 138753 - DNA, 614 bp, Cannabis sativa
ctcccaatcttctagttttttgtattgttgtttaaaatgcctgtgtctgagtgtctttcgcttactatacctctccgccatcaccgaatataaagtccccataagtaggtctcgggggaattcccgtcgatatcaaaatagttttactcatttaattgcaatttttatttaaattaaacaataaataaattcttctaattaatctttttgatttgtaatgtttaaattatttattaatctattcaaaaactaaaaaaatactatactttttaatgaaaacaattattattataaaaaaattcatttgacatattacactataaactaatatatttctttttctaattttttacattttttcatcattctaaatttactaaacttacttttcatatttttactaaacttaccaacaaacttatttaatttaaataaaatttaatataaaacaaacaaatacacattattaaaaacatacatttcacaaaagaaattttgtgtacactttctccaaagtgcttaaaaattttcttcaatctgaaaataaatagtaaaccatattatcaattactgaaattaaatatgaaagctacaaataaacacaatacaatata

SEQ ID NO: 138754 - DNA, 750 bp, Cannabis sativa
tagtagaatcagaaaaagcaaaaaacagaggcactataataagattttaaaaagaaaaggtctccatgtctttcacccttcccaataaccttcttcttcttggtgtcctgaatgatacaagaatcatcatgaaacatgaaagatcaattagctgaagacattaaggctgcaatagacattaggctgtatttaaaatctggaacatatagaacattaacaaggacaattttagaggaaattataacagtaccagtgcaagaaatttttttcttggtaccatcaggaagagtaatagtagatagaatatgtttgtgacaagtattggtaaacaaatcaatgtttggacaaacatgatgagtggcacctgtatcaataatgcatttatttttatgaataagatcagtcttaccagaaaaattcgacacaaggggctgattggaaggtgcagtattctctgtgtggaatttttatgcaagcatggccataattttctgacattggctgagggaaagaccagctaaaggatcttgattaactccaggtcctccttcattgatgtcattatgtgtttcagacatgtttgctgctggctttccttgtgttgttctactctgagaattttcaccatttttgttaggaaatctatcatgtaacctatgcctcagtggatagccatgaattttatagcatctagacatggtgtgtccattaattccacaatgattgcaaaataacttggatctttgagat

SEQ ID NO: 138755 - DNA, 566 bp, Cannabis sativa
ctggaaccttccagtgtgtcctttgttcctgtggcaaagcctttgtttttacccaacgtcacgattgcttttgaaccaggtgacttggattttgaaattatgcctcccaagctacatacatcaaatactccctaggacccaatgtcacctttgaggctgagttgatagaatcgaaggtgcagtctatctcagtctactcgggcgagatgctaaagacttgcgaaatcaattttgggcaatcatgccaagttaggtcagtacgagagggtgagttcagttgttacccttctacgcattttgcaagcagtaactcggggaccagtggtgagactagtaccagtggttcgactagtatgggcgcctggagccttgagcatatccgtacagagaccacgcttcctcttcgagactacttcaaggactatataaatcacattggagttgccccattccagttgactcccatctcctacaagattctcgctagtttgaaagtcttatagaaaattctgaactggggttgttgttgggttttgtgccctaattaaaacccatttcaatataat

SEQ ID NO: 138756 - DNA, 765 bp, Cannabis sativa
ggaagatgttgctatggacttcgtggtaggtttgcctagaacattgggacagtttggctctgtgtgggtcatagtggacaggtttacaaagtcagtgtactctttacctgttcagaagaatttctccattgaccattatgctgagttatatgcagagaaattgttcgtctttatggtgtcccaaagtccattgttttagatagagatctgaagtttacatagagattctgggagagtctccatcaagctatggtactcagttaaagttcagcacaacatttcatccttagacagatgggcaatctgagaggactatttagattttagaagacatgctacggtcatgtgtgcttgactttgaaggatcatgggtaaagtaccttcccctcatcgagttctcttataataacagctatcaggaaacaatcgggatggctccttatgagcttttttatggaagaaaatgtagatcacctattcactgggatgaaataggtgaaagaaagttcttggatccacgaggctgttcagagaacaagtgaggcagttgacaagattagagcgcgaatgctcgcggcttagagtagacagaaaaattatgctgatccaaagcgtcgggatattattttcaaatcggggacaaggtgtttctctaaatatcagcgatgaaaggcattaaacgctttggtaagaaaggaaagcttagcccaaggttcattggaccttttgaaatccttgagaggatagggcaagtagcgtacaggt

SEQ ID NO: 138757 - DNA, 1473 bp, Cannabis sativa
cctgttcattctcaaaagcactttacttggaaacttttgcatgatatttactataatgcttctcatttgccttggctaataatgggggattttaatagttatctttttaatactgataagctcgggggttaggcctctgatcaggttgttatgtcccttttctctgattttattaataaattttctatgtttcctcttccttatgtgggttgtaaatatacatggactaataatactataagtgaacggttagattgggcagtcgcttctgaatcttggtgtgatatttttcctgaaaatagtttacatcatctaggctattatgggtctgatcatcgtgctttaaaacttctttttgccaatgatgctagtaggcctattaattttgttaataagcgatttcgttttgaaaatagttggttagaggatcctgatttttataaccttatgcaaaataaatggcatgatcttctagctaataattcaccttccaatcattttaagtatttcttggataaacaagctcattgtgttaaccttttaaaagattggaataagactcataatcatctttttaaatctagaatccaggaattgactcaggaaatagataattttcaaaatcaagatgttcttactcaggctgatagacttcatttgaataaattgaattcaatactagatgctcttctctataaggaagaagtctattggaaacaaagggctagggtgcggtggctaaacgctggagataaaaacacaaaaatttttcataagcaggccactcttagaaggaaaactaatactataaaatatcttaaagataatgagggtcatgtggttaatactcaagaggggatagctaacttagttgtttctcatttttctgacctttttagtacccagggttgtagtgtggatgctgctgctgcaatttttgatgttttgggtcctggattggaaacttctgatgttgaatttcttgctcaggattttactgctgatgaagttaaaaaggctgtttttcaattgtctggagataaggcagtgggattagatggttttaatgcttatttttatcaaaagaattgggctgttctaggtagtgattttactcatgctattttagactgtctgaataatgatattgatttttctaaaataaattctactcttattgttctaattcctaaaaaacaacatgctaataagctaggtgattttagacctattagtctttgtactactttttataaagttctatctaagattatatctaatagacttaagaggatttagataaaatcatttctcctttccaaagtgcttttatttcaggtcgtgttatctttgataataatattattgctaatgaactagtacatgctattaataataggaaatctggtaaaaaaggatgggctgctttgaaacttgacatggctaaggcctttgatagggttgaatgggatt

SEQ ID NO: 138758 - DNA, 1133 bp, Cannabis sativa
  modified_base (422)..(425): a, c, t, g, unknown or other
  modified_base (456)..(459): a, c, t, g, unknown or other
  modified_base (1041)..(1047): a, c, t, g, unknown or other
atttctaaattaatcacaactatttaatagtaatccaatggcttaaaaaatataactatgatggttacaatataaatgaaatcattgaaacttcttccaaataaatgatattattatgggattatgagttattctttttattttttatatttatacaggttttttatgtcatatttttattaagaaaaaatagaaatttcatatttgtaaaataataataagtttagccataaatttattagtatcggaaaagtcgccgaaaaaatcattggtgctagaaaagttattgttgccagaaaagtcgacgaaaaagtcattattgtcagaaaaattaccaaaaaagtcaccgtcgttggaaaaattaccaaactcagatataaataaaaatagaaccaaatctatgacataatgaataaaaatannnntctatgacataatgaataaaaataaataacnnnnaataactcaaaccagttataattgaaatataaccgattctgtaacataatgaataaaaataaataatacaaaataacttaaatcagttataattaaaatagaactggttctataacagtgttataatgaataaaaaaaataacacgaaataactcaaactggttataactaaaatagaactggttatataacataatgaatgagtattttagggtagatatggtatgggtgtaattattttgtgggtttgagcatgttgaattggtattttttgtttgagttattttgtttaagcggtttttgtgtatgagtttttatcttagttactttacggaaccagtttttttgtctcaaatttttaactagttgataaatataattggtttctttatattatatttgagttcttgtctgttattatttgtatttatttattttattgtggaaccatttttcttatatttatgcctcaatattttttgggattgatcctcacttttttttttaaaaaaaaaaaaaattaaactgattttatggtatattgtgcattataaggtatttttattgtagaactagttttgnnnnnnntttatgtttcagtgttttaggaattgattttctctttgttttttaattgtaatcagtttgagttattgcgtgttacttgtttatat

SEQ ID NO: 138759 - DNA, 609 bp, Cannabis sativa
gttattctttttgtaagttttcagggttgtaggtttagatgaagtttgagtatgttatcttagttgaattaggtctgtttgtgtatgttaaaagtaaattcatggctgttgggattgaattgtgagtgaggaagctaaaggaacttagttttcttcacttgagcatatgattttgagttagagattgaactactgtaatttgcagcttgggatatgctatatttatgttattatactgttctggaaagtttagttaggtttggaggagttttgggttgaatttgaaagaaagaacccaagaaaacttggtctgccagaaccggtcgatcggttggttctggtgcaccagaaccggtcgaccgtttgcttgcaggggaatttttttgggttttcttcaagttcagttttggcccgggaagttatgtatcatctattttaagttgtatatgggatgcttgacctattttggagttgttgggagttaggttatgtatgattttgaactagggttttattccggaatttcaatttaaggtattcattgagtttaattgtcgtgacataggaccgggatcgcctagcttgttttccactcaggtcggtccgtac

SEQ ID NO: 138760 - DNA, 781 bp, Cannabis sativa
cgggaggcaaacccagcaatattttaatcggaacagtttccaagagaattgttaactcgggggctgctggttccaagagaaaggacagagttaaggaatcgtcgaaggataaaaagaaacaaaaaaagcatgaaaaatatgtgtgagtgtgtactatttatactgagcttaatgaaactcgggagaatatttacctcgcacatgagcaaaaggtggccgtcgacaagcccgagcctatgaggaattcgaggagcaaaagagatcctaacaaatattgtaaattccataaagatattaggcatacgacctatgaatgtcgccaattgaaaaatgagatagaaagtctcatcgcttgaggccattttaaacagtatgtgaaaagacagggctagggttacaaccagcccactctccccaataacccaaacaatcaggggttacaacctattcctgtggaaggagaggacatcttggttatttcaggagggccacatcggggaaagcaataacacccagaaaagatatgtgaaagaaataaagaacgggcaattgacctttgccccagaaccttccaagaaggtaaaaaccaaggaacctcccgttgtattcacggaggaagatgagaaaaacgtgaggtatcctcacatcgatcaactggtgataaccattgaactttccgataagaggatcaagaaagtattaatagacaatgaaagctcggtaaatatcctttataaggagactctaaagaaaatggggctcgaaaaagccaagttaaggc

SEQ ID NO: 138761 - DNA, 506 bp, Cannabis sativa
ctgataggtgtttcatacactagagcagacaatatgaaactccttaaggtgcttgttggggtcttctccaggtaatccatgaaaagctggtagtaagtggatgaggccggattttagttcaaaattgacatccaaaggtgcataatagatgcacaatggttgctggtctagatttggcgcggccaactccttcaatgtcctgttttgagccatggtcttgtgagaggtaaccgagtcgtcagagtctgactcgggatcagttgatagtggctgtttagtaggaccaagaggttgaaagagtgggttgtcggttatagtctttgaagatcgagaagcagacgatgactcaagatattatttaacccttgaaagtctctcttgagtatcgtcagcactagacatgtacacctgagattataaaaataaaacagcttagtaacaaaaattaaatatgaataataaaacaatctttttttttaatttttcaataatttttttttaataat

SEQ ID NO: 138762 - DNA, 932 bp, Cannabis sativa
  modified_base (221)..(222): a, c, t, g, unknown or other
  modified_base (303)..(304): a, c, t, g, unknown or other
  modified_base (848)..(855): a, c, t, g, unknown or other
tatatatatatatatatgatcgaattcgaaatccaatgtattaaagtaatatattttcgaaattcaaataaaataaaataaaaccggaaaattgttctaattgatgttgatctaaaattacataaattaattttcaatacaaatataattttcttatttatttttttttaaaaaaaatatcaaatatttaagtttcttgaacaaatcaacttaaatattanntttctatttaattaaatatacctagaaaaatacaaaaagtctacctaaaaaatatcgatctagataattcataaactaatnnttgttttctaattaaaatataatatattttttctatttattttaataaatcatcaatgaaaattactagatttaagttgacagttgacccaaaattaattaaaatcagttttcaactttaatctaatttttaaaattgcaaatttaaaaaatatctacatttaataaatgtatttcaaaatttatgtgggaaattattattaaaataaaataaaatatactctaaaaattattctaatttaagttgatctaaaattgaaaaatttctagcttagatataattttctatttaattaaatttattaaaataaaaataaatattgaaatttcttgaataaaattaactcaattattaatttttaattcaatatgtaagaaaaatattctaatctatgttagtctaaaattaattaataaattaattttcaactcaattatattttctattaaattaattaaattccttgaaatagaaataaataattaagtatcttgattaaaatcaacttatttattaattctatttttaagttctaagaaaaatnnnnnnnnttaagttggtctaaaattaattaccaaacagattaattttcaacttaaatatatttttctattaattaaatattaga

SEQ ID NO: 138763 - DNA, 522 bp, Cannabis sativa
tgtacagttttcccacataaattgatatgaaatagaattatcatcaattttctaggattttacgttttcatattctcttttatcacaaaaatatgaattatttcaatagattatcattatctagatgggctgaatggtctatgttttgctaaatctgtctttattcctcgtttctcatcaaaaatcacattgatcatcattgatgttgtgcgaacatttaaggccgctgatgaagatggcggtgatattcagatgtgggtcaagaagaaggatatatcaaatcctctattggtttgaaccgaacccttgattacgtggtgagttttttgattttgaattaaaatttcttttctttttagatgtccatatgagttatgttgttgatttattctggttttatttctaagttagtgaaatgcgtctagatttaagtacttttgtttgaatgtttgcacagtgcgatgaagtgttttgagttaaaattttaattttagtttaatcgtgggtgattttgttcaattt

SEQ ID NO: 138764 - DNA, 1370 bp, Cannabis sativa
gagcctatatgtttgctattgggcttagatgcgtataagagcctatttttttggaataattacataagacactgttgtactgtgaattttttgcctagaaactcgagaccaggctcccgtaagaatgacacgtggactcacatcccgtgaggattgctgagctgtcaagaagggaattctcgagaataaacctcgactgaaccatactcagcgagatgatgtgaccgtgatagagtcagtcgcattattatgcctgagaagggattatacaagtcgcgcatataccaaagtaaatgcgatgactacatagacttctccagcgacttagtaaagatcatttctttacatagcaagttggtctgaatgactactcaatgactcgataagaaatcacatatcctatgttatcgacgctgataaggtatccacatacacaactgattaggacgtgaatacctaagtacgaggcttgttagccctttttgtgttaaaacgcaccactaagcctgcgagcttgtgcgggtaaatgaacaggcaactcgcactatggaagtcgtgtacgttgctgtaattagtgaaatagatttaaactgattttcattttttttttccatttacttttattttaatttaatgttaatatttattgtaaaacgggtctataataaattaagttatgtgtaattaaaaggacacttgctttgtatataaaagagtaatccaacatgaataagacaagacaaaaattcttacaacagtggactaagtagaccgtgatctgactgaaccactatacttccttgtgttcatcattttcattgctttttctgtttatctaggaagtctttatttgagtattcgctattcgcggttgaatactcgctgtttttatttaattcttattttatttggtgttgtctaaattcctctgacaacatttggagccatttgtgggtagtaactttttatttaagaggaaaatcaacatggctgcaaaccagacaaatagaaataatggatttttcaatgtcgaaacaatgcctgctccactccccggtgatggagctaatctgtctaacacaattaatggaagtatgggacgaaccaatgtcactcctcttaatttgtttccagaaattacttgtaacgccctaacaattaggcatgctaccgaaggtgattaagaaaccctaatcccctaaacgggattactaagcggaaaagtgtaggaactttaaactttaaactaaaacataagaaaaataaaacttgtaatatatgttacaatctaaggttacatatctcgggatcccaaaaatattttacaaaatattacaagtcttttccattagccgtcctaagcggcaaaa

SEQ ID NO: 138765 - DNA, 616 bp, Cannabis sativa
  modified_base (134)..(147): a, c, t, g, unknown or other
  modified_base (270)..(275): a, c, t, g, unknown or other
  modified_base (464)..(471): a, c, t, g, unknown or other
ttatgccttaaataaaacccatttcaatataatcttcttttttatcaataaaagattagaagtcatttatgtttacatgtagtttttcatgtgtatggttgaatatacaatttctgttaaatccagaacatatnnnnnnnnnnnnnnacagtgatgtcaacacagtggagggtaattgtgattatatgcttcaaaagtttatgtctcatgattcatccgtgcactggatttacactgatgtgatagtcagcgataaagtttacttacacnnnnnntaagtgttatgttcttttcagggcataggtaaagtatgctagtatcagttgtatagactatacattggactgtgactgatattgatcttggtaaagatattataatcttactgttgtatctttctaagttaatatcactggttgatcttacatcaaaagatcttaatcctaatatggttaggttcgatnnnnnnnntgttatttatgttcttagagttgttagtaaaagcttaccaattggtttggttaacacatatatcttgggaacatgatagtacaattgagtgagagcgctaatcatagatatggaatctaatgcttctatctggaaatagaagtga

SEQ ID NO: 138766 - DNA, 526 bp, Cannabis sativa
tggtaaaatatatccaacacatggttgatgtcacctaattagttacacactggtcgcggtaataaacaggctatatatcgtatccacatggaggaaaaatacacttaaaaggattgttagtaattttacgagaataaaataagaaccttgaatatgatgagaataatgagaaaataatttttgaaaattgaacaagtaattaaaatgaaaagtgatcataaaatgattatggaagacacaagttttgtacatgcaattattttttcttaataaaattgattctttaaacttaactacaattctacacaattaattatagttggaaaatgtgtataattatgctcactggaaaaatatgttctctaattaaattaatgctacttctaaaaatactatgatattatataatttaaattgataaaataccaccggcagaatgcagtaaaaatcatataatataataaacaccctaataattaatgggcttttttcataaatgtacaacaaaaacaacataattacaaaa

SEQ ID NO: 138767 - DNA, 1518 bp, Cannabis sativa
  modified_base (145)..(148): a, c, t, g, unknown or other
aagaacatcatggctctcgcaagaaaaggaaagacaactcagttttgggtagaggatgacctcttatggaccaaaggtgggcgtttgtttgttccgaaggcaggaaatctgaggaggacgctgctgagtgagtgtcatgacacgnnnngggcaggtcatcaagggtggcatatgacacatgcccttttaaagcatgggtactattggccatagatgtgggaagatgtggtggactacacaaggacctgtctcgtctgccaacaagaaaaagtggagaggcataaaatgccaggattgttagaacctttgctagtcccaagcagaccatgggagtgtgtctcgcttgatttcattacaagtctgccgaagacttgggacttgaatgcaatcttggtgatcgtggacaaattttcaaagtatgcaaccttcatcccagtgtcaaagtagtgtccgacagaagagacaactcaacttttctttaagcatatggtaaagtactggggagtaccccagaatatagtaagtgatcgagatcgaagattcacagggagcttctggtctgaactatttaagcttcttgggtcacaaatgaacatctcctcaatctaccattcacagacagatgggcagacattaagatttaacgggatgttggaggagtatttgcgacactttgtcaattccaaccagaagaattggccgcaactactagacgtagctcaattttgtttcaactctcagaagagttcttcatcgaacaagagcccttttgaagttgtgaatggacaacaactactgttaccccacaaaatggatgaataccaccgagccttcaattttacaaaagtctggaagaagaatacaaagattgcccaagcatacttagtgaaagcctcacaaagaatgaagaagtgggcagataaaaaatgtcgaccgctggagttcaaagcaggtgacttaatgttgttcaaactgcggccagaacaattgagattctgaggggacaaggacatcagactcgtacgcaaatatgagggccctgttccaatcatctccaaagttggcctagcatcctacgaagtcgaattaccttattggatgaagatacacccagtccttcacgtcagcaatctcaagccgtatcatgaagacccagaagatccaacgcgcaaccagtttaccagggacaacatcagcattcaacgatgcaggagcagagaaccagaagaaatccttgctgaaagaactgttcgtgtgaagagaaagaagagaaaagagtacttggtcaaatggaagggcctcgctggtgacgagatcagctgggagaaggcgaaggacttacagcagtttatgcaaaagactgaagatcgtacaacaggtttgtcgaggacgccgaacaattaagtggggtagaatatggtgtgctgccccatggcacacccacaatagggccattttgtaacatgagcatgctttgtgcttgatcattagtccagtcttgcaccaagcacctcattg

SEQ ID NO: 138768 - DNA, 1018 bp, Cannabis sativa
aagtgccaatctcactattggattattgtagtgacaatctcactcttctcgggttgtttacaatatcggtatcaacctcacctacaaccgagttatttttgtatatcagtgccaatctcacctcaatcacaatatgaatattttattttgaaatacaaagtaagctctctctaataagatgaaatacaatgtaaaatcctaaagagatttacaagcacactagagaagataagcacaagtttgactcaagtgtgtgtggttaatgtgtttatgaaaataagataattctttaacttagaacacttagaatgatatagcaagatgaatagatgctcaaccaaccttaatttttgagtgaaaacgagtttatatagtgtaggaacaaaaactagccgtttataaccgttagcaaatttttcaaaaagaaataccgggaaaaacggactgtcatttttaaaacggactatcgtttctttgaaaaacggactaccttttcaaaatggtaggctgtacaagaggtagtggtaaagtgtaattttctcgacttaaaaagtgcataactcatagctcgtttatctgattttaaaaattccagttgtgttctcttagttaaaagatatgtgatttacaaagtcaattaaattattttttgaataatttggtgagaaaacttgttgcacaagttagtgggccaaacttttgaacttataaatcctagtgcattatgcaaaatattttaacaagagtaaagtaaacttataccatttgattgtgtgtagtcttgatgtagatgagattcttagcttgatttgcatattttgatccaaagttgactttttctgagagttgactttaactttgatgttgacttttgggtgacttttgacttttagcatatgaagtccttttttggataagatcttgaattattgatcccttgatgaaactttttctcttatgaagtatgaagtaattgatatacttgttgaatctacttctttgattatgtttgacttta

SEQ ID NO: 138769 - DNA, 1234 bp, Cannabis sativa
aaaagatatgtcgaaagagggtcaccctgccaaatacctctcgaaggaatgattagacccatatggcttccatgaattatagtataactaaccgaagagacacatgccataattagattaatccatctctcagcaaaacccatactagccataacgaacctaagataatcttacacagtcataggccttgctcatatctaccttgagagccataaaaccttttttttcctttagtcttcctcttaagataatgcatcacttcaaacgccaccataacataatctgaaatgagacgtccaggaatgaaagcgctttgggtatcagaaataacaaggtctataaggcttctcatacggttagcaagaacttttgaaagcaccttataagcaatattacaaagagaaattggacgtagatcacccatggaggtgaaattcttcttcttagggatcaaaaccaggtttgtttcattcaactcccgtgaaaaatagccggtatcaaagaaatcagtaacaagcttaaccaaatctgctctcacaatgtcccaatgtttctgaaaaaatcatggacccatgccatcagggccatgtgctttgtctggatgcatctggaatagggtagttttaattgatttttcgacaactggtttcaaaagttcttcgttttgtgcattggttacagagcatctgacatcagtggcaacagtattttgcaaggaacaattagcagtaaataaatctgaaaagtaagaggtgataacctagtcaaggccatttccacaattggtccaagctccattagaattttttaaatgcaaaatttgattgttcctttttctggcactagcagtggcatgaaagtatttggtgtttttgtccccgttgtgtaaccaaaattgcttcgacctctgtttccaatagatcccttgttgagctaagagttcaaagtaattattttattcattaacaaactcgacattcaaggaaaaattatggtgctgcctcagttgtgccattttcattttactggtagaaatacgacccttgaaattaccagtgagatctaaaccccactttgtcaaattatccccacaattttttttatcaaagagggatagatgtctgtgcatatcctagcagtcttttacaatctgtgcacaaatgggctctcgagaccaagcgttctcataacgaaaacgacgagcagtgatagtactatgatgggcatcaggttg

SEQ ID NO: 138770 - DNA, 1253 bp, Cannabis sativa
  modified_base (32)..(36): a, c, t, g, unknown or other
ttagctactcatgttcattgtagcaaattcannnnnattaattttagaaaagagaagaaaatagagaagaaaagaatgctaaaaactctctgaaaaacacctccagtattggcttcgatctccaaaactcgtacttagttgactgctctgatttccttctgaattgcccccttgaaactattgaagtccacttcttttatagctaaaaaatgataaaaataaaaaataaaaaactctgaaaaagcctattctgcttaggattagaaggggcagtgagttttctactgcattgactgatagtattttagccataattatctcgatattgcttggaattcgatgattaaagatgttctagaaagataaaagagagatctagaacttttatgttttaactttctccaaaatatgaacagaacataatctaatttaggcttgaaatgttagctttattttcttacacaattttttctattttatatatcatctttttgtgagatttttttttatcttttttccatcttatttctttgatattttctaatcttcttatattttaaatctacaaaaatataagataaaaagcgtaaaattgctccaaacaagagtagaactaaattaaaaatacacaaaaattaacctaaaaataatactgaaaacaacctaacaaattctcacaaactaaacatttactcgtcctcgagtaaaacactaaaatgaaaaataaagttaaacaagtcaatctccagaacatgagtaattttcaagtagactcaataacataattatgaaaaatctcacttatgcatacaatctagaatttcagttcaattacgccttgacacacttcaatttaattttattcagctcatgaaaccaaagaatgcaattaactaacaattgaatcactttatgcatgccaattacaaccattaatccactaactcaaaatttcatatgcttgtaatacttactatttttcactaatataaactaatgcacaactaagaatcaaaaggtctttctaggcttgtaatgttaggcttagagtaaaggtagttgaaatgatcatttaggcttgcttatactataagcttctccaatcatgccaccccaatataaatattttctttcacacccaaccccaattccttttttttttcctaattaaatgagagaatttttttttttttttttcaacaagattgcaacaactttatatttatcttttctgaatttgacactggttgtca

SEQ ID NO: 138771 - DNA, 833 bp, Cannabis sativa
gtctaaagatgatccctttggttacagagacttagctgatttatttaaacgctaaaccctttccatctacgtgtcttcatccggttggtccacgtattttgggcaaaatcaagggaaacataatctaatcacagtagcaagatcagcaagctaaacaacatttcaccattaaaaccagagtttgagtttaaaactccaaacttgaataaaatcaactaacaaacactaaaacctgttctaatccgttcatctaaacataattaagcctaagaaaacaacaataaacacatacaacaaccacaacatcaaaatcaccaagcatgcaaaatttcccttccttaaacttcaagaaaatacaaaagaggtacaagagctataccttggcttggatttactaatcaattagctgagaaagattgaattactgaagaaggatccaaccctagcagccccaagaaaaaaaacgaaagagagagagagagagcttgagagaaaatgaatttctttacttttgtctaacttttgatttttgcataaaaatgaagaaaatacttgtttttctttattttatcaaattgtttcagccaaacaaagctctaaaattcagattaataatttaatgaaaaaatccacaaaagataaagcacatatgggcaaaatgacctttttgccctctcacgttaaattgacataaaaggggtagtaagagtatttgcagaaattctaaattcttgactaaactcaacattcccaatgtctaattatactgccccgctatactaaaataccaagatgtgattctactgagccatacaccgcgttctaatgttgtc

SEQ ID NO: 138772 - DNA, 708 bp, Cannabis sativa
  modified_base (180)..(180): a, c, t, g, unknown or other
  modified_base (222)..(230): a, c, t, g, unknown or other
ttaaaccagtttgtaaatattttgaatacaagggtaccccgtagttaatatcacttatctttcatcaagtagtttttatatgtcgaattttaattatcaaaattttattacccacacttttagtataattatattgtatataaattagaattttattaaaacacacacacacacacacanacacacacacacacacacgtggcgtccctgttggacagggcnnnnnnnnntggtatcagagcgccaaggtttctagatcttgaagattggtttgatgtgtacattggctgcgaggactggtttgactcatggttcagtaagcttttaattaaaagatagtttgttaattttgtaattgtttaaaatgtgttaatattgaaattgtctggaaaggactatgatatatggaaatacttatcagtgttgttattacctggaataaggccacatgtgtatagattatgcacccaaggcggattggtagaggtaatcgcgagctagctgggcccggggttgctggtgagggtgagaaccctctaccgccaccaaactgagaagagttatatgctgcaatgcaagagactattcaacagcagggtgatcaaattagagaattcagagagcagcgagctcagcctgctctaaaccctaatcctgatccttcggcgcctctagtagtgccaccggatgtagggaatcgtttggaac

SEQ ID NO: 138773 - DNA, 1116 bp, Cannabis sativa
  modified_base (48)..(49): a, c, t, g, unknown or other
  modified_base (933)..(936): a, c, t, g, unknown or other
cacgtaggataattttttagtgacctgtcattgccacgtgggcaaaannaggacttaacgagggtggacagacgacaccttaaaaatgtaaatagaacagtactttaaatgttttcccaccaaaatatgagattggatggttttttgcaagtaaattgatagttgagggagttttaccgccaattactctcatatatatatatatatatataatgatgatctaaagaaaaagcttctatactatcacatgtaataggcttatatgcaactctctcatgtgtcatttgaaggagaattgaggaaattaatttgactattgggaaagttttagtgattgcacttggcgttgttttggcgagagaaaacaattagttctacaaagtctacaaagcttttatctagtttgatgaagactcttctcatatttttctatgagataattaatggttttacactggaatgttaggtgattgactgaatactatttatttattgtttaattttctgttattggacgaaaaataattattagctggaaataatatgaaatgtattctcttctggaagagaaaaacaaagagcatacactttatttattttaaattaaaatatgagttgtaaatataataaatttaaaattaatatagtttggacatatttttgaaaggtgcggtgtcctttataaatagatgttgtaaagaggtaactatttcaatttgtcttacttcttttgtctttagtatatatatagatacatttattgatatcttcttctttttttttttcattcaatatattcattgatatttcaatcatgttgggattttgtattttgcaaaagttattaattagactctctattttgttaaatgataaaataaatcttgtattttctaaaattatacaaataagatcctgaactgattttttgtnnnnataaaatttaataataatctaatctaaatatattaggacaaaactggttatatttttttgtatttgttcatattagaaatggtaaatggcggcaaaactcccaatactttcgttttagtttcattaaacccccaaaacctaaatttctgcgagtagacccccaaaactagtaaactgtta

SEQ ID NO: 138774 - DNA, 1001 bp, Cannabis sativa
  modified_base (696)..(696): a, c, t, g, unknown or other
taattaaattttgtcaaccgaaaatataaatgaacatatgatttttccaaacctatatgttatgggctctcaagattaaattaacatatttctatgtaaatatagacttagagaacacaaattaaacaccgatttcccatgggtcatacaaggtaaatagcatattcctataccatctacaaatcacacttttctaaggtgataatcttgcatcattcaagtatttccactaattttatttttttccaaaattaagattagctaaacagcctacaattggtgataagcaaaagtaggtagacaaacattaagcatccttgaatgaacaaaacttcattattaaaaatatttataaaacatcaacaaaattcacaatccaaggtttattaaaagttctaaccaaaataaattagtgcatgctcaaaaatacaaaaatacccaaaatgaaaataaagaagtataaaaataaaatacaaaagattaaaggagtagaaaaaactatgtggatgactcctccttcttccttttgcattccttttcttcttcttcttcttcttcttcttctttttctttattcctctagctattttccgtaatggtggctccatggattgtcttccccccttttcttttaagctagggtaaaatccccttttttaccttttaaaaaatgccctccacatggtcccttaattnccacttagagacttttccaactagattagctctaaaccacttttcttttgccacctcagccatttttcaccacatcaattaatgagttgccacgtcatcttttttctatattaatttctacattcagtccctgctacttttgctatagtaaaatccctacaaaacttcaacaaaacttgcattttctatattaggctattttcttcactaaaactaacaactccaaattacccaaaagaacataaaaatacaaaataacatatattctcacaaaatgggaggaaaagaactaaatataagtaaaa

SEQ ID NO: 138775 - DNA, 1347 bp, Cannabis sativa
agaaatatttctttgacatcagattttaactttaaaggatatatccaagtgaaattagtaaattcatcaatgaaatggacatagtacctatatccatctttggataaattggtgagggaccccatacatccgagtggatgatttcaagaggtttcttggcagttttggttgacaaggcataatgtttatgtcttgatttaccaatttggcaggcatcacagaactttaagggctgtttgaaggaaagtttttcattgattaacagatgtttcattacatttagacttgggtgaccaagcttcatatgccaaagattaatatccttggtgttagatgactcgacaaacatggactgggcagtgtgcctacttgattgactcttacattttgagtatatactcttcttggaatttaaggacttagacagataaagactcgactgagatgaaccagaacatgacttggacacttgaagccgatatagaccattgttaagcgttccccgagctagctccttcttcgtatccagatccttaacaacacagcagttagagtaaaattcaacataaacatggttatcttttgttaactgagatatggataataaatttttggttatttgaggtacacagaatatgtcattgaggagtaaatttgaggaatcatgaagtttgagaatgctgtttccaattttagtaatggaaaggggctggccatttccaatgaggagttgagtgttacctttgttctcagtcttgtgttgcagattttgtccatcagaggtaatgtggtttgtggccccactgtctacataccatgcattgtcttggtgtggatcaattgaggaagaggagaaataagcttgttgagcttggttggttgattgctgtccagtggtgttgttggcagtagtctggtttgtaccagaaccagtgggaacaaagttgatgtcaaaacgatgatagcatttagatacaacatgaccaacacgattgcaaagttgacacactggccgtttccacggccgtttcctcttccacggccacggccacgaggtgagtatcctctgccttgggagttgtttgcaccagctgaacctcctccaataccaacagaccttcgaaactgagttgcaagattggcactggggttgtttgaatctcctccaacactgatattcatatgttccaggcgcatttcttgactttgtagaagaaattgcacctcttgaagagtaatgggatcagtgcgagaggtaagagtgatcacaactggatcataatcatgtccaagacctccgagaatataaagtatgagttcctcatcagatatgagttggcctgcagc

SEQ ID NO: 138776 - DNA, 600 bp, Cannabis sativa
tgcttgataaagaacgagcagtagccgtgaaagatgaagttgaaaagctacgcaacaacaacttcataattgaagctttttacctggcttaggtcgcgaataccgtacttgtgcccaagtcgaacaagaaatggccagtctgtatcaaaatgccctaaagattattttctagttccaaggatcgatcagctcgtagacacaacagccgagcacgaaattttaagcttcatggatgcttattcaggctaaaatcatatcaaaatgcatccgccagactaagaacatacaagtttccgaacagatatgggtctctactgctaccaagtcatgccgtttggtctaaaaaatactagagctacgtaccaatgattggtaaacaggatgtctaaaaaccagatcgggcgaaatatggaggtgtacgttgatgacatgctcgtccaatccaaaaaggctggggggcacatagacgacttggaagaatgtttcaaagtcctcaagaaatacaacatgaaactaaatcccttaaagttctcctttggagacagctcgggaaagttcctacgcttcatcgtcaatgcccgaagaattgaagccaatcca

SEQ ID NO: 138777 - DNA, 604 bp, Cannabis sativa
tttaacatagtattatataaaaatatgatatataatccaatttaatataatacaataattaataggatattgagctaaataactctcttttaaaattacttttttgctaaataactttcttacaaaattattttaattttttaattttttttaattactaataaagtaaataactaatatactcaccagccctaacctccatctttaagactattttccttcttctctttttcatgtcttcatctcttctttatttcttcatctcaataataagctcaacaattattttttcttctattcaccttattatttattcttaagatttttttttcataaactcatctcaatctcttctccttaaatatgtcatctagtcccttaaaatgataaaaccctaatttgtaatcaatccaatcttcatagataaaattaaagaattttttttagttatatcactattttggtaagttttattatatatattctccaatttatataaatacattttattttatatgtatatatatactcacataacataatacaaaaacatattcttttttttatataaacaatacatatacatattcatgagcattattct

SEQ ID NO: 138778 - DNA, 600 bp, Cannabis sativa
agcactcactccccttgggtctataccttgtcagagacgaaaatgcacacatatatatatttttcatttactagtttacatctattttaatgcggttttgttttttattttaaataatattaattctttttctatggaaaacaaacaacataatttaactaattgaaaatagaaggtaaatttggccatatgaaaagattattgaccaaaatcgtgtgtaaggtactttttttttactaattttacaaatagagggtacctgataaacatttttcatattagaggtaccaaagatatatttaagtaaaatacagggtaccaaataagtatattcccttaattaaaaaataaataattaaaaacaaaactatcactgataacaataatttagccacataattttcacatttacgtacattctattcagacacaaacaattcttgtttatcagttttgtcggtcacgacctttaaaatgtacactatttttttatataaattatatgaaaaatcagtacaattaaaatttgatacaatttattacttaatctcattaaataaaaattataatttatatcaaataattttttttttgaattaa

SEQ ID NO: 138779 - DNA, 2327 bp, Cannabis sativa
  modified_base (459)..(459): a, c, t, g, unknown or other
  modified_base (669)..(669): a, c, t, g, unknown or other
  modified_base (946)..(948): a, c, t, g, unknown or other
  modified_base (2130)..(2134): a, c, t, g, unknown or other
ttgtattcaatacaacctttttctactattacatctccttagttacaaaatccttgatattgtgaaatgtctttctatatgtttactcctcttaggatattggattttactttttggctactacatctatgttagtcaggaagtaatactagtagttaattcattattggtacaacgccaaaaacagtatagaaatttccataggctgaataagtatcctttctgcaactttaacattcagtcttactggtagagttagagacttcagattaatttttacacttttccaaaaatcactgctctacccccagagtaatcaccatctcataagtagactttcaagcattaaagccagtctagaaactgatttggtgtagtttaagagtattaaaataccacccttattaactaaaatatagttcctcttttgatcttaagatttacttgattatcttccantgttcctttcctggattaaattgatacctactcataactctcactcaacaacaggtgtctggtctaatgcatagcgaaacatacatgagacctctcactgtgaagcttaaggaattcctttcatgacatttatctttagaattagccattagaaaaatgttctagcatcttactaaagtaagttgcttgcactagactaagtaaattacnaggtataccattagccataggtttagataatctcaaacctacaatattaggatgaggaagtttttttaagtccattgaatagacttattatcaaaatttcatttcttgtccttgtaatagaaaatttttgggttactccatttgaatggttttaaccatagttctcttggctttgcttcttaattccttattctgactatccattacctatttaaactaataatggatttttatcacaagtgtcttccaagtcataacagggtgggttccttgaaannntcctactacgacaaggtaccgtgactttctatctaggaacaacaatggtattatcctcattggttgtgtcaagacaacagagacagttggaccatcttatatagaataagatggtagaacactttggaatagaaaaatatctcctttgctttgccactttatttttagatttagtcatattcttagaaaagtagtattttttttttaaaacaaacactttcttatcttaattaccgtaggatggtccaccccttaatcactttagaatagccatcaaacaagaaaaccttagtaacaattctatattttcttaagttcacgatcaggacatccttgaatctagtaatagtttacactaagtatacgaccatttcatcattttgaaattttcctatcactagggtatttccctaaaaggagttaggaagttgctagtaactaatcatagacctttaattttcatcaatatgcaatctcaatttctggggaggtaagtttgaatactattcaaagttcaacttaatgatatttgaactgcataaccaaatatctctccacccttatcagttcacaagatcttttaccacttaccttaatgtttttcaacatcactagaaattcatgaaatttctcaaacatttcaaatttctttgcatacggtaaagtctagagtgatcgtaagaatttaacgataacttatatccacccctgaatgtacatccatatgttcgaatacagatgatcctacttccaagtggatattggcatattttttctttacaaagactgatcttgtcaaaataactgtgaataagatgcaaatgccatagatatatattatgtggttgtggccttttgatgacttaggtctagttacaacaaagagaacttagaatagttcaagtggattctggtgacagaatacaaaactcataatccatacattaacctacagtttggatccatcgacagaaaataaatattaaacttgtgaaaattgtactgtaatgttgaatgtattcaggaaactgaaatttaaaatttttatttgaaatttaaaatttaagtcaaagacttaaatttataccaaatatttcttgagtaattattctatctttgaccccactactagtttaactctaagtctaagttttctttagtaagcatatacaagtaagagannnnntaagatcgaggatttatattattttggaatagggtatctggaatatagtcatctgcgccacttaatttcatagaagaaaattgagtgacgtcataagcgtatgattgataaaccatctatccaatgatatactatctaagcaatttctaaatgaaaaagctaagagaaaaaataaaggataatttcgattaaa

SEQ ID NO: 138780 - DNA, 561 bp, Cannabis sativa
gtagttctgcaatttgtaacacttgggacgaatgtggcctctcctattacagaaatgacatgtaggaatgaaattgtcattctgtagtagattgtctgcatcaatcctcattccttcaaacttgagtttaatgggtctagttggaacctgtctcttctcagatgagtcagattcgttaatggtggttgaggtgtcaggtaactcatcttccttctttgctgaatcgacattagagggcagagaatgctcaacagacagatcattcccttgtttatacaacatcttatatcctaaggaagttccatcaccataggacgtctgaagctgtagggtttgattgatagctgcagtgcctgggggaatgaattgtaaagcttgcttggttcgaattagattagcagtgagtttatagatctcattctccttttcatcaagaagtctgttaaggtttttgaccgtgtcttctaactttcctttttcagtctccacttgctctagagagttctttaaagcacggatctgtttagtcatgtacttccattgtgcaaacatttcttcata

SEQ ID NO: 138781 - DNA, 548 bp, Cannabis sativa
accaaagaaacccaatgatccgagaagcccatctttctaagaactgactccaagaaactccattcaatgcgatcgtaggctttactgagatccagtttaagagccataaaaccatccttgccttttcttttccttttcaagtagtggagtacttcaaaagaaaccatgatattatcagttattagtctccccgggatgaacgcactttgagcttctgagacaatttgatccatgtatggtttcatcctattagccattactttagtaatgatcttatatagaacattacataaagcaataggtctaagatcgaccatactttcaggaactttctttttcggaatcaacacaacattagcatccccacaagctgaatcaagctctcctgtagttatgaatttctgaaccaccgccacaatatcaaattgaacaatttcccaacatttttgataaaaagcaggggtcataccatcagggccagggctcttatccggatgcatactgaaaattgctttccttacctcctcggcatctattggttgatggag

SEQ ID NO: 138782 - DNA, 598 bp, Cannabis sativa
ttaggattttctttgataagctctgtccggctgcatgatttccacagaatctgtcgtgaacttcatatagaagccgtgcagcttcattttggtgtgacgcatctgattaatgcattgagaatcctcttctatacatgatcccttctactatgatgtaccgtgctatttttcttctcattttccgagcttcatttcggttatatgggagttccccagagttgagataggctgctattggcgttatccagtttggagatgtgtcgatcatttcgatttcttctgtgacagtgatgctaggcccttcaagaaactcgattgggactaggtttgccttgtgacttatattgctgctcgccaatcaggctaacgcatgtgccgttgtattttcttctcttggaatttttctgaggctgtagcttttgaattgtgcgagaagatcatatattaccactagctgtgaatcactacagatctcaatgtgctcggccttcatctcctttgctagtttaagtccagcgattagggctttgtattcggcctcattgttagaggcttcgaatccaaatttgaacgttgcatgcaggtgttgccccccagg

SEQ ID NO: 138783 - DNA, 713 bp, Cannabis sativa
aaacgagacccttgttagaacttctaaatttcatttctttcaagctccaaatataaaagtgggattaaaagttacaccatatctattatcccatttttttatttttccaagtgtaaaaagtgggataaaaaatcccttttcttgtagtgggcggggatgagggtattaataagtagcggggatgggggcgggaattccattccccgtacattaaccgctcaattttcatctctaattgggaatctgtcacatgtctatttagtttagaaacctattatacttcacatctctttaatgcttgatcgtgctgtggctcattggatacatagttcaagtcgttattagggttttcttctattttattatgaacgattttgtaagtctattattgttgatttttctatgtaagttatattttcatgtgataaattttgtcggatttgcctattaatagatattatcctttgctctaaaaacattaaaaattagtgacaatttatttattacattaatttatttttctcggcagataatagtaatattactttacttacactcaaaaaaaagataaaaaaaagtactattgccttcatttagcaacattatagataatattactataaataaattttagcaaaaattctaggaaaaaagtttgttttgttataaatattattaattatgtggatgtccaaatcttttatttattacca

SEQ ID NO: 138784 - DNA, 911 bp, Cannabis sativa
ttaaacatagcagcaatattccattcagttacctgtttgagacccaaacctcctgctgattttcctttgcaaacattcctccaagctacagcagcagttcccttaagttggtggctaccactccaaaggaagctcctgcaaatagcctcaatttctgagataacttttttttggcaacaccattatttggctccagtaagagtgaatagccatcaatactaagttgataagaaccacccttcctgcaaaagtcaagtgtctagtactccaggttctaattctggctaccattttttccaccagcagtgagcactctgaagaggaaatcctctttgcacatattggcactcccaagtacctaaaaggaacttcatgccgtttgaatccagaagcatcaaggattctctgaatatcagtgtcacacatgttgttgcaatacacagatgtctttgaagggttagaaaataaacttgatgtttgagagaacagattcagcccctgcagcataaaataaatgctcttgtaatccccattacagaaaagtagaacatcattagcaaaacttaaatggttcagcctgagctctccacatctctcatgaaacttaaattcctgctttgagccaatcttcatcataattctggacaagtattccatacccaagaaaaacagtaaaggtgacatggggtctccttgtctcaatcccctttttgcctcaaagaatccatgcatagatccattgaacatcaaagagaaccttggagttctgacacaaatcatgattagcttgatgaatttctctgggaacttgaatgcagtagtatacaattttattatcatggtatatatattttaattgttacatataatttggttagtatattatacacatatatattagtaatatatat

SEQ ID NO: 138785 - DNA, 684 bp, Cannabis sativa
gggcataaaacccaacagaaagtgccccgttgtggctgctggtgtagatgtttccccggtttgagggccagcagtttcagggaataggttgaggggtctgacattacctcgacctactccacaattgatgacatccacaggtggtattctacccccagacaacggaacgtacatcattctgatgttgatggatttgttgttaaaacctccgtttgcttggtttccagccatgatgattttctttctgtattagcaagaatgtatttcttcgtttcccatagacggcgcctaatgttatcgagcgtctttcgcaacaccagaaatgagtaataataataagaaggaataatatgaggaacaattgcgagtattccacctaaaacggcaagtactcgaactgggaacgtaaatacttagtagaaactggaaaaatcaagtagacaaaggaatatagtggttcagtcagatcacggtcggcttagtcctctattgcaagagtttcgtaggtgtcatttcatggtgcatcactcctttatatacaaagcaagtgtccagttagttacacaaggatttacagtaatttaactaaaacgtaaacatcaataaatgaataacagtttctattcactaaatacagcaacgtatgcgacttctaatgttcgagttggttgttcatattctggt

SEQ ID NO: 138786 - DNA, 536 bp, Cannabis sativa
  modified_base (27)..(31): a, c, t, g, unknown or other
tcaacttttttatgcattttaaatttnnnnntattcaattctcattcccattcccctaaaccctgaaccctgaaaccttaaccctagcccctgaaaccttgattccaaacccttaccctacccctacctccaaccctaccccaaaccctaacctctaacccccaaaccccaaccccaacagtaaccctaaagcccaaaccccaaaccccaattcccattcccattctcattcctcagcgcattcccactcccattcctattccaattcccattcttattcccattcacatttccattcccattcccgttccctagcccattcccatttacattctcattcccattcccattctcattgctattcacattcccattcccattccctggcccattcccattccaattcccattcacatccccattataaatcccattccgattagcattgccattcccattccccaacccattcccattcccattcacattccttttcctatttgcattcgcattcccattcgcattctaatacccta

SEQ ID NO: 138787 - DNA, 853 bp, Cannabis sativa
  modified_base (787)..(789): a, c, t, g, unknown or other
caaaatatacttacaccatttttctcatccaattttacccctaaataaataaaaaccaaacatccatctctctctctctaggatactcacaccacacacatgcacatactctaccagtcggacgactcatcaccggagctagtgttgttcggccgccttacatttcaaaaaaacttctctcgttttttgcatttttttcttctggtttactagttttttgcgatatttaacgatctatttgcaatgatagaacaaatctaaggtcaaggatgaagtttagtgatgatttgcgatatgtagcgatatttagcgatgtttagcgatatttcgcgatgtgtttcgcgatgttgtgatttggagacatttagagatgttctcatgatttcgcgatgtttcgcgacatcgtcaaaaataagaaaaaaaatgcagaaaacaagcattgctgtgaattggagacatttagagatgtttcaagatttcgcgatgtttcgcgacatctagcgatatttcgcgacatcgtcaaaaatcagaaaaaaaatgaaaaaaaacaagcgctagatgggttagaaaccataaaaaaaaatgcggtggtcgtgggttgtcttgggtgcttctcgtgggtcgtcgcgagtcgtcatgggtcttctcggtcgtgggtcgtcttggtcggtcggagctcgtgaacagtcggggcttgaatggtttggggctggatgggagtaacagagagagaggggggaagagagcttttgaattggggttattttggggttttagggtgtttggnnnatatttagagtatttatttaaaggtggtatattaaaagaatagtctaaatttttaagtatattt

SEQ ID NO: 138788 - DNA, 574 bp, Cannabis sativa
agcttctgagatggttagtgcatgtattgagtttgtaattggaaagctgcacacttgacactccagtctaatttgctagaaagaatcaaaaaggcacaattagaagatcctgagctagtcaagattttagatgaggtgatggctagttggcctaaagacttttcaatctcgaatagaggaatgttattgcataaagattgagtgtgtgttcctagtattggtgagcttaagaaagagatccttgatgaagctcacaccagaccttattcactgcatccgggaaccaccaaaatgtatatagatttaaaaccatacttctggtggtatgggatgaaaagagatgtggtagactacgtgtccaagtgcttaacctgccagcaaataaaagttgaacatcaaaggctggcagggttattgcggcctttatcccttcctgagtggaagtgggaggacattgcgatggattttgtgaccggtttacctagaaccacgggaatgtatgattcgatatgggtcatagtggacagatttacaaaatcagctcactttatgccagtgaaagttacatattcag
